United States Patent Application Publication US 2026/0337666 A1 - sequence listing, part 9

SEQ ID NO: 11896 - DNA, 892 bp, Homo sapiens
  source 1..892: mol_type = unassigned DNA
gaacattggggacgtggaggaaagaaaggtgttggggctcagaggcgcctttagaaacccagggcatggccaggggccgcgcttggccggagcgagctcctggctctcggcctcgcctgttgctaacctgccattttgttgggtggtgcaaaggtgtagccgatgactgggtgacctggtggctgccacgctgtggaaagtgggggcgggaggcaacaggaagaggaagagggctgaggacttgaacatgctttttccccactcacccttgccatcattagtggcctttggattggaaagaggagctgggcaggaggcagggcaaggagaaagctgttcgggggtcttgtctggattttggttgcctcctccaatgttcctctacctctactacaaggatgggtcatgtttgtgtccgtgacagcgtttttcttttcgctcctctttctgggcatgttcctctctggcatggtggctcaaattgatgctaactggaacttcctggattttgcctaccattttacagtatttgtcttctattttggagcctttttattggaagcagcagccacatccctgcatgatttgcattgcaatacaaccataaccgggcagccactcctgagtgataaccagtataacataaacgtagcagcctcaatttttgcctttatgacgacagcttgttatggttgcagtttgggtctggctttacgaagatggcgaccgtaacactccttagaaactggcagtcgtatgttagtttcacttgtctactttatatgtctgatcaatttggataccattttgtccagatgcaaaaacattccaaaagtaatgtgtttagtagagagagactctaagctcaagttctggtttatttcatggatgg

SEQ ID NO: 11897 - DNA, 1837 bp, Homo sapiens
  source 1..1837: mol_type = unassigned DNA
agactcaacccgccccagagcacagcttcgccgagcccacctggtccccatcccggccttggcaatgaccctggcggcttcctcccagcgttcccaaatcattcgctccaagttccgatctgtcctccagcttcggatccacagacggaatcaggagcagatctcggatccggacccgtggatctcagcctcagaccctcctctggccccggccttgccctcgggcacggcccctttcctcttcagccctggggtcctgctccccgagccagaatattgtcctccttggaggtccccaaagaaggagtctcccaagatctcccaacgttggagggagtccaagcccagggggaacttgacataccaccagtacatgcccccagagccgagacagggatccagggcggacccccaagccgaggggtccgccctgggtcctcctgggccatctctgtgggaagggacagactcgcagcagccacatcctaggatgaagccctctcccctcactccctgcccaccaggagtccctagcccctcgccccccccacacaagttggaacttcagacccttaaactggaggagctgacggtctcagagctccggcagcagctgcgcctgcggggcctcccagtgtcggggaccaagtctatgctcctggagcgcatgcgcggcggcgcgccgccccgcgagcggccgaagccgcggcgcgaggacagtcccgcgggtgctccctggccgcgcctcaagcccaaggccctggcagccgcccggcgtcagggctcggtcaagcccagcgcagcatctcacaggccacctcttccacgtgccgcggataccccggggacggctccggctccaactcccactccggctcctgctgcagctccagccctgaccccttcctcagggccgggctcagcggctctgactctggaggaggagctgcaggaagcgatccggagggcgcagttgcttcctaaccggggcatcgatgacatcctggaggatcaggtggagcctgatgaccccctgccccctattcccctggacttccctggctccttcgacgtgctgtccccctccccggactctgaaggcctctcatctgttttctcctcttcactcccgtctcccacgaactcctcctccccttctcccagggaccccacggactccctggactggctggaggccctgagcgggggtcctcctctgggttctggtcccccaccccccagcatcttctccgctgacttatctgactccagcagcagccggctgtgggacctgctggaggatccatggtgatggattctaggatttacagagacagagaactgatgggggtggagagaagctccttgtgggaggagagggaactaccagcagagcccctcctaccgcagacacaggatcggagacaacctccaaccccacctgcctcctgaagtgctgctgacatgcaactgccttaactttgcctacctggcctccttatgatccccctccggcgtggtatggttggggggcttcttttgctgctggccacggcaaacaagctgcttgctgcttccttcagagacctcatggatgttcttacatgcccccgaccccggtagatggctccctgttgtttggggagcctggaaggtggttatgccttttggatgcaggagaggagcaagaaagagtggagagggagaatgggggagccggaccctgacctccctgggttctggttggagatgaaaaaattagaagcatcaggtctaagatcagcttctcttggaagcagagcctgagacaagatataaatgccagtcatttattaaa

SEQ ID NO: 11898 - DNA, 1825 bp, Homo sapiens
  source 1..1825: mol_type = unassigned DNA
gaatggcgctggcccgcggcgctgcgctggcagggagcaggcgggaggcccgaggaagggagcctgctgcccgcccacccgcctgcacaggctgtgtaagggggctgggcacgcatatcccgccaacaactgcagctcccaccagcctgccaggccaggctcctggacactcccttcccgccttcctcctcccacctccctcctccctccacagtcctccagcttcggatccacagacggaatcaggagcagaatccagttcaggcgcccatctcccagcaatcaagtcttgctccctggcctgccctccggcaccctggagccccgctttccacacagccttgctcctcccggcctggcttgctgcctgcaggcctctcagggtccttcaccgtctctccagtctcggatccggacccgtggatctcagcctcagaccctcctctggccccggccttgccctcgggcacggcccctttcctcttcagccctggggtcctgctccccgagccagaatattgtcctccttggaggtccccaaagaaggagtctcccaagatctcccaacgttggagggagtccaagcccagggggaacttgacataccaccagtacatgcccccagagccgagacagggatccagggcggacccccaagccgaggggtccgccctgggtcctcctgggccatctctgtgggaagggacagactcgcagcagccacatcctaggatgaagccctctcccctcactccctgcccaccaggagtccctagcccctcgccccccccacacaagttggaacttcagacccttaaactggaggagctgacggtctcagagctccggcagcagctgcgcctgcggggcctcccagtgtcggggaccaagtctatgctcctggagcgcatgcgcggcggcgcgccgccccgcgagcggccgaagccgcggcgcgaggacagtcccgcgggtgctccctggccgcgcctcaagcccaaggccctggcagccgcccggcgtcagggctcggtcaagcccagcgcagcatctcacaggccacctcttccacgtgccgcggataccccggggacggctccggctccaactcccactccggctcctgctgcagctccagccctgaccccttcctcagggccgggctcagcggctctgactctggaggaggagctgcaggaagcgatccggagggcgcagttgcttcctaaccggggcatcgatgacatcctggaggatcaggtggagcctgatgaccccctgccccctattcccctggacttccctggctccttcgacgtgctgtccccctccccggactctgaaggcctctcatctgttttctcctcttcactcccgtctcccacgaactcctcctccccttctcccagggaccccacggactccctggactggctggaggccctgagcgggggtcctcctctgggttctggtcccccaccccccagcatcttctccgctgacttatctgactccagcagcagccggctgtgggacctgctggaggatccatggtgatggattctaggatttacagagacagagaactgatgggggtggagagaagctccttgtgggaggagagggaactaccagcagagcccctcctaccgcagacacaggatcggagacaacctccaaccccacctgcctcctgaagtgctgctgacatgcaactgccttaactttgcctacctggcctccttatgatccccctccggcgtggtatggttggggggcttcttttgctgctggccacggcaaacaagctgcttgctgcttccttcag

SEQ ID NO: 11899 - DNA, 1693 bp, Homo sapiens
  source 1..1693: mol_type = unassigned DNA
gggggcaggtggagccgggggcagggctgcctccagcctgcacgctggctggctcgtagccccagaatggcgctggcccgcggcgctgcgctggcagggagcaggcgggaggcccgaggaagggagcctgctgcccgcccacccgcctgcacaggctgtgtaagggggctgggcacgcatatcccgccaacaactgcagctcccaccagcctgccaggccaggctcctggacactcccttcccgccttcctcctcccacctccctcctccctccacagtcctccagcttcggatccacagacggaatcaggagcagaatccagttcaggcgcccatctcccagcaatcaagtcttgctccctggcctgccctccggcaccctggagccccgctttccacacagccttgctcctcccggcctggcttgctgcctgcaggcctctcagggtccttcaccgtctctccagtctcggatccggacccgtggatctcagcctcagaccctcctctggccccggccttgccctcgggcacggcccctttcctcttcagccctggggtcctgctccccgagccagaatattgtcctccttggaggtccccaaagaaggagtctcccaagatctcccaacgttggagggagtccaagcccagggggaacttgacataccaccagtacatgcccccagagccgagacagggatccagggcggacccccaagccgaggggtccgccctgggtcctcctgggccatctctgtgggaagggacagactcgcagcagccacatcctaggatgaagccctctcccctcactccctgcccaccaggagtccctagcccctcgccccccccacacaagttggaacttcagacccttaaactggaggagctgacggtcaagcccagcgcagcatctcacaggccacctcttccacgtgccgcggataccccggggacggctccggctccaactcccactccggctcctgctgcagctccagccctgaccccttcctcagggccgggctcagcggctctgactctggaggaggagctgcaggaagcgatccggagggcgcagttgcttcctaaccggggcatcgatgacatcctggaggatcaggtggagcctgatgaccccctgccccctattcccctggacttccctggctccttcgacgtgctgtccccctccccggactctgaaggcctctcatctgttttctcctcttcactcccgtctcccacgaactcctcctccccttctcccagggaccccacggactccctggactggctggaggccctgagcgggggtcctcctctgggttctggtcccccaccccccagcatcttctccgctgacttatctgactccagcagcagccggctgtgggacctgctggaggatccatggtgatggattctaggatttacagagacagagaactgatgggggtggagagaagctccttgtgggaggagagggaactaccagcagagcccctcctaccgcagacacaggatcggagacaacctccaaccccacctgcctcctgaagtgctgctgacatgcaactgccttaactttgcctacctggcctccttatgatccccctccggcgtggtatggttggggggcttcttttgctgctggccacggcaaacaagctgcttgctgcttccttca

SEQ ID NO: 11900 - DNA, 714 bp, Homo sapiens
  source 1..714: mol_type = unassigned DNA
cccgccccagagcacagcttcgccgagcccacctggtccccatcccggccttggcaatgaccctggcggcttcctcccagcgttcccaaatcattcgctccaagttccgatctgtcctccagcttcggatccacagacggaatcaggagcagaatccagttcaggcgcccatctcccagcaatcaagtcttgctccctggcctgccctccggcaccctggagccccgctttccacacagccttgctcctcccggcctggcttgctgcctgcaggcctctcagggtccttcaccgtctctccagtctcggatccggacccgtggatctcagcctcagaccctcctctggccccggccttgccctcgggcacggcccctttcctcttcagccctggggtcctgctccccgagccagaatattgtcctccttggaggtccccaaagaaggagtctcccaagatctcccaacgttggagggagtccaagcccagggggaacttgacataccaccagtacatgcccccagagccgagacagggatccagggcggacccccaagccgaggggtccgccctgggtcctcctgggccatctctgtgggaagggacagactcgcagcagccacatcctaggatgaagccctctcccctcactccctgcccaccaggagtccctagcccctcgccccccccacacaagttggaacttcagaccc

SEQ ID NO: 11901 - DNA, 415 bp, Homo sapiens
  source 1..415: mol_type = unassigned DNA
atatcccgccaacaactgcagctcccaccagcctgccaggccaggctcctggacactcccttcccgccttcctcctcccacctccctcctccctccacagtcctccagcttcggatccacagacggaatcaggagcagagcctctcagggtccttcaccgtctctccagtctcggatccggacccgtggatctcagcctcagaccctcctctggccccggccttgccctcgggcacggcccctttcctcttcagccctggggtcctgctccccgagccagaatattgtcctccttggaggtccccaaagaaggagtctcccaagatctcccaacgttggagggagtccaagcccagggggaacttgacataccaccagtacatgcccccagagccgagacagggatccagggcgg

SEQ ID NO: 11902 - DNA, 5014 bp, Homo sapiens
  source 1..5014: mol_type = unassigned DNA
agtgctcgcggggccgcggcggagtgtaccgtgctgctctactcgctgccattcgcccgcaggtcggcgcgctcgcccacctgagccgcgccggggctgcgggaccgtgggacagcgcgctcagcccagcctaggaaagaggcagcagtctcagcgcggagatggggagcgggcgaagttgacgagtctcccgcccacgctgcgcccctcctgcccagaggggctgcagccagcggtctgtcgcgcgtgcctgtgtgcccgaggagccgccccggggagaagacccggcgcggagttgttcccccagggaggatccgcagcccagccgagggggtcgggcggcctggctacgcaggacccagccccgcagccgcggactcccagcggcggcgaagtttggctgctgagcggcgcggcgccggaccactggacagcgggagcgatgcccgtggggggcctgttgccgctcttcagcagccccgcgggcggcgtcctgggcggggggctcggcggcggcggtggcaggaaggggtcgggccccgccgccctccgcctgacggagaagttcgtgctgctgctggtattcagcgccttcatcacgctctgcttcggggcgatcttcttcctgccagactcctccaagctgctcagcggggtcctgttccactccagccccgccttgcagccggccgccgaccacaagcccgggcccggggcgcgcgccgaggacgcggccgaggggcgagcccggcgccgcgaggagggggcacccggggacccggaggccgccctggaggacaacttggccaggatccgcgaaaaccacgagcgggctctcagggaagccaaggagaccctgcagaagctgcccgaggagatccaaagagacatcctactggagaagaagaaggtggcccaggaccagctgcgtgacaaggcgccgttcagaggcctgcccccggtggacttcgtgcccccaatcggggtggagagccgggagcccgccgacgccgccatccgcgagaaaagggcaaagatcaaagagatgatgaaacatgcttggaataattataaaggttatgcctggggattaaatgaactcaaacctatatcaaaaggaggccattcaagcagtttgtttggtaacatcaaaggagcaactatagtagatgccctggatacactttttattatggaaatgaaacatgaatttgaagaagcaaaatcatgggttgaagaaaatttagattttaatgtgaatgctgaaatttctgtctttgaagtaaatatacgctttgttggtggactactctcagcctactatctgtctggagaagagatttttcgaaagaaagcagtggaacttggggtaaaattgctacctgcatttcatactccctctggaataccttgggcattgctgaatatgaaaagtggtattggaaggaactggccctgggcctctggaggcagcagtattctggcagaatttggaaccctgcatttggagtttatgcacttgagccacttatcaggaaaccccatctttgctgaaaaggtaatgaatattcgaacagtactgaacaaactggaaaaaccacaaggcctttatcctaactatctgaatcccagtagtggacagtggggtcaacatcatgtatcagttggaggacttggagacagcttctatgagtatttgctgaaggcctggttaatgtctgacaagacagatctggaagctaagaagatgtattttgatgctgttcaggctatcgagactcatttgatccgcaagtctagcagcggactaacttatatcgcagagtggaaagggggcctcctggagcacaagatgggccacctgacctgcttcgcggggggcatgttcgcactcggggctgatgcagctcccgaaggcatggcccaacactaccttgaactcggggctgaaattgcccgtacttgtcatgaatcatataatcgaacatttatgaaactgggaccagaagctttcagatttgatggtggtgttgaagccatcgctacaagacaaaatgaaaaatactacatcttacggccagaagttatggagacttacatgtatatgtggagactgactcatgatccaaagtacaggaaatgggcctgggaagccgtagaggccttggaaaaccattgcagagtgaatggaggctattcaggcctaagggatgtttaccttcttcatgagagttatgatgatgtgcagcagagtttcttcctggcagagacattgaaatatttgtacctaatattttctgacgacgatcttcttccactggagcattggatcttcaatagcgaggcacatcttctccctatcctccctaaagataaaaaggaagttgaaatcagagaggaataaaaagacattttatattttattctgctccattcccttcactgtataccttaataattccttttctggtaatcaggcacatgatgaactttgattagtaggtctgtgattaagttcttaaattgttttgcagtcttttatgtttattatcataggtataggtggacctaaattccttatcatatcctttattaattcagccagtgtatccaccagttttttgtttatgtttttaagtaacctattatctctggatttcatgaaggtgtaatatcgtttttgttaaactgaatagaattgtatagcgatgacctcttaattataatttgatttgactgcaaaactttttcctcctctaagaggagatgatgtctgctttaagctgtaatgttttgccatgttgcaaaaagccataataataagtataaaaaagctttttcctttacaatttcatgttaatctggtttgtctgtccaccagagacagatcttctgtgacagcctccttatgcaggtctatcattatttgatagaatgtcttctaaaatacttcactcacattgtaattcaaattagaaagtcattccaaaaggatcatgtcatgttgacctcatttcatcggaactgcagtatatttttgttggttaattatattagtgttttctattttgtaaatgtgtcctttaattttactttaaatgccctgtgtcatttctggattatatactagttaatttcttccattccccactacacagagaggtgagctttcaaattttgcagagctctgctatcactgaattacatttatctgaagaaaatagtacaacttaatggattagcttttgggtttaactgaatatatgaagaaattgggtctgtctaaagagagggtatttcatatggcttttagttcacttgtttgtatttcatcttgatttttttctttggaaaataaagcattctatttggttcagatttctcagatttgaaaaaggctctatctcagatgtagtaaattatttcctttcagtttgtgaaagcaggatttgactctgaaagaagctttgccaattttacttattcgtgatcaatcaaggaaaatctaataaattttaggccaaataagaatatagcatatttagtatggttatagtcaacacagagatcacaacttagaagaaatataaagaaatggccactccccatcccccacagtcctggagtaaatcaaaatcaatatatgattcttttaaacattaagtttgaaataggaatggttttctcaagaatagatttggtgtgataccttgtgtttgcttacattggcccactatatatacatatatatttatgtagatatacttccatgaaagggctaatacgatgcatatactgaagggcaaggactttgaccatgtcaattttcagccgagaatggtcagaaagatcagtacaaccccatggattaggctgaaacatatgaaattgctgcatttgtagtttaaaaactgtcagcagtttcatatggttccacctaatattattgaagacaattattttcttagctatcaataggcttaatagttttagttattttagcttttgaaagtgttttaaaagatttcctttatcggacaggaccatctttatgacctgctttctgtttttcaatatcatacattggtgtatgtcaaagaataaattagtaaaattagtaaatgaaaaagactcttccgtacatcattatttccatgctaatgtgtgtctgtgatccagaataacttctcccactcatatcttcagttcacctaatgaaatgaatggatagcaagagccctttgttcccaggactttaaggcaaaatattaaaaattattgccaaaattaagaatataatgtttgtataaatgtccttgaatttgccatttaaattaactcattttcttttcactttgatttgaaagctgataagtatttctgcagcagatagaatattaaaatcaggttgtgtgtacacactgcactatgaggtaccttggtgtcctggtgtgaatagacaagaagctgtactatatgttgctctctcagtggcaacaatgaagtttttgcaattctagaacttggatttttttttaacaaaagtcccaaaacaccaaaaatgtaaacaagataagagattaatattgtagtgatgtaatttaattaaagttatattttgggttaattttaacaactgaagtcttattgttgaaacttattttcaacaaaactgtgcagttaaatttgtatacgtattcacatactgaaagatgaaccgttaaaatagcacttaattttgtgtttcttcaatatgtcttgatatactttgtgcaattaatattacacatgtaagttgtatggcagtttacagaactcaatgacttgtcatgaggttttcatatgagctacacattgtgtacattgattgttttttatttttacataaatccattctgtcattttcaactttatatataaatctccaatgttatgggaaacaatagattgacacataatttttaaaaattatatttgtaaaatttctctattgtgaataaagtcttttaatata

SEQ ID NO: 11903 - DNA, 4641 bp, Homo sapiens
  source 1..4641: mol_type = unassigned DNA
aaggcgcgggccccggcgcggcggggagggctcggccggaggggaggctgcggcgcgcggccggtcgctgcgggcccgggccccaagccgtgccgctccgctcgcccgggccccgccgaggccgctgcgcccccgcctcctcgcgggaggactcgctccaaactccctgaacttcggggacagtcccccgaagcggcgaaactctcagggttggcaaccctgcccagggacccccatcccgggcggcgctccggacgccctcccctcaccgcgcccccgcagacacgtgcctggactccgagggcttctggagccaccggccgggccacgatgctcatgaggaaagtgcccggcttcgtcccggcctccccgtgggggctgcggctgccgcagaagttcctcttcctcctcttcctctcgggcctggtcaccctgtgcttcggggccctcttcctgctgccccactcctctcgcctcaagcgcctcttcctggccccccggacccagcagcctggtctggaagtggtggctgaaatcgccggccatgccccggcccgcgagcaggagccgcctcccaacccggcccccgccgcgccggccccgggcgaggatgaccccagcagctgggccagtccccgccgcaggaaaggggggctgcggcgcacccgccccactggaccccgcgaggaggccacggcggcccggggcaatagcatcccggcctccaggcccggggacgagggcgtccctttccgctttgacttcaacgcattccggagccgtctccgccacccggtcctgggaacgagggccgatgagagtcaggagccccagagccaagtgcgagcccagcgggagaaaatcaaggagatgatgcagtttgcttggcagagctataagcgttatgcaatggggaaaaacgaactccgtccactaacaaaagatggctacgagggtaacatgttcggaggcctcagcggggcaacagtcattgactccctcgataccctctacctcatggagctgaaggaggagttccaggaggccaaggcctgggtgggagagagcttccacctgaacgtgagcggagaagcatccttgtttgaggtgaacatccgctacatcgggggactcctctcagccttctacctgacaggagaagaggtgttccgaataaaggccatcaggctgggagagaagctcctgccggcgttcaacacccccacgggaatcccaaagggcgtggtgagcttcaaaagtgggaactggggctgggccacagccggcagcagcagcatcttggcggagtttggatccctgcacttggaattcttacacctcactgaactctctggcaaccaggtcttcgctgaaaaggtcaggaacatccgcaaggtcctcaggaagatcgaaaagccctttggcctctaccccaacttcctcagcccagtgagtgggaactgggtgcaacaccatgtctcagttggaggactcggggacagtttttatgaatatttgatcaaatcctggttgatgtcgggcaagacagatatggaggctaaaaatatgtactacgaagccttggaggcgatagagacctacttgctgaatgtctctcccggggggctgacctacattgccgagtggcgaggggggattctggaccacaagatggggcacctggcctgtttctccgggggcatgatcgcccttggcgccgaggatgccaaggaagaaaagagggcccactaccgagagctcgcagcccagatcaccaagacgtgtcacgagtcatacgcccgctcagacaccaaacttgggcctgaggccttctggtttaactccggcagagaggccgtggccacccagctgagcgagagctactacatcctccggccagaggtggtggagagctacatgtacctgtggcgacagacccacaaccccatctacagggagtggggctgggaggtggtgctggccttggagaaatactgtcggacagaagccggtttctctgggatccaagacgtgtacagtagcacccccaaccacgacaacaagcagcagagcttctttctagcggagacactaaagtatctctatcttctgttctctgaagatgacttgctctccctggaagactgggtgttcaacaccgaggcccacccactcccggtgaaccactcagacagctccggcagagcctggggcagacactgaccccatctcctgccgccgccctggggccgccgcagggatgccttgccttttcaggatttgagactgttctcaaagggattgggaacgaaggccccatctcgggcagacccccagcagatgtgtcggacaagcaacttcttttcctctgtgaggagacaagacttggagactcagcgatgtcaggccagggccatggccacactggcccacacattcctttctacagagaatttctatgaagcccactcacttgccattccagggccaaaggaccggaggtttgcatatccgccccttgtatttgatttgcttccttttggtttcttggtttttgtttttgcttgattttgtcttttctctacagtttagttttgtcacaattacacatatagttttcaaaatcatgcactttctaaaatggtgtcatcctgaaaaacaaaacccagtgtttgcacacacacaaaatcttgaccccgttatctatattttaaatgctttttgcccaacactgaccctatgttcaactttgtgtcatttaccttataatttgaggaggggtttccctttgggcctcagtgttacaaattactagtgctattttcattattattgtaatggaaaaatctgtggactagaataaaagagtttattgaataagaaatatgattgggctcattgcacatcagtgactcctagaaaaaccattgcaatgttaccatcagaaataataatcagccagcagttgatttaaggtataatttagtaaacgattccaacttctattacctcccctgaaatcggtcctgatatattcgagaagcatgaggccagcccttcagatgcagttgtttatttatactcaggtttagattgggaagaggcccagggaggagcagcaacttgcctgaggtcacacagcccaaaaaaggcaaaggagagtctcgcccctgccgtctcctggccaccccagttgagtgtccgtctgttccatcattcagcagatgcttggtgagtgcctgcaacggaccagacactgggctagaggccagggacaccgctgagagtgagacagtcataagccctgcagtcaaggggtcaagaggggagaaagcgatggtaagggaaactgacaagtaagtgaagtgactgcaggtcataggaaatgctacaaaggagatagatagacagctgaggacctaccctacggggtcagggagggcctctctgggcaggtgaccttcaagccaagacccagaagataaaaaggagcagccgaaagactatctggcagaagaatgaacttcccataacccagccccctttcccaccctccctgatgccctccctgggagggggcctgaaacactggggctgttgtgcagagcaaggagctcaggtcctaacactgaagtgacagctcttcctcccctgacccttttttttttttgagacccagagtctcgttcagtcgcccaggctggagtgcagtggtgcaatcttggctcactgcaacctccacctcctgggttcaagcagttctcctgcctcagcttccccagtagcagggtgcgtcaccacacccggctaattttttgtatttttagtaaagacgaggttttgccatgttgcctaggctggtcttgaactcctgagctcaggtgatccgcccacctcagcctcccaaagtgcggggattacaggcatgagccaccacacccagtcctttcctggcacatttgcagcttgtcaacacagcggaaatcacgggagaatgttgagcccttccctgggctcagctgcttgctctgttcataagctttaatagcccccggggctctgggccaggtgacccggctttaaatccctgctgtgtgaacttaggcaggtacctcccctctctgggctcttcttttccatcaagcagacagaaaacctcaaccccacaaggttgctgtgagaagaagtgggaagctgctggttccctgggcacaggaagtgcttgttccttgttctggagactcaagacattcccagaatcttcttaagcagagctgctggggagtagcccctgtagcaagtaccatgctcttgacaggcagcatgagagcgtgactcccatgacccacctgtgctcaaaaaaaaaaaaaaaaaaaagcaaaccaggaaaactgactacacaaacattgtagaaagattagaaaatagaagcagaaagaagactcattggccatcccactctctggggtgaatactgttatattttcttctaggcctttttctatgaatatatagaatatagattttgccaccgtggtatcctactatgcacactgttttcttataatctgcttttgcacttaactgtacattgtgaacctctttccatgtcaacaaatacatgtttatctcatcgctgta

SEQ ID NO: 11904 - DNA, 2627 bp, Homo sapiens
  source 1..2627: mol_type = unassigned DNA
ggctgccgcagaagttcctcttcctcctcttcctctcgggcctggtcaccctgtgcttcggggccctcttcctgctgccccactcctctcgcctcaagcgcctcttcctggccccccggacccagcagcctggtctggaagtggtggctgaaatcgccggccatgccccggcccgcgagcaggagccgcctcccaacccggcccccgccgcgccggccccgggcgaggatgaccccagcagctgggccagtccccgccgcaggaaaggggggctgcggcgcacccgccccactggaccccgcgaggaggccacggcggcccggggcaatagcatcccggcctccaggcccggggacgagggcgtccctttccgctttgacttcaacgcattccggagccgtctccgccacccggtcctgggaacgagggccgatgagagtcaggagccccagagccaagtgcgagcccagcgggagaaaatcaaggagacacagcggtcctggggttgccttccagatgaagatctatcaaagatttgaagtcttgtgtatgtggtcctagaggaccccaggctgttataccgatccatgaggcatctgaccccttccaaaggatgatgcagtttgcttggcagagctataagcgttatgcaatggggaaaaacgaactccgtccactaacaaaagatggctacgagggtaacatgttcggaggcctcagcggggcaacagtcattgactccctcgataccctctacctcatggagctgaaggaggagttccaggaggccaaggcctgggtgggagagagcttccacctgaacgtgagcggagaagcatccttgtttgaggtgaacatccgctacatcgggggactcctctcagccttctacctgacaggagaagaggtgttccgaataaaggccatcaggctgggagagaagctcctgccggcgttcaacacccccacgggaatcccaaagggcgtggtgagcttcaaaagtgggaactggggctgggccacagccggcagcagcagcatcttggcggagtttggatccctgcacttggaattcttacacctcactgaactctctggcaaccaggtcttcgctgaaaaggtcaggaacatccgcaaggtcctcaggaagatcgaaaagccctttggcctctaccccaacttcctcagcccagtgagtgggaactgggtgcaacaccatgtctcagttggaggactcggggacagtttttatgaatatttgatcaaatcctggttgatgtcgggcaagacagatatggaggctaaaaatatgtactacgaagccttggaggcgatagagacctacttgctgaatgtctctcccggggggctgacctacattgccgagtggcgaggggggattctggaccacaagatggggcacctggcctgtttctccgggggcatgatcgcccttggcgccgaggatgccaaggaagaaaagagggcccactaccgagagctcgcagcccagatcaccaagacgtgtcacgagtcatacgcccgctcagacaccaaacttgggcctgaggccttctggtttaactccggcagagaggccgtggccacccagctgagcgagagctactacatcctccggccagaggtggtggagagctacatgtacctgtggcgacagacccacaaccccatctacagggagtggggctgggaggtggtgctggccttggagaaatactgtcggacagaagccggtttctctgggatccaagacgtgtacagtagcacccccaaccacgacaacaagcagcagagcttctttctagcggagacactaaagtatctctatcttctgttctctgaagatgacttgctctccctggaagactgggtgttcaacaccgaggcccacccactcccggtgaaccactcagacagctccggcagagcctggggcagacactgaccccatctcctgccgccgccctggggccgccgcagggatgccttgccttttcaggatttgagactgttctcaaagggattgggaacgaaggccccatctcgggcagacccccagcagatgtgtcggacaagcaacttcttttcctctgtgaggagacaagacttggagactcagcgatgtcaggccagggccatggccacactggcccacacattcctttctacagagaatttctatgaagcccactcacttgccattccagggccaaaggaccggaggtttgcatatccgccccttgtatttgatttgcttccttttggtttcttggtttttgtttttgcttgattttgtcttttctctacagtttagttttgtcacaattacacatatagttttcaaaatcatgcactttctaaaatggtgtcatcctgaaaaacaaaacccagtgtttgcacacacacaaaatcttgaccccgttatctatattttaaatgctttttgcccaacactgaccctatgttcaactttgtgtcatttaccttataatttgaggaggggtttccctttgggcctcagtgttacaaattactagtgctattttcattattattgtaatggaaaaatctgtggactagaataaaagagtttattgaataagaaa

SEQ ID NO: 11905 - DNA, 3420 bp, Homo sapiens
  source 1..3420: mol_type = unassigned DNA
actaacaaaagatggctacgagggtaacatgttcggaggcctcagcggggcaacagtcattgactccctcgataccctctacctcatggagctgaaggaggagttccaggaggccaaggcctgggtgggagagagcttccacctgaacgtgagcggagaagcatccttgtttgaggtgaacatccgctacatcgggggactcctctcagccttctacctgacaggagaagaggtgttccgaataaaggccatcaggctgggagagaagctcctgccggcgttcaacacccccacgggaatcccaaagggcgtggtgagcttcaaaagtgggaactggggctgggccacagccggcagcagcagcatcttggcggagtttggatccctgcacttggaattcttacacctcactgaactctctggcaaccaggtcttcgctgaaaaggcaagtctcctccccacccttcttcctgcggagcagagggatgagcgtgcggctgccacagggttttcagaggcgagtgggtcctccctcatggatcagcaggagggcagtggggagcccgggagcccaagctaccactaaggtagcaaatagtagctacctataccccaacgccaggtggcagggaaggtgagcacgcagagtcaataagattctacagagggaaaaggagagacaagattctgccggggaaaaggttctcactggtctgcgtgagctcagtggcaaccacccatatgtgaaatctggagaaagtgcaactgaaatctaggcaccaccttgcattggcaggaattggccacccactgcagaagtcccctttccagagacatttagcttttccatgtgagatctgcctgccttcttccctgtgcctgtttagctcatgccatcagcaggctggcatggcaataccctgccatggcagatgccctgactgttcattcctgctgtttaaggccacatggggagcttagaacaccaatcagccctgacagctgctcatacctggccttgggcagtccccactagctagaagtgtcgctgtaggtctgacctcaaatccaaagaagggaagtgctcacacctccctcatatggcactcaggctccagcagctacagtccctccctgagggctgcctggggagatggaagccctgcccatcctctggagccctccaaggagaactctgtggcagtgccactcccaaagccttgtcttccccctggaatgcccgcctcttagaccagtatgggagctgggagatgactgatagattcccacctctatgccacggctcccagcaggcaactgggagatgatagattcccacagctaccccatggctcccagtatcatgtcgccatccagcctcaaagcattacctggcacagctgtgaggaaacagatttctgggcttcactccagggccaggcatctacatttttaatatgcattcatgtgctttttgacgcatggtttgggaccactacttactcaatgtaggagtccacctgagtgtccttaagaagctcaagaagagctgttcagcctcttcttgattactttctctgacaaggagctcactgccgccacccttaaacagtccgtcctcctggcagcccttccttcaaaagtgttttccttacattgagagggactctgcctccctgaaactcccccatttgaaagttcgtggaatgagttcaacctcacttcctggtagctcttattttctgatcctttcccacctccaagtcccatcccccaacctccctgttgccattgctcttaaatcagactcctctaggaaggttctgaccagctccgaatggagtgggacagggagctcactccagtccctggttattctggagtaatagctacccctgcctgagcacccgctatgtgctgggcactttataatggctctactcttcccaacaaccctatgaggtgggtcttcctggagttcccatatttacagaggaggaaactaagactcagagaggtcaagtcacttgccctgggccttccagctggtcagtgataaagccgtgattcaagcccaggatgtgctggctccttccagaccagattgatagagcaggctgcaggcttttgctctggagtccatccgtctatctctgtctcctctacatttacatactctggctattttcatcccccaatcatgcctcccacagaggcaattattggcagtcaacaaattggcccaaattctagaagcgcccgcaccctccaggggagctaatttggcctgcttcactgctcaccaccaggacagtcgagagtaacgcaggtacaagcacattcctgtccccgtaatggacttcgttaacataaatggatatgaaatctgacgtggcaaagccaagtgctgtcacctggaaaggaaggtctgcctgcagaaaggtggctctcccgcactcccggccccgtacacacataactctatcaacatgagacagtgtggtcccaagggcctttctctcccaaggggtcttgtgctggctaggacgtgctgagtaggatttaaccactgtcggagagcaggcactatagataaagccctcttgaattccacttctcaccttcatagccccaaaggttgcaaacccagcctctttctgctccagctggggcaggctgtgctccatggtcacggccctgatctgtgttggcccagtgctgccctgtgttgggcaggaatatgtatggtttatgttgtcagaattcattcacgtcctggctctgccacttaaggaccaggtggccatcagcaagtcaccagacctctctgagattcaggtttcttgtctgttacactgagataatcccttgtcggttatgagggttggagataatgtatataacggatctggctcaaaggaactgaaaaaggataacaactgttattgctttttataattattattatttttattaaaacactgaaacgcctgttaggacatggggttattcaggagcccaagcctctcccccgaaataattccagggcatcagataaaatagcatattactagattgggccatatgaaactgccaatattggacctttttttgattgccttatatacttaactgttttttaaatggccagaatacttaagcattctgaatacttaagttagcaacacttagcactaagcagtttttaagaatacaatacattgttatgaactacagtcatcatgtcttataccatagatctcttgaacttattcctcctaactgaaattttatatcctttgatcagcatctccccaacccttggtaaccaccattctactctctacctctacttctttttttttttttttttttttgagacggagtctctctctgtcgcccagcctggagtgcagtggc

SEQ ID NO: 11906 - DNA, 2461 bp, Homo sapiens
  source 1..2461: mol_type = unassigned DNA
gtcctttaagttgcaagggcctggggtggcaggggtagaggaatgcatgaagattcctcaccaatgcctgatactgtcagtcttcgtaacgttagcctttctagcagaaggaaactctatctatctatctatctatctatatttatttattttatttttttgagatggagtctcactcttgtcgcccagactggagtgcagtggcatagtctcggctcactgcaacttctgcctcccgggttcaagcgattctcctgcctcagcctcccgagtagctaggattacaggcgcccgcaaccacgcccagctaatttttgtatttttagtagagacagggtttcactgtgttggccaggctggtctcgaactcctgacctcaggcgatctgcctgccttggcctcccaaagtgctgggattacaggcatgagccactgagcccagctggaaacactatattcttgttgagcccctggaagtttatttatatactcattctgcatttttgttcaatccatactctgctaagcactggagaaaacagaggaggcctcagcggggcaacagtcattgactccctcgataccctctacctcatggagctgaaggaggagttccaggaggccaaggcctgggtgggagagagcttccacctgaacgtgagcggagaagcatccttgtttgaggtgaacatccgctacatcgggggactcctctcagccttctacctgacaggagaagaggtgttccgaataaaggccatcaggctgggagagaagctcctgccggcgttcaacacccccacgggaatcccaaagggcgtggtgagcttcaaaagtgggaactggggctgggccacagccggcagcagcagcatcttggcggagtttggatccctgcacttggaattcttacacctcactgaactctctggcaaccaggtcttcgctgaaaaggtcaggaacatccgcaaggtcctcaggaagatcgaaaagccctttggcctctaccccaacttcctcagcccagtgagtgggaactgggtgcaacaccatgtctcagttggaggactcggggacagtttttatgaatatttgatcaaatcctggttgatgtcgggcaagacagatatggaggctaaaaatatgtactacgaagccttggaggcgatagagacctacttgctgaatgtctctcccggggggctgacctacattgccgagtggcgaggggggattctggaccacaagatggggcacctggcctgtttctccgggggcatgatcgcccttggcgccgaggatgccaaggaagaaaagagggcccactaccgagagctcgcagcccagatcaccaagacgtgtcacgagtcatacgcccgctcagacaccaaacttgggcctgaggccttctggtttaactccggcagagaggccgtggccacccagctgagcgagagctactacatcctccggccagaggtggtggagagctacatgtacctgtggcgacagacccacaaccccatctacagggagtggggctgggaggtggtgctggccttggagaaatactgtcggacagaagccggtttctctgggatccaagacgtgtacagtagcacccccaaccacgacaacaagcagcagagcttctttctagcggagacactaaagtatctctatcttctgttctctgaagatgacttgctctccctggaagactgggtgttcaacaccgaggcccacccactcccggtgaaccactcagacagctccggcagagcctggggcagacactgaccccatctcctgccgccgccctggggccgccgcagggatgccttgccttttcaggatttgagactgttctcaaagggattgggaacgaaggccccatctcgggcagacccccagcagatgtgtcggacaagcaacttcttttcctctgtgaggagacaagacttggagactcagcgatgtcaggccagggccatggccacactggcccacacattcctttctacagagaatttctatgaagcccactcacttgccattccagggccaaaggaccggaggtttgcatatccgccccttgtatttgatttgcttccttttggtttcttggtttttgtttttgcttgattttgtcttttctctacagtttagttttgtcacaattacacatatagttttcaaaatcatgcactttctaaaatggtgtcatcctgaaaaacaaaacccagtgtttgcacacacacaaaatcttgaccccgttatctatattttaaatgctttttgcccaacactgaccctatgttcaactttgtgtcatttaccttataatttgaggaggggtttccctttgggcctcagtgttacaaattactagtgctattttcattattattgtaatggaaaaatctgtggactagaataaaagagtttattgaataagaaa

SEQ ID NO: 11907 - DNA, 769 bp, Homo sapiens
  source 1..769: mol_type = unassigned DNA
accaccacctgcttggtgtctatgctttggctgatgtatcagagcccagagtgcagctagactgtgggctggcacccccaagggtggctgccagagtgagaccctcagctgtgtcttccttggacagtagaggtgacatgagaagtatgtccaagctggaagaggcctccttcagtggagcatccagttttgctccttctctttgtgtggatggaaaccaaggcctagagaggggaaggcacttgcccaaggccacacagcacagagctggccaagctggcaccactgctggtctgtccgcggggtgtggaatgaacgagggctggaaggctgagagtggagtgcagtggtgcaatcttggctcaccgcaacttctgcctcctggattcaagtgattctcccacctcagcctcccaagtagctgggactacaggcgatagagacctacttgctgaatgtctctcccggggggctgacctacattgccgagtggcgaggggggattctggaccacaagatggggcacctggcctgtttctccgggggcatgatcgcccttggcgccgaggatgccaaggaagaaaagagggcccactaccgagagctcgcagcccagatcaccaagacgtgtcacgagtcatacgcccgctcaggccttggagaaatactgtcggacagaagccggtttctctgggatccaagacgtgtacagtagcacccccaaccacgacaacaagcagcagagcttctttctagcggagacactaaa

SEQ ID NO: 11908 - DNA, 893 bp, Homo sapiens
  source 1..893: mol_type = unassigned DNA
gaggaaacgtgtgacaagatactcctagagaacagctcttaattttctgcaggttctttttgagaaactggcgatagagacctacttgctgaatgtctctcccggggggctgacctacattgccgagtggcgaggggggattctggaccacaagatggggcacctggcctgtttctccgggggcatgatcgcccttggcgccgaggatgccaaggaagaaaagagggcccactaccgagagctcgcagcccagatcaccaagacgtgtcacgagtcatacgcccgctcagacaccaaacttgggcctgaggccttctggtttaactccggcagagaggccgtggccacccagctgagcgagagctactacatcctccggccagaggtggtggagagctacatgtacctgtggcgacagacccacaaccccatctacagggagtggggctgggaggtggtgctggccttggagaaatactgtcggacagaagccggtttctctgggatccaagacgtgtacagtagcacccccaaccacgacaacaagcagcagagcttctttctagcggagacactaaagtatctctatcttctgttctctgaagatgacttgctctccctggaagactgggtgttcaacaccgaggcccacccactcccggtgaaccactcagacagctccggcagagcctggggcagacactgaccccatctcctgccgccgccctggggccgccgcagggatgccttgccttttcaggatttgagactgttctcaaagggattgggaacgaaggccccatctcgggcagacccccagcagatgtgtcggacaagcaacttcttttcctctgtgaggagacaagacttggagactcagcgatgtcaggcca

SEQ ID NO: 11909 - DNA, 1145 bp, Homo sapiens
  source 1..1145: mol_type = unassigned DNA
catttccagtccccgagggtcttgttctgtccagcccaggccaagagggaagctgtgcatctgcccggtgcagccttacacagcagtccaggcaggggcaccccacacccacacacacctgacatcaccctggccgcgggttcaaggcaactgacatctctcctggatcccgaaaagcaggaggtgggaggtctgacctgggccctctgcttggctgtttccccagacaccaaacttgggcctgaggccttctggtttaactccggcagagaggccgtggccacccagctgagcgagagctactacatcctccggccagaggtggtggagagctacatgtacctgtggcgacagacccacaaccccatctacagggagtggggctgggaggtggtgctggccttggagaaatactgtcggacagaagccggtttctctgggatccaagacgtgtacagtagcacccccaaccacgacaacaagcagcagagcttctttctagcggagacactaaagtatctctatcttctgttctctgaagatgacttgctctccctggaagactgggtgttcaacaccgaggcccacccactcccggtgaaccactcagacagctccggcagagcctggggcagacactgaccccatctcctgccgccgccctggggccgccgcagggatgccttgccttttcaggatttgagactgttctcaaagggattgggaacgaaggccccatctcgggcagacccccagcagatgtgtcggacaagcaacttcttttcctctgtgaggagacaagacttggagactcagcgatgtcaggccagggccatggccacactggcccacacattcctttctacagagaatttctatgaagcccactcacttgccattccagggccaaaggaccggaggtttgcatatccgccccttgtatttgatttgcttccttttggtttcttggtttttgtttttgcttgattttgtcttttctctacagtttagttttgtcacaattacacatatagttttcaaaatcatgcactttctaaaatggtgtcatcctgaaaaacaaaacccagtgtttgcacacacacaaaatcttgaccccgttatctatattttaaatgctttttgcc

SEQ ID NO: 11910 - DNA, 4647 bp, Homo sapiens
  source 1..4647: mol_type = unassigned DNA
aaggcgcgggccccggcgcggcggggagggctcggccggaggggaggctgcggcgcgcggccggtcgctgcgggcccgggccccaagccgtgccgctccgctcgcccgggccccgccgaggccgctgcgcccccgcctcctcgcgggaggactcgctccaaactccctgaacttcggggacagtcccccgaagcggcgaaactctcagggttggcaaccctgcccagggacccccatcccgggcggcgctccggacgccctcccctcaccgcgcccccgcagacacgtgcctggactccgagggcttctggagccaccggccgggccacgatgctcatgaggaaagtgcccggcttcgtcccggcctccccgtgggggctgcggctgccgcagaagttcctcttcctcctcttcctctcgggcctggtcaccctgtgcttcggggccctcttcctgctgccccactcctctcgcctcaagcgcctcttcctggccccccggacccagcagcctggtctggaagtggtggctgaaatcgccggccatgccccggcccgcgagcaggagccgcctcccaacccggcccccgccgcgccggccccgggcgaggatgaccccagcagctgggccagtccccgccgcaggaaaggggggctgcggcgcacccgccccactggaccccgcgaggaggccacggcggcccggggcaatagcatcccggcctccaggcccggggacgagggcgtccctttccgctttgacttcaacgcattccggagccgtctccgccacccggtcctgggaacgagggccgatgagagtcaggagccccagagccaagtgcgagcccagcgggagaaaatcaaggagatgatgcagtttgcttggcagagctataagcgttatgcaatggggaaaaacgaactccgtccactaacaaaagatggctacgagggtaacatgttcggaggcctcagcggggcaacagtcattgactccctcgataccctctacctcatggagctgaaggaggagttccaggaggccaaggcctgggtgggagagagcttccacctgaacgtgagcggagaagcatccttgtttgaggtgaacatccgctacatcgggggactcctctcagccttctacctgacaggagaagaggtgttccgaataaaggccatcaggctgggagagaagctcctgccggcgttcaacacccccacgggaatcccaaagggcgtggtgagcttcaaaagtgggaactggggctgggccacagccggcagcagcagcatcttggcggagtttggatccctgcacttggaattcttacacctcactgaactctctggcaaccaggtcttcgctgaaaaggcaacagtcaggaacatccgcaaggtcctcaggaagatcgaaaagccctttggcctctaccccaacttcctcagcccagtgagtgggaactgggtgcaacaccatgtctcagttggaggactcggggacagtttttatgaatatttgatcaaatcctggttgatgtcgggcaagacagatatggaggctaaaaatatgtactacgaagccttggaggcgatagagacctacttgctgaatgtctctcccggggggctgacctacattgccgagtggcgaggggggattctggaccacaagatggggcacctggcctgtttctccgggggcatgatcgcccttggcgccgaggatgccaaggaagaaaagagggcccactaccgagagctcgcagcccagatcaccaagacgtgtcacgagtcatacgcccgctcagacaccaaacttgggcctgaggccttctggtttaactccggcagagaggccgtggccacccagctgagcgagagctactacatcctccggccagaggtggtggagagctacatgtacctgtggcgacagacccacaaccccatctacagggagtggggctgggagggtcaaggtggccttggagaaatactgtcggacagaagccggtttctctgggatccaagacgtgtacagtagcacccccaaccacgacaacaagcagcagagcttctttctagcggagacactaaagtatctctatcttctgttctctgaagatgacttgctctccctggaagactgggtgttcaacaccgaggcccacccactcccggtgaaccactcagacagctccggcagagcctggggcagacactgaccccatctcctgccgccgccctggggccgccgcagggatgccttgccttttcaggatttgagactgttctcaaagggattgggaacgaaggccccatctcgggcagacccccagcagatgtgtcggacaagcaacttcttttcctctgtgaggagacaagacttggagactcagcgatgtcaggccagggccatggccacactggcccacacattcctttctacagagaatttctatgaagcccactcacttgccattccagggccaaaggaccggaggtttgcatatccgccccttgtatttgatttgcttccttttggtttcttggtttttgtttttgcttgattttgtcttttctctacagtttagttttgtcacaattacacatatagttttcaaaatcatgcactttctaaaatggtgtcatcctgaaaaacaaaacccagtgtttgcacacacacaaaatcttgaccccgttatctatattttaaatgctttttgcccaacactgaccctatgttcaactttgtgtcatttaccttataatttgaggaggggtttccctttgggcctcagtgttacaaattactagtgctattttcattattattgtaatggaaaaatctgtggactagaataaaagagtttattgaataagaaatatgattgggctcattgcacatcagtgactcctagaaaaaccattgcaatgttaccatcagaaataataatcagccagcagttgatttaaggtataatttagtaaacgattccaacttctattacctcccctgaaatcggtcctgatatattcgagaagcatgaggccagcccttcagatgcagttgtttatttatactcaggtttagattgggaagaggcccagggaggagcagcaacttgcctgaggtcacacagcccaaaaaaggcaaaggagagtctcgcccctgccgtctcctggccaccccagttgagtgtccgtctgttccatcattcagcagatgcttggtgagtgcctgcaacggaccagacactgggctagaggccagggacaccgctgagagtgagacagtcataagccctgcagtcaaggggtcaagaggggagaaagcgatggtaagggaaactgacaagtaagtgaagtgactgcaggtcataggaaatgctacaaaggagatagatagacagctgaggacctaccctacggggtcagggagggcctctctgggcaggtgaccttcaagccaagacccagaagataaaaaggagcagccgaaagactatctggcagaagaatgaacttcccataacccagccccctttcccaccctccctgatgccctccctgggagggggcctgaaacactggggctgttgtgcagagcaaggagctcaggtcctaacactgaagtgacagctcttcctcccctgacccttttttttttttgagacccagagtctcgttcagtcgcccaggctggagtgcagtggtgcaatcttggctcactgcaacctccacctcctgggttcaagcagttctcctgcctcagcttccccagtagcagggtgcgtcaccacacccggctaattttttgtatttttagtaaagacgaggttttgccatgttgcctaggctggtcttgaactcctgagctcaggtgatccgcccacctcagcctcccaaagtgcggggattacaggcatgagccaccacacccagtcctttcctggcacatttgcagcttgtcaacacagcggaaatcacgggagaatgttgagcccttccctgggctcagctgcttgctctgttcataagctttaatagcccccggggctctgggccaggtgacccggctttaaatccctgctgtgtgaacttaggcaggtacctcccctctctgggctcttcttttccatcaagcagacagaaaacctcaaccccacaaggttgctgtgagaagaagtgggaagctgctggttccctgggcacaggaagtgcttgttccttgttctggagactcaagacattcccagaatcttcttaagcagagctgctggggagtagcccctgtagcaagtaccatgctcttgacaggcagcatgagagcgtgactcccatgacccacctgtgctcaaaaaaaaaaaaaaaaaaaagcaaaccaggaaaactgactacacaaacattgtagaaagattagaaaatagaagcagaaagaagactcattggccatcccactctctggggtgaatactgttatattttcttctaggcctttttctatgaatatatagaatatagattttgccaccgtggtatcctactatgcacactgttttcttataatctgcttttgcacttaactgtacattgtgaacctctttccatgtcaacaaatacatgtttatctcatcgctgt

SEQ ID NO: 11911 - DNA, 4667 bp, Homo sapiens
  source 1..4667: mol_type = unassigned DNA
ggcggggccagccgcccgctcggctcaggcgctgcgggcgcctattgacccagcggctgctgcgccgccgctgtctcctcctgctcgtggcgggcggtgctggagcgccaagtggcgctggagaaccggcgcttcctttcgccgcttccgccgccatctccgcgtttgtggggcgggaaagagggagggggctagcggctgcagctggagcgggcttctctccggggacggtcctttcctccctgctctccttttccttctttccgcgttgccgccgcccgccccctgcgcctccccgcggagcctgggtccgggagggggaaggtaggggcggcggggggcgggagagtctggcgagcggacgctagctctgaggaaactcatcaatccgtgagccccggagtccggggtgcacatcggcccagccgcagcgtcggcggcggcggcggcagcagcacgaaggggctcagtcggggtaggcgggggcggtgccggtgccgcgggggcgggcccgaccgtcccgcccagaagttgtagggcttggctcctcgcgatcttgttcctttcccctccgcttctctgacctagctgcgcggccccggcccgggagctgccgaacccgcgcctcccctgggtgaggaggacacgcctgccctcgtcgagaaaacttttcctgccgactcagttggggcggcggtggcaggaagtgcgggcagcgacctctcctccgcctgccccgcgcgccctgccggaggtcggcgctgagcttgcgatcaagtttgtgggggccccccttcccagttgccggcgagtctcgcctcgagaggggcgcccgaccccggggagggcggcaggccagggcgaaggccaagggcgtgtggtggcgccggagactaggtgcggagcaaggcggggactcgcacccgcatccgagagcgcggaggtcgcgcagcccgggagaagggagcctccggcggctgcttcctagagtccacagtgcgctgtctcctttggctgaggagagtgtcctggccccgagtctatcgaggaaaatgaagttaagccgccagttcaccgtgttcggcagtgcgatcttctgtgtggtgattttctcgctctacctgatgctggaccggggtcacttagactaccccaggaacccgcgccgcgagggctccttccctcagggccagctctcaatgttgcaagaaaaaatagaccatttggagcgtttgctagctgagaataatgagatcatctcaaatattagagactcagtcatcaatttgagtgagtctgtggaggatggtccgaaaagttcacaaagcaatttcagccaaggtgctggctcacatcttctgccctcacaattatccctctcagttgacactgcagactgtctgtttgcttcacaaagtggaagtcacaattcagatgtgcagatgttggatgtttacagtctaatttcttttgacaatccagatggtggagtttggaagcaaggatttgacattacttatgaatctaatgaatgggacactgaaccccttcaagtctttgtggtgcctcattcccataacgacccaggttggttgaagactttcaatgactactttagagacaagactcagtatatttttaataacatggtcctaaagctgaaagaagactcacggaggaagtttatttggtctgagatctcttacctttcaaagtggtgggatattatagatattcagaagaaggatgctgttaaaagtttaatagaaaatggtcagcttgaaattgtgacaggtggctgggttatgcctgatgaagctactccacattattttgccttaattgatcaactaattgaaggacatcagtggctggaaaataatataggagtgaaacctcggtccggctgggctattgatccctttggacactcaccaacaatggcttatcttctaaaccgtgctggactttctcacatgcttatccagagagttcattatgcagttaaaaaacactttgcactgcataaaacattggagtttttttggagacagaattgggatctgggatctgtcacagatattttatgccacatgatgcccttctacagctatgacatccctcacacttgtggacctgatcctaaaatatgctgccagtttgattttaaacgtcttcctggaggcagatttggttgtccctggggagtccccccagaaacaatacatcctggaaatgtccaaagcagggctcggatgctactagatcagtaccgaaagaagtcaaagctttttcgtaccaaagttctcctggctccactaggagatgatttccgctactgtgaatacacggaatgggatttacagtttaagaattatcagcagctttttgattatatgaattctcagtccaagtttaaagttaagatacagtttggaactttatcagatttttttgatgcgctggataaagcagatgaaactcagagagacaagggccaatcgatgttccctgttttaagtggagattttttcacttatgccgatcgagatgatcattactggagtggctattttacatccagacccttttacaaacgaatggacagaatcatggaatctcatttaagggctgctgaaattctttactatttcgccctgagacaagctcacaaatacaagataaataaatttctctcatcatcactttacacggcactgacagaagccagaaggaatttgggactgtttcaacatcatgatgctatcacaggaactgcaaaagactgggtggttgtggattatggtaccagactttttcattcgttaatggttttggagaagataattggaaattctgcatttcttcttattttgaaggacaaactcacatacgactcttactctcctgataccttcctggagatggatttgaaacaaaaatcacaagattctctgccacaaaaaaatataataaggctgagtgcggagccaaggtaccttgtggtctataatcctttagaacaagaccgaatctcgttggtctcagtctatgtgagttccccgacagtgcaagtgttctctgcttcaggaaaacctgtggaagttcaagtcagcgcagtttgggatacagcaaatactatttcagaaacagcctatgagatctcttttcgagcacatataccgccattgggactgaaagtgtataagattttggaatcagcaagttcaaattcacatttagctgattatgtcttgtataagaataaagtagaagatagcggaattttcaccataaagaatatgataaatactgaagaaggtataacactagagaactcctttgttttacttcggtttgatcaaactggacttatgaagcaaatgatgactaaagaagatggtaaacaccatgaagtaaatgtgcaattttcatggtatggaaccacaattaaaagagacaaaagtggtgcctacctcttcttacctgatggtaatgccaagccttatgtttacacaacaccgccctttgtcagagtgacacatggaaggatttattcggaagtgacttgcttttttgaccatgttactcatagagtccgactataccacatacagggaatagaaggacagtctgtggaagtttccaatattgtggacatccgaaaagtatataaccgtgagattgcaatgaaaatttcttctgatataaaaagccaaaatagattttatactgacctaaatgggtaccagattcaacctagaatgacactgagcaaattgcctcttcaagcaaatgtctatcccatgaccacaatggcctatatccaggatgccaaacatcgtttgacactgctctctgctcagtcattaggggtttcgagtttgaatagtggtcagattgaagttatcatggatcgaagactcatgcaagatgataatcgtggccttgagcaaggtatccaggataacaagattacagctaatctatttcgaatactactagaaaaaagaagtgctgttaatacggaagaagaaaagaagtcggtcagttatccttctctccttagccacataacttcttctctcatgaatcatccagtcattccaatggcaaataagttctcctcacctacccttgagctgcaaggtgaattctctccattacagtcatctttgccttgtgacattcatctggttaatttgagaacaatacagtcaaaggtgggcaatgggcactccaatgaggcagccttgatcctccacagaaaagggtttgattgtcggttctctagcaaaggcacagggctgttttgttctactactcagggaaagatattggtacagaaacttttaaacaagtttattgtcgaaagtctcacaccttcatcactatccttgatgcattcacctcccggcactcagaatataagtgagatcaacttgagtccaatggaaatcagcacattccgaatccagttgaggtgaacctgactttcacatttggattgagaatcattggcttttatacctttcttggtttgacgtgcaataaagaagcacattattttagcttctggctactgtgagaacatgaattctgtgattctgtgggttttttcttttttcttttaccagtacagtaagaaaaaaaaaaaaaaaaaaaaa

SEQ ID NO: 11912 - DNA, 448 bp, Homo sapiens
  source 1..448: mol_type = unassigned DNA
tttggagcttaacggcggaagtgagattccatgacttgaaccaaggcggctctagtctgagaagtaccttgtggtctataatcctttagaacaagaccgaatctcgttggtctcagtctatgtgagttccccgacagtgcaagtgttctctgcttcaggaaaacctgtggaagttcaagtcagcgcagtttgggatacagcaaatactatttcagaaacagcctatgagatctcttttcgagcacatataccgccattgggactgaaagtgtataagattttggaatcagcaagttcaaattcacatttagctgattatgtcttgtataagaataaagtagaagatagcggaattttcaccataaagaatatgataaatactgaagaaggtataacactagagaactcctttgttttacttcggtttgatcaaactggacttatgaag

SEQ ID NO: 11913 - DNA, 546 bp, Homo sapiens
  source 1..546: mol_type = unassigned DNA
gaggaacaaggaaaaggattttagtgaaggtatcctgatcctgaaaaagtcagggagggcttcaagcccatcttggacttcagaacacctcacaactttgtggtaccttgtggtctataatcctttagaacaagaccgaatctcgttggtctcagtctatgtgagttccccgacagtgcaagtgttctctgcttcaggaaaacctgtggaagttcaagtcagcgcagtttgggatacagcaaatactatttcagaaacagcctatgagatctcttttcgagcacatataccgccattgggactgaaagtgtataagattttggaatcagcaagttcaaattcacatttagctgattatgtcttgtataagaataaagtagaagatagcggaattttcaccataaagaatatgataaatactgaagaaggtataacactagagaactcctttgttttacttcggtttgatcaaactggacttatgaagcaaatgatgactaaagaagatggtaaacaccatgaagtaaatgtgcaattttcatggta

SEQ ID NO: 11914 - DNA, 2193 bp, Homo sapiens
  source 1..2193: mol_type = unassigned DNA
gaatgtttcttgacctagagtggacttaatacttcccagatttgatgagggaggtgttttcttttctgtttgaatcttttatgttttattactcgtgagtgactttgtcagcaatcctaacttagattatgaagtcctttgatcttggagtacatttaaaatatcttgttgaaattgttccctctctattcatgttattctacgagctgcattaaatttcagtgttgttggagaatattattttatatgctttatttaatctttcttttaatacaattcattcagacccgattttttatcagtatcttaatattgcagtgtccctctgctgtcttaaaattttttttttctctctccatagtctgaaatgtaatgacatctaatgttagcttctggcacgatgctagtcactttttgctagcacccttctgtgcaatgctaatctgacattctgaattttaagctgtatatctctataaatcctgtcttttcacacagatcagtagccaagccttttatctgagccttatattacaaaaaggatgcaaaatcagaagatgtcaatggagtaatcattttaagaaataagatacaaaattaaatttggttcaaatgtaactggtgatcaaaggacctttctgcataaattattttctaagttatttgtgtctgtttttactccttaggttaagattctactcagtcattgatttaattttgcatgtcatctagcatatttaatctaccaacattagtagattatttaatgtttgaacatacagaagtgttgcttttaaccatataccatagcaaaaactaaagcattttaaattatatggaataatcatatactatgtaagtgtgtgataactattcagtaacatatttaacacttctacttttggaataaaaatagtgaaacaattggcaatgatttaccaagttgaaagaaaacaatcagatgatctaggcatgccgcctatgttatttatatttaaaaattggatttattttgagagttttgttttctttaaattctgtcattgggtaacatttagttcctatcatttggtaacatggatggactttagctttgaatcagtatatgcctttatggtcttgttaaggggtataaatgaaactacaagaatatggtggatgaaacctgagaagggagataatatttgatgatgcacaacatataatctatgtacagcccaatccttgtactttgagagttttgtgataggttgagaattttcataaaaaggtatgccttgtcctgaaatgtttgtaggaaatgttttcagtatttttagtattaaatcaatggaagatatattttaaacatatgagttagatgtgtgctgtttattttcttttattgcttacaactaaacttggtagtttatggagtattttctaagactgttatttataaaatgtaatgaaaccaaattattcatatatttttatattaaaccctctcagataattctgttaatatgatgagaactggaaatatagacctcttaaacatttttgttttttcttgataggaagaagaaaagaagtcggtcagttatccttctctccttagccacataacttcttctctcatgaatcatccagtcattccaatggcaaataagttctcctcacctacccttgagctgcaaggtgaattctctccattacagtcatctttgccttgtgacattcatctggttaatttgagaacaatacagtcaaaggtgggcaatgggcactccaatgaggcagccttgatcctccacagaaaagggtttgattgtcggttctctagcaaaggcacagggctgttttgttctactactcagggaaagatattggtacagaaacttttaaacaagtttattgtcgaaagtctcacaccttcatcactatccttgatgcattcacctcccggcactcagaatataagtgagatcaacttgagtccaatggaaatcagcacattccgaatccagttgaggtgaacctgactttcacatttggattgagaatcattggcttttatacctttcttggtttgacgtgcaataaagaagcacattattttagcttctggctactgtgagaacatgaattctgtgattctgtgggttttttcttttttcttttaccagtacagtaagaaaaaaaaaaaaaaaa

SEQ ID NO: 11915 - DNA, 793 bp, Homo sapiens
  source 1..793: mol_type = unassigned DNA
ttttaaacatatgagttagatgtgtgctgtttattttcttttattgcttacaactaaacttggtagtttatggagtattttctaagactgttatttataaaatgtaatgaaaccaaattattcatatatttttatattaaaccctctcagataattctgttaatatgatgagaactggaaatatagacctcttaaacatttttgttttttcttgataggaagaagaaaagaagtcggtcagttatccttctctccttagccacataacttcttctctcatgaatcatccagtcattccaatggcaaataagttctcctcacctacccttgagctgcaaggtgaattctctccattacagtcatctttgccttgtgacattcatctggttaatttgagaacaatacagtcaaaggtgggcaatgggcactccaatgaggcagccttgatcctccacagaaaagggtttgattgtcggttctctagcaaaggcacagggctgttttgttctactactcagggaaaggtaagttgaaaaggttatttttgcttactgttagtgtgctttgaaatcctctttctgcaaaggatcttgacaataagatcatgtttcattgcttctttactgtctcagtttcatcagtctgcaaattagtttgaatctccccatctgaaaaatgcactttctcaaaacttcagcctcctttccttgttgacatcaaaaggcatagctggaatttatgcacatttgaaggcaatgctcttgttatttcctaggccttctatttccagcct

SEQ ID NO: 11916 - DNA, 5599 bp, Homo sapiens
  source 1..5599: mol_type = unassigned DNA
ggcccagcttagtctatgagctgaatgttggttttatcccctgaattaagtttgcaatgggttttctctgtgcaactttagaatacgccagccttacttcagtaattcagcctcgaaagtgatctaatctgttttacaaagatagttacctaccacagtgcttggcacaatttcaaaaattgtaaattttcttccccacatcctcccattttatggggtccagatattactaatgcattaatgaatgtaaaagcagttcttccaaaatctgtttactctcctagagcatacagtgtgactgcttgaaggtatctgttttcctgcatgcatattcaagttaaattcacagtttccctactttgaaaaacagttttcttggaaataaaatgtctagacagactttgaaactgaaaaactgctgctttgcctcaggtatttttgcttgaaaactgatactttcatgaatatttgattttttaaaaacttggacaagatgattgctatttcagttcgtttttacaaaagtgatgtaattttagttttgagagaaagtataactttttctatcagtgaaagttaatttttatgacttttatctctatttttgtattgtcggtttaaatctcttgtagaattcaaatgtagaattccaaaggtgtttccctccccacattttttgtccccttctgttgctataaaggccttacatattcattattccaagagcaaatgtgttgcaggaattttagccatgcatgctatcaagtgatatgtaaggatggacccatgagttaaaatggacaaatgctttaggttagtagtgatatgtgcttttaaaagagcttaatgaagagggtttctaatctgttaatctgaatccagactttgttatgactttgatgtacgactctagacatataatttaggagttccctgagtctttagctacaaagttgtaatgtcaaataaaggaaatttatgctaagggcttcctgtgtgccagacatttggccagatctttgttaagctatttcatttcatttcatcttcattttatggaaaaggaaaacctggttttgctgaaacccacagctagtaaattgcagagcaaggatccagatctccagctgtctgactccccactcaggctctgaaccactcttactacacagctcgtgcactagcgcattctgccctacaaggcagtgtgaagctacttacatagtattttcaacaggttaatccacacagtgactccatgaaggaaataatacaagcattacctccattttacaggcaagaaaatagatatttaggaagaagaaattactatcctaaggtttcacagttggcacatgatagagtcctgtttcttattcttttggagatctaatgataccataaatgaagggttttcctatgtgttatttttatagtacatgggcagggtgttttaaatgtattgaaatgaattagaaatttttatcatatgatttaaaattgctgtgtgtatcatgtggtcttgtgatgactcagaattccttaaatgactcttctcttccttcaaacaaaatcttagcagtacccctacaaaatatcagtgtgaaacatcataacataggttattccagccaagactctgaggtgaggacagctttaaactgttcaggcacattaaaatcaaatcagtggtggagattctggcagctattcaggaaagatgtctctttagtacattaaaaaatcttatcccctagtgaggatgatcaggcgtttgggcatattcctgtctgtggccagagaacagaggaaagaatcagttttatcacaatgtcagtgctgagcagcacatgactcttttcaaaaactgtatgtttcttaatttttccagggatttttaattcatttatcataaacaccttccaactttaggaaacaaaatttattaagataattgtattttaaaatattcagaggcctaaaccattcatgacattgatacttaaatggatatgagaaattttattgcaagaaaaggtatactgaccctcttagctgacttgtcatgtttagtatttttatttttgcctgcctatcaacaatagcttctgcagtatcaatttaaatgatacatcaagctggtaaatgtgagctggcctaccaagtgaaagcataactaaatttaaatagctctgatataaaaataatgaatcagtacatcaaagattaagaatgcagttagcaaaaattaatgttcaataaagaagcatgtgtgacttttaagttagatggtatgtcattcaatgaccagataaggactaagttcaggtgcagtttattcaactgatgtgtgtgtttgaaaaataagacgaaaacataatgctttatttgaataaactttaataaaacaatatataatgtatggacataaggaaacctaagtcctcggggattataggggaaaccaaggcatgaggttacctaacaaggaaccttagaacataatcttacctggctcagtacaagtaggagagaatggtagcaggtgaatgggcagtgagcatggacctgaggagaaatgaatttgcctaactttcttgctaaataaatgtgcttttggatgctgacatcgagagagtggtgtgtgaagtaccataaatatttgctttattgtctgcgcggtgtgactgcattctgctcatttgcaggtgggcaatgggcactccaatgaggcagccttgatcctccacagaaaagggtttgattgtcggttctctagcaaaggcacagggctgttttgttctactactcagggaaagatattggtacagaaacttttaaacaagtttattgtcgaaagtctcacaccttcatcactatccttgatgcattcacctcccggcactcagaatataagtgagatcaacttgagtccaatggaaatcagcacattccgaatccagttgaggtgaacctgactttcacatttggattgagaatcattggcttttatacctttcttggtttgacgtgcaataaagaagcacattattttagcttctggctactgtgagaacatgaattctgtgattctgtgggttttttcttttttcttttaccagtacagtaagaaaaaaaaaaaaaaaaaaaaagccatgctatcaatcaagattctttttttttaaactttctcccatgaactaccaccatcagtatgaattgatgcaacaaatgaagaaatatttaaagacagcctctcaacagattgtatctcaggttaaatgctaactaattatgtctgtgttgggggttgcgaagagattcttaaaagtatctgtgtgttgatcatcagttttacaaaaacacctatttggctgaaatggaataaaatgtttgtgggtaaaagctaatggccaaaatggttgcaatcattcatactagttagaaaaattatgtgttgaaataagtggaaaagtgcaatccatccacccttatgattaacgtagatgatttttatacctttttctgatgtacctcttgaccttctccttcccttcctaccctttctaagtatttccagaaatacctgattttgaatcattcaacagtagaaaaagaggcatattttcattacttgacaatgtgggatgggtgcaatttattccatcttcactaaaatagaagcaattccataggtaccataaacctattttaggtaccacaaggtgtctttttacacagctcatttgaatacaggtgttctgagaaggggtttctattttaaaattaccatatcaaaataaatgtgccttatttttttataagtcttgttaaatcagtgtccatattactgtttggggaagggggaatgttgtggggtctgggagagggtgggtactttctatgacacataaattgtgtaatttttgcctgacaatgctggccacattctgatctgtttcattaaatttgtggtgatgttactctaaacattttgactatttgaatgtactgagatgtcagaaaacaaaacaaggaaggaaaatattgttaattaaaatgtgctgctgccaaggaaactgcaacttgaagcaaggattttgtaaaatgcaaaatccagctactgtttccatttcacagtagttaactatattaaagagagaatgctttaaaattgatcttgttttgaaacccacttttatgtagctcatcatggtttatcttactaaggaatatgtttgttcattcagttctcaacttttgtatgtgctaaccttaaagtgaagttctgagcccgtgtgccattacagtgcttttaataaaatttatttgggattattgtttccttaacattaaaataatagcgacatttagactatgcaattttagcatagaaaggagtctttgagtatgtacagttttgaaaattctctttgagataattgatttcatattctgtggctttcaacctccatttacctcttgtcattccaacatctttatagagaaataaaaacccaatttctctttcaccatttagtttgattatcatctggattttcactcaagatgcagctcctaagattattgttatgttaaattcataaactccttcacctttaataattaaggaaacaataccagtgttgataaagatattacaaggggtaatttcatgcaataaacatgtaccgtaagttttcttccacatattttgggaaaaaactaaaaaaagaaaaaggacttcctttttgtggacatctacagatgttagggttgccagaagcaaatcccaggaatgagatcagtattttcattgcatcttaaatgtataaccttcctgtgggagttcagtttgtctgtggttaagtgggtgtgcttaatcattctcgaaattgtgatcagatgaaataaaaaaaaaatcttgatgcaataacagtggttttgccacttctggttgtttgcgatggatctgtcccatgtcagtctggggttttattcagcttgtgttgctaccagcagttcacaggtaaagcagaaattctctttaaccagcaagtttctgctttttaaggttacttttagaataaatcatcagggaaacagagaggatgctttgctttgggttgtagtcaaaaactgattaaataatttaatgtctctggcacacactaaaaaccatacacttcagttgtgatctcagtggcatatttatttggttaggtttcgttacatttattattacagatgttcagttgaccaagtagttcagtgttttctttcctttttttggaaattttagtttgagtttgtgactgcagtgttcaagaactcagcatccttgttttctacaaatactgattaaaataaaatgctgtaaaatgtgatgtaaaacattatcatgatcttcccatgcctttgttgtacttgtgccgaagtgttttgatattcctttgtctggaagaaaatgtttgctttcattttgatcattttgttcaccttggaatcaacaggttttgatattttctcttggaagattttatatctttttgggaatatgtaatataagatctctaataaaagataatcttatcatgta

SEQ ID NO: 11917 - DNA, 2870 bp, Homo sapiens
  source 1..2870: mol_type = unassigned DNA
gttccaagtttggagcttttagctgccagccctggcccatcatgtagctgcagcacagccttccctaacgttgcaactgggggaaaaatcactttccagtctgttttgcaaggtgtgcatttccatcttgattccctgaaagtccatctgctgcatcggtcaagagaaactccacttgcatgaagattgcacgcctgcagcttgcatctttgttgcaaaactagctacagaagagaagcaaggcaaagtcttttgtgctcccctcccccatcaaaggaaaggggaaaatgtctcagtcgaaaggcaagaagcgaaaccctggccttaaaattccaaaagaagcatttgaacaacctcagaccagttccacaccacctcgagatttagactccaaggcttgcatttctattggaaatcagaactttgaggtgaaggcagatgacctggagcctataatggaactgggacgaggtgcgtacggggtggtggagaagatgcggcacgtgcccagcgggcagatcatggcagtgaagcggatccgagccacagtaaatagccaggaacagaaacggctactgatggatttggatatttccatgaggacggtggactgtccattcactgtcaccttttatggcgcactgtttcgggagggtgatgtgtggatctgcatggagctcatggatacatcactagataaattctacaaacaagttattgataaaggccagacaattccagaggacatcttagggaaaatagcagtttctattgtaaaagcattagaacatttacatagtaagctgtctgtcattcacagagacgtcaagccttctaatgtactcatcaatgctctcggtcaagtgaagatgtgcgattttggaatcagtggctacttggtggactctgttgctaaaacaattgatgcaggttgcaaaccatacatggcccctgaaagaataaacccagagctcaaccagaagggatacagtgtgaagtctgacatttggagtctgggcatcacgatgattgagttggccatccttcgatttccctatgattcatggggaactccatttcagcagctcaaacaggtggtagaggagccatcgccacaactcccagcagacaagttctctgcagagtttgttgactttacctcacagtgcttaaagaagaattccaaagaacggcctacatacccagagctaatgcaacatccatttttcaccctacatgaatccaaaggaacagatgtggcatcttttgtaaaactgattcttggagactaaaaagcagtggacttaatcggttgaccctactgtggattggtgggtttcggggtgaagcaagttcactacagcatcaatagaaagtcatctttgagataatttaaccctgcctctcagagggttttctctcccaattttctttttactccccctcttaagggggccttggaatctatagtatagaatgaactgtctagatggatgaattatgataaaggcttaggacttcaaaaggtgattaaatatttaatgatgtgtcatatgagtcctcaagcttctcagacttctcttattctttacaaaatgaatgcattggccctgacaaaaaggtgctacggtagtgatgaaattataagtagatttgtagtttgtcccatttattattttaatatttatgtttaagtgcttggttgaaaagattccattttatacaagaagggagattcaaaaaaaaaatataaggttgggttagcaatatttatagggcttttattttttaagttcaattgtgtctgtggtccagaagaaattatttaatatgcatctttgagaatattataaaaatatcaaaaaggagctcttcttgtgaaatgtctgttccagctgttgtgactgctgccatttttgcaaacatctgcccaatcctgggtgatcaccacatcttttaggggaagtgacaagatgctctggtcatactctttttcccaactttggaaaacataaaaatcactcatataacagctcaaagagtaaaacatttggttcttctgacacttgtggtatagtattagtggaaagtgatttgtaatatgattttatatccacctacctattcatctacctgtgtgtatgtgtgtgtttgtgtgtctatttggcaattcacaagtcctgccaagtggtttctatgagcatctctgtttggtaaggaggacaattgtcagttttgagggggacatgtgttaaatcacagaaaaaaatggtgccttcttctgcgtttgtccctcctgccatgtgtaagttgtaaggattgcctttgtagttaatgtactctttggctttgtttgtttgttttcttcttcagtgaagcagccttactattcatagaagggctagaataggagaaaatgaaaggtagtgagtaattctttgataagatgaggaaataatgggaaaggttgaattaattcctgggcatggactaccagatgaccacaagttgcgttgaggccgcatctttcttcagcagcgtgcaatagctggctcctctataggagatgagcttcattgggagttcctagcaagttgactaaacagcaaaagttctttctcgtgggtaaatatacccacaggttctatgatttgtagctctaggtttcttgatgatcaaggagtgaagtaattgacagggaaaatatagacctatgataaataaccaggaagcattgcttttggacaaggaaggacagagggttttgattttaaaaagaagaaaaaaaaaccttattttttctttcttggcctcaagttcaatatggagaggattgcttccctgaatcctctcttccttccccttttaga

SEQ ID NO: 11918 - DNA, 1542 bp, Homo sapiens
  source 1..1542: mol_type = unassigned DNA
agcttttagctgccagccctggcccatcatgtagctgcagcacagccttccctaacgttgcaactgggggaaaaatcactttccagtctgttttgcaaggtgtgcatttccatcttgattccctgaaagtccatctgctgcatcggtcaagagaaactccacttgcatgaagattgcacgcctgcagcttgcatctttgttgcaaaactagctacagaagagaagcaaggcaaagtcttttgtgctcccctcccccatcaaaggaaaggggaaaatgtctcagtcgaaaggcaagaagcgaaaccctggccttaaaattccaaaagaagcatttgaacaacctcagaccagttccacaccacctcgagatttagactccaaggcttgcatttctattggaaatcagaactttgaggtgaaggcagatgacctggagcctataatggaactgggacgaggtgcgtacggggtggtggagaagatgcggcacgtgcccagcgggcagatcatggcagtgaagcggatccgagccacagtaaatagccaggaacagaaacggctactgatggatttggatatttccatgaggacggtggactgtccattcactgtcaccttttatggcgcactgtttcgggagggtgatgtgtggatctgcatggagctcatggatacatcactagataaattctacaaacaagttattgataaaggccagacaattccagaggacatcttagggaaaatagcagtttctattgtaaaagcattagaacatttacatagtaagctgtctgtcattcacagaggtaagcatccatgagctgccttggctgttcctttgataaagttcatctctttcacctggagtccgtctctacccccagtcccccatgggtggaagtagaattgactcaggcaagagaactaaggggctttcctttgagattggatagcaaaccatataagtagtattccttatcatggctgaggacataagaagaagacgtgatctttgtcttacatccaaattgaatataaacacttgttagcaagcagagctatgagatcatatcattgagaattttagagaatatgataaaaattgatcttgtattggccatcacatgagagcttgttggaaaagaatcatgggtctcaagatcaaatgaattggaatttgcattttaacaagatttccgggtgattcttgtgcacatgaaagtgtgaaaaactctggtataaagtagagccctttcagacaacaggaggcaggatataatgatttatctcttcctctttccttttcttccttcttattggcctgttatctcttcaaccagccattcatccatccatccattcattcattttctatccccccattcatccatttattcatcttttaaaatcacttttaaaatgtaatagatcccctgagaggtatctgagaagaaaatatattctgattaaattatgcatcaggattcttatagggaagtaagataaatgtacaaaaaaaaaaaaaaaaaaaaaaaaaaa

SEQ ID NO: 11919 - DNA, 1851 bp, Homo sapiens
  source 1..1851: mol_type = unassigned DNA
tgaaagtccatctgctgcatcggtcaagagaaactccacttgcatgaagattgcacgcctgcagcttgcatctttgttgcaaaactagctacagaagagaagcaaggcaaagtcttttgtgctcccctcccccatcaaaggaaaggggaaaatgtctcagtcgaaaggcaagaagcgaaaccctggccttaaaattccaaaagaagcatttgaacaacctcagaccagttccacaccacctcgagatttagactccaaggcttgcatttctattggaaatcagaactttgaggtgaaggcagatgacctggagcctataatggaactgggacgagcggatccgagccacagtaaatagccaggaacagaaacggctactgatggatttggatatttccatgaggacggtggactgtccattcactgtcaccttttatggcgcactgtttcgggagggtgatgtgtggatctgcatggagctcatggatacatcactagataaattctacaaacaagttattgataaaggccagacaattccagaggacatcttagggaaaatagcagtttctattgtaaaagcattagaacatttacatagtaagctgtctgtcattcacagagacgtcaagccttctaatgtactcatcaatgctctcggtcaagtgaagatgtgcgattttggaatcagtggctacttggtggactctgttgctaaaacaattgatgcaggttgcaaaccatacatggcccctgaaagaataaacccagagctcaaccagaagggatacagtgtgaagtctgacatttggagtctgggcatcacgatgattgagttggccatccttcgatttccctatgattcatggggaactccatttcagcagctcaaacaggtggtagaggagccatcgccacaactcccagcagacaagttctctgcagagtttgttgactttacctcacagtgcttaaagaagaattccaaagaacggcctacatacccagagctaatgcaacatccatttttcaccctacatgaatccaaaggaacagatgtggcatcttttgtaaaactgattcttggagactaaaaagcagtggacttaatcggttgaccctactgtggattggtgggtttcggggtgaagcaagttcactacagcatcaatagaaagtcatctttgagataatttaaccctgcctctcagagggttttctctcccaattttctttttactccccctcttaagggggccttggaatctatagtatagaatgaactgtctagatggatgaattatgataaaggcttaggacttcaaaaggtgattaaatatttaatgatgtgtcatatgagtcctcaagcttctcagacttctcttattctttacaaaatgaatgcattggccctgacaaaaaggtgctacggtagtgatgaaattataagtagatttgtagtttgtcccatttattattttaatatttatgtttaagtgcttggttgaaaagattccattttatacaagaagggagattcaaaaaaaaaatataaggttgggttagcaatatttatagggcttttattttttaagttcaattgtgtctgtggtccagaagaaattatttaatatgcatctttgagaatattataaaaatatcaaaaaggagctcttcttgtgaaatgtctgttccagctgttgtgactgctgccatttttgcaaacatctgcccaatcctgggtgatcaccacatcttttaggggaagtgacaagatgctctggtcatactctttttcccaactttggaaaacataaaaatcactcatataacagctcaaagagtaaaaca

SEQ ID NO: 11920 - DNA, 669 bp, Homo sapiens
  source 1..669: mol_type = unassigned DNA
acatagacccacttcccttctcccttcctgaagctgcaatttcctcggaacaatgagcttgcagaggtttgctgcaatccgaacttgaggagggggtggagtctgttcagttctgtttctccttgccgaagtgtggtctttggagctaagtgaagaatgacttctgttaggttttcctctgctggtcttccttgcagcctcgaaaacctcaccagagtcgcctctgctggtctcttactgtgctgctctgtcagagatgggcaagcaagaagcgaaaccctggccttaaaattccaaaagaagcatttgaacaacctcagaccagttccacaccacctcgagatttagactccaaggcttgcatttctattggaaatcagaactttgaggtgaaggcagatgacctggagcctataatggaactgggacgaggtgcgtacggggtggtggagaagatgcggcacgtgcccagcgggcagatcatggcagtgaagcggatccgagccacagtaaatagccaggaacagaaacggctactgatggatttggatatttccatgaggacggtggactgtccattcactgtcaccttttatggcgcactgtttcgggagggtgatgtgtggatctgcatggagctcatggatacatcactagataaattctaca

SEQ ID NO: 11921 - DNA, 632 bp, Homo sapiens
  source 1..632: mol_type = unassigned DNA
ctgtttctccttgccgaagtgtggtctttggagctaagtgaagaatgacttctgttaggttttcctctgctggtcttccttgcagcctcgaaaacctcaccagagtcgcctctgctggtctcttactgtgctgctctgtcagagatgggcaatagagacaggatttcaccgtgtcggccaggatggtctccatctcctgacctcgtgattcgcccgtctcggcctcccaaagtgctgggactacaggcatgagccaccgcgcctgggcagaaggcaagaagcgaaaccctggccttaaaattccaaaagaagcatttgaacaacctcagaccagttccacaccacctcgagatttagactccaaggcttgcatttctattggaaatcagaactttgaggtgaaggcagatgacctggagcctataatggaactgggacgaggtgcgtacggggtggtggagaagatgcggcacgtgcccagcgggcagatcatggcagtgaagcggatccgagccacagtaaatagccaggaacagaaacggctactgatggatttggatatttccatgaggacggtggactgtccattcactgtcaccttttatggcgcactgtttcgggagggtgatgtg

SEQ ID NO: 11922 - DNA, 1512 bp, Homo sapiens
  source 1..1512: mol_type = unassigned DNA
gcagagtgttgctgtgtgtgcttgtgatttgtattttatttgatgtaaacgtgaaggcagagtattttctaacactgtaattcaactaggttttgtgtctcctggatctatttttttttcttgttgttctgaggagctgatatacttggaaatattaggtttaagatatgcagatgtccaacttatatacatagtcaagggtttagagtctggagacaggaggctggcaatttcaactaggaggcagtaaattcagggcaagaagcgaaaccctggccttaaaattccaaaagaagcatttgaacaacctcagaccagttccacaccacctcgagatttagactccaaggcttgcatttctattggaaatcagaactttgaggtgaaggcagatgacctggagcctataatggaactgggacgaggtgcgtacggggtggtggagaagatgcggcacgtgcccagcgggcagatcatggcagtgaagcggatccgagccacagtaaatagccaggaacagaaacggctactgatggatttggatatttccatgaggacggtggactgtccattcactgtcaccttttatggcgcactgtttcgggagggtgatgtgtggatctgcatggagctcatggatacatcactagataaattctacaaacaagttattgataaaggccagacaattccagaggacatcttagggaaaatagcagtttctattgtaaaagcattagaacatttacatagtaagctgtctgtcattcacagagacgtcaagccttctaatgtactcatcaatgctctcggtcaagtgaagatgtgcgattttggaatcagtggctacttggtggactctgttgctaaaacaattgatgcaggttgcaaaccatacatggcccctgaaagaataaacccagagctcaaccagaagggatacagtgtgaagtctgacatttggagtctgggcatcacgatgattgagttggccatccttcgatttccctatgattcatggggaactccatttcagcagctcaaacaggtggtagaggagccatcgccacaactcccagcagacaagttctctgcagagtttgttgactttacctcacagtgcttaaagaagaattccaaagaacggcctacatacccagagctaatgcaacatccatttttcaccctacatgaatccaaaggaacagatgtggcatcttttgtaaaactgattcttggagactaaaaagcagtggacttaatcggttgaccctactgtggattggtgggtttcggggtgaagcaagttcactacagcatcaatagaaagtcatctttgagataatttaaccctgcctctcagagggttttctctcccaattttctttttactccccctcttaagggggccttggaatctatagtatagaatgaactgtctagatggatgaattatgataaaggcttaggacttcaaaaggtgattaaatatttaatgatgtgtcatatgag

SEQ ID NO: 11923 - DNA, 3076 bp, Homo sapiens
  source 1..3076: mol_type = unassigned DNA
aaaaaaaaaaaaaaaaagttgcaatgacaaattctcagtggggagaaagggcagatcttcctaggaaaagagagttggcattctcatcctgatgtttgccccctggactaatgaaaaacctcattcatgaccacagtctgtatttgagaagctctgtcctacctggtgcttgggttcttaacactcacagacttcctgggtaggaagtggcgctttgaatggagacatgagagctgcctgtgcaggtcagctctttcctttgccgcagtctctttctctgctatcttgctatgatttagtccttaactttttccttttgtctttccccataggcaagaagcgaaaccctggccttaaaattccaaaagaagcatttgaacaacctcagaccagttccacaccacctcgagatttagactccaaggcttgcatttctattggaaatcagaactttgaggtgaaggcagatgacctggagcctataatggaactgggacgaggtgcgtacggggtggtggagaagatgcggcacgtgcccagcgggcagatcatggcagtgaagcggatccgagccacagtaaatagccaggaacagaaacggctactgatggatttggatatttccatgaggacggtggactgtccattcactgtcaccttttatggcgcactgtttcgggaggtaggtgacccttcaattcaaagtccaagaggaacaataacttaaaaagaagtttctttgatcacgtaaatgccttcacaatcatggagctctttcttgtttgacacatcttgtatacgggggtttacgtgtgtgcaatgatgacatgccctggagcaaggttggattgaaattatggtattttcaaatgtggttagcctttttaagatgtggagtttctcgtctcctttcttttttgttttgtttatcttggcagaactttctatatcgcctatagactgatttgcttagatctcttataatttgaaatattctggtcttttgactgctttaggagcttcatctagcctacttgtgtactatatagacttactttgatctcttttctctacctctgttttccactttagcgttatatggattatgaggcttcacctcattaaaaccagctttttgactgactgttgctggtatttagtgtgagagatacgacatggaggaggcatctagacctaactcctagacagtggtatcagtaaaggcctggatatctggggttgtattgcttatgtctgttagtaattagattccatttttcattaaggggtaggagagcacatgcaggttctgcttggctacctactggtttgctctttgtagataaccttgcttatttgtaaattcctttatgatcttgacagaagacactgtatttccccccaaaattcaagaaagaaatagttaattcttcaggatagggtttactgttttttttttttatttttatttctccctttttcatccttttaaacaattcctgaaacaattggtctccagggtgatgtgtggatctgcatggagctcatggatacatcactagataaattctacaaacaagttattgataaaggccagacaattccagaggacatcttagggaaaatagcagtttctgtgagtacattttgatccctactgcaaggataatgtgagaaataaagtccctatgtgtctttggacctcagtatgaagaaatactacctgggccacagctactattcgtacatgtctgttgacatttattggtggatggataaatacatgctttcctttctgagcactgtgtagaagattctagcactgctttggtttggcagactctaggttaaatgactctaagtgctgcattcatcagctatgaccacattcctggtgtctatattctgacattagtttattttgattttcatttatggatttttaaaatgttctcttgagactagtaggcatagaagaaagcagaaggaaaataaatagaaagaaggtcttctaccttcatggctattcaggctcaggagggtggagagaaaaagaaggaggacaaatgaacaagacagatgagggagacatcctctctgatataagatacagtcctctctggtggatggagtccaatttgtgtaacttcctatgtattttcctagataggaccaccactatttgagaaaatatctcactggtaacctaaagccaaggataataaaccttgatatacttaacattcaatttctttccagcaatgtgataaataaatctatcttgtgtttctcttgcagattgtaaaagcattagaacatttacatagtaagctgtctgtcattcacagaggtaagcatccatgagctgccttggctgttcctttgataaagttcatctctttcacctggagtccgtctctacccccagtcccccatgggtggaagtagaattgactcaggcaagagaactaaggggctttcctttgagattggatagcaaaccatataagtagtattccttatcatggctgaggacataagaagaagacgtgatctttgtcttacatccaaattgaatataaacacttgttagcaagcagagctatgagatcatatcattgagaattttagagaatatgataaaaattgatcttgtattggccatcacatgagagcttgttggaaaagaatcatgggtctcaagatcaaatgaattggaatttgcattttaacaagatttccgggtgattcttgtgcacatgaaagtgtgaaaaactctggtataaagtagagccctttcagacaacaggaggcaggatataatgatttatctcttcctctttccttttcttccttcttattggcctgttatctcttcaaccagccattcatccatccatccattcattcattttctatccccccattcatccatttattcatcttttaaaatcacttttaaaatgtaatagatcccctgagaggtatctgagaagaaaatatattctgattaaattatgcatcaggattcttatagggaagtaagataaatgtacaaaaaaaaaaaaaaaaaaaa

SEQ ID NO: 11924 - DNA, 431 bp, Homo sapiens
  source 1..431: mol_type = unassigned DNA
aaaatatatatggcttctagattttaatgattatttttttttctttaagcttaaagaagaattccaaagaacggcctacatacccagagctaatgcaacatccatttttcaccctacatgaatccaaaggaacagatgtggcatcttttgtaaaactgattcttggagactaaaaagcagtggacttaatcggttgaccctactgtggattggtgggtttcggggtgaagcaagttcactacagcatcaatagaaagtcatctttgagataatttaaccctgcctctcagagggttttctctcccaattttctttttactccccctcttaagggggccttggaatctatagtatagaatgaactgtctagatggatgaattatgataaaggcttaggacttcaaaaggtgattaaatatttaatgatgtgt

SEQ ID NO: 11925 - DNA, 1509 bp, Homo sapiens
  source 1..1509: mol_type = unassigned DNA
gcagagtgttgctgtgtgtgcttgtgatttgtattttatttgatgtaaacgtgaaggcagagtattttctaacactgtaattcaactaggttttgtgtctcctggatctatttttttttcttgttgttctgaggagctgatatacttggaaatattaggtttaagatatgcagatgtccaacttatatacatagtcaagggtttagagtctggagacaggaggctggcaatttcaactaggaggcagtaaattcaggcaagaagcgaaaccctggccttaaaattccaaaagaagcatttgaacaacctcagaccagttccacaccacctcgagatttagactccaaggcttgcatttctattggaaatcagaactttgaggtgaaggcagatgacctggagcctataatggaactgggacgaggtgcgtacggggtggtggagaagatgcggcacgtgcccagcgggcagatcatggcagtgaagcggatccgagccacagtaaatagccaggaacagaaacggctactgatggatttggatatttccatgaggacggtggactgtccattcactgtcaccttttatggcgcactgtttcgggagggtgatgtgtggatctgcatggagctcatggatacatcactagataaattctacaaacaagttattgataaaggccagacaattccagaggacatcttagggaaaatagcagtttctattgtaaaagcattagaacatttacatagtaagctgtctgtcattcacagagacgtcaagccttctaatgtactcatcaatgctctcggtcaagtgaagatgtgcgattttggaatcagtggctacttggtggactctgttgctaaaacaattgatgcaggttgcaaaccatacatggcccctgaaagaataaacccagagctcaaccagaagggatacagtgtgaagtctgacatttggagtctgggcatcacgatgattgagttggccatccttcgatttccctatgattcatggggaactccatttcagcagctcaaacaggtggtagaggagccatcgccacaactcccagcagacaagttctctgcagagtttgttgactttacctcacagtgcttaaagaagaattccaaagaacggcctacatacccagagctaatgcaacatccatttttcaccctacatgaatccaaaggaacagatgtggcatcttttgtaaaactgattcttggagactaaaaagcagtggacttaatcggttgaccctactgtggattggtgggtttcggggtgaagcaagttcactacagcatcaatagaaagtcatctttgagataatttaaccctgcctctcagagggttttctctcccaattttctttttactccccctcttaagggggccttggaatctatagtatagaatgaactgtctagatggatgaattatgataaaggcttaggacttcaaaaggtgattaaatatttaatgatgtgtcatatg

SEQ ID NO: 11926 - DNA, 2111 bp, Homo sapiens
  source 1..2111: mol_type = unassigned DNA
cgggagcggggcggcgggcgccggggctggcatggcgtggccctgtatcagccgcctgtgctgcctggcgcggcgctggaaccagctggaccgctccgacgtggcggtgccgctcactctgcacggctactcggacctcgacagcgaggagccgggcacgggcggcgccgcctcgcgcaggggccagcctcccgcgggcgcccgggattccggccgggacgtgccgctcactcagtaccagcgggacttcggcttgtggaccacgcccgccgggcccaaggatccgccgccggggcgcggaccgggggcgggcggccgcaggggcaaatcctccgcgcagtcctccgcgccacctgcgcccggcgcccgcggggtctacgtgctgcccatcggcgacgcggacgcggctgcagcagtgaccacgtcgtacagacaggaattccaggcttggactggagtgaagccctcaagatccacaaagacaaaaccagcccgagtcatcacaacccacacttcgggatgggacagcagccctggggccggcttccaggtcccagaggtgaggaagaagttcactcctaacccctccgccatctttcaggcctcagctccccggattctcaacgtgtgactgcctgcaccgtgacaccatggctgccgacaggacagggctggggagcggcctcaggacccactgccgcggggctgggcgagagcatggcatgggcccctgcgggagggcacagcccctctcaaagctgtcaccagggccaaagtgctggtgtggagcagatgcaccgatggacttggcacacccagctcagcctcaagcatcctcttgagaagcctgtggaaggctcctgcgttcgttaactgccatctggccgtctctcagttttgaaatctctgaggagcctgaggatcaagtcagttgggaaccgaattggtccatggaagctgaggaatgtggacacatccggcccttgaaagaaccagttatgtccacttttggtggatttcccaggatgcgtgagcacttgattaatttcataacctacagtgagacccttggctcttcctacaaatggcccctgcagttgaagctgttggaatcttgggccgtcacctgcatgactcatggtgatgctgagtatccaggaggaaatttccagaagaaacagaccgtcagtcacgggcttccacttcacagacctccttatggccaagatgagcctcatgttttaacaaaacagttcttgggattgaatgactcacatttaccttgtgctaggttctaaagattgaatccacattttgttactaatgattttcccgctaacataaggatgatgagcagggcactatcatacacactggctgagaactggaactgtttttgggaaggtggcatttgtctcattccctgaaataccttaaaatgtcctctacaccaacccttccgtctaccctgctcacatgtacagtgacggggaactcaccaccttttgaagaggcagttcattttctttgcaaagctctctcctaacttcctccgtaaattccagccagcatggccacatgggtcacgcctggtgccttcacacgtttgaggggtcttcgtctctttttaaagcttagaggtacaagctcaggacagtcttcagtaaggaaatttgtggatttccctttggatctttcttcctctccagcccacaagtggctctagtgagacgagcatttaagctgcaggtggtggcactcgggtctcagagccaccagacgtgcaggtgggacagtggttccagctccgactgcctgtcagcgtccctcccaggtgctagccctggcaggcacagccctcccctcatgccagcaaaggaaatgctcttgatgagaggctcgctttaaagaagcccaaagcgtgtgcttatccaaggggttcagctattcctgacttcacggcttgcatgtttgatttttctaagagaaaagaggctgcctgctgggtgtctgtggaaatgagattaaaaactgtacaatctcagattttactaaaatgcaaaaatgtagtttcagtttcttaaattataagcacgagtcttctcacgctt

SEQ ID NO: 11927 - DNA, 890 bp, Homo sapiens
  source 1..890: mol_type = unassigned DNA
cgggagcgccgcgcgccgggagcggggcggcgggcgccggggctggcatggcgtggccctgtatcagccgcctgtgctgcctggcgcggcgctggaaccagctggaccgctccgacgtggcggtgccgctcactctgcacggctactcggacctcgacagcgaggagccgggcacgggcggcgccgcctcgcgcaggggccagcctcccgcgggcgcccgggattccggccgggacgtgccgctcactcagtaccagcgggacttcggcttgtggaccacgcccgccgggcccaaggatccgccgccggggcgcggaccgggggcgggcggccgcaggggcaaatcctccgcgcagtcctccgcgccacctgcgcccggcgcccgcggggtctacgtgctgcccatcggcgacgcggacgcggctgcagcagtgaccacgtcgtacagacaggaattccaggcttggactggagtgaagccctcaagatccacaaagacaaaaccagcccgagtcatcacaacccacacttcgggatgggacagcagccctggggccggcttccaggcctcagctccccggattctcaacgtgtgactgcctgcaccgtgacaccatggctgccgacaggacagggctggggagcggcctcaggacccactgccgcggggctgggcgagagcatggcatgggcccctgcgggagggcacagcccctctcaaagctgtcaccagggccaaagtgctggtgtggagcagatgcaccgatggacttggcacacccagctcagcctcaagcatcctcttgagaagcctgtggaaggctcctgcgttcgttaactgccatctggccgtctctcagttttgaaatctctgaggagcctgaggatca

SEQ ID NO: 11928 - DNA, 549 bp, Homo sapiens
  source 1..549: mol_type = unassigned DNA
gtgctgcctggcgcggcgctggaaccagctggaccgctccgacgtggcggtgccgctcactctgcacggctactcggacctcgacagcgaggagccgggcacgggcggcgccgcctcgcgcaggggccagcctcccgcgggcgcccgggattccggccgggacgtgccgctcactcagtaccagcgggacttcggcttgtggaccacgcccgccgggcccaaggatccgccgccggggcgcggaccgggggcgggcggccgcaggggcaaatcctccgcgcagtcctccgcgccacctgcgcccggcgcccgcggggtctacgtgctgcccatcggcgacgcggacgcggctgcagcagtgaccacgtcgtacaggaattccaggcttggactggagtgaagccctcaagatccacaaagacaaaaccagcccgagtcatcacaacccacacttcgggatgggacagcagccctggggccggcttccaggtcccagaggtgaggaagaagttcactcctaacccctccgccatctttcaggcctcagct

SEQ ID NO: 11929 - DNA, 360 bp, Homo sapiens
  source 1..360: mol_type = unassigned DNA
ctgcgcccggcgcccgcggggtctacgtgctgcccatcggcgacgcggacgcggctgcagcagtgaccacgtcgtacaggaatagcaagagcttggctgcctggacccctgcccccaattcgggcagaaacacaggatcactgttgaacttgaccctcccagcgccatgccagtgggcctctgggacccccaccttccagctctgggacctgatacaagccactccctccagccttgtcttgtaagatgtacatcatctaagcaaacttaagaaattcagaaagccaaggaaacgaacagagccaggaatcctgaagatgtgaggccactcctaactcaaggttcttgagggagtaccca

SEQ ID NO: 11930 - DNA, 4152 bp, Homo sapiens
  source 1..4152: mol_type = unassigned DNA
gggaaatagcgtctccgtaccctcgccccacctgggctgctcctcggaccgccgctcgtcccagactccaggaggcgccaccaggcctcgctgaccccgctccatatctccgggagccctcagctggtcggccgcggcgaccggaagctccggactgaggtactggttccgcccgccgctcttccagccgagactcggcagcggcggtcggagcggctgccacgccgcacctgcccgcgagggggcgcgccaggcccaggccgcagccgactgccgcgctctctgtccccgccctccgccatccccggactgcgctcacctgtctgggccgctggcctgggaggcgggggccggcgggagccaagccgaggaaagggcggagcggctctccgggcgcgtcatcggagcaccatggcggagctaggagctggcggcgacggccacaggggcggcgacggcgcagtgcgaagcgaaacagcacccgacagctacaaagtgcaagataagaaaaatgcctccagccgccctgcctctgcaatttcaggacaaaataacaaccactcaggaaataaaccagaccctccgcctgtgttacgtgttgatgaccggcagcggctggcccgggagcgacgtgaggaacgggagaaacagctagctgcaagagaaatagtgtggttagaaagagaagagcgagccaggcagcactacgagaagcacctggaagagcggaagaagaggttggaggagcagaggcagaaggaggagcggaggagggctgctgtggaggagaagcggaggcagagacttgaggaggacaaagaacgccacgaagctgttgtacggcgcacaatggaaaggagccagaagccaaaacagaagcataaccgttggtcgtggggaggctctctccatgggagccctagcatccacagtgcagatccagacaggcggtcagtttccaccatgaatctttcgaaatatgttgatcccgtcattagcaagcggctctcctcttcatctgcaactttactaaattctccagatagagctcgccgcctgcagctcagcccatgggagagcagcgttgttaacagactcctgacgcccacacattcgttcctggccagaagtaaaagcacagctgccttgtctggagaagcagcatcttgcagccccatcatcatgccctacaaagctgcacactctagaaattcgatggatcgaccaaaactctttgtaacaccacctgagggctcttctcgcaggaggatcattcatggcacagcgagctataaaaaagaaagagagagagaaaatgtactcttcctcacatctggcacccgaagggctgtatctccatctaatcccaaagcaagacaaccagctcgctcccgactttggcttccgtccaagtctcttcctcatttgcctggcacacccagaccgacatcctccttgccacccggctcagtcaaagctgctcctgctcaggtccggcccccatcccccggcaacatccgccctgtcaagagggaagtcaaagtggagcctgagaagaaagatcctgagaaggaacctcagaaagttgccaatgagccctcactaaagggcagagcacctttagtgaaggtagaagaagccacagttgaagagcggacacctgctgaaccagaagttggccctgctgctccagccatggccccagctccagcctcggccccagctccagcctcggccccagctccagccccggtccccaccccagccatggtctcagccccgtcatccactgtgaatgccagtgcttctgttaagacttctgcaggcaccaccgacccagaggaggccacaaggcttctagctgagaagaggcggctggcccgagagcagagagaaaaggaagaaagggagaggagggagcaggaagagcttgaaagacaaaagagagaggaattggctcaacgtgtggctgaagagaggacgactcgccgtgaggaggagtcgcgcaggctggaagccgagcaggcccgggagaaggaggagcagctgcagcggcaggcggaggagcgggcgctgcgcgagcgggaggaggcagagcgcgcccagaggcagaaagaagaagaagctcgcgttcgtgaagaagcagagagggtccggcaggaacgagagaagcatttccagagagaagagcaagagcgcctggagagaaagaagcgacttgaggagattatgaaaagaaccaggagaacagaagctacagataagaaaaccagtgatcagagaaacggtgatatagccaagggagctctcactggaggaacagaggtgtctgcacttccatgtacaacaaacgctccgggaaatggaaagccagttggcagcccacatgtggttacctcacaccagtcaaaagtgacagtggagagcactcccgatttggaaaaacaaccaaatgaaaatggtgtatctgttcagaatgaaaattttgaagaaattataaacttacccattggatctaaaccatccagattagatgtcaccaacagtgagagcccagaaattcctttgaatccaattttggcctttgatgatgaagggacacttgggcccctgcctcaggtagatggtgttcagacacagcagactgcagaagttatatgagtgtttcttctgaagaaccaaagctgaaatttaatgagaatttctacaattaatggaattcctttcctgctataaaggagcatcccctccacccgttttctagagttcttgaccatcattttgaaaagatttattaaaactagctaaagacaacagactggatagcttttctaataattttcatcaataggaaaaaagaaatacgtctcattcttcaatactttaaaatggctttttccagtgtgctccttcttagcaatcaatatttttctgcattctttaaaagacaagagaatttggttataaaagaaatgggctgactaggcatgatttttttggtcttaaaagcttaacatgtaaaattggcaaaaaaaattttttaccttttataatacttgaaaaataagtacctctttgttctacaagtagaatgaataggagaagagtttaagcctgtttttttaaaatattattgcaaagagctctatttgtagaagcaaattataggcagattaccaggttcttataaatacagcttgtacatggacattctgcaaacccagctgtcacatttttcttgcaactccttttgcaaaagcagactaaaatgttttaaaatgtgaaaaaacattattttttcaaagcaagaaaataatttactgccctcttacataatgtatttataaagtttttccagataaactaatcaaataaattagaataatgtgacaacattacaaatttaatttgttagctgcattccttctgatgttaccacgatagaatgttactgatgattcagggctatttctgaagtctgtatgttgctgctgtccccagtgatggtggacttatctttgccttacctgatcacaaattatgttggggaaaataaagatttaatatttctttaaatagaaaaagaatttggttttgctcgtttaagagcaatgagaaaatgatggaatgttgactgtgtttggcacacaggacacggaccttcatggaagtccttgctctgcgtggcatctgtcagcttttcacctttcattcttattcttcacttttgctgctgagcctagctgtacaaacttgcactttcatttgctaatataaattcagttttattttaccattttagagactactaatgattaaatgtagaaggagagggtgcacatgtttttatgtggagtgtttaaaagataaatttataccactgtaatgtgcagcttttattaaaagagaaattggttgaactgctaggttgaatgagagacttcatctattggactattttttttaatccaggcatatggtctttagtaatggcttgtaatttgtgaaaacattaatttgggggttttccctgttttcagttgtccatgtacacatagtcattatattagaaaagaaatctgttcaacaaacttgtttaatttgtttaaatcaacatagcatgaaacaccaaataaaatgtttgacatagtt

SEQ ID NO: 11931 - DNA, 3119 bp, Homo sapiens
  source 1..3119: mol_type = unassigned DNA
atatcatattttcccctctctgctgtgggctgaatattttactgtgtggtagcaggaagaagattggaaaaaggtgctgcagcaggaagaagctgggatctgattgaacagcagcggtatgcctggatcagctacagctctccgacatgagagactgaagaagaccaatgcaaggccaattcctcttggtttattcaccattaatgaggaagacgaacagcaaaagaatggaaattccagaagaccaaaagcacccgacagctacaaagtgcaagataagaaaaatgcctccagccgccctgcctctgcaatttcaggacaaaataacaaccactcaggaaataaaccagaccctccgcctgtgttacgtgttgatgaccggcagcggctggcccgggagcgacgtgaggaacgggagaaacagctagctgcaagagaaatagtgtggttagaaagagaagagcgagccaggcagcactacgagaagcacctggaagagcggaagaagaggttggaggagcagaggcagaaggaggagcggaggagggctgctgtggaggagaagcggaggcagagacttgaggaggacaaagaacgccacgaagctgttgtacggcgcacaatggaaaggagccagaagccaaaacagaagcataaccgttggtcgtggggaggctctctccatgggagccctagcatccacagtgcagatccagacaggcggtcagtttccaccatgaatctttcgaaatatgttgatcccgtcattagcaagcggctctcctcttcatctgcaactttactaaattctccagatagagctcgccgcctgcagctcagcccatgggagagcagcgttgttaacagactcctgacgcccacacattcgttcctggccagaagtaaaagcacagctgccttgtctggagaagcagcatcttgcagccccatcatcatgccctacaaagctgcacactctagaaattcgatggatcgaccaaaactctttgtaacaccacctgagggctcttctcgcaggaggatcattcatggcacagcgagctataaaaaagaaagagagagagaaaatgtactcttcctcacatctggcacccgaagggctgtatctccatctaatcccaaagcaagacaaccagctcgctcccgactttggcttccgtccaagtctcttcctcatttgcctggcacacccagaccgacatcctccttgccacccggctcagtcaaagctgctcctgctcaggtccggcccccatcccccggcaacatccgccctgtcaagagggaagtcaaagtggagcctgagaagaaagatcctgagaaggaacctcagaaagttgccaatgagccctcactaaagggcagagcacctttagtgaaggtagaagaagccacagttgaagagcggacacctgctgaaccagaagttggccctgctgctccagccatggccccagctccagcctcggccccagctccagcctcggccccagctccagccccggtccccaccccagccatggtctcagccccgtcatccactgtgaatgccagtgcttctgttaagacttctgcaggcaccaccgacccagaggaggccacaaggcttctagctgagaagaggcggctggcccgagagcagagagaaaaggaagaaagggagaggagggagcaggaagagcttgaaagacaaaagagagaggaattggctcaacgtgtggctgaagagaggacgactcgccgtgaggaggagtcgcgcaggctggaagccgagcaggcccgggagaaggaggagcagctgcagcggcaggcggaggagcgggcgctgcgcgagcgggaggaggcagagcgcgcccagaggcagaaagaagaagaagctcgcgttcgtgaagaagcagagagggtccggcaggaacgagagaagcatttccagagagaagagcaagagcgcctggagagaaagaagcgacttgaggagattatgaaaagaaccaggagaacagaagctacagataagaaaaccagtgatcagagaaacggtgatatagccaagggagctctcactggaggaacagaggtgtctgcacttccatgtacaacaaacgctccgggaaatggaaagccagttggcagcccacatgtggttacctcacaccagtcaaaagtgacagtggagagcactcccgatttggaaaaacaaccaaatgaaaatggtgtatctgttcagaatgaaaattttgaagaaattataaacttacccattggatctaaaccatccagattagatgtcaccaacagtgagagcccagaaattcctttgaatccaattttggcctttgatgatgaagggacacttgggcccctgcctcaggtagatggtgttcagacacagcagactgcagaagttatatgagtgtttcttctgaagaaccaaagctgaaatttaatgagaatttctacaattaatggaattcctttcctgctataaaggagcatcccctccacccgttttctagagttcttgaccatcattttgaaaagatttattaaaactagctaaagacaacagactggatagcttttctaataattttcatcaataggaaaaaagaaatacgtctcattcttcaatactttaaaatggctttttccagtgtgctccttcttagcaatcaatatttttctgcattctttaaaagacaagagaatttggttataaaagaaatgggctgactaggcatgatttttttggtcttaaaagcttaacatgtaaaattggcaaaaaaaattttttaccttttataatacttgaaaaataagtacctctttgttctacaagtagaatgaataggagaagagtttaagcctgtttttttaaaatattattgcaaagagctctatttgtagaagcaaattataggcagattaccaggttcttataaatacagcttgtacatggacattctgcaaacccagctgtcacatttttcttgcaactccttttgcaaaagcagactaaaatgttttaaaatgtgaaaaaacattattttttcaaagcaagaaaataatttactgccctcttacataatgtatttata

SEQ ID NO: 11932 - DNA, 2744 bp, Homo sapiens
  source 1..2744: mol_type = unassigned DNA
gatatttggtctttgcctggctgagggacacaaagcaagaagagggagacatgcagatatgttgcaggatattcaagaaagaaggattttagcatggaagacactaaactgtactcacccgacagctacaaagtgcaagataagaaaaatgcctccagccgccctgcctctgcaatttcaggacaaaataacaaccactcaggaaataaaccagaccctccgcctgtgttacgtgttgatgaccggcagcggctggcccgggagcgacgtgaggaacgggagaaacagctagctgcaagagaaatagtgtggttagaaagagaagagcgagccaggcagcactacgagaagcacctggaagagcggaagaagaggttggaggagcagaggcagaaggaggagcggaggagggctgctgtggaggagaagcggaggcagagacttgaggaggacaaagaacgccacgaagctgttgtacggcgcacaatggaaaggagccagaagccaaaacagaagcataaccgttggtcgtggggaggctctctccatgggagccctagcatccacagtgcagatccagacaggcggtcagtttccaccatgaatctttcgaaatatgttgatcccgtcattagcaagcggctctcctcttcatctgcaactttactaaattctccagatagagctcgccgcctgcagctcagcccatgggagagcagcgttgttaacagactcctgacgcccacacattcgttcctggccagaagtaaaagcacagctgccttgtctggagaagcagcatcttgcagccccatcatcatgccctacaaagctgcacactctagaaattcgatggatcgaccaaaactctttgtaacaccacctgagggctcttctcgcaggaggatcattcatggcacagcgagctataaaaaagaaagagagagagaaaatgtactcttcctcacatctggcacccgaagggctgtatctccatctaatcccaaagcaagacaaccagctcgctcccgactttggcttccgtccaagtctcttcctcatttgcctggcacacccagaccgacatcctccttgccacccggctcagtcaaagctgctcctgctcaggtccggcccccatcccccggcaacatccgccctgtcaagagggaagtcaaagtggagcctgagaagaaagatcctgagaaggaacctcagaaagttgccaatgagccctcactaaagggcagagcacctttagtgaaggtagaagaagccacagttgaagagcggacacctgctgaaccagaagttggccctgctgctccagccatggccccagctccagcctcggccccagctccagcctcggccccagctccagccccggtccccaccccagccatggtctcagccccgtcatccactgtgaatgccagtgcttctgttaagacttctgcaggcaccaccgacccagaggaggccacaaggcttctagctgagaagaggcggctggcccgagagcagagagaaaaggaagaaagggagaggagggagcaggaagagcttgaaagacaaaagagagaggaattggctcaacgtgtggctgaagagaggacgactcgccgtgaggaggagtcgcgcaggctggaagccgagcaggcccgggagaaggaggagcagctgcagcggcaggcggaggagcgggcgctgcgcgagcgggaggaggcagagcgcgcccagaggcagaaagaagaagaagctcgcgttcgtgaagaagcagagagggtccggcaggaacgagagaagcatttccagagagaagagcaagagcgcctggagagaaagaagcgacttgaggagattatgaaaagaaccaggagaacagaagctacagataagaaaaccagtgatcagagaaacggtgatatagccaagggagctctcactggaggaacagaggtgtctgcacttccatgtacaacaaacgctccgggaaatggaaagccagttggcagcccacatgtggttacctcacaccagtcaaaagtgacagtggagagcactcccgatttggaaaaacaaccaaatgaaaatggtgtatctgttcagaatgaaaattttgaagaaattataaacttacccattggatctaaaccatccagattagatgtcaccaacagtgagagcccagaaattcctttgaatccaattttggcctttgatgatgaagggacacttgggcccctgcctcaggtagatggtgttcagacacagcagactgcagaagttatatgagtgtttcttctgaagaaccaaagctgaaatttaatgagaatttctacaattaatggaattcctttcctgctataaaggagcatcccctccacccgttttctagagttcttgaccatcattttgaaaagatttattaaaactagctaaagacaacagactggatagcttttctaataattttcatcaataggaaaaaagaaatacgtctcattcttcaatactttaaaatggctttttccagtgtgctccttcttagcaatcaatatttttctgcattctttaaaagacaagagaatttggttataaaagaaatgggctgactaggcatgatttttttggtcttaaaagcttaacatgtaaaattggcaaaaaaaattttttaccttttataatacttgaaaaataagtacctctttgttctacaagtagaatgaataggagaagag

SEQ ID NO: 11933 - DNA, 2633 bp, Homo sapiens
  source 1..2633: mol_type = unassigned DNA
aaaaacaagtagcagcggtatgcctggatcagctacagctctccgacatgagagactgaagaagaccaatgcaaggccaattcctcttggtttattcaccattaatgaggaagacgaacagcaaaagaatggaaattccagaagaccaaaagcacccgacagctacaaagtgcaagataagaaaaatgcctccagccgccctgcctctgcaatttcaggacaaaataacaaccactcaggaaataaaccagaccctccgcctgtgttacgtgttgatgaccggcagcggctggcccgggagcgacgtgaggaacgggagaaacagctagctgcaagagaaatagtgtggttagaaagagaagagcgagccaggcagcactacgagaagcacctggaagagcggaagaagaggttggaggagcagaggcagaaggaggagcggaggagggctgctgtggaggagaagcggaggcagagacttgaggaggacaaagaacgccacgaagctgttgtacggcgcacaatggaaaggagccagaagccaaaacagaagcataaccgttggtcgtggggaggctctctccatgggagccctagcatccacagtgcagctcgccgcctgcagctcagcccatgggagagcagcgttgttaacagactcctgacgcccacacattcgttcctggccagaagtaaaagcacagctgccttgtctggagaagcagcatcttgcagccccatcatcatgccctacaaagctgcacactctagaaattcgatggatcgaccaaaactctttgtaacaccacctgagggctcttctcgcaggaggatcattcatggcacagcgagctataaaaaagaaagagagagagaaaatgtactcttcctcacatctggcacccgaagggctgtatctccatctaatcccaaagcaagacaaccagctcgctcccgactttggcttccgtccaagtctcttcctcatttgcctggcacacccagaccgacatcctccttgccacccggctcagtcaaagctgctcctgctcaggtccggcccccatcccccggcaacatccgccctgtcaagagggaagtcaaagtggagcctgagaagaaagatcctgagaaggaacctcagaaagttgccaatgagccctcactaaagggcagagcacctttagtgaaggtagaagaagccacagttgaagagcggacacctgctgaaccagaagttggccctgctgctccagccatggccccagctccagcctcggccccagctccagcctcggccccagctccagccccggtccccaccccagccatggtctcagccccgtcatccactgtgaatgccagtgcttctgttaagacttctgcaggcaccaccgacccagaggaggccacaaggcttctagctgagaagaggcggctggcccgagagcagagagaaaaggaagaaagggagaggagggagcaggaagagcttgaaagacaaaagagagaggaattggctcaacgtgtggctgaagagaggacgactcgccgtgaggaggagtcgcgcaggctggaagccgagcaggcccgggagaaggaggagcagctgcagcggcaggcggaggagcgggcgctgcgcgagcgggaggaggcagagcgcgcccagaggcagaaagaagaagaagctcgcgttcgtgaagaagcagagagggtccggcaggaacgagagaagcatttccagagagaagagcaagagcgcctggagagaaagaagcgacttgaggagattatgaaaagaaccaggagaacagaagctacagataagaaaaccagtgatcagagaaacggtgatatagccaagggagctctcactggaggaacagaggtgtctgcacttccatgtacaacaaacgctccgggaaatggaaagccagttggcagcccacatgtggttacctcacaccagtcaaaagtgacagtggagagcactcccgatttggaaaaacaaccaaatgaaaatggtgtatctgttcagaatgaaaattttgaagaaattataaacttacccattggatctaaaccatccagattagatgtcaccaacagtgagagcccagaaattcctttgaatccaattttggcctttgatgatgaagggacacttgggcccctgcctcaggtagatggtgttcagacacagcagactgcagaagttatatgagtgtttcttctgaagaaccaaagctgaaatttaatgagaatttctacaattaatggaattcctttcctgctataaaggagcatcccctccacccgttttctagagttcttgaccatcattttgaaaagatttattaaaactagctaaagacaacagactggatagcttttctaataattttcatcaataggaaaaaagaaatacgtctcattcttcaatactttaaaatggctttttccagtgtgctccttcttagcaatcaatatttttctgcattctttaaaagacaagagaatttggttataaaagaaatgggctgactaggcatgatttttttggtcttaaaagcttaacatgtaaaattggcaaaaaaaattttttaccttttataatacttgaaaaataagta

SEQ ID NO: 11934 - DNA, 2317 bp, Homo sapiens
  source 1..2317: mol_type = unassigned DNA
atcctgctgcgctgccgctgagaggaagagggagctgcccagcggcctcacgctgtaaccctctgctgctcttctattccatctaaggaacgccacgaagctgttgtacggcgcacaatggaaaggagccagaagccaaaacagaagcataaccgttggtcgtggggaggctctctccatgggagccctagcatccacagtgcagatccagacaggcggtcagtttccaccatgaatctttcgaaatatgttgatcccgtcattagcaagcggctctcctcttcatctgcaactttactaaattctccagatagagctcgccgcctgcagctcagcccatgggagagcagcgttgttaacagactcctgacgcccacacattcgttcctggccagaagtaaaagcacagctgccttgtctggagaagcagcatcttgcagccccatcatcatgccctacaaagctgcacactctagaaattcgatggatcgaccaaaactctttgtaacaccacctgagggctcttctcgcaggaggatcattcatggcacagcgagctataaaaaagaaagagagagagaaaatgtactcttcctcacatctggcacccgaagggctgtatctccatctaatcccaaagcaagacaaccagctcgctcccgactttggcttccgtccaagtctcttcctcatttgcctggcacacccagaccgacatcctccttgccacccggctcagtcaaagctgctcctgctcaggtccggcccccatcccccggcaacatccgccctgtcaagagggaagtcaaagtggagcctgagaagaaagatcctgagaaggaacctcagaaagttgccaatgagccctcactaaagggcagagcacctttagtgaaggtagaagaagccacagttgaagagcggacacctgctgaaccagaagttggccctgctgctccagccatggccccagctccagcctcggccccagctccagcctcggccccagctccagccccggtccccaccccagccatggtctcagccccgtcatccactgtgaatgccagtgcttctgttaagacttctgcaggcaccaccgacccagaggaggccacaaggcttctagctgagaagaggcggctggcccgagagcagagagaaaaggaagaaagggagaggagggagcaggaagagcttgaaagacaaaagagagaggaattggctcaacgtgtggctgaagagaggacgactcgccgtgaggaggagtcgcgcaggctggaagccgagcaggcccgggagaaggaggagcagctgcagcggcaggcggaggagcgggcgctgcgcgagcgggaggaggcagagcgcgcccagaggcagaaagaagaagaagctcgcgttcgtgaagaagcagagagggtccggcaggaacgagagaagcatttccagagagaagagcaagagcgcctggagagaaagaagcgacttgaggagattatgaaaagaaccaggagaacagaagctacagataagaaaaccagtgatcagagaaacggtgatatagccaagggagctctcactggaggaacagaggtgtctgcacttccatgtacaacaaacgctccgggaaatggaaagccagttggcagcccacatgtggttacctcacaccagtcaaaagtgacagtggagagcactcccgatttggaaaaacaaccaaatgaaaatggtgtatctgttcagaatgaaaattttgaagaaattataaacttacccattggatctaaaccatccagattagatgtcaccaacagtgagagcccagaaattcctttgaatccaattttggcctttgatgatgaagggacacttgggcccctgcctcaggtagatggtgttcagacacagcagactgcagaagttatatgagtgtttcttctgaagaaccaaagctgaaatttaatgagaatttctacaattaatggaattcctttcctgctataaaggagcatcccctccacccgttttctagagttcttgaccatcattttgaaaagatttattaaaactagctaaagacaacagactggatagcttttctaataattttcatcaataggaaaaaagaaatacgtctcattcttcaatactttaaaatggctttttccagtgtgctccttcttagcaatcaatatttttctgcattctttaaaagacaagagaatttggttataaaagaaatgggctgactaggcatgatttttttggtcttaaaagcttaacatgtaaaattggcaaaaaaaattttttacctttt

SEQ ID NO: 11935 - DNA, 4326 bp, Homo sapiens
  source 1..4326: mol_type = unassigned DNA
gggaaatagcgtctccgtaccctcgccccacctgggctgctcctcggaccgccgctcgtcccagactccaggaggcgccaccaggcctcgctgaccccgctccatatctccgggagccctcagctggtcggccgcggcgaccggaagctccggactgaggtactggttccgcccgccgctcttccagccgagactcggcagcggcggtcggagcggctgccacgccgcacctgcccgcgagggggcgcgccaggcccaggccgcagccgactgccgcgctctctgtccccgccctccgccatccccggactgcgctcacctgtctgggccgctggcctgggaggcgggggccggcgggagccaagccgaggaaagggcggagcggctctccgggcgcgtcatcggagcaccatggcggagctaggagctggcggcgacggccacaggggcggcgacggcgcagtgcgaagcgaaacagcacccgacagctacaaagtgcaagataagaaaaatgcctccagccgccctgcctctgcaatttcaggacaaaataacaaccactcaggaaataaaccagaccctccgcctgtgttacgtgttgatgaccggcagcggctggcccgggagcgacgtgaggaacgggagaaacagctagatccagacaggcggtcagtttccaccatgaatctttcgaaatatgttgatcccgtcattagcaagcggctctcctcttcatctgcaactttactaaattctccagatagagctcgccgcctgcagctcagcccatgggagagcagcgttgttaacagactcctgacgcccacacattcgttcctggccagaagtaaaagcacagctgccttgtctggagaagcagcatcttgcagccccatcatcatgccctacaaagctgcacactctagaaattcgatggatcgaccaaaactctttgtaacaccacctgagggctcttctcgcaggaggatcattcatggcacagcgagctataaaaaagaaagagagagagaaaatgtactcttcctcacatctggcacccgaagggctgtatctccatctaatcccaaagcaagacaaccagctcgctcccgactttggcttccgtccaagtctcttcctcatttgcctggcacacccagaccgacatcctccttgccacccggctcagtcaaagctgctcctgctcaggtccggcccccatcccccggcaacatccgccctgtcaagagggaagtcaaagtggagcctgagaagaaagatcctgagaaggaacctcagaaagttgccaatgagccctcactaaagggcagagcacctttagtgaaggtagaagaagccacagttgaagagcggacacctgctgaaccagaagttggccctgctgctccagccatggccccagctccagcctcggccccagctccagcctcggccccagctccagccccggtccccaccccagccatggtctcagccccgtcatccactgtgaatgccagtgcttctgttaagacttctgcaggcaccaccgacccagaggaggccacaaggcttctagctgagaagaggcggctggcccgagagcagagagaaaaggaagaaagggagaggagggagcaggaagagcttgaaagacaaaagagagaggaattggctcaacgtgtggctgaagagaggacgactcgccgtgaggaggagtcgcgcaggctggaagccgagcaggcccgggagaaggaggagcagctgcagcggcaggcggaggagcgggcgctgcgcgagcgggaggaggcagagcgcgcccagaggcagaaagaagaagaagctcgcgttcgtgaagaagcagagagggtccggcaggaacgagagaagcatttccagagagaagagcaagagcgcctggagagaaagaagcgacttgaggagattatgaaaagaaccaggagaacagaagctacagataagaaaaccagtgatcagagaaacggtgatatagccaagggagctctcactggaggaacagaggtgtctgcacttccatgtacaacaaacgctccgggaaatggaaagccagttggcagcccacatgtggttacctcacaccagtcaaaagtgacagtggagagcactcccgatttggaaaaacaaccaaatgaaaatggtgtatctgttcagaatgaaaattttgaagaaattataaacttacccattggatctaaaccatccagattagatgtcaccaacagtgagagcccagaaattcctttgaatccaattttggcctttgatgatgaagggacacttgggcccctgcctcaggtagatggtgttcagacacagcagactgcagaagttatatgagtgtttcttctgaagaaccaaagctgaaatttaatgagaatttctacaattaatggaattcctttcctgctataaaggagcatcccctccacccgttttctagagttcttgaccatcattttgaaaagatttattaaaactagctaaagacaacagactggatagcttttctaataattttcatcaataggaaaaaagaaatacgtctcattcttcaatactttaaaatggctttttccagtgtgctccttcttagcaatcaatatttttctgcattctttaaaagacaagagaatttggttataaaagaaatgggctgactaggcatgatttttttggtcttaaaagcttaacatgtaaaattggcaaaaaaaattttttaccttttataatacttgaaaaataagtacctctttgttctacaagtagaatgaataggagaagagtttaagcctgtttttttaaaatattattgcaaagagctctatttgtagaagcaaattataggcagattaccaggttcttataaatacagcttgtacatggacattctgcaaacccagctgtcacatttttcttgcaactccttttgcaaaagcagactaaaatgttttaaaatgtgaaaaaacattattttttcaaagcaagaaaataatttactgccctcttacataatgtatttataaagtttttccagataaactaatcaaataaattagaataatgtgacaacattacaaatttaatttgttagctgcattccttctgatgttaccacgatagaatgttactgatgattcagggctatttctgaagtctgtatgttgctgctgtccccagtgatggtggacttatctttgccttacctgatcacaaattatgttggggaaaataaagatttaatatttctttaaatagaaaaagaatttggttttgctcgtttaagagcaatgagaaaatgatggaatgttgactgtgtttggcacacaggacacggaccttcatggaagtccttgctctgcgtggcatctgtcagcttttcacctttcattcttattcttcacttttgctgctgagcctagctgtacaaacttgcactttcatttgctaatataaattcagttttattttaccattttagagactactaatgattaaatgtagaaggagagggtgcacatgtttttatgtggagtgtttaaaagataaatttataccactgtaatgtgcagcttttattaaaagagaaattggttgaactgctaggttgaatgagagacttcatctattggactattttttttaatccaggcatatggtctttagtaatggcttgtaatttgtgaaaacattaatttgggggttttccctgttttcagttgtccatgtacacatagtcattatattagaaaagaaatctgttcaacaaacttgtttaatttgtttaaatcaacatagcatgaaacaccaaataaaatgtttgacatagttttacttttagctttctcatatgttataacttcactcagattgattcttgagtcttcagattgtccttcatttaactcagtgacattttcctagcctcctgttgattaagcatataggatagccttatttaaaatttagagcagtaggtgtattttggctgtttttctttttcatgtgtgtttttaaactttagtcatcattagcaaacggaaagccttctaagtaatcaagttttaattagaagtggtgcaaaattcttaattatattgtgttaaagagcagcgctgccagagaatgaccctgacctttacaatggctggcttgctttttggccagcactggaaaaatctatatttacttgcagaccttaaggaggtcttcagtattcaccctacattaaggggagcgctcaggaatcaaatatggccctcagtatgaaatgagagtgaatgggct

SEQ ID NO: 11936 - DNA, 4375 bp, Homo sapiens
  source 1..4375: mol_type = unassigned DNA
gtaaccctctgctggtgagttcccagaacccagcatcctgcaagctgccgcttctcagctggggagatggagccgctctgggcccttcttgattaggatatgttagggttgtcagggcaactgttaacggcagcatatcatattttcccctctctgctgtgggctgaatattttactgtgtggtagcaggaagaagattggaaaaaggtgctgcagcaggaagaagctgggatctgattgaacagcacccgacagctacaaagtgcaagataagaaaaatgcctccagccgccctgcctctgcaatttcaggacaaaataacaaccactcaggaaataaaccagaccctccgcctgtgttacgtgttgatgaccggcagcggctggcccgggagcgacgtgaggaacgggagaaacagctagctgcaagagaaatagtgtggttagaaagagaagagcgagccaggcagcactacgagaagcacctggaagagcggaagaagaggttggaggagcagaggcagaaggaggagcggaggagggctgctgtggaggagaagcggaggcagagacttgaggaggacaaagaacgccacgaagctgttgtacggcgcacaatggaaaggagccagaagccaaaacagaagcataaccgttggtcgtggggaggctctctccatgggagccctagcatccacagtgcagatccagacaggcggtcagtttccaccatgaatctttcgaaatatgttgatcccgtcattagcaagcggctctcctcttcatctgcaactttactaaattctccagatagagctcgccgcctgcagctcagcccatgggagagcagcgttgttaacagactcctgacgcccacacattcgttcctggccagaagtaaaagcacagctgccttgtctggagaagcagcatcttgcagccccatcatcatgccctacaaagctgcacactctagaaattcgatggatcgaccaaaactctttgtaacaccacctgagggctcttctcgcaggaggatcattcatggcacagcgagctataaaaaagaaagagagagagaaaatgtactcttcctcacatctggcacccgaagggctgtatctccatctaatcccaaagcaagacaaccagctcgctcccgactttggcttccgtccaagtctcttcctcatttgcctggcacacccagaccgacatcctccttgccacccggctcagtcaaagctgctcctgctcaggtccggcccccatcccccggcaacatccgccctgtcaagagggaagtcaaagtggagcctgagaagaaagatcctgagaaggaacctcagaaagttgccaatgagccctcactaaagggcagagcacctttagtgaaggtagaagaagccacagttgaagagcggacacctgctgaaccagaagttggccctgctgctccagccatggccccagctccagcctcggccccagctccagcctcggccccagctccagccccggtccccaccccagccatggtctcagccccgtcatccactgtgaatgccagtgcttctgttaagacttctgcaggcaccaccgacccagaggaggccacaaggcttctagctgagaagaggcggctggcccgagagcagagagaaaaggaagaaagggagaggagggagcaggaagagcttgaaagacaaaagagagaggaattggctcaacgtgtggctgaagagaggacgactcgccgtgaggaggagtcgcgcaggctggaagccgagcaggcccgggagaaggaggagcagctgcagcggcaggcggaggagcgggcgctgcgcgagcgggaggaggcagagcgcgcccagaggcagaaagaagaagaagctcgcgttcgtgaagaagcagagagggtccggcaggaacgagagaagcatttccagagagaagagcaagagcgcctggagagaaagaagcgacttgaggagattatgaaaagaaccaggagaacagaagctacagataagaaaaccagtgatcagagaaacggtgatatagccaagggagctctcactggaggaacagaggtgtctgcacttccatgtacaacaaacgctccgggaaatggaaagccagttggcagcccacatgtggttacctcacaccagtcaaaagtgacagtggagagcactcccgatttggaaaaacaaccaaatgaaaatggtgtatctgttcagaatgaaaattttgaagaaattataaacttacccattggatctaaaccatccagattagatgtcaccaacagtgagagcccagaaattcctttgaatccaattttggcctttgatgatgaagggacacttgggcccctgcctcaggtagatggtgttcagacacagcagactgcagaagttatatgagtgtttcttctgaagaaccaaagctgaaatttaatgagaatttctacaattaatggaattcctttcctgctataaaggagcatcccctccacccgttttctagagttcttgaccatcattttgaaaagatttattaaaactagctaaagacaacagactggatagcttttctaataattttcatcaataggaaaaaagaaatacgtctcattcttcaatactttaaaatggctttttccagtgtgctccttcttagcaatcaatatttttctgcattctttaaaagacaagagaatttggttataaaagaaatgggctgactaggcatgatttttttggtcttaaaagcttaacatgtaaaattggcaaaaaaaattttttaccttttataatacttgaaaaataagtacctctttgttctacaagtagaatgaataggagaagagtttaagcctgtttttttaaaatattattgcaaagagctctatttgtagaagcaaattataggcagattaccaggttcttataaatacagcttgtacatggacattctgcaaacccagctgtcacatttttcttgcaactccttttgcaaaagcagactaaaatgttttaaaatgtgaaaaaacattattttttcaaagcaagaaaataatttactgccctcttacataatgtatttataaagtttttccagataaactaatcaaataaattagaataatgtgacaacattacaaatttaatttgttagctgcattccttctgatgttaccacgatagaatgttactgatgattcagggctatttctgaagtctgtatgttgctgctgtccccagtgatggtggacttatctttgccttacctgatcacaaattatgttggggaaaataaagatttaatatttctttaaatagaaaaagaatttggttttgctcgtttaagagcaatgagaaaatgatggaatgttgactgtgtttggcacacaggacacggaccttcatggaagtccttgctctgcgtggcatctgtcagcttttcacctttcattcttattcttcacttttgctgctgagcctagctgtacaaacttgcactttcatttgctaatataaattcagttttattttaccattttagagactactaatgattaaatgtagaaggagagggtgcacatgtttttatgtggagtgtttaaaagataaatttataccactgtaatgtgcagcttttattaaaagagaaattggttgaactgctaggttgaatgagagacttcatctattggactattttttttaatccaggcatatggtctttagtaatggcttgtaatttgtgaaaacattaatttgggggttttccctgttttcagttgtccatgtacacatagtcattatattagaaaagaaatctgttcaacaaacttgtttaatttgtttaaatcaacatagcatgaaacaccaaataaaatgtttgacatagttttacttttagctttctcatatgttataacttcactcagattgattcttgagtcttcagattgtccttcatttaactcagtgacattttcctagcctcctgttgattaagcatataggatagccttatttaaaatttagagcagtaggtgtattttggctgtttttctttttcatgtgtgtttttaaactttagtcatcattagcaaacggaaagccttctaagtaatcaagttttaattagaagtggtgcaaaattcttaattatattgtgttaaagagcagcgctgccagagaatgaccctgacctttacaatggctggcttgctttttggccagcactggaaaaatctatatttacttgcagaccttaaggaggtcttcagtattcaccctacattaaggggagcgctcaggaatcaaatatggccctcagtatgaaatgagagtgaatgggct

SEQ ID NO: 11937 - DNA, 4536 bp, Homo sapiens
  source 1..4536: mol_type = unassigned DNA
agtgggagggggctggtaggggaggtggggaagctgctgctaggtgaggggaactgcagggcctcagttgccaagtggctggtactatctgtcagctgtttgcaaactgtttacccataggggatctattacaagtgctcaaatgaacaggcagcttaggaactagcagcttcctgggagctgcaattacataagcatatatttttaatataatcacaattaaaaaaaaaaaaaacaagtagcagcggtatgcctggatcagctacagctctccgacatgagagactgaagaagaccaatgcaaggccaattcctcttggtttattcaccattaatgaggaagacgaacagcaaaagaatggaaattccagaagaccaaaagcacccgacagctacaaagtgcaagataagaaaaatgcctccagccgccctgcctctgcaatttcaggacaaaataacaaccactcaggaaataaaccagaccctccgcctgtgttacgtgttgatgaccggcagcggctggcccgggagcgacgtgaggaacgggagaaacagctagctgcaagagaaatagtgtggttagaaagagaagagcgagccaggcagcactacgagaagcacctggaagagcggaagaagaggttggaggagcagaggcagaaggaggagcggaggagggctgctgtggaggagaagcggaggcagagacttgaggaggacaaagaacgccacgaagctgttgtacggcgcacaatggaaaggagccagaagccaaaacagaagcataaccgttggtcgtggggaggctctctccatgggagccctagcatccacagtgcagatccagacaggcggtcagtttccaccatgaatctttcgaaatatgttgatcccgtcattagcaagcggctctcctcttcatctgcaactttactaaattctccagatagagctcgccgcctgcagctcagcccatgggagagcagcgttgttaacagactcctgacgcccacacattcgttcctggccagaagtaaaagcacagctgccttgtctggagaagcagttatccccatttgtcctcgttcagcatcttgcagccccatcatcatgccctacaaagctgcacactctagaaattcgatggatcgaccaaaactctttgtaacaccacctgagggctcttctcgcaggaggatcattcatggcacagcgagctataaaaaagaaagagagagagaaaatgtactcttcctcacatctggcacccgaagggctgtatctccatctaatcccaaagcaagacaaccagctcgctcccgactttggcttccgtccaagtctcttcctcatttgcctggcacacccagaccgacatcctccttgccacccggctcagtcaaagctgctcctgctcaggtccggcccccatcccccggcaacatccgccctgtcaagagggaagtcaaagtggagcctgagaagaaagatcctgagaaggaacctcagaaagttgccaatgagccctcactaaagggcagagcacctttagtgaaggtagaagaagccacagttgaagagcggacacctgctgaaccagaagttggccctgctgctccagccatggccccagctccagcctcggccccagctccagcctcggccccagctccagccccggtccccaccccagccatggtctcagccccgtcatccactgtgaatgccagtgcttctgttaagacttctgcaggcaccaccgacccagaggaggccacaaggcttctagctgagaagaggcggctggcccgagagcagagagaaaaggaagaaagggagaggagggagcaggaagagcttgaaagacaaaagagagaggaattggctcaacgtgtggctgaagagaggacgactcgccgtgaggaggagtcgcgcaggctggaagccgagcaggcccgggagaaggaggagcagctgcagcggcaggcggaggagcgggcgctgcgcgagcgggaggaggcagagcgcgcccagaggcagaaagaagaagaagctcgcgttcgtgaagaagcagagagggtccggcaggaacgagagaagcatttccagagagaagagcaagagcgcctggagagaaagaagcgacttgaggagattatgaaaagaaccaggagaacagaagctacagataagaaaaccagtgatcagagaaacggtgatatagccaagggagctctcactggaggaacagaggtgtctgcacttccatgtacaacaaacgctccgggaaatggaaagccagttggcagcccacatgtggttacctcacaccagtcaaaagtgacagtggagagcactcccgatttggaaaaacaaccaaatgaaaatggtgtatctgttcagaatgaaaattttgaagaaattataaacttacccattggatctaaaccatccagattagatgtcaccaacagtgagagcccagaaattcctttgaatccaattttggcctttgatgatgaagggacacttgggcccctgcctcaggtagatggtgttcagacacagcagactgcagaagttatatgagtgtttcttctgaagaaccaaagctgaaatttaatgagaatttctacaattaatggaattcctttcctgctataaaggagcatcccctccacccgttttctagagttcttgaccatcattttgaaaagatttattaaaactagctaaagacaacagactggatagcttttctaataattttcatcaataggaaaaaagaaatacgtctcattcttcaatactttaaaatggctttttccagtgtgctccttcttagcaatcaatatttttctgcattctttaaaagacaagagaatttggttataaaagaaatgggctgactaggcatgatttttttggtcttaaaagcttaacatgtaaaattggcaaaaaaaattttttaccttttataatacttgaaaaataagtacctctttgttctacaagtagaatgaataggagaagagtttaagcctgtttttttaaaatattattgcaaagagctctatttgtagaagcaaattataggcagattaccaggttcttataaatacagcttgtacatggacattctgcaaacccagctgtcacatttttcttgcaactccttttgcaaaagcagactaaaatgttttaaaatgtgaaaaaacattattttttcaaagcaagaaaataatttactgccctcttacataatgtatttataaagtttttccagataaactaatcaaataaattagaataatgtgacaacattacaaatttaatttgttagctgcattccttctgatgttaccacgatagaatgttactgatgattcagggctatttctgaagtctgtatgttgctgctgtccccagtgatggtggacttatctttgccttacctgatcacaaattatgttggggaaaataaagatttaatatttctttaaatagaaaaagaatttggttttgctcgtttaagagcaatgagaaaatgatggaatgttgactgtgtttggcacacaggacacggaccttcatggaagtccttgctctgcgtggcatctgtcagcttttcacctttcattcttattcttcacttttgctgctgagcctagctgtacaaacttgcactttcatttgctaatataaattcagttttattttaccattttagagactactaatgattaaatgtagaaggagagggtgcacatgtttttatgtggagtgtttaaaagataaatttataccactgtaatgtgcagcttttattaaaagagaaattggttgaactgctaggttgaatgagagacttcatctattggactattttttttaatccaggcatatggtctttagtaatggcttgtaatttgtgaaaacattaatttgggggttttccctgttttcagttgtccatgtacacatagtcattatattagaaaagaaatctgttcaacaaacttgtttaatttgtttaaatcaacatagcatgaaacaccaaataaaatgtttgacatagttttacttttagctttctcatatgttataacttcactcagattgattcttgagtcttcagattgtccttcatttaactcagtgacattttcctagcctcctgttgattaagcatataggatagccttatttaaaatttagagcagtaggtgtattttggctgtttttctttttcatgtgtgtttttaaactttagtcatcattagcaaacggaaagccttctaagtaatcaagttttaattagaagtggtgcaaaattcttaattatattgtgttaaagagcagcgctgccagagaatgaccctgacctttacaatggctggcttgctttttggccagcactggaaaaatctatatttacttgcagaccttaaggaggtcttcagtattcaccctacattaaggggagcgctcaggaatcaaatatggccctcagtatgaaatgagagtgaatgggct

SEQ ID NO: 11938 - DNA, 4497 bp, Homo sapiens
  source 1..4497: mol_type = unassigned DNA
gggaaatagcgtctccgtaccctcgccccacctgggctgctcctcggaccgccgctcgtcccagactccaggaggcgccaccaggcctcgctgaccccgctccatatctccgggagccctcagctggtcggccgcggcgaccggaagctccggactgaggtactggttccgcccgccgctcttccagccgagactcggcagcggcggtcggagcggctgccacgccgcacctgcccgcgagggggcgcgccaggcccaggccgcagccgactgccgcgctctctgtccccgccctccgccatccccggactgcgctcacctgtctgggccgctggcctgggaggcgggggccggcgggagccaagccgaggaaagggcggagcggctctccgggcgcgtcatcggagcaccatggcggagctaggagctggcggcgacggccacaggggcggcgacggcgcagtgcgaagcgaaacagcacccgacagctacaaagtgcaagataagaaaaatgcctccagccgccctgcctctgcaatttcaggacaaaataacaaccactcaggaaataaaccagaccctccgcctgtgttacgtgttgatgaccggcagcggctggcccgggagcgacgtgaggaacgggagaaacagctagctgcaagagaaatagtgtggttagaaagagaagagcgagccaggcagcactacgagaagcacctggaagagcggaagaagaggttggaggagcagaggcagaaggaggagcggaggagggctgctgtggaggagaagcggaggcagagacttgaggaggacaaagaacgccacgaagctgttgtacggcgcacaatggaaaggagccagaagccaaaacagaagcataaccgttggtcgtggggaggctctctccatgggagccctagcatccacagtgcagctcgccgcctgcagctcagcccatgggagagcagcgttgttaacagactcctgacgcccacacattcgttcctggccagaagtaaaagcacagctgccttgtctggagaagcagcatcttgcagccccatcatcatgccctacaaagctgcacactctagaaattcgatggatcgaccaaaactctttgtaacaccacctgagggctcttctcgcaggaggatcattcatggcacagcgagctataaaaaagaaagagagagagaaaatgtactcttcctcacatctggcacccgaagggctgtatctccatctaatcccaaagcaagacaaccagctcgctcccgactttggcttccgtccaagtctcttcctcatttgcctggcacacccagaccgacatcctccttgccacccggctcagtcaaagctgctcctgctcaggtccggcccccatcccccggcaacatccgccctgtcaagagggaagtcaaagtggagcctgagaagaaagatcctgagaaggaacctcagaaagttgccaatgagccctcactaaagggcagagcacctttagtgaaggtagaagaagccacagttgaagagcggacacctgctgaaccagaagttggccctgctgctccagccatggccccagctccagcctcggccccagctccagcctcggccccagctccagccccggtccccaccccagccatggtctcagccccgtcatccactgtgaatgccagtgcttctgttaagacttctgcaggcaccaccgacccagaggaggccacaaggcttctagctgagaagaggcggctggcccgagagcagagagaaaaggaagaaagggagaggagggagcaggaagagcttgaaagacaaaagagagaggaattggctcaacgtgtggctgaagagaggacgactcgccgtgaggaggagtcgcgcaggctggaagccgagcaggcccgggagaaggaggagcagctgcagcggcaggcggaggagcgggcgctgcgcgagcgggaggaggcagagcgcgcccagaggcagaaagaagaagaagctcgcgttcgtgaagaagcagagagggtccggcaggaacgagagaagcatttccagagagaagagcaagagcgcctggagagaaagaagcgacttgaggagattatgaaaagaaccaggagaacagaagctacagataagaaaaccagtgatcagagaaacggtgatatagccaagggagctctcactggaggaacagaggtgtctgcacttccatgtacaacaaacgctccgggaaatggaaagccagttggcagcccacatgtggttacctcacaccagtcaaaagtgacagtggagagcactcccgatttggaaaaacaaccaaatgaaaatggtgtatctgttcagaatgaaaattttgaagaaattataaacttacccattggatctaaaccatccagattagatgtcaccaacagtgagagcccagaaattcctttgaatccaattttggcctttgatgatgaagggacacttgggcccctgcctcaggtagatggtgttcagacacagcagactgcagaagttatatgagtgtttcttctgaagaaccaaagctgaaatttaatgagaatttctacaattaatggaattcctttcctgctataaaggagcatcccctccacccgttttctagagttcttgaccatcattttgaaaagatttattaaaactagctaaagacaacagactggatagcttttctaataattttcatcaataggaaaaaagaaatacgtctcattcttcaatactttaaaatggctttttccagtgtgctccttcttagcaatcaatatttttctgcattctttaaaagacaagagaatttggttataaaagaaatgggctgactaggcatgatttttttggtcttaaaagcttaacatgtaaaattggcaaaaaaaattttttaccttttataatacttgaaaaataagtacctctttgttctacaagtagaatgaataggagaagagtttaagcctgtttttttaaaatattattgcaaagagctctatttgtagaagcaaattataggcagattaccaggttcttataaatacagcttgtacatggacattctgcaaacccagctgtcacatttttcttgcaactccttttgcaaaagcagactaaaatgttttaaaatgtgaaaaaacattattttttcaaagcaagaaaataatttactgccctcttacataatgtatttataaagtttttccagataaactaatcaaataaattagaataatgtgacaacattacaaatttaatttgttagctgcattccttctgatgttaccacgatagaatgttactgatgattcagggctatttctgaagtctgtatgttgctgctgtccccagtgatggtggacttatctttgccttacctgatcacaaattatgttggggaaaataaagatttaatatttctttaaatagaaaaagaatttggttttgctcgtttaagagcaatgagaaaatgatggaatgttgactgtgtttggcacacaggacacggaccttcatggaagtccttgctctgcgtggcatctgtcagcttttcacctttcattcttattcttcacttttgctgctgagcctagctgtacaaacttgcactttcatttgctaatataaattcagttttattttaccattttagagactactaatgattaaatgtagaaggagagggtgcacatgtttttatgtggagtgtttaaaagataaatttataccactgtaatgtgcagcttttattaaaagagaaattggttgaactgctaggttgaatgagagacttcatctattggactattttttttaatccaggcatatggtctttagtaatggcttgtaatttgtgaaaacattaatttgggggttttccctgttttcagttgtccatgtacacatagtcattatattagaaaagaaatctgttcaacaaacttgtttaatttgtttaaatcaacatagcatgaaacaccaaataaaatgtttgacatagttttacttttagctttctcatatgttataacttcactcagattgattcttgagtcttcagattgtccttcatttaactcagtgacattttcctagcctcctgttgattaagcatataggatagccttatttaaaatttagagcagtaggtgtattttggctgtttttctttttcatgtgtgtttttaaactttagtcatcattagcaaacggaaagccttctaagtaatcaagttttaattagaagtggtgcaaaattcttaattatattgtgttaaagagcagcgctgccagagaatgaccctgacctttacaatggctggcttgctttttggccagcactggaaaaatctatatttacttgcagaccttaaggaggtcttcagtattcaccctacattaaggggagcgctcaggaatcaaatatggccctcagtatgaaatgagagtgaatgggct

SEQ ID NO: 11939 - DNA, 6248 bp, Homo sapiens
  source 1..6248: mol_type = unassigned DNA
ggaaggcgccgcggcctcggcttggttcagctgggctgggttcccccacccggcaacccctcctccaggcagcctgctgtggggccgggcgggggtcgggccgtgggtccccaggggagaaggagagcaaggcctgtctctccttgggagacgactcccccaagggccgttccccatcctccgccagccccgggaaggactcagccccttgactcggcgcctcagccaggccctggtcagggaacacgacttggccaggcccaggggatcctccaggtctcacgccaagccttgcccccagccaggaagcccgcggtgatcgggctgctggacgtattcactcctgatgagaccctggatgacttcacggacttttacctggtgatgccgttcatgggcaccgacctgggcaagctcatgaaacatgagaagctaggcgaggaccggatccagttcctcgtgtaccagatgctgaaggggctgaggtatatccacgctgccggcatcatccacagagacctgaagcccggcaacctggctgtgaacgaagactgtgagctgaagatcctggacttcggcctggccaggcaggcagacagtgagatgactgggtacgtggtgacccggtggtaccgggctcccgaggtcatcttgaattggatgcgctacacgcagacggtggacatctggtctgtgggctgcatcatggcggagatgatcacaggcaagacgctgttcaagggcagcgaccacctggaccagctgaaggagatcatgaaggtgacggggacgcctccggctgagtttgtgcagcggctgcagagcgatgaggccaagaactacatgaagggcctccccgaattggagaagaaggattttgcctctatcctgaccaatgcaagccctctggctgtgaacctcctggagaagatgctggtgctggacgcggagcagcgggtgacggcaggcgaggcgctggcccatccctacttcgagtccctgcacgacacggaagatgagccccaggtccagaagtatgatgactcctttgacgacgttgaccgcacactggatgaatggaagcgtgttacttacaaagaggtgctcagcttcaagcctccccggcagctgggggccagggtctccaaggagacgcctctgtgaagatctctgggctccggggtggcagtgaggaccaccttcaccttccacctgagaggggactctcgttgccaccttgaccttggctggggcttgcatcccaaggcatccatcagagcagacgcccgggttccatggaccctcctccccacggccatgcctctgctcttgggcgcccatcatggaggagcacctgaactttctggacaagacctctggccgacctggggatggcctctgatccctggagcagtggcccacttgcccggtgctctcagaaacctcagagctggtggggctccagatcaggccttggcctctgagccctgcctgctctgggccatgcagaggaaggacagagggtgggcgcagggcaccaactcagggacatcccctctcctgggcgacgtcagtggaccttcctgcacccccagcctggaatgtaaatcagctgtgtggtgcccgcgtggctggaaggaaatagacccttttgtagctccctgttctggctgtgcgtcctcatgccgggtcccaccttaagacctccgggcccttggcctgcatgtagaggaggctggcctgatagctcagacccttagagccaggaggggggcctgagcatcccatctctcccaggccacaaagctggtgcccacttcccccaggcctgtgccagtgatcttcgaacccccacgttagggcttggcccctccccttttacggggtgacctgctaatggcttagactctaagccactgtgtgtggatcctgaagccagacccaggggcagggcctgatggggaggagtgttaggatctaccctagctctctgcatcctccaatgccagcaggtccctggggggagggggcacgctgggcacgttgagacccctgtggtgaagtggtgagcgccagccagtccctggggggacggggcacattggacatgttgagacccctctggcccctgtggtggattggtgagcgcagagggctgggttttattcttgatcaaacctctagcccctactaccctgctccagtggtatcttcgtgcccaggccgccctctgcaggccactcggtgtttccaagggtggcggctggaacacaggccatgggcacctccaaacctgtcccagggcaggggttacagcagagagaccagtgaggggcagggcagggcaggccaggtgtcctcggtggacatgcccacagctggcccagccaaagtggacctgatgagctgccacgacagatgggccttctctgcccagcgaccctcatgcctctccagggcatccgggcctgggggacgtgatcgccatcagttccggagccacgctgacttgtggcatggctgctgtccacactgggcccaaagtgtgggcccataggtggcctgaggactgggggccccaaaattctgtgacccagctggatgtgaactcccgcgggggcagggtgtcccctgggctccagggggcctcaggtttcctctcgggcatcttcctccgtggctgtgcccgtgcctcctatcttcctcagtcccccaccatgctaccgcaaccccggtccagtgtccccacctccaccgaccttgactctgctcttgggccaggggtcttcttggagctagaaccggactcactccctccttaaacctcgggggcggtgctgcgcctccatgcagccacgaccaccgccctgagccggccgcagcgccacctgcctccccgcgggctcctcccgcctcgtggcctttgccctgcagacccctcgcccccctcgcctttcaccccaggtcttcctgcgcccgggccgggtgggccttggggctgcgctggaccctgacccagctggtgcagaacggggctctcatgggcaggctcggccacgggcgttcgggtggggctgcggcgaccactcgcctaaggccgggggaccccgcccctcttggaggggatcggggcggggccaatggggaggcggagccgcagcgcagctccgagggctggcggctcggggcgccgaggcttccgcgcccgctggttcctcgctccggggcggagctcgcgatagcgaccgggagcagggcgcggggcgggacccaggtccgaggcgaggaagccggaagccaggcgcggggagcctcccccttcgactgcagcctcgctccgtgccttctgcgcgcctgggatcccggagcctgcctaggttctgtgcgctcccgcccaggccggtgcccgccgcccgcctgcgccccaggcaggtcccaggcctccggctgctcccggccgaaggtggggacaggcagtggcaggcaccactagcgagggcgtttgggaacccagggtgaccacggcgcagccatggggaccgcgcttgtgtaccatgaggacatgacggccacccggctgctctgggacgagtaagtgggacctggccgaggtggggtgcggggagggacctctgaactgagctcctcatctgccccagccccgagtgcgagatcgagcgtcctgagcgcctgaccgcagccctggatcgcctgcggcagcgcggcctggaacagaggtgtctgcggttgtcagcccgcgaggcctcggaagaggagctgggcctggtgcacaggtcaggacgggggcaggccccacgatggggggcggggcgggcagcccagctagaaacctaagaacctgggcctaccccgagcctgccagcctcgaatacagagcctctccctatgcacctcgggtgggctcacaggcttgaggaagtgacagggtggccactcccaccatgaatcccaggtccccgcctcccgcccccctgctcctgctggtgaccctgcctctcctgcctgcccatctgcatgcagcccagagtatgtatccctggtcagggagacccaggtcctaggcaaggaggagctgcaggcgctgtccggacagttcgacgccatctacttccacccggtgcgtgtccccggacacactcacctgtgcagacacacatgcacgtgcctttgagcgttcacagccacggccgccaaccccagccagtgtcccctggtccatacacatgacattgccctgcacacctgcctgctggcactgccagagcctggggctggcctgttctgctcagcagctggtgtcttgcagcctggcacaagtgtgggtatggcctgcaaagggcagcagggaaggcagggggctcatctgcgcccctgcgcccacagagtacctttcactgcgcgcggctggccgcaggggctggactgcagctggtggacgctgtgctcactggagctgtgcaaaatgggcttgccctggtgaggcctcccgggcaccatggccagagggcggctgccaacgggttctgtgtgttcaacaacgtggccatagcagctgcacatgccaagcagaaacacgggctacacaggatcctcgtcgtggactgggatgtgcaccatggccaggggatccagtatctctttgaggatgaccccagcgtcctttacttctcctggcaccgctatgagcatgggcgcttctggcctttcctgcgagagtcagatgcagacgcagtggggcggggacagggcctcggcttcactgtcaacctgccctggaaccaggtgcccaccctcaagccccaggtccccacccagccccctccccctgggcccctcccctcccccacagttcaccctcaagccccaggtccccacccaccccctcccccgggcccctcccctgccccacagttcaggatgtagcctgggatgtcctgccaggttgggatgggaaacgctgactacgtggctgccttcctgcacctgctgctcccactggcctttgagtttgaccctgagctggtgctggtctcggcaggatttgactcagccatcggggaccctgaggggcaaatgcaggccacgccagagtgcttcgcccacctcacacagctgctgcaggtgctggccggcggccgggtctgtgccgtgctggagggcggctaccacctggagtcactggcggagtcagtgtgcatgacagtacagacgctgctgggtgacccggccccacccctgtcagggccaatggcgccatgtcagagtgccctagagtccatccagagtgcccgtgctgcccaggccccgcactggaagagcctccagcagcaagatgtgaccgctgtgccgatgagccccagcagccactccccagaggggaggcctccacctctgctgcctgggggtccagtgtgtaaggcagctgcatctgcaccgagctccctcctggaccagccgtgcctctgccccgcaccctctgtccgcaccgctgttgccctgacaacgccggatatcacattggttctgccccctgacgtcatccaacaggaagcgtcagccctgagggaggagacagaagcctgggccaggccacacgagtccctggcccgggaggaggccctcactgcacttgggaagctcctgtacctcttagatgggatgctggatgggcaggtgaacagtggtatagcagccactccagcctctgctgcagcagccaccctggatgtggctgttcggagaggcctgtcccacggagcccagaggctgctgtgcgtggccctgggacagctggaccggcctccagacctcgcccatgacgggaggagtctgtggctgaacatcaggggcaaggaggcggctgccctatccatgttccatgtctccacgccactgccagtgatgaccggtggtttcctgagctgcatcttgggcttggtgctgcccctggcctatggcttccagcctgacctggtgctggtggcgctggggcctggccatggcctgcagggcccccacgctgcactcctggctgcaatgcttcgggggctggcagggggccgagtcctggccctcctggaggagaggacgtccaggccctgatgtacctgagagggcagctggagcctcagtggaagatgttgcagtgccatcctcacctggtggcttgaaatcggccaaggtgggagcatttacaccgcagaaatgacaccgcacgccagcgcccc

SEQ ID NO: 11940 - DNA, 1459 bp, Homo sapiens
  source 1..1459: mol_type = unassigned DNA
tccgccccgcagctcggccgtggacggccgcaccggcgctaaggtggccatcaagaagctgtatcggcctttccagtccgagctgttcgccaagcgcgcctaccgcgagctgcgcctgctcaagcacatgcgccacgagaacgtgatcgggctgctggacgtattcactcctgatgagaccctggatgacttcacggacttttacctggtgatgccgttcatgggcaccgacctgggcaagctcatgaaacatgagaagctaggcgaggaccggatccagttcctcgtgtaccagatgctgaaggggctgagggacctgaagcccggcaacctggctgtgaacgaagactgtgagctgaagatcctggacttcggcctggccaggcaggcagacagtgagatgactgggtacgtggtgacccggtggtaccgggctcccgaggtcatcttgaattggatgcgctacacgcagacggtggacatctggtctgtgggctgcatcatggcggagatgatcacaggcaagacgctgttcaagggcagcgaccacctggaccagctgaaggagatcatgaaggtgacggggacgcctccggctgagtttgtgcagcggctgcagagcgatgaggccaagaactacatgaagggcctccccgaattggagaagaaggattttgcctctatcctgaccaatgcaagccctctggctgtgaacctcctggagaagatgctggtgctggacgcggagcagcgggtgacggcaggcgaggcgctggcccatccctacttcgagtccctgcacgacacggaagatgagccccaggtccagaagtatgatgactcctttgacgacgttgaccgcacactggatgaatggaagcgtgttacttacaaagaggtgctcagcttcaagcctccccggcagctgggggccagggtctccaaggagacgcctctgtgaagatctctgggctccggggtggcagtgaggaccaccttcaccttccacctgagaggggactctcgttgccaccttgaccttggctggggcttgcatcccaaggcatccatcagagcagacgcccgggttccatggaccctcctccccacggccatgcctctgctcttgggcgcccatcatggaggagcacctgaactttctggacaagacctctggccgacctggggatggcctctgatccctggagcagtggcccacttgcccggtgctctcagaaacctcagagctggtggggctccagatcaggccttggcctctgagccctgcctgctctgggccatgcagaggaaggacagagggtgggcgcagggcaccaactcagggacatcccctctcctgggcgacgtcagtggaccttcctgcacccccagcctggaatgtaaatcagctgtgtggtgcccgcgtggctggaaggaaatagacccttttgtagctccc

SEQ ID NO: 11941 - DNA, 1785 bp, Homo sapiens
  source 1..1785: mol_type = unassigned DNA
gcaggctctgcggggtgggcagctcccgggcctgccatgagctctccgccgcccgcccgcagtggcttttaccgccaggaggtgaccaagacggcctgggaggtgcgcgccgtgtaccgggacctgcagcccgtgggctcgggcgcctacggcgcggtgtgctcggccgtggacggccgcaccggcgctaaggtggccatcaagaagctgtatcggcctttccagtccgagctgttcgccaagcgcgcctaccgcgagctgcgcctgctcaagcacatgcgccacgagaacgtgatcgggctgctggacgtattcactcctgatgagaccctggatgacttcacggacttttacctggtgatgccgttcatgggcaccgacctgggcaagctcatgaaacatgagaagctaggcgaggaccggatccagttcctcgtgtaccagatgctgaaggggctgaggtatatccacgctgccggcatcatccacagagtgagtcccggtggagaagccgctcatcagccctcccccagtgcaatccccccgcctccacgtcccacctgtgaggatgtgatggggtctgggtgctgagccacgccctatgcacagcccctggtgggaacctgcctgggtgcccaggacctgaagcccggcaacctggctgtgaacgaagactgtgagctgaagatcctggacttcggcctggccaggcaggcagacagtgagatgactgggtacgtggtgacccggtggtaccgggctcccgaggtcatcttgaattggatgcgctacacgcagacggtggacatctggtctgtgggctgcatcatggcggagatgatcacaggcaagacgctgttcaagggcagcgaccacctggaccagctgaaggagatcatgaaggtgacggggacgcctccggctgagtttgtgcagcggctgcagagcgatgaggccaagaactacatgaagggcctccccgaattggagaagaaggattttgcctctatcctgaccaatgcaagccctctggctgtgaacctcctggagaagatgctggtgctggacgcggagcagcgggtgacggcaggcgaggcgctggcccatccctacttcgagtccctgcacgacacggaagatgagccccaggtccagaagtatgatgactcctttgacgacgttgaccgcacactggatgaatggaagcgtgttacttacaaagaggtgctcagcttcaagcctccccggcagctgggggccagggtctccaaggagacgcctctgtgaagatctctgggctccggggtggcagtgaggaccaccttcaccttccacctgagaggggactctcgttgccaccttgaccttggctggggcttgcatcccaaggcatccatcagagcagacgcccgggttccatggaccctcctccccacggccatgcctctgctcttgggcgcccatcatggaggagcacctgaactttctggacaagacctctggccgacctggggatggcctctgatccctggagcagtggcccacttgcccggtgctctcagaaacctcagagctggtggggctccagatcaggccttggcctctgagccctgcctgctctgggccatgcagaggaaggacagagggtgggcgcagggcaccaactcagggacatcccctctcctgggcgacgtcagtggaccttcctgcacccccagcctggaatgtaaatcagctgtgtggtgcccgcgtggctggaaggaaatagacccttttgtagctccc

SEQ ID NO: 11942 - DNA, 1918 bp, Homo sapiens
  source 1..1918: mol_type = unassigned DNA
cggcggcggccgcctcgggtttccggaggggccggagggcgggcgagggcgtcacgtgcgcgccgcccgcgggccggttggtccccgggcgggggaggggccgtgcgcagcctgggtcggggtcgggccggggtcggcacctgggacatccctgagggaagggccgggagcgggagcgccccagcggccggcgggcgggcgggcgagcggacgagcggcgcggagccggcccgaggcgcgcgccgagggagccccgtccccggtcgtgggggcaccgcccgcaggctctgcggggtgggcagctcccgggcctgccatgagctctccgccgcccgcccgcagtggcttttaccgccaggaggtgaccaagacggcctgggaggtgcgcgccgtgtaccgggacctgcagcccgtgggctcgggcgcctacggcgcggtgtgctcggccgtggacggccgcaccggcgctaaggtggccatcaagaagctgtatcggcctttccagtccgagctgttcgccaagcgcgcctaccgcgagctgcgcctgctcaagcacatgcgccacgagaacgtgatcgggctgctggacgtattcactcctgatgagaccctggatgacttcacggacttttacctggtgatgccgttcatgggcaccgacctgggcaagctcatgaaacatgagaagctaggcgaggaccggatccagttcctcgtgtaccagatgctgaaggggctgaggtatatccacgctgccggcatcatccacagagacctgaagcccggcaacctggctgtgaacgaagactgtgagctgaagatcctggacttcggcctggccaggcaggcagacagtgagatgactgggtacgtggtgacccggtggtaccgggctcccgaggtcatcttgaattggatgcgctacacgcagacggtggacatctggtctgtgggctgcatcatggcggagatgatcacaggcaagacgctgttcaagggcagcgaccacctggaccagctgaaggagatcatgaaggtgacggggacgcctccggctgagtttgtgcagcggctgcagagcgatgaggccaagaactacatgaagggcctccccgaattggagaagaaggattttgcctctatcctgaccaatgcaagccctctggctgtgaacctcctggagaagatgctggtgctggacgcggagcagcgggtgacggcaggcgaggcgctggcccatccctacttcgagtccctgcacgacacggaagatgagccccaggtccagaagtatgatgactcctttgacgacgttgaccgcacactggatgaatggaagcgtgttacttacaaagaggtgctcagcttcaagcctccccggcagctgggggccagggtctccaaggagacgcctctgtgaagatctctgggctccggggtggcagtgaggaccaccttcaccttccacctgagaggggactctcgttgccaccttgaccttggctggggcttgcatcccaaggcatccatcagagcagacgcccgggttccatggaccctcctccccacggccatgcctctgctcttgggcgcccatcatggaggagcacctgaactttctggacaagacctctggccgacctggggatggcctctgatccctggagcagtggcccacttgcccggtgctctcagaaacctcagagctggtggggctccagatcaggccttggcctctgagccctgcctgctctgggccatgcagaggaaggacagagggtgggcgcagggcaccaactcagggacatcccctctcctgggcgacgtcagtggaccttcctgcacccccagcctggaatgtaaatcagctgtgtggtgcccgcgtggctggaaggaaatagacccttttgtagctccc

SEQ ID NO: 11943 - DNA, 2019 bp, Homo sapiens
  source 1..2019: mol_type = unassigned DNA
cggggtcgggccggggtcggcacctgggacatccctgagggaagggccgggagcgggagcgccccagcggccggcgggcgggcgggcgagcggacgagcggcgcggagccggcccgaggcgcgcgccgagggagccccgtccccggtcgtgggggcaccgcccgcaggctctgcggggtgggcagctcccgggcctgccatgagctctccgccgcccgcccgcagtggcttttaccgccaggaggtgaccaagacggcctgggaggtgcgcgccgtgtaccgggacctgcagcccgtgggctcgggcgcctacggcgcggtgtggtgagcgcgggccgggcggggcggccggcggggcgggcggggcctgcgcggggtgcccggccttcccgctaagcggtccgccccgcagctcggccgtggacggccgcaccggcgctaaggtggccatcaagaagctgtatcggcctttccagtccgagctgttcgccaagcgcgcctaccgcgagctgcgcctgctcaagcacatgcgccacgagaacgtgatcgggctgctggacgtattcactcctgatgagaccctggatgacttcacggacttttacctggtgatgccgttcatgggcaccgacctgggcaagctcatgaaacatgagaagctaggcgaggaccggatccagttcctcgtgtaccagatgctgaaggggctgaggtatatccacgctgccggcatcatccacagagtgagtcccggtggagaagccgctcatcagccctcccccagtgcaatccccccgcctccacgtcccacctgtgaggatgtgatggggtctgggtgctgagccacgccctatgcacagcccctggtgggaacctgcctgggtgcccaggacctgaagcccggcaacctggctgtgaacgaagactgtgagctgaagatcctggacttcggcctggccaggcaggcagacagtgagatgactgggtacgtggtgacccggtggtaccgggctcccgaggtcatcttgaattggatgcgctacacgcagacggtggacatctggtctgtgggctgcatcatggcggagatgatcacaggcaagacgctgttcaagggcagcgaccacctggaccagctgaaggagatcatgaaggtgacggggacgcctccggctgagtttgtgcagcggctgcagagcgatgaggccaagaactacatgaagggcctccccgaattggagaagaaggattttgcctctatcctgaccaatgcaagccctctggctgtgaacctcctggagaagatgctggtgctggacgcggagcagcgggtgacggcaggcgaggcgctggcccatccctacttcgagtccctgcacgacacggaagatgagccccaggtccagaagtatgatgactcctttgacgacgttgaccgcacactggatgaatggaagcgtgttacttacaaagaggtgctcagcttcaagcctccccggcagctgggggccagggtctccaaggagacgcctctgtgaagatctctgggctccggggtggcagtgaggaccaccttcaccttccacctgagaggggactctcgttgccaccttgaccttggctggggcttgcatcccaaggcatccatcagagcagacgcccgggttccatggaccctcctccccacggccatgcctctgctcttgggcgcccatcatggaggagcacctgaactttctggacaagacctctggccgacctggggatggcctctgatccctggagcagtggcccacttgcccggtgctctcagaaacctcagagctggtggggctccagatcaggccttggcctctgagccctgcctgctctgggccatgcagaggaaggacagagggtgggcgcagggcaccaactcagggacatcccctctcctgggcgacgtcagtggaccttcctgcacccccagcctggaatgtaaatcagctgtgtggtgcccgcgtggctggaaggaaatag

SEQ ID NO: 11944 - DNA, 2763 bp, Homo sapiens
  source 1..2763: mol_type = unassigned DNA
tgtaccagatgctgaaggggctgagggtacgggccccgggggaggctgcagggaggcaggcagggcctcggggctgggcagaggagggccctgtggctctgagagggtgcgctgaagcctgccaaatcctctgccccccgcagtatatccacgctgccggcatcatccacagagtgagtcccggtggagaagccgctcatcagccctcccccagtgcaatccccccgcctccacgtcccacctgtgaggatgtgatggggtctgggtgctgagccacgccctatgcacagcccctggtgggaacctgcctgggtgcccaggtaccttggtctgcccttgaagggctgcagagagcaagggggccaggtccggtggccccatctttaggtgccacccaggctcttggctgtgcccatgcttgggagggtggggcacagtggccacctttcctctgcccccaggacctgaagcccggcaacctggctgtgaacgaagactgtgagctgaagatcctggacttcggcctggccaggcaggcagacagtgagatgactgggtacgtggtgacccggtggtaccgggctcccgaggtcatcttgaattggatgcgctacacgcagacgggtgagaagctgcccagagatctgggcctctcaggctgcaccatctgcttctccacttcttcacggacagccctgtggtggctgctcccagggaggctgttgagctggggtgggagccgggcaggtgggctgtgttggtgtctcctccctccccgtctcatcctgtccccctgcccacggagctgaccagggcttctatctcagtggacatctggtctgtgggctgcatcatggcggagatgatcacaggcaagacgctgttcaagggcagcgaccgtatcctccagccgcagggcggcaccaggggcgggtggggatggctcctgcccaggtgggggcagtgggggccctgatctctggcccccgagctgtgttcctgacctcggtgcagacctggaccagctgaaggagatcatgaaggtgacggggacgcctccggctgagtttgtgcagcggctgcagagcgatgaggccaagaactacatgaagggcctccccgaattggagaagaaggattttgcctctatcctgaccaatgcaagccctctggctgtgaacctcctggagaagatgctggtgctggacgcggagcagcgggtgacggcaggcgaggcgctggcccatccctacttcgagtccctgcacgacacggaagatgagccccaggtccagaagtatgatgactcctttgacgacgttgaccgcacactggatgaatggaagcgtgagtggggggctcctggcacggcctgtgtggacccaagtggggggctctgggcagggcctgtgtggacctgtgagttgggggctccgggtagggcctgtgtggacccgtgagttgggggctccgggtagggcctgtgtggaccctgtgggccctgtgcaggtggccaggctcagagtcctagatccccatccctgggatgcaggtcaggtgaggaggatgggaggtcagggcagcatggggccgtgtggcctggtggagatgacctctggctggagctggaagttgaagggaagggtgttcctggcaggctcagcacagaggctggcacagaaggagccgggagtggtgaaaggcagctgtgagtcagggaaccagggcccacttagcccctcctggcccccagacctgctgcccttccgccatgtccaggccagagacctgggccaccctgacaccctcaccacgtccgcttgtccctaaggcctctctgctcacacctcctgaatctgtccttgcctctccttgccccatttttgttttttgagacggagtctcactctgatgcccaggctggagggcagtggcacgatcttgactcactgcaagctccgtctcccgggtacacaccgttctcctgcctcagcctcccgagtagccgggactacaggcgcccgccaccaggcctggctaattttttgtatttttagtagagacggggtttcaccgtgttagccaggatggtctcgatctcctgacctcgtgatccgcccgcctcggcctcccaaagtgctgggattacaggcgtgagccaccgcgcccagccctctccttgccccactttaggatccctcccccctggacaactgtatacccaagacagtccccagggcctcgcctgtctcccccagcccccgctaagcagtccagactccaaccccaactgctggggtccatcatcccctataccaggggctatcccctcaacttggagggctggccaaagcctgtgcagcctcaggctggactcagagaagcctccccagctcccgcagctatgctgcggcctgaggctgtgctggacctggcttcatttctgctccaggatggcaggctgtgtcttcttcatggctgcatgaccagcctggggtgggtgtgcccggggaaagtaggtgtacactgggagccgtgccatgtttcaggccctgtcctggctctgcctcgggtgcgggaccttggtcctccacactggctgggtggggctggatgggttgagattcacatgtgctccttacgaccacgggtccctgggtgcccgcagcagggcctccacccttcgctgtgtgcatattcgtgtgcttatgagtttggctttgtttgattaaaggtttctgctgctagaaagataacttgaaa

SEQ ID NO: 11945 - DNA, 2101 bp, Homo sapiens
  source 1..2101: mol_type = unassigned DNA
ccgagctgttcgccaagcgcgcctaccgcgagctgcgcctgctcaagcacatgcgccacgagaacgtgatcgggctgctggacgtattcactcctgatgagaccctggatgacttcacggacttgacctgaagcccggcaacctggctgtgaacgaagactgtgagctgaagatcctggacttcggcctggccaggcaggcagacagtgagatgactgggtacgtggtgacccggtggtaccgggctcccgaggtcatcttgaattggatgcgctacacgcagacggtggacatctggtctgtgggctgcatcatggcggagatgatcacaggcaagacgctgttcaagggcagcgaccacctggaccagctgaaggagatcatgaaggtgacggggacgcctccggctgagtttgtgcagcggctgcagagcgatgaggccaagaactacatgaagggcctccccgaattggagaagaaggattttgcctctatcctgaccaatgcaagccctctggctgtgaacctcctggagaagatgctggtgctggacgcggagcagcgggtgacggcaggcgaggcgctggcccatccctacttcgagtccctgcacgacacggaagatgagccccaggtccagaagtatgatgactcctttgacgacgttgaccgcacactggatgaatggaagcgtgagtggggggctcctggcacggcctgtgtggacccaagtggggggctctgggcagggcctgtgtggacctgtgagttgggggctccgggtagggcctgtgtggacccgtgagttgggggctccgggtagggcctgtgtggaccctgtgggccctgtgcaggtggccaggctcagagtcctagatccccatccctgggatgcaggtcaggtgaggaggatgggaggtcagggcagcatggggccgtgtggcctggtggagatgacctctggctggagctggaagttgaagggaagggtgttcctggcaggctcagcacagaggctggcacagaaggagccgggagtggtgaaaggcagctgtgagtcagggaaccagggcccacttagcccctcctggcccccagacctgctgcccttccgccatgtccaggccagagacctgggccaccctgacaccctcaccacgtccgcttgtccctaaggcctctctgctcacacctcctgaatctgtccttgcctctccttgccccatttttgttttttgagacggagtctcactctgatgcccaggctggagggcagtggcacgatcttgactcactgcaagctccgtctcccgggtacacaccgttctcctgcctcagcctcccgagtagccgggactacaggcgcccgccaccaggcctggctaattttttgtatttttagtagagacggggtttcaccgtgttagccaggatggtctcgatctcctgacctcgtgatccgcccgcctcggcctcccaaagtgctgggattacaggcgtgagccaccgcgcccagccctctccttgccccactttaggatccctcccccctggacaactgtatacccaagacagtccccagggcctcgcctgtctcccccagcccccgctaagcagtccagactccaaccccaactgctggggtccatcatcccctataccaggggctatcccctcaacttggagggctggccaaagcctgtgcagcctcaggctggactcagagaagcctccccagctcccgcagctatgctgcggcctgaggctgtgctggacctggcttcatttctgctccaggatggcaggctgtgtcttcttcatggctgcatgaccagcctggggtgggtgtgcccggggaaagtaggtgtacactgggagccgtgccatgtttcaggccctgtcctggctctgcctcgggtgcgggaccttggtcctccacactggctgggtggggctggatgggttgagattcacatgtgctccttacgaccacgggtccctgggtgcccgcagcagggcctccacccttcgctgtgtgcatattcgtgtgcttatgagtttggctttgtttgattaaaggtttctgctgctagaaagataa

SEQ ID NO: 11946 - DNA, 2021 bp, Homo sapiens
  source 1..2021: mol_type = unassigned DNA
ggtacgtggtgacccggtggtaccgggctcccgaggtcatcttgaattggatgcgctacacgcagacgggtgagaagctgcccagagatctgggcctctcaggctgcaccatctgcttctccacttcttcacggacagccctgtggtggctgctcccagggaggctgttgagctggggtgggagccgggcaggtgggctgtgttggtgtctcctccctccccgtctcatcctgtccccctgcccacggagctgaccagggcttctatctcagtggacatctggtctgtgggctgcatcatggcggagatgatcacaggcaagacgctgttcaagggcagcgaccacctggaccagctgaaggagatcatgaaggtgacggggacgcctccggctgagtttgtgcagcggctgcagagcgatgaggccaagaactacatgaagggcctccccgaattggagaagaaggattttgcctctatcctgaccaatgcaagccctctggctgtgaacctcctggagaagatgctggtgctggacgcggagcagcgggtgacggcaggcgaggcgctggcccatccctacttcgagtccctgcacgacacggaagatgagccccaggtccagaagtatgatgactcctttgacgacgttgaccgcacactggatgaatggaagcgtgagtggggggctcctggcacggcctgtgtggacccaagtggggggctctgggcagggcctgtgtggacctgtgagttgggggctccgggtagggcctgtgtggacccgtgagttgggggctccgggtagggcctgtgtggaccctgtgggccctgtgcaggtggccaggctcagagtcctagatccccatccctgggatgcaggtcaggtgaggaggatgggaggtcagggcagcatggggccgtgtggcctggtggagatgacctctggctggagctggaagttgaagggaagggtgttcctggcaggctcagcacagaggctggcacagaaggagccgggagtggtgaaaggcagctgtgagtcagggaaccagggcccacttagcccctcctggcccccagacctgctgcccttccgccatgtccaggccagagacctgggccaccctgacaccctcaccacgtccgcttgtccctaaggcctctctgctcacacctcctgaatctgtccttgcctctccttgccccatttttgttttttgagacggagtctcactctgatgcccaggctggagggcagtggcacgatcttgactcactgcaagctccgtctcccgggtacacaccgttctcctgcctcagcctcccgagtagccgggactacaggcgcccgccaccaggcctggctaattttttgtatttttagtagagacggggtttcaccgtgttagccaggatggtctcgatctcctgacctcgtgatccgcccgcctcggcctcccaaagtgctgggattacaggcgtgagccaccgcgcccagccctctccttgccccactttaggatccctcccccctggacaactgtatacccaagacagtccccagggcctcgcctgtctcccccagcccccgctaagcagtccagactccaaccccaactgctggggtccatcatcccctataccaggggctatcccctcaacttggagggctggccaaagcctgtgcagcctcaggctggactcagagaagcctccccagctcccgcagctatgctgcggcctgaggctgtgctggacctggcttcatttctgctccaggatggcaggctgtgtcttcttcatggctgcatgaccagcctggggtgggtgtgcccggggaaagtaggtgtacactgggagccgtgccatgtttcaggccctgtcctggctctgcctcgggtgcgggaccttggtcctccacactggctgggtggggctggatgggttgagattcacatgtgctccttacgaccacgggtccctgggtgcccgcagcagggcctccacccttcgctgtg

SEQ ID NO: 11947 - DNA, 498 bp, Homo sapiens
  source 1..498: mol_type = unassigned DNA
aacgtgagtcgcgcggccccgctccgggaaggcgccgcggcctcggcttggttcagctgggctgggttcccccacccggcaacccctcctccaggcagcctgctgtggggccgggcgggggtcgggccgtgggtccccaggggagaaggagagcaaggcctgtctctccttgggagacgactcccccaagggccgttccccatcctccgccagccccgggaaggactcagccccttgactcggcgcctcagccaggccctggtcagggaacacgacttggccaggcccaggggatcctccaggtctcacgccaagccttgcccccagccaggaagcccgcggtgatcgggctgctggacgtattcactcctgatgagaccctggatgacttcacggacttccgacccctctgacccagatgccttgccgcgcccccatcgcccccaggcacctccctcatttctggcacaaagttgtgaagttgaaacctgactgcct

SEQ ID NO: 11948 - DNA, 605 bp, Homo sapiens
  source 1..605: mol_type = unassigned DNA
aggctctgcggggtgggcagctcccgggcctgccatgagctctccgccgcccgcccgcagtggcttttaccgccaggaggtgaccaagacggcctgggaggtgcgcgccgtgtaccgggacctgcagcccgtgggctcgggcgcctacggcgcggtgtgctcggccgtggacggccgcaccggcgctaaggtggccatcaagaagctgtatcggcctttccagtccgagctgttcgccaagcgcgcctaccgcgagctgcgcctgctcaagcacatgcgccacgagaacgtgatcgggctgctggacgtattcactcctgatgagaccctggatgacttcacggacttgaaggtcccgtgctcgggaccctggcaccaagtgtgtggccggtaactggagctgctgaccttttccagcgggtgggggagaagcggtagggaggacccaccctgcccctgccctgcagccgaccaccctgggactcacaccctgtcggccaagagtgaagggccaggccgaggaaggcctggagagggtagcaggcgcctcccgcctgacttgcagaggtcaagtcagtggcctctgggaaggtgctaaataccat

SEQ ID NO: 11949 - DNA, 1779 bp, Homo sapiens
  source 1..1779: mol_type = unassigned DNA
gcctgggtcggggtcgggccggggtcggcacctgggacatccctgagggaagggccgggagcgggagcgccccagcggccggcgggcgggcgggcgagcggacgagcggcgcggagccggcccgaggcgcgcgccgagggagccccgtccccggtcgtgggggcaccgcccgcaggctctgcggggtgggcagctcccgggcctgccatgagctctccgccgcccgcccgcagtggcttttaccgccaggaggtgaccaagacggcctgggaggtgcgcgccgtgtaccgggacctgcagcccgtgggctcgggcgcctacggcgcggtgtgctcggccgtggacggccgcaccggcgctaaggtggccatcaagaagctgtatcggcctttccagtccgagctgttcgccaagcgcgcctaccgcgagctgcgcctgctcaagcacatgcgccacgagaacgtgatcgggctgctggacgtattcactcctgatgagaccctggatgacttcacggacttttacctggtgatgccgttcatgggcaccgacctgggcaagctcatgaaacatgagaagctaggcgaggaccggatccagttcctcgtgtaccagatgctgaaggggctgagggacctgaagcccggcaacctggctgtgaacgaagactgtgagctgaagatcctggacttcggcctggccaggcaggcagacagtgagatgactgggtacgtggtgacccggtggtaccgggctcccgaggtcatcttgaattggatgcgctacacgcagacggtggacatctggtctgtgggctgcatcatggcggagatgatcacaggcaagacgctgttcaagggcagcgaccacctggaccagctgaaggagatcatgaaggtgacggggacgcctccggctgagtttgtgcagcggctgcagagcgatgaggccaagaactacatgaagggcctccccgaattggagaagaaggattttgcctctatcctgaccaatgcaagccctctggctgtgaacctcctggagaagatgctggtgctggacgcggagcagcgggtgacggcaggcgaggcgctggcccatccctacttcgagtccctgcacgacacggaagatgagccccaggtccagaagtatgatgactcctttgacgacgttgaccgcacactggatgaatggaagcgtgttacttacaaagaggtgctcagcttcaagcctccccggcagctgggggccagggtctccaaggagacgcctctgtgaagatctctgggctccggggtggcagtgaggaccaccttcaccttccacctgagaggggactctcgttgccaccttgaccttggctggggcttgcatcccaaggcatccatcagagcagacgcccgggttccatggaccctcctccccacggccatgcctctgctcttgggcgcccatcatggaggagcacctgaactttctggacaagacctctggccgacctggggatggcctctgatccctggagcagtggcccacttgcccggtgctctcagaaacctcagagctggtggggctccagatcaggccttggcctctgagccctgcctgctctgggccatgcagaggaaggacagagggtgggcgcagggcaccaactcagggacatcccctctcctgggcgacgtcagtggaccttcctgcacccccagcctggaatgtaaatcagctgtgtggtgcccgcgtggctggaaggaaatagacccttttgtagctccc

SEQ ID NO: 11950 - DNA, 848 bp, Homo sapiens
  source 1..848: mol_type = unassigned DNA
gcctgctggagcagggcacgctggcagaagagcatgccaagctgttcatgtaccagctgctccgcgggctcaagtacatccactccgccaacgtgctgcacagggacctgaagcccgccaacatcttcatcagcacagaggacctcgtgctcaagattggggatttcgggttggcaaggatcgttgatcagcattactcccacaaggcccgctaatgagttcttcgttgtttgtgttgagaagaggcagctgaaggattggagtgtgctttcttctgaatttatcccattaggaagcagactatctcaaaagagaaaaaaaatgtcattaagacttcactgagcactgtgtaaggcttaagaaaggtcaggaaccacctcaagagtatgcggaggtcctgaggagcacgatgacagcttgactcacggtgagagtgtgttgctccaggaagggccacctctcctcctaccatagagtcctcgctggggctgctggggggaccacccactacccttgcttgtagcacttattttaccctgggctcactaaacctgctcatctccactacaacattcaagaaccgtcaaactcctgatccagtaaccttctatgactagcgtgcatcatggcatttacagtaaagctagccctctacagctcacacctctgactgccaaaggcacatatagaggccccattgccgggtctatcgttcttgcagcagtacttctaaaattaggtgggtatggtataatacaagttactttaattctaatcccctggcagaatttatagcatatccattcctcattctatctctctaagggataatcataacaagttctatt

SEQ ID NO: 11951 - DNA, 3144 bp, Homo sapiens
  source 1..3144: mol_type = unassigned DNA
gagttcagattcggatcgcagtcccgattatcctcccctccagcctctccctttctcgttgaagggttaatacagcgtcctctcccctcgccacccgacagaggcgcctacactggcgggaaggagacttggtctgaaagatgccacattcctgcagcctctcttggtgcagtggaatacagtcttgggcgaggtggcgtggatgagctggtgaaagaggatgctgcccacatccaaaggctccagaggatcctggcctggcagctgagctcccctgcatttggaacctcaggcgtaacttggtgtagagctcatgaaaggtgcttgtgtttctccagcttttttcaccagtgcttaccagactggctcaggttttggaatctaaggtgagctggtagaaacaggagaggtagaaagaagcccctggatgcctccagaattcattgatgggatccctgcatactgcttggaacacagaaagaggctgtgacacagctgagctttggagcatcttaaggagctcagctcagcaaacaactcttgcatttcagccagaaagagcctcttgtaacaaagtattcaaaggggagagtttctgcatcttttactttgcagtccactatggtagaaaacttgacattccatagataatgatactgggttttctttccaagatgccagctttaaaagaaatatgagccattctaagctttaagaagggttcaggaaacacaggaattagtagacagccctcccaatgcaggttaagacgacagcctgcgcccccaactagcacagctcagcgagcatgaccatatgccattctcgtctccagagagctggtggcagtgacctcactaggagaaaacacatccctcagccgtgggacttgacagaatgaggtgcgcgagggaggccgctagccgagacttggcctttcctgactgcccctgtgttacctgggcagctccagatcactgagcccacaatggctgagaagggtgactgcatcgccagtgtctatgggtatgacctcggtgggcgctttgttgacttccaacccctgggcttcggtgtcaatggtttggtgctgtcggccgtggacagccgggcctgccggaaggtcgctgtgaagaagattgccctgagcgatgcccgcagcatgaagcacgcgctccgagagatcaagatcattcggcgcctggaccacgacaacatcgtcaaagtgtacgaggtgctcggtcccaagggcactgacctgcagggtgagctgttcaagttcagcgtggcgtacatcgtccaggagtacatggagaccgacctggcacgcctgctggagcagggcacgctggcagaagagcatgccaagctgttcatgtaccagctgctccgcgggctcaagtacatccactccgccaacgtgctgcacagggacctgaagcccgccaacatcttcatcagcacagaggacctcgtgctcaagattggggatttcgggttggcaaggatcgttgatcagcattactcccacaagtctactgattgcatcacaagcattgtgggtcacattccagagccttctgagaagggagaagtcagggaagttccttttgttcttctgagcgttctctgcaagtcaaactggggagagttccagtcctgtggggtgggagcagctgtgaagaggctggaatcggagggaactttggggcctggaggcctaatggaggactctgtgatgttggactatgttgtgtcgttaccctccctgcctctgcatcctcttctgtggagcagggacaatgacagcagccatcctgggagagcatcatgatgaccaaatggaaggaaacagagggtgaggagcaccccaagcacatggtcagcacctggcaggtggctgttattattacccactcctcaaaagtgcttttggactcacattttctttctttctttttgagggtggaggtgtagagaggtgaaataaagctctgagtctgacctccaggttggtcccaggcaagattagcagcctgaggggtccggcttccacacggtagcatgaatagcatgttcaatagaaaaccggacccataccccacacggcagagggctaggcttgagcacagacactacctttgtcctgagatttctacatggcaatgaaacttcgagctaattttctcctgactggtggtcagttcctgaatttcatgggcatatcaatcattcctttagctcaacgtttttactccattcattcacccgattgtaagtgagcgcctatcttgtacagaggtgcactgcagacagagggaaaacaactggctcttgccttcaggagccctcgctgcctcccctgctatagagttaatgaagttagatgaaggggtccaggaggctgtgtgaacacaaagccttgccagctaagtcagagaggagggtcctgcagtaatatccccaaatgtaaaatgaaaaataaataccttcaacagggttctcaggaggtgagctgagctactgctggcaaaatcccttgtacagagtggatgtcaacaaatattccctcccctccctaatgtgctctcagttatgtacctggatgttaataagggagctgagagaaaagtttgctaggagggcggagaaagtttccaccctcctcgggggaagaggtcggggacagaaaggggaggcctggggctcagagaccaacgtctcatgtcttctaccacatggccacgtggctcgccccttgactcactctggtctctgctcgaatgtccccttacatgagaggcctttctggaccacccaccccatcactctctatctccttaccctgctttatttccattccttgcacttatctccactagacatatcatccatttgtttgttcagctgtctttccatccaaagtgtgcacctcatgattacagggactttgttttgctcactgctgggatcagatctcagctctgccaattattagttaatttgatcttgctcaagttagccccatctctctacctgtttcacagggtcattttgataattaaatgcactattaataaagcagtacttggcacggtgcctggcacatcataatttctcaataaacgatagctattattatga

SEQ ID NO: 11952 - DNA, 572 bp, Homo sapiens
  source 1..572: mol_type = unassigned DNA
acttgctacttgcacagacttgtctctggtcctcaagtttggccaacagtggagcactctgtgggagaggaagtcagagagttggaggcaggtccaggaacataatttgcagggcacaagtgcaagatgaaaattcatgctccttgttcacaaatgatgaagaaattcaagacagcgacagcagagcatcagctaaatgcatggtccttttgagcttcgtggggcactgtgaccccatgggccatccgtctttgaggctggaccatgttggaaaccactggagaaggcagggggttgggggttgagcctggggctcagaggttctgtgttaaccaaatgccactcagctggaagatcagcgatggaaatcagttaacatttaagaaatcacctggaggcccaggctctgttccaagccattagggattcggcagtgagcaagcaagggctgctgtgagtagggaaggagacttggtctgaaagatgccacattcctgcagcctctcttggtgcagtggaatacagtcttgggcgaggtggcgtggatgagctggtgaaagaggatgctgccc

SEQ ID NO: 11953 - DNA, 1576 bp, Homo sapiens
  source 1..1576: mol_type = unassigned DNA
gagctcgccgtgcgccgtggctgggaccggcctggccgagcgcgccggcgccgcggccgcagacaaagggcggctcgcgcccgggccgccacgctctcgggctctgcctcgggttatctgtcagaagggttggtaacaaagtggtaccgttccccacgactgctcctttcccccaataactacaccaaagccatcgacatgtgggccgccggctgcatcctggctgagatgcttacggggagaatgctctttgctggggcccatgagctggagcagatgcaactcatcctggagaccatccctgtaatccgggaggaagacaaggacgagctgctcagggtgatgccttcctttgtcagcagcacctgggaggtgaagaggcctctgcgcaagctgctccctgaagtgaacagtgaagccatcgactttctggagaagatcctgacctttaaccccatggatcgcctaacagctgagatggggctgcaacacccctacatgagcccatactcgtgccctgaggacgagcccacctcacaacaccccttccgcattgaggatgagatcgacgacatcgtgctgatggccgctaaccagagccagctgtccaactgggacacgtgcagttccaggtaccctgtgagcctgtcgtcggacctggagtggcggcctgaccggtgccaggacgccagcgaggtacagcgcgacccgcgcgcgggttcggcgccactggctgaggacgtgcaggtggacccgcgcaaggactcgcacagcagctccgagcgcttcctagagcagtcgcactcgtccatggagcgcgccttcgaggccgactacgggcgctcctgcgactacaaggtggggtcgccgtcctacctggacaagctgctgtggcgcgacaacaagccgcaccactactcggagcccaagctcatcctggacctgtcgcactggaagcaggcggccggcgcgccccccacggccacggggctggcggacacgggggcgcgcgaggacgagccggccagcctcttcctggagatcgcgcagtgggtcaagagcacgcagggcggcccagagcacgccagcccgcccgccgacgaccccgagcgccgcttgtctgcctcgccccccggccgcccggccccggtggacggcggcgccagcccccagttcgacctggacgtgttcatctcccgcgccctgaagctctgcaccaagcccgaggacctgccggacaataaactgggcgacctcaatggtgcgtgcatccccgagcaccctggcgacctcgtgcagaccgaggccttctccaaagaaaggtggtgagggcggaggggccgctccaggccccacagagcaggagacccccagagaaagccggggctggcaggaggcggccgcccttcccgcccctctctgctgccttggggttggcagaacacgtgaaggatccgaggagcgagaggaatgtccatttcttaaactgccttaataactagcctttaacctgtgggagcgggtttgaacaggaccctggcttaggggttgatcactttcctagcaaaggggagac

SEQ ID NO: 11954 - DNA, 4330 bp, Homo sapiens
  source 1..4330: mol_type = unassigned DNA
gtgcgccgtggctgggaccggcctggccgagcgcgccggcgccgcggccgcagacaaagggcggctcgcgcccgggccgccacgctctcgggctctgcctcgggaaggagacttggtctgaaagatgccacattcctgcagcctctcttggtgcagtggaatacagtcttgggcgaggtggcgtggatgagctggtgaaagaggatgctgcccacatccaaaggctccagaggatcctggcctggcagctgagctcccctgcatttggaacctcaggcgtaacttggtgtagagctcatgaaaggtgcttgtgtttctccagcttttttcaccagtgcttaccagactggctcaggttttggaatctaaggtgagctggtagaaacaggagaggtagaaagaagcccctggatgcctccagaattcattgatgggatccctgcatactgcttggaacacagaaagaggctgtgacacagctgagctttggagcatcttaaggagctcagctcagcaaacaactcttgcatttcagccagaaagagcctcttgtaacaaagtattcaaaggggagagtttctgcatcttttactttgcagtccactatggtagaaaacttgacattccatagataatgatactgggttttctttccaagatgccagctttaaaagaaatatgagccattctaagctttaagaagggttcaggaaacacaggaattagtagacagccctcccaatgcaggttaagacgacagcctgcgcccccaactagcacagctcagcgagcatgaccatatgccattctcgtctccagagagctggtggcagtgacctcactaggagaaaacacatccctcagccgtgggacttgacagaatgaggtgcgcgagggaggccgctagccgagacttggcctttcctgactgcccctgtgttacctgggcagctccagatcactgagcccacaatggctgagaagggtgactgcatcgccagtgtctatgggtatgacctcggtgggcgctttgttgacttccaacccctgggcttcggtgtcaatggtttggtgctgtcggccgtggacagccgggcctgccggaaggtcgctgtgaagaagattgccctgagcgatgcccgcagcatgaagcacgcgctccgagagatcaagatcattcggcgcctggaccacgacaacatcgtcaaagtgtacgaggtgctcggtcccaagggcactgacctgcagggtgagctgttcaagttcagcgtggcgtacatcgtccaggagtacatggagaccgacctggcacgcctgctggagcagggcacgctggcagaagagcatgccaagctgttcatgtaccagctgctccgcgggctcaagtacatccactccgccaacgtgctgcacagggacctgaagcccgccaacatcttcatcagcacagaggacctcgtgctcaagattggggatttcgggttggcaaggatcgttgatcagcattactcccacaagggttatctgtcagaagggttggtaacaaagtggtaccgttccccacgactgctcctttcccccaataactacaccaaagccatcgacatgtgggccgccggctgcatcctggctgagatgcttacggggagaatgctctttgctggtaccctgtgagcctgtcgtcggacctggagtggcggcctgaccggtgccaggacgccagcgaggtacagcgcgacccgcgcgcgggttcggcgccactggctgaggacgtgcaggtggacccgcgcaaggactcgcacagcagctccgagcgcttcctagagcagtcgcactcgtccatggagcgcgccttcgaggccgactacgggcgctcctgcgactacaaggtggggtcgccgtcctacctggacaagctgctgtggcgcgacaacaagccgcaccactactcggagcccaagctcatcctggacctgtcgcactggaagcaggcggccggcgcgccccccacggccacggggctggcggacacgggggcgcgcgaggacgagccggccagcctcttcctggagatcgcgcagtgggtcaagagcacgcagggcggcccagagcacgccagcccgcccgccgacgaccccgagcgccgcttgtctgcctcgccccccggccgcccggccccggtggacggcggcgccagcccccagttcgacctggacgtgttcatctcccgcgccctgaagctctgcaccaagcccgaggacctgccggacaataaactgggcgacctcaatggtgcgtgcatccccgagcaccctggcgacctcgtgcagaccgaggccttctccaaagaaaggtggtgagggcggaggggccgctccaggccccacagagcaggagacccccagagaaagccggggctggcaggaggcggccgcccttcccgcccctctctgctgccttggggttggcagaacacgtgaaggatccgaggagcgagaggaatgtccatttcttaaactgccttaataactagcctttaacctgtgggagcgggtttgaacaggaccctggcttaggggttgatcactttcctagcaaaggggagaccacatgtggtgcacagggaagaaacggctttagacagcagtctgcgggccccacctgggtggcaggatgccgagaaatcttgcagaggtagctccgaaaccatctggcccaactagcctcaactgacagctgaggaaaggcaattaggcccagagaggcagagacactcgcttaagatcacaggcttagtgtgaggacgagcttgaaatcccagtctcctggcccccaggccagggtctgtccaccatagaatgtcttcctctactggggtcgttctggctttttgttagaaacttggtctgagatgtttcttccctgtccattaccattcgatgttcttttattcagagcaatgtttcttgtattctgaaactggaaactgaaccagtttgtttctcctagtcaccaagcatactttcctggctccccaagtacttaaatgttctcatctgtcgcacccctgtatttgcctcacccctgcatggtcggaaatcttcgtttcaggtcagaacagcctggggtctgtgggtaaaatcagcccttctcccaggcctgtgcacacaccccctcagcactccctatgcactttcctgacacgcaaagacacagccctctttccccactgggcgtcctaccccagtgaggttgaaggcaccaattccaagaatccctccaacctccctgccagcactcccccttcaccccacacccggcccccccacctaaccacagcgcctctccagacctacctcgggacctaatgttctctacatgaactgctcatttggaggacagcagtgaggtcctgccatagagcaaatgtgttaggagagaaggtttcacatgggacccaacatccttcatcaatactttcctgagtttgatcatccatttagccttgacaaacagcagaccctacagagatgtgttggagagcacgtcgtgaccttgggggcaaggaatccagaaaggtaggaagatatgaaaagagaggtgtcaacagcaagggctcttaggggtcaggcaccagcatggagacctcatgacaaaggaagggactcaaagcagcaatgcccctcatagtgtaggctaaggtgagtttggtgcatgcaaacctgtgtgctcacccacagagcatggggtaatggtgtgtagacacaggccctctgcagaagcgtggggtggggacactgacagcccctatctggtccccaggaacattctaccatttctgccactggtgttcagctccttctcttcccccaacactcccaaagatacccacaggaagtccagccagtttccaggtagaggattccaccagttggtcttgggctgcgttcaccctcacatcacagcaccttaaatctaatcagcaaactataatttgtacgttgaaacctgcaacacattagaaacttatatttaaaaacagaattaatcacactgaccaacttttaaatggaaaatatgtaaataggaagtgtttgggttttgttttttctttaagaaaaagaaatgtacaccactcctcatgtgccattttgtcctcagagggcggctttacttttttggtaaaggaacaagctgctggccttgaccaggagttcatatataactgttattacagaggaattgttataactactaatgtttttaaaaaatttattaaacattattaaacttgatcaggtcaggccaaataaagttttattggaacaca

SEQ ID NO: 11955 - DNA, 4770 bp, Homo sapiens
  source 1..4770: mol_type = unassigned DNA
gcgggagccggagcccgagctggagcagcgagccgggctgtcggggcgaccgcgggagctcgccgtgcgccgtggctgggaccggcctggccgagcgcgccggcgccgcggccgcagacaaagggcggctcgcgcccgggccgccacgctctcgggctctgcctcgggaaggagacttggtctgaaagatgccacattcctgcagcctctcttggtgcagtggaatacagtcttgggcgaggtggcgtggatgagctggtgaaagaggatgctgcccacatccaaaggctccagaggatcctggcctggcagctgagctcccctgcatttggaacctcaggcgtaacttggtgtagagctcatgaaaggtgcttgtgtttctccagcttttttcaccagtgcttaccagactggctcaggttttggaatctaaggtgagctggtagaaacaggagaggtagaaagaagcccctggatgcctccagaattcattgatgggatccctgcatactgcttggaacacagaaagaggctgtgacacagctgagctttggagcatcttaaggagctcagctcagcaaacaactcttgcatttcagccagaaagagcctcttgtaacaaagtattcaaaggggagagtttctgcatcttttactttgcagtccactatggtagaaaacttgacattccatagataatgatactgggttttctttccaagatgccagctttaaaagaaatatgagccattctaagctttaagaagggttcaggaaacacaggaattagtagacagccctcccaatgcaggttaagacgacagcctgcgcccccaactagcacagctcagcgagcatgaccatatgccattctcgtctccagagagctggtggcagtgacctcactaggagaaaacacatccctcagccgtgggacttgacagaatgaggtgcgcgagggaggccgctagccgagacttggcctttcctgactgcccctgtgttacctgggcagctccagatcactgagcccacaatggctgagaagggtgactgcatcgccagtgtctatgggtatgacctcggtgggcgctttgttgacttccaacccctgggcttcggtgtcaatggtttggtgctgtcggccgtggacagccgggcctgccggaaggtcgctgtgaagaagattgccctgagcgatgcccgcagcatgaagcacgcgctccgagagatcaagatcattcggcgcctggaccacgacaacatcgtcaaagtgtacgaggtgctcggtcccaagggcactgacctgcagggtgagctgttcaagttcagcgtggcgtacatcgtccaggagtacatggagaccgacctggcacgcctgctggagcagggcacgctggcagaagagcatgccaagctgttcatgtaccagctgctccgcgggctcaagtacatccactccgccaacgtgctgcacagggacctgaagcccgccaacatcttcatcagcacagaggacctcgtgctcaagattggggatttcgggttggcaaggatcgttgatcagcattactcccacaagggttatctgtcagaagggttggtaacaaagtggtaccgttccccacgactgctcctttcccccaataactacaccaaagccatcgacatgtgggccgccggctgcatcctggctgagatgcttacggggagaatgctctttgctggggcccatgagctggagcagatgcaactcatcctggagaccatccctgtaatccgggaggaagacaaggacgagctgctcagggtgatgccttcctttgtcagcagcacctgggaggtgaagaggcctctgcgcaagctgctccctgaagtgaacagtgaagccatcgactttctggagaagatcctgacctttaaccccatggatcgcctaacagctgagatggggctgcaacacccctacatgagcccatactcgtgccctgaggacgagcccacctcacaacaccccttccgcattgaggatgagatcgacgacatcgtgctgatggccgctaaccagagccagctgtccaactgggacacgtgcagttccaggtaccctgtgagcctgtcgtcggacctggagtggcggcctgaccggtgccaggacgccagcgaggtacagcgcgacccgcgcgcgggttcggcgccactggctgaggacgtgcaggtggacccgcgcaaggactcgcacagcagctccgagcgcttcctagagcagtcgcactcgtccatggagcgcgccttcgaggccgactacgggcgctcctgcgactacaaggtggggtcgccgtcctacctggacaagctgctgtggcgcgacaacaagccgcaccactactcggagcccaagctcatcctggacctgtcgcactggaagcaggcggccggcgcgccccccacggccacggggctggcggacacgggggcgcgcgaggacgagccggccagcctcttcctggagatcgcgcagtgggtcaagagcacgcagggcggcccagagcacgccagcccgcccgccgacgaccccgagcgccgcttgtctgcctcgccccccggccgcccggccccggtggacggcggcgccagcccccagttcgacctggacgtgttcatctcccgcgccctgaagctctgcaccaagcccgaggacctgccggacaataaactgggcgacctcaatggtgcgtgcatccccgagcaccctggcgacctcgtgcagaccgaggccttctccaaagaaaggtggtgagggcggaggggccgctccaggccccacagagcaggagacccccagagaaagccggggctggcaggaggcggccgcccttcccgcccctctctgctgccttggggttggcagaacacgtgaaggatccgaggagcgagaggaatgtccatttcttaaactgccttaataactagcctttaacctgtgggagcgggtttgaacaggaccctggcttaggggttgatcactttcctagcaaaggggagaccacatgtggtgcacagggaagaaacggctttagacagcagtctgcgggccccacctgggtggcaggatgccgagaaatcttgcagaggtagctccgaaaccatctggcccaactagcctcaactgacagctgaggaaaggcaattaggcccagagaggcagagacactcgcttaagatcacaggcttagtgtgaggacgagcttgaaatcccagtctcctggcccccaggccagggtctgtccaccatagaatgtcttcctctactggggtcgttctggctttttgttagaaacttggtctgagatgtttcttccctgtccattaccattcgatgttcttttattcagagcaatgtttcttgtattctgaaactggaaactgaaccagtttgtttctcctagtcaccaagcatactttcctggctccccaagtacttaaatgttctcatctgtcgcacccctgtatttgcctcacccctgcatggtcggaaatcttcgtttcaggtcagaacagcctggggtctgtgggtaaaatcagcccttctcccaggcctgtgcacacaccccctcagcactccctatgcactttcctgacacgcaaagacacagccctctttccccactgggcgtcctaccccagtgaggttgaaggcaccaattccaagaatccctccaacctccctgccagcactcccccttcaccccacacccggcccccccacctaaccacagcgcctctccagacctacctcgggacctaatgttctctacatgaactgctcatttggaggacagcagtgaggtcctgccatagagcaaatgtgttaggagagaaggtttcacatgggacccaacatccttcatcaatactttcctgagtttgatcatccatttagccttgacaaacagcagaccctacagagatgtgttggagagcacgtcgtgaccttgggggcaaggaatccagaaaggtaggaagatatgaaaagagaggtgtcaacagcaagggctcttaggggtcaggcaccagcatggagacctcatgacaaaggaagggactcaaagcagcaatgcccctcatagtgtaggctaaggtgagtttggtgcatgcaaacctgtgtgctcacccacagagcatggggtaatggtgtgtagacacaggccctctgcagaagcgtggggtggggacactgacagcccctatctggtccccaggaacattctaccatttctgccactggtgttcagctccttctcttcccccaacactcccaaagatacccacaggaagtccagccagtttccaggtagaggattccaccagttggtcttgggctgcgttcaccctcacatcacagcaccttaaatctaatcagcaaactataatttgtacgttgaaacctgcaacacattagaaacttatatttaaaaacagaattaatcacactgaccaacttttaaatggaaaatatgtaaataggaagtgtttgggttttgttttttctttaagaaaaagaaatgtacaccactcctcatgtgccattttgtcctcagagggcggctttacttttttggtaaaggaacaagctgctggccttgaccaggagttcatatataactgttattacagaggaattgttataactactaatgtttttaaaaaatttattaaacattattaaacttgatcaggtcaggccaaataaagttttattggaacaca

SEQ ID NO: 11956 - DNA, 166 bp, Homo sapiens
  source 1..166: mol_type = unassigned DNA
gcgggagccggagcccgagctggagcagcgagccgggctgtcggggcgaccgcgggagctcgccgtgcgccgtggctgggaccggcctggccgagcgcgccggcgccgcggccgcagacaaagggcggctcgcgcccgggccgccacgctctcgggctctgcctcg

SEQ ID NO: 11957 - DNA, 111 bp, Homo sapiens
  source 1..111: mol_type = unassigned DNA
gagctcgccgtgcgccgtggctgggaccggcctggccgagcgcgccggcgccgcggccgcagacaaagggcggctcgcgcccgggccgccacgctctcgggctctgcctcg

SEQ ID NO: 11958 - DNA, 102 bp, Homo sapiens
  source 1..102: mol_type = unassigned DNA
gtgcgccgtggctgggaccggcctggccgagcgcgccggcgccgcggccgcagacaaagggcggctcgcgcccgggccgccacgctctcgggctctgcctcg

SEQ ID NO: 11959 - DNA, 118 bp, Homo sapiens
  source 1..118: mol_type = unassigned DNA
gagttcagattcggatcgcagtcccgattatcctcccctccagcctctccctttctcgttgaagggttaatacagcgtcctctcccctcgccacccgacagaggcgcctacactggcg

SEQ ID NO: 11960 - DNA, 803 bp, Homo sapiens
  source 1..803: mol_type = unassigned DNA
ctctcgggtggactcccggagcggcggcggcggcggcggtggcagactgcgagtcacgtgcgacagaggaggcggagcacggcggccgggtgggtggagaaaacaaagcccccagctgtcagcagaggaaggaggcgacagcgccggagcagtgtcctgtttcccagaggaacagttcatttcaacagccagggagaaagcctggatgctcaagttggggaatggcggtcaatgtgtattctacctcgataacccaagagactatgagcagacatgacatcattgcatgggttaatgacatagtatctttaaactacacaaaagtggaacagctttgttcaggagcggcctattgccaattcatggacatgctcttccctggctgcattagtttgaagaaagtaaaatttcaagcaaagctggaacatgaatatattcacaattttaaacttctgcaagcatcatttaagcgaatgaacgttgataaggtaattccagtggagaagctagtgaaaggacgtttccaggacaacctggattttattcaatggtttaagaaattctatgatgctaactacgatgggaaggagtatgatcctgtagaggcacgacaagggcaagatgcaattcctcctcctgaccctggtgaacagatcttcaacctgccaaaaaagtctcaccatgcaaactcccccacagcaggtgcagctaaatcaagtccagcagctaaaccaggatccacaccttctcgaccctcatcagccaaaagggcttcttccagtggctcagcatccaaatccgat

SEQ ID NO: 11961 - DNA, 553 bp, Homo sapiens
  source 1..553: mol_type = unassigned DNA
agaggaaggaggcgacagcgccggagcagtgtcctgtttcccagaggaacagttcatttcaacagccagggagaaagcctggatgctcaagttggggaatggcggtcaatgtgtattctacctcgataacccaagagactatgagcagacatgacatcattgcatggtttgaagaaagtaaaatttcaagcaaagctggaacatgaatatattcacaattttaaacttctgcaagcatcatttaagcgaatgaacgttgataaggtaattccagtggagaagctagtgaaaggacgtttccaggacaacctggattttattcaatggtttaagaaattctatgatgctaactacgatgggaaggagtatgatcctgtagaggcacgacaagggcaagatgcaattcctcctcctgaccctggtgaacagatcttcaacctgccaaaaaagtctcaccatgcaaactcccccacagcaggtgcagctaaatcaagtccagcagctaaaccaggatccacaccttctcgaccctcatcagccaaaagggcttctt

SEQ ID NO: 11962 - DNA, 348 bp, Homo sapiens
  source 1..348: mol_type = unassigned DNA
gaaggaggcgacagcgccggagcagaatgagctgcaatttatagactgaaaagacaaagggattcctttttcaccaaatcaaaaaacacattataattaacggctgcagttgactattataggatgtggtttcctgcaacatgcctgattttgaagaagggtgatctacacactgggaatgaagccacagagcatgtatgttacatgtagctgctggctatatatgtccacgtcagccacacactcccttctgctcctcagaaccttaaagttctcctcatggctggggaacagtgatgtgctccagggctccaagcaatggattcctcagcagacattgctctgtga

SEQ ID NO: 11963 - DNA, 584 bp, Homo sapiens
  source 1..584: mol_type = unassigned DNA
gaaggaggcgacagcgccggagcagggctgcagttgactattataggatgtggtttcctgcaacatgcctgattttgaagaagggtgatctacacactgggaatgaagccacagagcatgtatgttacatgtagctgctggctatatatgtccacgtcagccacacactcccttctgctcctcagaaccttaaagttctcctcatggctggggaacagtgatgtgctccagggctccaagcaatggattcctcagcagacattgctctgtgaaatcaaaagtgtcctgtttcccagaggaacagttcatttcaacagccagggagaaagcctggatgctcaagttggggaatggcggtcaatgtgtattctacctcgataacccaagagactatgagcagacatgacatcattgcatgggttaatgacatagtatctttaaactacacaaaagtggaacagctttgttcaggagcggcctattgccaattcatggacatgctcttccctggctgcattagtttgaagaaagtaaaatttcaagcaaagctggaacatgaatatattcacaattttaaacttctg

SEQ ID NO: 11964 - DNA, 4323 bp, Homo sapiens
  source 1..4323: mol_type = unassigned DNA
gtagacccgctaggcaggaagaggtcactaaaaatactatcgtgctgtcaatgtagaatgaagggttaagcgctcaaacccgcgcccgcgcgcaccgaaacggaagaacttccttgattagcatagtatcgaccctggggccgcgctgcgaggcggaggttcggtcccagctggggtgaagtgtgcagaccggttgcgattgtggtcagacgcagcacctacttctaatctgaggacccgcgatttacacttttgctgaataggacactgtggaatgaaacagaacagagatcaaaagtgtcctgtttcccagaggaacagttcatttcaacagccagggagaaagcctggatgctcaagttggggaatggcggtcaatgtgtattctacctcgataacccaagagactatgagcagacatgacatcattgcatgggttaatgacatagtatctttaaactacacaaaagtggaacagctttgttcaggagcggcctattgccaattcatggacatgctcttccctggctgcattagtttgaagaaagtaaaatttcaagcaaagctggaacatgaatatattcacaattttaaacttctgcaagcatcatttaagcgaatgaacgttgataaggtaattccagtggagaagctagtgaaaggacgtttccaggacaacctggattttattcaatggtttaagaaattctatgatgctaactacgatgggaaggagtatgatcctgtagaggcacgacaagggcaagatgcaattcctcctcctgaccctggtgaacagatcttcaacctgccaaaaaagtctcaccatgcaaactcccccacagcaggtgcagctaaatcaagtccagcagctaaaccaggatccacaccttctcgaccctcatcagccaaaagggcttcttccagtggctcagcatccaaatccgataaagatttagaaacgcaggtcatacagcttaatgaacaggtacattcattaaaacttgcccttgaaggcgtggaaaaggaaagggatttctactttgggaagttgagagagatcgagctactctgccaagaacacgggcaggaaaatgatgacctcgtgcagagactaatggacatcctgtatgcttcagaagaacacgagggccacacagaagagccggaagcagaggagcaagcccacgaacagcagcccccgcagcaggaagagtactgacccaccccggctgctcttgacacttccattgtgtgtgggaacgtttcttctggagaattggaacatgtgtggccccaagctcaacagaaaccagttgttcccaatctgccgttaccatcaacgcactgttgcatatgccagccactgcgcttggttcccattttctttgccaaggtgtattagcggacggccctctggccacctacccgagagatcgtagggtcacatacatccaacttcaccacttggctgcttgagattggttctgctcttttcttcatttctttccagaacaactctttcccaccccaacaccactgccaccacccctctttttatcctggtgtgaaacaatggtaatttgatatatggtatttatattggcatttttcaacccagtgtcactagatgtcacacacatttgtggtgctttgatgtttgcaagtctaacctctgaacataaatttggtcaaataattggaacaaagggaaacagatacttgatatgaaagccataatgacggtgacttgtgtcgtgggggaaaacataaggtcattttctccctctactcacaatactaaagggaaaaaatggattcaaagctaggatttcagggcccagcagtgttcctccatcagcatgttagacaactacacagtatgttgttagttttgaaagacattcactcaaggaaaacaccatctcaactttgcccgctcaccatgtcccttgcccccatgtagcccatttcccaggttatgctcttttctttctcagggtcctctttggtgggcagccactccccgagatgttgccatcagttttctgcagtccaaagagggtatggttaggtacgggtcttcctgcctcattcctcttcctctttgtgtaggtttcagccacaaaactgtcattcactctaggggacccctactaaagggtaacttcaggtgtgcagccctgagctccaaggctctgcaccatgccacacacttgctgtaaggctagaagtgaagaccttattaataggagcataattgcgagggagaatcatggttctgcagtctggtgtagacactggaataacagcacagaaaaatctatgactcccaatatcttctagaataaagaattttccctctttaacacaagggccctccttgtcattgaccttagctaaaccatggcaattcataaatagaggaaacattaatgaattaaaagcattccttattttttaactaatatttgtacattttcttagtctctttccaagtctttgcctcttttttttctttatttttattttttcctttgacagatggtatcccttcctggatcattcatttcaccttggtttctaactttaggtttactttcacttgttatttgacttagcaggtgcaacaaaaacaagaaacaaatgtgcccaccccactttccgcttaactgaaaagcttaaaataaatttctgaattatgtatcctgaagctttgaaatttctttattaatcgatgaaatatgaattctaaattctagcattgaagcttttcaccaaaagaagtctctccaaaataaatcttttgcagcaaagtgatatttattgagttatgtggaaaagatggcttgtatttttcagattattacaacacactgtgcagaattagacagatgttccgtggtgtttggtttccctttcttctctctcctgctcactctgcattatagcagcagcttatttctctaaggctggacagcctggctctcggcagtgacgtcctcccacacctggtcacaagtagtagtggctgtgctatacccagcatcatgcttaacagcgtgttgcccttctgagcctgttgtactcactgatctctttaaaaacaaaaaatagctcttgtaaaaggtcacaataactctatgcacctgatactgcagtggttcctaggccattcttcatctgctctggacatctcagtcatacccaatgctcagtggatcatgaccaaactcctgtcatgtggatgcacgtgagtgggtagcagggagtcaggatcctgccttctccagcaaccccttactgctgtataacttgcataagcctccctggtgactcttgcaggaaccactccattgccctccagctccccagccttctcagttataaacatgctggccagatctcttagcctgcaaagagaactttccccagtcaccatagaccattctccttcctgaaggcttggggcagaccattcgtttatttagagaagagctatacattcttctttctggtcccatcttaaacgtcttctgttgtgctgcaccccagatggtgtctcagatgctttggggaatctttaacagctgaatttgagtcagtcctcttaggctgcacctccagcctctgcagatcccccctcatttcccatggatggtgggaccccattattctctcatctcggcattcagggaacagtttccttagcggcccctggtcacatgtcatcgggctgggcaggaagcgtccctgattgcgtgctccacttctccctctcaggaagcccagtttcatccttagtaccccccctcgtgcccgctgtcggctggttatagcacttccactgctactgtcagataggaagtgatcgaagcagggggcaaagagaaagcccatatttgttctaagcagaaaagcaggaaaaaaaaaaaaaaaaaagaaagaaaaacacctgttgacctgagagaagtaaattccagaagggaaccaagaactcttcccttccctggtgagtatttccattattccgttaaggtttaatatgcattcagattacttttactaaataggacaccataaagcttttgttatatattaaatgtaaactgaaaggaatgtaaacatatgtattgttaattataaatatagataagtaatgacataatagatgaaaaagtcttattcagatgtatcacattcattttacattacccacctattgtcgcatggtagaatagttttttgtctctgaatatgtgaataacttgacttgcattgatctttttacatatttaataaaaaaaaaagtatatgttaaaa

SEQ ID NO: 11965 - DNA, 543 bp, Homo sapiens
  source 1..543: mol_type = unassigned DNA
gtgcagaccggttgcgattgtggtcagacgcagcacctacttctaatctgaggacccgcgatttacacttttgctgaataggacactgtggaatgaaacagaacagagatcaaaagttcatttcaacagccagggagaaagcctggatgctcaagttggggaatggcggtcaatgtgtattctacctcgataacccaagagactatgagcagacatgacatcattgcatgggttaatgacatagtatctttaaactacacaaaagtggaacagctttgttcaggagcggcctattgccaattcatggacatgctcttccctggctgcattagtttgaagaaagtaaaatttcaagcaaagctggaacatgaatatattcacaattttaaacttctgcaagcatcatttaagcgaatgaacgttgataaggtaattccagtggagaagctagtgaaaggacgtttccaggacaacctggattttattcaatggtttaagaaattctatgatgctaactacgatgggaaggagtatgatcctgta

SEQ ID NO: 11966 - DNA, 4265 bp, Homo sapiens
  source 1..4265: mol_type = unassigned DNA
gtcagctgccagagggcggggccgcaggagggcggggcgcgagcgagagctgggagaaggcagtgagcgagcaggcggcaggcacggtccgtgcggagcaggcgagcgagcgggaagacgcagccaccttcctcaccagccagcccacagcggtttgttccccttctcgggagtgcgccaatgcctgggccgacccaaaccctgtccccaaatggcgagaacaacaacgacatcatccaggataataacgggaccatcattcctttccggaagcacacagtgcgcggggagcgttcctacagttggggaatggcggtcaatgtgtattctacctcgataacccaagagactatgagcagacatgacatcattgcatgggttaatgacatagtatctttaaactacacaaaagtggaacagctttgttcaggagcggcctattgccaattcatggacatgctcttccctggctgcattagtttgaagaaagtaaaatttcaagcaaagctggaacatgaatatattcacaattttaaacttctgcaagcatcatttaagcgaatgaacgttgataaggtaattccagtggagaagctagtgaaaggacgtttccaggacaacctggattttattcaatggtttaagaaattctatgatgctaactacgatgggaaggagtatgatcctgtagaggcacgacaagggcaagatgcaattcctcctcctgaccctggtgaacagatcttcaacctgccaaaaaagtctcaccatgcaaactcccccacagcaggtgcagctaaatcaagtccagcagctaaaccaggatccacaccttctcgaccctcatcagccaaaagggcttcttccagtggctcagcatccaaatccgataaagatttagaaacgcaggtcatacagcttaatgaacaggtacattcattaaaacttgcccttgaaggcgtggaaaaggaaagggatttctactttgggaagttgagagagatcgagctactctgccaagaacacgggcaggaaaatgatgacctcgtgcagagactaatggacatcctgtatgcttcagaagaacacgagggccacacagaagagccggaagcagaggagcaagcccacgaacagcagcccccgcagcaggaagagtactgacccaccccggctgctcttgacacttccattgtgtgtgggaacgtttcttctggagaattggaacatgtgtggccccaagctcaacagaaaccagttgttcccaatctgccgttaccatcaacgcactgttgcatatgccagccactgcgcttggttcccattttctttgccaaggtgtattagcggacggccctctggccacctacccgagagatcgtagggtcacatacatccaacttcaccacttggctgcttgagattggttctgctcttttcttcatttctttccagaacaactctttcccaccccaacaccactgccaccacccctctttttatcctggtgtgaaacaatggtaatttgatatatggtatttatattggcatttttcaacccagtgtcactagatgtcacacacatttgtggtgctttgatgtttgcaagtctaacctctgaacataaatttggtcaaataattggaacaaagggaaacagatacttgatatgaaagccataatgacggtgacttgtgtcgtgggggaaaacataaggtcattttctccctctactcacaatactaaagggaaaaaatggattcaaagctaggatttcagggcccagcagtgttcctccatcagcatgttagacaactacacagtatgttgttagttttgaaagacattcactcaaggaaaacaccatctcaactttgcccgctcaccatgtcccttgcccccatgtagcccatttcccaggttatgctcttttctttctcagggtcctctttggtgggcagccactccccgagatgttgccatcagttttctgcagtccaaagagggtatggttaggtacgggtcttcctgcctcattcctcttcctctttgtgtaggtttcagccacaaaactgtcattcactctaggggacccctactaaagggtaacttcaggtgtgcagccctgagctccaaggctctgcaccatgccacacacttgctgtaaggctagaagtgaagaccttattaataggagcataattgcgagggagaatcatggttctgcagtctggtgtagacactggaataacagcacagaaaaatctatgactcccaatatcttctagaataaagaattttccctctttaacacaagggccctccttgtcattgaccttagctaaaccatggcaattcataaatagaggaaacattaatgaattaaaagcattccttattttttaactaatatttgtacattttcttagtctctttccaagtctttgcctcttttttttctttatttttattttttcctttgacagatggtatcccttcctggatcattcatttcaccttggtttctaactttaggtttactttcacttgttatttgacttagcaggtgcaacaaaaacaagaaacaaatgtgcccaccccactttccgcttaactgaaaagcttaaaataaatttctgaattatgtatcctgaagctttgaaatttctttattaatcgatgaaatatgaattctaaattctagcattgaagcttttcaccaaaagaagtctctccaaaataaatcttttgcagcaaagtgatatttattgagttatgtggaaaagatggcttgtatttttcagattattacaacacactgtgcagaattagacagatgttccgtggtgtttggtttccctttcttctctctcctgctcactctgcattatagcagcagcttatttctctaaggctggacagcctggctctcggcagtgacgtcctcccacacctggtcacaagtagtagtggctgtgctatacccagcatcatgcttaacagcgtgttgcccttctgagcctgttgtactcactgatctctttaaaaacaaaaaatagctcttgtaaaaggtcacaataactctatgcacctgatactgcagtggttcctaggccattcttcatctgctctggacatctcagtcatacccaatgctcagtggatcatgaccaaactcctgtcatgtggatgcacgtgagtgggtagcagggagtcaggatcctgccttctccagcaaccccttactgctgtataacttgcataagcctccctggtgactcttgcaggaaccactccattgccctccagctccccagccttctcagttataaacatgctggccagatctcttagcctgcaaagagaactttccccagtcaccatagaccattctccttcctgaaggcttggggcagaccattcgtttatttagagaagagctatacattcttctttctggtcccatcttaaacgtcttctgttgtgctgcaccccagatggtgtctcagatgctttggggaatctttaacagctgaatttgagtcagtcctcttaggctgcacctccagcctctgcagatcccccctcatttcccatggatggtgggaccccattattctctcatctcggcattcagggaacagtttccttagcggcccctggtcacatgtcatcgggctgggcaggaagcgtccctgattgcgtgctccacttctccctctcaggaagcccagtttcatccttagtaccccccctcgtgcccgctgtcggctggttatagcacttccactgctactgtcagataggaagtgatcgaagcagggggcaaagagaaagcccatatttgttctaagcagaaaagcaggaaaaaaaaaaaaaaaaaagaaagaaaaacacctgttgacctgagagaagtaaattccagaagggaaccaagaactcttcccttccctggtgagtatttccattattccgttaaggtttaatatgcattcagattacttttactaaataggacaccataaagcttttgttatatattaaatgtaaactgaaaggaatgtaaacatatgtattgttaattataaatatagataagtaatgacataatagatgaaaaagtcttattcagatgtatcacattcattttacattacccacctattgtcgcatggtagaatagttttttgtctctgaatatgtgaataacttgacttgcattgatctttttacatatttaataaaaaaaaaagtatatgttaaaa

SEQ ID NO: 11967 - DNA, 4093 bp, Homo sapiens
  source 1..4093: mol_type = unassigned DNA
gagagctgggagaaggcagtgagcgagcaggcggcaggcacggtccgtgcggagcaggcgagcgagcgggaagacgcagccaccttcctcaccagccagcccacagcggtttgttccccttctcgggagtgcgccaatgcctgggccgacccaaaccctgtccccaaatggcgagaacaacaacgacatcatccaggataataacgggaccatcattcctttccggaagcacacagtgcgcggggagcgttcctacaggagcggcctattgccaattcatggacatgctcttccctggctgcattagtttgaagaaagtaaaatttcaagcaaagctggaacatgaatatattcacaattttaaacttctgcaagcatcatttaagcgaatgaacgttgataaggtaattccagtggagaagctagtgaaaggacgtttccaggacaacctggattttattcaatggtttaagaaattctatgatgctaactacgatgggaaggagtatgatcctgtagaggcacgacaagggcaagatgcaattcctcctcctgaccctggtgaacagatcttcaacctgccaaaaaagtctcaccatgcaaactcccccacagcaggtgcagctaaatcaagtccagcagctaaaccaggatccacaccttctcgaccctcatcagccaaaagggcttcttccagtggctcagcatccaaatccgataaagatttagaaacgcaggtcatacagcttaatgaacaggtacattcattaaaacttgcccttgaaggcgtggaaaaggaaagggatttctactttgggaagttgagagagatcgagctactctgccaagaacacgggcaggaaaatgatgacctcgtgcagagactaatggacatcctgtatgcttcagaagaacacgagggccacacagaagagccggaagcagaggagcaagcccacgaacagcagcccccgcagcaggaagagtactgacccaccccggctgctcttgacacttccattgtgtgtgggaacgtttcttctggagaattggaacatgtgtggccccaagctcaacagaaaccagttgttcccaatctgccgttaccatcaacgcactgttgcatatgccagccactgcgcttggttcccattttctttgccaaggtgtattagcggacggccctctggccacctacccgagagatcgtagggtcacatacatccaacttcaccacttggctgcttgagattggttctgctcttttcttcatttctttccagaacaactctttcccaccccaacaccactgccaccacccctctttttatcctggtgtgaaacaatggtaatttgatatatggtatttatattggcatttttcaacccagtgtcactagatgtcacacacatttgtggtgctttgatgtttgcaagtctaacctctgaacataaatttggtcaaataattggaacaaagggaaacagatacttgatatgaaagccataatgacggtgacttgtgtcgtgggggaaaacataaggtcattttctccctctactcacaatactaaagggaaaaaatggattcaaagctaggatttcagggcccagcagtgttcctccatcagcatgttagacaactacacagtatgttgttagttttgaaagacattcactcaaggaaaacaccatctcaactttgcccgctcaccatgtcccttgcccccatgtagcccatttcccaggttatgctcttttctttctcagggtcctctttggtgggcagccactccccgagatgttgccatcagttttctgcagtccaaagagggtatggttaggtacgggtcttcctgcctcattcctcttcctctttgtgtaggtttcagccacaaaactgtcattcactctaggggacccctactaaagggtaacttcaggtgtgcagccctgagctccaaggctctgcaccatgccacacacttgctgtaaggctagaagtgaagaccttattaataggagcataattgcgagggagaatcatggttctgcagtctggtgtagacactggaataacagcacagaaaaatctatgactcccaatatcttctagaataaagaattttccctctttaacacaagggccctccttgtcattgaccttagctaaaccatggcaattcataaatagaggaaacattaatgaattaaaagcattccttattttttaactaatatttgtacattttcttagtctctttccaagtctttgcctcttttttttctttatttttattttttcctttgacagatggtatcccttcctggatcattcatttcaccttggtttctaactttaggtttactttcacttgttatttgacttagcaggtgcaacaaaaacaagaaacaaatgtgcccaccccactttccgcttaactgaaaagcttaaaataaatttctgaattatgtatcctgaagctttgaaatttctttattaatcgatgaaatatgaattctaaattctagcattgaagcttttcaccaaaagaagtctctccaaaataaatcttttgcagcaaagtgatatttattgagttatgtggaaaagatggcttgtatttttcagattattacaacacactgtgcagaattagacagatgttccgtggtgtttggtttccctttcttctctctcctgctcactctgcattatagcagcagcttatttctctaaggctggacagcctggctctcggcagtgacgtcctcccacacctggtcacaagtagtagtggctgtgctatacccagcatcatgcttaacagcgtgttgcccttctgagcctgttgtactcactgatctctttaaaaacaaaaaatagctcttgtaaaaggtcacaataactctatgcacctgatactgcagtggttcctaggccattcttcatctgctctggacatctcagtcatacccaatgctcagtggatcatgaccaaactcctgtcatgtggatgcacgtgagtgggtagcagggagtcaggatcctgccttctccagcaaccccttactgctgtataacttgcataagcctccctggtgactcttgcaggaaccactccattgccctccagctccccagccttctcagttataaacatgctggccagatctcttagcctgcaaagagaactttccccagtcaccatagaccattctccttcctgaaggcttggggcagaccattcgtttatttagagaagagctatacattcttctttctggtcccatcttaaacgtcttctgttgtgctgcaccccagatggtgtctcagatgctttggggaatctttaacagctgaatttgagtcagtcctcttaggctgcacctccagcctctgcagatcccccctcatttcccatggatggtgggaccccattattctctcatctcggcattcagggaacagtttccttagcggcccctggtcacatgtcatcgggctgggcaggaagcgtccctgattgcgtgctccacttctccctctcaggaagcccagtttcatccttagtaccccccctcgtgcccgctgtcggctggttatagcacttccactgctactgtcagataggaagtgatcgaagcagggggcaaagagaaagcccatatttgttctaagcagaaaagcaggaaaaaaaaaaaaaaaaaagaaagaaaaacacctgttgacctgagagaagtaaattccagaagggaaccaagaactcttcccttccctggtgagtatttccattattccgttaaggtttaatatgcattcagattacttttactaaataggacaccataaagcttttgttatatattaaatgtaaactgaaaggaatgtaaacatatgtattgttaattataaatatagataagtaatgacataatagatgaaaaagtcttattcagatgtatcacattcattttacattacccacctattgtcgcatggtagaatagttttttgtctctgaatatgtgaataacttgacttgcattgatctttttacatatttaataaaaaaaaaagtatatgttaaaa

SEQ ID NO: 11968 - DNA, 1389 bp, Homo sapiens
  source 1..1389: mol_type = unassigned DNA
caggcggcaggcacggtccgtgcggagcaggcgagcgagcgggaagacgcagccaccttcctcaccagccagcccacagcggtttgttccccttctcgggagtgcgccaatgcctgggccgacccaaaccctgtccccaaatggcgagaacaacaacgacatcatccaggataataacgggaccatcattcctttccggaagcacacagtgcgcggggagcgttcctacagttggggaatggcggtcaatgtgtattctacctcgataacccaagagactatgagcagacatgacatcattgcatgggttaatgacatagtatctttaaactacacaaaagtggaacagctttgttcaggagcggcctattgccaattcatggacatgctcttccctggctgcattagtttgaagaaagtaaaatttcaagcaaagctggaacatgaatatattcacaattttaaacttctgcaagcatcatttaagcgaatgaacgttgataaggtaattccagtggagaagctagtgaaaggacgtttccaggacaacctggattttattcaatggtttaagaaattctatgatgctaactacgatgggaaggagtatgatcctgtagaggcacgacaagggcaagatgcaattcctcctcctgaccctggtgaacagatcttcaacctgccaaaaaagtctcaccatgcaaactcccccacagcaggtgcagctaaatcaagtccagcagctaaaccaggatccacaccttctcgaccctcatcagccaaaagggcttcttccagtggctcagcatccaaatccgataaagatttagaaacgcaggtcatacagcttaatgaacaggtaatgcatcagctctggccacgcctctaggagcagtgacgtgtgtaagaggtagggggcctaggatcccctaggactggggtaagggagggaagggtaaggaagaatccttggtttcaagtaagtgagaataaaaagaattgttcgaagacaaaatcagtagcccatgatgaataaaaagtgttagtcacaaatctcaaagctgtacattaagatggggcagatggctcagccttgctgcagacttcaggctaccttcccctcccctgctcctcagggccgtcaagagctccaggctagaccgttgcccatcctgcccacttctggccattctagatagtgctgcattagggtgagtctgcctccctctctttttaaaggctgggtcagggttagtctgtctccctcccactctcttcttttttcccttcttcctttctttcttcagctattagtagttgagcttattctatatgaaagatattacgcttaatgctggtaatataaaggtagtaaaatagatacctttc

SEQ ID NO: 11969 - DNA, 622 bp, Homo sapiens
  source 1..622: mol_type = unassigned DNA
cctcaccagccagcccacagcggtttgttccccttctcgggagtgcgccaatgcctgggccgacccaaaccctgtccccaaatggcgagaacaacaacgacatcatccaggataataacgggaccatcattcctttccggaagcacacagtgcgcggggagcgttcctacagttggggaatggcggtcaatgtgtattctacctcgataacccaagagactatgagcagacatgacatcattgcatgggttaatgacatagtatctttaaactacacaaaagtggaacagctttgttcaggtaagacatattcttttaagtgtttacctaaatatttacagtctgtcatgtggaatgtgattttatgaaccacagctgctatattttgggtaggaaaaagtatatattgctattggcatgtaattaaagggggaaaaactcagatataactaaaggacgtattgggaaaagtgtttatgagcatccaggagcacaagcagagccacacggacacgtattggaaaggtctcttgcttgagcttcgtaatgcctttcactggctcctagcctcttctctgtcatcccatctgccatcacacttgcctcctgaaaacaccaattg

SEQ ID NO: 11970 - DNA, 4080 bp, Homo sapiens
  source 1..4080: mol_type = unassigned DNA
gcgttcctacaggtaatggggctggcacgagagcagcgccggggaccgccgtgagggcgcgcggaaatccagcccgttatataatggagcagacactgcctgcgacccctgctgcagttggggaatggcggtcaatgtgtattctacctcgataacccaagagactatgagcagacatgacatcattgcatgggttaatgacatagtatctttaaactacacaaaagtggaacagctttgttcaggagcggcctattgccaattcatggacatgctcttccctggctgcattagtttgaagaaagtaaaatttcaagcaaagctggaacatgaatatattcacaattttaaacttctgcaagcatcatttaagcgaatgaacgttgataaggtaattccagtggagaagctagtgaaaggacgtttccaggacaacctggattttattcaatggtttaagaaattctatgatgctaactacgatgggaaggagtatgatcctgtagaggcacgacaagggcaagatgcaattcctcctcctgaccctggtgaacagatcttcaacctgccaaaaaagtctcaccatgcaaactcccccacagcaggtgcagctaaatcaagtccagcagctaaaccaggatccacaccttctcgaccctcatcagccaaaagggcttcttccagtggctcagcatccaaatccgataaagatttagaaacgcaggtcatacagcttaatgaacaggtacattcattaaaacttgcccttgaaggcgtggaaaaggaaagggatttctactttgggaagttgagagagatcgagctactctgccaagaacacgggcaggaaaatgatgacctcgtgcagagactaatggacatcctgtatgcttcagaagaacacgagggccacacagaagagccggaagcagaggagcaagcccacgaacagcagcccccgcagcaggaagagtactgacccaccccggctgctcttgacacttccattgtgtgtgggaacgtttcttctggagaattggaacatgtgtggccccaagctcaacagaaaccagttgttcccaatctgccgttaccatcaacgcactgttgcatatgccagccactgcgcttggttcccattttctttgccaaggtgtattagcggacggccctctggccacctacccgagagatcgtagggtcacatacatccaacttcaccacttggctgcttgagattggttctgctcttttcttcatttctttccagaacaactctttcccaccccaacaccactgccaccacccctctttttatcctggtgtgaaacaatggtaatttgatatatggtatttatattggcatttttcaacccagtgtcactagatgtcacacacatttgtggtgctttgatgtttgcaagtctaacctctgaacataaatttggtcaaataattggaacaaagggaaacagatacttgatatgaaagccataatgacggtgacttgtgtcgtgggggaaaacataaggtcattttctccctctactcacaatactaaagggaaaaaatggattcaaagctaggatttcagggcccagcagtgttcctccatcagcatgttagacaactacacagtatgttgttagttttgaaagacattcactcaaggaaaacaccatctcaactttgcccgctcaccatgtcccttgcccccatgtagcccatttcccaggttatgctcttttctttctcagggtcctctttggtgggcagccactccccgagatgttgccatcagttttctgcagtccaaagagggtatggttaggtacgggtcttcctgcctcattcctcttcctctttgtgtaggtttcagccacaaaactgtcattcactctaggggacccctactaaagggtaacttcaggtgtgcagccctgagctccaaggctctgcaccatgccacacacttgctgtaaggctagaagtgaagaccttattaataggagcataattgcgagggagaatcatggttctgcagtctggtgtagacactggaataacagcacagaaaaatctatgactcccaatatcttctagaataaagaattttccctctttaacacaagggccctccttgtcattgaccttagctaaaccatggcaattcataaatagaggaaacattaatgaattaaaagcattccttattttttaactaatatttgtacattttcttagtctctttccaagtctttgcctcttttttttctttatttttattttttcctttgacagatggtatcccttcctggatcattcatttcaccttggtttctaactttaggtttactttcacttgttatttgacttagcaggtgcaacaaaaacaagaaacaaatgtgcccaccccactttccgcttaactgaaaagcttaaaataaatttctgaattatgtatcctgaagctttgaaatttctttattaatcgatgaaatatgaattctaaattctagcattgaagcttttcaccaaaagaagtctctccaaaataaatcttttgcagcaaagtgatatttattgagttatgtggaaaagatggcttgtatttttcagattattacaacacactgtgcagaattagacagatgttccgtggtgtttggtttccctttcttctctctcctgctcactctgcattatagcagcagcttatttctctaaggctggacagcctggctctcggcagtgacgtcctcccacacctggtcacaagtagtagtggctgtgctatacccagcatcatgcttaacagcgtgttgcccttctgagcctgttgtactcactgatctctttaaaaacaaaaaatagctcttgtaaaaggtcacaataactctatgcacctgatactgcagtggttcctaggccattcttcatctgctctggacatctcagtcatacccaatgctcagtggatcatgaccaaactcctgtcatgtggatgcacgtgagtgggtagcagggagtcaggatcctgccttctccagcaaccccttactgctgtataacttgcataagcctccctggtgactcttgcaggaaccactccattgccctccagctccccagccttctcagttataaacatgctggccagatctcttagcctgcaaagagaactttccccagtcaccatagaccattctccttcctgaaggcttggggcagaccattcgtttatttagagaagagctatacattcttctttctggtcccatcttaaacgtcttctgttgtgctgcaccccagatggtgtctcagatgctttggggaatctttaacagctgaatttgagtcagtcctcttaggctgcacctccagcctctgcagatcccccctcatttcccatggatggtgggaccccattattctctcatctcggcattcagggaacagtttccttagcggcccctggtcacatgtcatcgggctgggcaggaagcgtccctgattgcgtgctccacttctccctctcaggaagcccagtttcatccttagtaccccccctcgtgcccgctgtcggctggttatagcacttccactgctactgtcagataggaagtgatcgaagcagggggcaaagagaaagcccatatttgttctaagcagaaaagcaggaaaaaaaaaaaaaaaaaagaaagaaaaacacctgttgacctgagagaagtaaattccagaagggaaccaagaactcttcccttccctggtgagtatttccattattccgttaaggtttaatatgcattcagattacttttactaaataggacaccataaagcttttgttatatattaaatgtaaactgaaaggaatgtaaacatatgtattgttaattataaatatagataagtaatgacataatagatgaaaaagtcttattcagatgtatcacattcattttacattacccacctattgtcgcatggtagaatagttttttgtctctgaatatgtgaataacttgacttgcattgatctttttacatatttaataaaaaaaaaagtatatgttaaaa

SEQ ID NO: 11971 - DNA, 476 bp, Homo sapiens
  source 1..476: mol_type = unassigned DNA
gttatttctgcttctctctctctctctcttttgggttttattcacaggaattgctggtcatgtcttatactatattttgggtggttttttttcttcactctcactcccttgcaggtacattcattaaaacttgcccttgaaggcgtggaaaaggaaagggatttctactttgggaagttgagagagatcgagctactctgccaagaacacgggcaggaaaatgatgacctcgtgcagagactaatggacatcctgtatgcttcagaagaacacgagggccacacagaagagccggaagcagaggagcaagcccacgaacagcagcccccgcagcaggaagagtactgacccaccccggctgctcttgacacttccattgtgtgtgggaacgtttcttctggagaattggaacatgtgtggccccaagctcaacagaaaccagttgttcccaatctgccgttaccatcaacgcactg

SEQ ID NO: 11972 - DNA, 4173 bp, Homo sapiens
  source 1..4173: mol_type = unassigned DNA
ctctcgggtggactcccggagcggcggcggcggcggcggtggcagactgcgagtcacgtgcgacagaggaggcggagcacggcggccgggtgggtggagaaaacaaagcccccagctgtcagcagaggaaggaggcgacagcgccggagcagtgtcctgtttcccagaggaacagttcatttcaacagccagggagaaagcctggatgctcaagttggggaatggcggtcaatgtgtattctacctcgataacccaagagactatgagcagacatgacatcattgcatgggttaatgacatagtatctttaaactacacaaaagtggaacagctttgttcaggagcggcctattgccaattcatggacatgctcttccctggctgcattagtttgaagaaagtaaaatttcaagcaaagctggaacatgaatatattcacaattttaaacttctgcaagcatcatttaagcgaatgaacgttgataaggtaattccagtggagaagctagtgaaaggacgtttccaggacaacctggattttattcaatggtttaagaaattctatgatgctaactacgatgggaaggagtatgatcctgtagaggcacgacaagggcaagatgcaattcctcctcctgaccctggtgaacagatcttcaacctgccaaaaaagtctcaccatgcaaactcccccacagcaggtgcagctaaatcaagtccagcagctaaaccaggatccacaccttctcgaccctcatcagccaaaagggcttcttccagtggctcagcatccaaatccgataaagatttagaaacgcaggtcatacagcttaatgaacaggtacattcattaaaacttgcccttgaaggcgtggaaaaggaaagggatttctactttgggaagttgagagagatcgagctactctgccaagaacacgggcaggaaaatgatgacctcgtgcagagactaatggacatcctgtatgcttcagaagaacacgagggccacacagaagagccggaagcagaggagcaagcccacgaacagcagcccccgcagcaggaagagtactgacccaccccggctgctcttgacacttccattgtgtgtgggaacgtttcttctggagaattggaacatgtgtggccccaagctcaacagaaaccagttgttcccaatctgccgttaccatcaacgcactgttgcatatgccagccactgcgcttggttcccattttctttgccaaggtgtattagcggacggccctctggccacctacccgagagatcgtagggtcacatacatccaacttcaccacttggctgcttgagattggttctgctcttttcttcatttctttccagaacaactctttcccaccccaacaccactgccaccacccctctttttatcctggtgtgaaacaatggtaatttgatatatggtatttatattggcatttttcaacccagtgtcactagatgtcacacacatttgtggtgctttgatgtttgcaagtctaacctctgaacataaatttggtcaaataattggaacaaagggaaacagatacttgatatgaaagccataatgacggtgacttgtgtcgtgggggaaaacataaggtcattttctccctctactcacaatactaaagggaaaaaatggattcaaagctaggatttcagggcccagcagtgttcctccatcagcatgttagacaactacacagtatgttgttagttttgaaagacattcactcaaggaaaacaccatctcaactttgcccgctcaccatgtcccttgcccccatgtagcccatttcccaggttatgctcttttctttctcagggtcctctttggtgggcagccactccccgagatgttgccatcagttttctgcagtccaaagagggtatggttaggtacgggtcttcctgcctcattcctcttcctctttgtgtaggtttcagccacaaaactgtcattcactctaggggacccctactaaagggtaacttcaggtgtgcagccctgagctccaaggctctgcaccatgccacacacttgctgtaaggctagaagtgaagaccttattaataggagcataattgcgagggagaatcatggttctgcagtctggtgtagacactggaataacagcacagaaaaatctatgactcccaatatcttctagaataaagaattttccctctttaacacaagggccctccttgtcattgaccttagctaaaccatggcaattcataaatagaggaaacattaatgaattaaaagcattccttattttttaactaatatttgtacattttcttagtctctttccaagtctttgcctcttttttttctttatttttattttttcctttgacagatggtatcccttcctggatcattcatttcaccttggtttctaactttaggtttactttcacttgttatttgacttagcaggtgcaacaaaaacaagaaacaaatgtgcccaccccactttccgcttaactgaaaagcttaaaataaatttctgaattatgtatcctgaagctttgaaatttctttattaatcgatgaaatatgaattctaaattctagcattgaagcttttcaccaaaagaagtctctccaaaataaatcttttgcagcaaagtgatatttattgagttatgtggaaaagatggcttgtatttttcagattattacaacacactgtgcagaattagacagatgttccgtggtgtttggtttccctttcttctctctcctgctcactctgcattatagcagcagcttatttctctaaggctggacagcctggctctcggcagtgacgtcctcccacacctggtcacaagtagtagtggctgtgctatacccagcatcatgcttaacagcgtgttgcccttctgagcctgttgtactcactgatctctttaaaaacaaaaaatagctcttgtaaaaggtcacaataactctatgcacctgatactgcagtggttcctaggccattcttcatctgctctggacatctcagtcatacccaatgctcagtggatcatgaccaaactcctgtcatgtggatgcacgtgagtgggtagcagggagtcaggatcctgccttctccagcaaccccttactgctgtataacttgcataagcctccctggtgactcttgcaggaaccactccattgccctccagctccccagccttctcagttataaacatgctggccagatctcttagcctgcaaagagaactttccccagtcaccatagaccattctccttcctgaaggcttggggcagaccattcgtttatttagagaagagctatacattcttctttctggtcccatcttaaacgtcttctgttgtgctgcaccccagatggtgtctcagatgctttggggaatctttaacagctgaatttgagtcagtcctcttaggctgcacctccagcctctgcagatcccccctcatttcccatggatggtgggaccccattattctctcatctcggcattcagggaacagtttccttagcggcccctggtcacatgtcatcgggctgggcaggaagcgtccctgattgcgtgctccacttctccctctcaggaagcccagtttcatccttagtaccccccctcgtgcccgctgtcggctggttatagcacttccactgctactgtcagataggaagtgatcgaagcagggggcaaagagaaagcccatatttgttctaagcagaaaagcaggaaaaaaaaaaaaaaaaaagaaagaaaaacacctgttgacctgagagaagtaaattccagaagggaaccaagaactcttcccttccctggtgagtatttccattattccgttaaggtttaatatgcattcagattacttttactaaataggacaccataaagcttttgttatatattaaatgtaaactgaaaggaatgtaaacatatgtattgttaattataaatatagataagtaatgacataatagatgaaaaagtcttattcagatgtatcacattcattttacattacccacctattgtcgcatggtagaatagttttttgtctctgaatatgtgaataacttgacttgcattgatctttttacatatttaataaaaaaaaaagtatatgtt

SEQ ID NO: 11973 - DNA, 758 bp, Homo sapiens
  source 1..758: mol_type = unassigned DNA
gaccaccccagaggccgccccattagctcgcttgctttgggcggcgtcgctcccacggcgcccagggtacccccgccgctgtctgcctgtcttcctccattaccgcgcaggcttggtcaccgcattaaggcattcccgctctccgcggaactgctctgccgtctcggcggtgaaagtgtgagagggtccgtagttgggtcaactttgactcctctcgcctgcccggatccttaagggcctcctcgtcctcccggtctccggtcgctgccgggtctgtgcgccggtccgcgcccgccctcgctctgccatgggcgcttccagctcctccgcgctggcccgcctcggcctcccagcccggccctggcccaggtggctcggggtcgccgcgctaggactggccgccgtggccctggggactgtcgcctggcgccgcgcatggcccaggcggcgccggcggctgcagcaggtgggcaccgtggcgaagctctggatctacccggtgaaatcctgcaaaggggtgccggtgagcgaggctgagtgcacggccatggggctgcgcagcggcaacctgcgggacagaatgtgtgcatgaagaggaaaggctgtttgggaggtttcctgatgtaggacccccgcatgccgcggttttggctggtgattaaggaagatggacacatggtcactgcccgacaggagcctcgcctcgtgctcatctccatcatttatgagaataactgcctgatcttcagggctccaga

SEQ ID NO: 11974 - DNA, 1335 bp, Homo sapiens
  source 1..1335: mol_type = unassigned DNA
cgtcgctcccacggcgcccagggtacccccgccgctgtctgcctgtcttcctccattaccgcgcaggcttggtcaccgcattaaggcattcccgctctccgcggaactgctctgccgtctcggcggtgaaagtgtgagagggtccgtagttgggtcaactttgactcctctcgcctgcccggatccttaagggcctcctcgtcctcccggtctccggtcgctgccgggtctgtgcgccggtccgcgcccgccctcgctctgccatgggcgcttccagctcctccgcgctggcccgcctcggcctcccagcccggccctggcccaggtggctcggggtcgccgcgctaggactggccgccgtggccctggggactgtcgcctggcgccgcgcatggcccaggcggcgccggcggctgcagcaggtgggcaccgtggcgaagctctggatctacccggtgaaatcctgcaaaggggtgccggtgagcgaggctgagtgcacggccatggggctgcgcagcggcaacctgcgggacaggttttggctggtgattaaggaagatggacacatggtcactgcccgacaggagcctcgcctcgtgctcatctccatcatttatgagaataactgcctgatcttcagggctccagacatggaccagctggttttgcctagcaagcagccttcctcaaacaaactccacaactgcaggatatttggccttgacattaaaggcagagactgtggcaatgaggcagctaagtggttcaccaacttcttgaaaactgaagcgtatagattggttcaatttgagacaaacatgaagggaagaacatcaagaaaacttctccccactcttgatcagaatttccaggtggcctacccagactactgcccgctcctgatcatgacagatgcctccctggtagatttgaataccaggatggagaagaaaatgaaaatggagaatttcaggccaaatattgtggtgaccggctgtgatgcttttgaggaggcttcagcaaccaggagggattgactgagatcttaacaacagcagcaacgatacatcagcaaatccttattatccagccttcaactatctttaccctggaaaacaatctcgatttttgacttttcaaagttgtgtatgctccaggttaatgcaaggaaagtattagaggggggaatatgaaagtatatatataaattttaggtactgaaggctttaaaaataattaagatcatcaaaaatgctattttgaatgttatcatggctattacacttttacttcctgactttaatattgatgaataaagcaagtttaatgaatcaa

SEQ ID NO: 11975 - DNA, 2134 bp, Homo sapiens
  source 1..2134: mol_type = unassigned DNA
ggcttggtcaccgcattaaggcattcccgctctccgcggaactgctctgccgtctcggcggtgaaagtgtgagagggtccgtagttgggtcaactttgactcctctcgcctgcccggatccttaagggcctcctcgtcctcccggtctccggtcgctgccgggtctgtgcgccggtccgcgcccgccctcgctctgccatgggcgcttccagctcctccgcgctggcccgcctcggcctcccagcccggccctggcccaggtggctcggggtcgccgcgctaggactggccgccgtggccctggggactgtcgcctggcgccgcgcatggcccaggcggcgccggcggctgcagcaggtgggcaccgtggcgaagctctggatctacccggtgaaatcctgcaaaggggtgccggtgagcgaggctgagtgcacggccatggggctgcgcagcggcaacctgcgggacaggttttggctggtgattaaggaagatggacacatggtcactgcccgacaggagcctcgcctcgtgctcatctccatcatttatgagaataactgcctgatcttcagggctccagacatggaccagctggttttgcctagcaagcagccttcctcaaacaaactccacaactgcaggatatttggccttgacattaaaggcagagactgtggcaatgaggcagctaagtggttcaccaacttcttgaaaactgaagcgtatagattggttcaatttgagacaaacatgaagggaagaacatcaagaaaacttctccccactcttgatcagaatttccaggtggcctacccagactactgcccgctcctgatcatgacagatgcctccctggtagatttgaataccaggatggagaagaaaatgaaaatggagaatttcaggccaaatattgtggtgaccggctgtgatgcttttgaggaggatacctgggatgaactcctaattggtagtgtagaagtgaaaaaggtaatggcatgccccaggtgtattttgacaacggtggacccagacactggagtcatagacaggaaacagccactggacaccctgaagagctaccgcctgtgtgatccttctgagagggaattgtacaagttgtctccactttttgggatctattattcagtggaaaaaattggaagcctgagagttggtgaccctgtgtatcggatggtgtagtgatgagtgatggatccactagggtgatatggcttcagcaaccaggagggattgactgagatcttaacaacagcagcaacgatacatcagcaaatccttattatccagccttcaactatctttaccctggaaaacaatctcgatttttgacttttcaaagttgtgtatgctccaggttaatgcaaggaaagtattagaggggggaatatgaaagtatatatataaattttaggtactgaaggctttaaaaataattaagatcatcaaaaatgctattttgaatgttatcatggctattacacttttacttcctgactttaatattgatgaataaagcaagtttaatgaatcaactaaaaagctgcaaaaatgtttttaaaatgtgtgccttttattacctatcagtctatgttttgggagaaatgggaagcaacagatcactgtgtcctgatgtgcaggacgcatgttaccacactcacaaatgcctaatattggtctttatgtggccattgagtcctgttgactttccactcatgtgctttttactctagcattatggaatctgggctgtacttgagtatggaaattctcttatagacttagttttagtactctattacacctttactaagccacataaaagtaatctgtttgtgtgtaactgccagatataccacctggaattccaagtaagataaggaagaggatgacatttaaaagagaatggaattttgagagtaggaatgcaaggaagacagcatgaacatatttttttcagtgcaaataattttttcgtaacaaagaaacgaacaactttggtatgatcttaagcaaaaatactcactgaaatagtatgtggatgaattcacctacttacaattttatggtttctttgtaaataataaatgtgaatctcaatcctgcttta

SEQ ID NO: 11976 - DNA, 585 bp, Homo sapiens
  source 1..585: mol_type = unassigned DNA
ggacacatggtcactgcccgacaggagcctcgcctcgtgctcatctccatcatttatgagaataactgcctgatcttcagggctccagacatggaccagctggttttgcctagcaagcagccttcctcaaacaaactccacaactgcaggatatttggccttgacattaaaggcagagactgtggcaatgaggcagctaagtggttcaccaacttcttgaaaactgaagcgtatagattggttcaatttgagacaaacatgaagggaagaacatcaagaaaacttctccccactcttgatcagaatttccaggtggcctacccagactactgcccgctcctgatcatgacagatgcctccctggtagatttgaataccaggatggagaagaaaatgaaaatggagaatttcaggccaaatattgtggtgaccggctgtgatgcttttgaggaggatacctgggatgaactcctaattggtagtgtagaagtgaaaaaggtaatggcatgccccaggtaaggagcctagctagaccccaggactgtggtgtggcccattcattggttcctaagcatcacctaaccc

SEQ ID NO: 11977 - DNA, 252 bp, Homo sapiens
  source 1..252: mol_type = unassigned DNA
ccagggctcagaggggagcctcagattactccgtgaactctcatcttacgctttttcaagcaaagcgtctaagctgaaatccacaactcatggttcccaattttcaaaagtctgaagcaataattcactgaattcagtatttcaggatatttggccttgacattaaaggcagagactgtggcaatgaggcagctaagtggttcaccaacttcttgaaaactgaagcgtatagattggttcaatttgagacaa

SEQ ID NO: 11978 - DNA, 699 bp, Homo sapiens
  source 1..699: mol_type = unassigned DNA
agactcaaaggctaatgaagccaccatttaaaagataactttctcttttctcttaggatacctgggatgaactcctaattggtagtgtagaagtgaaaaaggtaatggcatgccccaggtaaggagcctagctagaccccaggactgtggtgtggcccattcattggttcctaagcatcacctaacccttggttactgcataacaggtgtattttgacaacggtggacccagacactggagtcatagacaggaaacagccactggacaccctgaagagctaccgcctgtgtgatccttctgagagggaattgtacaagttgtctccactttttgggatctattattcagtggaaaaaattggaagcctgagagttggtgaccctgtgtatcggatggtgtagtgatgagtgatggatccactagggtgatatggcttcagcaaccaggagggattgactgagatcttaacaacagcagcaacgatacatcagcaaatccttattatccagccttcaactatctttaccctggaaaacaatctcgatttttgacttttcaaagttgtgtatgctccaggttaatgcaaggaaagtattagaggggggaatatgaaagtatatatataaattttaggtactgaaggctttaaaaataattaagatcatcaaaaatgctattttgaatgttatcatggctat

SEQ ID NO: 11979 - DNA, 5877 bp, Homo sapiens
  source 1..5877: mol_type = unassigned DNA
agaggaggggagaggactggggagccgagccagagccgggctgcctgccacccggctgctcgtccgctagctggggaggagcgctccacccgcaactgacaaaggatgggagaatgcccgcgccccgggatgccggccgcacgcagcctggcggccgcctgagctacttcaccctccgccggtaagtgactgcaaacatcattcattcaatcagcctcactgggagccccttctctccggctggtagtcctgggcggcttgtccctgatcccgagcggggcttggcacagcatcagccctggagggcaggcagcaggtgcctttgcctggtgggtccactggggagcgtggctggggttcgcggcgggtgctgccacccaacctgcgggcggcgggctcgcccagtaggcgcctctctggtgagaggaggcggctccagcccgcagcctggggtagttgctactattggcccccagcgcccgctctgcgcgcgcgccgtttctggcggatccccagtgcgcggcgcgctgtttacaccggcgtggtactagtcacggagccgcacccctcggaaagcgcggagtcgatgacagccacttcacaggctcacgcgctcctagtgtgggcttgaaggggacggggaccgattaccaaaggagagcgctgagtacggaagacacagggcagcctttgtcttgggtttagcgctgatgcgctcaaccctgagtcgggttcactgcaactgttgtgtccgatttcggttccctgcaaccgccctcctgggcgagagatgtcattgtgttcctgcggccagcgggactgagagctgggacttaagacgccaggagggtcctgcgctcacgggaaatgtaccccaaaagaactctgagagaatatactcaactgtcctgctgtgattaaacaagactgctgtattttaatttcagaaattgaaaagggataagaggaaggagaaaatgctgggctggtgtgaagcgatagcccgtaaccctcacagaattccaaacaacacgcgaacacccgagatctcaggggatttggctgacgcctcacaaacctccacattgaatgaaaaatccccagggcgatctgcaagtcgatcaagtaacatttcaaaagcaagcagcccaacaacagggacagctcccaggagccagtcaaggttgtctgtctgtccatccactcaggacatctgcagaatctgtcactgcgaaggggatgaagagagccccctcatcacaccctgtcgctgcactgggacactgcgctttgtccaccagtcctgcctccaccagtggataaagagctcagatacacgctgctgtgagctctgcaagtatgacttcataatggagaccaagctcaaacccctccggaagtgggagaaactacagatgaccacaagtgaaaggaggaaaatattctgctctgtcacattccacgtaatcgcgatcacctgtgtggtttggtctttgtatgtattgatagaccggacagcggaggaaatcaagcaaggcaatgacaatggtgtccttgaatggccattttggacaaaactggttgtggtagccattggcttcacaggaggtcttgtcttcatgtacgtacagtgtaaagtctatgttcagttgtggcgcaggctgaaggcctacaaccgtgtgatctttgtacaaaattgcccagacactgccaaaaaactggagaagaacttctcatgtaatgtaaacacagacatcaaagatgctgtggtagtgcctgtaccacaaacaggtgcaaattcactgccatctgcagagggtggcccccctgaagttgtatcagtctgatggaacctgttgggagtttcttcaccgaagaatatctttctagccctcagccactacaaatgacagaagtgatcttgaattatttactcccttcagctcctcctttctcctactgacacatttttcctgactttgttcaaagaggaaaggagaaaaacaaacagaccaaatgcccaggagcccatgaagtaatagcgtaaagtaaagtatgatatggaaatgtgaagtttgcaagagaatgatttccaagacaattaagaactactggggcaatgaatgcttttaggcagtaatcaaagattaaatggacccatgatactcttcttcacagtaacaggggaaaagttcaagaatacagacttgaattgcgatgtgtattacttctagggccttgtaatgttaactgtctcatctggaaataactaacatatttggttttaagcctgaaattgtctgcattatccctaagtcacattggaagtgaacttggaggatgcatattttgatatgctttgacagctaacagatttgtatggtttagtggagtctggttattttgacagatgcatgttttttttaaatagatgcaatatacatttgaagacattgatatttggaattaattacgtttgtttaagtcacgcaaaagattttcagaaaatgttcggatataattagctctgttaaatacccacagaactgttatcaggtcttatatttattttcatctggttcctctaatacagtgctgtccaatagaaacacaacagccacaaatgcaggccacagatgcaaatatttaacttcccagtagccctattttaaaaagtaaaaataaatgtttgtttgttaaaatgaattttgattttttaaaaacactatatgttatttcaacatgtcatcaatataaaaaattgattgattgattgatagtttacatctgtttcttgaaccaagttttcaaaatccagttggtaatttaaaagtacacttcaacttgaattaactatattggatagcacagccgtaaaattagagactaagcttctgctttatttaacagttgttgagtatttcaaaacagtttaattcattcttttatttcaaagtcacaaaagttagttatgatttttaaaagcattaaattaagtgtcctcattttaaagtcagatgaagttcacatctctaaagggtaaaaatccaaaagtatagaaagataaaacaatcaatctgcctatagcagagttgtgaaataaataaattgttactatgaagtacttacaataggggaataaaattacctatttttgttattaaatcaaatgtgtaaggcttatttcatccatatgaggtgtcaacttgacagatgatgagtaattatgactaagaatctagcccttacttttaaaagctgacaggatttcccttgctcagttagaaaacaaaaatattcaacagattctgtgataagtaattaatcgtttaggtttgacagttgattattgtgttctttgcatattcatgtaaaactgatgtgtgaatgacattgcagtgagctagattaacggtgattatagatacagtagcctgtcaaagaaagatgtcctacattaaaaaaggtgacttatttttgttagctgtcattatttattaacatgaaaaggcaatgatggccataagaaccaaagcatgagtatcacactgcacaaatctgggtatcacatggatgcactttgtaattatcagtgtgcttgttcttcacagatcataggaaaaagggaaaaaaaaaacaaacctttaaatgaggagaaagatggtataaatattagtagtggctgacactgagtccagatagtcttgattcctagaaataaacaaaaggtaaacaatgtcaattttgtgtgtgtgtatggcgtgtgtgtagtcatgtatatatgcggggaaaatgttaaggtattcagtcaggaaacaaaaggtttaaaactcatctttcttaaaacttgttataagcacagggaaagcaaagttgaggtaactaaactgaaccaaaaattctgtataaataaggatataagtaattaacgttttaaaaaacatgtggaccttaaacaaactgtatattaaattcctcttaaatgcccattttaaatatttaagataaatacatttatgaataacaaatctgtgggtgatttaaccatggcaccatatccaagggattaaccttaatgcaattttcctgttaattgtcctaagctttttactaatccattttccctgtgggttagtaatggcaacatgctgcttacagatattcccggggaaaaacatccagacaccagcaaacaaagaaatgttgatttctcttttgtttgctctgaaagtaaaataattatttactttaattaacatggaaaatattgtttaaattctgtacgaacctaaacaagatacgttgcagggctgatttcacagtggaggatgatcggctaaaataaagcctcatttattaagggctacacttttaacactaagaaaacatttctagaataaaaagcaaaggtaagcattattctattaatagtaaaagaggacatgggattttaaaactatacctaaattcttgcaattaacttttatgggcttggacattgttgaaatgagaaaataatataatatagcttcctggcaggttaaaagtcaacacttgattttgctattcttctgactttttgaaaccctgaagttctgaatttcaagcttttaagaagcttttcagcaatggttgtttgtttatggttcaaacatctgaaataactacctgcatttaaaatctaatgttgattattttctttttacattctgtgtggcaatggaacatttgccctttcaaacaataaaacgatttagctttgtggcagtgcttttttgtagactgactgactatacccttcaaaaagaaaaactgctctacggaatgcaaattttgaggcatgtttacctgctcgtggaagaaataaaatggaattgaaaaaaaaaggactaaaattgaagaatgaaattacagttgtgttaaaaaccttggctctttataatcatgaatcttcagtattaaaccagacattgatgctgttaatttttttaaagaactatcactcttatcgtacaggagtaaagattaaattgtaaaagaaagaaattccaattttttaaaaagtaaagcccaaaaggcaattaagcttaagtacaaaaacaaaataaaaatgaacaaaatctaaactaaagtgagcccaacaacctgagatacagcaatgtgtaacctgaaggaagataggtgtagactgaaggagtctttcaaaacaccccagcattaaatctcactctgcgctgcttctacacgtgattatagtcccagacagacgacctcatggttttttatcttgttttacaaaaggtccttgggtactctttaaaacatctattctttggcaggaaaattagctcattagaacaatgacaccattaagggacattataagggtcctggggctgaggtgggaagatttttctatctgccccatatagtttacccttccttgccttgaaaatgaatattatagaacagagtacagctcttaaaagttattagtatcattattattatagttgttatataatactttaattaagaaagatgaaaaccttttttctttcctaagtcagcccaatggtgctattttacatatcaacacagttgaaaggaagtactgttattttgggctgcagtgtttcctccacatctaaagaaagcccattttgaaactggatactgcattaaaacaaagaaggaaaaattattttaactgtgtgcagtttttgaaattaggcatttgtactattttggttttacataattctcttgcattaacaatttactgttttgtgaatcatgtgtactaaagcaaattaagaaaaagaaaataattatctgtgaaagactttgtatattaaacaagtgacgcaaacctta

SEQ ID NO: 11980 - DNA, 3903 bp, Homo sapiens
  source 1..3903: mol_type = unassigned DNA
actggggagccgagccagagccgggctgcctgccacccggctgctcgtccgctagctggggaggagcgctccacccgcaactgacaaaggatgggagaatgcccgcgccccgggatgccggccgcacgcagcctggcggccgcctgagctacttcaccctccgccggaaatgtaccccaaaagaactctgagagaatatactcaactgtcctgctgtgattaaacaagactgctgtattttacctgagcttggcaaagcaaggatatgaacaattgtgcaggtgggctactcagggcgagtgaagagataaggcatccaatcagggattggccacctgcagccctgccaatatgcccctccaccagatttccgtaatcccagcacgggagactgccagcaatgggagaaattcaatgggcagaaacaaagagaagaacaaggaagtcgagaatttcagaaattgaaaagggataagaggaaggagaaaatgctgggctggtgtgaagcgatagcccgtaaccctcacagaattccaaacaacacgcgaacacccgagatctcaggggatttggctgacgcctcacaaacctccacattgaatgaaaaatccccagggcgatctgcaagtcgatcaagtaacatttcaaaagcaagcagcccaacaacagggacagctcccaggagccagtcaaggttgtctgtctgtccatccactcaggacatctgcagatctgccatcttgcatgacatgtcagaagagtcatttgagtattgcacccctgtcatggtgctgagccctgctaggaaggagtctggtaagaaatcagtaatacaaagacctaggaggaggagaaaagcctctgagagatatgagcatgctgcagaagaacaaataagagggagaaaaaatgactttcaccttcaaatctcaagccccaggtggagggagctttacacagattcttcagattcatcttccacagatgagagtcattggattcaggcaaaaagaagagcccaggttaaattcagactgtcaagaagaaggaggagaaataataataagccgtgtgaaaacttagctgggtcttccactcctaacggaattgagctcgttgatctgggatccaaaggtaaagagcaacaagagctgattgaatgtgagagttgctctttaaatctccacagaggaaaacatacaaggtaccaagaatgcaacccttctctgactcaagggtcctctgaaattaagagatcctcaaggaatcatgagaagagcaaaggcagatatcaccacagagatcctcagctcttgcaaagtcttaggaaaaatgaaataatgaagaagacattttcagaaacagattccagcactgaaatactgggagttccagaaggcagcaaggacatgaatgatgcagggctccaggtgaataaccctgttcagaagcctcctgccacctatgacgatgggtctgataatttagaagtatgcagaatctgtcactgcgaaggggatgaagagagccccctcatcacaccctgtcgctgcactgggacactgcgctttgtccaccagtcctgcctccaccagtggataaagagctcagatacacgctgctgtgagctctgcaagtatgacttcataatggagaccaagctcaaacccctccggaagtgggagaaactacagatgaccacaagtgaaaggaggaaaatattctgctctgtcacattccacgtaatcgcgatcacctgtgtggtttggtctttgtatgtattgatagaccggacagcggaggaaatcaagcaaggcaatgacaatggtgtccttgaatggccattttggacaaaactggttgtggtagccattggcttcacaggaggtcttgtcttcatgtacgtacagtgtaaagtctatgttcagttgtggcgcaggctgaaggcctacaaccgtgtgatctttgtacaaaattgcccagacactgccaaaaaactggagaagaacttctcatgtaatgtaaacacagacatcaaagatgctgtggtagtgcctgtaccacaaacaggtgcaaattcactgccatctgcagagggtggcccccctgaagttgtatcagtctgatggaacctgttgggagtttcttcaccgaagaatatctttctagccctcagccactacaaatgacagaagtgatcttgaattatttactcccttcagctcctcctttctcctactgacacatttttcctgactttgttcaaagaggaaaggagaaaaacaaacagaccaaatgcccaggagcccatgaagtaatagcgtaaagtaaagtatgatatggaaatgtgaagtttgcaagagaatgatttccaagacaattaagaactactggggcaatgaatgcttttaggcagtaatcaaagattaaatggacccatgatactcttcttcacagtaacaggggaaaagttcaagaatacagacttgaattgcgatgtgtattacttctagggccttgtaatgttaactgtctcatctggaaataactaacatatttggttttaagcctgaaattgtctgcattatccctaagtcacattggaagtgaacttggaggatgcatattttgatatgctttgacagctaacagatttgtatggtttagtggagtctggttattttgacagatgcatgttttttttaaatagatgcaatatacatttgaagacattgatatttggaattaattacgtttgtttaagtcacgcaaaagattttcagaaaatgttcggatataattagctctgttaaatacccacagaactgttatcaggtcttatatttattttcatctggttcctctaatacagtgctgtccaatagaaacacaacagccacaaatgcaggccacagatgcaaatatttaacttcccagtagccctattttaaaaagtaaaaataaatgtttgtttgttaaaatgaattttgattttttaaaaacactatatgttatttcaacatgtcatcaatataaaaaattgattgattgattgatagtttacatctgtttcttgaaccaagttttcaaaatccagttggtaatttaaaagtacacttcaacttgaattaactatattggatagcacagccgtaaaattagagactaagcttctgctttatttaacagttgttgagtatttcaaaacagtttaattcattcttttatttcaaagtcacaaaagttagttatgatttttaaaagcattaaattaagtgtcctcattttaaagtcagatgaagttcacatctctaaagggtaaaaatccaaaagtatagaaagataaaacaatcaatctgcctatagcagagttgtgaaataaataaattgttactatgaagtacttacaataggggaataaaattacctatttttgttattaaatcaaatgtgtaaggcttatttcatccatatgaggtgtcaacttgacagatgatgagtaattatgactaagaatctagcccttacttttaaaagctgacaggatttcccttgctcagttagaaaacaaaaatattcaacagattctgtgataagtaattaatcgtttaggtttgacagttgattattgtgttctttgcatattcatgtaaaactgatgtgtgaatgacattgcagtgagctagattaacggtgattatagatacagtagcctgtcaaagaaagatgtcctacattaaaaaaggtgacttatttttgttagctgtcattatttattaacatgaaaaggcaatgatggccataagaaccaaagcatgagtatcacactgcacaaatctgggtatcacatggatgcactttgtaattatcagtgtgcttgttcttcacagatcataggaaaaa

SEQ ID NO: 11981 - DNA, 2476 bp, Homo sapiens
  source 1..2476: mol_type = unassigned DNA
ctatattctctgttctgcattataagcaacatgaccagcagccacgtttgttgtaattttttaaatatgtggaaaaaaagcaagatatcaaccatgtattaccttaaccaagatgccaaattatctaacttgtttctccaggcaagcagcccaacaacagggacagctcccaggagccagtcaaggttgtctgtctgtccatccactcaggacatctgcagaatctgtcactgcgaaggggatgaagagagccccctcatcacaccctgtcgctgcactgggacactgcgctttgtccaccagtcctgcctccaccagtggataaagagctcagatacacgctgctgtgagctctgcaagtatgacttcataatggagaccaagctcaaacccctccggaagtgggagaaactacagatgaccacaagtgaaaggaggaaaatattctgctctgtcacattccacgtaatcgcgatcacctgtgtggtttggtctttgtatgtattgatagaccggacagcggaggaaatcaagcaaggcaatgacaatggtgtccttgaatggccattttggacaaaactggttgtggtagccattggcttcacaggaggtcttgtcttcatgtacgtacagtgtaaagtctatgttcagttgtggcgcaggctgaaggcctacaaccgtgtgatctttgtacaaaattgcccagacactgccaaaaaactggagaagaacttctcatgtaatgtaaacacagacatcaaagatgctgtggtagtgcctgtaccacaaacaggtgcaaattcactgccatctgcagagggtggcccccctgaagttgtatcagtctgatggaacctgttgggagtttcttcaccgaagaatatctttctagccctcagccactacaaatgacagaagtgatcttgaattatttactcccttcagctcctcctttctcctactgacacatttttcctgactttgttcaaagaggaaaggagaaaaacaaacagaccaaatgcccaggagcccatgaagtaatagcgtaaagtaaagtatgatatggaaatgtgaagtttgcaagagaatgatttccaagacaattaagaactactggggcaatgaatgcttttaggcagtaatcaaagattaaatggacccatgatactcttcttcacagtaacaggggaaaagttcaagaatacagacttgaattgcgatgtgtattacttctagggccttgtaatgttaactgtctcatctggaaataactaacatatttggttttaagcctgaaattgtctgcattatccctaagtcacattggaagtgaacttggaggatgcatattttgatatgctttgacagctaacagatttgtatggtttagtggagtctggttattttgacagatgcatgttttttttaaatagatgcaatatacatttgaagacattgatatttggaattaattacgtttgtttaagtcacgcaaaagattttcagaaaatgttcggatataattagctctgttaaatacccacagaactgttatcaggtcttatatttattttcatctggttcctctaatacagtgctgtccaatagaaacacaacagccacaaatgcaggccacagatgcaaatatttaacttcccagtagccctattttaaaaagtaaaaataaatgtttgtttgttaaaatgaattttgattttttaaaaacactatatgttatttcaacatgtcatcaatataaaaaattgattgattgattgatagtttacatctgtttcttgaaccaagttttcaaaatccagttggtaatttaaaagtacacttcaacttgaattaactatattggatagcacagccgtaaaattagagactaagcttctgctttatttaacagttgttgagtatttcaaaacagtttaattcattcttttatttcaaagtcacaaaagttagttatgatttttaaaagcattaaattaagtgtcctcattttaaagtcagatgaagttcacatctctaaagggtaaaaatccaaaagtatagaaagataaaacaatcaatctgcctatagcagagttgtgaaataaataaattgttactatgaagtacttacaataggggaataaaattacctatttttgttattaaatcaaatgtgtaaggcttatttcatccatatgaggtgtcaacttgacagatgatgagtaattatgactaagaatctagcccttacttttaaaagctgacaggatttcccttgctcagttagaaaacaaaaatattcaacagattctgtgataagtaattaatcgtttaggtttgacagttgattattgtgttctttgcatattcatgtaaaactgatgtgtgaatgacattgcagtgagctagattaacggtgattatagatacagtagcctgtcaaagaaagatgtcctacattaaaaaaggtgactta

SEQ ID NO: 11982 - DNA, 1051 bp, Homo sapiens
  source 1..1051: mol_type = unassigned DNA
ataagcaacatgaccagcagccacgtttgttgtaattttttaaatatgtggaaaaaaagcaagatatcaaccatgtattaccttaaccaagatgccaaattatctaacttgtttctccaggcaagcagcccaacaacagggacagctcccaggagccagtcaaggttgtctgtctgtccatccactcaggacatctgcagaatctgtcactgcgaaggggatgaagagagccccctcatcacaccctgtcgctgcactgggacactgcgctttgtccaccagtcctgcctccaccagtggataaagagctcagatacacgctgctgtgagctctgcaagtatgacttcataatggagaccaagctcaaacccctccggaagtgtctgtgcttctgcttagtacacgagcactgtctcctaaacggcaaggctatgatcacttaggcacagagagtgaccacagacctgtgcagattccacgtgtgccatagctgttcactgaagagtgggagaaactacagatgaccacaagtgaaaggaggaaaatattctgctctgtcacattccacgtaatcgcgatcacctgtgtggtttggtctttgtatgtattgatagaccggacagcggaggaaatcaagcaaggcaatgacaatggtgtccttgaatggccattttggacaaaactggttgtggtagccattggcttcacaggaggtcttgtcttcatgtacgtacagtgtaaagtctatgttcagttgtggcgcaggctgaaggcctacaaccgtgtgatctttgtacaaaattgcccagacactgccaaaaaactggagaagaacttctcatgtaatgtaaacacagacatcaaagatgctgtggtagtgcctgtaccacaaacaggtgcaaattcactgccatctgcagagggtggcccccctgaagttgtatcagtctgatggaacctgttgggagtttcttcaccgaagaatatctttctagccctcagccactacaaatgacagaagtgatcttgaattatttactcccttcagct

SEQ ID NO: 11983 - DNA, 2912 bp, Homo sapiens
  source 1..2912: mol_type = unassigned DNA
gagagatatgagcatgctgcagaagaacaaataagagggagaaaaaatgactttcaccttcaaatctcaagccccaggtggagggagctttacacagattcttcagattcatcttccacagatgagagtcattggattcaggcaaaaagaagagcccaggttaaattcagactgtcaagaagaaggaggagaaataataataagccgtgtgaaaacttagctgggtcttccactcctaacggaattgagctcgttgatctgggatccaaaggtaaagagcaacaagagctgattgaatgtgagagttgctctttaaatctccacagaggaaaacatacaaggtaccaagaatgcaacccttctctgactcaagggtcctctgaaattaagagatcctcaaggaatcatgagaagagcaaaggcagatatcaccacagagatcctcagctcttgcaaagtcttaggaaaaatgaaataatgaagaagacattttcagaaacagattccagcactgaaatactgggagttccagaaggcagcaaggacatgaatgatgcagggctccaggtgaataaccctgttcagaagcctcctgccacctatgacgatgggtctgataatttagaagtatgcagaatctgtcactgcgaaggggatgaagagagccccctcatcacaccctgtcgctgcactgggacactgcgctttgtccaccagtcctgcctccaccagtggataaagagctcagatacacgctgctgtgagctctgcaagtatgacttcataatggagaccaagctcaaacccctccggaaggtacagtatccataggaattggtttgggagggaccatttgcaaagcagacttgttttagaaatctatttcctttgccaatacgattctcctaatatgctaatatccattaagggtatgtgtcttgtgttgagctcagtgcacaaaatttatctaagtgtttgcagataatccttcctttcttctatgttttatattctagagcttctgattgatatattactttcaatgcttttttaaaagtcagtgtgtgcacgtaatagatataaacatatatatgtatatgcatgcaaaatgcacttgtaattcaatgtaattgaattgatgagaactatgatagcattgtgcttacggaagccagttctcaagaaggttacatgatacattgccttaaacaacatcaactcatcaaatttcttacaagttatttattaggtaatagaagagaatgatttcttctataaagtgtgtactatttatgtttgcttttatttgggaattggtttaatggcacatgtgtaattagagtaggtagaaataaaaagtactattttccatattgtgcatcaggctgtaagagagaggtaagtgtattttgtatctgtaatgtttgtcttcaaattcctcatttatgttatatttttctgaagaagaaaggtaagactgtgagtcagatacaaagttagtgtctcactcaaagccaccgaagaacagcttgtaaacaatacaaacaaggacaatgaacttatacaattcatgtttgatagctggacttctggattttagcatgtaacttatttatctttttgcctaactgtagccttacatatatggctgcctcagtttccaagggagagtatgaagaccacagtttaaataatgaatcatcccagagttgctttttttatttaaattgaatgcaaagcaaaagttataggacattgcctggaaagaaacacaacgagttccagaatgagcagagttgaaatgcaaataagaatattctagcacatatctgattgctggctgaccattgcaattcttcattaattctgtaaattgtggagggagagaatcacattccttgcttttgtggtagcctcaatttttaaaatctgcaaatggtttatagctatcaaaaataatgcataaaattcctttaggatatgtgtggtctttttttaacaatggggtaacctgagtgctgcagggtaaccctgtttttctagggcccagaggtgtcaatgccagaaatagaaatggaccctgattccttgtcctttgcttcatccgctggacagatgctgagcattgtctgcagtagttaaatggcacattgtactccacgattttccaaatgttttttcttagttctcagggaactacaaattatttcatagaatctatatatttcttcattttttttctcatgctaaatttacataaaattttcatttcaactttgtcaaatacagtattttaatttgagggccacgatctaggataataacatattctaattttctcttctttaccatatctatcaccactactcatttttgtttaattaaaaaacatgctgctgagaagaaacttgaaaagtctttttattccaccgccagcttttgtagtatctagtataccctgtcaatacaactttcatcctttgttaatattccattctcaataatttacaactctcttaggaaatcttatttttttcctcaacaaacacacttataaaccagagaaaggcagcaaatatgtctatctttttaaatattcatgataatggaccaggcacggtggcttacacctggaatctcagcactttgggaggctgaggcaggcgtatcccttgagcccaggagtttgagaccaacctgggcaacaaagtgaaatcttgtctctacaaaaaagttaaaaaaaaaaaattaacctggcatggtagcacaaacctgtagttccagctactcaagaggctgaggaaggaggatcccttgagcctaggatttcaaggttccagtgagctttgattgcaccactgcagtcaagcctgagtgacagagccatactttgtctccaaaaaaaaaaaaaa

SEQ ID NO: 11984 - DNA, 558 bp, Homo sapiens
  source 1..558: mol_type = unassigned DNA
tatattctctgttctgcattataagcaacatgaccagcagccacgtttgttgtaattttttaaatatgtggaaaaaaagcaagatatcaaccatgtattaccttaaccaagatgccaaattatctaacttgtttctccaggcaagcagcccaacaacagggacagctcccaggagccagtcaaggttgtctgtctgtccatccactcaggacatctgcagaatctgtcactgcgaaggggatgaagagagccccctcatcacaccctgtcgctgcactgggacactgcgctttgtccaccagtcctgcctccaccagtggataaagagctcagatacacgctgctgtgagctctgcaagtatgacttcataatggagaccaagctcaaacccctccggaaggtacagtatccataggaattggtttgggagggaccatttgcaaagcagacttgttttagaaatctatttcctttgccaatacgattctcctaatatgctaatatccattaagggtatgtgtcttgtgttgagctcagtgcacaaaatttatctaagt

SEQ ID NO: 11985 - DNA, 656 bp, Homo sapiens
  source 1..656: mol_type = unassigned DNA
gtccgctagctggggaggagcgctccacccgcaactgacaaaggatgggagaatgcccgcgccccgggatgccggccgcacgcagcctggcggccgcctgagctacttcaccctccgccggaaatgtaccccaaaagaactctgagagaatatactcaactgtcctgctgtgattaaacaagactgctgtattttaatttcagaaattgaaaagggataagaggaaggagaaaatgctgggctggtgtgaagcgatagcccgtaaccctcacagaattccaaacaacacgcgaacacccgagatctcaggggatttggctgacgcctcacaaacctccacattgaatgaaaaatccccagggcgatctgcaagtcgatcaagtaacatttcaaaagcaagcagcccaacaacagggacagctcccaggagccagtcaaggttgtctgtctgtccatccactcaggacatctgcagaatctgtcactgcgaaggggatgaagagagccccctcatcacaccctgtcgctgcactgggacactgcgctttgtccaccagtcctgcctccaccagtggataaagagctcagatacacgctgctgtgagctctgcaagtatgacttcataatggagaccaagctcaaacccctccggaag

SEQ ID NO: 11986 - DNA, 554 bp, Homo sapiens
  source 1..554: mol_type = unassigned DNA
agcaacatgaccagcagccacgtttgttgtaattttttaaatatgtggaaaaaaagcaagatatcaaccatgtattaccttaaccaagatgccaaattatctaacttgtttctccaggcaagcagcccaacaacagggacagctcccaggagccagtcaaggttgtctgtctgtccatccactcaggacatctgcagatctgccatcttgcatgacatgtcagaagagtcatttgagtattgcacccctgtcatggtgctgagccctgctaggaaggagtctggtaagaaatcagtaatacaaagacctaggaggaggagaaaagcctctgagagatatgagcatgctgcagaagaacaaataagagggagaaaaaatgactttcaccttcaaatctcaagccccaggtggagggagctttacacagattcttcagattcatcttccacagatgagagtcattggattcaggcaaaaagaagagcccaggttaaattcagactgtcaagaagaaggaggagaaataataataagccgtgtgaaaacttagctgg

SEQ ID NO: 11987 - DNA, 499 bp, Homo sapiens
  source 1..499: mol_type = unassigned DNA
acaatgctcttaggggagagggggtgctccagtgacaaagcagttcaattatgacttgcagtaaatcatcctttggagaatgcagtactccctggattatttgttcttgcatttcttttaactcccctttcaatgtgtttaacattttgaccagaagactctggcctctgctgcacagtgtctcaaacactatttttcccctctttgtttagacctgagcttggcaaagcaaggatatgaacaattgtgcaggtgggctactcagggcgagtgaagagataaggcatccaatcagggattggccacctgcagccctgccaatatgcccctccaccagatttccgtaatcccagcacgggagactgccagcaatgggagaaattcaatgggcagaaacaaagagaagaacaaggaagtcgagaatgaaaaatccccagggcgatctgcaagtcgatcaagtaacatttcaaaagcaagcagcccaacaacagggacagct

SEQ ID NO: 11988 - DNA, 616 bp, Homo sapiens
  source 1..616: mol_type = unassigned DNA
catgtgaagaaggatgtgtttgcttccccttccaccatgattgtgaattttctgaggcctccccaaccctgtggaactatgcttttacaaaatctgagtcataaattacagatattcttgatgaaaattcagaacataggatttattttcaaaaagaaatgtaccccaaaagaactctgagagaatatactcaactgtcctgctgtgattaaacaagactgctgtattttacctgagcttggcaaagcaaggatatgaacaattgtgcaggtgggctactcagggcgagtgaagagataaggcatccaatcagggattggccacctgcagccctgccaatatgcccctccaccagatttccgtaatcccagcacgggagactgccagcaatgggagaaattcaatgggcagaaacaaagagaagaacaaggaagtcgagaatttcagaaattgaaaagggataagaggaaggagaaaatgctgggctggtgtgaagcgatagcccgtaaccctcacagaattccaaacaacacgcgaacacccgagatctcaggggatttggctgacgcctcacaaacctccacattgaatgaaaaatccccagggcgatctgcaa

SEQ ID NO: 11989 - DNA, 657 bp, Homo sapiens
  source 1..657: mol_type = unassigned DNA
acaccggcgtggtactagtcacggagccgcacccctcggaaagcgcggagtcgatgacagccacttcacaggctcacgcgctcctagtgtgggcttgaaggggacggggaccgattaccaaaggagagcgctgagtacggaagacacagggcagcctttgtcttgggtttagcgctgatgcgctcaaccctgagtcgggttcactgcaactgttgtgtccgatttcggttccctgcaaccgccctcctgggcgagagatgtcattgtgttcctgcggccagcgggactgagagctgggacttaagacgccaggagggtcctgcgctcacgggcctcaacaaagactatcagaatctgtgtaaatcaatagcaccgctgagtagaaattcagttgctgaagtaaatatggattctggaaatgtaccccaaaagaactctgagagaatatactcaactgtcctgctgtgattaaacaagactgctgtattttacctgagcttggcaaagcaaggatatgaacaattgtgcaggtgggctactcagggcgagtgaagagataaggcatccaatcagggattggccacctgcagccctgccaatatgcccctccaccagatttccgtaatcccagcacgggagactgccagcaatgggaga

SEQ ID NO: 11990 - DNA, 550 bp, Homo sapiens
  source 1..550: mol_type = unassigned DNA
gacaaaggatgggagaatgcccgcgccccgggatgccggccgcacgcagcctggcggccgcctgagctacttcaccctccgccgctgaatttggtcaggtggctttagaagcagaaggcgagaatgcccttggcatggacttggcattcttacaaagagtattttgctgtggtcacccaaagggacatactggaacaaaagaggaaaagtgaacagatgctatctggtaacttgtagctggcagattggttggtgagcaaaatgagacatccctgtgagggcttcaagaaacacagagaccctctgatatggaaatgtaccccaaaagaactctgagagaatatactcaactgtcctgctgtgattaaacaagactgctgtattttacctgagcttggcaaagcaaggatatgaacaattgtgcaggtgggctactcagggcgagtgaagagataaggcatccaatcagggattggccacctgcagccctgccaatatgcccctccaccagatttccgtaatcccagcacgggagactgccagcaatggg

SEQ ID NO: 11991 - DNA, 584 bp, Homo sapiens
  source 1..584: mol_type = unassigned DNA
ctgcgcgcgcgccgtttctggcggatccccagtgcgcggcgcgctgtttacaccggcgtggtactagtcacggagccgcacccctcggaaagcgcggagtcgatgacagccacttcacaggctcacgcgctcctagtgtgggcttgaaggggacggggaccgattaccaaaggagagcgctgagtacggaagacacagggcagcctttgtcttgggtttagcgctgatgcgctcaaccctgagtcgggttcactgcaactgttgtgtccgatttcggttccctgcaaccgccctcctgggcgagagatgtcattgtgttcctgcggccagcgggactgagagctgggacttaagacgccaggagggtcctgcgctcacgggaaatgtaccccaaaagaactctgagagaatatactcaactgtcctgctgtgattaaacaagactgctgtattttacctgagcttggcaaagcaaggatatgaacaattgtgcaggtgggctactcagggcgagtgaagagataaggcatccaatcagggattggccacctgcagccctgccaatatgcccctccaccagattt

SEQ ID NO: 11992 - DNA, 581 bp, Homo sapiens
  source 1..581: mol_type = unassigned DNA
acaccggcgtggtactagtcacggagccgcacccctcggaaagcgcggagtcgatgacagccacttcacaggctcacgcgctcctagtgtgggcttgaaggggacggggaccgattaccaaaggagagcgctgagtacggaagacacagggcagcctttgtcttgggtttagcgctgatgcgctcaaccctgagtcgggttcactgcaactgttgtgtccgatttcggttccctgcaaccgccctcctgggcgagagatgtcattgtgttcctgcggccagcgggactgagagctgggacttaagacgccaggagggtcctgcgctcacggatgcttttacaaaatctgagtcataaattacagatattcttgatgaaaattcagaacataggatttattttcaaaaagaaatgtaccccaaaagaactctgagagaatatactcaactgtcctgctgtgattaaacaagactgctgtattttatggggtttcagcatgttgcccaggctggcctcgaactcctggactcaagcgatccacctacctcagtttcccgaagtgctgggattacaagcatgag

SEQ ID NO: 11993 - DNA, 5367 bp, Homo sapiens
  source 1..5367: mol_type = unassigned DNA
tattttcagaatttcagaaattgaaaagggataagaggaaggagaaaatgctgggctggtgtgaagcgatagcccgtaaccctcacagaattccaaacaacacgcgaacacccgagatctcaggggatttggctgacgcctcacaaacctccacattgaatgaaaaatccccagggcgatctgcaagtcgatcaagtaacatttcaaaagcaagcagcccaacaacagggacagctcccaggagccagtcaaggttgtctgtctgtccatccactcaggacatctgcagaatctgtcactgcgaaggggatgaagagagccccctcatcacaccctgtcgctgcactgggacactgcgctttgtccaccagtcctgcctccaccagtggataaagagctcagatacacgctgctgtgagctctgcaagtatgacttcataatggagaccaagctcaaacccctccggaagtgggagaaactacagatgaccacaagtgaaaggaggaaaatattctgctctgtcacattccacgtaatcgcgatcacctgtgtggtttggtctttgtatgtattgatagaccggacagcggaggaaatcaagcaaggcaatgacaatggtgtccttgaatggccattttggacaaaactggttgtggtagccattggcttcacaggaggtcttgtcttcatgtacgtacagtgtaaagtctatgttcagttgtggcgcaggctgaaggcctacaaccgtgtgatctttgtacaaaattgcccagacactgccaaaaaactggagaagaacttctcatgtaatgtaaacacagacatcaaagatgctgtggtagtgcctgtaccacaaacaggtgcaaattcactgccatctgcagagggtggcccccctgaagttgtatcagtctgatggaacctgttgggagtttcttcaccgaagaatatctttctagccctcagccactacaaatgacagaagtgatcttgaattatttactcccttcagctcctcctttctcctactgacacatttttcctgactttgttcaaagaggaaaggagaaaaacaaacagaccaaatgcccaggagcccatgaagtaatagcgtaaagtaaagtatgatatggaaatgtgaagtttgcaagagaatgatttccaagacaattaagaactactggggcaatgaatgcttttaggcagtaatcaaagattaaatggacccatgatactcttcttcacagtaacaggggaaaagttcaagaatacagacttgaattgcgatgtgtattacttctagggccttgtaatgttaactgtctcatctggaaataactaacatatttggttttaagcctgaaattgtctgcattatccctaagtcacattggaagtgaacttggaggatgcatattttgatatgctttgacagctaacagatttgtatggtttagtggagtctggttattttgacagatgcatgttttttttaaatagatgcaatatacatttgaagacattgatatttggaattaattacgtttgtttaagtcacgcaaaagattttcagaaaatgttcggatataattagctctgttaaatacccacagaactgttatcaggtcttatatttattttcatctggttcctctaatacagtgctgtccaatagaaacacaacagccacaaatgcaggccacagatgcaaatatttaacttcccagtagccctattttaaaaagtaaaaataaatgtttgtttgttaaaatgaattttgattttttaaaaacactatatgttatttcaacatgtcatcaatataaaaaattgattgattgattgatagtttacatctgtttcttgaaccaagttttcaaaatccagttggtaatttaaaagtacacttcaacttgaattaactatattggatagcacagccgtaaaattagagactaagcttctgctttatttaacagttgttgagtatttcaaaacagtttaattcattcttttatttcaaagtcacaaaagttagttatgatttttaaaagcattaaattaagtgtcctcattttaaagtcagatgaagttcacatctctaaagggtaaaaatccaaaagtatagaaagataaaacaatcaatctgcctatagcagagttgtgaaataaataaattgttactatgaagtacttacaataggggaataaaattacctatttttgttattaaatcaaatgtgtaaggcttatttcatccatatgaggtgtcaacttgacagatgatgagtaattatgactaagaatctagcccttacttttaaaagctgacaggatttcccttgctcagttagaaaacaaaaatattcaacagattctgtgataagtaattaatcgtttaggtttgacagttgattattgtgttctttgcatattcatgtaaaactgatgtgtgaatgacattgcagtgagctagattaacggtgattatagatacagtagcctgtcaaagaaagatgtcctacattaaaaaaggtgacttatttttgttagctgtcattatttattaacatgaaaaggcaatgatggccataagaaccaaagcatgagtatcacactgcacaaatctgggtatcacatggatgcactttgtaattatcagtgtgcttgttcttcacagatcataggaaaaagggaaaaaaaaaacaaacctttaaatgaggagaaagatggtataaatattagtagtggctgacactgagtccagatagtcttgattcctagaaataaacaaaaggtaaacaatgtcaattttgtgtgtgtgtatggcgtgtgtgtagtcatgtatatatgcggggaaaatgttaaggtattcagtcaggaaacaaaaggtttaaaactcatctttcttaaaacttgttataagcacagggaaagcaaagttgaggtaactaaactgaaccaaaaattctgtataaataaggatataagtaattaacgttttaaaaaacatgtggaccttaaacaaactgtatattaaattcctcttaaatgcccattttaaatatttaagataaatacatttatgaataacaaatctgtgggtgatttaaccatggcaccatatccaagggattaaccttaatgcaattttcctgttaattgtcctaagctttttactaatccattttccctgtgggttagtaatggcaacatgctgcttacagatattcccggggaaaaacatccagacaccagcaaacaaagaaatgttgatttctcttttgtttgctctgaaagtaaaataattatttactttaattaacatggaaaatattgtttaaattctgtacgaacctaaacaagatacgttgcagggctgatttcacagtggaggatgatcggctaaaataaagcctcatttattaagggctacacttttaacactaagaaaacatttctagaataaaaagcaaaggtaagcattattctattaatagtaaaagaggacatgggattttaaaactatacctaaattcttgcaattaacttttatgggcttggacattgttgaaatgagaaaataatataatatagcttcctggcaggttaaaagtcaacacttgattttgctattcttctgactttttgaaaccctgaagttctgaatttcaagcttttaagaagcttttcagcaatggttgtttgtttatggttcaaacatctgaaataactacctgcatttaaaatctaatgttgattattttctttttacattctgtgtggcaatggaacatttgccctttcaaacaataaaacgatttagctttgtggcagtgcttttttgtagactgactgactatacccttcaaaaagaaaaactgctctacggaatgcaaattttgaggcatgtttacctgctcgtggaagaaataaaatggaattgaaaaaaaaaggactaaaattgaagaatgaaattacagttgtgttaaaaaccttggctctttataatcatgaatcttcagtattaaaccagacattgatgctgttaatttttttaaagaactatcactcttatcgtacaggagtaaagattaaattgtaaaagaaagaaattccaattttttaaaaagtaaagcccaaaaggcaattaagcttaagtacaaaaacaaaataaaaatgaacaaaatctaaactaaagtgagcccaacaacctgagatacagcaatgtgtaacctgaaggaagataggtgtagactgaaggagtctttcaaaacaccccagcattaaatctcactctgcgctgcttctacacgtgattatagtcccagacagacgacctcatggttttttatcttgttttacaaaaggtccttgggtactctttaaaacatctattctttggcaggaaaattagctcattagaacaatgacaccattaagggacattataagggtcctggggctgaggtgggaagatttttctatctgccccatatagtttacccttccttgccttgaaaatgaatattatagaacagagtacagctcttaaaagttattagtatcattattattatagttgttatataatactttaattaagaaagatgaaaaccttttttctttcctaagtcagcccaatggtgctattttacatatcaacacagttgaaaggaagtactgttattttgggctgcagtgtttcctccacatctaaagaaagcccattttgaaactggatactgcattaaaacaaagaaggaaaaattattttaactgtgtgcagtttttgaaattaggcatttgtactattttggttttacataattctcttgcattaacaatttactgttttgtgaatcatgtgtactaaagcaaattaagaaaaagaaaataattatctgtgaaagactttgtatattaaacaagtgacgcaaaccttagttgtggtttccacaatttttgcctaacagactgatatttgtatttgcaacatccaaacacacatacattttttaagattttacaagggtctgaacatataattattttaaagcaaacctacgttgactaactcatgacatggtacaaataaataaatacacaaacagagggaaaccaatgaaaataaactatgtggactttcaaacctgctttaaaaaaagagttcaagagaaatcacaatgtaatctaaagcgggactgtctcaagaataagtcttggatatagaaaaataagcatataacagcatttttctgttcagagataatagtggattcagataattgcatggataataaacattaaaagcaagatattagaatctaagaggtttggtgatagcaaaaaacaaagctgtttcc

SEQ ID NO: 11994 - DNA, 1741 bp, Homo sapiens
  source 1..1741: mol_type = unassigned DNA
ctccaccgaacggccgcgcctgccgccgccgcagctgcagaaccttccgcatcccctccccgtcccgccccctagccccaggcgtccgggccccctccctccttttcccctctccctcccgccccctccgcgctctctttccctgcagccagagcccggcccgccagccgggccggcaggagggcggcggcggcacaaccatgagctttgagggcggccacggcggcagtcggtgtcgcggggcggagagcggggacgccgagcctcccccgcaacctcccccgccgccgccgccgacgccgccgccgggagagccggccccggtccccgcggccccgcgctacctgccgccgctgcccgcgtcccccgagacccccgagcgcgccgcggggccaagcgagccgctaggggaggtggccccgcggtgcaggggagcggacgagctgccgcctccgcccctgcccctgcagcccgccggccaggaagtggcggcggccggcgactccggggaaggtccgaggcgcctcccggaggcggcagcagcgaaaggcggccccggggagtctgaggccggcgcgggcggcgagcgcgagcggcggggcgccggagaccagcccgagacgcgctcggtgtgcagcagccgcagcagcagcagtggcggcggcgaccagcgcgctgggcaccagcaccagcaccaccagcccatctgcaagatctgcttccagggcgcggagcagggtgagttgttgaacccctgccgatgtgatgggtcagttcggtatacacatcagctgtgcctgctaaaatggatcagtgagagaggttcctggacctgtgaactttgctgttatagataccatgttatagccattaaaatgaaacaaccttgccagtggcagagcatttctataacactggttgagaaagttcagatgattgctgtaatcctaggatccctgttcttaatagccagtgtgacttggctcctctggtcagccttcagcccctatgcagtgtggcagaggaaggacatcctttttcagatctgctatggaatgtatggttttatggatctagtgtgcataggtctcattgttcatgaaggagctgcagtttacagagtgtttaagcgctggcgagctgtgaatttgcactgggatgtgttaaattatgacaaagccacagacatcgaagaaagcagccggggagagtcttccacaagtaggactttgtggttgccattgacagctctgcggaacagaaacttggtccacccaactcagttaacctcaccaaggtttcagtgtggctatgtgttattgcacctgttcaatcggatgaggccccatgaagacttatcagaagataacagctcgggggaggttgtgatgagagtgacttcagtgtgacaaaagcataagatgatgcagtgtggaccaccctgcacattttgcaatgtaattgcagtgaatggcaaaaccatagcacttctaaaaacacatctatgaactttttaaaatttatgctttttatatgaacatttgaattgcaaatacatttttctgagaaaaagagtcctcttgttcttcgttgtctggtttgtcacatcttttataagttggtacttgaaatcattatacatataatttaactatacttggttaaaagaataatgaaagttatccttaaggccaaaactattttttcttgcttgttttaaatatatttttatgaaagcttt

SEQ ID NO: 11995 - DNA, 584 bp, Homo sapiens
  source 1..584: mol_type = unassigned DNA
agctgtgcctgctaaaatggatcagtgagagaggttcctggacctgtgaactttgctgttatagataccatgttatagccattaaaatgaaacaaccttgccaggtctcattgttcatgaaggagctgcagtttacagagtgtttaagcgctggcgagctgtgaatttgcactgggatgtgttaaattatgacaaagccacagacatcgaagaaagcagccggggagagtcttccacaagtaggactttgtggttgccattgacagctctgcggaacagaaacttggtccacccaactcagttaacctcaccaaggtttcagtgtggctatgtgttattgcacctgttcaatcggatgaggccccatgaagacttatcagaagataacagctcgggggaggttgtgatgagagtgacttcagtgtgacaaaagcataagatgatgcagtgtggaccaccctgcacattttgcaatgtaattgcagtgaatggcaaaaccatagcacttctaaaaacacatctatgaactttttaaaatttatgctttttatatgaacatttgaattgcaaatacatttttctga

SEQ ID NO: 11996 - DNA, 469 bp, Homo sapiens
  source 1..469: mol_type = unassigned DNA
agttccctgcaggtgagggatttttttttttttccagaaagaaaactgttagctctgccctgaagatgagtcccacagaggttttgcagggtggagttaccgagaaattgacttcgggggtgagttgttgaacccctgccgatgtgatgggtcagttcggtatacacatcagctgtgcctgctaaaatggatcagtgagagaggttcctggacctgtgaactttgctgttatagataccatgttatagccattaaaatgaaacaaccttgccagtggcagagcatttctataacactggttgagaaagttcagatgattgctgtaatcctaggatccctgttcttaatagccagtgtgacttggctcctctggtcagccttcagcccctatgcagtgtggcagaggaaggacatcctttttcagatctgctatggaatgtatggttttatggatctagtgtgcataggt

SEQ ID NO: 11997 - DNA, 4275 bp, Homo sapiens
  source 1..4275: mol_type = unassigned DNA
cccgcatcttattagcaaccagggagatttctccattttcctcttgtctacagtgcggctacaaatctgggatttttttattacttctttttttttcgaactacacttgggctcctttttttgtgctcgacttttccaccctttttccctccctcctgtgctgctgctttttgatctcttcgactaaaatttttttatccggagtgtatttaatcggttctgttctgtcctctccaccacccccacccccctccctccggtgtgtgtgccgctgccgctgttgccgccgccgctgctgctgctgctcgccccgtcgttacaccaacccgaggctctttgtttcccctcttggatctgttgagtttctttgttgaagaagccagcatgggtgcccagttctccaagaccgcagcgaagggagaagccgccgcggagaggcctggggaggcggctgtggcctcgtcgccttccaaagcgaacggacaggagaatggccacgtgaaggtaaacggcgacgcttcgcccgcggccgccgagtcgggcgccaaggaggagctgcaggccaacggcagcgccccggccgccgacaaggaggagcccgcggccgccgggagcggggcggcgtcgccctccgcggccgagaaaggtgagccggccgccgccgctgcccccgaggccggggccagcccggtagagaaggaggcccccgcggaaggcgaggctgccgagcccggctcgcccacggccgcggagggagaggccgcgtcggccgcctcctcgacttcttcgcccaaggccgaggacggggccacgccctcgcccagcaacgagaccccgaaaaaaaaaaagaagcgcttttccttcaagaagtctttcaagctgagcggcttctccttcaagaagaacaagaaggaggctggagaaggcggtgaggctgaggcgcccgctgccgaaggcggcaaggacgaggccgccgggggcgcagctgcggccgccgccgaggcgggcgcggcctccggggagcaggcagcggcgccgggcgaggaggcggcagcgggcgaggagggggcggcgggtggcgacccgcaggaggccaagccccaggaggccgctgtcgcgccagagaagccgcccgccagcgacgagaccaaggccgccgaggagcccagcaaggtggaggagaaaaaggccgaggaggccggggccagcgccgccgcctgcgaggccccctccgccgccgggcccggcgcgcccccggagcaggaggcagcccccgcggaggagcccgcggccgccgcagcctcgtcagcctgcgcagccccctcacaggaggcccagcccgagtgcagtccagaagcccccccagcggaggcggcagagtaaaagagcaagcttttgtgagataatcgaagaacttttctcccccgtttgtttgttggagtggtgccaggtactggttttggagaacttgtctacaaccagggattgattttaaagatgtctttttttattttacttttttttaagcaccaaattttgttgttttttttttttctcccctccccacagatcccatctcaaatcattctgttaaccaccattccaacaggtcgaggagagcttaaacaccttcttcctctgccttgtttctcttttattttttattttttcgcatcagtattaatgtttttgcatactttgcatctttattcaaaagtgtaaactttctttgtcaatctatggacatgcccatatatgaaggagatgggtgggtcaaaaagggatatcaaatgaagtgatggggtcacaatggggaaattgaagtggtgcataacattgccaaaatagtgtgccactagaaatggtgtaaaggctgtcttttttttttttttaaaagaaaagttattaccatgtattttgtgaggcaggtttacaacactacaagtcttgagttaagaaggaaagaggaaaaaagaaaaaacaccaatacccagatttaaaaaaaaaaaaacgatcatagtcttaggagttcatttaaaccataggaacttttcacttatctcatgttagctgtaccagtcagtgattaagtagaactacaagttgtataggctttattgtttattgctggtttatgaccttaataaagtgtaattatgtattaccagcagggtgtttttaactgtgactattgtataaaaacaaatcttgatatccagaagcacatgaagtttgcaactttccaccctgcccatttttgtaaaactgcagtcatcttggaccttttaaaacacaaattttaaactcaaccaagctgtgataagtggaatggttactgtttatactgtggtatgtttttgattacagcagataatgctttcttttccagtcgtctttgagaataaaggaaaaaaaatcttcagatgcaatggttttgtgtagcatcttgtctatcatgttttgtaaatactggagaagctttgaccaatttgacttagagatggaatgtaactttgcttacaaaaattgctattaaactcctgcttaaggtgttctaattttctgtgagcacactaaaagcgaaaaataaatgtgaataaaatgtacaaatttgttgtgtttttttatgttctaataatactgagacttctaggtcttaggttaatttttaggaagatcttgcatgccatcaggagtaaattttattgtggttcttaatctgaagttttcaagctctgaaattcataatccgcagtgtcagattacgtagaggaagatcttacaacatttccatgtcaaatctgttaccatttattggcatttagttttcatttaagaattgaacataattatttttattgtagctatatagcatgtcagattaaatcatttacaacaaaaggggtgtgaacctaagactatttaaatgtcttatgagaaaatttcataaagccattctcttgtcattcaggtccagaaacaaattttaaactgagtgagagtctatagaatccatactgcagatgggtcatgaaatgtgaccaaatgtgtttcaaaaattgatggtgtattacctgctattgtaattgcttagtgcttggctaatttccaaattattgcataatatgttctaccttaagaaaacaggtttatgtaacaaagtaatggtgttgaatggatgatgtcagttcatgggcctttagcatagttttaagcatccttttttttttttttttttgaaagtgtgttagcatcttgttactcaaaggataagacagacaataatacttcactgaatcttaataatctttactagtttacctcctctgctctttgccacccgataactggatatcttttccttcaaaggaccctaaactgattgaaatttaagatatgtatcaaaaacattatttcatttaatgcacatctgttttgctgtttttgagcagtgtgcagtttagggttcatgataaatcattgaaccacatgtgtaacaactgaatgccaaatcttaaactcattagaaaaataacaaattaggttttgacacgcattcttaattggaataatggatcaaaaatagtggttcatgaccttaccaaacacccttgctactaataaaatcaaataacacttagaagggtatgtatttttagttagggtttcttgatcttggaggatgtttgaaagttaaaaattgaatttggtaaccaaaggactgatttatgggtctttcctatcttaaccaacgttttcttagttacctagatggccaagtacagtgcctggtatgtagtaagactcagtaaaaaagtggatttttaaaaataactcccaaagtgaatagtcaaaaatcctgttagcaaactgttatatattgctaagtttgttcttttaacagctggaatttattaagatgcattattttgattttattcactgcctaaaacactttgggtggtattgatggagttggtggattttcctccaagtgattaaatgaaatttgacgtatcttttcatccaaagttttgtacatcatgttttctaacggaaaaaaatgttaatatggcttttttgtattactaaaaatagctttgagattaaggaaaaataaataactcttgtacagttcagtattgtctattaaatctgtattggcagtatgtataatggcatttgctgtggttacaaaatacttcctctgggttataataatcatttgatccaattcctattgcttgtaaaataaagttttaccagttgatataa

SEQ ID NO: 11998 - DNA, 1699 bp, Homo sapiens
  source 1..1699: mol_type = unassigned DNA
gtacccgaccgccagcgtcgcctgctgcgcaagtggggcctgcgagccaaccccgcctccgcccctcgattgggcgcgcatttaaatgtccggccccgccccgagctccgggcgcttatatataggcagctcggcgggcggcgggcggcattctggcgcggagcggagcggcggcgggcgcagctagcgggtcggccgcggagcggaggtgcagctcggcttcccccggcacccctccccctcgggcgccagccccacccctccgccggccgggccgaccccgccgtactatcccctgcggcgcgagcccggggcggctccaagcgccccccagcagacccccatcatgggcagccagagctccaaggctccccggggcgacgtgaccgccgaggaggcagcaggcgcttcccccgcgaaggccaacggccaggagaatggccacgtgaaaagcaatggagacttatcccccaagggtgaaggggagtcgccccctgtgaacggaacagatgaggcagccggggccactggcgatgccatcgagccagcaccccctagccagggtgctgaggccaagggggaggtcccccccaaggagacccccaagaagaagaagaaattctctttcaagaagcctttcaaattgagcggcctgtccttcaagagaaatcggaaggagggtgggggtgattcttctgcctcctcacccacagaggaagagcaggagcagggggagatcggtgcctgcagcgacgagggcactgctcaggaagggaaggccgcagccacccctgagagccaggaaccccaggccaagggggcagaggctagtgcagcctcagaagaagaggcagggccccaggctacagagccatccactccctcggggccggagagtggccctacaccagccagcgctgagcagaatgagtagctaggtaggggcaggtgggtgatctctaagctgcaaaaactgtgctgtccttgtgaggtcactgcctggacctggtgccctggctgccttcctgtgcccagaaaggaaggggctattgcctcctcccagccacgttccctttcctcctctccctcctgtggattctcccatcagccatctggttctcctcttaaggccagttgaagatggtcccttacagcttcccaagttaggttagtgatgtgaaatgctcctgtccctggccctacctccttccctgtccccacccctgcataaggcagttgttggttttcttccccaattcttttccaagtaggttttgtttaccctactccccaaatccctgagccagaagtggggtgcttatactcccaaaccttgagtgtccagccttcccctgttgtttttagtctcttgtgctgtgcctagtggcacctgggctggggaggacactgccccgtctaggtttttataaatgtcttactcaagttcaaacctccagcctgtgaatcaactgtgtctcttttttgacttggtaagcaagtattaggctttggggtggggggaggtctgtaatgtgaaacaacttcttgtctttttttctcccactgttgtaaataacttttaatggccaaaccccagatttgtactttttttttttttctaactgctaaaaccattctcttccacctggttttactgtaacatttggaaaaggaataaatgtcgtccctttagtggtgc

SEQ ID NO: 11999 - DNA, 2153 bp, Homo sapiens
  source 1..2153: mol_type = unassigned DNA
gcccgataccggtttcagagtcctgggcagcgtgcgcgctcttcctggcggctgcgcaggtgtgaaaatcacaaatgtcaaatgatggaagatccaggaatcgggacaggcgctacgatgaggtcccaagcgacctgccctatcaagataccaccataagaacccacccaattcttcatgacagtgagcgggcagtgagcgctgatcccttgccaccaccccctctcccattacagccaccattcggcccagacttctactcaagtgacacagaagaaccagctatagcgccagatctcaaaccagtaaggcgctttgtccctgactcctggaagaactttttcagagggaagaaaaaggaccccgaatgggataagccggtgtctgatatcaggtacatctccgatggagtggagtgttcaccaccagcctctccagcaagaccaaaccaccgttcgcccctcaactcctgcaaagatccctacggagggtcagaaggaacctttagttcccggaaagaggctgacgcagtgtttccccgggatccctatggatctctagaccgacacacacaaacagttcgaacatacagtgagaaggtggaggagtataacctgagatactcctacatgaagtcgtgggcaggcctgctgagaatactgggtgtggtggagctgcttttgggggccggtgtctttgcttgtgtcacagcttacattcacaaggacagtgagtggtacaacttgtttggatattcacaaccgtatggcatgggaggcgttggtggattgggcagtatgtatgggggctattactacactggccctaagaccccttttgtactcgtggttgctggattagcttggatcaccaccattattattctggttcttggcatgtccatgtattaccggaccattcttctggactctaattggtggcccctaactgaatttggaattaacgttgccttgtttattttgtatatggccgcagccatagtctatgtgaatgataccaaccgaggtggcctctgctactatccgttatttaatacaccagtgaatgcagtgttctgccgggtagaaggaggacagatagctgcaatgatcttcctgtttgtcaccatgatagtttatctcattagtgctttggtttgcctaaagttatggaggcatgaggcagctcggagacatagagaatatatggaacaacaggagataaatgagccatcattgtcatcgaaaaggaaaatgtgtgaaatggccaccagtggtgacagacaaagagactcagaagttaatttcaaggaactgagaacagcaaaaatgaaacctgaactactgagtggacacatccccccaggccacattcctaaacctatcgtgatgcccgactatgtggcaaaataccctgtgattcagacagatgatgagcgagaacgctataaagctgtgttccaagaccagttttcagagtacaaagagctgtctgcagaagttcaggctgtcctgaggaagtttgatgagctggatgcagtgatgagcagattgccacatcattcggaaagccgacaggaacatgagagaatttcaagaatccatgaagagtttaagaaaaaaaagaatgatcctacatttctggaaaaaaaagaacgctgtgattacctaaagaataaactttctcacataaagcaaagaattcaagaatatgataaagtaatgaattgggatgtacaaggttattcttaacgcttatttgaaaccactttatttttttattttattttatttttttgagatgaagtctcgctctgttacccaggctggaatgcagtggcacaatctcggctcactgcaacctccacctcccgggttcaagcaattctcctgttcaagcaattagcctccccagtagctgggattacaggcgtgcgctgccacaccccgctaatttttgtatttttagtagagacgaggtttcaccatgttggtcaggctgggaaactactttttttaaaaaatagcaagtttactatttatttactgcctttttaatgctagcctctgtggtagagaagcaagcgcttcccaaatcagcttccaattggtttaaccagtatgcaacattaaagattttactcagacattttt

SEQ ID NO: 12000 - DNA, 4400 bp, Homo sapiens
  source 1..4400: mol_type = unassigned DNA
cagagtcctgggcagcgtgcgcgctcttcctggcggctgcgcaggtgtgaaaatcacaaatgtcaaatgatggaagatccaggaatcgggacaggcgctacgatgaggtcccaagcgacctgccctatcaagataccaccataagaacccacccaattcttcatgacagtgagcgggcagtgagcgctgatcccttgccaccaccccctctcccattacagccaccattcggcccagacttctactcaagtgacacagaagaaccagctatagcgccagatctcaaaccagtaaggcgctttgtccctgactcctggaagaactttttcagagggaagaaaaaggaccccgaatgggataagccggtgtctgatatcaggtacatctccgatggagtggagtgttcaccaccagcctctccagcaagaccaaaccaccgttcgcccctcaactcctgcaaagatccctacggagggtcagaaggaacctttagttcccggaaagaggctgacgcagtgtttccccgggatccctatggatctctagaccgacacacacaaacagttcgaacatacagtgagaaggtggaggagtataacctgagatactcctacatgaagtcgtgggcaggcctgctgagaatactgggtgtggtggagctgcttttgggggccggtgtctttgcttgtgtcacagcttacattcacaaggacagtgagtggtacaacttgtttggatattcacaaccgtatggcatgggaggcgttggtggattgggcagtatgtatgggggctattactacactggccctaagaccccttttgtactcgtggttgctggattagcttggatcaccaccattattattctggttcttggcatgtccatgtattaccggaccattcttctggactctaattggtggcccctaactgaatttggaattaacgttgccttgtttattttgtatatggccgcagccatagtctatgtgaatgataccaaccgaggtggcctctgctactatccgttatttaatacaccagtgaatgcagtgttctgccgggtagaaggaggacagatagctgcaatgatcttcctgtttgtcaccatgatagtttatctcattagtgctttggtttgcctaaagttatggaggcatgaggcagctcggagacatagagaatatatggaacaacaggagtgtgaaatggccaccagtggtgacagacaaagagactcagaagttaatttcaaggaactgagaacagcaaaaatgaaacctgaactactgagtggacacatccccccaggccacattcctaaacctatcgtgatgcccgactatgtggcaaaataccctgtgattcagacagatgatgagcgagaacgctataaagctgtgttccaagaccagttttcagagtacaaagagctgtctgcagaagttcaggctgtcctgaggaagtttgatgagctggatgcagtgatgagcagattgccacatcattcggaaagccgacaggaacatgagagaatttcaagaatccatgaagagtttaagaaaaaaaagaatgatcctacatttctggaaaaaaaagaacgctgtgattacctaaagaataaactttctcacataaagcaaagaattcaagaatatgataaagtaatgaattgggatgtacaaggttattcttaacgcttatttgaaaccactttatttttttattttattttatttttttgagatgaagtctcgctctgttacccaggctggaatgcagtggcacaatctcggctcactgcaacctccacctcccgggttcaagcaattctcctgttcaagcaattagcctccccagtagctgggattacaggcgtgcgctgccacaccccgctaatttttgtatttttagtagagacgaggtttcaccatgttggtcaggctgggaaactactttttttaaaaaatagcaagtttactatttatttactgcctttttaatgctagcctctgtggtagagaagcaagcgcttcccaaatcagcttccaattggtttaaccagtatgcaacattaaagattttactcagacatttttaaacgaattcaaatgttctaagggcctttactaagaatggaaaaaatcctgtgttcatctttcatctgtgaccaatttcatattcatctatctcatttaaatgtgtcatcattttagagatcgtatcctggcagtgtgatgggcaagtggaccatcaattctggtgctactttttccttttttactcaggcaggttcctaggatttttctgggacaaatttctcttcctagagaaattcctaggggatttctaaaggatttttctaagggaaaaagggtgacatctttcaaaggtgtcatttattcccttgaaaggtgtttgaatcccagatcaacattttcagacatcctgatcttgggcaaattgcttaatctctctgtgcctgtttcctcttctgtaaaatggggctaataatagttccttcctcatagagttgttaggattaaaggagttactaatatggtaggaactatattagtgtttgtgaagtctactgaagtgtttgtgaaatgaataaattataaagaatgagtctcaagaaaaggtccttaatgagcaagcccaacctacttaaccaaaagcccaagtgtctggtgcctttctggtttgtggtgttaactcatggccttagcctggtgcttcactgtggctctgtggcccctggggttccacatggcctccctgtctttcatcagtgtgactgtacatctctccatctccccatagtccagcctgccctggacacattgaattgtatgaatggtattgcttttttttttttttttttgtgagacagagtcttactctgttgcccagactggagtgcagtggtgcgatctcggctcactgcaagctccgcctcccaagttcacgtcattttcctgcctcagcctcccgagtagctgggactacaggcacctgccaccacgcccagctaatttttttgtatttttagtagagatggggtttcaccgtgttagccaggatgatctcgatctcctgacctcatgatccacccgcctcagcctcccaaagtgttgggattacaggcgtgagtcaccgcgcccagctggtattgcttttctattccctttggacatacatgctacagtcccacaatgtagcatttccttggaaactcccttttttttttttttttgagatggagtttcgctcttgttgcccaggctggagtacagtggtatgatcttggctcactgcagcctctgcctcctgggttcaagcgattctcctgcctctgcctcccaagtagctgggattacaggcacccaccaccatgcccagctaattttttgtatttttagtagagacaggatttcactatgttggccaggttggtctcaagctcctgacctcagatgatctaccagcctcggccttctgaagtgctgggattcaggtgtgagccactgtgcccagcagggatgcttcatctttctaagaattatcttggctttggactttattcataaatgttttatttctgttagtatgaacaatagactgccttaacaaagtttttttttaaacaaaatcgttcttgttggattttattcagcagcatctatcatgtagataaattcccaggtgtagcattacagcttctgactaatatagctgccattcagacaattaatgttcaaagagttttctaaagtgataaaaccaaagaaaagcatgtggaaaagcagaagcttagaaagttgtggtcactgaatgcactccctggtttttatttgtcagtgaaatctttatgcattcattgttaatattttaattccatggctttgtaggctgtgctgtgtctgaaggggtaacacctagggaaacatgaggccccttatgggaccccccaaatggaacaacttcactttctcttttatgtattgagccctgtgttaacatttcacttaagaagagcaccagtgctttaaaaaaaaaaaaaaaaaaaaaaaaaaaaaaaaaaaaggtaaaatattaccattttgatagactgtaaagagttagattcctgttgaagtgttaaggaaatttaactttgtgaaacttttaaaataaagtttataaatgtagctaatctttgaaaaaccaatgcagtaacactgatttgtaaatgttgtggtcaatccctaggtgcattaaagtttcagtcacctgccgtgtgtgtgtgtgcccttttatgtttgccttcctagcattcctgtgttcactgtgcatgttcttgaaaatattttcacttgtcagaaaataaactggaaagtcattgaaaacccgta

SEQ ID NO: 12001 - DNA, 576 bp, Homo sapiens
  source 1..576: mol_type = unassigned DNA
cccaggtgtgctgcgacggacggctgcccgcgctcggcgctcagcctgccatagcccgcgggggaggccggagccagggatccggggaggcccgcgtcccgccaggtttcgctctgcggacgcaggtgtgaaaatcacaaatgtcaaatgatggaagatccaggaatcgggacaggcgctacgatgaggtcccaagcgacctgccctatcaagataccaccataagaacccacccaattcttcatgacagtgagcgggcagtgagcgctgatcccttgccaccaccccctctcccattacagccaccattcggcccagacttctactcaagtgacacagaagaaccagctatagcgccagatctcaaaccagtaaggcgctttgtccctgactcctggaagaactttttcagagggaagaaaaaggaccccgaatgggataagccggtgtctgatatcaggtacatctccgatggagtggagtgttcaccaccagcctctccagcaagaccaaaccaccgttcgcccctcaactcctgcaaagatccctacggagggtcagaaggaacctttagtt

SEQ ID NO: 12002 - DNA, 1908 bp, Homo sapiens
  source 1..1908: mol_type = unassigned DNA
gcggggcggggcgcgcacctcggggcgatctcggtgctccttacctgggaggtctcccggcttagtttcggcctcgttgggtcggaatctccaaagacagtgggtttcagccagaaacgcgaagacgaacgcctagccggcgcgggcagaaccgaggacacaatgagatttgtgggaccgggcgcccagaggctggcgcgggggagaccccacagctaaaatgctcggtacccccgggcagtcgtgggttagttagaaccgcagagcctttcccgacccctcggaagcgcagaagtatccgaaatctacccgtttcttgggtccagcaaaacttttaagccaggtgtgaaaatcacaaatgtcaaatgatggaagatccaggaatcgggacaggcgctacgatgaggtcccaagcgacctgccctatcaagataccaccataagaacccacccaattcttcatgacagtgagcgggcagtgagcgctgatcccttgccaccaccccctctcccattacagccaccattcggcccagacttctactcaagtgacacagaagaaccagctatagcgccagatctcaaaccagtaaggcgctttgtccctgactcctggaagaactttttcagagggaagaaaaaggaccccgaatgggataagccggtgtctgatatcaggtacatctccgatggagtggagtgttcaccaccagcctctccagcaagaccaaaccaccgttcgcccctcaactcctgcaaagatccctacggagggtcagaaggaacctttagttcccggaaagaggctgacgcagtgtttccccgggatccctatggatctctagaccgacacacacaaacagttcgaacatacagtgagaaggtggaggagtataacctgagatactcctacatgaagtcgtgggcaggcctgctgagaatactgggtgtggtggagctgcttttgggggccggtgtctttgcttgtgtcacagcttacattcacaaggacagtgagtggtacaacttgtttggatattcacaaccgtatggcatgggaggcgttggtggattgggcagtatgtatgggggctattactacactggccctaagaccccttttgtactcgtggttgctggattagcttggatcaccaccattattattctggttcttggcatgtccatgtattaccggaccattcttctggactctaattggtggcccctaactgaatttggaattaacgttgccttgtttattttgtatatggccgcagccatagtctatgtgaatgataccaaccgaggtggcctctgctactatccgttatttaatacaccagtgaatgcagtgttctgccgggtagaaggaggacagatagctgcaatgatcttcctgtttgtcaccatgatagtttatctcattagtgctttggtttgcctaaagttatggaggcatgaggcagctcggagacatagagaatatatggaacaacaggagataaatgagccatcattgtcatcgaaaaggaaaatgtgtgaaatggccaccagtggtgacagacaaagagactcagaagttaatttcaaggaactgagaacagcaaaaatgaaacctgaactactgagtggacacatccccccaggccacattcctaaacctatcgtgatgcccgactatgtggcaaaataccctgtgattcagacagatgatgagcgagaacgctataaagctgtgttccaagaccagttttcagagtacaaagagctgtctgcagaagttcaggctgtcctgaggaagtttgatgagctggatgcagtgatgagcagattgccacatcattcggaaagccgacaggaacatgagagaatttcaagaatccatgaagagtttaagaaaaaaaa

SEQ ID NO: 12003 - DNA, 1563 bp, Homo sapiens
  source 1..1563: mol_type = unassigned DNA
caggtgtgaaaatcacaaatgtcaaatgatggaagatccaggaatcgggacaggcgctacgatgaggtcccaagcgacctgccctatcaagataccaccataagaacccacccaattcttcatgacagtgagcgggcagtgagcgctgatcccttgccaccaccccctctcccattacagccaccattcggcccagacttctactcaagtgacacagaagaaccagctatagcgccagatctcaaaccagtaaggcgctttgtccctgactcctggaagaactttttcagagggaagaaaaaggaccccgaatgggataagccggtgtctgatatcaggtacatctccgatggagtggagtgttcaccaccagcctctccagcaagaccaaaccaccgttcgcccctcaactcctgcaaagatccctacggagggtcagaaggaacctttagttcccggaaagaggctgacgcagtgtttccccgggatccctatggatctctagaccgacacacacaaacagttcgaacatacagtgagaaggtggaggagtataacctgagatactcctacatgaagtcgtgggcaggcctgctgagaatactgggtgtggtggagctgcttttgggggccggtgtctttgcttgtgtcacagcttacattcacaaggacagtgagtggtacaacttgtttggatattcacaaccgtatggcatgggaggcgttggtggattgggcagtattgctttggtttgcctaaagttatggaggcatgaggcagctcggagacatagagaatatatggaacaacaggagataaatgagccatcattgtcatcgaaaaggaaaatgtgtgaaatggccaccagtggtgacagacaaagagactcagaagttaatttcaaggaactgagaacagcaaaaatgaaacctgaactactgagtggacacatccccccaggccacattcctaaacctatcgtgatgcccgactatgtggcaaaataccctgtgattcagacagatgatgagcgagaacgctataaagctgtgttccaagaccagttttcagagtacaaagagctgtctgcagaagttcaggctgtcctgaggaagtttgatgagctggatgcagtgatgagcagattgccacatcattcggaaagccgacaggaacatgagagaatttcaagaatccatgaagagtttaagaaaaaaaagaatgatcctacatttctggaaaaaaaagaacgctgtgattacctaaagaataaactttctcacataaagcaaagaattcaagaatatgataaagtaatgaattgggatgtacaaggttattcttaacgcttatttgaaaccactttatttttttattttattttatttttttgagatgaagtctcgctctgttacccaggctggaatgcagtggcacaatctcggctcactgcaacctccacctcccgggttcaagcaattctcctgttcaagcaattagcctccccagtagctgggattacaggcgtgcgctgccacaccccgctaatttttgtattttta

SEQ ID NO: 12004 - DNA, 1584 bp, Homo sapiens
  source 1..1584: mol_type = unassigned DNA
caggtgtgaaaatcacaaatgtcaaatgatggaagatccaggaatcgggacaggcgctacgatgaggtcccaagcgacctgccctatcaagataccaccataagaacccacccaattcttcatgacagtgagcgggcagtgagcgctgatcccttgccaccaccccctctcccattacagccaccattcggcccagacttctactcaagtgacacagaagaaccagctatagcgccagatctcaaaccagtaaggcgctttgtccctgactcctggaagaactttttcagagggaagaaaaaggaccccgaatgggataagccggtgtctgatatcaggtacatctccgatggagtggagtgttcaccaccagcctctccagcaagaccaaaccaccgttcgcccctcaactcctgcaaagatccctacggagggtcagaaggaacctttagttcccggaaagaggctgacgcagtgtttccccgggatccctatggatctctagaccgacacacacaaacagttcgaacatacagtgagaaggtggaggagtataacctgagatactcctacatgaagtcgtgggcaggcctgctgagaatactgggtgtggtggagctgcttttgggggccggtgtctttgcttgtgtcacagcttacattcacaaggacagtgagtggtacaacttgtttggatattcacaaccgtatggcatgggaggcgttggtggattgggcagtattgctttggtttgcctaaagttatggaggcatgaggcagctcggagacatagagaatatatggaacaacaggagataaatgagccatcattgtcatcgaaaaggaaaatgtgtgaaatggccaccagtggtgacagacaaagagactcagaagttaatttcaaggaactgagaacagcaaaaatgaaacctgaactactgagtggacacatccccccaggccacattcctaaacctatcgtgatgcccgactatgtggcaaaataccctgtgattcagacagatgatgagcgagaacgctataaagctgtgttccaagaccagttttcagagtacaaagagctgtctgcagaagttcaggctgtcctgaggaagtttgatgagctggatgcagtgatgagcagattgccacatcattcggaaagccgacaggaacatgagagaatttcaagaatccatgaagagtttaagaaaaaaaagaatgatcctacatttctggaaaaaaaagaacgctgtgattacctaaagaataaactttctcacataaagcaaagaattcaagaatatgataaagtaatgaattgggatgtacaaggttattcttaacgcttatttgaaaccactttatttttttattttattttatttttttgagatgaagtctcgctctgttacccaggctggaatgcagtggcacaatctcggctcactgcaacctccacctcccgggttcaagcaattctcctgttcaagcaattagcctccccacctcccaaagtgttgggattacaggcgtgagtcaccgcgcccagctggtattgcttttctattccctttggacat

SEQ ID NO: 12005 - DNA, 2153 bp, Homo sapiens
  source 1..2153: mol_type = unassigned DNA
gcccgataccggtttcagagtcctgggcagcgtgcgcgctcttcctggcggctgcgcaggtgtgaaaatcacaaatgtcaaatgatggaagatccaggaatcgggacaggcgctacgatgaggtcccaagcgacctgccctatcaagataccaccataagaacccacccaactcttcatgacagtgagcgggcagtgagcgctgatcccttgccaccaccccctctcccattacagccaccattcggcccagacttctactcaagtgacacagaagaaccagctatagcgccagatctcaaaccagtaaggcgctttgtccctgactcctggaagaactttttcagagggaagaaaaaggaccccgaatgggataagccggtgtctgatatcaggtacatctccgatggagtggagtgttcaccaccagcctctccagcaagaccaaaccaccgttcgcccctcaactcctgcaaagatccctacggagggtcagaaggaacctttagttcccggaaagaggctgacgcagtgtttccccgggatccctatggatctctagaccgacacacacaaacagttcgaacatacagtgagaaggtggaggagtataacctgagatactcctacatgaagtcgtgggcaggcctgctgagaatactgggtgtggtggagctgcttttgggggccggtgtctttgcttgtgtcacagcttacattcacaaggacagtgagtggtacaacttgtttggatattcacaaccgtatggcatgggaggcgttggtggattgggcagtatgtatgggggctattactacactggccctaagaccccttttgtactcgtggttgctggattagcttggatcaccaccattattattctggttcttggcatgtccatgtattaccggaccattcttctggactctaattggtggcccctaactgaatttggaattaacgttgccttgtttattttgtatatggccgcagccatagtctatgtgaatgataccaaccgaggtggcctctgctactatccgttatttaatacaccagtgaatgcagtgttctgccgggtagaaggaggacagatagctgcaatgatcttcctgtttgtcaccatgatagtttatctcattagtgctttggtttgcctaaagttatggaggcatgaggcagctcggagacatagagaatatatggaacaacaggagataaatgagccatcattgtcatcgaaaaggaaaatgtgtgaaatggccaccagtggtgacagacaaagagactcagaagttaatttcaaggaactgagaacagcaaaaatgaaacctgaactactgagtggacacatccccccaggccacattcctaaacctatcgtgatgcccgactatgtggcaaaataccctgtgattcagacagatgatgagcgagaacgctataaagctgtgttccaagaccagttttcagagtacaaagagctgtctgcagaagttcaggctgtcctgaggaagtttgatgagctggatgcagtgatgagcagattgccacatcattcggaaagccgacaggaacatgagagaatttcaagaatccatgaagagtttaagaaaaaaaagaatgatcctacatttctggaaaaaaaagaacgctgtgattacctaaagaataaactttctcacataaagcaaagaattcaagaatatgataaagtaatgaattgggatgtacaaggttattcttaacgcttatttgaaaccactttatttttttattttattttatttttttgagatgaagtctcgctctgttacccaggctggaatgcagtggcacaatctcggctcactgcaacctccacctcccgggttcaagcaattctcctgttcaagcaattagcctccccagtagctgggattacaggcgtgcgctgccacaccccgctaatttttgtatttttagtagagacgaggtttcaccatgttggtcaggctgggaaactactttttttaaaaaatagcaagtttactatttatttactgcctttttaatgctagcctctgtggtagagaagcaagcgcttcccaaatcagcttccaattggtttaaccagtatgcaacattaaagattttactcagacattttt

SEQ ID NO: 12006 - DNA, 4376 bp, Homo sapiens
  source 1..4376: mol_type = unassigned DNA
cagagtcctgggcagcgtgcgcgctcttcctggcggctgcgcaggtgtgaaaatcacaaatgtcaaatgatggaagatccaggaatcgggacaggcgctacgatgaggtcccaagcgacctgccctatcaagataccaccataagaacccacccaactcttcatgacagtgagcgggcagtgagcgctgatcccttgccaccaccccctctcccattacagccaccattcggcccagacttctactcaagtgacacagaagaaccagctatagcgccagatctcaaaccagtaaggcgctttgtccctgactcctggaagaactttttcagagggaagaaaaaggaccccgaatgggataagccggtgtctgatatcaggtacatctccgatggagtggagtgttcaccaccagcctctccagcaagaccaaaccaccgttcgcccctcaactcctgcaaagatccctacggagggtcagaaggaacctttagttcccggaaagaggctgacgcagtgtttccccgggatccctatggatctctagaccgacacacacaaacagttcgaacatacagtgagaaggtggaggagtataacctgagatactcctacatgaagtcgtgggcaggcctgctgagaatactgggtgtggtggagctgcttttgggggccggtgtctttgcttgtgtcacagcttacattcacaaggacagtgagtggtacaacttgtttggatattcacaaccgtatggcatgggaggcgttggtggattgggcagtatgtatgggggctattactacactggccctaagaccccttttgtactcgtggttgctggattagcttggatcaccaccattattattctggttcttggcatgtccatgtattaccggaccattcttctggactctaattggtggcccctaactgaatttggaattaacgttgccttgtttattttgtatatggccgcagccatagtctatgtgaatgataccaaccgaggtggcctctgctactatccgttatttaatacaccagtgaatgcagtgttctgccgggtagaaggaggacagatagctgcaatgatcttcctgtttgtcaccatgatagtttatctcattagtgctttggtttgcctaaagttatggaggcatgaggcagctcggagacatagagaatatatggaacaacaggagtgtgaaatggccaccagtggtgacagacaaagagactcagaagttaatttcaaggaactgagaacagcaaaaatgaaacctgaactactgagtggacacatccccccaggccacattcctaaacctatcgtgatgcccgactatgtggcaaaataccctgtgattcagacagatgatgagcgagaacgctataaagctgtgttccaagaccagttttcagagtacaaagagctgtctgcagaagttcaggctgtcctgaggaagtttgatgagctggatgcagtgatgagcagattgccacatcattcggaaagccgacaggaacatgagagaatttcaagaatccatgaagagtttaagaaaaaaaagaatgatcctacatttctggaaaaaaaagaacgctgtgattacctaaagaataaactttctcacataaagcaaagaattcaagaatatgataaagtaatgaattgggatgtacaaggttattcttaacgcttatttgaaaccactttatttttttattttattttatttttttgagatgaagtctcgctctgttacccaggctggaatgcagtggcacaatctcggctcactgcaacctccacctcccgggttcaagcaattctcctgttcaagcaattagcctccccagtagctgggattacaggcgtgcgctgccacaccccgctaatttttgtatttttagtagagacgaggtttcaccatgttggtcaggctgggaaactactttttttaaaaaatagcaagtttactatttatttactgcctttttaatgctagcctctgtggtagagaagcaagcgcttcccaaatcagcttccaattggtttaaccagtatgcaacattaaagattttactcagacatttttaaacgaattcaaatgttctaagggcctttactaagaatggaaaaaatcctgtgttcatctttcatctgtgaccaatttcatattcatctatctcatttaaatgtgtcatcattttagagatcgtatcctggcagtgtgatgggcaagtggaccatcaattctggtgctactttttccttttttactcaggcaggttcctaggatttttctgggacaaatttctcttcctagagaaattcctaggggatttctaaaggatttttctaagggaaaaagggtgacatctttcaaaggtgtcatttattcccttgaaaggtgtttgaatcccagatcaacattttcagacatcctgatcttgggcaaattgcttaatctctctgtgcctgtttcctcttctgtaaaatggggctaataatagttccttcctcatagagttgttaggattaaaggagttactaatatggtaggaactatattagtgtttgtgaagtctactgaagtgtttgtgaaatgaataaattataaagaatgagtctcaagaaaaggtccttaatgagcaagcccaacctacttaaccaaaagcccaagtgtctggtgcctttctggtttgtggtgttaactcatggccttagcctggtgcttcactgtggctctgtggcccctggggttccacatggcctccctgtctttcatcagtgtgactgtacatctctccatctccccatagtccagcctgccctggacacattgaattgtatgaatggtattgcttttttttttttttttttgtgagacagagtcttactctgttgcccagactggagtgcagtggtgcgatctcggctcactgcaagctccgcctcccaagttcacgtcattttcctgcctcagcctcccgagtagctgggactacaggcacctgccaccacgcccagctaatttttttgtatttttagtagagatggggtttcaccgtgttagccaggatgatctcgatctcctgacctcatgatccacccgcctcagcctcccaaagtgttgggattacaggcgtgagtcaccgcgcccagctggtattgcttttctattccctttggacatacatgctacagtcccacaatgtagcatttccttggaaactccctttttttttttttttgagatggagtttcgctcttgttgcccaggctggagtacagtggtatgatcttggctcactgcagcctctgcctcctgggttcaagcgattctcctgcctctgcctcccaagtagctgggattacaggcacccaccaccatgcccagctaattttttgtatttttagtagagacaggatttcactatgttggccaggttggtctcaagctcctgacctcagatgatctaccagcctcggccttctgaagtgctgggattcaggtgtgagccactgtgcccagcagggatgcttcatctttctaagaattatcttggctttggactttattcataaatgttttatttctgttagtatgaacaatagactgccttaacaaagtttttttttaaacaaaatcgttcttgttggattttattcagcagcatctatcatgtagataaattcccaggtgtagcattacagcttctgactaatatagctgccattcagacaattaatgttcaaagagttttctaaagtgataaaaccaaagaaaagcatgtggaaaagcagaagcttagaaagttgtggtcactgaatgcactccctggtttttatttgtcagtgaaatctttatgcattcattgttaatattttaattccatggctttgtaggctgtgctgtgtctgaaggggtaacacctagggaaacatgaggccccttatgggaccccccaaatggaacaacttcactttctcttttatgtattgagccctgtgttaacatttcacttaagaagagcaccagtgctttaaaaaaaaaaaaaggtaaaatattaccattttgatagactgtaaagagttagattcctgttgaagtgttaaggaaatttaactttgtgaaacttttaaaataaagtttataaatgtagctaatctttgaaaaaccaatgcagtaacactgatttgtaaatgttgtggtcaatccctaggtgcattaaagtttcagtcacctgccgtgtgtgtgtgtgcccttttatgtttgccttcctagcattcctgtgttcactgtgcatgttcttgaaaatattttcacttgtcagaaaataaactggaaagtcattgaaaacccgta

SEQ ID NO: 12007 - DNA, 576 bp, Homo sapiens
  source 1..576: mol_type = unassigned DNA
cccaggtgtgctgcgacggacggctgcccgcgctcggcgctcagcctgccatagcccgcgggggaggccggagccagggatccggggaggcccgcgtcccgccaggtttcgctctgcggacgcaggtgtgaaaatcacaaatgtcaaatgatggaagatccaggaatcgggacaggcgctacgatgaggtcccaagcgacctgccctatcaagataccaccataagaacccacccaactcttcatgacagtgagcgggcagtgagcgctgatcccttgccaccaccccctctcccattacagccaccattcggcccagacttctactcaagtgacacagaagaaccagctatagcgccagatctcaaaccagtaaggcgctttgtccctgactcctggaagaactttttcagagggaagaaaaaggaccccgaatgggataagccggtgtctgatatcaggtacatctccgatggagtggagtgttcaccaccagcctctccagcaagaccaaaccaccgttcgcccctcaactcctgcaaagatccctacggagggtcagaaggaacctttagtt

SEQ ID NO: 12008 - DNA, 1908 bp, Homo sapiens
  source 1..1908: mol_type = unassigned DNA
gcggggcggggcgcgcacctcggggcgatctcggtgctccttacctgggaggtctcccggcttagtttcggcctcgttgggtcggaatctccaaagacagtgggtttcagccagaaacgcgaagacgaacgcctagccggcgcgggcagaaccgaggacacaatgagatttgtgggaccgggcgcccagaggctggcgcgggggagaccccacagctaaaatgctcggtacccccgggcagtcgtgggttagttagaaccgcagagcctttcccgacccctcggaagcgcagaagtatccgaaatctacccgtttcttgggtccagcaaaacttttaagccaggtgtgaaaatcacaaatgtcaaatgatggaagatccaggaatcgggacaggcgctacgatgaggtcccaagcgacctgccctatcaagataccaccataagaacccacccaactcttcatgacagtgagcgggcagtgagcgctgatcccttgccaccaccccctctcccattacagccaccattcggcccagacttctactcaagtgacacagaagaaccagctatagcgccagatctcaaaccagtaaggcgctttgtccctgactcctggaagaactttttcagagggaagaaaaaggaccccgaatgggataagccggtgtctgatatcaggtacatctccgatggagtggagtgttcaccaccagcctctccagcaagaccaaaccaccgttcgcccctcaactcctgcaaagatccctacggagggtcagaaggaacctttagttcccggaaagaggctgacgcagtgtttccccgggatccctatggatctctagaccgacacacacaaacagttcgaacatacagtgagaaggtggaggagtataacctgagatactcctacatgaagtcgtgggcaggcctgctgagaatactgggtgtggtggagctgcttttgggggccggtgtctttgcttgtgtcacagcttacattcacaaggacagtgagtggtacaacttgtttggatattcacaaccgtatggcatgggaggcgttggtggattgggcagtatgtatgggggctattactacactggccctaagaccccttttgtactcgtggttgctggattagcttggatcaccaccattattattctggttcttggcatgtccatgtattaccggaccattcttctggactctaattggtggcccctaactgaatttggaattaacgttgccttgtttattttgtatatggccgcagccatagtctatgtgaatgataccaaccgaggtggcctctgctactatccgttatttaatacaccagtgaatgcagtgttctgccgggtagaaggaggacagatagctgcaatgatcttcctgtttgtcaccatgatagtttatctcattagtgctttggtttgcctaaagttatggaggcatgaggcagctcggagacatagagaatatatggaacaacaggagataaatgagccatcattgtcatcgaaaaggaaaatgtgtgaaatggccaccagtggtgacagacaaagagactcagaagttaatttcaaggaactgagaacagcaaaaatgaaacctgaactactgagtggacacatccccccaggccacattcctaaacctatcgtgatgcccgactatgtggcaaaataccctgtgattcagacagatgatgagcgagaacgctataaagctgtgttccaagaccagttttcagagtacaaagagctgtctgcagaagttcaggctgtcctgaggaagtttgatgagctggatgcagtgatgagcagattgccacatcattcggaaagccgacaggaacatgagagaatttcaagaatccatgaagagtttaagaaaaaaaa

SEQ ID NO: 12009 - DNA, 1563 bp, Homo sapiens
  source 1..1563: mol_type = unassigned DNA
caggtgtgaaaatcacaaatgtcaaatgatggaagatccaggaatcgggacaggcgctacgatgaggtcccaagcgacctgccctatcaagataccaccataagaacccacccaactcttcatgacagtgagcgggcagtgagcgctgatcccttgccaccaccccctctcccattacagccaccattcggcccagacttctactcaagtgacacagaagaaccagctatagcgccagatctcaaaccagtaaggcgctttgtccctgactcctggaagaactttttcagagggaagaaaaaggaccccgaatgggataagccggtgtctgatatcaggtacatctccgatggagtggagtgttcaccaccagcctctccagcaagaccaaaccaccgttcgcccctcaactcctgcaaagatccctacggagggtcagaaggaacctttagttcccggaaagaggctgacgcagtgtttccccgggatccctatggatctctagaccgacacacacaaacagttcgaacatacagtgagaaggtggaggagtataacctgagatactcctacatgaagtcgtgggcaggcctgctgagaatactgggtgtggtggagctgcttttgggggccggtgtctttgcttgtgtcacagcttacattcacaaggacagtgagtggtacaacttgtttggatattcacaaccgtatggcatgggaggcgttggtggattgggcagtattgctttggtttgcctaaagttatggaggcatgaggcagctcggagacatagagaatatatggaacaacaggagataaatgagccatcattgtcatcgaaaaggaaaatgtgtgaaatggccaccagtggtgacagacaaagagactcagaagttaatttcaaggaactgagaacagcaaaaatgaaacctgaactactgagtggacacatccccccaggccacattcctaaacctatcgtgatgcccgactatgtggcaaaataccctgtgattcagacagatgatgagcgagaacgctataaagctgtgttccaagaccagttttcagagtacaaagagctgtctgcagaagttcaggctgtcctgaggaagtttgatgagctggatgcagtgatgagcagattgccacatcattcggaaagccgacaggaacatgagagaatttcaagaatccatgaagagtttaagaaaaaaaagaatgatcctacatttctggaaaaaaaagaacgctgtgattacctaaagaataaactttctcacataaagcaaagaattcaagaatatgataaagtaatgaattgggatgtacaaggttattcttaacgcttatttgaaaccactttatttttttattttattttatttttttgagatgaagtctcgctctgttacccaggctggaatgcagtggcacaatctcggctcactgcaacctccacctcccgggttcaagcaattctcctgttcaagcaattagcctccccagtagctgggattacaggcgtgcgctgccacaccccgctaatttttgtattttta

SEQ ID NO: 12010 - DNA, 1584 bp, Homo sapiens
  source 1..1584: mol_type = unassigned DNA
caggtgtgaaaatcacaaatgtcaaatgatggaagatccaggaatcgggacaggcgctacgatgaggtcccaagcgacctgccctatcaagataccaccataagaacccacccaactcttcatgacagtgagcgggcagtgagcgctgatcccttgccaccaccccctctcccattacagccaccattcggcccagacttctactcaagtgacacagaagaaccagctatagcgccagatctcaaaccagtaaggcgctttgtccctgactcctggaagaactttttcagagggaagaaaaaggaccccgaatgggataagccggtgtctgatatcaggtacatctccgatggagtggagtgttcaccaccagcctctccagcaagaccaaaccaccgttcgcccctcaactcctgcaaagatccctacggagggtcagaaggaacctttagttcccggaaagaggctgacgcagtgtttccccgggatccctatggatctctagaccgacacacacaaacagttcgaacatacagtgagaaggtggaggagtataacctgagatactcctacatgaagtcgtgggcaggcctgctgagaatactgggtgtggtggagctgcttttgggggccggtgtctttgcttgtgtcacagcttacattcacaaggacagtgagtggtacaacttgtttggatattcacaaccgtatggcatgggaggcgttggtggattgggcagtattgctttggtttgcctaaagttatggaggcatgaggcagctcggagacatagagaatatatggaacaacaggagataaatgagccatcattgtcatcgaaaaggaaaatgtgtgaaatggccaccagtggtgacagacaaagagactcagaagttaatttcaaggaactgagaacagcaaaaatgaaacctgaactactgagtggacacatccccccaggccacattcctaaacctatcgtgatgcccgactatgtggcaaaataccctgtgattcagacagatgatgagcgagaacgctataaagctgtgttccaagaccagttttcagagtacaaagagctgtctgcagaagttcaggctgtcctgaggaagtttgatgagctggatgcagtgatgagcagattgccacatcattcggaaagccgacaggaacatgagagaatttcaagaatccatgaagagtttaagaaaaaaaagaatgatcctacatttctggaaaaaaaagaacgctgtgattacctaaagaataaactttctcacataaagcaaagaattcaagaatatgataaagtaatgaattgggatgtacaaggttattcttaacgcttatttgaaaccactttatttttttattttattttatttttttgagatgaagtctcgctctgttacccaggctggaatgcagtggcacaatctcggctcactgcaacctccacctcccgggttcaagcaattctcctgttcaagcaattagcctccccacctcccaaagtgttgggattacaggcgtgagtcaccgcgcccagctggtattgcttttctattccctttggacat

SEQ ID NO: 12011 - DNA, 5276 bp, Homo sapiens
  source 1..5276: mol_type = unassigned DNA
acacacagagtgatacaaatacctgcttgagcccctcagttattttctctcaagggctgaagtcagccacacaggataaaggagggaagggaaggagcagatcttttcggtaggaagacagattttgttgtcaggttcctgggagtgcaagagcaagtcaaaggagagagagaggagagaggaaaagccagagggagagagggggagaggggatctgttgcaggcaggggaaggcgtgacctgaatggagaatgccagccaattccagagacacacagggacctcagaacaaagataaggcatcacggacaccacaccgggcacgagctcacaggcaagtcaagctgggaggaccaaggccgggcagccgggagcacccaaggcaggaaaatgaggtggctgcttctctattatgctctgtgcttctccctgtcaaaggcttcagcccacaccgtggagctaaacaatatgtttggccagatccagtcgcctggttatccagactcctatcccagtgattcagaggtgacttggaatatcactgtcccagatgggtttcggatcaagctttacttcatgcacttcaacttggaatcctcctacctttgtgaatatgactatgtgaaggtagaaactgaggaccaggtgctggcaaccttctgtggcagggagaccacagacacagagcagactcccggccaggaggtggtcctctcccctggctccttcatgtccatcactttccggtcagatttctccaatgaggagcgtttcacaggctttgatgcccactacatggctgtggatgtggacgagtgcaaggagagggaggacgaggagctgtcctgtgaccactactgccacaactacattggcggctactactgctcctgccgcttcggctacatcctccacacagacaacaggacctgccgagtggagtgcagtgacaacctcttcactcaaaggactggggtgatcaccagccctgacttcccaaacccttaccccaagagctctgaatgcctgtataccatcgagctggaggagggtttcatggtcaacctgcagtttgaggacatatttgacattgaggaccatcctgaggtgccctgcccctatgactacatcaagatcaaagttggtccaaaagttttggggcctttctgtggagagaaagccccagaacccatcagcacccagagccacagtgtcctgatcctgttccatagtgacaactcgggagagaaccggggctggaggctctcatacagggctgcaggaaatgagtgcccagagctacagcctcctgtccatgggaaaatcgagccctcccaagccaagtatttcttcaaagaccaagtgctcgtcagctgtgacacaggctacaaagtgctgaaggataatgtggagatggacacattccagattgagtgtctgaaggatgggacgtggagtaacaagattcccacctgtaaaattgtagactgtagagccccaggagagctggaacacgggctgatcaccttctctacaaggaacaacctcaccacatacaagtctgagatcaaatactcctgtcaggagccctattacaagatgctcaacaataacacaggtatatatacctgttctgcccaaggagtctggatgaataaagtattggggagaagcctacccacctgccttccagtgtgtgggctccccaagttctcccggaagctgatggccaggatcttcaatggacgcccagcccagaaaggcaccactccctggattgccatgctgtcacacctgaatgggcagcccttctgcggaggctcccttctaggctccagctggatcgtgaccgccgcacactgcctccaccagtcactcgatccggaagatccgaccctacgtgattcagacttgctcagcccttctgacttcaaaatcatcctgggcaagcattggaggctccggtcagatgaaaatgaacagcatctcggcgtcaaacacaccactctccacccccagtatgatcccaacacattcgagaatgacgtggctctggtggagctgttggagagcccagtgctgaatgccttcgtgatgcccatctgtctgcctgagggaccccagcaggaaggagccatggtcatcgtcagcggctgggggaagcagttcttgcaaaggttcccagagaccctgatggagattgaaatcccgattgttgaccacagcacctgccagaaggcttatgccccgctgaagaagaaagtgaccagggacatgatctgtgctggggagaaggaagggggaaaggacgcctgtgcgggtgactctggaggccccatggtgaccctgaatagagaaagaggccagtggtacctggtgggcactgtgtcctggggtgatgactgtgggaagaaggaccgctacggagtatactcttacatccaccacaacaaggactggatccagagggtcaccggagtgaggaactgaatttggctcctcagccccagcaccaccagctgtgggcagtcagtagcagaggacgatcctccgatgaaagcagccatttctcctttccttcctcccatcccccctccttcggcctatccattactgggcaatagagcaggtatcttcacccccttttcactctctttaaagagatggagcaagagagtggtcagaacacaggccgaatccaggctctatcacttactagtttgcagtgctgggcaggtgacttcatctcttcgaacttcagtttcttcataagatggaaatgctataccttacctacctcgtaaaagtctgatgaggaaaagattaactaatagatgcatagcacttaacagagtgcatagcatacactgttttcaataaatgcaccttagcagaaggtcgatgtgtctaccaggcagacgaagctctcttacaaacccctgcctgggtcttagcattgatcagtgacacacctctcccctcaaccttgaccatctccatctgcccttaaatgctgtatgcttttttgccaccgtgcaacttgcccaacatcaatcttcaccctcatccctaaaaaagtaaaacagacaaggttctgagtcctgtggtatgtcccctagcaaatgtaactaggaacatgcactagatgacagattgcgggagggcctgagagaagcagggacaggagggagcctggggattgtggtttgggaaggcagacacctggttctagaactagctctgcccttagccccctgtatgaccctatgcaagtcctcctccctcatctcaaagggtcctcaaagctctgacgatctaagatacaatgaagccattttccccctgataagatgaggtaaagccaatgtaaccaaaaggcaaaaattacaatcggttcaaaggaactttgatgcagacaaaatgctgctgctgctgctcctgaaatacccacccctttccactacgggtgggttcccaaggacatgggacaggcaaagtgtgagccaaaggatccttccttattcctaagcagagcatctgctctgggccctggcctccttcccttcttgggaaactgggctgcatgaggtgggccctggtagtttgtaccccaggcccctatactcttccttcctatgtccacagctgaccccaagcagccgttccccgactcctcacccctgagcctcaccctgaactccctcatcttgcaaggccataagtgttttccaagcaaaatgcctctcccatcctctctcaggaagcttctagagactttatgccctccagagctccaagatataagccctccaagggatcagaagctccaagttcctgtcttctgttttatagaaattgatcttccctgggggactttaactcttgacctgtatgcagctgttggagtaattccaggtctcttgaaaaaaaagaggaagataatggagaatgagaacatatatatatatatattaagccccaggctgaatactcagggacagcaattcacagcctgcctctggttctataaacaagtcattctacctctttgtgccctgctgtttattctgtaaggggaaggtggcaatgggacccagctccatcagacacttgtcaagctagcagaaactccattttcaatgccaaagaagaactgtaatgctgttttggaatcatcccaaggcatcccaagacaccatatcttcccatttcaagcactgcctgggcacaccccaacatcccaggctgtggtggctcctgtgggaactacctagatgaagagagtatcatttataccttctaggagctcctattgggagacatgaaacatatgtaattgactaccatgtaatagaacaaaccctgccaagtgctgctttggaaagtcatggaggtaaaagaaagaccattctggtatgaaggttttgggggaggagatatcaatcaagaaggcttcccagaagaggtgactggaccagagccttgtccacaggtaagacggaggaggccttccacatggagggagaacaatagtaaatgtccactcaagatgtcctttattataccagctcctcccacaaaaacacatgtccagtggactctttttctgggatcagaaccaacaccaaaaagagcttttctccttaaagttagaattctaaacaggacttgaaatggcctcaaggtttgtgcacaaatactgacttctggctggacccagcttattctgtttatttctccaattgcaatttcatccttatcctgagaaaatgtctaaataggccatggaacccaggcttccccgtgacctacaagcacttattagctgtgccagctcctgcactgctgctaaggtccaagaaacccagatctctcacagagccatagaagcagagggctggagtatctgtgaggacaacaaccttgtctaacttcgcgacctcattcttgagcatttctactgatgagaaactcactacccccaattgcagctcattcaactttaaaattgctgctttttgaatcactgattgtgaatattaatttaaaaaaataagtaagaaaatgttttaaatgtgctgcctctttaaaaggtctcctctttgtgcaaccaaaacccacctctctagaatacagtttgtataactgaagctataatttcataccatgagtgctgctgttagcaataataatcatgcccggattttattaacaacagaagctgttgctcgtatgaaaaaacaaacattagttctaataaacatctgcattgagtc

SEQ ID NO: 12012 - DNA, 498 bp, Homo sapiens
  source 1..498: mol_type = unassigned DNA
ggctgatcaccttctctacaaggaacaacctcaccacatacaagtctgagatcaaatactcctgtcaggagccctattacaagatgctcaacaataacacaggtatatatacctgttctgcccaaggagtctggatgaataaagtattggggagaagcctacccacctgccttccagtgtgtgggctccccaagttctcccggaagctgatggccaggatcttcaatggacgcccagcccagaaaggcaccactccctggattgccatgctgtcacacctgaatgggcagcccttctgcggaggctcccttctaggctccagctggatcgtgaccgccgcacactgcctccaccagtcactcgatccggaagatccgaccctacgtgattcagacttgctcagcccttctgacttcaaaatcatcctggggcaggacacctgggatggaggtccaggaacctgagtccaagtgcaagatatgattctccagacacgtg

SEQ ID NO: 12013 - DNA, 5982 bp, Homo sapiens
  source 1..5982: mol_type = unassigned DNA
ttgaaattatttgcattttgagtggactctctagctaatcaaaaagatgaatttggagtcctaaagttaaaatcacaatgtctaaatggcactcagggataaattatatctcactgtttcccaaaatgaccaggtaaaattcaggaggacatggaactttggaaattttaccagggctctggaaattctgacagttgatgtccaccattggccagctagtacctagaataggccatttaactggaaaacagatccttaagaaccactagttccatttactaaaacagccctgggtttgaggtcaaatcttgctctcattctgatagtaacttgctgtatgtccttagacgagtcaagtctcctctctgggctcatagataaaataaagaggacattctagattgcctacttcaggtttctttccagctgtgacattctatgattcatctatgattcttcgactctggcataggctgttatacctaagattaggatttccttaagaatgaaaagattgacaaatttgggtccagagcctctgatatggccatgaaaagatgccctgactctcagctgactcacactgggctccatcagtgctgacaactcccctaagactgagctggactggaaagctccccaaagaccacctctgaggagcaggcatctttattcatgtcctgtactgggaattatggctcaaacatgcggccatcaacaattatagaaaatgaacaggggaagactgaaagctgatccacctccaaccctgcctcctggcttctatggccaagcaagctgcctgtagagaggcagcagggtggggctgtgtactcatacaggagctgggtttttttattttttgtgccaaactccaatgtgagcacattagctgctgttactcagcctaggattgggactagaagaacaaaagattatttagtttatgtcagctagagttttctcactaagccaagggcttcattcttgggcagaagaggcagagaggattgcacaataaaactagaagtaaaagaaagaggccctggtgggtaaaagactggagtctgcttaaacctcagtagaccttcccctacccaaaattgacactgggcaggtgagttgaccacacagtagtaccataatgaatggaagagacctcaaaagcaggaccatgggtagcttcacaggctgtacactgcacaccccaggggtgcccttcagaggcattataacattgctttctggaattgtgtgcagtgcacaacctgtacatctgcatgagatagatccatcagatagccaaaggaggatgagcaaaaggcagttgaggggtctcacttcttctctctcagttgtagactgtagagccccaggagagctggaacacgggctgatcaccttctctacaaggaacaacctcaccacatacaagtctgagatcaaatactcctgtcaggagccctattacaagatgctcaacaataacacaggtaagccatccatgctaagccatcccactcccgtttcacactctcggggcctcagggttggactgggggccgagacagctgtgaaaggaagaactgctcataagtgtgtagagcctgataatgcaaaacgtgtcactcacacatctcaggttctcacttttcatgagcttgtgttactgtgtccatgtggagatgcagaaacagtctcaaaaccaaaaagcaggcttttttgtttttaactttaaagctagcactgatttactaatgagttgttggtgggagcgtgaaggagtcacacactgacacaactaagagaagaaacgagaccctaaaggaagcctggaatcccccaagttaaactccttcatgtggtctgaggctgagttggggtttccaaaaaaaggccagtattactgcttcacccagactctgccttggcttctgggtgagggcaacatctcaccaggccagacccattcagcaggtaagggaccttccttcaaagacctcttcccctggtacggacaggggtccaggcagggttggggagcgaggagtggatcctctgtctccccaggtagcccagcatatcccctgaccacagctcaagcacagccacagcagtccctgtccaggccccatccatgccacctggcagagacccctggctgccccaggggctgggcagcagcacactggccagagggtgaaggaccagcaataacctgaccattggccacactgggggtttgggaggaactgggaggagaaatgcttagagacataacccgcctctccctgccttgtggcagcccaacacccgctcacatgcactcatagtccctagcagaaaaggaactctcagggagaaaggagggcccatcggctctgcctctctggcatgcaagcactgagaacattctcctgactcatctaagcctccaactcctctttgtttttgtttttgtttttgagacagggtctcactctgtcacccaggctggagtgcagtggtgtgatgtcggctcactgcaacctccacgtcctgggttcaagcaattctctcgcctcagcctcccaagcagctgtgattacagaagcttgccaccatgcccagctaatttttgtatttttagtagagacccgcttttgccatgttggtcaggctggtctcaaactcctgacctcaagtgatccgcccgcctcggcctcccaaagtgctgggattacaagcgtgagccactgcacctggccccaagtcctcatttttaaaagagggaagagttacaaagctcttagagctatttcaaaatgccagtgagatggtggccacaaatgtatgcttattaaagagtctgtcaaatggagaagaaaggaaagggcatctgtgcaacagggagccatgtgagcccaggtctttgtgacaagtgaggcggaggtgccttccaggacctgggcagcgtggggtggggaggggagcagccctcagccaggcaggagtgggattccccagagctttggacagacaccatgctgaagagtgtggtgtttatttttgggggtgacagcaagccattcgtgattctgagctgagaaaggacatggtcacattcccattttagaaagatccttcatgttgcaaagggagtttgatagaaggactaggatggtagccctgtgggtatttgaagatatttggaggttaattggtccctttggaggattgtatcccagagagtacctgccacattcttcctcattcttcttagtacatctaggctcagagacaatcgtatctgagcctagatgaccatttggaggactttgtaataactcactttagagaaattaaatacccagatctattttccatgtgttacaaatcaaccattttctccctcctctcctaacctctttcactaatccaggtatatatacctgttctgcccaaggagtctggatgaataaagtattggggagaagcctacccacctgccttccagagtgtggtcagccctcccgctccctgccaagcctggtcaagaggatcattgggggccgaaatgctgagcctggcctcttcccgtggcaggccctgatagtggtggaggacacttcgagagtgccaaatgacaagtggtttgggagtggggccctgctctctgcgtcctggatcctcacagcagctcatgtgctgcgctcccagcgtagagacaccacggtgataccagtctccaaggagcatgtcaccgtctacctgggcttgcatgatgtgcgagacaaatcgggggcagtcaacagctcagctgcccgagtggtgctccacccagacttcaacatccaaaactacaaccacgatatagctctggtgcagctgcaggagcctgtgcccctgggaccccacgttatgcctgtctgcctgccaaggcttgagcctgaaggcccggccccccacatgctgggcctggtggccggctggggcatctccaatcccaatgtgacagtggatgagatcatcagcagtggcacacggaccttgtcagatgtcctgcagtatgtcaagttacccgtggtgcctcacgctgagtgcaaaactagctatgagtcccgctcgggcaattacagcgtcacggagaacatgttctgtgctggctactacgagggcggcaaagacacgtgccttggagatagcggtggggcctttgtcatctttgatgacttgagccagcgctgggtggtgcaaggcctggtgtcctgggggggacctgaagaatgcggcagcaagcaggtctatggagtctacacaaaggtctccaattacgtggactgggtgtgggagcagatgggcttaccacaaagtgttgtggagccccaggtggaacggtgagctgacttacttcctcggggcctgcctcccctgagcgaagctacaccgcacttccgacagcacactccacattacttatcagaccatatggaatggaacacactgacctagcggtggcttctcctaccgagacagcccccaggaccctgagaggcagagtgtggtatagggaaaaggctccaggcaggagacctgtgttcctgagcttgtccaagtctctttccctgtctgggcctcactctaccgagtaatacaatgcaggagctcaaccaaggcctctgtgccaatcccagcactcctttccaggccatgcttcttaccccagtggcctttattcactcctgaccacttatcaaacccatcggtcctactgttggtataactgagcttggacctgactattagaaaatggtttctaacattgaactgaatgccgcatctgtatattttcctgctctgccttctgggactagccttggcctaatccttcctctaggagaagagcattcaggttttgggagatggctcatagccaagcccctctctcttagtgtgatcccttggagcaccttcatgcctggggtttctctcccaaaagcttcttgcagtctaagccttatcccttatgttccccattaaaggaatttcaaaagacatggagaaagttgggaaggtttgtgctgactgctgggagcagaatagccgtgggaggcccaccaagcccttaaattcccattgtcaactcagaacacatttgggcccatatgccaccctggaacaccagctgacaccatgggcgtccacacctgctgctccagacaagcacaaagcaatctttcagccttgaaatgtattatctgaaaggctacctgaagcccaggcccgaatatggggacttagtcgattacctggaaaaagaaaagacccacactgtgtcctgctgtgcttttgggcaggaaaatggaagaaagagtggggtgggcacattagaagtcacccaaatcctgccaggctgcctggcatccctggggcatgagctgggcggagaatccaccccgcaggatgttcagagggacccactccttcatttttcagagtcaaaggaatcagaggctcacccatggcaggcagtgaaaagagccaggagtcctgggttctagtccctgctctgcccccaactggctgtataacctttgaaaaatcattttctttgtctgagtctctggttctccgtcagcaacaggctggcataaggtcccctgcaggttccttctagctggagcactcagagcttccctgactgctagcagcctctctggccctcacagggctgattgttctccttctccctggagctctctctcctgaaaatctccatcagagcaaggcagccagagaagcccctgagagggaatgattgggaagtgtccactttctcaaccggctcatcaaacacactcctttgtctatgaatggcacatgtaaatgatgttatattttgtatcttttatatcatatgcttcaccattctgtaaagggcctctgcattgttgctcccatcaggggtctcaagtggaaataaaccctcgtggataaccaaca

SEQ ID NO: 12014 - DNA, 4015 bp, Homo sapiens
  source 1..4015: mol_type = unassigned DNA
agagagagaggagagaggaaaagccagagggagagagggggagaggggatctgttgcaggcaggggaaggcgtgacctgaatggagaatgccagccaattccagagacacacagggacctcagaacaaagataaggcatcacggacaccacaccgggcacgagctcacaggcaagtcaagctgggaggaccaaggccgggcagccgggagcacccaaggcaggaaaatgaggtggctgcttctctattatgctctgtgcttctccctgtcaaaggcttcagcccacaccgtggagctaaacaatatgtttggccagatccagtcgcctggttatccagactcctatcccagtgattcagaggtgacttggaatatcactgtcccagatgggtttcggatcaagctttacttcatgcacttcaacttggaatcctcctacctttgtgaatatgactatgtgaaggtagaaactgaggaccaggtgctggcaaccttctgtggcagggagaccacagacacagagcagactcccggccaggaggtggtcctctcccctggctccttcatgtccatcactttccggtcagatttctccaatgaggagcgtttcacaggctttgatgcccactacatggctgtggatgtggacgagtgcaaggagagggaggacgaggagctgtcctgtgaccactactgccacaactacattggcggctactactgctcctgccgcttcggctacatcctccacacagacaacaggacctgccgagtggagtgcagtgacaacctcttcactcaaaggactggggtgatcaccagccctgacttcccaaacccttaccccaagagctctgaatgcctgtataccatcgagctggaggagggtttcatggtcaacctgcagtttgaggacatatttgacattgaggaccatcctgaggtgccctgcccctatgactacatcaagatcaaagttggtccaaaagttttggggcctttctgtggagagaaagccccagaacccatcagcacccagagccacagtgtcctgatcctgttccatagtgacaactcgggagagaaccggggctggaggctctcatacagggctgcaggaaatgagtgcccagagctacagcctcctgtccatgggaaaatcgagccctcccaagccaagtatttcttcaaagaccaagtgctcgtcagctgtgacacaggctacaaagtgctgaaggataatgtggagatggacacattccagattgagtgtctgaaggatgggacgtggagtaacaagattcccacctgtaaaattgtagactgtagagccccaggagagctggaacacgggctgatcaccttctctacaaggaacaacctcaccacatacaagtctgagatcaaatactcctgtcaggagccctattacaagatgctcaacaataacacaggtatatatacctgttctgcccaaggagtctggatgaataaagtattggggagaagcctacccacctgccttccagagtgtggtcagccctcccgctccctgccaagcctggtcaagaggatcattgggggccgaaatgctgagcctggcctcttcccgtggcaggccctgatagtggtggaggacacttcgagagtgccaaatgacaagtggtttgggagtggggccctgctctctgcgtcctggatcctcacagcagctcatgtgctgcgctcccagcgtagagacaccacggtgataccagtctccaaggagcatgtcaccgtctacctgggcttgcatgatgtgcgagacaaatcgggggcagtcaacagctcagctgcccgagtggtgctccacccagacttcaacatccaaaactacaaccacgatatagctctggtgcagctgcaggagcctgtgcccctgggaccccacgttatgcctgtctgcctgccaaggcttgagcctgaaggcccggccccccacatgctgggcctggtggccggctggggcatctccaatcccaatgtgacagtggatgagatcatcagcagtggcacacggaccttgtcagatgtcctgcagtatgtcaagttacccgtggtgcctcacgctgagtgcaaaactagctatgagtcccgctcgggcaattacagcgtcacggagaacatgttctgtgctggctactacgagggcggcaaagacacgtgccttggagatagcggtggggcctttgtcatctttgatgacttgagccagcgctgggtggtgcaaggcctggtgtcctgggggggacctgaagaatgcggcagcaagcaggtctatggagtctacacaaaggtctccaattacgtggactgggtgtgggagcagatgggcttaccacaaagtgttgtggagccccaggtggaacggtgagctgacttacttcctcggggcctgcctcccctgagcgaagctacaccgcacttccgacagcacactccacattacttatcagaccatatggaatggaacacactgacctagcggtggcttctcctaccgagacagcccccaggaccctgagaggcagagtgtggtatagggaaaaggctccaggcaggagacctgtgttcctgagcttgtccaagtctctttccctgtctgggcctcactctaccgagtaatacaatgcaggagctcaaccaaggcctctgtgccaatcccagcactcctttccaggccatgcttcttaccccagtggcctttattcactcctgaccacttatcaaacccatcggtcctactgttggtataactgagcttggacctgactattagaaaatggtttctaacattgaactgaatgccgcatctgtatattttcctgctctgccttctgggactagccttggcctaatccttcctctaggagaagagcattcaggttttgggagatggctcatagccaagcccctctctcttagtgtgatcccttggagcaccttcatgcctggggtttctctcccaaaagcttcttgcagtctaagccttatcccttatgttccccattaaaggaatttcaaaagacatggagaaagttgggaaggtttgtgctgactgctgggagcagaatagccgtgggaggcccaccaagcccttaaattcccattgtcaactcagaacacatttgggcccatatgccaccctggaacaccagctgacaccatgggcgtccacacctgctgctccagacaagcacaaagcaatctttcagccttgaaatgtattatctgaaaggctacctgaagcccaggcccgaatatggggacttagtcgattacctggaaaaagaaaagacccacactgtgtcctgctgtgcttttgggcaggaaaatggaagaaagagtggggtgggcacattagaagtcacccaaatcctgccaggctgcctggcatccctggggcatgagctgggcggagaatccaccccgcaggatgttcagagggacccactccttcatttttcagagtcaaaggaatcagaggctcacccatggcaggcagtgaaaagagccaggagtcctgggttctagtccctgctctgcccccaactggctgtataacctttgaaaaatcattttctttgtctgagtctctggttctccgtcagcaacaggctggcataaggtcccctgcaggttccttctagctggagcactcagagcttccctgactgctagcagcctctctggccctcacagggctgattgttctccttctccctggagctctctctcctgaaaatctccatcagagcaaggcagccagagaagcccctgagagggaatgattgggaagtgtccactttctcaaccggctcatcaaacacactcctttgtctatgaatggcacatgtaaatgatgttatattttgtatcttttatatcatatgcttcaccattctgtaaagggcctctgcattgttgctcccatcaggggtctcaagtggaaataaaccctcgtggataaccaaca

SEQ ID NO: 12015 - DNA, 3900 bp, Homo sapiens
  source 1..3900: mol_type = unassigned DNA
tctctcaagggctgaagtcagccacacaggataaaggagggaagggaaggagcagatcttttcggtaggaagacagattttgttgtcaggttcctgggagtgcaagagcaagtcaaaggagagagagaggagagaggaaaagccagagggagagagggggagaggggatctgttgcaggcaggggaaggcgtgacctgaatggagaatgccagccaattccagagacacacagggacctcagaacaaagataaggcatcacggacaccacaccgggcacgagctcacaggcaagtcaagctgggaggaccaaggccgggcagccgggagcacccaaggcaggaaaatgaggtagaaactgaggaccaggtgctggcaaccttctgtggcagggagaccacagacacagagcagactcccggccaggaggtggtcctctcccctggctccttcatgtccatcactttccggtcagatttctccaatgaggagcgtttcacaggctttgatgcccactacatggctgtggatgtggacgagtgcaaggagagggaggacgaggagctgtcctgtgaccactactgccacaactacattggcggctactactgctcctgccgcttcggctacatcctccacacagacaacaggacctgccgagtggagtgcagtgacaacctcttcactcaaaggactggggtgatcaccagccctgacttcccaaacccttaccccaagagctctgaatgcctgtataccatcgagctggaggagggtttcatggtcaacctgcagtttgaggacatatttgacattgaggaccatcctgaggtgccctgcccctatgactacatcaagatcaaagttggtccaaaagttttggggcctttctgtggagagaaagccccagaacccatcagcacccagagccacagtgtcctgatcctgttccatagtgacaactcgggagagaaccggggctggaggctctcatacagggctgcaggaaatgagtgcccagagctacagcctcctgtccatgggaaaatcgagccctcccaagccaagtatttcttcaaagaccaagtgctcgtcagctgtgacacaggctacaaagtgctgaaggataatgtggagatggacacattccagattgagtgtctgaaggatgggacgtggagtaacaagattcccacctgtaaaattgtagactgtagagccccaggagagctggaacacgggctgatcaccttctctacaaggaacaacctcaccacatacaagtctgagatcaaatactcctgtcaggagccctattacaagatgctcaacaataacacaggtatatatacctgttctgcccaaggagtctggatgaataaagtattggggagaagcctacccacctgccttccagagtgtggtcagccctcccgctccctgccaagcctggtcaagaggatcattgggggccgaaatgctgagcctggcctcttcccgtggcaggccctgatagtggtggaggacacttcgagagtgccaaatgacaagtggtttgggagtggggccctgctctctgcgtcctggatcctcacagcagctcatgtgctgcgctcccagcgtagagacaccacggtgataccagtctccaaggagcatgtcaccgtctacctgggcttgcatgatgtgcgagacaaatcgggggcagtcaacagctcagctgcccgagtggtgctccacccagacttcaacatccaaaactacaaccacgatatagctctggtgcagctgcaggagcctgtgcccctgggaccccacgttatgcctgtctgcctgccaaggcttgagcctgaaggcccggccccccacatgctgggcctggtggccggctggggcatctccaatcccaatgtgacagtggatgagatcatcagcagtggcacacggaccttgtcagatgtcctgcagtatgtcaagttacccgtggtgcctcacgctgagtgcaaaactagctatgagtcccgctcgggcaattacagcgtcacggagaacatgttctgtgctggctactacgagggcggcaaagacacgtgccttggagatagcggtggggcctttgtcatctttgatgacttgagccagcgctgggtggtgcaaggcctggtgtcctgggggggacctgaagaatgcggcagcaagcaggtctatggagtctacacaaaggtctccaattacgtggactgggtgtgggagcagatgggcttaccacaaagtgttgtggagccccaggtggaacggtgagctgacttacttcctcggggcctgcctcccctgagcgaagctacaccgcacttccgacagcacactccacattacttatcagaccatatggaatggaacacactgacctagcggtggcttctcctaccgagacagcccccaggaccctgagaggcagagtgtggtatagggaaaaggctccaggcaggagacctgtgttcctgagcttgtccaagtctctttccctgtctgggcctcactctaccgagtaatacaatgcaggagctcaaccaaggcctctgtgccaatcccagcactcctttccaggccatgcttcttaccccagtggcctttattcactcctgaccacttatcaaacccatcggtcctactgttggtataactgagcttggacctgactattagaaaatggtttctaacattgaactgaatgccgcatctgtatattttcctgctctgccttctgggactagccttggcctaatccttcctctaggagaagagcattcaggttttgggagatggctcatagccaagcccctctctcttagtgtgatcccttggagcaccttcatgcctggggtttctctcccaaaagcttcttgcagtctaagccttatcccttatgttccccattaaaggaatttcaaaagacatggagaaagttgggaaggtttgtgctgactgctgggagcagaatagccgtgggaggcccaccaagcccttaaattcccattgtcaactcagaacacatttgggcccatatgccaccctggaacaccagctgacaccatgggcgtccacacctgctgctccagacaagcacaaagcaatctttcagccttgaaatgtattatctgaaaggctacctgaagcccaggcccgaatatggggacttagtcgattacctggaaaaagaaaagacccacactgtgtcctgctgtgcttttgggcaggaaaatggaagaaagagtggggtgggcacattagaagtcacccaaatcctgccaggctgcctggcatccctggggcatgagctgggcggagaatccaccccgcaggatgttcagagggacccactccttcatttttcagagtcaaaggaatcagaggctcacccatggcaggcagtgaaaagagccaggagtcctgggttctagtccctgctctgcccccaactggctgtataacctttgaaaaatcattttctttgtctgagtctctggttctccgtcagcaacaggctggcataaggtcccctgcaggttccttctagctggagcactcagagcttccctgactgctagcagcctctctggccctcacagggctgattgttctccttctccctggagctctctctcctgaaaatctccatcagagcaaggcagccagagaagcccctgagagggaatgattgggaagtgtccactttctcaaccggctcatcaaacacactcctttgtctatgaatggcacatgtaaatgatgttatattttgtatcttttatatcatatgcttcaccattctgtaaagggcctctgcattgttgctcccatcaggggtctcaagtggaaataaaccctcgtggataaccaa

SEQ ID NO: 12016 - DNA, 587 bp, Homo sapiens
  source 1..587: mol_type = unassigned DNA
agacacacagggacctcagaacaaagataaggcatcacggacaccacaccgggcacgagctcacagcagctcatgtgctgcgctcccagcgtagagacaccacggtgataccagtctccaaggagcatgtcaccgtctacctgggcttgcatgatgtgcgagacaaatcgggggcagtcaacagctcagctgcccgagtggtgctccacccagacttcaacatccaaaactacaaccacgatatagctctggtgcagctgcaggagcctgtgcccctgggaccccacgttatgcctgtctgcctgccaaggcttgagcctgaaggcccggccccccacatgctgggcctggtggccggctggggcatctccaatcccaatgtgacagtggatgagatcatcagcagtggcacacggaccttgtcagatgtcctgcagtatgtcaagttacccgtggtgcctcacgctgagtgcaaaactagctatgagtcccgctcgggcaattacagcgtcacggagaacatgttctgtgctggctactacgagggcggcaaagacacgtgccttggagatagcggtggggccttt

SEQ ID NO: 12017 - DNA, 2440 bp, Homo sapiens
  source 1..2440: mol_type = unassigned DNA
gccacacaggataaaggagggaagggaaggagcagatcttttcggtaggaagacagattttgttgtcaggttcctgggagtgcaagagcaagtcaaaggagagagagaggagagaggaaaagccagagggagagagggggagaggggatctgttgcaggcaggggaaggcgtgacctgaatggagaatgccagccaattccagagacacacagggacctcagaacaaagataaggcatcacggacaccacaccgggcacgagctcacaggcaagtcaagctgggaggaccaaggccgggcagccgggagcacccaaggcaggaaaatgaggtggctgcttctctattatgctctgtgcttctccctgtcaaaggcttcagcccacaccgtggagctaaacaatatgtttggccagatccagtcgcctggttatccagactcctatcccagtgattcagaggtgacttggaatatcactgtcccagatgggtttcggatcaagctttacttcatgcacttcaacttggaatcctcctacctttgtgaatatgactatgtgaaggtagaaactgaggaccaggtgctggcaaccttctgtggcagggagaccacagacacagagcagactcccggccaggaggtggtcctctcccctggctccttcatgtccatcactttccggtcagatttctccaatgaggagcgtttcacaggctttgatgcccactacatggctgtggatgtggacgagtgcaaggagagggaggacgaggagctgtcctgtgaccactactgccacaactacattggcggctactactgctcctgccgcttcggctacatcctccacacagacaacaggacctgccgagtggagtgcagtgacaacctcttcactcaaaggactggggtgatcaccagccctgacttcccaaacccttaccccaagagctctgaatgcctgtataccatcgagctggaggagggtttcatggtcaacctgcagtttgaggacatatttgacattgaggaccatcctgaggtgccctgcccctatgactacatcaagatcaaagttggtccaaaagttttggggcctttctgtggagagaaagccccagaacccatcagcacccagagccacagtgtcctgatcctgttccatagtgacaactcgggagagaaccggggctggaggctctcatacagggctgcaggaaatgagtgcccagagctacagcctcctgtccatgggaaaatcgagccctcccaagccaagtatttcttcaaagaccaagtgctcgtcagctgtgacacaggctacaaagtgctgaaggataatgtggagatggacacattccagattgagtgtctgaaggatgggacgtggagtaacaagattcccacctgtaaaaaaaatgaaatcgatctggagagcgaactcaagtcagagcaagtgacagagtgaatgacgggaccccacacaatgcagacatccagaaatggatcactcccaagacccctggggcccagagctgcaccacccctccccacccacaacacccccgtgcccctttccatgtggattagaatgggtgctgaacaacatgatctcagcagttgaagctgctacgtgtgtgaaagcaaattctccacttgagggtttgcccatcattcaaacactattccagaaaataatgaaaaaaaaatgtgggatttattttagcacctctgagtggactgtacttttctcaacggaaaaaaaaaatgcccttggtccttgagacaaaagatttaatatacaaccatgtggcctcaggctgaccagatcaaagtggtttctaatccattctacatgtcaagtttaaatgaaccagactgcctgtgactttatgaatctgaaggtattacctgttgctgctttcttaaccaccatgagtaggtaaagcaaataataactcacagagtgtggatttttgagaatctgaatgttttctcattcacaaaagtatcccttctacccctatctggcgcagggctgaaatgtcatcattagaggttctgtcttctggggcttacaagttctatgtttcttaaaattcgctgattaaaaattttaaaaagataggatcacacctgaaagcagtggtcccagctctgtgctgtgggacatcacaggtcctaaacagtgatagagaaagggctggggagtggcagctggaatctctgcttccgtctgaacatctggacacacatgtcagagaatctttgcattaaatggactgcccgatctatttggtgattaaatggctgtgcggtgaggggagaaccctgggcagtctggagactgaggtgccattctcggctagagacaccacccaaagaagagatgggctggctactaaagacaagtgtcagttgaataaatgtctttaaacct

SEQ ID NO: 12018 - DNA, 1673 bp, Homo sapiens
  source 1..1673: mol_type = unassigned DNA
gggagtgcaagagcaagtcaaaggagagagagaggagagaggaaaagccagagggagagagggggagaggggatctgttgcaggcaggggaaggcgtgacctgaatggagaatgccagccaattccagagacacacagggacctcagaacaaagataaggcatcacggacaccacaccgggcacgagctcacaggcaagtcaagctgggaggaccaaggccgggcagccgggagcacccaaggcaggaaaatgagggtgctgcctgctggcgaatgtgactctcctcctgttcacccacaaggctgatttttccgtgttcctcctctggaaagagcattgctttctctcttccagcactttgtggctgcttctctattatgctctgtgcttctccctgtcaaaggcttcagcccacaccgtggagctaaacaatatgtttggccagatccagtcgcctggttatccagactcctatcccagtgattcagaggtgacttggaatatcactgtcccagatgggtttcggatcaagctttacttcatgcacttcaacttggaatcctcctacctttgtgaatatgactatgtgaaggtagaaactgaggaccaggtgctggcaaccttctgtggcagggagaccacagacacagagcagactcccggccaggaggtggtcctctcccctggctccttcatgtccatcactttccggtcagatttctccaatgaggagcgtttcacaggctttgatgcccactacatggctgtggatgtggacgagtgcaaggagagggaggacgaggagctgtcctgtgaccactactgccacaactacattggcggctactactgctcctgccgcttcggctacatcctccacacagacaacaggacctgccgagtggagtgcagtgacaacctcttcactcaaaggactggggtgatcaccagccctgacttcccaaacccttaccccaagagctctgaatgcctgtataccatcgagctggaggagggtttcatggtcaacctgcagtttgaggacatatttgacattgaggaccatcctgaggtgccctgcccctatgactacatcaagatcaaagttggtccaaaagttttggggcctttctgtggagagaaagccccagaacccatcagcacccagagccacagtgtcctgatcctgttccatagtgacaactcgggagagaaccggggctggaggctctcatacagggctgcaggaaatgagtgcccagagctacagcctcctgtccatgggaaaatcgagccctcccaagccaagtatttcttcaaagaccaagtgctcgtcagctgtgacacaggctacaaagtgctgaaggataatgtggagatggacacattccagattgagtgtctgaaggatgggacgtggagtaacaagattcccacctgtaaaaaaaatgaaatcgatctggagagcgaactcaagtcagagcaagtgacagagtgaatgacgggaccccacacaatgcagacatccagaaatggatcactcccaagacccctggggcccagagctgcaccacccctccccacccacaacacccccgtgcccctttccatgtggattagaatgggtgctgaacaacatgatctcagcagttgaagctgctacgtgtgtgaa

SEQ ID NO: 12019 - DNA, 410 bp, Homo sapiens
  source 1..410: mol_type = unassigned DNA
aaccggggctggaggctctcatacagggctgcaggaaatgagtgcccagagctacagcctcctgtccatgggaaaatcgagccctcccaagccaagtatttcttcaaagaccaagtgctcgtcagctgtgacacaggctacaaagtgctgaaggtgcagagccttgcctgggaaaggggagtgaccaggccacagaaactctcgaaacctgcccctccccagggcagatgggctgccagaacttgtcatagttccagcacagaatttcctagctgcccatcaacttctcaaatgctccagaaattccaaagcatgcgtcccaggcggtctcacactctgaaagtggcacaaaagtttgttttttttttttttttaatcagagcatgagctggtttgaatttttaaaatat

SEQ ID NO: 12020 - DNA, 770 bp, Homo sapiens
  source 1..770: mol_type = unassigned DNA
agcccacaccgtggagctaaacaatatgtttggccagatccagtcgcctggttatccagactcctatcccagtgattcagaggtgacttggaatatcactgtcccagatgggtttcggatcaagctttacttcatgcacttcaacttggaatcctcctacctttgtgaatatgactatgtgaaggtagaaactgaggaccaggtgctggcaaccttctgtggcagggagaccacagacacagagcagactcccggccaggaggtggtcctctcccctggctccttcatgtccatcactttccggtcagatttctccaatgaggagcgtttcacaggctttgatgcccactacatggctgtggatgtggacgagtgcaaggagagggaggacgaggagctgtcctgtgaccactactgccacaactacattggcggctactactgctcctgccgcttcggctacatcctccacacagacaacaggacctgccgagtggagtgcagtgacaacctcttcactcaaaggactggggtgatcaccagccctgacttcccaaacccttaccccaagagctctgaatgcctgtataccatcgagctggaggagggtttcatggtcaacctgcagtttgaggacatatttgacattgaggaccatcctgaggtgccctgcccctatgactacatcaaggtgagcctgcaatgaacacttgtcctggagatgctggaaaatcttggctgagttgggaaaattgatattgcggaacctt

SEQ ID NO: 12021 - DNA, 563 bp, Homo sapiens
  source 1..563: mol_type = unassigned DNA
tgaaagcatttgtcacactgtgtaatacctgcctgtgtctgtgttcctcaatctcaacactgctattgtgtgcacagcactgtgtctatctctcatcacctccatctcatgctttgctcggcagtaggcacacactggatactcaatgaatgacttatattgtgtatacagtttccattctttggaaatgtggtagaaactgaggaccaggtgctggcaaccttctgtggcagggagaccacagacacagagcagactcccggccaggaggtggtcctctcccctggctccttcatgtccatcactttccggtcagatttctccaatgaggagcgtttcacaggctttgatgcccactacatggctgtggatgtggacgagtgcaaggagagggaggacgaggagctgtcctgtgaccactactgccacaactacattggcggctactactgctcctgccgcttcggctacatcctccacacagacaacaggacctgccgagtggagtgcagtgacaacctcttcactcaaaggactggggtgatcaccagccctgacttccc

SEQ ID NO: 12022 - DNA, 962 bp, Homo sapiens
  source 1..962: mol_type = unassigned DNA
ttttctctcaagggctgaagtcagccacacaggataaaggagggaagggaaggagcagatcttttcggtaggaagacagattttgttgtcaggttcctgggagtgcaagagcaagtcaaaggagagagagaggagagaggaaaagccagagggagagagggggagaggggatctgttgcaggcaggggaaggcgtgacctgaatggagaatgccagccaattccagagacacacagggacctcagaacaaagataaggcatcacggacaccacaccgggcacgagctcacaggcaagtcaagctgggaggaccaaggccgggcagccgggagcacccaaggcaggaaaatgagacctacattcatgtctttcaggtggctgcttctctattatgctctgtgcttctccctgtcaaaggcttcagcccacaccgtggagctaaacaatatgtttggccagatccagtcgcctggttatccagactcctatcccagtgattcagaggtgacttggaatatcactgtcccagatgggtttcggatcaagctttacttcatgcacttcaacttggaatcctcctacctttgtgaatatgactatgtgaaggtagaaactgaggaccaggtgctggcaaccttctgtggcagggagaccacagacacagagcagactcccggccaggaggtggtcctctcccctggctccttcatgtccatcactttccggtcagatttctccaatgaggagcgtttcacaggctttgatgcccactacatggctgtggatgtggacgagtgcaaggagagggaggacgaggagctgtcctgtgaccactactgccacaactacattggcggctactactgctcctgccgcttcggctacatcctccacacagacaacaggacctgccgagtggagtgcagtgacaacctcttcactcaaaggactggggtgatcac

SEQ ID NO: 12023 - DNA, 510 bp, Homo sapiens
  source 1..510: mol_type = unassigned DNA
aaacatttctcatgaatttcaattgtagtctccggtggaattctcccactccagagacaccaggacccaaacaccaattctagcttattcagaagaattagaaaatgaaaatgagcttgcttcaggaaagtgtaatgaaagctcattttatgccaaaagtgcaaacagcacaggcttcagggtgatggaaaacaaaaggaagctcgcagtgctgaggaagagcatgtgggtagaaactgaggaccaggtgctggcaaccttctgtggcagggagaccacagacacagagcagactcccggccaggaggtggtcctctcccctggctccttcatgtccatcactttccggtcagatttctccaatgaggagcgtttcacaggctttgatgcccactacatggctgtggatgtggacgagtgcaaggagagggaggacgaggagctgtcctgtgaccactactgccacaactacattggcggctactactgctcctgccgcttcggctacat

SEQ ID NO: 12024 - DNA, 542 bp, Homo sapiens
  source 1..542: mol_type = unassigned DNA
agccacacaggataaaggagggaagggaaggagcagatcttttcggtaggaagacagattttgttgtcaggttcctgggagtgcaagagcaagtcaaaggagagagagaggagagaggaaaagccagagggagagagggggagaggggatctgttgcaggcaggggaaggcgtgacctgaatggagaatgccagccaattccagagacacacagggacctcagaacaaagataaggcatcacggacaccacaccgggcacgagctcacaggtggctgcttctctattatgctctgtgcttctccctgtcaaaggcttcagcccacaccgtggagctaaacaatatgtttggccagatccagtcgcctggttatccagactcctatcccagtgattcagaggtgacttggaatatcactgtcccagatgggtttcggatcaagctttacttcatgcacttcaacttggaatcctcctacctttgtgaatatgactatgtgaaggtagaaactgaggaccaggtgctggcaaccttctgtggca

SEQ ID NO: 12025 - DNA, 553 bp, Homo sapiens
  source 1..553: mol_type = unassigned DNA
agctcacaggcaagtcaagctgggaggaccaaggccgggcagccgggagcacccaaggcaggaaaatgagggctctgagaagggagctgtgggtgggctgggtgccttccccaggactccaggagacataaaacttgaaacgggagacttcgtgcaaatcctgctccggacgctgctgaagctcagatttctcccactgcctgcacagggtgctgcctgctggcgaatgtgactctcctcctgttcacccacaaggctgatttttccgtgttcctcctctggaaagagcattgctttctctcttccagcactttgtggctgcttctctattatgctctgtgcttctccctgtcaaaggcttcagcccacaccgtggagctaaacaatatgtttggccagatccagtcgcctggttatccagactcctatcccagtgattcagaggtgacttggaatatcactgtcccagatgggtttcggatcaagctttacttcatgcacttcaacttggaatcctcctacctttgtgaatatgactatgtgaaggtagaaa

SEQ ID NO: 12026 - DNA, 3832 bp, Homo sapiens
  source 1..3832: mol_type = unassigned DNA
acaaccgtgccggctgctgcccgtgctgccagaactatgagggtcctctctggcactagcctcatgctctgcagcctgctgctgctgctccaggccctgtgcagccctggcctcgccccccagtccagaggccatctctgccggacgcggcccacagacctggtgtttgttgtcgacagctctcgcagcgttcggcctgttgaatttgagaaagtgaaggtattcctgtcccaggtcatcgagtcgctggacgtggggcccaatgccacccgggtgggcatggtcaactatgccagcaccgtgaagcaggagttctcgctgcgggctcatgtctccaaggccgcactgctgcaggctgtgcgccgtatccagccgctgtccacaggcaccatgaccggcctggccatccagttcgctatcaccaaagccttcggcgatgcagagggtggtcgttccaggtcccctgacatcagcaaggtggtcatcgtggtgacagacgggaggccccaggacagcgtgcaggacgtgtctgcgcgggcccgggccagcggcgtcgagctgttcgccatcggagtgggcagcgtggacaaggccacgctgcggcagatcgccagcgagccgcaggacgaacacgtcgattacgtggagagctacagcgtcatcgagaagctgtccaggaagttccaggaggccttctgcgtggtgtcagacctgtgcgccacaggggaccatgactgtgagcaggtgtgcatcagctcccccggttcctacacctgcgcctgccacgagggcttcactctgaacagcgacggcaagacctgcaatgtctgcagtggtggtggtggcagctcggccactgacctggtcttcctcattgacggatccaagagtgtgaggccagagaactttgagctggtgaagaagttcatcagtcagatcgtggatacgctggacgtgtcagacaagctggcccaggtggggctggtgcagtactcaagctctgtgcgccaggagttccccctgggtcgcttccacaccaagaaggacatcaaggcggctgtgcggaatatgtcctacatggagaagggcacaatgactggggctgctctcaagtacctcattgacaattccttcactgtgtccagtggggctaggcccggggcccagaaggtgggcattgtcttcactgatggccggagccaggactacattaatgatgctgccaagaaggccaaagacctcggctttaagatgtttgctgtgggtgtgggcaatgccgtggaggatgagctgagggaaatagcctcagagcctgtggcagagcactacttctacacggctgacttcaagaccatcaaccagataggcaagaagttgcagaagaagatctgtgtggaggaagacccgtgtgcctgcgagtccctggtgaaattccaagccaaagtggaggggctgctgcaggccctgaccaggaaactggaagctgtgagtaagcggctggccatcctggagaacacagttgtctaaggctgcctgtcaccactgtggcctctccaagcgtcctgcacgtgtccgccgtagctttaccattttagtgagggaagccagcccgggggtgggagggggtgtgtctgggtgtgcctattgagagcgtgtaatggcgtttgggagctcgtgtgtgtatgtgtgcgtgtgtgtatgtgtgcatgtgtgtgtgtgtgtgtgtgtgtgcacgtgcgcctgagggtgggcatgagtcttgccagaatgtgagtgtgagagtgataatgcaggggtgagtgtgagagggactgcgtttgcatttttataatcaaaagcttaatatattcccatcttttttagttaaccctttcttgactctgagtgctgtgaatttctttactgatttctctattctccggtgagaaacaattaaatgtgatttaacgtaagcagtgaatggggctagaggcagtgtggttatttggggaccagggaaaaggatggatgaagatgtggtgggaggggatggttggaaggatggtaacagtggtggtgacagtgatgacagtgaccacaccaaaaccagctggtgtttgtcctgccttttcagttacatattcatttagttgacctcatttcacttccagtaaccttacccagaaaagactcaaattatccccattacaaatgggaaagctgagagtctaaatgatgaaatgacttgctcagcagtgggtcgctgagagacaggacttgaatctaggactgaagaacatcaaaagaaaaaggcttcagagaaaaagggcaatgacaccagataggactcatttgttcattcattcattcgttcactcattcgttcaggtatcatgtacttacagggcaatggcggtggggggggatggtgctgtatgagacagacgtagttcctgccctaagagacatacagttgagcagggtgctcatgtcacccccaccagccagagggaccagccagaggaaaagagagtgggtttaggtcgtaccaggggtttgtgcctcctcttgatacctgggagcccacggggtgagtgtgtgtgtgagatgatgggaagggctccagcctgggcctgggctgccctaggtgcctctcccctcccgcccccaacatgccctgttggagttctgtttgtttcctgtgcacaggcggcatcacccccaacccaaagtccccaacgcagatggcagcagccccacctcagagactgcacaagagaaagactcctggccccatgttcccttcctccagccctatgtggggtctgcaggtcacaccctgagatctcggccacctcccccaggcccctgttggaccagtgctgctccggaatctccatctctgtcctctcagagggggagctttggtgattttctgaacctattcttgtttaatggagcatttttagtgttactactagattcacacttgagagcatgtctaaaaggcttttacaagaagctcagaccacaccgaaagatcttcctcggaggcagttcaaagaggcagaataacaacacgaacggtacccaagagctacatcagtacaacagcacaaatacacaagcgcgacttaactggggcacagccaccctcgcccccatgacctgactccacctcctacacagttcaccaaaccctttctctctgtccgtccctggggcaggagtttttctgctgtccaaggaggctccttgacacagccacctgagaagttatgactctgctcattcttcctttcttctgagattatccactcccctctcctccccacacaggtggggagggggagaggcagccatgttgatatggactgagaaggctcagcagtgtgtccccaaggaggaggagagggtcattagcggacgccatggcctgggagctggcgggcagaagcaacagatgtccctgatgagtggagtcagagatggggtggaagccctgcctgggaataggacctcgttcttccctgcccggtgggtggagtagtggcaggaccttgtcaccaggctctgatgaaggcagggaccagcttcttgggatctttcaatcccaaactcttgcccttcactcatcgcagttctccccacggctactccaggtcctcttgaaatccgtcctctccatggacttcccacatccctctctgctctaggtttgattaacagaaggttgtaaatgaaaaccagcatctcccgagggcagccatggtctactgacagatggcaagttactttgtaacctgtaattttgtttttttgaattttgtataaataaacaggactaaactaa

SEQ ID NO: 12027 - DNA, 941 bp, Homo sapiens
  source 1..941: mol_type = unassigned DNA
ccccctgggtcgcttccacaccaagaaggacatcaaggcggctgtgcggaatatgtcctacatggagaagggcacaatgactggggctgctctcaagtacctcattgacaattccttcactgtgtccagtggggctaggcccggggcccagaaggtgggcattgtcttcactgatggccggagccaggactacattaatgatgctgccaagaaggccaaagacctcggctttaagatgtttgctgtgggtgtgggcaatgccgtggaggatgagctgagggaaatagcctcagagcctgtggcagagcactacttctacacggctgacttcaagaccatcaaccagataggcaagaagttgcagaagaagatctgtgtggaggaagacccgtgtgcctgcgagtccctggtgaaattccaagccaaagtggaggggctgctgcaggccctgaccaggaaacatatcccttcccagagggggctggggctggggaggggcgcaggccagtgttgggggaggcgggggcatggcccaagtgtggtcagttgggcaggcttctcttggcctgcttactgctgatgggctgcattctggcagaataagctgaagccagcttgggtgcacaccctgtcaaaagcagagactcctagaaggtaaacaagaaaatgaggcagaagccaggatctagggactggacacacaccagagtcctggacatgctctgaagaacatggagcccatggatgccccatttctcaggctcatggtgacgtgcctgaccccagtacccactcagaggtggggctgggccccagacagttcccctggctcagccaggactaggtggggaacccagcaggtctaaatctgcaactgagcagggctgggcactcgtggctcacagtaactggctgtgttttttggaaagcaccattctgag

SEQ ID NO: 12028 - DNA, 943 bp, Homo sapiens
  source 1..943: mol_type = unassigned DNA
gggaaggcatggccctgaccttagagaccccaatttggcgatggggcatcacatccctccgggcatctcagagctgcctgcccgagggaggcgaagcagatggaaagccccccagccacgtctctcagtcagaggaaacgggtctcctcttcggccagccgggtcctcttcccccgggtgccgcctggctgtgcgacccggcagtcctcccgcctctccgggcctcagcctcctctcctggacagtcccgtgggcttccgggagcccggtgtcacaccgccccgcgtgtcgcaggtggtcatcgtggtgacagacgggaggccccaggacagcgtgcaggacgtgtctgcgcgggcccgggccagcggcgtcgagctgttcgccatcggagtgggcagcgtggacaaggccacgctgcggcagatcgccagcgagccgcaggacgaacacgtcgattacgtggagagctacagcgtcatcgagaagctgtccaggaagttccaggaggccttctgcgtggtgtcagacctgtgcgccacaggggaccatgactgtgagcaggtgtgcatcagctcccccggttcctacacctgcgcctgccacgagggcttcactctgaacagcgacggcaagacctgcaatgtctgcagtggtggtggtggcagctcggccactgacctggtcttcctcattgacggatccaagagtgtgaggccagagaactttgagctggtgaagaagttcatcagtcagatcgtggatacgctggacgtgtcagacaagctggcccaggtggggctggtgcagtactcaagctctgtgcgccaggagttccccctgggtcgcttccacaccaagaaggacatcaaggcggctgtgcggaatatgtcctacatggagaagggcacaatgactggggctgctctcaagtacctcattgaca

SEQ ID NO: 12029 - DNA, 2077 bp, Homo sapiens
  source 1..2077: mol_type = unassigned DNA
ccaagcgccatgagaggccttctttgctggcccgtgttgctgctccttcttcagccctgggaaacccagctccagttgacaggtcccaggtgtcacactgggcccctggatctggtgttcgtgattgacagctcccgcagcgtgcgccctttcgagttcgagaccatgcggcagttcctcatgggcctcctccgaggcctgaacgtgggtcccaacgccacgcgcgttggcgtgatccagtattcgagtcaagtgcagagcgtcttccctctccgcgcgttctctcgccgcgaggacatggagcgcgccatccgcgacctggtgcctctggcgcaaggcaccatgacgggactggcaatccagtacgccatgaacgtggccttcagtgtggccgagggcgcgcgaccgccagaggagcgcgtgccgcgtgtcgctgtcatcgtgacagacgggcggccccaggaccgcgtggccgaggtggcggcacaggcgcgcgcccgcggcattgaaatttacgcggtgggggtgcagcgcgcggacgtgggctccctgcgcgccatggcatcgcccccgctagacgagcacgtcttcctcgtagagtccttcgacctcatccaggagttcggcctgcagttccagagccggctgtgtgccattgatctgtgtgctgaagggacccatggatgtgagcaccactgcgtcaattccccaggctcctatttctgtcactgccaagttggctttgtactccagcaggaccagaggagctgcagggccattgactactgcagctttgggaaccatagctgtcagcatgagtgtgttagcacccctggtgggccacggtgccactgcagagagggccatgacttgcagcctgatgggaggagctgtcaggtccgggacctttgcaatggcgtggaccatggctgtgagttccagtgtgtgagcgagggcctctcctaccgctgcctgtgccccgaggggcggcaacttcaggcagatggcaagagctgcaaccggtgccgggaaggccacgtggaccttgttctgctggttgatggctccaagagcgtgcgtccacaaaacttcgagctagtgaagcgcttcgtgaaccagattgtggacttcctagatgtgtcccccgagggcacgcgggtggggctggtgcagttctcgagccgcgtgcgcaccgagttccctctgggtcgctacggcaccgcagccgaggtgaagcaggcggtcctggccgtggagtacatggaacgcggcaccatgacagggctggcgttgcggcacatggtggagcacagcttctccgaggcgcagggtgcacggccccgtgcccttaacgtgcctcgtgttggcctggtcttcacggatggccgctcccaggatgacatctcggtgtgggcagcgcgcgccaaggaggaaggcatcgtcatgtacgccgtgggcgtgggcaaggcggtggaggcggagctgcgcgagatcgcctcggagccagcggaactgcacgtgtcctatgccccggacttcggcaccatgacgcacctgctggagaacctcagaggcagcatctgtccagaggagggcatcagcgcagggacagagcttcggagcccatgcgaatgcgaaagcctcgtggagttccagggccgcacgctgggggcgctcgagagcctgacgctgaacctggcccagctgacggcgcgcctggaggatctggagaaccagctggccaaccagaagtgagggccacggacggcccagacccgggctggggcgcggcaccacggacggtgccccttgcgcgccatcggtgcgccggggccaggcagaacctgggcccgtccggcttgggctgtcggggcggaggcgctggcgggcttccggcattgagctgagttggcctcgcccggaccattaggcggactgcggcgtcagggggatagcgggtggtgagggaaggggcacgtgctagaccggcacgccctcgccgcgtgctgcgctcagttctttgttggatttcttgtttgtgttcttaaaaaaataaaaaaaactgatttccacgggg

SEQ ID NO: 12030 - DNA, 2200 bp, Homo sapiens
  source 1..2200: mol_type = unassigned DNA
ccaagcgccatgagaggccttctttgctggcccgtgttgctgctccttcttcagccctgggaaacccagctccagttgacaggtcccaggtgtcacactgggcccctggatctggtgttcgtgattgacagctcccgcagcgtgcgccctttcgagttcgagaccatgcggcagttcctcatgggcctcctccgaggcctgaacgtgggtcccaacgccacgcgcgttggcgtgatccagtattcgagtcaagtgcagagcgtcttccctctccgcgcgttctctcgccgcgaggacatggagcgcgccatccgcgacctggtgcctctggcgcaaggcaccatgacgggactggcaatccagtacgccatgaacgtggccttcagtgtggccgagggcgcgcgaccgccagaggagcgcgtgccgcgtgtcgctgtcatcgtgacagacgggcggccccaggaccgcgtggccgaggtggcggcacaggcgcgcgcccgcggcattgaaatttacgcggtgggggtgcagcgcgcggacgtgggctccctgcgcgccatggcatcgcccccgctagacgagcacgtcttcctcgtagagtccttcgacctcatccaggagttcggcctgcagttccagagccggctgtgtgggaaggaccagtgtgctgaggggggacatggttgccagcaccaatgtgtcaatgcctgggccatgttccactgcacctgcaacccaggctacaagctagcagcagataacaagagctgtttggccattgatctgtgtgctgaagggacccatggatgtgagcaccactgcgtcaattccccaggctcctatttctgtcactgccaagttggctttgtactccagcaggaccagaggagctgcagggccattgactactgcagctttgggaaccatagctgtcagcatgagtgtgttagcacccctggtgggccacggtgccactgcagagagggccatgacttgcagcctgatgggaggagctgtcaggtccgggacctttgcaatggcgtggaccatggctgtgagttccagtgtgtgagcgagggcctctcctaccgctgcctgtgccccgaggggcggcaacttcaggcagatggcaagagctgcaaccggtgccgggaaggccacgtggaccttgttctgctggttgatggctccaagagcgtgcgtccacaaaacttcgagctagtgaagcgcttcgtgaaccagattgtggacttcctagatgtgtcccccgagggcacgcgggtggggctggtgcagttctcgagccgcgtgcgcaccgagttccctctgggtcgctacggcaccgcagccgaggtgaagcaggcggtcctggccgtggagtacatggaacgcggcaccatgacagggctggcgttgcggcacatggtggagcacagcttctccgaggcgcagggtgcacggccccgtgcccttaacgtgcctcgtgttggcctggtcttcacggatggccgctcccaggatgacatctcggtgtgggcagcgcgcgccaaggaggaaggcatcgtcatgtacgccgtgggcgtgggcaaggcggtggaggcggagctgcgcgagatcgcctcggagccagcggaactgcacgtgtcctatgccccggacttcggcaccatgacgcacctgctggagaacctcagaggcagcatctgtccagaggagggcatcagcgcagggacagagcttcggagcccatgcgaatgcgaaagcctcgtggagttccagggccgcacgctgggggcgctcgagagcctgacgctgaacctggcccagctgacggcgcgcctggaggatctggagaaccagctggccaaccagaagtgagggccacggacggcccagacccgggctggggcgcggcaccacggacggtgccccttgcgcgccatcggtgcgccggggccaggcagaacctgggcccgtccggcttgggctgtcggggcggaggcgctggcgggcttccggcattgagctgagttggcctcgcccggaccattaggcggactgcggcgtcagggggatagcgggtggtgagggaaggggcacgtgctagaccggcacgccctcgccgcgtgctgcgctcagttctttgttggatttcttgtttgtgttcttaaaaaaataaaaaaaactgatttccacgggg

SEQ ID NO: 12031 - DNA, 2127 bp, Homo sapiens
  source 1..2127: mol_type = unassigned DNA
aaatgcggccgttgcctctgtgtgctccagctgcctggcagtccccacctagggcacgctgccacgccgccgttacctggtccaagtgcccgggaggctccgcctgtcggcttcgctctgcagctgcatctctgatctgtcctgcaggctcaggctctgacacctccattctctgtccccaagcgccatgagaggccttctttgctggcccgtgttgctgctccttcttcagccctgggaaacccagctccagttgacaggtcccaggtgtcacactgggcccctggatctggtgttcgtgattgacagctcccgcagcgtgcgccctttcgagttcgagaccatgcggcagttcctcatgggcctcctccgaggcctgaacgtgggtcccaacgccacgcgcgttggcgtgatccagtattcgagtcaagtgcagagcgtcttccctctccgcgcgttctctcgccgcgaggacatggagcgcgccatccgcgacctggtgcctctggcgcaaggcaccatgacgggactggcaatccagtacgccatgaacgtggccttcagtgtggccgagggcgcgcgaccgccagaggagcgcgtgccgcgtgtcgctgtcatcgtgacagacgggcggccccaggaccgcgtggccgaggtggcggcacaggcgcgcgcccgcggcattgaaatttacgcggtgggggtgcagcgcgcggacgtgggctccctgcgcgccatggcatcgcccccgctagacgagcacgtcttcctcgtagagtccttcgacctcatccaggagttcggcctgcagttccagagccggctgtgtgccattgactactgcagctttgggaaccatagctgtcagcatgagtgtgttagcacccctggtgggccacggtgccactgcagagagggccatgacttgcagcctgatgggaggagctgtcaggtccgggacctttgcaatggcgtggaccatggctgtgagttccagtgtgtgagcgagggcctctcctaccgctgcctgtgccccgaggggcggcaacttcaggcagatggcaagagctgcaaccggtgccgggaaggccacgtggaccttgttctgctggttgatggctccaagagcgtgcgtccacaaaacttcgagctagtgaagcgcttcgtgaaccagattgtggacttcctagatgtgtcccccgagggcacgcgggtggggctggtgcagttctcgagccgcgtgcgcaccgagttccctctgggtcgctacggcaccgcagccgaggtgaagcaggcggtcctggccgtggagtacatggaacgcggcaccatgacagggctggcgttgcggcacatggtggagcacagcttctccgaggcgcagggtgcacggccccgtgcccttaacgtgcctcgtgttggcctggtcttcacggatggccgctcccaggatgacatctcggtgtgggcagcgcgcgccaaggaggaaggcatcgtcatgtacgccgtgggcgtgggcaaggcggtggaggcggagctgcgcgagatcgcctcggagccagcggaactgcacgtgtcctatgccccggacttcggcaccatgacgcacctgctggagaacctcagaggcagcatctgtccagaggagggcatcagcgcagggacagagcttcggagcccatgcgaatgcgaaagcctcgtggagttccagggccgcacgctgggggcgctcgagagcctgacgctgaacctggcccagctgacggcgcgcctggaggatctggagaaccagctggccaaccagaagtgagggccacggacggcccagacccgggctggggcgcggcaccacggacggtgccccttgcgcgccatcggtgcgccggggccaggcagaacctgggcccgtccggcttgggctgtcggggcggaggcgctggcgggcttccggcattgagctgagttggcctcgcccggaccattaggcggactgcggcgtcagggggatagcgggtggtgagggaaggggcacgtgctagaccggcacgccctcgccgcgtgctgcgctcagttctttgttggatttcttgtttgtgttcttaaaaaaataaaaaaaactgatttcca

SEQ ID NO: 12032 - DNA, 1657 bp, Homo sapiens
  source 1..1657: mol_type = unassigned DNA
ctgcctggcagtccccacctagggcacgctgccacgccgccgttacctggtccaagtgcccgggaggctccgcctgtcggcttcgctctgcagctgcatctctgatctgtcctgcaggctcaggctctgacacctccattctctgtccccaagcgccatgagaggccttctttgctggcccgtgttgctgctccttcttcagccctgggaaacccagctccagttgacaggtcccaggtgtcacactgggcccctggatctggtgttcgtgattgacagctcccgcagcgtgcgccctttcgagttcgagaccatgcggcagttcctcatgggcctcctccgaggcctgaacgtgggtcccaacgccacgcgcgttggcgtgatccagtattcgagtcaagtgcagagcgtcttccctctccgcgcgttctctcgccgcgaggacatggagcgcgccatccgcgacctggtgcctctggcgcaaggcaccatgacgggactggcaatccagtacgccatgaacgtggccttcagtgtggccgagggcgcgcgaccgccagaggagcgcgtgccgcgtgtcgctgtcatcgtgacagacgggcggccccaggaccgcgtggccgaggtggcggcacaggcgcgcgcccgcggcattgaaatttacgcggtgggggtgcagcgcgcggacgtgggctccctgcgcgccatggcatcgcccccgctagacgagcacgtcttcctcgtagagtccttcgacctcatccaggagttcggcctgcagttccagagccggctgtgtgtccgggacctttgcaatggcgtggaccatggctgtgagttccagtgtgtgagcgagggcctctcctaccgctgcctgtgccccgaggggcggcaacttcaggcagatggcaagagctgcaaccggtgccgggaaggccacgtggaccttgttctgctggttgatggctccaagagcgtgcgtccacaaaacttcgagctagtgaagcgcttcgtgaaccagattgtggacttcctagatgtgtcccccgagggcacgcgggtggggctggtgcagttctcgagccgcgtgcgcaccgagttccctctgggtcgctacggcaccgcagccgaggtgaagcaggcggtcctggccgtggagtacatggaacgcggcaccatgacagggctggcgttgcggcacatggtggagcacagcttctccgaggcgcagggtgcacggccccgtgcccttaacgtgcctcgtgttggcctggtcttcacggatggccgctcccaggatgacatctcggtgtgggcagcgcgcgccaaggaggaaggcatcgtcatgtacgccgtgggcgtgggcaaggcggtggaggcggagctgcgcgagatcgcctcggagccagcggaactgcacgtgtcctatgccccggacttcggcaccatgacgcacctgctggagaacctcagaggcagcatctgtccagaggagggcatcagcgcagggacagagcttcggagcccatgcgaatgcgaaagcctcgtggagttccagggccgcacgctgggggcgctcgagagcctgacgctgaacctggcccagctgacggcgcgcctggaggatctggagaaccagctggccaaccagaagtga

SEQ ID NO: 12033 - DNA, 1991 bp, Homo sapiens
  source 1..1991: mol_type = unassigned DNA
agtgtggctgccccggtctccccagtctcccgctgtagctgaattccagcctggcccgcagctagccctgtctgcagctccaagcgtgctgcctggcagtccccacctagggcacgctgccacgccgccgttacctggtccaagtgcccgggaggctccgcctgtcggcttcgctctgcagctgcatctctgatctgtcctgcaggctcaggctctgacacctccattctctgtccccaagcgccatgagaggccttctttgctggcccgtgttgctgctccttcttcagccctgggaaacccagctccagttgacaggtcccaggtgtcacactgggcccctggatctggtgttcgtgattgacagctcccgcagcgtgcgccctttcgagttcgagaccatgcggcagttcctcatgggcctcctccgaggcctgaacgtgggtcccaacgccacgcgcgttggcgtgatccagtattcgagtcaagtgcagagcgtcttccctctccgcgcgttctctcgccgcgaggacatggagcgcgccatccgcgacctggtgcctctggcgcaaggcaccatgacgggactggcaatccagtacgccatgaacgtggccttcagtgtggccgagggcgcgcgaccgccagaggagcgcgtgccgcgtgtcgctgtcatcgtgacagacgggcggccccaggaccgcgtggccgaggtggcggcacaggcgcgcgcccgcggcattgaaatttacgcggtgggggtgcagcgcgcggacgtgggctccctgcgcgccatggcatcgcccccgctagacgagcacgtcttcctcgtagagtccttcgacctcatccaggagttcggcctgcagttccagagccggctgtgtgccattgatctgtgtgctgaagggacccatggatgtgagcaccactgcgtcaattccccaggctcctatttctgtcactgccaagttggctttgtactccagcaggaccagaggagctgcagggccattgactactgcagctttgggaaccatagctgtcagcatgagtgtgttagcacccctggtgggccacggtgccactgcagagagggccatgacttgcagcctgatgggaggagctgtcaggtccgggacctttgcaatggcgtggaccatggctgtgagttccagtgtgtgagcgagggcctctcctaccgctgcctgtgccccgaggggcggcaacttcaggcagatggcaagagctgcaaccggtgccgggaaggccacgtggaccttgttctgctggttgatggctccaagagcgtgcgtccacaaaacttcgagctagtgaagcgcttcgtgaaccagattgtggacttcctagatgtgtcccccgagggcacgcgggtggggctggtgcagttctcgagccgcgtgcgcaccgagttccctctgggtcgctacggcaccgcagccgaggtgaagcaggcggtcctggccgtggagtacatggaacgcggcaccatgacagggctggcgttgcggcacatggtggagcacagcttctccgaggcgcagggtgcacggccccgtgcccttaacgtgcctcgtgttggcctggtcttcacggatggccgctcccaggatgacatctcggtgtgggcagcgcgcgccaaggaggaaggcatcgtcatgtacgccgtgggcgtgggcaaggcggtggaggcggagctgcgcgagatcgcctcggagccagcggaactgcacgtgtcctatgccccggacttcggcaccatgacgcacctgctggagaacctcagaggcagcatctgtccagaggagggcatcagcgcagggacagagcttcggagcccatgcgaatgcgaaagcctcgtggagttccagggccgcacgctgggggcgctcgagagcctgacgctgaacctggcccagctgacggcgcgcctggaggatctggagaaccagctggccaaccagaagtga

SEQ ID NO: 12034 - DNA, 1794 bp, Homo sapiens
  source 1..1794: mol_type = unassigned DNA
gagagtttgcgccggttcgcattccccggcctcccgttcgctcccccgcgaaccaggcggccgtgcgcctctcggggcaaccacccaagagcacccgggcgggaggacgccgagcagggggtgttgcgggctgggacaggggcagccacctcccgaagatgcaggatggcagcagagccgcagccgtccagcctttcctaccgcaccacgggctccacctacctgcacccgctcagcgagctcctgggcatcccgctggaccaggtgaattttgtggtatgccagcttgttgctctgtttgctgctttctggtttcgcatctacttacgtcctggtacaaccagctctgatgtccggcatgcggttgccaccatttttggcatctattttgtcatcttttgtttcggctggtactctgtgcatctttttgtgctggtgttaatgtgctatgcaatcatggtcactgctagtgtatccaatattcacagatattccttttttgtagcaatgggatatcttacaatatgccacatcagccgaatatacatcttccactatggaattctcactacggatttttctgggcctctgatgattgtcactcagaagatcacaaccttggcattccaggttcatgatggattaggtcgaagagctgaagacctttctgctgaacaacatcgacttgctatcaaagtgaaaccctcttttttggaatacttaagttaccttctcaatttcatgagtgtcatagctggtccttgtaacaatttcaaggactacatagccttcattgaggggaagcatatacacatgaagttgctggaggtgaactggaagcgaaaaggtttccacagcttgccagaaccttctcccacaggagctgtgatacacaagttgggcatcaccttggtgtctctccttttgtttttgacgctaacgaagacctttcctgtcacctgccttgtggatgactggtttgtccataaagcaagctttccggctcgactctgctacttatatgttgtcatgcaagcctcaaagcccaagtattactttgcatggacattagctgatgcagtgaataacgcagctggctttgggttcagcggagtggataagaatgggaatttctgttgggatctgctttcgaacctaaacatctggaaaattgagactgccacaagtttcaaaatgtacttggaaaactggaatattcagacagctacttggctaaagtgtgtgtgctatcagcgggttccatggtaccccacggtgctaaccttcatcctgtctgctttgtggcatggtgtctaccctggatactattttaccttcttaactggaattcttgtcacattagcagctagagcggtcaggaacaactacagacattacttcctttcttcaagagctctcaaggctgtgtatgatgcaggcacctgggccgtcactcagctggctgtctcttacacggtagcaccctttgtgatgttggcagttgaaccgaccatcagcttatacaagtccatgtacttttatttgcacatcataagtctcctgataatactatttctgccaatgaaaccacaagctcatacgcaaaggcggcctcagactctgaactctattaataagagaaaaacagattgatacctccaagagaagcggaacaagcaaaactgcagaacgttcgaaagatgagatgacaaggcttcaagggctcctccggtggcttagaggcgatgtttacatgcatctttattttgttcttttttaaagtgcagggagtat

SEQ ID NO: 12035 - DNA, 7751 bp, Homo sapiens
  source 1..7751: mol_type = unassigned DNA
cgggcgcgggaggaggtggcggcggagggggaggtgcgagccgggcaccgcccccggcccctccccggccttccccgcgcagagctccgaccgcgggcggcccaggggcgggcgcgccgctgcatccccatcctcgtcgtcgcccggcacagcgcgagcgggcgagcggcgcgggcggccggagcgccgaggcccggccatggccaccaccagcaccacgggctccaccctgctgcagcccctcagcaacgccgtgcagctgcccatcgaccaggtcaactttgtagtgtgccaactctttgccttgctagcagccatttggtttcgaacttatctacattcaagcaaaactagctcttttataagacatgtagttgctacccttttgggcctttatcttgcacttttttgctttggatggtatgccttacactttcttgtacaaagtggaatttcctactgtatcatgatcatcataggagtggagaacatgcacaattactgctttgtgtttgctctgggatacctcacagtgtgccaagttactcgagtctatatctttgactatggacaatattctgctgatttttcaggcccaatgatgatcattactcagaagatcactagtttggcttgcgaaattcatgatgggatgtttcggaaggatgaagaactgacttcctcacagagggatttagctgtaaggcgcatgccaagcttactggagtatttgagttacaactgtaacttcatggggatcctggcaggcccactttgctcttacaaagactacattactttcattgaaggcagatcataccatatcacacaatctggtgaaaatggaaaagaagagacacagtatgaaagaacagagccatctccaaatactgcggttgttcagaagctcttagtttgtgggctgtccttgttatttcacttgaccatctgtacaacattacctgtggagtacaacattgatgagcattttcaagctacagcttcgtggccaacaaagattatctatctgtatatctctcttttggctgccagacccaaatactattttgcatggacgctagctgatgccattaataatgctgcaggctttggtttcagagggtatgacgaaaatggagcagctcgctgggacttaatttccaatttgagaattcaacaaatagagatgtcaacaagtttcaagatgtttcttgataattggaatattcagacagctctttggctcaaaagggtgtgttatgaacgaacctccttcagtccaactatccagacgttcattctctctgccatttggcacggggtatacccaggatattatctaacgtttctaacaggggtgttaatgacattagcagcaagagctatgagaaataactttagacattatttcattgaaccttcccaactgaaattattttatgatgttataacatggatagtaactcaagtagcaataagttacacagttgtgccatttgtgcttctttctataaaaccatcactcacgttttacagctcctggtattattgcctgcacattcttggtatcttagtattattgttgttgccagtgaaaaaaactcaaagaagaaagaatacacatgaaaacattcagctctcacaatccaaaaagtttgatgaaggagaaaattctttgggacagaacagtttttctacaacaaacaatgtttgcaatcagaatcaagaaatagcctcgagacattcatcactaaagcagtgatcgggaaggctctgagggctgttttttttttttgatgttaacagaaaccaatcttagcaccttttcaaggggtttgagtttgttggaaaagcagttaactggggggaaatggacagttatagataaggaatttcctgtacaccagattggaaatggagtgaaacaagccctcccatgccatgtctccgtgggccacgccttatgtaagaatatttccatatttcagtgggcactcccaacctcagcacttgtccgtagggtcacacgcgtgccctgttgctgaatgtatgttgcgtatcccaaggcactgaagaggtggaaaaataatcgtgtcaatctggatgatagagagaaattaacttttccaaatgaatgtcttgccttaaaccctctatttcctaaaatattgttcctaaatggtattttcaagtgtaatattgtgagaacgctactgcagtagttgatgttgtgtgctgtaaaggattttaggaggaatttgaaacaggatatttaagagtgtggatatttttaaaatgcaataaacatctcagtatttgaagggttttcttaaagtatgtcaaatgactacaatccatagtgaaactgtaaacagtaatggacgccaaattataggtagctgattttgctggagagtttaattaccttgtgcagtcaaagagcgcttccagaaggaatctcttaaaacataatgagaggtttggtaatgtgatattttaagcttattctttttcttaaaagagagaggtgacgaaggaaggcaggaatgaagaagcactgcgtggcctccggtggaatgcacggggcacagccgcgactctgcaggcagcttcccccccatgccagggctctgcgccgtcatgtgagacttaaaaaaaaagttgaatgacttcgtgatactttggacttctaaattaaatttatcaggcataaattatgtagaattagaggctttgaaaataatactggtaggttgctcaaaggttttgaaagagaaatcgctaggtaggttactatctggctaatccatttcttatccttgacaatttaattcatatttgggaaacttttagggaaatgaaaaataaaagtcactgagtctgggtgacattttttaagaataatataaattcagtttcaaactcttctcacattaaaattttgctgtgaactcttactaaaatgagttttaggttctgtaagtggaaaaatgtgcttttattttatgggccatttttaccacaactaatcttgccttggattactaagcatctcctgcgatcccacagaggactgtggtggccacaggagctgaaagcagaagagtgggatttgatgccaggcagtggagtggcctcagccccagattgtacctcctgccctgtaggaggggagggggcaaagccttctgacttcacctttgtttgacctatgtatggaacttacttttactttttgccttaaatttttaatgaaatgcaaattttctgtgatggggttctctctctctttttttcggggggtggagtcactaataaatttgcaaatgaagttaaagacaaggcaaccatctggcttatgctatataatacttcatttaaagaagaaaggaaaagcaaatgcacttgcagcttttgaggtctcagcaaaaatgggcatgtgtcttttttgaagtttagaaatatcctaatctatttttatttatctaaaagtaagtgttttccggctgataaggctaaccctacccaggaaaggattgataactaaataaatttcctctgttttcccatgcattgaaattatgttggctgagcatggtggctcacacctgtaatcctagcactttgggaggccgaggtgggcggatcacttgaggtcaggagttggagaccagcctggccaacgtggtgaatccccgtctctactgaaaacacaaaaattagacgggcatggtggcgcacacctgtaatcccagctacttgggaggctgaggcaggagaattgcttgaacctgggaggtggaggttgcagtgagctaaaattgtgccactgcactccagcctgggtgacagaggaagactccgtctcacaaaaaaaaaaaaagaaaaaagaaattatgccagctgtttaatgtgagagaatagaaagaatgttcatggaatgtacctgccctgtaaaatgtttgatcattttcattaatgttgcagagaatccgactgctattaagagaaagtgaacaaattaagaatttaaaagacaggttcaggcatgtcataagtgaaaacaagaaggcttaatacaaacttgttgggttttgttcgtgtgtgtgtgtgtgtgtgtgtgtgtgtttttttttggttcagcctatctagccacctacaaataatcacatttctgttacctgaatttatttctcagcctgtaaaccttagtcactgttacctgtttcttgctcagtgaatatgatcttggcactgtcatctagaaagcaagatatttgattggttttctggttccttcgaagataataattccatatccagtttgactgattttcatacccctgaatcaactagttattttcatgaaatggtttttggatatctctcctctagtttggagaagtaataatcacaaagattaatattttgcttctagtacttacagtagaagaattttaaactggtacgtctactcctgttaaatagaaaggggattcgttgtattatgtgcttgcttttttttaatcaatagaataagattcaatgcatatttatgttttatattttccactattcaggtatcatgaaatcactctagagatgatcaatcaacatcatatttatacttttggttaattatatactactcagggaaaaaatgaacaaaaataactactcatccttcaatttcattttcttgaaacagtaagagtataatttggtatgcctcagctgtcaccattttataagtggctcattctgttcttaaagtaagtatttttattggaactcagggtaattgggggaatttatttagcttctaaaatatccggcaggatagagaagatttatttggcttcaaaaatgtctggtgaccacttctcttattagccactactgcccatttgcttcaaaaatatatttattggtctccaccatgtgtgacacacacaggatttccaaacataccacttttgagaaaaatgtgcagtaaaaaggaggtttctagaaagtgacagtaactcacatttaagcactagctgacctaggaggagacctggatcttcattctggttctgcctttcatgagacttaagacttggaggagccacctgtcctgtagaccccaagttcctcagccataagcaaacgggttaatcctaagagttcaggaccagttgggtgtcgtgaacggagccattagcaaggtctgtaggattcaaggacttgggcacattcacagtccacactattgtcatggtcattgacttactacttgagctcaaagccctgacatttcaaaaggttgtcatgataacagtgaaacctctgaatcccttaaatcagaaggcatggcaacatactttttctactggcaatagctcttacaatgagtgtttcataatgaaatagtctctgctgaagaaaacatgttttccttttgctctctctgctttgttggtttctgtgctgtgtggaattggagaagatatatgctctgaaatattttatacagattactgactactggacagggtttaccactatataacatctcaaagttattcaaggatatttaaagcatatttagtttagttacaccttattttaaaccgcagaaaacaatagctttaaaatttttgccattaaaataattataaatttatacttttactcaaggactagatcacagttttaggacaaaaatctctcctatttaaagttcataccttgtaagtatttagtttgtatattcatgaacaaatctggacatttatactttttttgtttccttatcaactgttcacaattattagttaattggtcttaacagttctacattataattgaaagaaaaattacttgagaaaataattgtttcagaatagtgcctactatatctgtgtcagctaaaaatttgtccagagttttagatataagctagtattttgtggagttttatccaggcgttaatagttcttcctggctgaaatttaatataggtgcagaatcctaaataacactgtgagatgtaatcttaactgccctcaataccttataaaactgctgcatttaacccagtgtgcatttaatgagtggctggtcgttgatacactcatcttagatgctgaaatttctgttttctccagcccttgtaaaagtgggtttcttgatgaacgcgtgctcccaatgctgaagcaaaagatttgcatttaaggagagaaatacaccctgaaatttgagtttgaaagattagaacatagagggtctctacagtgtttttctgcaacaccaagtagtcaaatctatttatagaaactctgattacaacagaaattttaaaatgaaattttccacatcggtattttgtaggaaagctcttataatcaatgcttaagctgctttttgaggcttttcttgtacagaggttgcagccaattacattttaattggtaggctgctgaataatgtttttgtatgttttaaaataatatttattttaataggttttttaacattatgcaaatcccaataaagaactgacacgttccataggccattgactgggaaattttgtgaaacacagcctaaatacacagtttttacaccaactaatttgtcttgcctttaaaactgattataactcttctttaagtacaacttttataaagaaaaaatacaacactaagactgtatgttctgtaaattatagtgtgatgacccatgcagaaccgctgtctgaagcttactcagcgattcatagccatctccagccatgttttatcaaatcacacactaaaaataaatggaaatgctacagtgaaaaaccaaaagttacagagcaacataagtaaaatgactaggcagtttcttagtaacatgtttgaaatgggaaaggtgactgactgcctttcaccagagtcttagctgtttcacgttcactattttaggttaattttcttgggaaatcaatttgaatattcccccctgtccttttgcattaaaggacgaaaatatatgttgagagtttgacagactttttaaatatgcctctttcccaattttatgtatttttggttctgcgcacacagatttatcaatgaagtacatttgcctctggctttatcacaaggaaaaaggaatcaaacattgaacacaaatgtgttccaaaccagtcttgtccatcttgtcacttttatgtgactgctcctctgaaccagaaggggcacgatagaaggccataggaatgaaagtaaatcattcaggtgaagtgagaaattcttccatatacagagtgaaaatgtgtgatttcattcctgccttcctttaaacgttgtcttgatctctgcctagtagtagttgagccctcagtcgcccaaacatgaggagagacccaactccagcagccagaatttagtatttacatttgccttcccaagttgagaatagaatgtggtgttctgtgctttctgtttttattattccaaaatatttttttaaagaagtgttatttttcaacagattcataaattagttcctgatgtacggtaaattaaaactcccactgtgtcagtcaaactgagatgtgctcatttcataaccactcatttctagtctgtcagagctgcactggtggcttattgctggtttttaaaggtgtttttaacttacatgtaacatgtttaggacatgttttttttttctaatttgtgtgtctttacaactgattaaacagtagtttaaaaata

SEQ ID NO: 12036 - DNA, 1227 bp, Homo sapiens
  source 1..1227: mol_type = unassigned DNA
aaagactacattactttcattgaaggcagatcataccatatcacacaatctggtgaaaatggaaaagaagagacacagtatgaaagaacagagccatctccaaatactgcggttgttcagaagctcttagtttgtgggctgtccttgttatttcacttgaccatctgtacaacattacctgtggagtacaacattgatgagcattttcaagctacagcttcgtggccaacaaagattatctatctgtatatctctcttttggctgccagacccaaatactattttgcatggacgctagctgatgccattaataatgctgcaggctttggtttcagagggtatgacgaaaatggagcagctcgctgggacttaatttccaatttgagaattcaacaaatagagatgtcaacaagtttcaagatgtttcttgataattggaatattcagacagctctttggctcaaaagaattttctgaaggagagataaaaactgagttaaataaagatgatcagaatggatgagaaataactttagacattatttcattgaaccttcccaactgaaattattttatgatgttataacatggatagtaactcaagtagcaataagttacacagttgtgccatttgtgcttctttctataaaaccatcactcacgttttacagctcctggtattattgcctgcacattcttggtatcttagtattattgttgttgccagtgaaaaaaactcaaagaagaaagaatacacatgaaaacattcagctctcacaatccaaaaagtttgatgaaggagaaaattctttgggacagaacagtttttctacaacaaacaatgtttgcaatcagaatcaagaaatagcctcgagacattcatcactaaagcagtgatcgggaaggctctgagggctgttttttttttttgatgttaacagaaaccaatcttagcaccttttcaaggggtttgagtttgttggaaaagcagttaactggggggaaatggacagttatagataaggaatttcctgtacaccagattggaaatggagtgaaacaagccctcccatgccatgtctccgtgggccacgccttatgtaagaatatttccatatttcagtgggcactcccaacctcagcacttgtccgtagggtcacacgcgtgccctgttgctgaatgtatgttgcgtatcccaaggcactgaagaggtggaaaaataatcg

SEQ ID NO: 12037 - DNA, 416 bp, Homo sapiens
  source 1..416: mol_type = unassigned DNA
tcctttccactagaagcgaggtgtgtactgcgtgcatgtttgctgagcgctcaccacgggctaggctccatgcccagttcctgtgaggagaaaacacgtttctatgtgcccggcaggtaggaggcactcacaaaatgttactttgtctttacagaattttctgaaggagagataaaaactgagttaaataaagatgatcagaatggatgagaaataactttagacattatttcattgaaccttcccaactgaaattattttatgatgttataacatggatagtaactcaagtagcaataagttacacagttgtgccatttgtgcttctttctataaaaccatcactcacgttttacagctcctggtattattgcctgcacattcttggtatcttagtattattgttgttgccagtg

SEQ ID NO: 12038 - DNA, 576 bp, Homo sapiens
  source 1..576: mol_type = unassigned DNA
gatttaaggatctctaggcagtgttgtcttaaacttttcttttttttttggaaacttttattttaatacagaatctaatctacagaaaagttgcaaagaacttctatatgccctttacccagactcaccagtcatttatgttttccctgttacttcctcatctcccctctctctgtcttttatacacagtgtgtacaatgtgtattcgcttttttagaacgaactttatccatagtagcagtgtacattcccactagcaacttaggagagtttcagttactctactccacatccttccaacagttgatatcaccagtgtaactgcataagtaatgttaatttaaagatacagcaaatgtttttgtttctttatttcagatgagaaataactttagacattatttcattgaaccttcccaactgaaattattttatgatgttataacatggatagtaactcaagtagcaataagttacacagttgtgccatttgtgcttctttctataaaaccatcactcacgttttacagctcctggtattattgcctgcacattcttggtatcttagtattattg

SEQ ID NO: 12039 - DNA, 1351 bp, Homo sapiens
  source 1..1351: mol_type = unassigned DNA
gagcgggcgagcggcgcgggcggccggagcgccgaggcccggccatggccaccaccagcaccacgggctccaccctgctgcagcccctcagcaacgccgtgcagctgcccatcgaccaggtcaactttgtagtgtgccaactctttgccttgctagcagccatttggtttcgaacttatctacattcaagcaaaactagctcttttataagacatgtagttgctacccttttgggcctttatcttgcacttttttgctttggatggtatgccttacactttcttgtacaaagtggaatttcctactgtatcatgatcatcataggagtggagaacatgcacaattactgctttgtgtttgctctgggatacctcacagtgtgccaagttactcgagtctatatctttgactatggacaatattctgctgatttttcaggcccaatgatgatcattactcagaagatcactagtttggcttgcgaaattcatgatgggatgtttcggaaggatgaagaactgacttcctcacagagggatttagctgtaaggcgcatgccaagcttactggagtatttgagttacaactgtaacttcatggggatcctggcaggcccactttgctcttacaaagactacattactttcattgaaggcagatcataccatatcacacaatctggtgaaaatggaaaagaagagacacagtatgaaagaacagagccatctccaaatactgcggttgttcagaagctcttagtttgtgggctgtccttgttatttcacttgaccatctgtacaacattacctgtggagtacaacattgatgagcattttcaagctacagcttcgtggccaacaaagattatctatctgtatatctctcttttggctgccagacccaaatactattttgcatggacgctagctgatgccattaataatgctgcaggctttggtttcagagggtatgacgaaaatggagcagctcgctgggacttaatttccaatttgagaattcaacaaatagagatgtcaacaagtttcaagatgtttcttgataattggaatattcagacagctctttggctcaaaagggtgtgttatgaacgaacctccttcagtccaactatccagacgttcattctctctgccatttggcacggggtatacccaggatattatctaacgtttctaacaggggtgttaatgacattagcagcaagagctaattttctgaaggagagataaaaactgagttaaataaagatgatcagaatggatgagaaataactttagacattatttcattgaaccttcccaactgaaattattttatgatgttataacat

SEQ ID NO: 12040 - DNA, 525 bp, Homo sapiens
  source 1..525: mol_type = unassigned DNA
tatgacgaaaatggagcagctcgctgggacttaatttccaatttgagaattcaacaaatagagatgtcaacaagtttcaagatgtttcttgataattggaatattcagacagctctttggctcaaaagggtgtgttatgaacgaacctccttcagtccaactatccagacgttcattctctctgccatttggcacggggtatacccaggatattatctaacgtttctaacaggggtgttaatgacattagcagcaagagctgtaagtatcaagaattttattttacaattcaatggtccacttgaactgttaaaaaggctgagtacatctctcttacaaggtagaccctctttccttggtcgtggtcagtattgtcctttccactagaagcgaggtgtgtactgcgtgcatgtttgctgagcgctcaccacgggctaggctccatgcccagttcctgtgaggagaaaacacgtttctatgtgcccggcaggtaggaggcactcacaaaatgttactttgtcttta

SEQ ID NO: 12041 - DNA, 754 bp, Homo sapiens
  source 1..754: mol_type = unassigned DNA
ggggcgggcgcgccgctgcatccccatcctcgtcgtcgcccggcacagcgcgagcgggcgagcggcgcgggcggccggagcgccgaggcccggccatggccaccaccagcaccacgggctccaccctgctgcagcccctcagcaacgccgtgcagctgcccatcgaccagttactgctttgtgtttgctctgggatacctcacagtgtgccaagttactcgagtctatatctttgactatggacaatattctgctgatttttcaggcccaatgatgatcattactcagaagatcactagtttggcttgcgaaattcatgatgggatgtttcggaaggatgaagaactgacttcctcacagagggatttagctgtaaggcgcatgccaagcttactggagtatttgagttacaactgtaacttcatggggatcctggcaggcccactttgctcttacaaagactacattactttcattgaaggcagatcataccatatcacacaatctggtgaaaatggaaaagaagagacacagtatgaaagaacagagccatctccaaatactgcggttgttcagaagctcttagtttgtgggctgtccttgttatttcacttgaccatctgtacaacattacctgtggagtacaacattgatgagcattttcaagctacagcttcgtggccaacaaagattatctatctgtatatctctcttttggctgccagacccaaatactattttgcatggacgctag

SEQ ID NO: 12042 - DNA, 713 bp, Homo sapiens
  source 1..713: mol_type = unassigned DNA
gaacttatctacattcaagcaaaactagctcttttataagacatgtagttgctacccttttgggcctttatcttgcacttttttgctttggatggtatgccttacactttcttgtacaaagtggaatttcctactgtatcatgatcatcataggagtggagaacatgcacaattactgctttgtgtttgctctgggatacctcacagtgtgccaagttactcgagtctatatctttgactatggacaatattctgctgatttttcaggcccaatgatgatcattactcagaagatcactagtttggcttgcgaaattcatgatgggatgtttcggaaggatgaagaactgacttcctcacagagggatttagctgtaaggcgcatgccaagcttactggagtatttgagttacaactgtaacttcatggggatcctggcaggcccactttgctcttacaaagactacattactttcattgaaggcagatcataccatatcacacaatctggtgaaaatggaaaagaagagacacagtatgaaagaacagagccatctccaaatgtaaggtcatgagatttatctggagcctttacagcatgtattgactgcggttgttcagaagctcttagtttgtgggctgtccttgttatttcacttgaccatctgtacaacattacctgtggagtacaacattgatgagcattttcaagc

SEQ ID NO: 12043 - DNA, 580 bp, Homo sapiens
  source 1..580: mol_type = unassigned DNA
acagcgcgagcgggcgagcggcgcgggcggccggagcgccgaggcccggccatggccaccaccagcaccacgggctccaccctgctgcagcccctcagcaacgccgtgcagctgcccatcgaccaggctgcccgccacatgattcccgggtgtctttccccttccgtgtgtctcacgtacctggcagagtccacaggcgaaaagtatgccttacactttcttgtacaaagtggaatttcctactgtatcatgatcatcataggagtggagaacatgcacaattactgctttgtgtttgctctgggatacctcacagtgtgccaagttactcgagtctatatctttgactatggacaatattctgctgatttttcaggcccaatgatgatcattactcagaagatcactagtttggcttgcgaaattcatgatgggatgtttcggaaggatgaagaactgacttcctcacagagggatttagctgtaaggcgcatgccaagcttactggagtatttgagttacaactgtaacttcatggggatcctggcaggcccactttgctcttacaaagactacatta

SEQ ID NO: 12044 - DNA, 550 bp, Homo sapiens
  source 1..550: mol_type = unassigned DNA
gtcaactttgtagtgtgccaactctttgccttgctagcagccatttggtttcgaacttatctacattcaagcaaaactagctcttttataagacatgtagttgctacccttttgggcctttatcttgcacttttttgctttggatggtatgccttacactttcttgtacaaagtggaatttcctactgtatcatgatcatcataggagtggagaacatgcacaattactgctttgtgtttgctctgggatacctcacagtgtgccaagttactcgagtctatatctttgactatggacaatattctgctgatttttcagggtccttgggctaggtcagtctgagtttcctagagaaggcgctcaagagtgcgttttacttctatgcatttcacctattttcagtgttctccattcaacaccagtattcagttgagtagtggaaataatttctggcatttgttccttcaaaggggatgtattttcttcctggtactagatgaatctttttgtcctgtaacaaaactgattatatgtctgttgtgaaataaa

SEQ ID NO: 12045 - DNA, 2598 bp, Homo sapiens
  source 1..2598: mol_type = unassigned DNA
taaggactcgactacctccgaagaaagccgaaacatgtggctccgcccacactggcctcagctctccgttctcgactattgccgaagtgagccgaagtttgtggccccgcttccggagaactcaagctcccgattgtgcccgaaggaacccgaagggagaccccgcctcattcctcacggcgagctccagaccccgcctcctttccggagcccgtctgttccccttcgggtccaaagcttttggctcctccttgttccgagcccgaaggcccgccccttcacgtactcggagctcggatcccagtgtggacctggactcgaatcccgttgccgactcgcgctctcggcttctgctccggggcttcttccctgcccgcccggggccctgaccgtggcttcttccccggcctgatctgcgcagcccggcgggcgcccagaaggagcaggcggcgcgggggcgcgctgggcgggggaggcgtggccggagctgcggcggcaagcgggctgggactgctcggccgcctcctgcccggcgagcagctcagaccatgtcgcctgaagaatggacgtatctagtggttcttcttatctccatccccatcggcttcctctttaagaaagccggtcctgggctgaagagatggggagcagccgctgtgggcctggggctcaccctgttcacctgtggcccccacactttgcattctctggtcaccatcctcgggacctgggccctcattcaggcccagccctgctcctgccacgccctggctctggcctggactttctcctatctcctgttcttccgagccctcagcctcctgggcctgcccactcccacgcccttcaccaatgccgtccagctgctgctgacgctgaagctggtgagcctggccagtgaagtccaggacctgcatctggcccagaggaaggaaatggcctcaggcttcagcaaggggcccaccctggggctgctgcccgacgtgccctccctgatggagacactcagctacagctactgctacgtgggaatcatgacaggcccgttcttccgctaccgcacctacctggactggctggagcagcccttccccggggcagtgcccagcctgcggcccctgctgcgccgcgcctggccggccccgctcttcggcctgctgttcctgctctcctctcacctcttcccgctggaggccgtgcgcgaggacgccttctacgcccgcccgctgcccgcccgcctcttctacatgatccccgtcttcttcgccttccgcatgcgcttctacgtggcctggattgccgccgagtgcggctgcattgccgccggctttggggcctaccccgtggccgccaaagcccgggccggaggcggccccaccctccaatgcccaccccccagcagtccggagaaggcggcttccttggagtatgactatgagaccatccgcaacatcgactgctacagcacagatttctgcgtgcgggtgcgcgatggcatgcggtactggaacatgacggtgcagtggtggctggcgcagtatatctacaagagcgcacctgcccgttcctatgtcctgcggagcgcctggaccatgctgctgagcgcctactggcacggcctccacccgggctactacctgagcttcctgaccatcccgctgtgcctggctgccgagggccggctggagtcagccctgcgggggcggctgagcccagggggccagaaggcctgggactgggtgcactggttcctgaagatgcgcgcctatgactacatgtgcatgggcttcgtgctgctctccttggccgacacccttcggtactgggcctccatctacttctgtatccacttcctggccctggcagccctggggctggggctggctttaggtgggggcagccccagccggcggaaggcagcatcccagcccaccagccttgccccagagaagctccgggaggagtaagctgtcacgacgctccctctgccagctggtcccgggaattctgtgaaccaggctgctgtctcctccccagaaagagtccttaccttggagagggtcctggagagaatttcctcttccccagctaaataccctgcctgcaactgaagcagacccgggggtgtcctccctgccctctgcccagaggccacctccactcctacaaaatcaaagtattgtccagacaagagtcactggcccctgctccagcttctgggtatccagagagcactgcacttccccaaaacggaaggggcccctgggcagtgggttttgggcaaattccctttctttgcatccacaatgtggggtcggagcttgggggcaggtcctgggagtgggaagcctcttccttgtgtctttcgctccacttttagctcatcgcaccaatattgcagacttggaaggaagcataagcttcccatttcacaaaggggaaactgaggtgcgggtgcgcgggcctggggacggccgtcccatggcttccatctgagccacctcgggaccccagcgctcctggcgccctcttctcatcgcttggcctatgacaggtcaccgtgtgtaaatctttcccaataaagtgttgcacaaaggc

SEQ ID NO: 12046 - DNA, 2471 bp, Homo sapiens
  source 1..2471: mol_type = unassigned DNA
taaggactcgactacctccgaagaaagccgaaacatgtggctccgcccacactggcctcagctctccgttctcgactattgccgaagtgagccgaagtttgtggccccgcttccggagaactcaagctcccgattgtgcccgaaggaacccgaagggagaccccgcctcattcctcacggcgagctccagaccccgcctcctttccggagcccgtctgttccccttcgggtccaaagcttttggctcctccttgttccgagcccgaaggcccgccccttcacgtactcggagctcggatcccagtgtggacctggactcgaatcccgttgccgactcgcgctctcggcttctgctccggggcttcttccctgcccgcccggggccctgaccgtggcttcttccccggcctgatctgcgcagcccggcgggcgcccagaaggagcaggcggcgcgggggcgcgctgggcgggggaggcgtggccggagctgcggcggcaagcgggctgggactgctcggccgcctcctgcccggcgagcagctcagaccatgtcgcctgaagaatggacgtatctagtggttcttcttatctccatccccatcggcttcctctttaagaaagccggtcctgggctgaagagatggggagcagccgctgtgggcctggggctcaccctgttcacctgtggcccccacactttgcattctctggtcaccatcctcgggacctgggccctcattcaggcccagccctgctggtgagcctggccagtgaagtccaggacctgcatctggcccagaggaaggaaatggcctcaggcttcagcaaggggcccaccctggggctgctgcccgacgtgccctccctgatggagacactcagctacagctactgctacgtgggaatcatgacaggcccgttcttccgctaccgcacctacctggactggctggagcagcccttccccggggcagtgcccagcctgcggcccctgctgcgccgcgcctggccggccccgctcttcggcctgctgttcctgctctcctctcacctcttcccgctggaggccgtgcgcgaggacgccttctacgcccgcccgctgcccgcccgcctcttctacatgatccccgtcttcttcgccttccgcatgcgcttctacgtggcctggattgccgccgagtgcggctgcattgccgccggctttggggcctaccccgtggccgccaaagcccgggccggaggcggccccaccctccaatgcccaccccccagcagtccggagaaggcggcttccttggagtatgactatgagaccatccgcaacatcgactgctacagcacagatttctgcgtgcgggtgcgcgatggcatgcggtactggaacatgacggtgcagtggtggctggcgcagtatatctacaagagcgcacctgcccgttcctatgtcctgcggagcgcctggaccatgctgctgagcgcctactggcacggcctccacccgggctactacctgagcttcctgaccatcccgctgtgcctggctgccgagggccggctggagtcagccctgcgggggcggctgagcccagggggccagaaggcctgggactgggtgcactggttcctgaagatgcgcgcctatgactacatgtgcatgggcttcgtgctgctctccttggccgacacccttcggtactgggcctccatctacttctgtatccacttcctggccctggcagccctggggctggggctggctttaggtgggggcagccccagccggcggaaggcagcatcccagcccaccagccttgccccagagaagctccgggaggagtaagctgtcacgacgctccctctgccagctggtcccgggaattctgtgaaccaggctgctgtctcctccccagaaagagtccttaccttggagagggtcctggagagaatttcctcttccccagctaaataccctgcctgcaactgaagcagacccgggggtgtcctccctgccctctgcccagaggccacctccactcctacaaaatcaaagtattgtccagacaagagtcactggcccctgctccagcttctgggtatccagagagcactgcacttccccaaaacggaaggggcccctgggcagtgggttttgggcaaattccctttctttgcatccacaatgtggggtcggagcttgggggcaggtcctgggagtgggaagcctcttccttgtgtctttcgctccacttttagctcatcgcaccaatattgcagacttggaaggaagcataagcttcccatttcacaaaggggaaactgaggtgcgggtgcgcgggcctggggacggccgtcccatggcttccatctgagccacctcgggaccccagcgctcctggcgccctcttctcatcgcttggcctatgacaggtcaccgtgtgtaaatctttcccaataaagtgttgcacaaaggc

SEQ ID NO: 12047 - DNA, 2392 bp, Homo sapiens
  source 1..2392: mol_type = unassigned DNA
taaggactcgactacctccgaagaaagccgaaacatgtggctccgcccacactggcctcagctctccgttctcgactattgccgaagtgagccgaagtttgtggccccgcttccggagaactcaagctcccgattgtgcccgaaggaacccgaagggagaccccgcctcattcctcacggcgagctccagaccccgcctcctttccggagcccgtctgttccccttcgggtccaaagcttttggctcctccttgttccgagcccgaaggcccgccccttcacgtactcggagctcggatcccagtgtggacctggactcgaatcccgttgccgactcgcgctctcggcttctgctccggggcttcttccctgcccgcccggggccctgaccgtggcttcttccccggcctgatctgcgcagcccggcgggcgcccagaaggagcaggcggcgcgggggcgcgctgggcgggggaggcgtggccggagctgcggcggcaagcgggctgggactgctcggccgcctcctgcccggcgagcagctcaggtcctgggctgaagagatggggagcagccgctgtgggcctggggctcaccctgttcacctgtggcccccacactttgcattctctggtcaccatcctcgggacctgggccctcattcaggcccagccctgctggtgagcctggccagtgaagtccaggacctgcatctggcccagaggaaggaaatggcctcaggcttcagcaaggggcccaccctggggctgctgcccgacgtgccctccctgatggagacactcagctacagctactgctacgtgggaatcatgacaggcccgttcttccgctaccgcacctacctggactggctggagcagcccttccccggggcagtgcccagcctgcggcccctgctgcgccgcgcctggccggccccgctcttcggcctgctgttcctgctctcctctcacctcttcccgctggaggccgtgcgcgaggacgccttctacgcccgcccgctgcccgcccgcctcttctacatgatccccgtcttcttcgccttccgcatgcgcttctacgtggcctggattgccgccgagtgcggctgcattgccgccggctttggggcctaccccgtggccgccaaagcccgggccggaggcggccccaccctccaatgcccaccccccagcagtccggagaaggcggcttccttggagtatgactatgagaccatccgcaacatcgactgctacagcacagatttctgcgtgcgggtgcgcgatggcatgcggtactggaacatgacggtgcagtggtggctggcgcagtatatctacaagagcgcacctgcccgttcctatgtcctgcggagcgcctggaccatgctgctgagcgcctactggcacggcctccacccgggctactacctgagcttcctgaccatcccgctgtgcctggctgccgagggccggctggagtcagccctgcgggggcggctgagcccagggggccagaaggcctgggactgggtgcactggttcctgaagatgcgcgcctatgactacatgtgcatgggcttcgtgctgctctccttggccgacacccttcggtactgggcctccatctacttctgtatccacttcctggccctggcagccctggggctggggctggctttaggtgggggcagccccagccggcggaaggcagcatcccagcccaccagccttgccccagagaagctccgggaggagtaagctgtcacgacgctccctctgccagctggtcccgggaattctgtgaaccaggctgctgtctcctccccagaaagagtccttaccttggagagggtcctggagagaatttcctcttccccagctaaataccctgcctgcaactgaagcagacccgggggtgtcctccctgccctctgcccagaggccacctccactcctacaaaatcaaagtattgtccagacaagagtcactggcccctgctccagcttctgggtatccagagagcactgcacttccccaaaacggaaggggcccctgggcagtgggttttgggcaaattccctttctttgcatccacaatgtggggtcggagcttgggggcaggtcctgggagtgggaagcctcttccttgtgtctttcgctccacttttagctcatcgcaccaatattgcagacttggaaggaagcataagcttcccatttcacaaaggggaaactgaggtgcgggtgcgcgggcctggggacggccgtcccatggcttccatctgagccacctcgggaccccagcgctcctggcgccctcttctcatcgcttggcctatgacaggtcaccgtgtgtaaatctttcccaataaagtgttgcacaaaggc

SEQ ID NO: 12048 - DNA, 2598 bp, Homo sapiens; identical to SEQ ID NO: 12045
  source 1..2598: mol_type = unassigned DNA

SEQ ID NO: 12049 - DNA, 2471 bp, Homo sapiens; identical to SEQ ID NO: 12046
  source 1..2471: mol_type = unassigned DNA

SEQ ID NO: 12050 - DNA, 2392 bp, Homo sapiens; identical to SEQ ID NO: 12047
  source 1..2392: mol_type = unassigned DNA

SEQ ID NO: 12051 - DNA, 2598 bp, Homo sapiens; identical to SEQ ID NO: 12045
  source 1..2598: mol_type = unassigned DNA

SEQ ID NO: 12052 - DNA, 2471 bp, Homo sapiens; identical to SEQ ID NO: 12046
  source 1..2471: mol_type = unassigned DNA

SEQ ID NO: 12053 - DNA, 2392 bp, Homo sapiens; identical to SEQ ID NO: 12047
  source 1..2392: mol_type = unassigned DNA

SEQ ID NO: 12054 - DNA, 2596 bp, Homo sapiens
  source 1..2596: mol_type = unassigned DNA
taaggactcgactacctccgaagaaagccgaaacatgtggctccgcccacagtggcctcagctctccgttctcgactattgccgaagtgagccgaagtttgtggccccgcttccggagaactcaagctcccgattgtgcccgaaggaacccgaagggagaccccgcctcattcctcacgccgagctccagaccccgcctcctttccagagcccgtctgttccccttcgggtccaaagcttttggctcctccttgttccgagcccgaaggcccgccccttcacgtactcggagctcggatcccagtgtggacctggactcgaatcccgttgccgactcgcgctctcggcttctgctccggggcttcttccctgcccgcccggggccctgaccgtggcttcttccccggcctgatctgcgcagcccggcgggcgcccagaaggagcaggcggcgcgggggcgcgctgggcgggggaggcgtggccggagctgcggcggcaagcgggctgggactgctcggccgcctcctgcccggcgagcagctcagaccatgtcgcctgaagaatggacgtatctagtggttcttcttatctccatccccatcggcttcctctttaagaaagccggtcctgggctgaagagatggggagcagccgctgtgggcctggggctcaccctgttcacctgtggcccccacactttgcattctctggtcaccatcctcgggacctgggccctcattcaggcccagccctgctcctgccacgccctggctctggcctggactttctcctatctcctgttcttccgagccctcagcctcctgggcctgcccactcccacgcccttcaccaatgccgtccagctgctgctgacgctgaagctggtgagcctggccagtgaagtccaggacctgcatctggcccagaggaaggaaatggcctcaggcttcagcaaggggcccaccctggggctgctgcccgacgtgccctccctgatggagacactcagctacagctactgctacgtgggaatcatgacaggcccgttcttccgctaccgcacctacctggactggctggagcagcccttccccggggcagtgcccagcctgcggcccctgctgcgccgcgcctggccggccccgctcttcggcctgctgttcctgctctcctctcacctcttcccgctggaggccgtgcgcgaggacgccttctacgcccgcccgctgcccgcccgcctcttctacatgatccccgtcttcttcgccttccgcatgcgcttctacgtggcctggattgccgccgagtgcggctgcattgccgccggctttggggcctaccccgtggccgccaaagcccgggccggaggcggccccaccctccaatgcccaccccccagcagtccggagaaggcggcttccttggagtatgactatgagaccatccgcaacatcgactgctacagcacagatttctgcgtgcgggtgcgcgatggcatgcggtactggaacatgacggtgcagtggtggctggcgcagtatatctacaagagcgcacctgcccgttcctatgtcctgcggagcgcctggaccatgctgctgagcgcctactggcacggcctccacccgggctactacctgagcttcctgaccatcccgctgtgcctggctgccgagggccggctggagtcagccctgcgggggcggctgagcccagggggccagaaggcctgggactgggtgcactggttcctgaagatgcgcgcctatgactacatgtgcatgggcttcgtgctgctctccttggctgacacccttcggtactgggcctccatctacttctgtatccacttcctggccctggcagccctggggctggggctggctttaggtgggggcagccccagccggcggaaggcagcatcccagcccaccagccttgccccggagaagctccgggaggagtaagctgtcacgacgctccctctgccagctggtcccgggaattctgtgaaccaggctgctgtctcctccccagaaagagtccttaccttggagagggtcctggagagaatttcctcttccccagctaaataccctgcctgcaactgaagcagacccgggggtgtcctccctgccctctgcccagaggccacctccactcctacaaaatcaaagtattgtccagacaagagtcactggcccctgctccagcttctgggtatccagagagcactgcacttccccaaaacggaaggggcccctgggcagtgggttttgggcaaattccctttctttgcatccacaatgtggggtcggagcttgggggcaggtcctgggagtgggaagcctcttccttgtgtctttcgctccacttttagctcatcgcaccaatattgcagacttggaaggaagcataagcttcccatttcacaaaggggaaactgaggtgcgggtgcgcgggcctggggacggccgtcccatggcttccatctgagccacctcgggaccccagcactcctggcgccctcttctcatagcttggcctatgacaggtcaccgtgtgtaaatctttcccaataaagtgttgcacaaag

SEQ ID NO: 12055 - DNA, 1811 bp, Homo sapiens
  source 1..1811: mol_type = unassigned DNA
cccgtctgttccccttcgggtccaaagcttttggctcctccttgttccgagcccgaaggcccgccccttcacgtactcggagctcggatcccagtgtggacctggactcgaatcccgttgccgactcgcgctctcggcttctgctccggggcttcttccctgcccgcccggggccctgaccgtggcttcttccccggcctgatctgcgcagcccggcgggcgcccagaaggagcaggcggcgcgggggcgcgctgggcgggggaggcgtggccggagctgcggcggcaagcgggctgggactgctcggccgcctcctgcccggcgagcagctcagaccatgtcgcctgaagaatggacgtatctagtggttcttcttatctccatccccatcggcttcctctttaagaaagccggtcctgggctgaagagatggggagcagccgctgtgggcctggggctcaccctgttcacctgtggcccccacactttgcattctctggtcaccatcctcgggacctgggccctcattcaggcccagccctgctcctgccacgccctggctctggcctggactttctcctatctcctgttcttccgagccctcagcctcctgggcctgcccactcccacgcccttcaccaatgccgtccagctgctgctgacgctgaagctggtgagcctggccagtgaagtccaggacctgcatctggcccagaggaaggaaatggcctcaggcttcagcaaggggcccaccctggggctgctgcccgacgtgccctccctgatggagacactcagctacagctactgctacgtgggaatcatgacaggcccgttcttccgctaccgcacctacctggactggctggagcagcccttccccggggcagtgcccagcctgcggcccctgctgcgccgcgcctggccggccccgctcttcggcctgctgttcctgctctcctctcacctcttcccgctggaggccgtgcgcgaggacgccttctacgcccgcccgctgcccgcccgcctcttctacatgatccccgtcttcttcgccttccgcatgcgcttctacgtggcctggattgccgccgagtgcggctgcattgccgccggctttggggcctaccccgtggccgccaaagcccgggccggaggcggccccaccctccaatgcccaccccccagcagtccggagaaggcggcttccttggagtatgactatgagaccatccgcaacatcgactgctacagcacagatttctgcgtgcgggtgcgcgatggcatgcggtactggaacatgacggtgcagtggtggctggcgcagtatatctacaagagcgcacctgcccgttcctatgtcctgcggtgagtgagcccgcccagtctcaggtgacactgcagaactacatctcccagcaggccccagggtagcctgcagcgtccctggctgggcccctgcccccggaggctcatgggaattgtagtttgtttagcctggttttgccctgcctctaattatagtggcagcatgccggtgtaaaatcgttccccctctcggggcctcagttgctacttctgtaaagtcagcctcactcagcagaagcaatgtactgagtcctgtggactcaatagccagccttcctggaatcttggccgtccaggttatggagaaaccttgaggagttagttgacctcttagttgcctcaagtgttgaatggagtgaatgctatttattactggtttcataggtagatagaaggactaaatgtgataaaatgtgaaatgtatttaatgtgaggcctgaca

SEQ ID NO: 12056 - DNA, 3039 bp, Homo sapiens
  source 1..3039: mol_type = unassigned DNA
atgcccaccccccagcaggtcaggcggcgcgagggaggcttcccaagacccagcagcccccacctccaagggctggctctgcccctagccgggaggagagcggggagcaaggggccagggccaccacctttttgagcagagtgtcgccccctcggcaaccatggcctgccagcccctgtcggtagggaaaagatccctggtactgacagatgccccttgttgctagcgcttgtcaccccgcagtgtggtgaactgccccctgtcgctaggaaaaggtggtaacttagcaaccctgtgccacccctctgttgccacagaagtgtcaccccccagaaccagattgttcctgcttgctggggatgccatcctttgctagtggtgggtcaccctctgttgctagggaaacggttccctagcaacagaacgccactatttgctagggaagcaggatccctagcaacagtagctcacctcctttttaccagaagttttgctctgttgctgcagatacggcactccctgcactgcccctttgttgctaggagctagcactgctccaccccgtgggatgtcctcacatagcagccctcagcagccctctgcaaggaaatagcaatttccaatccctgaccagtgctgttccccagcagagggcacgccattcctaccaactacagttacactgttgctaaggaagccaaacctccccctggaaactatgggttgacccttgttgccagagaggctccaccccccggcacctgcattgctaggcaagtcgcacggccatagctgtggactctcttgtggctgaggaagtattgcccccgtgttgctagggagatggcacccccggcaaccaggagtagactgcccttgtgttcctgacagctgcagtcagccttcccccaggggcttggactgcggctgggggaacagcctgttgatgtaaatgatgaactactactccctgctagggttgtcccctagtcgtcacaaactgccattctgttgtgggggtagtgacacccccacgggaatttgttaccactgccctaataaccgtgccctgacctccagctgctagagagaggatgtccccctagtaaagccaagcaggaattgaaggtttttctaaatctgctcggtcctcactcctaaaggatggctcccctcctgtcatcagaggccaccaaggcttcatatgggccagtgtttcccactgctggggctgtcgacatgagtgatgagggagccactgtattgctagaggtgacacttctccaataatcactgcgaccaggaaaaaagccccttcctaaaagcctttctaaacatcctaggcattgttgctaaggaatgccttttccttagcaacaaagatcatggggaccccactggcgcctggaacatctccctagcaaccgtgaagcaccttgttattagggatgataaccacaacttccctggcaactgcagtgtccgacaatttagaagggaccatccttggcggcttctctgaatatactgagcttggttgctaaaggactcatagcttagcaaccatagcccttcaaggcttttcatggctgtggcgggccccattaggtaccaaaagaagaagaaccccattgtcagtgaactgtaccacccagcccacccaccttcctaccctacaggcaccctctgggccaccctcccttgctgccctagcaagtctgacagccagagggccattgcctggccaggatcccttccttagcatccggggctgggacactagcaggcgtcgggagggggcctggctgagctgcatgtctgtcccccaccctcatcctccaccccccagtccggagaaggcggcttccttggagtatgactatgagaccatccgcaacatcgactgctacagcacagatttctgcgtgcgggtgcgcgatggcatgcggtactggaacatgacggtgcagtggtggctggcgcagtatatctacaagagcgcacctgcccgttcctatgtcctgcggagcgcctggaccatgctgctgagcgcctactggcacggcctccacccgggctactacctgagcttcctgaccatcccgctgtgcctggctgccgagggccggctggagtcagccctgcgggggcggctgagcccagggggccagaaggcctgggactgggtgcactggttcctgaagatgcgcgcctatgactacatgtgcatgggcttcgtgctgctctccttggctgacacccttcggtactgggcctccatctacttctgtatccacttcctggccctggcagccctggggctggggctggctttaggtgggggcagccccagccggcggaaggcagcatcccagcccaccagccttgccccggagaagctccgggaggagtaagctgtcacgacgctccctctgccagctggtcccgggaattctgtgaaccaggctgctgtctcctccccagaaagagtccttaccttggagagggtcctggagagaatttcctcttccccagctaaataccctgcctgcaactgaagcagacccgggggtgtcctccctgccctctgcccagaggccacctccactcctacaaaatcaaagtattgtccagacaagagtcactggcccctgctccagcttctgggtatccagagagcactgcacttccccaaaacggaaggggcccctgggcagtgggttttgggcaaattccctttctttgcatccacaatgtggggtcggagcttgggggcaggtcctgggagtgggaagcctcttccttgtgtctttcgctccacttttagctcatcgcaccaatattgcagacttggaaggaagcataagcttcccatttcacaaaggggaaactgaggtgcgggtgcgcgggcctggggacggccgtcccatggcttccatctgagccacctcgggaccccagcactcctggcgccctcttctcatagcttggcctatgacaggtcaccgtgtgtaaatctttcccaataaagtgttgcac

SEQ ID NO: 12057 - DNA, 2030 bp, Homo sapiens
  source 1..2030: mol_type = unassigned DNA
ggagcaggcggcgcgggggcgcgctgggcgggggaggcgtggccggagctgcggcggcaagcgggctgggactgctcggccgcctcctgcccggcgagcagctcagaccatgtcgcctgaagaatggacgtatctagtggttcttcttatctccatccccatcggcttcctctttaagaaagccggtcctgggctgaagagatggggagcagccgctgtgggcctggggctcaccctgttcacctgtggcccccacactttgcattctctggtcaccatcctcgggacctgggccctcattcaggcccagccctgctggtgagcctggccagtgaagtccaggacctgcatctggcccagaggaaggaaatggcctcaggcttcagcaaggggcccaccctggggctgctgcccgacgtgccctccctgatggagacactcagctacagctactgctacgtgggaatcatgacaggcccgttcttccgctaccgcacctacctggactggctggagcagcccttccccggggcagtgcccagcctgcggcccctgctgcgccgcgcctggccggccccgctcttcggcctgctgttcctgctctcctctcacctcttcccgctggaggccgtgcgcgaggacgccttctacgcccgcccgctgcccgcccgcctcttctacatgatccccgtcttcttcgccttccgcatgcgcttctacgtggcctggattgccgccgagtgcggctgcattgccgccggctttggggcctaccccgtggccgccaaagcccgggccggaggcggccccaccctccaatgcccaccccccagcagtccggagaaggcggcttccttggagtatgactatgagaccatccgcaacatcgactgctacagcacagatttctgcgtgcgggtgcgcgatggcatgcggtactggaacatgacggtgcagtggtggctggcgcagtatatctacaagagcgcacctgcccgttcctatgtcctgcggagcgcctggaccatgctgctgagcgcctactggcacggcctccacccgggctactacctgagcttcctgaccatcccgctgtgcctggctgccgagggccggctggagtcagccctgcgggggcggctgagcccagggggccagaaggcctgggactgggtgcactggttcctgaagatgcgcgcctatgactacatgtgcatgggcttcgtgctgctctccttggctgacacccttcggtactgggcctccatctacttctgtatccacttcctggccctggcagccctggggctggggctggctttaggtgggggcagccccagccggcggaaggcagcatcccagcccaccagccttgccccggagaagctccgggaggagtaagctgtcacgacgctccctctgccagctggtcccgggaattctgtgaaccaggctgctgtctcctccccagaaagagtccttaccttggagagggtcctggagagaatttcctcttccccagctaaataccctgcctgcaactgaagcagacccgggggtgtcctccctgccctctgcccagaggccacctccactcctacaaaatcaaagtattgtccagacaagagtcactggcccctgctccagcttctgggtatccagagagcactgcacttccccaaaacggaaggggcccctgggcagtgggttttgggcaaattccctttctttgcatccacaatgtggggtcggagcttgggggcaggtcctgggagtgggaagcctcttccttgtgtctttcgctccacttttagctcatcgcaccaatattgcagacttggaaggaagcataagcttcccatttcacaaaggggaaactgaggtgcgggtgcgcgggcctggggacggccgtcccatggcttccatctgagccacctcgggaccccagcactcctggcgccctcttctcatagcttggcctatgacaggtcaccgtgtgtaaatctttcccaataaagtgttgcacaaag

SEQ ID NO: 12058 - DNA, 564 bp, Homo sapiens
  source 1..564: mol_type = unassigned DNA
agctcaggtgggccagggtggcggcgcccagtggcgaggcgagaccatgtcgcctgaagaatggacgtatctagtggttcttcttatctccatccccatcggcttcctctttaagaaagccggtcctgggctgaagagatggggagcagccgctgtgggcctggggctcaccctgttcacctgtggcccccacactttgcattctctggtcaccatcctcgggacctgggccctcattcaggcccagccctgctcctgccacgccctggctctggcctggactttctcctatctcctgttcttccgagccctcagcctcctgggcctgcccactcccacgcccttcaccaatgccgtccagctgctgctgacgctgaagctggtgagcctggccagtgaagtccaggacctgcatctggcccagaggaaggaaatggcctcaggcttcagcaaggggcccaccctggggctgctgcccgacgtgccctccctgatggagacactcagctacagctactgctacgtgggaatcatgacaggcccgttcttccgctaccgcaccta

SEQ ID NO: 12059 - DNA, 911 bp, Homo sapiens
  source 1..911: mol_type = unassigned DNA
agggtggcggcgcccagtggcgaggcgaggttacacggcggcagggtctctgcgggctggcgggtgcggggcggccccggaggcgcgttggaactcggggctggcgcaaccgcctgtggctctgccggggatgcgctgggaccatgtcgcctgaagaatggacgtatctagtggttcttcttatctccatccccatcggcttcctctttaagaaagccggtcctgggctgaagagatggggagcagccgctgtgggcctggggctcaccctgttcacctgtggcccccacactttgcattctctggtcaccatcctcgggacctgggccctcattcaggcccagccctgctcctgccacgccctggctctggcctggactttctcctatctcctgttcttccgagccctcagcctcctgggcctgcccactcccacgcccttcaccaatgccgtccagctgctgctgacgctgaagctggtgagcctggccagtgaagtccaggacctgcatctggcccagaggaaggaaatggcctcaggcttcagcaaggggcccaccctggggctgctgcccgacgtgccctccctgatggagacactcagctacagctactgctacgtgggaatcatgacaggcccgttcttccgctaccgcacctacctggactggctggagcagcccttccccggggcagtgcccagcctgcggcccctgctgcgccgcgcctggccggccccgctcttcggcctgctgttcctgctctcctctcacctcttcccgctggaggccgtgcgcgaggacgccttctacgcccgcccgctgcccgcccgcctcttctacatgatccccgtcttcttcgccttccgcatgcgcttctacgtggcctggattgccgccgagtgcggctgc

SEQ ID NO: 12060 - DNA, 465 bp, Homo sapiens
  source 1..465: mol_type = unassigned DNA
ggactcgaatcccgttgccgactcgcgctctcggcttctgctccggggcttcttccctgcccgcccggggccctgaccgtggcttcttccccggcctgatctgcgcagcccggcgggcgcccagaaggagcaggcggcgcgggggcgcgctgggcgggggaggcgtggccggagctgcggcggcaagcgggctgggactgctcggccgcctcctgcccggcgagcagctcagaccatgtcgcctgaagaatggacgtatctagtggttcttcttatctccatccccatcggcttcctctttaagaaagccggtcctgggctgaagagatggggagcagccgctgtgggcctggggctcaccctgttcacctgtggcccccacactttgcattctctggtcaccatcctcgggacctgggccctcattcaggcccagccctgtgcgcctcctgcttttgcccagct

SEQ ID NO: 12061 - DNA, 556 bp, Homo sapiens
  source 1..556: mol_type = unassigned DNA
agtttgtggccccgcttccggagaactcaagctcccgattgtgcccgaaggaacccgaagggagaccccgcctcattcctcacgccgagctccagaccccgcctcctttccagagcccgtctgttccccttcgggtccaaagcttttggctcctccttgttccgagcccgaaggcccgccccttcacgtactcggagctcggatcccagtgtggacctggactcgaatcccgttgccgactcgcgctctcggcttctgctccggggcttcttccctgcccgcccggggccctgaccgtggcttcttccccggcctgatctgcgcagcccggcgggcgcccagaaggagcaggcggcgcgggggcgcgctgggcgggggaggcgtggccggagctgcggcggcaagcgggctgggactgctcggccgcctcctgcccggcgagcagctcaggtcctgggctgaagagatggggagcagccgctgtgggcctggggctcaccctgttcacctgtggcccccacactttgcattctctggtcaccatcctcgggacctg

SEQ ID NO: 12062 - DNA, 600 bp, Homo sapiens
  source 1..600: mol_type = unassigned DNA
agtggaaaataaaggggggggaccctctggaaggttccaggcttatgctgtcccttccccctgcaggtcctgggctgaagagatggggagcagccgctgtgggcctggggctcaccctgttcacctgtggcccccacactttgcattctctggtcaccatcctcgggacctgggccctcattcaggcccagccctgctcctgccacgccctggctctggcctggactttctcctatctcctgttcttccgagccctcagcctcctgggcctgcccactcccacgcccttcaccaatgccgtccagctgctgctgacgctgaagctggtgagcctggccagtgaagtccaggacctgcatctggcccagaggaaggaaatggcctcaggcttcagcaaggggcccaccctggggctgctgcccgacgtgccctccctgatggagacactcagctacagctactgctacgtgggaatcatgacaggcccgttcttccgctaccgcacctacctggactggctggagcagcccttccccggggcagtgcccagcctgcggcccctgctgcgccgcgcctggccggccccgctcttcggcctgc

SEQ ID NO: 12063 - DNA, 544 bp, Homo sapiens
  source 1..544: mol_type = unassigned DNA
cagaccatgtcgcctgaagaatggacgtatctagtggttcttcttatctccatccccatcggcttcctctttaagaaagccggtcctgggctgaagagatggggagcagccgctgtgggcctggggctcaccctgttcacctgtggcccccacactttgcattctctggtcaccatcctcgggacctgggccctcattcaggcccagccctgctcctgccacgccctggctctggcctggactttctcctatctcctgttcttccgagccctcagcctcctgggcctgcccactcccacgcccttcaccaatgccgtccagctgctgctgacgctgaaggtcagactcggggcttgccactcccctccagcctccctgtgggccccttcacctcccactttacctcccccttcagtggctccccgggattttacctccaacacaccctgggggtgggacgtcacctcacttgctgccctgggcacagcattccccattcacatgcccttgggcaggtcttcacctcccagctcctcctggggtg

SEQ ID NO: 12064 - DNA, 927 bp, Homo sapiens
  source 1..927: mol_type = unassigned DNA
ggaaggaaatggcctcaggcttcagcaaggggcccaccctggggctgctgcccgacgtgccctccctgatggagacactcagctacagctactgctacgtgggaatcatgacaggcccgttcttccgctaccgcacctacctggactggctggagcagcccttccccggggcagtgcccagcctgcggcccctgctgcgccgcgcctggccggccccgctcttcggcctgctgttcctgctctcctctcacctcttcccgctggaggccgtgcgcgaggacgccttctacgcccgcccgctgcccgcccgcctcttctacatgatccccgtcttcttcgccttccgcatgcgcttctacgtggcctggattgccgccgagtgcggctgcattgccgccggctttggggcctaccccgtggccgccaaagcccgggccggaggcggccccaccctccaatgcccaccccccagcaggtcaggcggcgcgagggaggcttcccaagacccagcagcccccacctccaagggctggctctgcccctagccgggaggagagcggggagcaaggggccagggccaccacctttttgagcagagtgtcgccccctcggcaaccatggcctgccagcccctgtcggtagggaaaagatccctggtactgacagatgccccttgttgctagcgcttgtcaccccgcagtgtggtgaactgccccctgtcgctaggaaaaggtggtaacttagcaaccctgtgccacccctctgttgccacagaagtgtcaccccccagaaccagattgttcctgcttgctggggatgccatcctttgctagtggtgggtcaccctctgttgctagggaaacggttccctagcaacagaacgccactatttgctagggaagcaggatccctagcaacagtagctca

SEQ ID NO: 12065 - DNA, 919 bp, Homo sapiens
  source 1..919: mol_type = unassigned DNA
acaggcccgttcttccgctaccgcacctacctggactggctggagcagcccttccccggggcagtgcccagcctgcggcccctgctgcgccgcgcctggccggccccgctcttcggcctgctgttcctgctctcctctcacctcttcccgctggaggccgtgcgcgaggacgccttctacgcccgcccgctgcccgcccgcctcttctacatgatccccgtcttcttcgccttccgcatgcgcttctacgtggcctggattgccgccgagtgcggctgcattgccgccggctttggggcctaccccgtggccgccaaagcccgggccggaggcggccccaccctccaatgcccaccccccagcagtccggagaaggcggcttccttggagtatgactatgagaccatccgcaacatcgactgctacagcacagatttctgcgtgcgggtgcgcgatggcatgcggtactggaacatgacggtgcagtggtggctggcgcagtatatctacaagagcgcacctgcccgttcctatgtcctgcggagcgcctggaccatgctgctgagcgcctactggcacggcctccacccgggctactacctgagcttcctgaccatcccgctgtgcctggctgccgagggccggctggagtcagccctgcgggggcggctgagcccagggggccagaaggcctgggactgggtgcactggttcctgaagatgcgcgcctatgactacatgtgcatgggcttcgtgctgctctccttggctgacacccttcggtactgggcctccatctacttctgtatccacttcctggccctggcagccctggggctggggctggctttaggtgggggcagccccagccggcggaaggcagcatcccagcccaccagccttgccccggagaagctcc

SEQ ID NO: 12066 - DNA, 2392 bp, Homo sapiens
  source 1..2392: mol_type = unassigned DNA
taaggactcgactacctccgaagaaagccgaaacatgtggctccgcccacagtggcctcagctctccgttctcgactattgccgaagtgagccgaagtttgtggccccgcttccggagaactcaagctcccgattgtgcccgaaggaacccgaagggagaccccgcctcattcctcacgccgagctccagaccccgcctcctttccagagcccgtctgttccccttcgggtccaaagcttttggctcctccttgttccgagcccgaaggcccgccccttcacgtactcggagctcggatcccagtgtggacctggactcgaatcccgttgccgactcgcgctctcggcttctgctccggggcttcttccctgcccgcccggggccctgaccgtggcttcttccccggcctgatctgcgcagcccggcgggcgcccagaaggagcaggcggcgcgggggcgcgctgggcgggggaggcgtggccggagctgcggcggcaagcgggctgggactgctcggccgcctcctgcccggcgagcagctcaggtcctgggctgaagagatggggagcagccgctgtgggcctggggctcaccctgttcacctgtggcccccacactttgcattctctggtcaccatcctcgggacctgggccctcattcaggcccagccctgctggtgagcctggccagtgaagtccaggacctgcatctggcccagaggaaggaaatggcctcaggcttcagcaaggggcccaccctggggctgctgcccgacgtgccctccctgatggagacactcagctacagctactgctacgtgggaatcatgacaggcccgttcttccgctaccgcacctacctggactggctggagcagcccttccccggggcagtgcccagcctgcggcccctgctgcgccgcgcctggccggccccgctcttcggcctgctgttcctgctctcctctcacctcttcccgctggaggccgtgcgcgaggacgccttctacgcccgcccgctgcccgcccgcctcttctacatgatccccgtcttcttcgccttccgcatgcgcttctacgtggcctggattgccgccgagtgcggctgcattgccgccggctttggggcctaccccgtggccgccaaagcccgggccggaggcggccccaccctccaatgcccaccccccagcagtccggagaaggcggcttccttggagtatgactatgagaccatccgcaacatcgactgctacagcacagatttctgcgtgcgggtgcgcgatggcatgcggtactggaacatgacggtgcagtggtggctggcgcagtatatctacaagagcgcacctgcccgttcctatgtcctgcggagcgcctggaccatgctgctgagcgcctactggcacggcctccacccgggctactacctgagcttcctgaccatcccgctgtgcctggctgccgagggccggctggagtcagccctgcgggggcggctgagcccagggggccagaaggcctgggactgggtgcactggttcctgaagatgcgcgcctatgactacatgtgcatgggcttcgtgctgctctccttggctgacacccttcggtactgggcctccatctacttctgtatccacttcctggccctggcagccctggggctggggctggctttaggtgggggcagccccagccggcggaaggcagcatcccagcccaccagccttgccccggagaagctccgggaggagtaagctgtcacgacgctccctctgccagctggtcccgggaattctgtgaaccaggctgctgtctcctccccagaaagagtccttaccttggagagggtcctggagagaatttcctcttccccagctaaataccctgcctgcaactgaagcagacccgggggtgtcctccctgccctctgcccagaggccacctccactcctacaaaatcaaagtattgtccagacaagagtcactggcccctgctccagcttctgggtatccagagagcactgcacttccccaaaacggaaggggcccctgggcagtgggttttgggcaaattccctttctttgcatccacaatgtggggtcggagcttgggggcaggtcctgggagtgggaagcctcttccttgtgtctttcgctccacttttagctcatcgcaccaatattgcagacttggaaggaagcataagcttcccatttcacaaaggggaaactgaggtgcgggtgcgcgggcctggggacggccgtcccatggcttccatctgagccacctcgggaccccagcactcctggcgccctcttctcatagcttggcctatgacaggtcaccgtgtgtaaatctttcccaataaagtgttgcacaaaggc

SEQ ID NO: 12067 - DNA, 2033 bp, Homo sapiens
  source 1..2033: mol_type = unassigned DNA
ggagcaggcggcgcgggggcgcgctgggcgggggaggcgtggccggagctgcggcggcaagcgggctgggactgctcggccgcctcctgcccggcgagcagctcagaccatgtcgcctgaagaatggacgtatctagtggttcttcttatctccatccccatcggcttcctctttaagaaagccggtcctgggctgaagagatggggagcagccgctgtgggcctggggctcaccctgttcacctgtggcccccacactttgcattctctggtcaccatcctcgggacctgggccctcattcaggcccagccctgctggtgagcctggccagtgaagtccaggacctgcatctggcccagaggaaggaaatggcctcaggcttcagcaaggggcccaccctggggctgctgcccgacgtgccctccctgatggagacactcagctacagctactgctacgtgggaatcatgacaggcccgttcttccgctaccgcacctacctggactggctggagcagcccttccccggggcagtgcccagcctgcggcccctgctgcgccgcgcctggccggccccgctcttcggcctgctgttcctgctctcctctcacctcttcccgctggaggccgtgcgcgaggacgccttctacgcccgcccgctgcccgcccgcctcttctacatgatccccgtcttcttcgccttccgcatgcgcttctacgtggcctggattgccgccgagtgcggctgcattgccgccggctttggggcctaccccgtggccgccaaagcccgggccggaggcggccccaccctccaatgcccaccccccagcagtccggagaaggcggcttccttggagtatgactatgagaccatccgcaacatcgactgctacagcacagatttctgcgtgcgggtgcgcgatggcatgcggtactggaacatgacggtgcagtggtggctggcgcagtatatctacaagagcgcacctgcccgttcctatgtcctgcggagcgcctggaccatgctgctgagcgcctactggcacggcctccacccgggctactacctgagcttcctgaccatcccgctgtgcctggctgccgagggccggctggagtcagccctgcgggggcggctgagcccagggggccagaaggcctgggactgggtgcactggttcctgaagatgcgcgcctatgactacatgtgcatgggcttcgtgctgctctccttggccgacacccttcggtactgggcctccatctacttctgtatccacttcctggccctggcagccctggggctggggctggctttaggtgggggcagccccagccggcggaaggcagcatcccagcccaccagccttgccccggagaagctccgggaggagtaagctgtcacgacgctccctctgccagctggtcccgggaattctgtgaaccaggctgctgtctcctccccagaaagagtccttaccttggagagggtcctggagagaatttcctcttccccagctaaataccctgcctgcaactgaagcagacccgggggtgtcctccctgccctctgcccagaggccacctccactcctacaaaatcaaagtattgtccagacaagagtcactggcccctgctccagcttctgggtatccagagagcactgcacttccccaaaacggaaggggcccctgggcagtgggttttgggcaaattccctttctttgcatccacaatgtggggtcggagcttgggggcaggtcctgggagtgggaagcctcttccttgtgtctttcgctccacttttagctcatcgcaccaatattgcagacttggaaggaagcataagcttcccatttcacaaaggggaaactgaggtgcgggtgcgcgggcctggggacggccgtcccatggcttccatctgagccacctcgggaccccagcactcctggcgccctcttctcatcgcttggcctatgacaggtcaccgtgtgtaaatctttcccaataaagtgttgcacaaaggca

SEQ ID NO: 12068 - DNA, 2076 bp, Homo sapiens
  source 1..2076: mol_type = unassigned DNA
gactcgaatcccgttgccgactcgcgctctcggcttctgctccggggcttcttccctgcccgcccggggccctgaccgtggcttcttccccggcctgatctgcgcagcccggcgggcgcccagaaggagcaggcggcgcgggggcgcgctgggcgggggaggcgtggccggagctgcggcggcaagcgggctgggactgctcggccgcctcctgcccggcgagcagctcaggtcctgggctgaagagatggggagcagccgctgtgggcctggggctcaccctgttcacctgtggcccccacactttgcattctctggtcaccatcctcgggacctgggccctcattcaggcccagccctgctggtgagcctggccagtgaagtccaggacctgcatctggcccagaggaaggaaatggcctcaggcttcagcaaggggcccaccctggggctgctgcccgacgtgccctccctgatggagacactcagctacagctactgctacgtgggaatcatgacaggcccgttcttccgctaccgcacctacctggactggctggagcagcccttccccggggcagtgcccagcctgcggcccctgctgcgccgcgcctggccggccccgctcttcggcctgctgttcctgctctcctctcacctcttcccgctggaggccgtgcgcgaggacgccttctacgcccgcccgctgcccgcccgcctcttctacatgatccccgtcttcttcgccttccgcatgcgcttctacgtggcctggattgccgccgagtgcggctgcattgccgccggctttggggcctaccccgtggccgccaaagcccgggccggaggcggccccaccctccaatgcccaccccccagcagtccggagaaggcggcttccttggagtatgactatgagaccatccgcaacatcgactgctacagcacagatttctgcgtgcgggtgcgcgatggcatgcggtactggaacatgacggtgcagtggtggctggcgcagtatatctacaagagcgcacctgcccgttcctatgtcctgcggagcgcctggaccatgctgctgagcgcctactggcacggcctccacccgggctactacctgagcttcctgaccatcccgctgtgcctggctgccgagggccggctggagtcagccctgcgggggcggctgagcccagggggccagaaggcctgggactgggtgcactggttcctgaagatgcgcgcctatgactacatgtgcatgggcttcgtgctgctctccttggccgacacccttcggtactgggcctccatctacttctgtatccacttcctggccctggcagccctggggctggggctggctttaggtgggggcagccccagccggcggaaggcagcatcccagcccaccagccttgccccggagaagctccgggaggagtaagctgtcacgacgctccctctgccagctggtcccgggaattctgtgaaccaggctgctgtctcctccccagaaagagtccttaccttggagagggtcctggagagaatttcctcttccccagctaaataccctgcctgcaactgaagcagacccgggggtgtcctccctgccctctgcccagaggccacctccactcctacaaaatcaaagtattgtccagacaagagtcactggcccctgctccagcttctgggtatccagagagcactgcacttccccaaaacggaaggggcccctgggcagtgggttttgggcaaattccctttctttgcatccacaatgtggggtcggagcttgggggcaggtcctgggagtgggaagcctcttccttgtgtctttcgctccacttttagctcatcgcaccaatattgcagacttggaaggaagcataagcttcccatttcacaaaggggaaactgaggtgcgggtgcgcgggcctggggacggccgtcccatggcttccatctgagccacctcgggaccccagcactcctggcgccctcttctcatcgcttggcctatgacaggtcaccgtgtgtaaatctttcccaataaagtgttgcacaaag

SEQ ID NO: 12069 - DNA, 2529 bp, Homo sapiens
  source 1..2529: mol_type = unassigned DNA
gttctcgactattgccgaagtgagccgaagtttgtggccccgcttccggagaactcaagctcccgattgtgcccgaaggaacccgaagggagaccccgcctcattcctcacgccgagctccagaccccgcctcctttccagagcccgtctgttccccttcgggtccaaagcttttggctcctccttgttccgagcccgaaggcccgccccttcacgtactcggagctcggatcccagtgtggacctggactcgaatcccgttgccgactcgcgctctcggcttctgctccggggcttcttccctgcccgcccggggccctgaccgtggcttcttccccggcctgatctgcgcagcccggcgggcgcccagaaggagcaggcggcgcgggggcgcgctgggcgggggaggcgtggccggagctgcggcggcaagcgggctgggactgctcggccgcctcctgcccggcgagcagctcagaccatgtcgcctgaagaatggacgtatctagtggttcttcttatctccatccccatcggcttcctctttaagaaagccggtcctgggctgaagagatggggagcagccgctgtgggcctggggctcaccctgttcacctgtggcccccacactttgcattctctggtcaccatcctcgggacctgggccctcattcaggcccagccctgctcctgccacgccctggctctggcctggactttctcctatctcctgttcttccgagccctcagcctcctgggcctgcccactcccacgcccttcaccaatgccgtccagctgctgctgacgctgaagctggtgagcctggccagtgaagtccaggacctgcatctggcccagaggaaggaaatggcctcaggcttcagcaaggggcccaccctggggctgctgcccgacgtgccctccctgatggagacactcagctacagctactgctacgtgggaatcatgacaggcccgttcttccgctaccgcacctacctggactggctggagcagcccttccccggggcagtgcccagcctgcggcccctgctgcgccgcgcctggccggccccgctcttcggcctgctgttcctgctctcctctcacctcttcccgctggaggccgtgcgcgaggacgccttctacgcccgcccgctgcccgcccgcctcttctacatgatccccgtcttcttcgccttccgcatgcgcttctacgtggcctggattgccgccgagtgcggctgcattgccgccggctttggggcctaccccgtggccgccaaagcccgggccggaggcggccccaccctccaatgcccaccccccagcagtccggagaaggcggcttccttggagtatgactatgagaccatccgcaacatcgactgctacagcacagatttctgcgtgcgggtgcgcgatggcatgcggtactggaacatgacggtgcagtggtggctggcgcagtatatctacaagagcgcacctgcccgttcctatgtcctgcggagcgcctggaccatgctgctgagcgcctactggcacggcctccacccgggctactacctgagcttcctgaccatcccgctgtgcctggctgccgagggccggctggagtcagccctgcgggggcggctgagcccagggggccagaaggcctgggactgggtgcactggttcctgaagatgcgcgcctatgactacatgtgcatgggcttcgtgctgctctccttggccgacacccttcggtactgggcctccatctacttctgtatccacttcctggccctggcagccctggggctggggctggctttaggtgggggcagccccagccggcggaaggcagcatcccagcccaccagccttgccccggagaagctccgggaggagtaagctgtcacgacgctccctctgccagctggtcccgggaattctgtgaaccaggctgctgtctcctccccagaaagagtccttaccttggagagggtcctggagagaatttcctcttccccagctaaataccctgcctgcaactgaagcagacccgggggtgtcctccctgccctctgcccagaggccacctccactcctacaaaatcaaagtattgtccagacaagagtcactggcccctgctccagcttctgggtatccagagagcactgcacttccccaaaacggaaggggcccctgggcagtgggttttgggcaaattccctttctttgcatccacaatgtggggtcggagcttgggggcaggtcctgggagtgggaagcctcttccttgtgtctttcgctccacttttagctcatcgcaccaatattgcagacttggaaggaagcataagcttcccatttcacaaaggggaaactgaggtgcgggtgcgcgggcctggggacggccgtcccatggcttccatctgagccacctcgggaccccagcactcctggcgccctcttctcatcgcttggcctatgacaggtcaccgtgtgtaaatctttcccaataaagtgttgcacaaag

SEQ ID NO: 12070 - DNA, 3039 bp, Homo sapiens
  source 1..3039: mol_type = unassigned DNA
atgcccaccccccagcaggtcaggcggcgcgagggaggcttcccaagacccagcagcccccacctccaagggctggctctgcccctagccgggaggagagcggggagcaaggggccagggccaccacctttttgagcagagtgtcgccccctcggcaaccatggcctgccagcccctgtcggtagggaaaagatccctggtactgacagatgccccttgttgctagcgcttgtcaccccgcagtgtggtgaactgccccctgtcgctaggaaaaggtggtaacttagcaaccctgtgccacccctctgttgccacagaagtgtcaccccccagaaccagattgttcctgcttgctggggatgccatcctttgctagtggtgggtcaccctctgttgctagggaaacggttccctagcaacagaacgccactatttgctagggaagcaggatccctagcaacagtagctcacctcctttttaccagaagttttgctctgttgctgcagatacggcactccctgcactgcccctttgttgctaggagctagcactgctccaccccgtgggatgtcctcacatagcagccctcagcagccctctgcaaggaaatagcaatttccaatccctgaccagtgctgttccccagcagagggcacgccattcctaccaactacagttacactgttgctaaggaagccaaacctccccctggaaactatgggttgacccttgttgccagagaggctccaccccccggcacctgcattgctaggcaagtcgcacggccatagctgtggactctcttgtggctgaggaagtattgcccccgtgttgctagggagatggcacccccggcaaccaggagtagactgcccttgtgttcctgacagctgcagtcagccttcccccaggggcttggactgcggctgggggaacagcctgttgatgtaaatgatgaactactactccctgctagggttgtcccctagtcgtcacaaactgccattctgttgtgggggtagtgacacccccacgggaatttgttaccactgccctaataaccgtgccctgacctccagctgctagagagaggatgtccccctagtaaagccaagcaggaattgaaggtttttctaaatctgctcggtcctcactcctaaaggatggctcccctcctgtcatcagaggccaccaaggcttcatatgggccagtgtttcccactgctggggctgtcgacatgagtgatgagggagccactgtattgctagaggtgacacttctccaataatcactgcgaccaggaaaaaagccccttcctaaaagcctttctaaacatcctaggcattgttgctaaggaatgccttttccttagcaacaaagatcatggggaccccactggcgcctggaacatctccctagcaaccgtgaagcaccttgttattagggatgataaccacaacttccctggcaactgcagtgtccgacaatttagaagggaccatccttggcggcttctctgaatatactgagcttggttgctaaaggactcatagcttagcaaccatagcccttcaaggcttttcatggctgtggcgggccccattaggtaccaaaagaagaagaaccccattgtcagtggactgtaccacccagcccacccaccttcctaccctacaggcaccctctgggccaccctcccttgctgccctagcaagtctgacagccagagggccattgcctggccaggatcccttccttagcatccggggctgggacactagcaggcgtcgggagggggcctggctgagctgcatgtctgtcccccaccctcatcctccaccccccagtccggagaaggcggcttccttggagtatgactatgagaccatccgcaacatcgactgctacagcacagatttctgcgtgcgggtgcgcgatggcatgcggtactggaacatgacggtgcagtggtggctggcgcagtatatctacaagagcgcacctgcccgttcctatgtcctgcggagcgcctggaccatgctgctgagcgcctactggcacggcctccacccgggctactacctgagcttcctgaccatcccgctgtgcctggctgccgagggccggctggagtcagccctgcgggggcggctgagcccagggggccagaaggcctgggactgggtgcactggttcctgaagatgcgcgcctatgactacatgtgcatgggcttcgtgctgctctccttggccgacacccttcggtactgggcctccatctacttctgtatccacttcctggccctggcagccctggggctggggctggctttaggtgggggcagccccagccggcggaaggcagcatcccagcccaccagccttgccccggagaagctccgggaggagtaagctgtcacgacgctccctctgccagctggtcccgggaattctgtgaaccaggctgctgtctcctccccagaaagagtccttaccttggagagggtcctggagagaatttcctcttccccagctaaataccctgcctgcaactgaagcagacccgggggtgtcctccctgccctctgcccagaggccacctccactcctacaaaatcaaagtattgtccagacaagagtcactggcccctgctccagcttctgggtatccagagagcactgcacttccccaaaacggaaggggcccctgggcagtgggttttgggcaaattccctttctttgcatccacaatgtggggtcggagcttgggggcaggtcctgggagtgggaagcctcttccttgtgtctttcgctccacttttagctcatcgcaccaatattgcagacttggaaggaagcataagcttcccatttcacaaaggggaaactgaggtgcgggtgcgcgggcctggggacggccgtcccatggcttccatctgagccacctcgggaccccagcactcctggcgccctcttctcatcgcttggcctatgacaggtcaccgtgtgtaaatctttcccaataaagtgttgcac

SEQ ID NO: 12071 - DNA, 707 bp, Homo sapiens
  source 1..707: mol_type = unassigned DNA
cacactttgcattctctggtcaccatcctcgggacctgggccctcattcaggcccagccctgctcctgccacgccctggctctggcctggactttctcctatctcctgttcttccgagccctcagcctcctgggcctgcccactcccacgcccttcaccaatgccgtccagctgctgctgacgctgaagctggtgagcctggccagtgaagtccaggacctgcatctggcccagaggaaggaaatggcctcaggcttcagcaaggggcccaccctggggctgctgcccgacgtgccctccctgatggagacactcagctacagctactgctacgtgggaatcatgacaggagcgcctggaccatgctgctgagcgcctactggcacggcctccacccgggctactacctgagcttcctgaccatcccgctgtgcctggctgccgagggccggctggagtcagccctgcgggggcggctgagcccagggggccagaaggcctgggactgggtgcactggttcctgaagatgcgcgcctatgactacatgtgcatgggcttcgtgctgctctccttggccgacacccttcggtactgggcctccatctacttctgtatccacttcctggccctggcagccctggggctggggctggctttaggtgggggcagccccagccggcggaaggcagcatcccagcccaccagc

SEQ ID NO: 12072 - DNA, 1797 bp, Homo sapiens
  source 1..1797: mol_type = unassigned DNA
cccgtctgttccccttcgggtccaaagcttttggctcctccttgttccgagcccgaaggcccgccccttcacgtactcggagctcggatcccagtgtggacctggactcgaatcccgttgccgactcgcgctctcggcttctgctccggggcttcttccctgcccgcccggggccctgaccgtggcttcttccccggcctgatctgcgcagcccggcgggcgcccagaaggagcaggcggcgcgggggcgcgctgggcgggggaggcgtggccggagctgcggcggcaagcgggctgggactgctcggccgcctcctgcccggcgagcagctcagaccatgtcgcctgaagaatggacgtatctagtggttcttcttatctccatccccatcggcttcctctttaagaaagccggtcctgggctgaagagatggggagcagccgctgtgggcctggggctcaccctgttcacctgtggcccccacactttgcattctctggtcaccatcctcgggacctgggccctcattcaggcccagccctgctcctgccacgccctggctctggcctggactttctcctatctcctgttcttccgagccctcagcctcctgggcctgcccactcccacgcccttcaccaatgccgtccagctgctgctgacgctgaagctggtgagcctggccagtgaagtccaggacctgcatctggcccagaggaaggaaatggcctcaggcttcagcaaggggcccaccctggggctgctgcccgacgtgccctccctgatggagacactcagctacagctactgctacgtgggaatcatgacaggcccgttcttccgctaccgcacctacctggactggctggagcagcccttccccggggcagtgcccagcctgcggcccctgctgcgccgcgcctggccggccccgctcttcggcctgctgttcctgctctcctctcacctcttcccgctggaggccgtgcgcgaggacgccttctacgcccgcccgctgcccgcccgcctcttctacatgatccccgtcttcttcgccttccgcatgcgcttctacgtggcctggattgccgccgagtgcggctgcattgccgccggctttggggcctaccccgtggccgccaaagcccgggccggaggcggccccaccctccaatgcccaccccccagcagtccggagaaggcggcttccttggagtatgactatgagaccatccgcaacatcgactgctacagcacagatttctgcgtgcgggtgcgcgatggcatgcggtactggaacatgacggtgcagtggtggctggcgcagtatatctacaagagcgcacctgcccgttcctatgtcctgcggtgagtgagcccgcccagtctcaggtgacactgcagaactacatctcccagcaggccccagggtagcctgcagcgtccctggctgggcccctgcccccggaggctcatgggaattgtagtttgtttagcctggttttgccctgcctctaattatagtggcagcatgccggtgtaaaatcgttccccctctcggggcctcagttgctacttctgtaaagtcagcctcactcagcagaagcaatgtactgagtcctgtggactcaatagccagccttcctggaatcttggccgtccaggttatggagaaaccttgaggagttagttgacctcttagttgcctcaagtgttgaatggagtgaatgctatttattactggtttcataggtagatagaaggactaaatgtgataaaatgtgaaatgtatttaa

SEQ ID NO: 12073 - DNA, 1585 bp, Homo sapiens
  source 1..1585: mol_type = unassigned DNA
ggaaggaaatggcctcaggcttcagcaaggggcccaccctggggctgctgcccgacgtgccctccctgatggagacactcagctacagctactgctacgtgggaatcatgacaggcccgttcttccgctaccgcacctacctggactggctggagcagcccttccccggggcagtgcccagcctgcggcccctgctgcgccgcgcctggccggccccgctcttcggcctgctgttcctgctctcctctcacctcttcccgctggaggccgtgcgcgaggacgccttctacgcccgcccgctgcccgcccgcctcttctacatgatccccgtcttcttcgccttccgcatgcgcttctacgtggcctggattgccgccgagtgcggctgcattgccgccggctttggggcctaccccgtggccgccaaagcccgggccggaggcggccccaccctccaatgcccaccccccagcaggtcaggcggcgcgagggaggcttcccaagacccagcagcccccacctccaagggctggctctgcccctagccgggaggagagcggggagcaaggggccagggccaccacctttttgagcagagtgtcgccccctcggcaaccatggcctgccagcccctgtcggtagggaaaagatccctggtactgacagatgccccttgttgctagcgcttgtcaccccgcagtgtggtgaactgccccctgtcgctaggaaaaggtggtaacttagcaaccctgtgccacccctctgttgccacagaagtgtcaccccccagaaccagattgttcctgcttgctggggatgccatcctttgctagtggtgggtcaccctctgttgctagggaaacggttccctagcaacagaacgccactatttgctagggaagcaggatccctagcaacagtagctcacctcctttttaccagaagttttgctctgttgctgcagatacggcactccctgcactgcccctttgttgctaggagctagcactgctccaccccgtgggatgtcctcacatagcagccctcagcagccctctgcaaggaaatagcaatttccaatccctgaccagtgctgttccccagcagagggcacgccattcctaccaactacagttacactgttgctaaggaagccaaacctccccctggaaactatgggttgacccttgttgccagagaggctccaccccccggcacctgcattgctaggcaagtcgcacggccatagctgtggactctcttgtggctgaggaagtattgcccccgtgttgctagggagatggcacccccggcaaccaggagtagactgcccttgtgttcctgacagctgcagtcagccttcccccaggggcttggactgcggctgggggaacagcctgttgatgtaaatgatgaactactactccctgctagggttgtcccctagtcgtcacaaactgccattctgttgtgggggtagtgacacccccacgggaatttgttaccactgccctaataaccgtgccctgacctccagctgctagagagaggatgtccccctagtaaagccaagcaggaattgaag

SEQ ID NO: 12074 - DNA, 876 bp, Homo sapiens
  source 1..876: mol_type = unassigned DNA
cggcggcagggtctctgcgggctggcgggtgcggggcggccccggaggcgcgttggaactcggggctggcgcaaccgcctgtggctctgccggggatgcgctgggaccatgtcgcctgaagaatggacgtatctagtggttcttcttatctccatccccatcggcttcctctttaagaaagccggtcctgggctgaagagatggggagcagccgctgtgggcctggggctcaccctgttcacctgtggcccccacactttgcattctctggtcaccatcctcgggacctgggccctcattcaggcccagccctgctcctgccacgccctggctctggcctggactttctcctatctcctgttcttccgagccctcagcctcctgggcctgcccactcccacgcccttcaccaatgccgtccagctgctgctgacgctgaagctggtgagcctggccagtgaagtccaggacctgcatctggcccagaggaaggaaatggcctcaggcttcagcaaggggcccaccctggggctgctgcccgacgtgccctccctgatggagacactcagctacagctactgctacgtgggaatcatgacaggcccgttcttccgctaccgcacctacctggactggctggagcagcccttccccggggcagtgcccagcctgcggcccctgctgcgccgcgcctggccggccccgctcttcggcctgctgttcctgctctcctctcacctcttcccgctggaggccgtgcgcgaggacgccttctacgcccgcccgctgcccgcccgcctcttctacatgatccccgtcttcttcgccttccgcatgcgcttctacgtggcctggattgccgccgagtgcggctgc

SEQ ID NO: 12075 - DNA, 557 bp, Homo sapiens
  source 1..557: mol_type = unassigned DNA
agctcaggtgggccagggtggcggcgcccagtggcgaggcgagaccatgtcgcctgaagaatggacgtatctagtggttcttcttatctccatccccatcggcttcctctttaagaaagccggtcctgggctgaagagatggggagcagccgctgtgggcctggggctcaccctgttcacctgtggcccccacactttgcattctctggtcaccatcctcgggacctgggccctcattcaggcccagccctgctcctgccacgccctggctctggcctggactttctcctatctcctgttcttccgagccctcagcctcctgggcctgcccactcccacgcccttcaccaatgccgtccagctgctgctgacgctgaagctggtgagcctggccagtgaagtccaggacctgcatctggcccagaggaaggaaatggcctcaggcttcagcaaggggcccaccctggggctgctgcccgacgtgccctccctgatggagacactcagctacagctactgctacgtgggaatcatgacaggcccgttcttccgctacc

SEQ ID NO: 12076 - DNA, 493 bp, Homo sapiens
  source 1..493: mol_type = unassigned DNA
agtggaaaataaaggggggggaccctctggaaggttccaggcttatgctgtcccttccccctgcaggtcctgggctgaagagatggggagcagccgctgtgggcctggggctcaccctgttcacctgtggcccccacactttgcattctctggtcaccatcctcgggacctgggccctcattcaggcccagccctgctcctgccacgccctggctctggcctggactttctcctatctcctgttcttccgagccctcagcctcctgggcctgcccactcccacgcccttcaccaatgccgtccagctgctgctgacgctgaagctggtgagcctggccagtgaagtccaggacctgcatctggcccagaggaaggaaatggcctcaggcttcagcaaggggcccaccctggggctgctgcccgacgtgccctccctgatggagacactcagctacagctactgctacgtgggaatcatgacaggcccgttctt

SEQ ID NO: 12077 - DNA, 629 bp, Homo sapiens
  source 1..629: mol_type = unassigned DNA
actcgcgctctcggcttctgctccggggcttcttccctgcccgcccggggccctgaccgtggcttcttccccggcctgatctgcgcagcccggcgggcgcccagaaggagcaggcggcgcgggggcgcgctgggcgggggaggcgtggccggagctgcggcggcaagcgggctgggactgctcggccgcctcctgcccggcgagcagctcaggtcctgggctgaagagatggggagcagccgctgtgggcctggggctcaccctgttcacctgtggcccccacactttgcattctctggtcaccatcctcgggacctgggccctcattcaggcccagccctgctcctgccacgccctggctctggcctggactttctcctatctcctgttcttccgagccctcagcctcctgggcctgcccactcccacgcccttcaccaatgccgtccagctgctgctgacgctgaagctggtgagcctggccagtgaagtccaggacctgcatctggcccagaggaaggaaatggcctcaggcttcagcaaggggcccaccctggggctgctgcccgacgtgccctccctgatggagacactcagctacagctactgctacgtgggaatcatgacag

SEQ ID NO: 12078 - DNA, 564 bp, Homo sapiens
  source 1..564: mol_type = unassigned DNA
ctcctgcccggcgagcagctcagaccatgtcgcctgaagaatggacgtatctagtggttcttcttatctccatccccatcggcttcctctttaagaaagccggtcctgggctgaagagatggggagcagccgctgtgggcctggggctcaccctgttcacctgtggcccccacactttgcattctctggtcaccatcctcgggacctgggccctcattcaggcccagccctgctcctgccacgccctggctctggcctggactttctcctatctcctgttcttccgagccctcagcctcctgggcctgcccactcccacgcccttcaccaatgccgtccagctgctgctgacgctgaaggtcagactcggggcttgccactcccctccagcctccctgtgggccccttcacctcccactttacctcccccttcagtggctccccgggattttacctccaacacaccctgggggtgggacgtcacctcacttgctgccctgggcacagcattccccattcacatgcccttgggcaggtcttcacctcccagctcctcctggggtg

SEQ ID NO: 12079 - DNA, 465 bp, Homo sapiens; identical to SEQ ID NO: 12060
  source 1..465: mol_type = unassigned DNA

SEQ ID NO: 12080 - DNA, 2471 bp, Homo sapiens
  source 1..2471: mol_type = unassigned DNA
taaggactcgactacctccgaagaaagccgaaacatgtggctccgcccacagtggcctcagctctccgttctcgactattgccgaagtgagccgaagtttgtggccccgcttccggagaactcaagctcccgattgtgcccgaaggaacccgaagggagaccccgcctcattcctcacgccgagctccagaccccgcctcctttccagagcccgtctgttccccttcgggtccaaagcttttggctcctccttgttccgagcccgaaggcccgccccttcacgtactcggagctcggatcccagtgtggacctggactcgaatcccgttgccgactcgcgctctcggcttctgctccggggcttcttccctgcccgcccggggccctgaccgtggcttcttccccggcctgatctgcgcagcccggcgggcgcccagaaggagcaggcggcgcgggggcgcgctgggcgggggaggcgtggccggagctgcggcggcaagcgggctgggactgctcggccgcctcctgcccggcgagcagctcagaccatgtcgcctgaagaatggacgtatctagtggttcttcttatctccatccccatcggcttcctctttaagaaagccggtcctgggctgaagagatggggagcagccgctgtgggcctggggctcaccctgttcacctgtggcccccacactttgcattctctggtcaccatcctcgggacctgggccctcattcaggcccagccctgctggtgagcctggccagtgaagtccaggacctgcatctggcccagaggaaggaaatggcctcaggcttcagcaaggggcccaccctggggctgctgcccgacgtgccctccctgatggagacactcagctacagctactgctacgtgggaatcatgacaggcccgttcttccgctaccgcacctacctggactggctggagcagcccttccccggggcagtgcccagcctgcggcccctgctgcgccgcgcctggccggccccgctcttcggcctgctgttcctgctctcctctcacctcttcccgctggaggccgtgcgcgaggacgccttctacgcccgcccgctgcccgcccgcctcttctacatgatccccgtcttcttcgccttccgcatgcgcttctacgtggcctggattgccgccgagtgcggctgcattgccgccggctttggggcctaccccgtggccgccaaagcccgggccggaggcggccccaccctccaatgcccaccccccagcagtccggagaaggcggcttccttggagtatgactatgagaccatccgcaacatcgactgctacagcacagatttctgcgtgcgggtgcgcgatggcatgcggtactggaacatgacggtgcagtggtggctggcgcagtatatctacaagagcgcacctgcccgttcctatgtcctgcggagcgcctggaccatgctgctgagcgcctactggcacggcctccacccgggctactacctgagcttcctgaccatcccgctgtgcctggctgccgagggccggctggagtcagccctgcgggggcggctgagcccagggggccagaaggcctgggactgggtgcactggttcctgaagatgcgcgcctatgactacatgtgcatgggcttcgtgctgctctccttggccgacacccttcggtactgggcctccatctacttctgtatccacttcctggccctggcagccctggggctggggctggctttaggtgggggcagccccagccggcggaaggcagcatcccagcccaccagccttgccccggagaagctccgggaggagtaagctgtcacgacgctccctctgccagctggtcccgggaattctgtgaaccaggctgctgtctcctccccagaaagagtccttaccttggagagggtcctggagagaatttcctcttccccagctaaataccctgcctgcaactgaagcagacccgggggtgtcctccctgccctctgcccagaggccacctccactcctacaaaatcaaagtattgtccagacaagagtcactggcccctgctccagcttctgggtatccagagagcactgcacttccccaaaacggaaggggcccctgggcagtgggttttgggcaaattccctttctttgcatccacaatgtggggtcggagcttgggggcaggtcctgggagtgggaagcctcttccttgtgtctttcgctccacttttagctcatcgcaccaatattgcagacttggaaggaagcataagcttcccatttcacaaaggggaaactgaggtgcgggtgcgcgggcctggggacggccgtcccatggcttccatctgagccacctcgggaccccagcactcctggcgccctcttctcatcgcttggcctatgacaggtcaccgtgtgtaaatctttcccaataaagtgttgcacaaaggc

SEQ ID NO: 12081 - DNA, 2030 bp, Homo sapiens; identical to SEQ ID NO: 12057
  source 1..2030: mol_type = unassigned DNA

SEQ ID NO: 12082 - DNA, 2596 bp, Homo sapiens; identical to SEQ ID NO: 12054
  source 1..2596: mol_type = unassigned DNA

SEQ ID NO: 12083 - DNA, 3039 bp, Homo sapiens; identical to SEQ ID NO: 12056
  source 1..3039: mol_type = unassigned DNA

SEQ ID NO: 12084 - DNA, 919 bp, Homo sapiens; identical to SEQ ID NO: 12065
  source 1..919: mol_type = unassigned DNA

SEQ ID NO: 12085 - DNA, 1797 bp, Homo sapiens; identical to SEQ ID NO: 12072
  source 1..1797: mol_type = unassigned DNA

SEQ ID NO: 12086 - DNA, 923 bp, Homo sapiens
  source 1..923: mol_type = unassigned DNA
ggaaggaaatggcctcaggcttcagcaaggggcccaccctggggctgctgcccgacgtgccctccctgatggagacactcagctacagctactgctacgtgggaatcatgacaggcccgttcttccgctaccgcacctacctggactggctggagcagcccttccccggggcagtgcccagcctgcggcccctgctgcgccgcgcctggccggccccgctcttcggcctgctgttcctgctctcctctcacctcttcccgctggaggccgtgcgcgaggacgccttctacgcccgcccgctgcccgcccgcctcttctacatgatccccgtcttcttcgccttccgcatgcgcttctacgtggcctggattgccgccgagtgcggctgcattgccgccggctttggggcctaccccgtggccgccaaagcccgggccggaggcggccccaccctccaatgcccaccccccagcaggtcaggcggcgcgagggaggcttcccaagacccagcagcccccacctccaagggctggctctgcccctagccgggaggagagcggggagcaaggggccagggccaccacctttttgagcagagtgtcgccccctcggcaaccatggcctgccagcccctgtcggtagggaaaagatccctggtactgacagatgccccttgttgctagcgcttgtcaccccgcagtgtggtgaactgccccctgtcgctaggaaaaggtggtaacttagcaaccctgtgccacccctctgttgccacagaagtgtcaccccccagaaccagattgttcctgcttgctggggatgccatcctttgctagtggtgggtcaccctctgttgctagggaaacggttccctagcaacagaacgccactatttgctagggaagcaggatccctagcaacagtag

SEQ ID NO: 12087 - DNA, 911 bp, Homo sapiens; identical to SEQ ID NO: 12059
  source 1..911: mol_type = unassigned DNA

SEQ ID NO: 12088 - DNA, 600 bp, Homo sapiens; identical to SEQ ID NO: 12062
  source 1..600: mol_type = unassigned DNA

SEQ ID NO: 12089 - DNA, 564 bp, Homo sapiens; identical to SEQ ID NO: 12058
  source 1..564: mol_type = unassigned DNA

SEQ ID NO: 12090 - DNA, 544 bp, Homo sapiens; identical to SEQ ID NO: 12063
  source 1..544: mol_type = unassigned DNA

SEQ ID NO: 12091 - DNA, 465 bp, Homo sapiens; identical to SEQ ID NO: 12060
  source 1..465: mol_type = unassigned DNA

SEQ ID NO: 12092 - DNA, 556 bp, Homo sapiens; identical to SEQ ID NO: 12061
  source 1..556: mol_type = unassigned DNA

SEQ ID NO: 12093 - DNA, 2392 bp, Homo sapiens; identical to SEQ ID NO: 12066
  source 1..2392: mol_type = unassigned DNA

SEQ ID NO: 12094 - DNA, 2033 bp, Homo sapiens
  source 1..2033: mol_type = unassigned DNA
ggagcaggcggcgcgggggcgcgctgggcgggggaggcgtggccggagctgcggcggcaagcgggctgggactgctcggccgcctcctgcccggcgagcagctcagaccatgtcgcctgaagaatggacgtatctagtggttcttcttatctccatccccatcggcttcctctttaagaaagccggtcctgggctgaagagatggggagcagccgctgtgggcctggggctcaccctgttcacctgtggcccccacactttgcattctctggtcaccatcctcgggacctgggccctcattcaggcccagccctgctggtgagcctggccagtgaagtccaggacctgcatctggcccagaggaaggaaatggcctcaggcttcagcaaggggcccaccctggggctgctgcccgacgtgccctccctgatggagacactcagctacagctactgctacgtgggaatcatgacaggcccgttcttccgctaccgcacctacctggactggctggagcagcccttccccggggcagtgcccagcctgcggcccctgctgcgccgcgcctggccggccccgctcttcggcctgctgttcctgctctcctctcacctcttcccgctggaggccgtgcgcgaggacgccttctacgcccgcccgctgcccgcccgcctcttctacatgatccccgtcttcttcgccttccgcatgcgcttctacgtggcctggattgccgccgagtgcggctgcattgccgccggctttggggcctaccccgtggccgccaaagcccgggccggaggcggccccaccctccaatgcccaccccccagcagtccggagaaggcggcttccttggagtatgactatgagaccatccgcaacatcgactgctacagcacagatttctgcgtgcgggtgcgcgatggcatgcggtactggaacatgacggtgcagtggtggctggcgcagtatatctacaagagcgcacctgcccgttcctatgtcctgcggagcgcctggaccatgctgctgagcgcctactggcacggcctccacccgggctactacctgagcttcctgaccatcccgctgtgcctggctgccgagggccggctggagtcagccctgcgggggcggctgagcccagggggccagaaggcctgggactgggtgcactggttcctgaagatgcgcgcctatgactacatgtgcatgggcttcgtgctgctctccttggccgacacccttcggtactgggcctccatctacttctgtatccacttcctggccctggcagccctggggctggggctggctttaggtgggggcagccccagccggcggaaggcagcatcccagcccaccagccttgccccagagaagctccgggaggagtaagctgtcacgacgctccctctgccagctggtcccgggaattctgtgaaccaggctgctgtctcctccccagaaagagtccttaccttggagagggtcctggagagaatttcctcttccccagctaaataccctgcctgcaactgaagcagacccgggggtgtcctccctgccctctgcccagaggccacctccactcctacaaaatcaaagtattgtccagacaagagtcactggcccctgctccagcttctgggtatccagagagcactgcacttccccaaaacggaaggggcccctgggcagtgggttttgggcaaattccctttctttgcatccacaatgtggggtcggagcttgggggcaggtcctgggagtgggaagcctcttccttgtgtctttcgctccacttttagctcatcgcaccaatattgcagacttggaaggaagcataagcttcccatttcacaaaggggaaactgaggtgcgggtgcgcgggcctggggacggccgtcccatggcttccatctgagccacctcgggaccccagcgctcctggcgccctcttctcatcgcttggcctatgacaggtcaccgtgtgtaaatctttcccaataaagtgttgcacaaaggca

SEQ ID NO: 12095 - DNA, 2076 bp, Homo sapiens
  source 1..2076: mol_type = unassigned DNA
gactcgaatcccgttgccgactcgcgctctcggcttctgctccggggcttcttccctgcccgcccggggccctgaccgtggcttcttccccggcctgatctgcgcagcccggcgggcgcccagaaggagcaggcggcgcgggggcgcgctgggcgggggaggcgtggccggagctgcggcggcaagcgggctgggactgctcggccgcctcctgcccggcgagcagctcaggtcctgggctgaagagatggggagcagccgctgtgggcctggggctcaccctgttcacctgtggcccccacactttgcattctctggtcaccatcctcgggacctgggccctcattcaggcccagccctgctggtgagcctggccagtgaagtccaggacctgcatctggcccagaggaaggaaatggcctcaggcttcagcaaggggcccaccctggggctgctgcccgacgtgccctccctgatggagacactcagctacagctactgctacgtgggaatcatgacaggcccgttcttccgctaccgcacctacctggactggctggagcagcccttccccggggcagtgcccagcctgcggcccctgctgcgccgcgcctggccggccccgctcttcggcctgctgttcctgctctcctctcacctcttcccgctggaggccgtgcgcgaggacgccttctacgcccgcccgctgcccgcccgcctcttctacatgatccccgtcttcttcgccttccgcatgcgcttctacgtggcctggattgccgccgagtgcggctgcattgccgccggctttggggcctaccccgtggccgccaaagcccgggccggaggcggccccaccctccaatgcccaccccccagcagtccggagaaggcggcttccttggagtatgactatgagaccatccgcaacatcgactgctacagcacagatttctgcgtgcgggtgcgcgatggcatgcggtactggaacatgacggtgcagtggtggctggcgcagtatatctacaagagcgcacctgcccgttcctatgtcctgcggagcgcctggaccatgctgctgagcgcctactggcacggcctccacccgggctactacctgagcttcctgaccatcccgctgtgcctggctgccgagggccggctggagtcagccctgcgggggcggctgagcccagggggccagaaggcctgggactgggtgcactggttcctgaagatgcgcgcctatgactacatgtgcatgggcttcgtgctgctctccttggccgacacccttcggtactgggcctccatctacttctgtatccacttcctggccctggcagccctggggctggggctggctttaggtgggggcagccccagccggcggaaggcagcatcccagcccaccagccttgccccagagaagctccgggaggagtaagctgtcacgacgctccctctgccagctggtcccgggaattctgtgaaccaggctgctgtctcctccccagaaagagtccttaccttggagagggtcctggagagaatttcctcttccccagctaaataccctgcctgcaactgaagcagacccgggggtgtcctccctgccctctgcccagaggccacctccactcctacaaaatcaaagtattgtccagacaagagtcactggcccctgctccagcttctgggtatccagagagcactgcacttccccaaaacggaaggggcccctgggcagtgggttttgggcaaattccctttctttgcatccacaatgtggggtcggagcttgggggcaggtcctgggagtgggaagcctcttccttgtgtctttcgctccacttttagctcatcgcaccaatattgcagacttggaaggaagcataagcttcccatttcacaaaggggaaactgaggtgcgggtgcgcgggcctggggacggccgtcccatggcttccatctgagccacctcgggaccccagcgctcctggcgccctcttctcatcgcttggcctatgacaggtcaccgtgtgtaaatctttcccaataaagtgttgcacaaag

SEQ ID NO: 12096 - DNA, 2529 bp, Homo sapiens
  source 1..2529: mol_type = unassigned DNA
gttctcgactattgccgaagtgagccgaagtttgtggccccgcttccggagaactcaagctcccgattgtgcccgaaggaacccgaagggagaccccgcctcattcctcacggcgagctccagaccccgcctcctttccggagcccgtctgttccccttcgggtccaaagcttttggctcctccttgttccgagcccgaaggcccgccccttcacgtactcggagctcggatcccagtgtggacctggactcgaatcccgttgccgactcgcgctctcggcttctgctccggggcttcttccctgcccgcccggggccctgaccgtggcttcttccccggcctgatctgcgcagcccggcgggcgcccagaaggagcaggcggcgcgggggcgcgctgggcgggggaggcgtggccggagctgcggcggcaagcgggctgggactgctcggccgcctcctgcccggcgagcagctcagaccatgtcgcctgaagaatggacgtatctagtggttcttcttatctccatccccatcggcttcctctttaagaaagccggtcctgggctgaagagatggggagcagccgctgtgggcctggggctcaccctgttcacctgtggcccccacactttgcattctctggtcaccatcctcgggacctgggccctcattcaggcccagccctgctcctgccacgccctggctctggcctggactttctcctatctcctgttcttccgagccctcagcctcctgggcctgcccactcccacgcccttcaccaatgccgtccagctgctgctgacgctgaagctggtgagcctggccagtgaagtccaggacctgcatctggcccagaggaaggaaatggcctcaggcttcagcaaggggcccaccctggggctgctgcccgacgtgccctccctgatggagacactcagctacagctactgctacgtgggaatcatgacaggcccgttcttccgctaccgcacctacctggactggctggagcagcccttccccggggcagtgcccagcctgcggcccctgctgcgccgcgcctggccggccccgctcttcggcctgctgttcctgctctcctctcacctcttcccgctggaggccgtgcgcgaggacgccttctacgcccgcccgctgcccgcccgcctcttctacatgatccccgtcttcttcgccttccgcatgcgcttctacgtggcctggattgccgccgagtgcggctgcattgccgccggctttggggcctaccccgtggccgccaaagcccgggccggaggcggccccaccctccaatgcccaccccccagcagtccggagaaggcggcttccttggagtatgactatgagaccatccgcaacatcgactgctacagcacagatttctgcgtgcgggtgcgcgatggcatgcggtactggaacatgacggtgcagtggtggctggcgcagtatatctacaagagcgcacctgcccgttcctatgtcctgcggagcgcctggaccatgctgctgagcgcctactggcacggcctccacccgggctactacctgagcttcctgaccatcccgctgtgcctggctgccgagggccggctggagtcagccctgcgggggcggctgagcccagggggccagaaggcctgggactgggtgcactggttcctgaagatgcgcgcctatgactacatgtgcatgggcttcgtgctgctctccttggccgacacccttcggtactgggcctccatctacttctgtatccacttcctggccctggcagccctggggctggggctggctttaggtgggggcagccccagccggcggaaggcagcatcccagcccaccagccttgccccagagaagctccgggaggagtaagctgtcacgacgctccctctgccagctggtcccgggaattctgtgaaccaggctgctgtctcctccccagaaagagtccttaccttggagagggtcctggagagaatttcctcttccccagctaaataccctgcctgcaactgaagcagacccgggggtgtcctccctgccctctgcccagaggccacctccactcctacaaaatcaaagtattgtccagacaagagtcactggcccctgctccagcttctgggtatccagagagcactgcacttccccaaaacggaaggggcccctgggcagtgggttttgggcaaattccctttctttgcatccacaatgtggggtcggagcttgggggcaggtcctgggagtgggaagcctcttccttgtgtctttcgctccacttttagctcatcgcaccaatattgcagacttggaaggaagcataagcttcccatttcacaaaggggaaactgaggtgcgggtgcgcgggcctggggacggccgtcccatggcttccatctgagccacctcgggaccccagcgctcctggcgccctcttctcatcgcttggcctatgacaggtcaccgtgtgtaaatctttcccaataaagtgttgcacaaag

SEQ ID NO: 12097 - DNA, 3039 bp, Homo sapiens
  source 1..3039: mol_type = unassigned DNA
atgcccaccccccagcaggtcaggcggcgcgagggaggcttcccaagacccagcagcccccacctccaagggctggctctgcccctagccgggaggagagcggggagcaaggggccagggccaccacctttttgagcagagtgtcgccccctcggcaaccatggcctgccagcccctgtcggtagggaaaagatccctggtactgacagatgccccttgttgctagcgcttgtcaccccgcagtgtggtgaactgccccctgtcgctaggaaaaggtggtaacttagcaaccctgtgccacccctctgttgccacagaagtgtcaccccccagaaccagattgttcctgcttgctggggatgccatcctttgctagtggtgggtcaccctctgttgctagggaaacggttccctagcaacagaacgccactatttgctagggaagcaggatccctagcaacagtagctcacctcctttttaccagaagttttgctctgttgctgcagatacggcactccctgcactgcccctttgttgctaggagctagcactgctccaccccgtgggatgtcctcacatagcagccctcagcagccctctgcaaggaaatagcaatttccaatccctgaccagtgctgttccccagcagagggcacgccattcctaccaactacagttacactgttgctaaggaagccaaacctccccctggaaactatgggttgacccttgttgccagagaggctccaccccccggcacctgcattgctaggcaagtcgcacggccatagctgtggactctcttgtggctgaggaagtattgcccccgtgttgctagggagatggcacccccggcaaccaggagtagactgcccttgtgttcctgacagctgcagtcagccttcccccaggggcttggactgcggctgggggaacagcctgttgatgtaaatgatgaactactactccctgctagggttgtcccctagtcgtcacaaactgccattctgttgtgggggtagtgacacccccacgggaatttgttaccactgccctaataaccgtgccctgacctccagctgctagagagaggatgtccccctagtaaagccaagcaggaattgaaggtttttctaaatctgctcggtcctcactcctaaaggatggctcccctcctgtcatcagaggccaccaaggcttcatatgggccagtgtttcccactgctggggctgtcgacatgagtgatgagggagccactgtattgctagaggtgacacttctccaataatcactgcgaccaggaaaaaagccccttcctaaaagcctttctaaacatcctaggcattgttgctaaggaatgccttttccttagcaacaaagatcatggggaccccactggcgcctggaacatctccctagcaaccgtgaagcaccttgttattagggatgataaccacaacttccctggcaactgcagtgtccgacaatttagaagggaccatccttggcggcttctctgaatatactgagtttggttgctaaaggactcatagcttagcaaccatagcccttcaaggcttttcatggctgtggcgggccccattaggtaccaaaagaagaagaaccccattgtcagtgaactgtaccacccagcccacccaccttcctaccctacaggcaccctctgggccaccctcccttgctgccctagcaagtctgacagccagagggccattgcctggccaggatcccttccttagcatccggggctgggacactagcaggcgtcgggagggggcctggctgagctgcatgtctgtcccccaccctcatcctccaccccccagtccggagaaggcggcttccttggagtatgactatgagaccatccgcaacatcgactgctacagcacagatttctgcgtgcgggtgcgcgatggcatgcggtactggaacatgacggtgcagtggtggctggcgcagtatatctacaagagcgcacctgcccgttcctatgtcctgcggagcgcctggaccatgctgctgagcgcctactggcacggcctccacccgggctactacctgagcttcctgaccatcccgctgtgcctggctgccgagggccggctggagtcagccctgcgggggcggctgagcccagggggccagaaggcctgggactgggtgcactggttcctgaagatgcgcgcctatgactacatgtgcatgggcttcgtgctgctctccttggccgacacccttcggtactgggcctccatctacttctgtatccacttcctggccctggcagccctggggctggggctggctttaggtgggggcagccccagccggcggaaggcagcatcccagcccaccagccttgccccagagaagctccgggaggagtaagctgtcacgacgctccctctgccagctggtcccgggaattctgtgaaccaggctgctgtctcctccccagaaagagtccttaccttggagagggtcctggagagaatttcctcttccccagctaaataccctgcctgcaactgaagcagacccgggggtgtcctccctgccctctgcccagaggccacctccactcctacaaaatcaaagtattgtccagacaagagtcactggcccctgctccagcttctgggtatccagagagcactgcacttccccaaaacggaaggggcccctgggcagtgggttttgggcaaattccctttctttgcatccacaatgtggggtcggagcttgggggcaggtcctgggagtgggaagcctcttccttgtgtctttcgctccacttttagctcatcgcaccaatattgcagacttggaaggaagcataagcttcccatttcacaaaggggaaactgaggtgcgggtgcgcgggcctggggacggccgtcccatggcttccatctgagccacctcgggaccccagcgctcctggcgccctcttctcatcgcttggcctatgacaggtcaccgtgtgtaaatctttcccaataaagtgttgcac

SEQ ID NO: 12098 - DNA, 707 bp, Homo sapiens; identical to SEQ ID NO: 12071
  source 1..707: mol_type = unassigned DNA

SEQ ID NO: 12099 - DNA, 1797 bp, Homo sapiens; identical to SEQ ID NO: 12072
  source 1..1797: mol_type = unassigned DNA

SEQ ID NO: 12100 - DNA, 1585 bp, Homo sapiens; identical to SEQ ID NO: 12073
  source 1..1585: mol_type = unassigned DNA

SEQ ID NO: 12101 - DNA, 876 bp, Homo sapiens; identical to SEQ ID NO: 12074
  source 1..876: mol_type = unassigned DNA

SEQ ID NO: 12102 - DNA, 557 bp, Homo sapiens; identical to SEQ ID NO: 12075
  source 1..557: mol_type = unassigned DNA

SEQ ID NO: 12103 - DNA, 493 bp, Homo sapiens; identical to SEQ ID NO: 12076
  source 1..493: mol_type = unassigned DNA

SEQ ID NO: 12104 - DNA, 629 bp, Homo sapiens; identical to SEQ ID NO: 12077
  source 1..629: mol_type = unassigned DNA

SEQ ID NO: 12105 - DNA, 564 bp, Homo sapiens; identical to SEQ ID NO: 12078
  source 1..564: mol_type = unassigned DNA

SEQ ID NO: 12106 - DNA, 465 bp, Homo sapiens; identical to SEQ ID NO: 12060
  source 1..465: mol_type = unassigned DNA

SEQ ID NO: 12107 - DNA, 2598 bp, Homo sapiens; identical to SEQ ID NO: 12045
  source 1..2598: mol_type = unassigned DNA

SEQ ID NO: 12108 - DNA, 2471 bp, Homo sapiens; identical to SEQ ID NO: 12046
  source 1..2471: mol_type = unassigned DNA

SEQ ID NO: 12109 - DNA, 2392 bp, Homo sapiens; identical to SEQ ID NO: 12047
  source 1..2392: mol_type = unassigned DNA

SEQ ID NO: 12110 - DNA, 2598 bp, Homo sapiens; identical to SEQ ID NO: 12045
  source 1..2598: mol_type = unassigned DNA

SEQ ID NO: 12111 - DNA, 2471 bp, Homo sapiens; identical to SEQ ID NO: 12046
  source 1..2471: mol_type = unassigned DNA

SEQ ID NO: 12112 - DNA, 2392 bp, Homo sapiens; identical to SEQ ID NO: 12047
  source 1..2392: mol_type = unassigned DNA

SEQ ID NO: 12113 - DNA, 2598 bp, Homo sapiens; identical to SEQ ID NO: 12045
  source 1..2598: mol_type = unassigned DNA

SEQ ID NO: 12114 - DNA, 2471 bp, Homo sapiens; identical to SEQ ID NO: 12046
  source 1..2471: mol_type = unassigned DNA

SEQ ID NO: 12115 - DNA, 2392 bp, Homo sapiens; identical to SEQ ID NO: 12047
  source 1..2392: mol_type = unassigned DNA

SEQ ID NO: 12116 - DNA, 2281 bp, Homo sapiens
  source 1..2281: mol_type = unassigned DNA
aacaccttcaaagacaggccctctgagtccgacgagctccagaccatccaagaagacagtgcagccacctccgagagcctggatgtgatggcgtcacagaagagaccctcccagaggcacggatccaagtacctggccacagcaagtaccatggaccatgccaggcatggcttcctcccaaggcacagagacacgggcatccttgactccatcgggcgcttctttggcggtgacaggggtgcgcccaagcggggctctggcaaggtaccctggctaaagccgggccggagccctctgccctctcatgcccgcagccagcctgggctgtgcaacatgtacaaggactcacaccacccggcaagaactgctcactacggctccctgccccagaagtcacacggccggacccaagatgaaaaccccgtagtccacttcttcaagaacattgtgacgcctcgcacaccacccccgtcgcagggaaaggggagaggactgtccctgagcagatttagctggggggccgaaggccagagaccaggatttggctacggaggcagagcgtccgactataaatcggctcacaagggattcaagggagtcgatgcccagggcacgctttccaaaatttttaagctgggaggaagagatagtcgctctggatcacccatggctagacgctgaaaacccacctggttccggaatcctgtcctcagcttcttaatataactgccttaaaactttaatcccacttgcccctgttacctaattagagcagatgacccctcccctaatgcctgcggagttgtgcacgtagtagggtcaggccacggcagcctaccggcaatttccggccaacagttaaatgagaacatgaaaacagaaaacggttaaaactgtccctttctgtgtgaagatcacgttccttcccccgcaatgtgcccccagacgcacgtgggtcttcagggggccaggtgcacagacgtccctccacgttcacccctccacccttggactttcttttcgccgtggctgcggcacccttgcgcttttgctggtcactgccatggaggcacacagctgcagagacagagaggacgtgggcggcagagaggactgttgacatccaagcttcctttgtttttttttcctgtccttctctcacctcctaaagtagacttcatttttcctaacaggattagacagtcaaggagtggcttactacatgtgggagcttttggtatgtgacatgcgggctgggcagctgttagagtccaacgtggggcagcacagagagggggccacctccccaggccgtggctgcccacacaccccaattagctgaattcgcgtgtggcagagggaggaaaaggaggcaaacgtgggctgggcaatggcctcacataggaaacagggtcttcctggagatttggtgatggagatgtcaagcaggtggcctctggacgtcaccgttgccctgcatggtggccccagagcagcctctatgaacaacctcgtttccaaaccacagcccacagccggagagtccaggaagacttgcgcactcagagcagaagggtaggagtcctctagacagcctcgcagccgcgccagtcgcccatagacactggctgtgaccgggcgtgctggcagcggcagtgcacagtggccagcactaaccctccctgagaagataaccggctcattcacttcctcccagaagacgcgtggtagcgagtaggcacaggcgtgcacctgctcccgaattactcaccgagacacacgggctgagcagacggccccgtggatggagacaaagagctcttctgaccatatccttcttaacacccgctggcatctcctttcgcgcctccctccctaacctactgacccaccttttgattttagcgcacctgtgattgataggccttccaaagagtcccacgctggcatcaccctccccgaggacggagatgaggagtagtcagcgtgatgccaaaacgcgtcttcttaatccaattctaattctgaatgtttcgtgtgggcttaataccatgtctattaatatatagcctcgatgatgagagagttacaaagaacaaaactccagacacaaacctccaaatttttcagcagaagcactctgcgtcgctgagctgaggtcggctctgcgatccatacgtggccgcacccacacagcacgtgctgtgacgatggctgaacggaaagtgtacactgttcctgaatattgaaataaaacaataaacttttaatggtatttgca

SEQ ID NO: 12117 - DNA, 4820 bp, Homo sapiens
  source 1..4820: mol_type = unassigned DNA
atagatatcaagccatccagaaaatcttccttaggaattttaggctggttaatactgaaagcaaactttcaaggaaggtttaaaatggccaatttgaactttctagtgaaaaaatttggtgtctgagccaaattaaaatgccaatcattatattctaaccaaacttacagactttagttactagcaaataccagatatgattcttactgtataaaagttataattttagaataaaatggaggaataaccaccaacgtattgtagataggttgtgtctgtctccgaaactgcaatgctctcatacgctagaacagagcctacctacactttctgctcaattaataagcatcatataaatgaatgaatacattttaaaagaaaaacaacaaggagaaagaacaggaagaaagaacagggaaagaaaacagaaggtggggaagaggaaggaagagagggaggaaggggcagggtacttgagagaccatgaggatcccagatcagtcccacacatgattacactgaattatgaactaagatatttaccgaaacgttttccattaatgcatatttgacttgctttttctgacctaatgaatttgcaaaacgatgacaatcatgtagcaaatgtacatggactagtactcacaattaattttttattttctatgccagcaggagacaaagatgatagaagaatgaaattcatttttgacccagaaatcttattttagctactgctttatctgctcttaattttctaggagtggactttggggccgtcgtgccggatcctccctgaatgtggagcgatggggggttgcacacaggccgttctgccccagcagctaacaagaaagacccttgcattcctccctgcatctctcccttttgggtcctactaatgtctgttgaatttctcttttttccaaagcaaaatccttctctgcattttgtctgcttgtctgtttcccagagccgcaggactctctccttgtctggagttccagagagcccccactttctctttctaagctgtgttgtgtgtttcctggtacattctaggttccccaaagataaacatgactaaggattggaaaggaggaaaggccgcgcagattgttaatctgaaagtcaatccccggatttagctctcaaaaatgctttatttttggagaaaagcaatagagtaagacagaaggacttaacgcttgcagggaagtggctttctgccatgtagagccaggctggcaacctgccctctgccatcagggagtgagcatgaacctggaaacctctaggacgcaagagcgaggctggctgtcccctcgtgtgcagtgcttagaccttcttgccacacatcccgtccctcacctcactggatagcccccgaatcaactgttcacacgaaagcagctgcctggttctgagtggccatgctcactcccaagcacaggctgaatgaaaagaaaactgtgcaagtagcttgtatggtgggaagcccccagcagaggctgagggtgcagccaggtgctctggaagccttgaggcctctggtgtcatcttcctcacctctaaataagagatgggctaggttggtcaaggtcctccctgtcctaaaacactttaatgaaatggaagaaaggctgcaggctgatagaggagggacagtctggtttggttccctcaagtcttcaggagagggctcaaggacagtctcccatttcttgttggcaaaatgtaaagtgcagtctggaccctgtccattgagtagagactcaggaggccaaccaagatccctgaaaagctaacagcgtggtcagccttcccacagacagtgcacccaccgtgggaggacacttcgccccccattgttaacgtccaccgcgcccagactcccacagcgagctccttcccttcctccccatgtttgcagtggagttcccactcgagaagacagcacagtagcaagtagaggctggtcctgggacactcgcacccatgtgtgtcaggaagcccctgcggtcacacggcccatgaggaagccagaggggctgctggggctgatgaggccagggcagggcggcctgctcttccataaatgacagctggcaccaaagcccagagctggcagcctccacctgaggagtggcatctccatgaacggcttgtgttctcgcacagccccattgcgtagatgaggaaactgaagctcagagaggttcctgcccttgcccaaggccacacagccggatgagctagaaaggtgctaggggactgggaggtgggggagctgagacgctgtcccgctgctgccaggatgcggccgccccccgtgccagccaggcctgcctcctccctctgtccggctcagcagccccggcctcctgttgctcccagtccgagctatggccaagggagactgattcctgctcaccctgggagagagctcaggattttgtctcaaaaccttataaaagatacgaggctcgacattttactaaggccgaggactcttgatctcccagacagatcctagaaccacagggcacatgtgaccagaatccaatctgtgcaaatcaatcagcaaaaggagcccccagcaaaggcgcaggccggggcctccggggaccggcacctacacagcgcacagccccccagggtccgagtcctccaaacccgtgtaggcaggagcctccttaccttgatttgcttgatgtttgctaatcttctcttgaacaccccacagcgtgaaggtaagcaactgttccctaaacgacttagatccttaaaatatgtgtggttgggccgcatatctcatgagagagcctccgcccaaaccagagccctcctctctctgcggccaacaccctggtagacctgggggagcagcctctcccgcccccaccccctcagcgtggtgctggcccgtggctcctgaaccactcaccagtccagtccggggcctgggcccttccccggggccctggtggcagctcccagtggctcaagcagcgtgcccagcaccgcgggtggaggttgagctccgtggtcttctcttgcagggggccgaaggccagagaccaggatttggctacggaggcagagcgtccgactataaatcggctcacaagggattcaagggagtcgatgcccagggcacgctttccaaaatttttaagctgggaggaagagatagtcgctctggatcacccatggctagacgctgaaaacccacctggttccggaatcctgtcctcagcttcttaatataactgccttaaaactttaatcccacttgcccctgttacctaattagagcagatgacccctcccctaatgcctgcggagttgtgcacgtagtagggtcaggccacggcagcctaccggcaatttccggccaacagttaaatgagaacatgaaaacagaaaacggttaaaactgtccctttctgtgtgaagatcacgttccttcccccgcaatgtgcccccagacgcacgtgggtcttcagggggccaggtgcacagacgtccctccacgttcacccctccacccttggactttcttttcgccgtggctgcggcacccttgcgcttttgctggtcactgccatggaggcacacagctgcagagacagagaggacgtgggcggcagagaggactgttgacatccaagcttcctttgtttttttttcctgtccttctctcacctcctaaagtagacttcatttttcctaacaggattagacagtcaaggagtggcttactacatgtgggagcttttggtatgtgacatgcgggctgggcagctgttagagtccaacgtggggcagcacagagagggggccacctccccaggccgtggctgcccacacaccccaattagctgaattcgcgtgtggcagagggaggaaaaggaggcaaacgtgggctgggcaatggcctcacataggaaacagggtcttcctggagatttggtgatggagatgtcaagcaggtggcctctggacgtcaccgttgccctgcatggtggccccagagcagcctctatgaacaacctcgtttccaaaccacagcccacagccggagagtccaggaagacttgcgcactcagagcagaagggtaggagtcctctagacagcctcgcagccgcgccagtcgcccatagacactggctgtgaccgggcgtgctggcagcggcagtgcacagtggccagcactaaccctccctgagaagataaccggctcattcacttcctcccagaagacgcgtggtagcgagtaggcacaggcgtgcacctgctcccgaattactcaccgagacacacgggctgagcagacggccccgtggatggagacaaagagctcttctgaccatatccttcttaacacccgctggcatctcctttcgcgcctccctccctaacctactgacccaccttttgattttagcgcacctgtgattgataggccttccaaagagtcccacgctggcatcaccctccccgaggacggagatgaggagtagtcagcgtgatgccaaaacgcgtcttcttaatccaattctaattctgaatgtttcgtgtgggcttaataccatgtctattaatatatagcctcgatgatgagagagttacaaagaacaaaactccagacacaaacctccaaatttttcagcagaagcactctgcgtcgctgagctgaggtcggctctgcgatccatacgtggccgcacccacacagcacgtgctgtgacgatggctgaacggaaagtgtacactgttcctgaatattgaaataaaacaataaacttttaatggt

SEQ ID NO: 12118 - DNA, 9797 bp, Homo sapiens
  source 1..9797: mol_type = unassigned DNA
ccctgccccagaagtcacacggccggacccaagatgaaaaccccgtagtccacttcttcaagaacattgtgacgcctcgcacaccacccccgtcgcagggaaaggggagaggactgtccctgagcagatttagctgggtaggtgacgaacgcacttccatcggcttcctcttccgtcccagtcctcacagccccgcaacttttgtgttctgctctgtttcggttgcttcctggcctccttttctctcctctcgagacctctctgcccacagctgggatcgggccgccttgtcttccactggggaaatgaaacgtggtcttcccttccggaaggtctggtctcttgcttctgtgccggggacccagccctgcaaggccagatcctcttctcccagagggttcccaggcgacgtgactggtctccctcccagggagggagcaacaccacgtccgagaaaatgtttaacttcctccaacacaaccagtgcgagaagccccaggaacccgcatgtggaagtgggactggctggcccgtctcagtgaccccagatgctgacactgggaaaatgattctgctgatgaacagaaaaagaggctaaatagagttgctcgatttataataacctcattaatccaaagatttttgttttgtatgtgtttaaataataattaaaacatagatatcaagccatccagaaaatcttccttaggaattttaggctggttaatactgaaagcaaactttcaaggaaggtttaaaatggccaatttgaactttctagtgaaaaaatttggtgtctgagccaaattaaaatgccaatcattatattctaaccaaacttacagactttagttactagcaaataccagatatgattcttactgtataaaagttataattttagaataaaatggaggaataaccaccaacgtattgtagataggttgtgtctgtctccgaaactgcaatgctctcatacgctagaacagagcctacctacactttctgctcaattaataagcatcatataaatgaatgaatacattttaaaagaaaaacaacaaggagaaagaacaggaagaaagaacagggaaagaaaacagaaggtggggaagaggaaggaagagagggaggaaggggcagggtacttgagagaccatgaggatcccagatcagtcccacacatgattacactgaattatgaactaagatatttaccgaaacgttttccattaatgcatatttgacttgctttttctgacctaatgaatttgcaaaacgatgacaatcatgtagcaaatgtacatggactagtactcacaattaattttttattttctatgccagcaggagacaaagatgatagaagaatgaaattcatttttgacccagaaatcttattttagctactgctttatctgctcttaattttctaggagtggactttggggccgtcgtgccggatcctccctgaatgtggagcgatggggggttgcacacaggccgttctgccccagcagctaacaagaaagacccttgcattcctccctgcatctctcccttttgggtcctactaatgtctgttgaatttctcttttttccaaagcaaaatccttctctgcattttgtctgcttgtctgtttcccagagccgcaggactctctccttgtctggagttccagagagcccccactttctctttctaagctgtgttgtgtgtttcctggtacattctaggttccccaaagataaacatgactaaggattggaaaggaggaaaggccgcgcagattgttaatctgaaagtcaatccccggatttagctctcaaaaatgctttatttttggagaaaagcaatagagtaagacagaaggacttaacgcttgcagggaagtggctttctgccatgtagagccaggctggcaacctgccctctgccatcagggagtgagcatgaacctggaaacctctaggacgcaagagcgaggctggctgtcccctcgtgtgcagtgcttagaccttcttgccacacatcccgtccctcacctcactggatagcccccgaatcaactgttcacacgaaagcagctgcctggttctgagtggccatgctcactcccaagcacaggctgaatgaaaagaaaactgtgcaagtagcttgtatggtgggaagcccccagcagaggctgagggtgcagccaggtgctctggaagccttgaggcctctggtgtcatcttcctcacctctaaataagagatgggctaggttggtcaaggtcctccctgtcctaaaacactttaatgaaatggaagaaaggctgcaggctgatagaggagggacagtctggtttggttccctcaagtcttcaggagagggctcaaggacagtctcccatttcttgttggcaaaatgtaaagtgcagtctggaccctgtccattgagtagagactcaggaggccaaccaagatccctgaaaagctaacagcgtggtcagccttcccacagacagtgcacccaccgtgggaggacacttcgccccccattgttaacgtccaccgcgcccagactcccacagcgagctccttcccttcctccccatgtttgcagtggagttcccactcgagaagacagcacagtagcaagtagaggctggtcctgggacactcgcacccatgtgtgtcaggaagcccctgcggtcacacggcccatgaggaagccagaggggctgctggggctgatgaggccagggcagggcggcctgctcttccataaatgacagctggcaccaaagcccagagctggcagcctccacctgaggagtggcatctccatgaacggcttgtgttctcgcacagccccattgcgtagatgaggaaactgaagctcagagaggttcctgcccttgcccaaggccacacagccggatgagctagaaaggtgctaggggactgggaggtgggggagctgagacgctgtcccgctgctgccaggatgcggccgccccccgtgccagccaggcctgcctcctccctctgtccggctcagcagccccggcctcctgttgctcccagtccgagctatggccaagggagactgattcctgctcaccctgggagagagctcaggattttgtctcaaaaccttataaaagatacgaggctcgacattttactaaggccgaggactcttgatctcccagacagatcctagaaccacagggcacatgtgaccagaatccaatctgtgcaaatcaatcagcaaaaggagcccccagcaaaggcgcaggccggggcctccggggaccggcacctacacagcgcacagccccccagggtccgagtcctccaaacccgtgtaggcaggagcctccttaccttgatttgcttgatgtttgctaatcttctcttgaacaccccacagcgtgaaggtaagcaactgttccctaaacgacttagatccttaaaatatgtgtggttgggccgcatatctcatgagagagcctccgcccaaaccagagccctcctctctctgcggccaacaccctggtagacctgggggagcagcctctcccgcccccaccccctcagcgtggtgctggcccgtggctcctgaaccactcaccagtccagtccggggcctgggcccttccccggggccctggtggcagctcccagtggctcaagcagcgtgcccagcaccgcgggtggaggttgagctccgtggtcttctcttgcagggggccgaaggccagagaccaggatttggctacggaggcagagcgtccgactataaatcggctcacaagggattcaagggagtcgatgcccagggcacgctttccaaaatttttaagctggtaaggtaccctctgctcagctccactgagcggggactaagggctcccagaatccccaactaagctgagtacaagggtggctgccgcctctggctcagccgcactgtaccctggacgtgctctgtcccagcaggcgtgcaggggctcaggtggcattgcccacccgcatttacgcgtggatttcctccgagatgcatgtgaagccggaggtgcttgaggaagggctgcgcctgggctggttcaggggccctggagcaggcgactgaccttgactctggggcagggcccagctggagtccaacttgctcatgcccaggggttggggccctcagggagctaaagcaggagtcaagcagacgtgggtgtcggggggagatccctggagccacgggagggaatgcccaggagacctccagggagtggggagtgtcccgtcggctcatgaggacctggaaccagacccaggacgaatgccaggcccgctgtttataagctctgtctctgagacttggttttctcatctgtaaaatggaggtaacccgcccactcagctcacaaaatcgctgtgaaagtaaaaggtagtgacaaacacaaaacgcggctggcaggtgcgcggctcggattccttagataagcagtcacctttattattgttaaacgtcacccagaaaacccttaactcttagacagcggctctcattaagcaaaaggggaggcacatgaagctccaggcagggccgggagggaaccgtgaagccaaaggctctgggagcccccaggcacctgcgtttgcattttcatcctggaggagaccaggcttctggggctgctccccggggtgcagagaggaggggtctttcttggtgtgtaacatactcattgattcagtcacctgacctttgactccatgtattttgttgagtctggatgtgtggtgtgctctgcccagcagcggggatccacatgagcacagacatggtccccccgcgtccttggtgagtgcagaacctctgccgtgagcctcgattctgggaggttctgggaggttctgtggacaacaggcaattcagggcacagcccctgctcttaaggatagccggtcttaggagaagcttttaatatgtgaagtgagcagggagtaactgagctgctaagtaagcagctttatgtcagatgaagtggtaggcaggatccactcctcaacgtaaattctgagttaagaaaaaaattctccaaatattcaagtctcagggccatcatgctgtacattgccgcagttctgggatgtggccacaagagggcggagatgaggctccccggggagcagtgtctgaacccagcactgcagtcaggacggccccgccccacctggccagcacgtcacctgcctctgaatcgcctgggatgcacgcccagacccctatctgcgctccgccacagcctcactgagtcagaatgtccaagggcgaactaggtgttgctagttgtgatgattttgcagacaccgtgctcacctgggaaacacggattcatcccatctggaaaactaattactccactaccagcttaaggactgttagacacaccgggagagctgagtgctggctcagagttgatgggagggcccagatgagtgaggggccccatttagcaaatattgtccttgcaatatatgcaaggcttacaaccagtcactcaaagatgcttgcaaggccagagcttaccaagaccaccctgaggaacagaaagctgcatttagatctgcacatttactgtgtgcaaatataaccagtgtactatacacatgtgtttcctgaaataagttcagtattttccctgaacttttttgtaagaagcttttaaaaattatttaatttctgtagagttcaagggaagcttctatgtatcaaagcaaatttcaaatcatatggttgtaattaaattttactgcataaaaagttcataactggcctactatggccatatggctgaattagttgacttggagcacttccaatagattaataaatcagctcccccagaaatgagggggtctagaggcaggcagatggagaggacagggacttcatagcatttaacatcattttaccatctttccttcctgttctttttggtgctgttggaaatcagtagtgagaggaaaacactcaaatctggaagtctagcgctgtcggtaggaactgggtagaaaaaactatgcatgtccccccatcactcggaaactacatcagaacatcataggagcatcctgtttccatgtgcattagtttccacgaacatacatgtgaatgttttcccacctgtagtgttgctgtggagttgtgagatgtcaaagtggaggcaagagtatctgccttttgcagtaggctctgttcttttcctgtcctgagagaggaggtcagtctaaccctcaccttgtgagttcagccttatactgacctgagcccagggtggatcagatgctgagatcatgtgactccaagttgcaagacacgtaatagagagaagcgtgactgttgcatccatgcaggctctaatcctggctccttcgggctggctgagctttggctcctgagctataaagagaggatgataggaacacctactccaggaggtgctgtgagcacaaaagagaaaacggggaaaaacgggtttcctgcatggtcagtgctcaacaaattgtagtttcaatgataaaaagtaaaaccaatacacccaccattttcaatgtcaaaagggggcatcaagaaagttaagattgtacctcggtaggttaccttgccagaggctgcagggaacttactccatttcagcacagaagcactttgtttcataggacagtggttctaccactttccaggaagtccaaaggctgatctcttggaaatgcagcaaaaggtgaggtgagtgccaacttctgggctactccagagggcagctccaatgccagagatgttcaagttaagccaggatcaaacaggaaaaacccacgctcccgagggagaggctggccctcgaggggcagggccctgcacctgtcagtccccaggccggcaggaggcctccacggtatgtgagaaagctgcctgtcttgggagggaaatctcactagatggttcctgaagcggcttcgcaggctagcatttcataaacgttttcacttgtgaaaacaaaaatcccttgagtgagttgtgtaagcacaacatagaggcttgtttataatgctacgtatgtacttggaaaaccccccaagaagtcagaactgtcaccttggtctgttagctgcgttacttggaaggattcttggcgtctgcgctctggttatttgtgttactgggcagtgtggaagacgtagaattagatgaggacagtgttggttcgttgctgatcggccacggtaaagagcatatttcttttctatcttgctttctgggggctcttcgccaaaattgatcatttcataaaagaggggaaacccaaggagagagactaaactttgaataaaaatttgaatgcaaaaaaagtgcagttctgcttcgtcgatctaagtgacattctgagtgaccaacgcattcctctttctagagggatggccacgcctggctacctccacaccgtgggccacagcacacctgtgcaccatctcaattagctgccaactctcttttaaacatcgaaattatttgtcccccaaacgtgtaaatgcatggttttaagaccccttcaagtcaaagtttgcagacaaagctctctgtgcatttgatttgtctggtgtggcagatgagatggcacataggagggacgtccccagggatggacacgtggctttgctctttgctggcgcgtgtagcaaggggtgtgctagggtcccgccgaaaaagaagttgctcctgttgtcgctggcagttcccctcggctgccctggcacctctagctgacgagaaaaagtgctcattcaaagcaaagcaatggagcggctgcactttcacccacagaagtgcagcgttgttttgcagagcagtggttatgccaggcaccactccctggggcctgggaatccgattccagttctctctcacagaactggaaattcaattagcatttgctgagggaggtcgggagaaatggaatgaaaagaccagctctccggggtgccatttctattagcagatgagagagacacccaatggctcagcatccacccgggaccacagaagaggggatgctggtgtgggaggaccctgcggcactctcgtcctaactcctctctcttccttttcagggaggaagagatagtcgctctggatcacccatggctagacgctgaaaacccacctggttccggaatcctgtcctcagcttcttaatataactgccttaaaactttaatcccacttgcccctgttacctaattagagcagatgacccctcccctaatgcctgcggagttgtgcacgtagtagggtcaggccacggcagcctaccggcaatttccggccaacagttaaatgagaacatgaaaacagaaaacggttaaaactgtccctttctgtgtgaagatcacgttccttcccccgcaatgtgcccccagacgcacgtgggtcttcagggggccaggtgcacagacgtccctccacgttcacccctccacccttggactttcttttcgccgtggctgcggcacccttgcgcttttgctggtcactgccatggaggcacacagctgcagagacagagaggacgtgggcggcagagaggactgttgacatccaagcttcctttgtttttttttcctgtccttctctcacctcctaaagtagacttcatttttcctaacaggattagacagtcaaggagtggcttactacatgtgggagcttttggtatgtgacatgcgggctgggcagctgttagagtccaacgtggggcagcacagagagggggccacctccccaggccgtggctgcccacacaccccaattagctgaattcgcgtgtggcagagggaggaaaaggaggcaaacgtgggctgggcaatggcctcacataggaaacagggtcttcctggagatttggtgatggagatgtcaagcaggtggcctctggacgtcaccgttgccctgcatggtggccccagagcagcctctatgaacaacctcgtttccaaaccacagcccacagccggagagtccaggaagacttgcgcactcagagcagaagggtaggagtcctctagacagcctcgcagccgcgccagtcgcccatagacactggctgtgaccgggcgtgctggcagcggcagtgcacagtggccagcactaaccctccctgagaagataaccggctcattcacttcctcccagaagacgcgtggtagcgagtaggcacaggcgtgcacctgctcccgaattactcaccgagacacacgggctgagcagacggccccgtggatggagacaaagagctcttctgaccatatccttcttaacacccgctggcatctcctttcgcgcctccctccctaacctactgacccaccttttgattttagcgcacctgtgattgataggccttccaaagagtcccacgctggcatcaccctccccgaggacggagatgaggagtagtcagcgtgatgccaaaacgcgtcttcttaatccaattctaattctgaatgtttcgtgtgggcttaataccatgtctattaatatatagcctcgatgatgagagagttacaaagaacaaaactccagacacaaacctccaaatttttcagcagaagcactctgcgtcgctgagctgaggtcggctctgcgatccatacgtggccgcacccacacagcacgtgctgtgacgatggctgaacggaaagtgtacactgttcctgaatattgaaataaaacaataaacttttaatgg

SEQ ID NO: 12119 - DNA, 2168 bp, Homo sapiens
  source 1..2168: mol_type = unassigned DNA
agaccatccaagaagacagtgcagccacctccgagagcctggatgtgatggcgtcacagaagagaccctcccagaggcacggatccaagtacctggccacagcaagtaccatggaccatgccaggcatggcttcctcccaaggcacagagacacgggcatccttgactccatcgggcgcttctttggcggtgacaggggtgcgcccaagcggggctctggcaaggactcacaccacccggcaagaactgctcactacggctccctgccccagaagtcacacggccggacccaagatgaaaaccccgtagtccacttcttcaagaacatttgcagcccacggttctctgtgtctttccaggtgacgcctcgcacaccacccccgtcgcagggaaaggggagaggactgtccctgagcagatttagctggggggccgaaggccagagaccaggatttggctacggaggcagagcgtccgactataaatcggctcacaagggattcaagggagtcgatgcccagggcacgctttccaaaatttttaagctgggaggaagagatagtcgctctggatcacccatggctagacgctgaaaacccacctggttccggaatcctgtcctcagcttcttaatataactgccttaaaactttaatcccacttgcccctgttacctaattagagcagatgacccctcccctaatgcctgcggagttgtgcacgtagtagggtcaggccacggcagcctaccggcaatttccggccaacagttaaatgagaacatgaaaacagaaaacggttaaaactgtccctttctgtgtgaagatcacgttccttcccccgcaatgtgcccccagacgcacgtgggtcttcagggggccaggtgcacagacgtccctccacgttcacccctccacccttggactttcttttcgccgtggctgcggcacccttgcgcttttgctggtcactgccatggaggcacacagctgcagagacagagaggacgtgggcggcagagaggactgttgacatccaagcttcctttgtttttttttcctgtccttctctcacctcctaaagtagacttcatttttcctaacaggattagacagtcaaggagtggcttactacatgtgggagcttttggtatgtgacatgcgggctgggcagctgttagagtccaacgtggggcagcacagagagggggccacctccccaggccgtggctgcccacacaccccaattagctgaattcgcgtgtggcagagggaggaaaaggaggcaaacgtgggctgggcaatggcctcacataggaaacagggtcttcctggagatttggtgatggagatgtcaagcaggtggcctctggacgtcaccgttgccctgcatggtggccccagagcagcctctatgaacaacctcgtttccaaaccacagcccacagccggagagtccaggaagacttgcgcactcagagcagaagggtaggagtcctctagacagcctcgcagccgcgccagtcgcccatagacactggctgtgaccgggcgtgctggcagcggcagtgcacagtggccagcactaaccctccctgagaagataaccggctcattcacttcctcccagaagacgcgtggtagcgagtaggcacaggcgtgcacctgctcccgaattactcaccgagacacacgggctgagcagacggccccgtggatggagacaaagagctcttctgaccatatccttcttaacacccgctggcatctcctttcgcgcctccctccctaacctactgacccaccttttgattttagcgcacctgtgattgataggccttccaaagagtcccacgctggcatcaccctccccgaggacggagatgaggagtagtcagcgtgatgccaaaacgcgtcttcttaatccaattctaattctgaatgtttcgtgtgggcttaataccatgtctattaatatatagcctcgatgatgagagagttacaaagaacaaaactccagacacaaacctccaaatttttcagcagaagcactctgcgtcgctgagctgaggtcggctctgcgatccatacgtggccgcacccacacagcacgtgctgtgacgatggctgaacggaaagtgtacactgttcctgaatattgaaataaaa

SEQ ID NO: 12120 - DNA, 2145 bp, Homo sapiens
  source 1..2145: mol_type = unassigned DNA
gagctccagaccatccaagaagacagtgcagccacctccgagagcctggatgtgatggcgtcacagaagagaccctcccagaggcacggatccaagtacctggccacagcaagtaccatggaccatgccaggcatggcttcctcccaaggcacagagacacgggcatccttgactccatcgggcgcttctttggcggtgacaggggtgcgcccaagcggggctctggcaaggactcacaccacccggcaagaactgctcactacggctccctgccccagaagtcacacggccggacccaagatgaaaaccccgtagtccacttcttcaagaacattgtgacgcctcgcacaccacccccgtcgcagggaaaggggagaggactgtccctgagcagatttagctggggggccgaaggccagagaccaggatttggctacggaggcagagcgtccgactataaatcggctcacaagggattcaagggagtcgatgcccagggcacgctttccaaaatttttaagctgggaggaagagatagtcgctctggatcacccatggctagacgctgaaaacccacctggttccggaatcctgtcctcagcttcttaatataactgccttaaaactttaatcccacttgcccctgttacctaattagagcagatgacccctcccctaatgcctgcggagttgtgcacgtagtagggtcaggccacggcagcctaccggcaatttccggccaacagttaaatgagaacatgaaaacagaaaacggttaaaactgtccctttctgtgtgaagatcacgttccttcccccgcaatgtgcccccagacgcacgtgggtcttcagggggccaggtgcacagacgtccctccacgttcacccctccacccttggactttcttttcgccgtggctgcggcacccttgcgcttttgctggtcactgccatggaggcacacagctgcagagacagagaggacgtgggcggcagagaggactgttgacatccaagcttcctttgtttttttttcctgtccttctctcacctcctaaagtagacttcatttttcctaacaggattagacagtcaaggagtggcttactacatgtgggagcttttggtatgtgacatgcgggctgggcagctgttagagtccaacgtggggcagcacagagagggggccacctccccaggccgtggctgcccacacaccccaattagctgaattcgcgtgtggcagagggaggaaaaggaggcaaacgtgggctgggcaatggcctcacataggaaacagggtcttcctggagatttggtgatggagatgtcaagcaggtggcctctggacgtcaccgttgccctgcatggtggccccagagcagcctctatgaacaacctcgtttccaaaccacagcccacagccggagagtccaggaagacttgcgcactcagagcagaagggtaggagtcctctagacagcctcgcagccgcgccagtcgcccatagacactggctgtgaccgggcgtgctggcagcggcagtgcacagtggccagcactaaccctccctgagaagataaccggctcattcacttcctcccagaagacgcgtggtagcgagtaggcacaggcgtgcacctgctcccgaattactcaccgagacacacgggctgagcagacggccccgtggatggagacaaagagctcttctgaccatatccttcttaacacccgctggcatctcctttcgcgcctccctccctaacctactgacccaccttttgattttagcgcacctgtgattgataggccttccaaagagtcccacgctggcatcaccctccccgaggacggagatgaggagtagtcagcgtgatgccaaaacgcgtcttcttaatccaattctaattctgaatgtttcgtgtgggcttaataccatgtctattaatatatagcctcgatgatgagagagttacaaagaacaaaactccagacacaaacctccaaatttttcagcagaagcactctgcgtcgctgagctgaggtcggctctgcgatccatacgtggccgcacccacacagcacgtgctgtgacgatggctgaacggaaagtgtacactgttcctgaatattgaaataaaa

SEQ ID NO: 12121 - DNA, 2127 bp, Homo sapiens
  source 1..2127: mol_type = unassigned DNA
aaagacaggccctctgagtccgacgagctccagaccatccaagaagacagtgcagccacctccgagagcctggatgtgatggcgtcacagaagagaccctcccagaggcacggatccaagtacctggccacagcaagtaccatggaccatgccaggcatggcttcctcccaaggcacagagacacgggcatccttgactccatcgggcgcttctttggcggtgacaggggtgcgcccaagcggggctctggcaaggactcacaccacccggcaagaactgctcactacggctccctgccccagaagtcacacggccggacccaagatgaaaaccccgtagtccacttcttcaagaacattgtgacgcctcgcacaccacccccgtcgcagggaaagggggccgaaggccagagaccaggatttggctacggaggcagagcgtccgactataaatcggctcacaagggattcaagggagtcgatgcccagggcacgctttccaaaatttttaagctgggaggaagagatagtcgctctggatcacccatggctagacgctgaaaacccacctggttccggaatcctgtcctcagcttcttaatataactgccttaaaactttaatcccacttgcccctgttacctaattagagcagatgacccctcccctaatgcctgcggagttgtgcacgtagtagggtcaggccacggcagcctaccggcaatttccggccaacagttaaatgagaacatgaaaacagaaaacggttaaaactgtccctttctgtgtgaagatcacgttccttcccccgcaatgtgcccccagacgcacgtgggtcttcagggggccaggtgcacagacgtccctccacgttcacccctccacccttggactttcttttcgccgtggctgcggcacccttgcgcttttgctggtcactgccatggaggcacacagctgcagagacagagaggacgtgggcggcagagaggactgttgacatccaagcttcctttgtttttttttcctgtccttctctcacctcctaaagtagacttcatttttcctaacaggattagacagtcaaggagtggcttactacatgtgggagcttttggtatgtgacatgcgggctgggcagctgttagagtccaacgtggggcagcacagagagggggccacctccccaggccgtggctgcccacacaccccaattagctgaattcgcgtgtggcagagggaggaaaaggaggcaaacgtgggctgggcaatggcctcacataggaaacagggtcttcctggagatttggtgatggagatgtcaagcaggtggcctctggacgtcaccgttgccctgcatggtggccccagagcagcctctatgaacaacctcgtttccaaaccacagcccacagccggagagtccaggaagacttgcgcactcagagcagaagggtaggagtcctctagacagcctcgcagccgcgccagtcgcccatagacactggctgtgaccgggcgtgctggcagcggcagtgcacagtggccagcactaaccctccctgagaagataaccggctcattcacttcctcccagaagacgcgtggtagcgagtaggcacaggcgtgcacctgctcccgaattactcaccgagacacacgggctgagcagacggccccgtggatggagacaaagagctcttctgaccatatccttcttaacacccgctggcatctcctttcgcgcctccctccctaacctactgacccaccttttgattttagcgcacctgtgattgataggccttccaaagagtcccacgctggcatcaccctccccgaggacggagatgaggagtagtcagcgtgatgccaaaacgcgtcttcttaatccaattctaattctgaatgtttcgtgtgggcttaataccatgtctattaatatatagcctcgatgatgagagagttacaaagaacaaaactccagacacaaacctccaaatttttcagcagaagcactctgcgtcgctgagctgaggtcggctctgcgatccatacgtggccgcacccacacagcacgtgctgtgacgatggctgaacggaaagtgtacactgttcctgaatatt

SEQ ID NO: 12122 - DNA, 582 bp, Homo sapiens
  source 1..582: mol_type = unassigned DNA
gacgagctccagaccatccaagaagacagtgcagccacctccgagagcctggatgtgatggcgtcacagaagagaccctcccagaggcacggatccaagtacctggccacagcaagtaccatggaccatgccaggcatggcttcctcccaaggcacagagacacgggcatccttgactccatcgggcgcttctttggcggtgacaggggtgcgcccaagcggggctctggcaaggactcacaccacccggcaagaactgctcactacggctccctgccccagaagcacacagctgcagagacagagaggacgtgggcggcagagaggactgttgacatccaagcttcctttgtttttttttcctgtccttctctcacctcctaaagtagacttcatttttcctaacaggattagacagtcaaggagtggcttactacatgtgggagcttttggtatgtgacatgcgggctgggcagctgttagagtccaacgtggggcagcacagagagggggccacctccccaggccgtggctgcccacacaccccaattagctgaattcgcgtgtggcagagggaggaaa

SEQ ID NO: 12123 - DNA, 1255 bp, Homo sapiens
  source 1..1255: mol_type = unassigned DNA
agacagtgcagccacctccgagagcctggatgtgatggcgtcacagaagagaccctcccagaggcacggatccaagtacctggccacagcaagtaccatggaccatgccaggcatggcttcctcccaaggcacagagacacgggcatccttgactccatcgggcgcttctttggcggtgacaggggtgcgcccaagcggggctctggcaaggtaccctggctaaagccgggccggagccctctgccctctcatgcccgcagccagcctgggctgtgcaacatgtacaaggactcacaccacccggcaagaactgctcactacggctccctgccccagaagtcacacggccggacccaagatgaaaaccccgtagtccacttcttcaagaacattgtgacgcctcgcacaccacccccgtcgcagggaaagggggccgaaggccagagaccaggatttggctacggaggcagagcgtccgactataaatcggctcacaagggattcaagggagtcgatgcccagggcacgctttccaaaatttttaagctgggaggaagagatagtcgctctggatcacccatggctagacgctgaaaacccacctggttccggaatcctgtcctcagcttcttaatataactgccttaaaactttaatcccacttgcccctgttacctaattagagcagatgacccctcccctaatgcctgcggagttgtgcacgtagtagggtcaggccacggcagcctaccggcaatttccggccaacagttaaatgagaacatgaaaacagaaaacggttaaaactgtccctttctgtgtgaagatcacgttccttcccccgcaatgtgcccccagacgcacgtgggtcttcagggggccaggtgcacagacgtccctccacgttcacccctccacccttggactttcttttcgccgtggctgcggcacccttgcgcttttgctggtcactgccatggaggcacacagctgcagagacagagaggacgtgggcggcagagaggactgttgacatccaagcttcctttgtttttttttcctgtccttctctcacctcctaaagtagacttcatttttcctaacaggattagacagtcaaggagtggcttactacatgtgggagcttttggtatgtgacatgcgggctgggcagctgttagagtccaacgtggggcagcacagagagggggccacctccccaggccgtggctgcccacacaccccaattagctg

SEQ ID NO: 12124 - DNA, 584 bp, Homo sapiens
  source 1..584: mol_type = unassigned DNA
gagctccagaccatccaagaagacagtgcagccacctccgagagcctggatgtgatggcgtcacagaagagaccctcccagaggcacggatccaagtacctggccacagcaagtaccatggaccatgccaggcatggcttcctcccaagggcacgctttccaaaatttttaagctgggaggaagagatagtcgctctggatcacccatggctagacgctgaaaacccacctggttccggaatcctgtcctcagcttcttaatataactgccttaaaactttaatcccacttgcccctgttacctaattagagcagatgacccctcccctaatgcctgcggagttgtgcacgtagtagggtcaggccacggcagcctaccggcaatttccggccaacagttaaatgagaacatgaaaacagaaaacggttaaaactgtccctttctgtgtgaagatcacgttccttcccccgcaatgtgcccccagacgcacgtgggtcttcagggggccaggtgcacagacgtccctccacgttcacccctccacccttggactttcttttcgccgtggctgcggcacccttgc

SEQ ID NO: 12125 - DNA, 552 bp, Homo sapiens
  source 1..552: mol_type = unassigned DNA
acagaagagaccctcccagaggcacggatccaagtacctggccacagcaagtaccatggaccatgccaggcatggcttcctcccaaggcacagagacacgggcatccttgactccatcgggcgcttctttggcggtgacaggggtgcgcccaagcggggctctggcaaggactgtccctgagcagatttagctggggggccgaaggccagagaccaggatttggctacggaggcagagcgtccgactataaatcggctcacaagggattcaagggagtcgatgcccagggcacgctttccaaaatttttaagctgggaggaagagatagtcgctctggatcacccatggctagacgctgaaaacccacctggttccggaatcctgtcctcagcttcttaatataactgccttaaaactttaatcccacttgcccctgttacctaattagagcagatgacccctcccctaatgcctgcggagttgtgcacgtagtagggtcaggccacggcagcctaccggcaatttccggccaacagttaaatgagaacatg

SEQ ID NO: 12126 - DNA, 566 bp, Homo sapiens
  source 1..566: mol_type = unassigned DNA
tccagaccatccaagaagacagtgcagccacctccgagagcctggatgtgatggcgtcacagaagagaccctcccagaggcacggatccaagtacctggccacagcaagtaccatggaccatgccaggcatggcttcctcccaagatgaaaaccccgtagtccacttcttcaagaacattgtgacgcctcgcacaccacccccgtcgcagggaaaggggagaggactgtccctgagcagatttagctggggggccgaaggccagagaccaggatttggctacggaggcagagcgtccgactataaatcggctcacaagggattcaagggagtcgatgcccagggcacgctttccaaaatttttaagctgggaggaagagatagtcgctctggatcacccatggctagacgctgaaaacccacctggttccggaatcctgtcctcagcttcttaatataactgccttaaaactttaatcccacttgcccctgttacctaattagagcagatgacccctcccctaatgcctgcggagttgtgcacgtagtagggtcaggccacggcag

SEQ ID NO: 12127 - DNA, 584 bp, Homo sapiens
  source 1..584: mol_type = unassigned DNA
tataaaagatacgaggctcgacattttactaaggccgaggactcttgatctcccagacagatcctagaaccacagggcacatgtgaccagaatccaatctgtgcaaatcaatcagcaaaaggagcccccagcaaaggcgcaggccggggcctccggggaccggcacctacacagcgcacagccccccagggtccgagtcctccaaacccgtgtaggcaggagcctccttaccttgatttgcttgatgtttgctaatcttctcttgaacaccccacagcgtgaagggggccgaaggccagagaccaggatttggctacggaggcagagcgtccgactataaatcggctcacaagggattcaagggagtcgatgcccagggcacgctttccaaaatttttaagctgggaggaagagatagtcgctctggatcacccatggctagacgctgaaaacccacctggttccggaatcctgtcctcagcttcttaatataactgccttaaaactttaatcccacttgcccctgttacctaattagagcagatgacccctcccctaatgcctgcggagttgtgcacgtagta

SEQ ID NO: 12128 - DNA, 884 bp, Homo sapiens
  source 1..884: mol_type = unassigned DNA
agaccatccaagaagacagtgcagccacctccgagagcctggatgtgatggcgtcacagaagagaccctcccagaggcacggatccaagtacctggccacagcaagtaccatggaccatgccaggcatggcttcctcccaaggcacagagacacgggcatccttgactccatcgggcgcttctttggcggtgacaggggtgcgcccaagcggggctctggcaaggactcacaccacccggcaagaactgctcactacggctccctgccccagaagtcacacggccggacccaagatgaaaaccccgtagtccacttcttcaagaacattgtgacgcctcgcacaccacccccgtcgcagggaaaggggagaggactgtccctgagcagatttagctgggtaggtgacgaacgcacttccatcggcttcctcttccgtcccagtcctcacagccccgcaacttttgtgttctgctctgtttcggttgcttcctggcctccttttctctcctctcgagacctctctgcccacagctgggatcgggccgccttgtcttccactggggaaatgaaacgtggtcttcccttccggaagggggccgaaggccagagaccaggatttggctacggaggcagagcgtccgactataaatcggctcacaagggattcaagggagtcgatgcccagggcacgctttccaaaatttttaagctgggaggaagagatagtcgctctggatcacccatggctagacgctgaaaacccacctggttccggaatcctgtcctcagcttcttaatataactgccttaaaactttaatcccacttgcccctgttacctaattagagcagatgacccctcccctaatgcctgcggagttgtg

SEQ ID NO: 12129 - DNA, 575 bp, Homo sapiens
  source 1..575: mol_type = unassigned DNA
agatgcgaaccagaacaatgggacctcctctcaggacacagcggtgactgactccaagcgcacagcggacccgaagaatgcctggcaggatgcccacccagctgacccagggagccgcccccacttgatccgcctcttttcccgagatgccccggggagggaggacaacaccttcaaagacaggccctctgagtccgacgagctccagaccatccaagaagacagtgcagccacctccgagagcctggatgtgatggcgtcacagaagagaccctcccagaggcacggatccaagtacctggccacagcaagtaccatggaccatgccaggcatggcttcctcccaaggcacagagacacgggcatccttgactccatcgggcgcttctttggcggtgacaggggtgcgcccaagcggggctctggcaagggaggaagagatagtcgctctggatcacccatggctagacgctgaaaacccacctggttccggaatcctgtcctcagcttcttaatataactgccttaaaactttaatcccacttgcccctgttacctaattagagcagatgacc

SEQ ID NO: 12130 - DNA, 581 bp, Homo sapiens
  source 1..581: mol_type = unassigned DNA
gacgagctccagaccatccaagaagacagtgcagccacctccgagagcctggatgtgatggcgtcacagaagagaccctcccagaggcacggatccaagtacctggccacagcaagtaccatggaccatgccaggcatggcttcctcccaaggactcacaccacccggcaagaactgctcactacggctccctgccccagaagtcacacggccggacccaagatgaaaaccccgtagtccacttcttcaagaacattgtgacgcctcgcacaccacccccgtcgcagggaaaggggagaggactgtccctgagcagatttagctggggggccgaaggccagagaccaggatttggctacggaggcagagcgtccgactataaatcggctcacaagggattcaagggagtcgatgcccagggcacgctttccaaaatttttaagctgggaggaagagatagtcgctctggatcacccatggctagacgctgaaaacccacctggttccggaatcctgtcctcagcttcttaatataactgccttaaaactttaatcccacttgcccctgttacctaattaga

SEQ ID NO: 12131 - DNA, 570 bp, Homo sapiens
  source 1..570: mol_type = unassigned DNA
agaccatccaagaagacagtgcagccacctccgagagcctggatgtgatggcgtcacagaagagaccctcccagaggcacggatccaagtacctggccacagcaagtaccatggaccatgccaggcatggcttcctcccaaggactcacaccacccggcaagaactgctcactacggctccctgccccagaagtcacacggccggacccaagatgaaaaccccgtagtccacttcttcaagaacattgtgacgcctcgcacaccacccccgtcgcagggaaaggggagaggactgtccctgagcagatttagctggcgtgaagggggccgaaggccagagaccaggatttggctacggaggcagagcgtccgactataaatcggctcacaagggattcaagggagtcgatgcccagggcacgctttccaaaatttttaagctgggaggaagagatagtcgctctggatcacccatggctagacgctgaaaacccacctggttccggaatcctgtcctcagcttcttaatataactgccttaaaactttaatcccacttgcccctgttacc

SEQ ID NO: 12132 - DNA, 582 bp, Homo sapiens
  source 1..582: mol_type = unassigned DNA
gacgagctccagaccatccaagaagacagtgcagccacctccgagagcctggatgtgatggcgtcacagaagagaccctcccagaggcacggatccaagtacctggccacagcaagtaccatggaccatgccaggcatggcttcctcccaagcggggctctggcaaggactcacaccacccggcaagaactgctcactacggctccctgccccagaagtcacacggccggacccaagatgaaaaccccgtagtccacttcttcaagaacattgtgacgcctcgcacaccacccccgtcgcagggaaaggggagaggactgtccctgagcagatttagctggggggccgaaggccagagaccaggatttggctacggaggcagagcgtccgactataaatcggctcacaagggattcaagggagtcgatgcccagggcacgctttccaaaatttttaagctgggaggaagagatagtcgctctggatcacccatggctagacgctgaaaacccacctggttccggaatcctgtcctcagcttcttaatataactgccttaaaactttaatcccacttgcccct

SEQ ID NO: 12133 - DNA, 581 bp, Homo sapiens
  source 1..581: mol_type = unassigned DNA
gacgagctccagaccatccaagaagacagtgcagccacctccgagagcctggatgtgatggcgtcacagaagagaccctcccagaggcacagagacacgggcatccttgactccatcgggcgcttctttggcggtgacaggggtgcgcccaagcggggctctggcaaggactcacaccacccggcaagaactgctcactacggctccctgccccagaagtcacacggccggacccaagatgaaaaccccgtagtccacttcttcaagaacattgtgacgcctcgcacaccacccccgtcgcagggaaaggggagaggactgtccctgagcagatttagctggggggccgaaggccagagaccaggatttggctacggaggcagagcgtccgactataaatcggctcacaagggattcaagggagtcgatgcccagggcacgctttccaaaatttttaagctgggaggaagagatagtcgctctggatcacccatggctagacgctgaaaacccacctggttccggaatcctgtcctcagcttcttaatataactgccttaaaactttaatcccacttgccc

SEQ ID NO: 12134 - DNA, 915 bp, Homo sapiens
  source 1..915: mol_type = unassigned DNA
atgggaaaccacgcaggcaaacgagaattaaatgccgagaaggccagtacgaatagtgaaactaacagaggagaatctgaaaaaaagagaaacctgggtgaactttcacggacaacctcagaggacaacgaagtgttcggagaggcagatgcgaaccagaacaatgggacctcctctcaggacacagcggtgactgactccaagcgcacagcggacccgaagaatgcctggcaggatgcccacccagctgacccagggagccgcccccacttgatccgcctcttttcccgagatgccccggggagggaggacaacaccttcaaagacaggccctctgagtccgacgagctccagaccatccaagaagacagtgcagccacctccgagagcctggatgtgatggcgtcacagaagagaccctcccagaggcacggatccaagtacctggccacagcaagtaccatggaccatgccaggcatggcttcctcccaaggcacagagacacgggcatccttgactccatcgggcgcttctttggcggtgacaggggtgcgcccaagcggggctctggcaaggactcacaccacccggcaagaactgctcactacggctccctgccccagaagtcacacggccggacccaagatgaaaaccccgtagtccacttcttcaagaacattgtgacgcctcgcacaccacccccgtcgcagggaaaggggagaggactgtccctgagcagatttagctggggggccgaaggccagagaccaggatttggctacggaggcagagcgtccgactataaatcggctcacaagggattcaagggagtcgatgcccagggcacgctttccaaaatttttaagctgggaggaagagatagtcgctctggatcacccatggctagacgctga

SEQ ID NO: 12135 - DNA, 1052 bp, Homo sapiens
  source 1..1052: mol_type = unassigned DNA
agcccggggaggcggggccggggagctgggtgcgcgcccgtccctcggagccgccgccgtcagtcaccgccgccgcgcgccagagagaagcagcctccggccccggcggcccctgtctcccgaccccggaaggcgaagcaggctgcccggggaccccgcgcgtgggcgcttgaagccgagaccagcctgcccgggcctgggcaggcggagcagggccttggaccccgcggcgcccctcggcctcggagcaacgagcgcagcgccgcctctgaagagccaatccattcaggatgggaaaccacgcaggcaaacgagaattaaatgccgagaaggccagtacgaatagtgaaactaacagaggagaatctgaaaaaaagagaaacctgggtgaactttcacggacaacctcagaggacaacgaagtgttcggagaggcagatgcgaaccagaacaatgggacctcctctcaggacacagcggtgactgactccaagcgcacagcggacccgaagaatgcctggcaggatgcccacccagctgacccagggagccgcccccacttgatccgcctcttttcccgagatgccccggggagggaggacaacaccttcaaagacaggccctctgagtccgacgagctccagaccatccaagaagacagtgcagccacctccgagagcctggatgtgatggcgtcacagaagagaccctcccagaggcacggatccaagtacctggccacagcaagtaccatggaccatgccaggcatggcttcctcccaaggcacagagacacgggcatccttgactccatcgggcgcttctttggcggtgacaggggtgcgcccaagcggggctctggcaaggactcacaccacccggcaagaactgctcactacggctccctgccccagaagtcacacggccggacccaagatgaaaaccccgtagtccacttcttcaagaacattgtgacgcctcgcacaccacccccgtcgcagggaaagggaggaagagatagtcgctctggatcacccatggctagacgctga

SEQ ID NO: 12136 - DNA, 578 bp, Homo sapiens
  source 1..578: mol_type = unassigned DNA
agaccatccaagaagacagtgcagccacctccgagagcctggatgtgatggcgtcacagaagagaccctcccagaggcacggatccaagtacctggccacagcaagtaccatggaccatgccaggcatggcttcctcccaaggcacagagacacgggcatccttgactccatcgggcgcttctttggcggtgacaggggtgcgcccaagcggggctctggcaaggactcacaccacccggcaagaactgctcactacggctccctgccccagaagtcacacggccggacccaagatgaaaaccccgtagtccacttcttcaagaacattgtgacgcctcgcacaccacccccgtcgcagggaaaggggagaggactgtccctgagcagatttagctggggggccgaaggccagagaccaggatttggctacggaggcagagcgtccgactataaatcggctcacaagggattcaagggagtcgatgcccagggcacgctttccaaaatttttaagctgtagtgagaggaaaacactcaaatctggaagtctagcgctgtcgggaggaagagatagtcg

SEQ ID NO: 12137 - DNA, 565 bp, Homo sapiens
  source 1..565: mol_type = unassigned DNA
agaccatccaagaagacagtgcagccacctccgagagcctggatgtgatggcgtcacagaagagaccctcccagaggcacggatccaagtacctggccacagcaagtaccatggaccatgccaggcatggcttcctcccaaggcacagagacacgggcatccttgactccatcgggcgcttctttggcggtgacaggggtgcgcccaagcggggctctggcaaggactcacaccacccggcaagaactgctcactacggctccctgccccagaagtcacacggccggacccaagatgaaaaccccgtagtccacttcttcaagaacattgtgacgcctcgcacaccacccccgtcgcagggaaaggggagaggactgtccctgagcagatttagctggggggccgaaggccagagaccaggatttggctacggaggcagagcgtccgactataaatcggctcacaagggattcaagggagtcgatgcccagggcacgctttccaaaatttttaagctggtaaggtaccctctgctcagctccactgagcggggactaagggctcc

SEQ ID NO: 12138 - DNA, 569 bp, Homo sapiens
  source 1..569: mol_type = unassigned DNA
gctcttccttccatcatccatcatctgcacatgccttcttctctccctgtcgtccttcatcctccaccccccgctcactcctcctcactctgggctcttgccaagccagctctagaggagatttgctggaggactttggggcattgccggcggcgcccacccggactcacgcagcccactctgtgtcccccggcaggtaccctggctaaagccgggccggagccctctgccctctcatgcccgcagccagcctgggctgtgcaacatgtacaaggactcacaccacccggcaagaactgctcactacggctccctgccccagaagtcacacggccggacccaagatgaaaaccccgtagtccacttcttcaagaacattgtgacgcctcgcacaccacccccgtcgcagggaaaggggagaggactgtccctgagcagatttagctggggggccgaaggccagagaccaggatttggctacggaggcagagcgtccgactataaatcggctcacaagggattcaagggagtcgatgcccagggcacgctttccaaaatttttaagctgg

SEQ ID NO: 12139 - DNA, 583 bp, Homo sapiens
  source 1..583: mol_type = unassigned DNA
agaccatccaagaagacagtgcagccacctccgagagcctggatgtgatggcgtcacagaagagaccctcccagaggcacggatccaagtacctggccacagcaagtaccatggaccatgccaggcatggcttcctcccaaggcacagagacacgggcatccttgactccatcgggcgcttctttggcggtgacaggggtgcgcccaagcggggctctggcaaggtaccctggctaaagccgggccggagccctctgccctctcatgcccgcagccagcctgggctgtgcaacatgtacaaggactcacaccacccggcaagaactgctcactacggctccctgccccagaagtcacacggccggacccaagatgaaaaccccgtagtccacttcttcaagaacattgtgacgcctcgcacaccacccccgtcgcagggaaaggggagaggactgtccctgagcagatttagctggcgtgaagggggccgaaggccagagaccaggatttggctacggaggcagagcgtccgactataaatcggctcacaagggattcaagggagtcgatgcccagggcacgc

SEQ ID NO: 12140 - DNA, 566 bp, Homo sapiens
  source 1..566: mol_type = unassigned DNA
agaagccagatgattctgcctgtgcaggaatgaagtgcgacccggcgcgcgagggagggaggcctctgcgctttggctccggccgcgcctcctccctgggatccggtctagggctggcgagctccgcggatccctgctcagagcggggctgctgcaccacctgccgcgggtggccaaagcagaaaaaaaagaaaaaaatgggagtggggaatacaaacgtcttattttcttttaaagaatagtgaaactaacagaggagaatctgaaaaaaagagaaacctgggtgaactttcacggacaacctcagaggacaacgaagtgttcggactcacaccacccggcaagaactgctcactacggctccctgccccagaagtcacacggccggacccaagatgaaaaccccgtagtccacttcttcaagaacattgtgacgcctcgcacaccacccccgtcgcagggaaagggggccgaaggccagagaccaggatttggctacggaggcagagcgtccgactataaatcggctcacaagggattcaagggagtcgatgcccagggcacgc

SEQ ID NO: 12141 - DNA, 570 bp, Homo sapiens
  source 1..570: mol_type = unassigned DNA
catccaagaagacagtgcagccacctccgagagcctggatgtgatggcgtcacagaagagaccctcccagaggcacggatccaagtacctggccacagcaagtaccatggaccatgccaggcatggcttcctcccaaggcacagagacacgggcatccttgactccatcgggcgcttctttggcggtgacaggggtgcgcccaagcggggctctggcaaggactcacaccacccggcaagaactgctcactacggctccctgccccagaagtcacacggccggacccaagatgaaaaccccgtagtccacttcttcaagaacattgtgacgcctcgcacaccacccccgtcgcagggaaaggggagaggactgtccctgagcagatttagctggagccgcaggactctctccttgtctggagttccagagagcccccactttctctttctaagctgtgttgtgtgtttcctgcgtgaagggggccgaaggccagagaccaggatttggctacggaggcagagcgtccgactataaatcggctcacaagggattcaagggagtcgatgccc

SEQ ID NO: 12142 - DNA, 558 bp, Homo sapiens
  source 1..558: mol_type = unassigned DNA
agaccatccaagaagacagtgcagccacctccgagagcctggatgtgatggcgtcacagaagagaccctcccagaggcacggatccaagtacctggccacagcaagtaccatggaccatgccaggcatggcttcctcccaaggcacagagacacgggcatccttgactccatcgggcgcttctttggcggtgacaggggtgcgcccaagcggggctctggcaaggactcacaccacccggcaagaactgctcactacggctccctgccccagaagtcacacggccggacccaagatgaaaaccccgtagtccacttcttcaagaacattgcaggagcccgttaggaaatggacggcggcacagggctcccagtgcagcccacggttctctgtgtctttccaggtgacgcctcgcacaccacccccgtcgcagggaaaggggagaggactgtccctgagcagatttagctggggggccgaaggccagagaccaggatttggctacggaggcagagcgtccgactataaatcggctcacaagggattcaagggagtcgat

SEQ ID NO: 12143 - DNA, 568 bp, Homo sapiens
  source 1..568: mol_type = unassigned DNA
agaccatccaagaagacagtgcagccacctccgagagcctggatgtgatggcgtcacagaagagaccctcccagaggcacggatccaagtacctggccacagcaagtaccatggaccatgccaggcatggcttcctcccaaggcacagagacacgggcatccttgactccatcgggcgcttctttggcggtgacaggggtgcgcccaagcggggctctggcaaggagagccgcacactgagtcggtgatagaaatctctccccagcaagtcgcacacccaaacccgctgctgccagcccgtagctgccccaggactcacaccacccggcaagaactgctcactacggctccctgccccagaagtcacacggccggacccaagatgaaaaccccgtagtccacttcttcaagaacattgtgacgcctcgcacaccacccccgtcgcagggaaaggggagaggactgtccctgagcagatttagctggggggccgaaggccagagaccaggatttggctacggaggcagagcgtccgactataaatcggctcacaagggattcaagggag

SEQ ID NO: 12144 - DNA, 580 bp, Homo sapiens
  source 1..580: mol_type = unassigned DNA
agaccatccaagaagacagtgcagccacctccgagagcctggatgtgatggcgtcacagaagagaccctcccagaggcacggatccaagtacctggccacagcaagtaccatggaccatgccaggcatggcttcctcccaaggcacagagacacgggcatccttgactccatcgggcgcttctttggcggtgacaggggtgcgcccaagcggggctctggcaaggactcacaccacccggcaagaactgctcactacggctccctgccccagaagtcacacggccggacccaagatgaaaaccccgtagtccacttcttcaagaacattgacagaagtggggaggctgggcacccgggtgcttctggcagctgatggatgctagccaccctcagcaggcaggagcccgttaggaaatggacggcggcacagggctcccagtgcagcccacggttctctgtgtctttccaggtgacgcctcgcacaccacccccgtcgcagggaaaggggagaggactgtccctgagcagatttagctggggggccgaaggccagagaccaggatttggctacggaggcag

SEQ ID NO: 12145 - DNA, 580 bp, Homo sapiens
  source 1..580: mol_type = unassigned DNA
agaccatccaagaagacagtgcagccacctccgagagcctggatgtgatggcgtcacagaagagaccctcccagaggcacggatccaagtacctggccacagcaagtaccatggaccatgccaggcatggcttcctcccaaggcacagagacacgggcatccttgactccatcgggcgcttctttggcggtgacaggggtgcgcccaagcggggctctggcaaggactcacaccacccggcaagaactgctcactacggctccctgccccagaagtcacacggccggacccaagatgaaaaccccgtagtccacttcttcaagaacattgtgacgcctcgcacaccacccccgtcgcagggaaaggggagaggactgtccctgagcagatttagctggacagatcctagaaccacagggcacatgtgaccagaatccaatctgtgcaaatcaatcagcaaaaggagcccccagcaaaggcgcaggccggggcctccggggaccggcacctacacagcgcacagccccccagggtccgagtcctccaaacccgtgtaggcaggagcctccttaccttgatt

SEQ ID NO: 12146 - DNA, 1290 bp, Homo sapiens
  source 1..1290: mol_type = unassigned DNA
agacagtgcagccacctccgagagcctggatgtgatggcgtcacagaagagaccctcccagaggcacggatccaagtacctggccacagcaagtaccatggaccatgccaggcatggcttcctcccaaggcacagagacacgggcatccttgactccatcgggcgcttctttggcggtgacaggggtgcgcccaagcggggctctggcaaggactcacaccacccggcaagaactgctcactacggctccctgccccagaagtcacacggccggacccaagatgaaaaccccgtagtccacttcttcaagaacattgtgacgcctcgcacaccacccccgtcgcagggaaaggggagaggactgtccctgagcagatttagctgggtaggtgacgaacgcacttccatcggcttcctcttccgtcccagtcctcacagccccgcaacttttgtgttctgctctgtttcggttgcttcctggcctccttttctctcctctcgagacctctctgcccacagctgggatcgggccgccttgtcttccactggggaaatgaaacgtggtcttcccttccggaaggtctggtctcttgcttctgtgccggggacccagccctgcaaggccagatcctcttctcccagagggttcccaggcgacgtgactggtctccctcccagggagggagcaacaccacgtccgagaaaatgtttaacttcctccaacacaaccagtgcgagaagccccaggaacccgcatgtggaagtgggactggctggcccgtctcagtgaccccagatgctgacactgggaaaatgattctgctgatgaacagaaaaagaggctaaatagagttgctcgatttataataacctcattaatccaaagatttttgttttgtatgtgtttaaataataattaaaacatagatatcaagccatccagaaaatcttccttaggaattttaggctggttaatactgaaagcaaactttcaaggaaggtttaaaatggccaatttgaactttctagtgaaaaaatttggtgtctgagccaaattaaaatgccaatcattatattctaaccaaacttacagactttagttactagcaaataccagatatgattcttactgtataaaagttataattttagaataaaatggaggaataaccaccaacgtattgtagataggttgtgtctgtctccgaaactgcaatgctctcatacgctagaacagagcctacctacactttctgctcaattaataagcatcatataaatgaatgaata

SEQ ID NO: 12147 - DNA, 400 bp, Homo sapiens
  source 1..400: mol_type = unassigned DNA
ccctctgccctctcatgcccgcagccagcctgggctgtgcaacatgtacaaggactcacaccacccggcaagaactgctcactacggctccctgccccagaagtcacacggccggacccaagatgaaaaccccgtagtccacttcttcaagaacattgtgacgcctcgcacaccacccccgtcgcagggaaaggggagaggactgtccctgagcagatttagctgggtaggtgacgaacgcacttccatcggcttcctcttccgtcccagtcctcacagccccgcaacttttgtgttctgctctgtttcggttgcttcctggcctccttttctctcctctcgagacctctctgcccacagctgggatcgggccgccttgtcttccactggggaaatgaaa

SEQ ID NO: 12148 - DNA, 561 bp, Homo sapiens
  source 1..561: mol_type = unassigned DNA
agaccatccaagaagacagtgcagccacctccgagagcctggatgtgatggcgtcacagaagagaccctcccagaggcacggatccaagtacctggccacagcaagtaccatggaccatgccaggcatggcttcctcccaaggcacagagacacgggcatccttgactccatcgggcgcttctttggcggtgacaggggtgcgcccaagcggggctctggcaaggtaccctggctaaagccgggccggagccctctgccctctcatgcccgcagccagcctgggctgtgcaacatgtacaaggactcacaccacccggcaagaactgctcactacggctccctgccccagaagtcacacggccggacccaagatgaaaaccccgtagtccacttcttcaagaacattgtgacgcctcgcacaccacccccgtcgcagggaaaggggagaggactgtccctgagcagatttagctgggtaggtgacgaacgcacttccatcggcttcctcttccgtcccagtcctcacagccccgcaacttttgtgttctgctctgtttcgg

SEQ ID NO: 12149 - DNA, 769 bp, Homo sapiens
  source 1..769: mol_type = unassigned DNA
tccagaccatccaagaagacagtgcagccacctccgagagcctggatgtgatggcgtcacagaagagaccctcccagaggcacggatccaagtacctggccacagcaagtaccatggaccatgccaggcatggcttcctcccaaggcacagagacacgggcatccttgactccatcgggcgcttctttggcggtgacaggggtgcgcccaagcggggctctggcaaggactcacaccacccggcaagaactgctcactacggctccctgccccagaagtcacacggccggacccaagatgaaaaccccgtagtccacttcttcaagaacattgtgacgcctcgcacaccacccccgtcgcagggaaaggtaagaccttggaatgttttgattgatcatcacttttctgatagaccttctctaaaatcccataatgtaccaaagagagagttaggctccgagctaccagaatccatcccaaaacgtgttgccaggcagctcccaagtagaacaggtcggcagatccatgcacccctcctgtccctcccgcacctgcacagccgctgtggccctgagcctgcggcccccctcggagctccgggtggaacctgtttttaccacctcagctccactgtgctttgactgtgtttcctgttgattgaaaggactttcccttcactgaccaccatgtcattatttctctgtcttcctcatgcaggggagaggactgtccctgagcagatttagctgggtaggtgacgaacgcactt

SEQ ID NO: 12150 - DNA, 569 bp, Homo sapiens
  source 1..569: mol_type = unassigned DNA
agctccagaccatccaagaagacagtgcagccacctccgagagcctggatgtgatggcgtcacagaagagaccctcccagaggcacggatccaagtacctggccacagcaagtaccatggaccatgccaggcatggcttcctcccaaggcacagagacacgggcatccttgactccatcgggcgcttctttggcggtgacaggggtgcgcccaagcggggctctggcaaggactcacaccacccggcaagaactgctcactacggctccctgccccagaagtcacacggccggacccaagatgaaaaccccgtagtccacttcttcaagaacattgtctatacttcttcaccaactaggacagaagtggggaggctgggcacccgggtgcttctggcagctgatggatgctagccaccctcagcaggcaggagcccgttaggaaatggacggcggcacagggctcccagtgcagcccacggttctctgtgtctttccaggtgacgcctcgcacaccacccccgtcgcagggaaaggggagaggactgtccctgagcagatttagctggg

SEQ ID NO: 12151 - DNA, 559 bp, Homo sapiens
  source 1..559: mol_type = unassigned DNA
agaccatccaagaagacagtgcagccacctccgagagcctggatgtgatggcgtcacagaagagaccctcccagaggcacggatccaagtacctggccacagcaagtaccatggaccatgccaggcatggcttcctcccaaggcacagagacacgggcatccttgactccatcgggcgcttctttggcggtgacaggggtgcgcccaagcggggctctggcaaggactcacaccacccggcaagaactgctcactacggctccctgccccagaagtcacacggccggacccaagatgaaaaccccgtagtccacttcttcaagaacattgtaagtgacgatcgatgggaagaggtagcaactgtgagggggaggaggggtgctggccactgctgtcatccacacaggacgttcgtacgctcgggggtggcaccggggtcatcatcagggtgaggccggccggggaactcccccctcgcacctgatcgcgagttccaggcaagcgcttcccgactgtatctgccacggattgcaccgtgcgctccgtgcgttctccagag

SEQ ID NO: 12152 - DNA, 875 bp, Homo sapiens
  source 1..875: mol_type = unassigned DNA
caattctaaatgccccacttctttcatgcatgaattgcaaaaagatgtggcaagttttgtttctaccaagaaaactaaaaacaccttttgtcaaataaatgctccttgcatatttaacttatgcaccagtggccttttaaacagtcaatgtcccatcaaggtgcctgcacatctgggctctccgggagcagccatggcagcacccgggaagaaacgctgatgtggctgctctgcatgctcagatgacttcatcgggaagcctgggtgcattttacgctgggtgccaaatctcgagtaactgaggaattcccagagccttctgaaacacagagctgcaataaggctgctccatccaggagaggcagatgcgaaccagaacaatgggacctcctctcaggacacagcggtgactgactccaagcgcacagcggacccgaagaatgcctggcaggatgcccacccagctgacccagggagccgcccccacttgatccgcctcttttcccgagatgccccggggagggaggacaacaccttcaaagacaggccctctgagtccgacgagctccagaccatccaagaagacagtgcagccacctccgagagcctggatgtgatggcgtcacagaagagaccctcccagaggcacggatccaagtacctggccacagcaagtaccatggaccatgccaggcatggcttcctcccaaggcacagagacacgggcatccttgactccatcgggcgcttctttggcggtgacaggggtgcgcccaagcggggctctggcaaggactcacaccacccggcaagaactgctcactacggctccctgccccagaagtcacacggccggacccaagatgaaaaccccg

SEQ ID NO: 12153 - DNA, 583 bp, Homo sapiens
  source 1..583: mol_type = unassigned DNA
agaccatccaagaagacagtgcagccacctccgagagcctggatgtgatggcgtcacagaagagaccctcccagaggcacggatccaagtacctggccacagcaagtaccatggaccatgccaggcatggcttcctcccaaggcacagagacacgggcatccttgactccatcgggcgcttctttggcggtgacaggggtgcgcccaagcggggctctggcaagacccttgtgctcctggcctgacttggaggacactgtccacccctcagccttggcgcccatggaggcttctggaaagacctgccctgcctctgaatccaccatcacccagcacactggcgtttaggaagcaaagcattttgtgccatgggaaagcacaggaggaagaaccaaaaatgcttggctcaggtctcatggcactgcgtcatagccgtggacctggggcaggtgtctgtcttctctgagcttccttccctctcctgtgaaacagcaatggtggcaaaagcgtcacctgtcctgcagatgctttggaacgttgtgctgatcaagcaagaaaagcaatgcaaaggccccacaggagc

SEQ ID NO: 12154 - DNA, 4800 bp, Homo sapiens
  source 1..4800: mol_type = unassigned DNA
tcctttcgcgtccacctgagcccccccgttttggaaggtggagtggggcttgggaaaaggttcaagcgtctttggggacccccgtgcgactctggctggaaacaggcgagctctggttccttgttccgttttccaattgcaacaaccctctgaagagccaatccattcaggatgggaaaccacgcaggcaaacgagaattaaatgccgagaaggccagtacgaatagtgaaactaacagaggagaatctgaaaaaaagagaaacctgggtgaactttcacggacaacctcagaggacaacgaagtgttcggagaggcagatgcgaaccagaacaatgggacctcctctcaggacacagcggtgactgactccaagcgcacagcggacccgaagaatgcctggcaggatgcccacccagctgacccagggagccgcccccacttgatccgcctcttttcccgagatgccccggggagggaggacaacaccttcaaagacaggccctctgagtccgacgagctccagaccatccaagaagacagtgcagccacctccgagagcctggatgtgatggcgtcacagaagagaccctcccagaggcacggatccaagtacctggccacagcaagtaccatggaccatgccaggcatggcttcctcccaaggcacagagacacgggcatccttgactccatcgggcgcttctttggcggtgacaggggtgcgcccaagcggggctctggcaaggtgagctctgaggagtagaggagttttagtttaaatggaaaaagcaaaggagaaatcagtaggtgaactcagccattagaggaagaactggcacgtagcctcttgctgtctaaggtctcgttccgtgctggagaatgcatatgagcccaagagtgtgggcctgagtggctgcttaggacgttttcgtttaactcaccccctcttttcctcacaagggatggtggccggggtgtggctcaggaatgtaaggacatgctgaattctggatctctaagggtgcctggacatgggcgttgcagaaagagagccacattctcagggtctctggtggtgtgtgcttgcggacttgatgactgatgttgcctctgcagcccacacgctggggttcaacactgggttatgctcgttttttcctggagtcagtgctgctagcttcatgttgctctgcgacaatcataggattgaggtcgaggaagacttttgaacaaactcctcaatttaaatccgccttgagcaaacgttctctgtggtctgagaagtggaaggggggagggataaatgagtgtctatgaatcaaagctttattatcttgtgattccattaatttgcatacagagtcttagaagtttctttattcaaaagcaaatgtggataaaaatgtattacaaaaaaaaaaaactctgctatggggtccagagtctaggagtggtttctgcagttgattgtcagtggagaacctgtggctgctggttcatcaaagcgctggtccctgagtgccattcagattgcagatgcagtattttacgtgatgtttagagtgtttggtggttgtgtaattttggagagaaagaagtttttcccaaaaaagtccctagtttattgggtgttctcacacaacctgtaagatgaagctgtttttctgcctgtgtgcagggctgattctggaattccagaaggccttgtgggagcgtaaaaggcttttgaataaagtgtggaacagagcgcctcattctgataacatgcaatcataaaaaccatagggcaacttggagttaaggagtttctagaatttgctttagtctccaactgcaattctttattgatcatgaaattgttgaagagaaacacaaatgtcagttttacctttcctgtgggcgtgaaagcacatcgaagtttcaggcaactgttaacatctctaccatctgtctgagttgagatttcaggttgtgacacttgccgtgacttatttgtaaatgacattttgtgtgtcttagatactaatggaattcatattctggctagttctttcagtgcatttgtagacatgttcttttcctttgtagcagtcctccctcaccctgaaatgttggtgttctaaccgatttctaatgctaatttcaactggaagcactttttcaagcccagctatcaaaccacaccagacatgtatggattcgggttgcccaataaagcgttgctattatgtaagcatccctcacgcatacagcatcaccagttttgaaagcttgaactattctgcttacttcaaggtacagaaaaaaaaaatgtacttaaactgtgcagaaaagatgaaatcactggataatatgtattataaaataagcttcatgtgagtgacactggtttaagttgaaataaaatggtgaaagcattgatatcaatcattgtgactttatctcaaaacaatattgacacacatagatgtttttcttcctttatggtaagattacagcctttattgtcttaaatctcttatactcttcaatattttcaaagaaaacattctagtctcagaaatagtccatctctttgcaaaacagggctggccaattatcaaggacccataaaaatcaaaacactttcaaaaattttaaaaataaaaataattttcacatgattgctttaggaattttgaagtatccattcttttcactatggagtgttgaatatagaagattttttaatgaacaggcttgccctttgatgccaaaggcaaaaaataataataataacatttgcacgtgtgatcacagagcagctgtgaggcatcccgggggagcgcacgcagtggggatgtgattgctccactcaactattttatcacaaagtgttgtaaacatgggagatgaaagcttaactctctctacacccagctacagacccgcaatggccctaaaaatctggggtattcattgggtgggctgccatggaggaatttttggttttgtttttatttttatttgttgttctgtttacaaatcaggagagcccctgtttttatatgctaggaaggtccttgggataggccgaagaggtgtgcaaacgagcagtggaaggcccgggccctgtctctcaggaccacggcggcctgccccacacacagttctgcttctccctatctagaacgaggttttcctggcagattcctgccagactctgagtggagcccccccatgaccctataaaaggggctgtttgtcctcctcccaccctcctgtgctcttcctccctccccttgagggcacatggccgctggtaccacatgttggagcggccgcccccgagcccgggaatgccctaacaacacccatgcttgtgttgctgggagctgacattcaagaaaagtgcattaaaaattccttgagaaggcatattcttttgagagccgtaaatgaaaagtgcattcacggagaacatgctcctttgttgtgagaggaaagaaaggactgttgttgcctttaaggaacaggtttcccagttccccggaatgtcagggtcacatgaggaatgggtgagcacttagggccaagattgtcgtgtgcttggcccggcagcttctctctaagtgacctctccagcatcactctgtgccagtgctcatatctgaggccacttgagtgtcacgaggcagagcctggaaacattagctttggaaaccgttccttcctttttatgtggaggaagtaaggtttcacaagacacctaagctggacatggtgatgtgccacttggatagttcccaaagcagaaagcagccaggacatcccagtaccccacttctccgtgccgtgtacttttagggaggttttcgaaagctagcttcttaccgatgattttgtctatttttctgttttatgtgaaaaccttcatttataacctgctcttctcagtgttcttctattcagcattcagtatgacttctatgcctctaattgcgactgtatggagaagaactgtttgtcattcagtgccgtgggatataatcagtcctgtaaattcatcagaatgttctgttgcctgattttttttccattgcattttaatttcattaaacatattttagttctacagtaacctaattcctcattgttaccatgagatcctaattctgtagctgtgttctgtaatcccatggggcgtgtaccatttggagacacatgaaggatacagtagacagcacggaaggcagcagcaacacacaggggtgtcctccctccccagagcccagtgtgcacacagaaccaaattcaatctcattcatcgtgagcttgcatggtaactgatccagccactcagtacctccattggataagagatttggccacagattcttctagagaaaatccaaatgtggagggtgcatttgtttctgcacccaaacaaataccttttgagatttcttataggcattcctctcaaagtctcattactctgatcagttattgatcggaggctaccctggctcagtcaccagctgctcactgtgtccttctgtggtctcaggagctgcagttgttgctgttgtatgaatagacgatagttaattagactggatgtgtctgtactggcagtgattttgcaacttcctctgtataagcgatacatttgtaaatcatgggaatgtatttgatggtaattgcctgtggtggttgtatcatgatttaattttattatgagcttttggctttatatatttttctgcctttttatgcattcattaaacagtttaacagaccaaggacagtgtactaa

SEQ ID NO: 12155 - DNA, 4844 bp, Homo sapiens
  source 1..4844: mol_type = unassigned DNA
cgcgccagagagaagcagcctccggccccggcggcccctgtctcccgaccccggaaggcgaagcaggctgcccggggaccccgcgcgtgggcgcttgaagccgagaccagcctgcccgggcctgggcaggcggagcagggccttggaccccgcggcgcccctcggcctcggagcaacgagcgcagcgccgcctctgaagagccaatccattcaggatgggaaaccacgcaggcaaacgagaattaaatgccgagaaggccagtacgaatagtgaaactaacagaggagaatctgaaaaaaagagaaacctgggtgaactttcacggacaacctcagaggacaacgaagtgttcggagaggcagatgcgaaccagaacaatgggacctcctctcaggacacagcggtgactgactccaagcgcacagcggacccgaagaatgcctggcaggatgcccacccagctgacccagggagccgcccccacttgatccgcctcttttcccgagatgccccggggagggaggacaacaccttcaaagacaggccctctgagtccgacgagctccagaccatccaagaagacagtgcagccacctccgagagcctggatgtgatggcgtcacagaagagaccctcccagaggcacggatccaagtacctggccacagcaagtaccatggaccatgccaggcatggcttcctcccaaggcacagagacacgggcatccttgactccatcgggcgcttctttggcggtgacaggggtgcgcccaagcggggctctggcaaggtgagctctgaggagtagaggagttttagtttaaatggaaaaagcaaaggagaaatcagtaggtgaactcagccattagaggaagaactggcacgtagcctcttgctgtctaaggtctcgttccgtgctggagaatgcatatgagcccaagagtgtgggcctgagtggctgcttaggacgttttcgtttaactcaccccctcttttcctcacaagggatggtggccggggtgtggctcaggaatgtaaggacatgctgaattctggatctctaagggtgcctggacatgggcgttgcagaaagagagccacattctcagggtctctggtggtgtgtgcttgcggacttgatgactgatgttgcctctgcagcccacacgctggggttcaacactgggttatgctcgttttttcctggagtcagtgctgctagcttcatgttgctctgcgacaatcataggattgaggtcgaggaagacttttgaacaaactcctcaatttaaatccgccttgagcaaacgttctctgtggtctgagaagtggaaggggggagggataaatgagtgtctatgaatcaaagctttattatcttgtgattccattaatttgcatacagagtcttagaagtttctttattcaaaagcaaatgtggataaaaatgtattacaaaaaaaaaaaactctgctatggggtccagagtctaggagtggtttctgcagttgattgtcagtggagaacctgtggctgctggttcatcaaagcgctggtccctgagtgccattcagattgcagatgcagtattttacgtgatgtttagagtgtttggtggttgtgtaattttggagagaaagaagtttttcccaaaaaagtccctagtttattgggtgttctcacacaacctgtaagatgaagctgtttttctgcctgtgtgcagggctgattctggaattccagaaggccttgtgggagcgtaaaaggcttttgaataaagtgtggaacagagcgcctcattctgataacatgcaatcataaaaaccatagggcaacttggagttaaggagtttctagaatttgctttagtctccaactgcaattctttattgatcatgaaattgttgaagagaaacacaaatgtcagttttacctttcctgtgggcgtgaaagcacatcgaagtttcaggcaactgttaacatctctaccatctgtctgagttgagatttcaggttgtgacacttgccgtgacttatttgtaaatgacattttgtgtgtcttagatactaatggaattcatattctggctagttctttcagtgcatttgtagacatgttcttttcctttgtagcagtcctccctcaccctgaaatgttggtgttctaaccgatttctaatgctaatttcaactggaagcactttttcaagcccagctatcaaaccacaccagacatgtatggattcgggttgcccaataaagcgttgctattatgtaagcatccctcacgcatacagcatcaccagttttgaaagcttgaactattctgcttacttcaaggtacagaaaaaaaaaatgtacttaaactgtgcagaaaagatgaaatcactggataatatgtattataaaataagcttcatgtgagtgacactggtttaagttgaaataaaatggtgaaagcattgatatcaatcattgtgactttatctcaaaacaatattgacacacatagatgtttttcttcctttatggtaagattacagcctttattgtcttaaatctcttatactcttcaatattttcaaagaaaacattctagtctcagaaatagtccatctctttgcaaaacagggctggccaattatcaaggacccataaaaatcaaaacactttcaaaaattttaaaaataaaaataattttcacatgattgctttaggaattttgaagtatccattcttttcactatggagtgttgaatatagaagattttttaatgaacaggcttgccctttgatgccaaaggcaaaaaataataataataacatttgcacgtgtgatcacagagcagctgtgaggcatcccgggggagcgcacgcagtggggatgtgattgctccactcaactattttatcacaaagtgttgtaaacatgggagatgaaagcttaactctctctacacccagctacagacccgcaatggccctaaaaatctggggtattcattgggtgggctgccatggaggaatttttggttttgtttttatttttatttgttgttctgtttacaaatcaggagagcccctgtttttatatgctaggaaggtccttgggataggccgaagaggtgtgcaaacgagcagtggaaggcccgggccctgtctctcaggaccacggcggcctgccccacacacagttctgcttctccctatctagaacgaggttttcctggcagattcctgccagactctgagtggagcccccccatgaccctataaaaggggctgtttgtcctcctcccaccctcctgtgctcttcctccctccccttgagggcacatggccgctggtaccacatgttggagcggccgcccccgagcccgggaatgccctaacaacacccatgcttgtgttgctgggagctgacattcaagaaaagtgcattaaaaattccttgagaaggcatattcttttgagagccgtaaatgaaaagtgcattcacggagaacatgctcctttgttgtgagaggaaagaaaggactgttgttgcctttaaggaacaggtttcccagttccccggaatgtcagggtcacatgaggaatgggtgagcacttagggccaagattgtcgtgtgcttggcccggcagcttctctctaagtgacctctccagcatcactctgtgccagtgctcatatctgaggccacttgagtgtcacgaggcagagcctggaaacattagctttggaaaccgttccttcctttttatgtggaggaagtaaggtttcacaagacacctaagctggacatggtgatgtgccacttggatagttcccaaagcagaaagcagccaggacatcccagtaccccacttctccgtgccgtgtacttttagggaggttttcgaaagctagcttcttaccgatgattttgtctatttttctgttttatgtgaaaaccttcatttataacctgctcttctcagtgttcttctattcagcattcagtatgacttctatgcctctaattgcgactgtatggagaagaactgtttgtcattcagtgccgtgggatataatcagtcctgtaaattcatcagaatgttctgttgcctgattttttttccattgcattttaatttcattaaacatattttagttctacagtaacctaattcctcattgttaccatgagatcctaattctgtagctgtgttctgtaatcccatggggcgtgtaccatttggagacacatgaaggatacagtagacagcacggaaggcagcagcaacacacaggggtgtcctccctccccagagcccagtgtgcacacagaaccaaattcaatctcattcatcgtgagcttgcatggtaactgatccagccactcagtacctccattggataagagatttggccacagattcttctagagaaaatccaaatgtggagggtgcatttgtttctgcacccaaacaaataccttttgagatttcttataggcattcctctcaaagtctcattactctgatcagttattgatcggaggctaccctggctcagtcaccagctgctcactgtgtccttctgtggtctcaggagctgcagttgttgctgttgtatgaatagacgatagttaattagactggatgtgtctgtactggcagtgattttgcaacttcctctgtataagcgatacatttgtaaatcatgggaatgtatttgatggtaattgcctgtggtggttgtatcatgatttaattttattatgagcttttggctttatatatttttctgcctttttatgcattcattaaacagtttaacagaccaaggacagtgtactaa

SEQ ID NO: 12156 - DNA, 563 bp, Homo sapiens
  source 1..563: mol_type = unassigned DNA
ttgcattcccaccggcggtgtgtgagtgattcaggaccttcccagcctgggcagcatttgcctctgaagagccaatccattcaggatgggaaaccacgcaggcaaacgagaattaaatgccgagaaggccagtacgaatagtgaaactaacagaggagaatctgaaaaaaagagaaacctgggtgaactttcacggacaacctcagaggacaacgaagtgttcggagaggcagatgcgaaccagaacaatgggacctcctctcaggacacagcggtgactgactccaagcgcacagcggacccgaagaatgcctggcaggatgcccacccagctgacccagggagccgcccccacttgatccgcctcttttcccgagatgccccggggagggaggacaacaccttcaaagacaggccctctgagtccgacgagctccagaccatccaagaagacagtgcagccacctccgagagcctggatgtgatggcgtcacagaagagaccctcccagaggcacggatccaagtacctggccacagcaagtaccatggaccatgccaggc

SEQ ID NO: 12157 - DNA, 913 bp, Homo sapiens
  source 1..913: mol_type = unassigned DNA
tgcgcgcccgtccctcggagccgccgccgtcagtcaccgccgccgcgcgccagagagaagcagcctccggccccggcggcccctgtctcccgaccccggaaggcgaagcaggctgcccggggaccccgcgcgtgggcgcttgaagccgagaccagcctgcccgggcctgggcaggcggagcagggccttggaccccgcggcgcccctcggcctcggagcaacgagcgcagcgccgcctctgaagagccaatccattcaggatgggaaaccacgcaggcaaacgagaattaaatgccgagaaggccagtacggacatcgcccagagcagcaacatcctgcggaaaagagtgtcagtggcatcttttgttatgcagaggagatggaatcctcccaggtgactgatagctgagagggagggaaactatcaggagagccaagaagagagatgggttccaggaggagaaagttgtccacaacaggaagagctgccacagggctcccctctgcctggctcctgcagaccccatcttcacagaatagtgaaactaacagaggagaatctgaaaaaaagagaaacctgggtgaactttcacggacaacctcagaggacaacgaagtgttcggagaggcagatgcgaaccagaacaatgggacctcctctcaggacacagcggtgactgactccaagcgcacagcggacccgaagaatgcctggcaggatgcccacccagctgacccagggagccgcccccacttgatccgcctcttttcccgagatgccccggggagggaggacaacaccttcaaagacaggccctctgagtccgacgagctccagaccatccaagaagacagtgcagccacctccgagagcctggatgtgatggcgtcacagaagagaccctcccagagg

SEQ ID NO: 12158 - DNA, 531 bp, Homo sapiens
  source 1..531: mol_type = unassigned DNA
caggctgctccaggtcccctggaagctccagatccagatccctgactgggggtgtaggtcaggaggaacgcggggcctcattctgggactcccccaacctcctcctcttccaccatcaggaggctgagaatccagagaaagatctctgaccactaaatctgtgtgcagcctctgaagagccaatccattcaggatgggaaaccacgcaggcaaacgagaattaaatgccgagaaggccagtacgaatagtgaaactaacagaggagaatctgaaaaaaagagaaacctgggtgaactttcacggacaacctcagaggacaacgaagtgttcggagaggcagatgcgaaccagaacaatgggacctcctctcaggacacagcggtgactgactccaagcgcacagcggacccgaagaatgcctggcaggatgcccacccagctgacccagggagccgcccccacttgatccgcctcttttcccgagatgccccggggagggaggacaacaccttcaaagacaggccctctga

SEQ ID NO: 12159 - DNA, 578 bp, Homo sapiens
  source 1..578: mol_type = unassigned DNA
gtgtttgcctccagccttccctagattcccacgccggcctcaccctacagcgctgcgcgactgctttgcagaagccagatgattctgcctgtgcaggaatgaagtgcgacccggcgcgcgagggagggaggcctctgcgctttggctccggccgcgcctcctccctgggatccggtctagggctggcgagctccgcggatccctgctcagagcggggctgctgcaccacctgccgcgggtggccaaagcagaaaaaaaagaaaaaaatgggagtggggaatacaaacgtcttattttcttttaaagaatagtgaaactaacagaggagaatctgaaaaaaagagaaacctgggtgaactttcacggacaacctcagaggacaacgaagtgttcggagaggcagatgcgaaccagaacaatgggacctcctctcaggacacagcggtgactgactccaagcgcacagcggacccgaagaatgcctggcaggatgcccacccagctgacccagggagccgcccccacttgatccgcctcttttcccgagatgccccggggagggaggacaacaccttcaa

SEQ ID NO: 12160 - DNA, 889 bp, Homo sapiens
  source 1..889: mol_type = unassigned DNA
caggctgctccaggtcccctggaagctccagatccagatccctgactgggggtgtaggtcaggaggaacgcggggcctcattctgggactcccccaacctcctcctcttccaccatcaggaggctgagaatccagagaaagatctctgaccactaaatctgtgtgcagcctctgaagagccaatccattcaggatgggaaaccacgcaggcaaacgagaattaaatgccgagaaggccagtacggacatcgcccagagcagcaacatcctgcggaaaagagtgtcagtggcatcttttgttatgcagaggagatggaatcctcccaggtgactgatagctgagagggagggaaactatcaggagagccaagaagagagatgggttccaggaggagaaagttgtccacaacaggaagagctgccacagggctcccctctgcctggctcctgcagaccccatcttcacagaaaggaaagccagatcactcagaaagtcacttccttccggtcacccaaacccacacctggattgctgtgacacggctgtcatgccattgagcgccaaattccctgggaaattcttcctttctgatctgactgcagtgtgctggcaattgacagatctgtacgtgtaaaatttctactttatagaatagtgaaactaacagaggagaatctgaaaaaaagagaaacctgggtgaactttcacggacaacctcagaggacaacgaagtgttcggagaggcagatgcgaaccagaacaatgggacctcctctcaggacacagcggtgactgactccaagcgcacagcggacccgaagaatgcctggcaggatgcccacccagctgacccagggagccgcccccacttgatccgcctcttttccc

SEQ ID NO: 12161 - DNA, 876 bp, Homo sapiens
  source 1..876: mol_type = unassigned DNA
ccctacagcgctgcgcgactgctttgcagaagccagatgattctgcctgtgcaggaatgaagtgcgacccggcgcgcgagggagggaggcctctgcgctttggctccggccgcgcctcctccctgggatccggtctagggctggcgagctccgcggatccctgctcagagcggggctgctgcaccacctgccgcgggtggccaaagcagaaaaaaaagaaaaaaatgggagtggggaatacaaacgtcttattttcttttaaagaatagtgaaactaacagaggagaatctgaaaaaaagagaaacctgggtgaactttcacggacaacctcagaggacaacgaagtgttcggtaggtgacgcagatatcggcaacatggcgccacatggtgacagcgtgcacctgcactctcactcggggaagcctttgatttttttattgcatgggtgatccatggatctgtctgtactcattactaaaacatagaggctgggatcattgcttcatgtctgtaatcgcacacttcatggggtctatgcaagaggatcgcttgagcccaggagctcaagaccagcccgggcaacacaatgagacctcgtctctacaaaaaataaaataaataaattagccaggtgtggtggcatgcacccgtggccccagatacttgggaggctgaagtgagaggatcacttgggcccaggaggtcgaggctgcagtgagctatgattgctccactgcactccaggctgggcaacagagcaagacgctgtctaaaaaaaattaaaatgtcggctgtgtagatacgtggcagatacagccccttcctcccctcctgcaatcccttcccatctcggttttgtttttgctcgcatgcc

SEQ ID NO: 12162 - DNA, 573 bp, Homo sapiens
  source 1..573: mol_type = unassigned DNA
ctactttttaattggattgtttggttttaacaactgagttttcctaattctttatattttctagatgctggccttaccactcggtgattattttctaccactttatcttgttttttcaccctcttcacagagtcctttgcagaaagttttacattttgttgaattcaagtttattaattttaccttttttggattttgatttttggtgtgaagtctaagtcttcacctagcctgaggttcccgaagattttctccttttttccctacaaattttatagtttcacattttatacttaagcctattttccattttgagttaatttttgtatgaggtgtgaggtttaggttgaggcttatttgttttggtttggtttgggttttgccaacgaatgtccaatagctccgggactattagttgaaaagcctctgaagagccaatccattcaggatgggaaaccacgcaggcaaacgagaattaaatgccgagaaggccagtacgaatagtgaaactaacagaggagaatctgaaaaaaagagaaacctgggtgaactttcacggacaacctcagagga

SEQ ID NO: 12163 - DNA, 2772 bp, Homo sapiens
  source 1..2772: mol_type = unassigned DNA
tgggtgcgcgcccgtccctcggagccgccgccgtcagtcaccgccgccgcgcgccagagagaagcagcctccggccccggcggcccctgtctcccgaccccggaaggcgaagcaggctgcccggggaccccgcgcgtgggcgcttgaagccgagaccagcctgcccgggcctgggcaggcggagcagggccttggaccccgcggcgcccctcggcctcggagcaacgagcgcagcgccgcctctgaagagccaatccattcaggatgggaaaccacgcaggcaaacgagaattaaatgccgagaaggccagtacgaatagtgaaactaacagaggagaatctgaaaaaaagagaaacctgggtgaactttcacggacaacctcagaggacaacgaagtgttcggagaggcagatgcgaaccagaacaatgggacctcctctcaggacacagcggtgactgactccaagcgcacagcggacccgaagaatgcctggcaggatgcccacccagctgacccagggagccgcccccacttgatccgcctcttttcccgagatgccccggggagggaggacaacaccttcaaagacaggccctctgagtccgacgagctccagaccatccaagaagacagtgcagccacctccgagagcctggatgtgatggcgtcacagaagagaccctcccagaggcacggatccaagtacctggccacagcaagtaccatggaccatgccaggcatggcttcctcccaaggcacagagacacgggcatccttgactccatcgggcgcttctttggcggtgacaggggtgcgcccaagcggggctctggcaaggactcacaccacccggcaagaactgctcactacggctccctgccccagaagtcacacggccggacccaagatgaaaaccccgtagtccacttcttcaagaacattgtgacgcctcgcacaccacccccgtcgcagggaaaggggagaggactgtccctgagcagatttagctggggggccgaaggccagagaccaggatttggctacggaggcagagcgtccgactataaatcggctcacaagggattcaagggagtcgatgcccagggcacgctttccaaaatttttaagctgggaggaagagatagtcgctctggatcacccatggctagacgctgaaaacccacctggttccggaatcctgtcctcagcttcttaatataactgccttaaaactttaatcccacttgcccctgttacctaattagagcagatgacccctcccctaatgcctgcggagttgtgcacgtagtagggtcaggccacggcagcctaccggcaatttccggccaacagttaaatgagaacatgaaaacagaaaacggttaaaactgtccctttctgtgtgaagatcacgttccttcccccgcaatgtgcccccagacgcacgtgggtcttcagggggccaggtgcacagacgtccctccacgttcacccctccacccttggactttcttttcgccgtggctgcggcacccttgcgcttttgctggtcactgccatggaggcacacagctgcagagacagagaggacgtgggcggcagagaggactgttgacatccaagcttcctttgtttttttttcctgtccttctctcacctcctaaagtagacttcatttttcctaacaggattagacagtcaaggagtggcttactacatgtgggagcttttggtatgtgacatgcgggctgggcagctgttagagtccaacgtggggcagcacagagagggggccacctccccaggccgtggctgcccacacaccccaattagctgaattcgcgtgtggcagagggaggaaaaggaggcaaacgtgggctgggcaatggcctcacataggaaacagggtcttcctggagatttggtgatggagatgtcaagcaggtggcctctggacgtcaccgttgccctgcatggtggccccagagcagcctctatgaacaacctcgtttccaaaccacagcccacagccggagagtccaggaagacttgcgcactcagagcagaagggtaggagtcctctagacagcctcgcagccgcgccagtcgcccatagacactggctgtgaccgggcgtgctggcagcggcagtgcacagtggccagcactaaccctccctgagaagataaccggctcattcacttcctcccagaagacgcgtggtagcgagtaggcacaggcgtgcacctgctcccgaattactcaccgagacacacgggctgagcagacggccccgtggatggagacaaagagctcttctgaccatatccttcttaacacccgctggcatctcctttcgcgcctccctccctaacctactgacccaccttttgattttagcgcacctgtgattgataggccttccaaagagtcccacgctggcatcaccctccccgaggacggagatgaggagtagtcagcgtgatgccaaaacgcgtcttcttaatccaattctaattctgaatgtttcgtgtgggcttaataccatgtctattaatatatagcctcgatgatgagagagttacaaagaacaaaactccagacacaaacctccaaatttttcagcagaagcactctgcgtcgctgagctgaggtcggctctgcgatccatacgtggccgcacccacacagcacgtgctgtgacgatggctgaacggaaagtgtacactgttcctgaatattgaaataaaacaataaacttttaatggt

SEQ ID NO: 12164 - DNA, 3313 bp, Homo sapiens
  source 1..3313: mol_type = unassigned DNA
ctccggccgggaagcatggggcttcccaggctggtctgcgccttcttgctcgccgcctgctgctgctgtcctcgcgtcgcgggtgtgcccggagaggctgagcagcctgcgcctgagctggtggaggtggaagtgggcagcacagcccttctgaagtgcggcctctcccagtcccaaggcaacctcagccatgtcgactggttttctgtccacaaggagaagcggacgctcatcttccgtgtgcgccagggccagggccagagcgaacctggggagtacgagcagcggctcagcctccaggacagaggggctactctggccctgactcaagtcaccccccaagacgagcgcatcttcttgtgccagggcaagcgccctcggtcccaggagtaccgcatccagctccgcgtctacaaagctccggaggagccaaacatccaggtcaaccccctgggcatccctgtgaacagtaaggagcctgaggaggtcgctacctgtgtagggaggaacgggtaccccattcctcaagtcatctggtacaagaatggccggcctctgaaggaggagaagaaccgggtccacattcagtcgtcccagactgtggagtcgagtggtttgtacaccttgcagagtattctgaaggcacagctggttaaagaagacaaagatgcccagttttactgtgagctcaactaccggctgcccagtgggaaccacatgaaggagtccagggaagtcaccgtccctgttttctacccgacagaaaaagtgtggctggaagtggagcccgtgggaatgctgaaggaaggggaccgcgtggaaatcaggtgtttggctgatggcaaccctccaccacacttcagcatcagcaagcagaaccccagcaccagggaggcagaggaagagacaaccaacgacaacggggtcctggtgctggagcctgcccggaaggaacacagtgggcgctatgaatgtcagggcctggacttggacaccatgatatcgctgctgagtgaaccacaggaactactggtgaactatgtgtctgacgtccgagtgagtcccgcagcccctgagagacaggaaggcagcagcctcaccctgacctgtgaggcagagagtagccaggacctcgagttccagtggctgagagaagagacaggccaggtgctggaaagggggcctgtgcttcagttgcatgacctgaaacgggaggcaggaggcggctatcgctgcgtggcgtctgtgcccagcatacccggcctgaaccgcacacagctggtcaacgtggccatttttggccccccttggatggcattcaaggagaggaaggtgtgggtgaaagagaatatggtgttgaatctgtcttgtgaagcgtcagggcacccccggcccaccatctcctggaacgtcaacggcacggcaagtgaacaagaccaagatccacagcgagtcctgagcaccctgaatgtcctcgtgaccccggagctgttggagacaggtgttgaatgcacggcctccaacgacctgggcaaaaacaccagcatcctcttcctggagctggtcaatttaaccaccctcacaccagactccaacacaaccactggcctcagcacttccactgccagtcctcataccagagccaacagcacctccacagagagaaagctgccggagccggagagccggggcgtggtcatcgtggctgtgattgtgtgcatcctggtcctggcggtgctgggcgctgtcctctatttcctctataagaagggcaagctgccgtgcaggcgctcagggaagcaggagatcacgctacccccgtctcgtaagagcgaacttgtagttgaagttaagtcagataagctcccagaagagatgggcctcctgcagggcagcagcggtgacaagagggctccgggagaccagggagagaaatacatcgatctgaggcattagccccgaatcacttcagctcccttccctgcctggaccattcccagctccctgctcactcttctctcagccaaagcctccaaagggactagagagaagcctcctgctcccctcgcctgcacaccccctttcagagggccactgggttaggacctgaggacctcacttggccctgcaaggcccgcttttcagggaccagtccaccaccatctcctccacgttgagtgaagctcatcccaagcaaggagccccagtctcccgagcgggtaggagagtttcttgcagaacgtgttttttctttacacacattatggctgtaaatacctggctcctgccagcagctgagctgggtagcctctctgagctggtttcctgccccaaaggctggcttccaccatccaggtgcaccactgaagtgaggacacaccggagccaggcgcctgctcatgttgaagtgcgctgttcacacccgctccggagagcaccccagcagcatccagaagcagctgcagtgttgctgccaccaccctcctgtctgcctcttcaaagtctcctgtgacattttttctttggtcagaagccaggaactggtgtcattccttaaaagatacgtgccggggccaggtgtggtggctcacgcctgtaatcccagcactttgggaggccgaggcgggcggatcacaaagtcaggacgagaccatcctggctaacacggtgaaaccctgtctctactaaaaatacaaaaaaaaattagctaggcgtagtggttggcacctatagtcccagctactcggaaggctgaagcaggagaatggtatgaatccaggaggtggagcttgcagtgagccgagaccgtgccactgcactccagcctgggcaacacagcgagactccgtctcgaggaaaaaaaaagaaaagatacgtgcctgcggtgaggaagctgggcgctgttttcgagttcaggtgaattagcctcaatcccccgtgttcacttggctcccatagccctcttgatggatcacgtaaaactgaaaggcagcggggagcagacaaagatgaggtctacactgtccttcatggggattaaagctatggttatattagcaccaaacttctacaaaccaagctcagggccccaaccctagaagggcccaaatgagagaatggtacttagggatggaaaacgggcctggctagagcttcgggtgtgtgtgtctgtctgtgtgtatgcatacatatgtgtgtatatatggttttgtcaggtgtgtaaatttgcaaattgtttcctttatatatgtatgtatatatatatatgaaaatatatatatatatgaaaaataaagcttaattgtcccagaaa

SEQ ID NO: 12165 - DNA, 3164 bp, Homo sapiens
  source 1..3164: mol_type = unassigned DNA
acttggctctcgccctccggccgggaagcatggggcttcccaggctggtctgcgccttcttgctcgccgcctgctgctgctgtcctcgcgtcgcgggtgtgcccggagaggctgagcagcctgcgcctgagctggtggaggtggaagtgggcagcacagcccttctgaagtgcggcctctcccagtcccaaggcaacctcagccatgtcgactggttttctgtccacaaggagaagcggacgctcatcttccgtgtgcgccagggccagggccagagcgaacctggggagtacgagcagcggctcagcctccaggacagaggggctactctggccctgactcaagtcaccccccaagacgagcgcatcttcttgtgccagggcaagcgccctcggtcccaggagtaccgcatccagctccgcgtctacaaagctccggaggagccaaacatccaggtcaaccccctgggcatccctgtgaacagtaaggagcctgaggaggtcgctacctgtgtagggaggaacgggtaccccattcctcaagtcatctggtacaagaatggccggcctctgaaggaggagaagaaccgggtccacattcagtcgtcccagactgtggagtcgagtggtttgtacaccttgcagagtattctgaaggcacagctggttaaagaagacaaagatgcccagttttactgtgagctcaactaccggctgcccagtgggaaccacatgaaggagtccagggaagtcaccgtccctgttttctacccgacagaaaaagtgtggctggaagtggagcccgtgggaatgctgaaggaaggggaccgcgtggaaatcaggtgtttggctgatggcaaccctccaccacacttcagcatcagcaagcagaaccccagcaccagggaggcagaggaagagacaaccaacgacaacggggtcctggtgctggagcctgcccggaaggaacacagtgggcgctatgaatgtcagggcctggacttggacaccatgatatcgctgctgagtgaaccacaggaactactggtgaactatgtgtctgacgtccgagtgagtcccgcagcccctgagagacaggaaggcagcagcctcaccctgacctgtgaggcagagagtagccaggacctcgagttccagtggctgagagaagagacaggccaggtgctggaaagggggcctgtgcttcagttgcatgacctgaaacgggaggcaggaggcggctatcgctgcgtggcgtctgtgcccagcatacccggcctgaaccgcacacagctggtcaacgtggccatttttggccccccttggatggcattcaaggagaggaaggtgtgggtgaaagagaatatggtgttgaatctgtcttgtgaagcgtcagggcacccccggcccaccatctcctggaacgtcaacggcacggcaagtgaacaagaccaagatccacagcgagtcctgagcaccctgaatgtcctcgtgaccccggagctgttggagacaggtgttgaatgcacggcctccaacgacctgggcaaaaacaccagcatcctcttcctggagctgggtgagggctgcatccctgcaggggatggcaggggcaggcccaggcacgggcagtaacttgcgcttctcctaacacccctccctctgcctcctagtcaatttaaccaccctcacaccagactccaacacaaccactggcctcagcacttccactgccagtcctcataccagagccaacagcacctccacaggtaagccaggcctggcaagagaacagggctgtgccagggcatcctttctgccctgtccctccccagagagccctgtccagaaaggtgagtagcagccccatcttgtcggccctggactggctgggccaacgatggtgacgaagtggcctggggcagggagtgacgaggagtgtctttgtggcgcagagagaaagctgccggagccggagagccggggcgtggtcatcgtggctgtgattgtgtgcatcctggtcctggcggtgctgggcgctgtcctctatttcctctataagaagggcaagctgccgtgcaggcgctcagggaagcaggagatcacgctacccccgtctcgtaagagcgaacttgtagttgaagttaagtcagataagctcccagaagagatgggcctcctgcagggcagcagcggtgacaagagggctccgggagaccagggagagaaatacatcgatctgaggcattagccccgaatcacttcagctcccttccctgcctggaccattcccagctccctgctcactcttctctcagccaaagcctccaaagggactagagagaagcctcctgctcccctcgcctgcacaccccctttcagagggccactgggttaggacctgaggacctcacttggccctgcaaggcccgcttttcagggaccagtccaccaccatctcctccacgttgagtgaagctcatcccaagcaaggagccccagtctcccgagcgggtaggagagtttcttgcagaacgtgttttttctttacacacattatggctgtaaatacctggctcctgccagcagctgagctgggtagcctctctgagctggtttcctgccccaaaggctggcttccaccatccaggtgcaccactgaagtgaggacacaccggagccaggcgcctgctcatgttgaagtgcgctgttcacacccgctccggagagcaccccagcagcatccagaagcagctgcagtgttgctgccaccaccctcctgtctgcctcttcaaagtctcctgtgacattttttctttggtcagaagccaggaactggtgtcattccttaaaagatacgtgccggggccaggtgtggtggctcacgcctgtaatcccagcactttgggaggccgaggcgggcggatcacaaagtcaggacgagaccatcctggctaacacggtgaaaccctgtctctactaaaaatacaaaaaaaaattagctaggcgtagtggttggcacctatagtcccagctactcggaaggctgaagcaggagaatggtatgaatccaggaggtggagcttgcagtgagccgagaccgtgccactgcactccagcctgggcaacacagcgagactccgtctcgaggaaaaaaaaagaaaa

SEQ ID NO: 12166 - DNA, 4865 bp, Homo sapiens
  source 1..4865: mol_type = unassigned DNA
atctccagggtttgctggctcaccctccacctcccccagcgagcaaaggggtggccccgctgggcaacagacctctacccaaatccaggcccctatttggcactccctggtggaggcgcgccagcagatgtggaccccttttctgaggccaggctgctggggtcagagtgaggcaagagcacctccccctccctagagccttagttcaagaggccagaagacccagggagaagccggcgttttgggagaaggggagctgcagagctccccacccaagcaggtgaggggaaactgagttccagggtaggctccagagtgaagagggaagaaacatgattctcaaggcccaggtctggacaagtgtgaacaccttgggcctgcgaattcagccccctccttcctttctctggtcaaaggctagacttgcaggagcttgcgtttgaagggacagcccagaaggcatcgtctgcactccccatacaggtgtgcccggagaggctgagcagcctgcgcctgagctggtggaggtggaagtgggcagcacagcccttctgaagtgcggcctctcccagtcccaaggcaacctcagccatgtcgactggttttctgtccacaaggagaagcggacgctcatcttccgtgtgcgccagggccagggccagagcgaacctggggagtacgagcagcggctcagcctccaggacagaggggctactctggccctgactcaagtcaccccccaagacgagcgcatcttcttgtgccagggcaagcgccctcggtcccaggagtaccgcatccagctccgcgtctacaaagctccggaggagccaaacatccaggtcaaccccctgggcatccctgtgaacagtaaggagcctgaggaggtcgctacctgtgtagggaggaacgggtaccccattcctcaagtcatctggtacaagaatggccggcctctgaaggaggagaagaaccgtgagtagccctttctcccaaaagccacccttgggccaggtgtggtagctcacacctgtaatctcggtgctttgggaggccaaggcaggaggatctctggaggtgaggagttcaggaccaccttggacaacatagggtgaccctgtctctacagaaaataaaaaaattagccaggcatggtggtgtgtgcctgtggtcccagatacttgggaggctgaggcaggaggatcatatgagcccaggaaatgaaggctgcagtgagctaggattgcaccaccacactccggcctgggtgacagagcgagaccccatctcttaaaaagagctgtccctatggtactacacaggaactgccttatattttcattaagcttttaacttaaaaaaattatacaaatggtacttgaaaatattttcatgagaatttaaactgacaaaaaatctagaagtttcttcttgcctgagaccccccctcccagaaataatctctgctatcagggtgtgttctttcaagcctatttctatgtatttgctcatatatagaaatatttctagaatgatataggcttctgtgttttattatctaaatcagtcattcttaaccaggggtgattttgtaccccctcctcctaggagatacttggcaatgtctggagatatttttggttgtcacacatagagggggtgctactgccatctagtaggtagagagaccaaggatgttgctaacatcctatagggcacaggacagcccccacaataaagaatcaacgtggcctaaaacatcagtagtgctggctgggctcacgcctgtaatcccagcacttttggaggccaaggtgggcggatcacctgaggtcgggagttcaagaccagcctgtccaacacggagaaaccccatctctactgaaaatacaaaagtagccgggcgtggtggcgcatgtctgtaatcccagctactcaggaggctgaggcaggagaatcacttgaagccgggagggaggtggaggttgcggtgagccgagattgtaccactgcactccagcctgggcaacaagagtgaaactctgtctgaaaaaaaaaaaaaaaaaattatcagtagtgctgagaaaccctggtctaagtggtggtgtatggtatacattgttagacaatttcttttatacaatgtttctgggtcagtctatttagatcaactgatcgttttgcttactgccaagttttccatactacgcatagcaggtagtcgagttcaccattccccatttagtggacatctagacggctgctcgtttttatcattgcagcattctttgcacacatccttggatatgagcagacatgaaaatgtttttctagggttgacactgagcagtaaaagtgctgggttgaagggtttccagcttgcatttgtacctggccttctacaggggacagggggctatttagatggtcccctgccaaccccagtggacaaccctagggtggggctggaggtggggctgaggctgagtcttcctccccttcctccctgcccaggggtccacattcagtcgtcccagactgtggagtcgagtggtttgtacaccttgcagagtattctgaaggcacagctggttaaagaagacaaagatgcccagttttactgtgagctcaactaccggctgcccagtgggaaccacatgaaggagtccagggaagtcaccgtccctgttttctacccgacagaaaaagtgtggctggaagtggagcccgtgggaatgctgaaggaaggggaccgcgtggaaatcaggtgtttggctgatggcaaccctccaccacacttcagcatcagcaagcagaaccccagcaccagggaggcagaggaagagacaaccaacgacaacggggtcctggtgctggagcctgcccggaaggaacacagtgggcgctatgaatgtcagggcctggacttggacaccatgatatcgctgctgagtgaaccacaggaactactggtgaactatgtgtctgacgtccgagtgagtcccgcagcccctgagagacaggaaggcagcagcctcaccctgacctgtgaggcagagagtagccaggacctcgagttccagtggctgagagaagagacaggccaggtgctggaaagggggcctgtgcttcagttgcatgacctgaaacgggaggcaggaggcggctatcgctgcgtggcgtctgtgcccagcatacccggcctgaaccgcacacagctggtcaacgtggccatttttggccccccttggatggcattcaaggagaggaaggtgtgggtgaaagagaatatggtgttgaatctgtcttgtgaagcgtcagggcacccccggcccaccatctcctggaacgtcaacggcacggcaagtgaacaagaccaagatccacagcgagtcctgagcaccctgaatgtcctcgtgaccccggagctgttggagacaggtgttgaatgcacggcctccaacgacctgggcaaaaacaccagcatcctcttcctggagctggtcaatttaaccaccctcacaccagactccaacacaaccactggcctcagcacttccactgccagtcctcataccagagccaacagcacctccacaggtaagccaggcctggcaagagaacagggctgtgccagggcatcctttctgccctgtccctccccagagagccctgtccagaaaggtgagtagcagccccatcttgtcggccctggactggctgggccaacgatggtgacgaagtggcctggggcagggagtgacgaggagtgtctttgtggcgcagagagaaagctgccggagccggagagccggggcgtggtcatcgtggctgtgattgtgtgcatcctggtcctggcggtgctgggcgctgtcctctatttcctctataagaagggcaagctgccgtgcaggcgctcagggaagcaggagatcacgctacccccgtctcgtaagagcgaacttgtagttgaagttaagtcagataagctcccagaagagatgggcctcctgcagggcagcagcggtgacaagagggctccgggagaccagggagagaaatacatcgatctgaggcattagccccgaatcacttcagctcccttccctgcctggaccattcccagctccctgctcactcttctctcagccaaagcctccaaagggactagagagaagcctcctgctcccctcgcctgcacaccccctttcagagggccactgggttaggacctgaggacctcacttggccctgcaaggcccgcttttcagggaccagtccaccaccatctcctccacgttgagtgaagctcatcccaagcaaggagccccagtctcccgagcgggctggcttccaccatccaggtgcaccactgaagtgaggacacaccggagccaggcgcctgctcatgttgaagtgcgctgttcacacccgctccggagagcaccccagcagcatccagaagcagctgcagtgttgctgccaccaccctcctgtctgcctcttcaaagtctcctgtgacattttttctttggtcagaagccaggaactggtgtcattccttaaaagatacgtgccggggccaggtgtggtggctcacgcctgtaatcccagcactttgggaggccgaggcgggcggatcacaaagtcaggacgagaccatcctggctaacacggtgaaaccctgtctctactaaaaatacaaaaaaaaattagctaggcgtagtggttggcacctatagtcccagctactcggaaggctgaagcaggagaatggtatgaatccaggaggtggagcttgcagtgagccgagaccgtgccactgcactccagcctgggcaacacagcgagactccgtctcgagg

SEQ ID NO: 12167 - DNA, 206 bp, Homo sapiens
  source 1..206: mol_type = unassigned DNA
tcataccagagccaacagcacctccacagagagaaagctgccggagccggagagccggggcgtggtcatcgtggctgtgattgtgtgcatcctggtcctggcggtgctgggcgctgtcctctatttcctctataagaagggcaagctgccgtgcaggcgctcagggaagcaggagatggagagaaatacatcgatctgaggcatta

SEQ ID NO: 12168 - DNA, 722 bp, Homo sapiens
  source 1..722: mol_type = unassigned DNA
ccctgaatgtcctcgtgaccccggagctgttggagacaggtgttgaatgcacggcctccaacgacctgggcaaaaacaccagcatcctcttcctggagctggtcaatttaaccaccctcacaccagactccaacacaaccactggcctcagcacttccactgccagtcctcataccagagccaacagcacctccacagagagaaagctgccggagccggagagccggggcgtggtcatcgtggctgtgattgtgtgcatcctggtcctggcggtgctgggcgctgtcctctatttcctctataagaagggcaagctgccgtgcaggcgctcagggaagcaggagatcacgctacccccgtctcgtaagagcgaacttgtagttgaagttaagtcagataagctcccagaagagatgggcctcctgcagggcagcagcggtgacaagagggctccgggagaccagggagcaggccccatcttgccttcttaacactactcacagatggcagggccaagcaagtggctgagggagcttggaggaagactgagaaagaccctgtcccatcaccttttcctgaccaatgcccgtggctctgggtgtggccatttcaccagtgcagtcagacgggggccgccctccttccctggcctgccatgcccatcctagcttcctccccaacgctgcccaccaaattcatcggcttctgcttccatctctcct

SEQ ID NO: 12169 - DNA, 541 bp, Homo sapiens
  source 1..541: mol_type = unassigned DNA
acttggctctcgccctccggccgggaagcatggggcttcccaggctggtctgcgccttcttgctcgccgcctgctgctgctgtcctcgcgtcgcgggtccacaaggagaagcggacgctcatcttccgtgtgcgccagggccagggccagagcgaacctggggagtacgagcagcggctcagcctccaggacagaggggctactctggccctgactcaagtcaccccccaagacgagcgcatcttcttgtgccagggcaagcgccctcggtcccaggagtaccgcatccagctccgcgtctacaaagctccggaggagccaaacatccaggtcaaccccctgggcatccctgtgaacagtaaggagcctgaggaggtcgctacctgtgtagggaggaacgggtaccccattcctcaagtcatctggtacaagaatggccggcctctgaaggaggagaagaaccgggtccacattcagtcgtcccagactgtggagtcgagtggtttgtacaccttgcagagtattctgaaggcacagctgg

SEQ ID NO: 12170 - DNA, 563 bp, Homo sapiens
  source 1..563: mol_type = unassigned DNA
ttctagctctgggaggagtcaggggtctgaggctctgggttggagaccccaccttccacctgccctccttgtccgagagccaaggtgtgcccggagaggctgagcagcctgcgcctgagctggtggaggtggaagtgggcagcacagcccttctgaagtgcggcctctcccagtcccaaggcaacctcagccatgtcgactggttttctgtccacaaggagaagcggacgctcatcttccgtgtgcgccagggccagggccagagcgaacctggggagtacgagcagcggctcagcctccaggacagaggggctactctggccctgactcaagtcaccccccaagacgagcgcatcttcttgtgccagggcaagcgccctcggtcccaggagtaccgcatccagctccgcgtctacaaagctccggaggagccaaacatccaggtcaaccccctgggcatccctgtgaacagtaaggagcctgaggaggtcgctacctgtgtagggaggaacgggtaccccattcctcaagtcatctggtacaagaatggccggcctctgaag

SEQ ID NO: 12171 - DNA, 757 bp, Homo sapiens
  source 1..757: mol_type = unassigned DNA
agagtatcccgggagcagcactcggaaggcggggaggaggctgcttctgggaacgagaaggggtggagctcagcctttcggggtgctggggggtgggtggtccctgaggtgctcactctgggggcccgcaattgaagccgggcaggaggcgcagctggggcgcatcctcaaagcctgaattccgcgcccgcctgttgctggaaaaggcagcttccttcgctggagggggtgcgccgacccaccccttcccccttctgcctgggcatcacgccaggctggaggtgtgcccggagaggctgagcagcctgcgcctgagctggtggaggtggaagtgggcagcacagcccttctgaagtgcggcctctcccagtcccaaggcaacctcagccatgtcgactggttttctgtccacaaggagaagcggacgctcatcttccgtgtgcgccagggccagggccagagcgaacctggggagtacgagcagcggctcagcctccaggacagaggggctactctggccctgactcaagtcaccccccaagacgagcgcatcttcttgtgccagggcaagcgccctcggtcccaggagtaccgcatccagctccgcgtctacaaagctccggaggagccaaacatccaggtcaaccccctgggcatccctgtgaacagtaaggagcctgaggaggtcgctacctgtgtagggaggaacgggtaccccattcctcaagtcatctggtacaagaatggccggcctctg

SEQ ID NO: 12172 - DNA, 562 bp, Homo sapiens
  source 1..562: mol_type = unassigned DNA
cttggctctcgccctccggccgggaagcatggggcttcccaggctggtctgcgccttcttgctcgccgcctgctgctgctgtcctcgcgtcgcgggtgtgcccggagaggctgagcagcctgcgcctgagctggtggaggtggaagtgggcagcacagcccttctgaagtgcggcctctcccagtcccaaggcaacctcagccatgtcgactggttttctgtccacaaggagaagcggacgctcatcttccgtgtgcgccagggccagggccagagcgaacctggggagtacgagcagcggctcagcctccaggacagaggggctactctggccctgactcaagtcaccccccaagacgagcgcatcttcttgtgccagggcaagcgccctcggtcccaggagtaccgcatccagctccgcgtctacaaagctccggaggagccaaacatccaggtcaaccccctgggcatccctgtgaacagtaaggagcctgaggaggtgagatgtgtggcaggtgggctgggcagctggtgcgcagccgctgagatggggcttgaaggg

SEQ ID NO: 12173 - DNA, 588 bp, Homo sapiens
  source 1..588: mol_type = unassigned DNA
acttggctctcgccctccggccgggaagcatggggcttcccaggctggtctgcgccttcttgctcgccgcctgctgctgctgtcctcgcgtcgcggcctcagctggagctgttcggtgctcagtctctgctcaatctctgcttggctccaaggacctgggatctcctggacggggagagggctggcccaggtgtgcccggagaggctgagcagcctgcgcctgagctggtggaggtggaagtgggcagcacagcccttctgaagtgcggcctctcccagtcccaaggcaacctcagccatgtcgactggttttctgtccacaaggagaagcggacgctcatcttccgtgtgcgccagggccagggccagagcgaacctggggagtacgagcagcggctcagcctccaggacagaggggctactctggccctgactcaagtcaccccccaagacgagcgcatcttcttgtgccagggcaagcgccctcggtcccaggagtaccgcatccagctccgcgtctacaaagctccggaggagccaaacatccaggtcaaccccctgggcatccctgtgaacagtaaggagcct

SEQ ID NO: 12174 - DNA, 478 bp, Homo sapiens
  source 1..478: mol_type = unassigned DNA
acttggctctcgccctccggccgggaagcatggggcttcccaggctggtctgcgccttcttgctcgccgcctgctgctgctgtcctcgcgtcgcgggtgtgcccggagaggctgagcagcctgcgcctgagctggtggaggtggaagtgggcagcacagcccttctgaagtgcggcctctcccagtcccaaggcaacctcagccatgtcgactggttttctgagaagcggacgctcatcttccgtgtgcgccagggccagggccagagcgaacctggggagtacgagcagcggctcagcctccaggacagaggggctactctggccctgactcaagtcaccccccaagacgagcgcatcttcttgtgccagggcaagcgccctcggtcccaggagtaccgcatccagctccgcgtctacaaagctccggaggagccaaacatccaggtcaaccccctgggcatccctgtgaacagtaa

SEQ ID NO: 12175 - DNA, 563 bp, Homo sapiens
  source 1..563: mol_type = unassigned DNA
acttggctctcgccctccggccgggaagcatggggcttcccaggctggtctgcgccttcttgctcgccgcctgctgctgctgtcctcgcgtcgcggctctgggaggagtcaggggtctgaggctctgggttggagaccccaccttccacctgccctccttgtccgagagccaaggtgtgcccggagaggctgagcagcctgcgcctgagctggtggaggtggaagtgggcagcacagcccttctgaagtgcggcctctcccagtcccaaggcaacctcagccatgtcgactggttttctgtccacaaggagaagcggacgctcatcttccgtgtgcgccagggccagggccagagcgaacctggggagtacgagcagcggctcagcctccaggacagaggggctactctggccctgactcaagtcaccccccaagacgagcgcatcttcttgtgccagggcaagcgccctcggtcccaggagtaccgcatccagctccgcgtctacaaagctccggaggagccaaacatccaggtcaaccccctgggcatccctgtgaacagt

SEQ ID NO: 12176 - DNA, 555 bp, Homo sapiens
  source 1..555: mol_type = unassigned DNA
acttggctctcgccctccggccgggaagcatggggcttcccaggctggtctgcgccttcttgctcgccgcctgctgctgctgtcctcgcgtcgcgggtgtgcccggagaggctgagcagcctgcgcctgagctggtggaggtggaagtgggcagcacagcccttctgaagtgcggcctctcccagtcccaaggcaacctcagccatgtcgactggttttctgtgagtgcttgggctcctgcaagagcagcccggggagggagactctgcccctcttgtagcccaggacccttctcctcctctgtgtctcctcccattaggtccacaaggagaagcggacgctcatcttccgtgtgcgccagggccagggccagagcgaacctggggagtacgagcagcggctcagcctccaggacagaggggctactctggccctgactcaagtcaccccccaagacgagcgcatcttcttgtgccagggcaagcgccctcggtcccaggagtaccgcatccagctccgcgtctacaaagctccggaggagccaaacatccaggt

SEQ ID NO: 12177 - DNA, 567 bp, Homo sapiens
  source 1..567: mol_type = unassigned DNA
acttggctctcgccctccggccgggaagcatggggcttcccaggctggtctgcgccttcttgctcgccgcctgctgctgctgtcctcgcgtcgcgggctactgcctcccaggctgactttatttctggggaaagggctaaatcgggctccacagttgcagccggtccagctccaccctgccctgctcttctagctctgggaggagtcaggggtctgaggctctgggttggagaccccaccttccacctgccctccttgtccgagagccaaggtgtgcccggagaggctgagcagcctgcgcctgagctggtggaggtggaagtgggcagcacagcccttctgaagtgcggcctctcccagtcccaaggcaacctcagccatgtcgactggttttctgtccacaaggagaagcggacgctcatcttccgtgtgcgccagggccagggccagagcgaacctggggagtacgagcagcggctcagcctccaggacagaggggctactctggccctgactcaagtcaccccccaagacgagcgcatcttcttgtgccagggcaagcgccct

SEQ ID NO: 12178 - DNA, 569 bp, Homo sapiens
  source 1..569: mol_type = unassigned DNA
ctttcaccgcagagacaaatcctccacccccacctggcttcactctcctccagcggaagaagaattcagaactgactgtccttggtggtgaggggaaactgagttccagggtaggctccagagtgaagagggaagaaacatgattctcaaggcccaggtctggacaagtgtgaacaccttgggcctgcgaattcagccccctccttcctttctctggtcaaaggctagacttgcaggagcttgcgtttgaagggacagcccagaaggcatcgtctgcactccccatacaggtgtgcccggagaggctgagcagcctgcgcctgagctggtggaggtggaagtgggcagcacagcccttctgaagtgcggcctctcccagtcccaaggcaacctcagccatgtcgactggttttctgtccacaaggagaagcggacgctcatcttccgtgtgcgccagggccagggccagagcgaacctggggagtacgagcagcggctcagcctccaggacagaggggctactctggccctgactcaagtcaccccccaagacgagcgcatcttcttgt

SEQ ID NO: 12179 - DNA, 909 bp, Homo sapiens
  source 1..909: mol_type = unassigned DNA
aggtgcaggctgggggcagaggagagggaaggggattaggtgctggggccggggaaccgagacccagggtgtcaccgctgacagcagcggggcccgcagagctgcagggagacagagccgcctccccgcggcgccgacgctgccatctagctagagggccccactctttctttaaccagaggtcacagcctcattgcctacccaggaggcagccccgagacgccccctgcggcctgggttttctccaccctgtccccgcgcccaccccagctctgccatccccggctgcaccgctttgtaaaggggacggctggtcagaccgaatcactgcgcgggctcgcgctgggtcgggcctggagactggatctggggcttccggagagccccaggctccccgcgcgcccatccacccgcagccgcctgagcatttatggtgaggggaaactgagttccagggtaggctccagagtgaagagggaagaaacatgattctcaaggcccaggtctggacaagtgtgaacaccttgggcctgcgaattcagccccctccttcctttctctggtcaaaggctagacttgcaggagcttgcgtttgaagggacagcccagaaggcatcgtctgcactccccatacaggtgtgcccggagaggctgagcagcctgcgcctgagctggtggaggtggaagtgggcagcacagcccttctgaagtgcggcctctcccagtcccaaggcaacctcagccatgtcgactggttttctgtccacaaggagaagcggacgctcatcttccgtgtgcgccagggccagggccagagcgaacctggggagtacgagcagcggctcagcctccaggacagaggggctactctggccctgactcaagtcaccccccaagacgagcgcatct

SEQ ID NO: 12180 - DNA, 574 bp, Homo sapiens
  source 1..574: mol_type = unassigned DNA
acctagggtggggtccgcgggtgtgtgcggagtgttcatggaggtgctgctgagggagcatgagaccggaacttccgccagagttagcccgctggggagtgagggcagggattttggagggcagaggatagagcagtggtgtcttcccctggcggtggtgacacaaaagggcctgtgtgccccagcctggcacatgctttgcattcccacactctgagctcacccggagaggagggggcctggaaggaaaggggccttcctcttggccccgagcctaggttgcccctttctgcccctctaccagcctcagctggagctgttcggtgctcagtctctgctcaatctctgcttggctccaaggacctgggatctcctggacggggagagggctggcccaggtgtgcccggagaggctgagcagcctgcgcctgagctggtggaggtggaagtgggcagcacagcccttctgaagtgcggcctctcccagtcccaaggcaacctcagccatgtcgactggttttctgtccacaaggagaagcggacgctcatcttccgtgtgcgccagggccagggc

SEQ ID NO: 12181 - DNA, 8257 bp, Homo sapiens
  source 1..8257: mol_type = unassigned DNA
agaaaccacttacaactccagacgattcgaaggggaaacttcggcgtgaagtgcagctccgctccggctccctctagctttctttccttctctggaatccgaggcgcggatcttcctcgccccaccgccctagttttttcgggagctcgccggtgccctctagggtgtcggctcgtgctgggaagtgccctccatcctggtaatggggggcggcgaggcaccgtaggagtggcgaggcggcgcccagggtggcactgccccggaacggggcgctgggtgcgcgcgggagggtccccgcgcgggctccgccgctgccgcagctgcgagcgcgccgcgccaccgagcctcctgcagcaatggctcgtccgtgaaacgcgagccacggctgctctttttaagagtgcctgcatcctccgtttgcgcttcgcaactgtcctgggtgaaaatggctgtctagactaaaatgtggcagaagggaccaagcagtggatattgagcctgtgaagtccaactcttaagctccgagacctgggggactgagagcccagctctgaaaagtgcatcatgaattccggagttgccatgaaatatggaaacgactcctcggccgagctgagtgagctccattcagcagccctggcatcactaaagggagatatagtggaacttaataaacgtctccagcaaacagagagggaacgggaccttctggaaaagaaattggccaaggcacagtgcgagcagtcccacctcatgagagagcatgaggatgtccaggagcgaacgacacttcgctatgaggaacgcatcacagagctccacagcgtcattgcggagctcaacaagaagatagaccgtctgcaaggcaccaccatcagggaggaagatgagtactcagaactgcgatcagaactcagccagagccaacacgaggtcaacgaggactctcgaagcatggaccaagaccagacctctgtctctatccccgaaaaccagtctaccatggttactgctgacatggacaactgcagtgacctgaactcagaactgcagagggtgctgacagggctggagaatgttgtctgcggcaggaagaagagcagctgcagcctctccgtggccgaggtggacaagcacattgagcagctcaccacagccagcgagcactgtgacctggctattaagacagtcgaggagattgagggggtgcttggccgggacctgtatcccaacctggctgaagagaggtctcggtgggagaaggagctggctgggctgagggaagagaatgagagcctgactgccatgctgtgcagcaaagaggaagaactgaaccggactaaggccaccatgaatgccatccgggaagagcgggaccggctccggaggagggtcagagagcttcaaactcgactacagagcgtgcaggccacaggtccctccagccctggccgcctcacttccaccaaccgcccgattaaccccagcactggggagctgagcacaagcagcagcagcaatgacattcccatcgccaagattgctgagagggtgaagctatcaaagacaaggtccgaatcgtcatcatctgatcggccagtcctgggctcagaaatcagtagcataggggtatccagcagtgtggctgaacacctggcccactcacttcaggactgctccaatatccaagagattttccaaacactctactcacacggatctgccatctcagaaagcaagattagagagtttgaggtggaaacagaacggctgaatagccggattgagcacctcaaatcccaaaatgacctcctgaccataaccttggaggaatgtaaaagcaatgccgagaggatgagcatgctggtgggaaaatacgaatccaatgccacagcgctgaggctggccttgcagtacagcgagcagtgcatcgaagcctacgaactcctcctggcgctggcagagagtgagcagagcctcatcctggggcagttccgagcggcgggcgtggggtcctcccctggagaccagtcgggggatgaaaacatcactcagatgctcaagcgagctcatgactgccggaagacagctgagaacgctgccaaggccctgctcatgaagctggacggcagctgtgggggagcctttgccgtggccggctgcagcgtgcagccctgggagagcctttcctccaacagccacaccagcacaaccagctccacagccagtagttgcgacaccgagttcactaaagaagacgagcagaggctgaaggattatatccagcagctcaagaatgacagggctgcggtcaagctgaccatgctggagctggaaagcatccacatcgatcctctcagctatgacgtcaagcctcggggagacagccagaggctggatctggaaaacgcagtgcttatgcaggagctcatggccatgaaggaggagatggccgagttgaaggcccagctctacctactggagaaagagaagaaggccctggagctgaagctgagcacgcgggaggcccaggagcaggcctacctggtgcacattgagcacctgaagtccgaggtggaggagcagaaggagcagcggatgcgatccctcagctccaccagcagcggcagcaaagacaaacctggcaaggagtgtgctgatgctgcctccccagctctgtccctagccgaactcaggacaacgtgcagcgagaatgagctggctgcggagttcaccaacgccattcgtcgagaaaagaagttgaaggccagagttcaagagctggtgagtgccttggagagactcaccaagagcagtgaaatccgacatcagcaatctgcagagttcgtgaatgatctaaagcgggccaacagcaacctggtggctgcctatgagaaagcaaagaaaaagcatcaaaacaaactgaagaagttagagtcgcagatgatggccatggtggagagacatgagacccaagtgaggatgctcaagcaaagaatagctctgctagaggaggagaactccaggccacacaccaatgaaacttcgctttaatcagcactcacgcaccggagttctgcccatgggaagtaaactgcagcaggccactggggacagaagggcccatgtacttgttgggaggaggaggaaagggaaggctggcaggtaggtcggcacttggacaatggagtgccccaactcaacccttggggcgactggccatggtgacattgtggactgtatccagaggtgcccgctcttccctcctgggcccacaacagcgtgtaaacacatgttctgtgcctgctcagcagagcctcgtttctgctttcagcactcactctccccctcctcttctggtctggcggctgtgcatcagtgggatcccagacatttgtttctgtaagattttccattgtatcctctttttggtagatgctgggctcatcttctagaatctcgtttctcctctttcctcctgcttcatgggaaaacagacctgtgtgtgcctccagcatttaaaaggactgctgatttgtttactacagcaaggctttggtttccaagtcccgggtctcaactttaagatagaggcggccataagaggtgatctctgggagttataggtcatgggaagagcgtagacaggtgttacttacagtcccagatacactaaagttacaaacagaccaccaccaggactgtgcctgaacaattttgtattgagagaataaaaacttccttcaatcttcattttggaggcagggctgggaagggagcgctctcttgattctgggatttctccctctcagtggagccttattaatatccaagacttagagctgggaatctttttgatacctgtagtggaactaaaattctgtcaggggtttcttcaagagctgagaaacattattagcacttcccgccccagggcactacataattgctgttctgctgaatcaaatctcttccacatgggtgcatttgtagctctggacctgtctctacctaaggacaagacactgaggagatactgaacattttgcaaaacttatcacgcctacttaagagtgctgtgtaacccccagttcaagacttagctcctgttgtcatgacggggacagagtgagggaatggtagttaaggcttcttttttgcccccagatacatggtgatggttagcatatggtgcttaaaaggttaaatttcaagcaaaatgcttacagggctaggcagtaccaaagtaactgaattatttcaggaaggtcttcaatcttaaaacaaattcattattctttttcagttttacctcttctctctcagttctacactgatacacttgaaggaccatttactgtttttttctgtagcaccagagaatccatccaaagttccctatgaaaaatgtgttccattgccatagctgactacaaattaaagttgaggaggtttctgcatagagtctttatgtccataagctacgggtaggtctattttcagagcatgatacaaattccacagccttctgttcgctggaggatactccagccaccagttcggagggcagacagctgtatcctaaaagcaaccactgagaggccagcagtgaggctgcccatctccaaaacgaaacaacagatcaactggtatcagtctagaaggaccagctttggggtgctttgatcactatgaaaatgttcactggtttctgtcaatcatttggtcaaagttagttcctgtgattttttttttttttttttgagatggagttttgctcgtcaccaggctgaagtgcagtggcgtgatcttggctcactgcaacctctgcctcctgagtagctggaattacaggtgcccgccaccatacccagctagtttttttgtatttttagtagagacagggtttcaccatgttggccaggctggtctcgaactcctgaccactgatccacccacctcggcctcccaaagtgctgggattacaggcatgagccaatgtgcctggccattcctgtgattttttagaatttttcacttttcatataaagttgcattttatcatgaggaaaatgttttggctgaaaaacatatgccccaaaaaaaaaaaaatcagttttcactatttttccagcttgcctagggaaacgtcctcccctgagcaaagtgggatgtgcatggctcttttttgtgattaagcaggcatcaaatgggcagttttcattttcactgacacagaaacatgtggctgaagcaggaataaaatcctgcctactgacttctgtctccattcttgctccaggtaaaatcagagaacctccccttctctgagaattcccccaggcagaggcggctccagctcctgttaagggccccagttttactcatgctacctgaccttagttttagtactttcaaatgtgatttgggtaaaaactattttgcaggcaaaagtgttaattttttataaatatgtataataaaaaagctataaaagtttttccttttcttgtatttttcaaatactccccaagacacaatccttgaaggtgaactaggtggcacttgattatgctaattgtgggagctactgaactaaactatactgattaaattaaatgcttgcaggttcctgggtaattttcctttgtgaataacctggcgctacctgaatttttctctaacaaacatctccaatgagggtaaacaatgatcttgattctaatttatatgaggttaaaaaccttcagatttcgtattttgaattgttctccctagtttcctcagtggttacccccttttagtcagtaaccatctctgttcagaattcagtctttggcttttgaagaaatgggcacagagccaaaggacccatttcacagttcccttggaatatatttcccattgttggactgaggcaaacaaaaccaactgtgcaaatcacaagcaaaagagacttctgtccgtagttgcgagtgccatcagtgtgagcttaccagctacaaaaatctgtcatggactggggaacagtatgattccttattgaaactttcatcctcatcggctggcttgtcagcgttctgaagttaatatccatgctgcctgaaacaaatgttatgtttaactagcacttaacttttaaaattgcttaattctcctttcagatgcatgcactaagtcttctctgagcctgcagcaatattttagagggacctcttctaagtcagagccttgacattctactccaaaaggaagtccaaattagagcccataggctttttcttaaaagctgttaaggagtagtaaagaaagttaccactctaaggaaaacatgaaactatctgaaagtcttctggttcctaactggatacagattagattattttaaatgagaaaaaagtgcaccgtagttacccgatcaagattggactgcctgtgtccctggcatgaattaaagaacctccatagttgcttgttcccttctgaaggtgtttcctatggcccacgagaattataaagcaatcactttttaagtctatcagtcaaccttaatagctctcaagagtttcgattatcaagctttaaagtgataacatatcaagatgactattaaaaaataaacatctctgaaagtgtcctttcctccataaggctttaaacaatttgcaaattcttaattgggagtatgtcccaatcattctattaaactatttacagctctacctacttctagattcagcaaacagagctactagttagagtattttgagagccaaaatagtaagagacttctgtaatggttgagatttctgcactgaccttaattagggtaccgccatagggctaccaaagtttttagtgagggctggggaggtggagcataagtaacattttttttctgcagaaggtgatggctttgtagaacactataaaatttttcaggaaaacatacagcaaattttcttatccagtgggaacagcctatttgacaaggaatgatatacaagtttgattcacctttgagcactcttatagagtttacagaagaggcgtaactggttacaaaacaaaagttacgccttcactatccagttcttaaagtttatccacatcctacaaatcttatgttcatgtaggtcaggttaaagtaagctccaaacttgtggccttcagaagcatctcctgtttaacacacctgaaattactctaacttaatacatttgtattctctaagaaataatgctgactgctgtcaccacagcatcactgatctctcagtggctgttaaaatataaacaagtggaaaaaaagtatacaagttgatagcagctgttcatgtattcttgttttgctaatacctgtgtagagaaagacagtttcacatgcagatcaccatacatttttgcttaaaggttacactgggtaaactgtttgtttatcacattacatctgggtgagattttgcatgtgaccaagaggaagaaatcattcagtcccggaaatagcaactgctatgtaaaaccacatccttgactagtacttcatctttccacagtcatccatctgctaatcaggtgaaatatcagctcagcagaacaaagcaagttatacacaaatttcccccacattcacactgatgccgtacttagtaattctggttctaccattcccttttgcactttttgcaagtcaaattcatgtggaaaaatgttctgtttgtagaactcatagtattcacttatagtgctcatgtcaggaatggcaagtgagtaagagcccctgataatctgcttttgttagaacgtaatgcaaagataataaaacatgtccacttcttttctagttctaatcagtttttagacatcaagatttatttactttgcatgagatttgtttcctattatttgaatatgtgctatacacttgaattagaaaaacctgcttgaatgtattgtcagttattaaagcacatgtgactaagtttgcatttgtcagtattgttctactgtttgtactgaaagtctcattttaaaattgctacttaacactgtactataccttgtaattttttagattctccacttgtattctttaaatgtttccagatgcctttagttttagctgctgtaaaatagctactttgcgttatttgatatagaattgttttttaaaaactccatttatttatacagagacatttataatattttacaaacattcttatattctgaataaatatttctaattccacagtgta

SEQ ID NO: 12182 - DNA, 3844 bp, Homo sapiens
  source 1..3844: mol_type = unassigned DNA
ttttctatatataatatctgcactcaacagatattctctgtttttctgtatttttaaagggaaattggaaactatgggtagagatagagacctcttttgagggatttgggtttagtaaaaagcccgtctaggggggcttccctggcatgctgaagcataggaagatgctgcagtgtgctcctctactgtgatctgatgcagagttgccacttctagtcacactccacaaaggaagaatgtgctccattcagcagccctggcatcactaaagggagatatagtggaacttaataaacgtctccagcaaacagagagggaacgggaccttctggaaaagaaattggccaaggcacagtgcgagcagtcccacctcatgagagagcatgaggatgtccaggagcgaacgacacttcgctatgaggaacgcatcacagagctccacagcgtcattgcggagctcaacaagaagatagaccgtctgcaaggcaccaccatcagggaggaagatgagtactcagaactgcgatcagaactcagccagagccaacacgaggtcaacgaggactctcgaagcatggaccaagaccagacctctgtctctatccccgaaaaccagtctaccatggttactgctgacatggacaactgcagtgacctgaactcagaactgcagagggtgctgacagggctggagaatgttgtctgcggcaggaagaagagcagctgcagcctctccgtggccgaggtggacaagcacattgagcagctcaccacagccagcgagcactgtgacctggctattaagacagtcgaggagattgagggggtgcttggccgggacctgtatcccaacctggctgaagagaggtctcggtgggagaaggagctggctgggctgagggaagagaatgagagcctgactgccatgctgtgcagcaaagaggaagaactgaaccggactaaggccaccatgaatgccatccgggaagagcgggaccggctccggaggagggtcagagagcttcaaactcgactacagagcgtgcaggccacaggtccctccagccctggccgcctcacttccaccaaccgcccgattaaccccagcactggggagctgagcacaagcagcagcagcaatgacattcccatcgccaagattgctgagagggtgaagctatcaaagacaaggtccgaatcgtcatcatctgatcggccagtcctgggctcagaaatcagtagcataggggtatccagcagtgtggctgaacacctggcccactcacttcaggactgctccaatatccaagagattttccaaacactctactcacacggatctgccatctcagaaagcaagattagagagtttgaggtggaaacagaacggctgaatagccggattgagcacctcaaatcccaaaatgacctcctgaccataaccttggaggaatgtaaaagcaatgccgagaggatgagcatgctggtgggaaaatacgaatccaatgccacagcgctgaggctggccttgcagtacagcgagcagtgcatcgaagcctacgaactcctcctggcgctggcagagagtgagcagagcctcatcctggggcagttccgagcggcgggcgtggggtcctcccctggagaccagtcgggggatgaaaacatcactcagatgctcaagcgagctcatgactgccggaagacagctgagaacgctgccaaggccctgctcatgaagctggacggcagctgtgggggagcctttgccgtggccggctgcagcgtgcagccctgggagagcctttcctccaacagccacaccagcacaaccagctccacagccagtagttgcgacaccgagttcactaaagaagacgagcagaggctgaaggattatatccagcagctcaagaatgacagggctgcggtcaagctgaccatgctggagctggaaagcatccacatcgatcctctcagctatgacgtcaagcctcggggagacagccagaggctggatctggaaaacgcagtgcttatgcaggagctcatggccatgaaggaggagatggccgagttgaaggcccagctctacctactggagaaagagaagaaggccctggagctgaagctgagcacgcgggaggcccaggagcaggcctacctggtgcacattgagcacctgaagtccgaggtggaggagcagaaggagcagcggatgcgatccctcagctccaccagcagcggcagcaaagacaaacctggcaaggagtgtgctgatgctgcctccccagctctgtccctagccgaactcaggacaacgtgcagcgagaatgagctggctgcggagttcaccaacgccattcgtcgagaaaagaagttgaaggccagagttcaagagctggtgagtgccttggagagactcaccaagagcagtgaaatccgacatcagcaatctgcagagttcgtgaatgatctaaagcgggccaacagcaacctggtggctgcctatgagaaagcaaagaaaaagcatcaaaacaaactgaagaagttagagtcgcagatgatggccatggtggagagacatgagacccaagtgaggatgctcaagcaaagaatagctctgctagaggaggagaactccaggccacacaccaatgaaacttcgctttaatcagcactcacgcaccggagttctgcccatgggaagtaaactgcagcaggccactggggacagaagggcccatgtacttgttgggaggaggaggaaagggaaggctggcaggtaggtcggcacttggacaatggagtgccccaactcaacccttggggcgactggccatggtgacattgtggactgtatccagaggtgcccgctcttccctcctgggcccacaacagcgtgtaaacacatgttctgtgcctgctcagcagagcctcgtttctgctttcagcactcactctccccctcctcttctggtctggcggctgtgcatcagtgggatcccagacatttgtttctgtaagattttccattgtatcctctttttggtagatgctgggctcatcttctagaatctcgtttctcctctttcctcctgcttcatgggaaaacagacctgtgtgtgcctccagcatttaaaaggactgctgatttgtttactacagcaaggctttggtttccaagtcccgggtctcaactttaagatagaggcggccataagaggtgatctctgggagttataggtcatgggaagagcgtagacaggtgttacttacagtcccagatacactaaagttacaaacagaccaccaccaggactgtgcctgaacaattttgtattgagagaataaaaacttccttcaatcttcattttggaggcagggctgggaagggagcgctctcttgattctgggatttctccctctcagtggagccttattaatatccaagacttagagctgggaatctttttgatacctgtagtggaactaaaattctgtcaggggtttcttcaagagctgagaaacattattagcacttcccgccccagggcactacataattgctgttctgctgaatcaaatctcttccacatgggtgcatttgtagctctggacctgtctctacctaaggacaagacactgaggagatactgaacattttgcaaaacttatcacgcctacttaagagtgctgtgtaacccccagttcaagacttagctcctgttgtcatgacggggacagagtgagggaatggtagttaaggcttcttttttgcccccagatacatggtgatggttagcatatggtgcttaaaaggttaaatttcaagcaaaatgct

SEQ ID NO: 12183 - DNA, 3476 bp, Homo sapiens
  source 1..3476: mol_type = unassigned DNA
atgactccgggcggtcggagaaggtctgccgggagtacacctgccctctgcctgaagcgtccccaagtgtcccgggcccgcgtcgttgccggatgcacaatgctgacacccttcccgggggcttccagtgtattctgcctcctcttgtgttcccgttgccacccttagctccctgactcttccagccaccttcccctcctccctcttccctgaggtgcctcctcgggcgattccagagcgcccatcttcccagtccgggcaaaacccggagaggtggaatccctcgcccggagcgccccggcggccactgggcatgctccgttgtcaggcaagttcggggctgcaggcagcttgcgcgccgcgcggattccagctgcggtcgcgcgtactcctcctcccaagtagggagcgggcgcatgatggcggccgcggcggcagcggctgcggggagctccagcagcggcggcggcggcggcggcagcggcagcagcagcagcagcagcgacacgtccagcaccggcgaggaggagaggatgcggcgcctcttccagacgtgcgacggcgacggggacggatacatcagcagaaatgacttgctaatggtctgtcgccagctgaatatggaagagtctgtggctgagatcatgaaccagttgggagcagatgaaaatgggaagatttcctttcaggatttcacaagatgccgcatgcagcttgttcgagaaattaggaaggaggaagtagatctttctgcaaagtcagacaactcctgtacaaagaagctgagggatagaattgcttcctggcccacgagcagtgacaacagtttgggtgccttatcagcagccagggagagctgggaatacgactctggtgccagggacctccagagcccggatgtgcagagccagtcagccctccagaagctgctcgagtatggcggaagctctttgcatcagcaggctgctctccacaaactgctcacacagtccccgcacattggcaactctgtaggaggaagctatctagagctggccaacacactccattcagcagccctggcatcactaaagggagatatagtggaacttaataaacgtctccagcaaacagagagggaacgggaccttctggaaaagaaattggccaaggcacagtgcgagcagtcccacctcatgagagagcatgaggatgtccaggagcgaacgacacttcgctatgaggaacgcatcacagagctccacagcgtcattgcggagctcaacaagaagatagaccgtctgcaaggcaccaccatcagggaggaagatgagtactcagaactgcgatcagaactcagccagagccaacacgaggtcaacgaggactctcgaagcatggaccaagaccagacctctgtctctatccccgaaaaccagtctaccatggttactgctgacatggacaactgcagtgacctgaactcagaactgcagagggtgctgacagggctggagaatgttgtctgcggcaggaagaagagcagctgcagcctctccgtggccgaggtggacaagcacattgagcagctcaccacagccagcgagcactgtgacctggctattaagacagtcgaggagattgagggggtgcttggccgggacctgtatcccaacctggctgaagagaggtctcggtgggagaaggagctggctgggctgagggaagagaatgagagcctgactgccatgctgtgcagcaaagaggaagaactgaaccggactaaggccaccatgaatgccatccgggaagagcgggaccggctccggaggagggtcagagagcttcaaactcgactacagagcgtgcaggccacaggtccctccagccctggccgcctcacttccaccaaccgcccgattaaccccagcactggggagctgagcacaagcagcagcagcaatgacattcccatcgccaagattgctgagagggtgaagctatcaaagacaaggtccgaatcgtcatcatctgatcggccagtcctgggctcagaaatcagtagcataggggtatccagcagtgtggctgaacacctggcccactcacttcaggactgctccaatatccaagagattttccaaacactctactcacacggatctgccatctcagaaagcaagattagagagtttgaggtggaaacagaacggctgaatagccggattgagcacctcaaatcccaaaatgacctcctgaccataaccttggaggaatgtaaaagcaatgccgagaggatgagcatgctggtgggaaaatacgaatccaatgccacagcgctgaggctggccttgcagtacagcgagcagtgcatcgaagcctacgaactcctcctggcgctggcagagagtgagcagagcctcatcctggggcagttccgagcggcgggcgtggggtcctcccctggagaccagtcgggggatgaaaacatcactcagatgctcaagcgagctcatgactgccggaagacagctgagaacgctgccaaggccctgctcatgaagctggacggcagctgtgggggagcctttgccgtggccggctgcagcgtgcagccctgggagagcctttcctccaacagccacaccagcacaaccagctccacagccagtagttgcgacaccgagttcactaaagaagacgagcagaggctgaaggattatatccagcagctcaagaatgacagggctgcggtcaagctgaccatgctggagctggaaagcatccacatcgatcctctcagctatgacgtcaagcctcggggagacagccagaggctggatctggaaaacgcagtgcttatgcaggagctcatggccatgaaggaggagatggccgagttgaaggcccagctctacctactggagaaagagaagaaggccctggagctgaagctgagcacgcgggaggcccaggagcaggcctacctggtgcacattgagcacctgaagtccgaggtggaggagcagaaggagcagcggatgcgatccctcagctccaccagcagcggcagcaaagacaaacctggcaaggagtgtgctgatgctgcctccccagctctgtccctagccgaactcaggacaacgtgcagcgagaatgagctggctgcggagttcaccaacgccattcgtcgagaaaagaagttgaaggccagagttcaagagctggtgagtgccttggagagactcaccaagagcagtgaaatccgacatcagcaatctgcagagttcgtgaatgatctaaagcgggccaacagcaacctggtggctgcctatgagaaagcaaagaaaaagcatcaaaacaaactgaagaagttagagtcgcagatgatggccatggtggagagacatgagacccaagtgaggatgctcaagcaaagaatagctctgctagaggaggagaactccaggccacacaccaatgaaacttcgctttaa

SEQ ID NO: 12184 - DNA, 664 bp, Homo sapiens
  source 1..664: mol_type = unassigned DNA
cgtggccggctgcagcgtgcagccctgggagagcctttcctccaacagccacaccagcacaaccagctccacagccagtagttgcgacaccgagttcactaaagaagacgagcagaggctgaaggattatatccagcagctcaagaatgacagggctgcggtcaagctgaccatgctggagctggaaagcatccacatcgatcctctcagctatgacgtcaagcctcggggagacagccagaggctggatctggaaaacgcagtgcttatgcaggagctcatggccatgaaggaggagatggccgagttgaaggcccagctctacctactggagaaagagaagaaggccctggagctgaagctgagcacgcgggaggcccaggagcaggcctacctggtgcacattgagcacctgaagtccgaggtggaggagcagaaggagcagcggatgcgatccctcagctccaccagcagcggcagcaaagacaaacctggcaaggtgatatgatccaaaatcccccatagatgcctgaaaccacaggtaatactgaacccttatatattctacgttttcccctatacatacatacctgtgttgaagtttaatttataaattaggcacagtaaaagattaacaactaataaaatattaatagaacaatta

SEQ ID NO: 12185 - DNA, 2855 bp, Homo sapiens
  source 1..2855: mol_type = unassigned DNA
acaactccagacgattcgaaggggaaacttcggcgtgaagtgcagctccgctccggctccctctagctttctttccttctctggaatccgaggcgcggatcttcctcgccccaccgccctagttttttcgggagctcgccggtgccctctagggtgtcggctcgtgctgggaagtgccctccatcctggtaatggggggcggcgaggcaccgtaggagtggcgaggcggcgcccagggtggcactgccccggaacggggcgctgggtgcgcgcgggagggtccccgcgcgggctccgccgctgccgcagctgcgagcgcgccgcgccaccgagcctcctgcagcaatggctcgtccgtgaaacgcgagccacggctgctctttttaagagtgcctgcatcctccgtttgcgcttcgcaactgtcctgggtgaaaatggctgtctagactaaaatgtggcagaagggaccaagcagtggatattgagcctgtgaagtccaactcttaagctccgagacctgggggactgagagcccagctctgaaaagtgcatcatgaattccggagttgccatgaaatatggaaacgactcctcggccgagctgagtgagctccattcagcagccctggcatcactaaagggagatatagtggaacttaataaacgtctccagcaaacagagagggaacgggaccttctggaaaagaaattggccaaggcacagtgcgagcagtcccacctcatgagagagcatgaggatgtccaggagcgaacgacacttcgctatgaggaacgcatcacagagctccacagcgtcattgcggagctcaacaagaagatagaccgtctgcaaggcaccaccatcagggaggaagatgagtactcagaactgcgatcagaactcagccagagccaacacgaggtcaacgaggactctcgaagcatggaccaagaccagacctctgtctctatccccgaaaaccagtctaccatggttactgctgacatggacaactgcagtgacctgaactcagaactgcagagggtgctgacagggctggagaatgttgtctgcggcaggaagaagagcagctgcagcctctccgtggccgaggtggacaagcacattgagcagctcaccacagccagcgagcactgtgacctggctattaagacagtcgaggagattgagggggtgcttggccgggacctgtatcccaacctggctgaagagaggtctcggtgggagaaggagctggctgggctgagggaagagaatgagagcctgactgccatgctgtgcagcaaagaggaagaactgaaccggactaaggccaccatgaatgccatccgggaagagcgggaccggctccggaggagggtcagagagcttcaaactcgactacagagcgtgcaggccacaggtccctccagccctggccgcctcacttccaccaaccgcccgattaaccccagcactggggagctgagcacaagcagcagcagcaatgacattcccatcgccaagattgctgagagggtgaagctatcaaagacaaggtccgaatcgtcatcatctgatcggccagtcctgggctcagaaatcagtagcataggggtatccagcagtgtggctgaacacctggcccactcacttcaggactgctccaatatccaagagattttccaaacactctactcacacggatctgccatctcagaaagcaagattagagagtttgaggtggaaacagaacggctgaatagccggattgagcacctcaaatcccaaaatgacctcctgaccataaccttggaggaatgtaaaagcaatgccgagaggatgagcatgctggtgggaaaatacgaatccaatgccacagcgctgaggctggccttgcagtacagcgagcagtgcatcgaagcctacgaactcctcctggcgctggcagagagtgagcagagcctcatcctggggcagttccgagcggcgggcgtggggtcctcccctggagaccagtcgggggatgaaaacatcactcagatgctcaagcgagctcatgactgccggaagacagctgagaacgctgccaaggccctgctcatgaagctggacggcagctgtgggggagcctttgccgtggccggctgcagcgtgcagccctgggagagcctttcctccaacagccacaccagcacaaccagctccacagccagtagttgcgacaccgagttcactaaagaagacgagcagaggctgaaggattatatccagcagctcaagaatgacagggctgcggtcaagctgaccatgctggagctggaaagcatccacatcgatcctctcagctatgacgtcaagcctcggggagacagccagaggctggatctggaaaacgcagtgcttatgcaggagctcatggccatgaaggaggagatggccgagttgaaggcccagctctacctactggagaaagagaagaaggccctggagctgaagctgagcacgcgggaggcccaggagcaggcctacctggtgcacattgagcacctgaagtccgaggtggaggagcagaaggagcagcggatgcgatccctcagctccaccagcagcggcagcaaagacaaacctggcaaggtagggccggagtggcttggggacacccttaggctcagtgactgcccagtgactgcccagtgaccactggccacacctcaccgccctgctgcctcagttcttgtatttgcataggaaatgcaggccattcgtaggtatctaagaaggtgacattttgagtgtaatgaaaccaggtctacattttagaaataccaaatctcactttatgtaatagttg

SEQ ID NO: 12186 - DNA, 757 bp, Homo sapiens
  source 1..757: mol_type = unassigned DNA
tcagggaggaagatgagtactcagaactgcgatcagaactcagccagagccaacacgaggtcaacgaggactctcgaagcatggaccaagaccagacctctgtctctatccccgaaaaccagtctaccatggttactgctgacatggacaactgcagtgacctgaactcagaactgcagagggtgctgacagggctggagaatgttgtctgcggcaggaagaagagcagctgcagcctctccgtggccgaggtggacaagcacattgagcagctcaccacagccagcgagcactgtgacctggctattaagacagtcgaggagattgagggggtgcttggccgggacctgtatcccaacctggctgaagagaggtctcggtgggagaaggagctggctgggctgagggaagagaatgagagcctgactgccatgctgtgcagcaaagaggaagaactgaaccggactaaggccaccatgaatgccatccgggaagagcgggaccggctccggaggagggtgagcatgctgcatccataatggtcaggcccttcctgggcatggggctgagagaggctggtgtatagcaccaggggcaccgtgagaattttgtggcatttgtaattttgggaatcactgtctctttcctgttatgaagtccttcttgaaagtagttcgaaattgctaaggtatagaggtaagatttaaaaaaaaaaagcaaacacttttctctggaatcttaaatctgactggttgat

SEQ ID NO: 12187 - DNA, 837 bp, Homo sapiens
  source 1..837: mol_type = unassigned DNA
ttcttactaaagaaactcaagatgtggctgctttgagtgaaagacaagagaattcagaaaatgaccatcatctgaaactctttaataaaaagagctttgcattggctccaagtctcagaggcagtgcctgtgaggttaggctggctggtgttgaactttgaaatgtcaggctccattgccatcccattacctgaatgagtccctcatggtaagcaaaacagacagcatttgttgccctgtgtaacgcattttgtcttcattcactcacagacaactgcagtgacctgaactcagaactgcagagggtgctgacagggctggagaatgttgtctgcggcaggaagaagagcagctgcagcctctccgtggccgaggtggacaagcacattgagcagctcaccacagccagcgagcactgtgacctggctattaagacagtcgaggagattgagggggtgcttggccgggacctgtatcccaacctggctgaagagaggtctcggtgggagaaggagctggctgggctgagggaagagaatgagagcctgactgccatgctgtgcagcaaagaggaagaactgaaccggactaaggccaccatgaatgccatccgggaagagcgggaccggctccggaggagggtgagcatgctgcatccataatggtcaggcccttcctgggcatggggctgagagaggctggtgtatagcaccaggggcaccgtgagaattttgtggcatttgtaattttgggaatcactgtctctttcctgttatgaagtccttcttgaaagtagttcgaaattgctaaggtatagaggtaagatttaaaaaaaaa

SEQ ID NO: 12188 - DNA, 857 bp, Homo sapiens
  source 1..857: mol_type = unassigned DNA
ggcgagaccaaccccggactgtgcctccaccacacccatccccacacctcttgggcaaggaggaccagagcacatgtcaagctccattcagcagccctggcatcactaaagggagatatagtggaacttaataaacgtctccagcaaacagagagggaacgggaccttctggaaaagaaattggccaaggcacagtgcgagcagtcccacctcatgagagagcatgaggatgtccaggagcgaacgacacttcgctatgaggaacgcatcacagagctccacagcgtcattgcggagctcaacaagaagatagaccgtctgcaaggcaccaccatcagggaggaagatgagtactcagaactgcgatcagaactcagccagagccaacacgaggtcaacgaggactctcgaagcatggaccaagaccagacctctgtctctatccccgaaaaccagtctaccatggttactgctgacatggacaactgcagtgacctgaactcagaactgcagagggtgctgacagggctggagaatgttgtctgcggcaggaagaagagcagctgcagcctctccgtggccgaggtggacaagcacattgagcagctcaccacagccagcgagcactgtgacctggctattaagacagtcgaggagattgagggggtgcttggccgggacctgtatcccaacctggctgaagagaggtctcggtgggagaaggagctggctgggctgagggaagagaatgagagcctgactgccatgctgtgcagcaaagaggaagaactgaaccggactaaggccaccatgaatgccatccgggaagagcgggaccggctccggaggagggtgag

SEQ ID NO: 12189 - DNA, 840 bp, Homo sapiens
  source 1..840: mol_type = unassigned DNA
tcagatctgcctaactgcgttgaacagagacgagagaacagagacttgatgaaatgagcatcagctccattcagcagccctggcatcactaaagggagatatagtggaacttaataaacgtctccagcaaacagagagggaacgggaccttctggaaaagaaattggccaaggcacagtgcgagcagtcccacctcatgagagagcatgaggatgtccaggagcgaacgacacttcgctatgaggaacgcatcacagagctccacagcgtcattgcggagctcaacaagaagatagaccgtctgcaaggcaccaccatcagggaggaagatgagtactcagaactgcgatcagaactcagccagagccaacacgaggtcaacgaggactctcgaagcatggaccaagaccagacctctgtctctatccccgaaaaccagtctaccatggttactgctgacatggacaactgcagtgacctgaactcagaactgcagagggtgctgacagggctggagaatgttgtctgcggcaggaagaagagcagctgcagcctctccgtggccgaggtggacaagcacattgagcagctcaccacagccagcgagcactgtgacctggctattaagacagtcgaggagattgagggggtgcttggccgggacctgtatcccaacctggctgaagagaggtctcggtgggagaaggagctggctgggctgagggaagagaatgagagcctgactgccatgctgtgcagcaaagaggaagaactgaaccggactaaggccaccatgaatgccatccgggaagagcgggaccggctccggaggagggtgag

SEQ ID NO: 12190 - DNA, 744 bp, Homo sapiens
  source 1..744: mol_type = unassigned DNA
cgggcggtcggagaaggtctgccgggagtacacctgccctctgcctgaagcgtccccaagtgtcccgggcccgcgtcgttgccggatgcacaatgctgacacccttcccgggggcttccagtgtattctgcctcctcttgtgttcccgttgccacccttagctccctgactcttccagccaccttcccctcctccctcttccctgaggtgcctcctcgggcgattccagagcgcccatcttcccagtccgggcaaaacccggagaggtggaatccctcgcccggagcgccccggcggccactgggcatgctccgttgtcaggcaagttcggggctgcaggcagcttgcgcgccgcgcggattccagctgcggtcgcgcgtactcctcctcccaagtagggagcgggcgcatgatggcggccgcggcggcagcggctgcggggagctccagcagcggcggcggcggcggcggcagcggcagcagcagcagcagcagcgacacgtccagcaccggcgaggaggagaggatgcggcgcctcttccagacgtgcgacggcgacggggacggatacatcagcaggttatgcaccagaaaggagaagaatggagaggcaaagactgattgaccccactcatggtgcctgcccatcctgtggatcctccatcttttgaaaaagagctctgaatcttgtcatacttaaaaacttttggaatctaaaagtaggcacatgacagaaaaatccta

SEQ ID NO: 12191 - DNA, 3932 bp, Homo sapiens
  source 1..3932: mol_type = unassigned DNA
tccagtaaggagtcggggtcttccccagttttctcagccaggcggcggcggcgactggcaatgtttggcctcaaaagaaacgcggtaatcggactcaacctctactgtgggggggccggcttgggggccggcagcggcggcgccacccgcccgggagggcgacttttggctacggagaaggaggcctcggcccggcgagagatagggggaggggaggccggcgcggtgattggcggaagcgccggcgcaagccccccgtccaccctcacgccagactcccggagggtcgcgcggccgccgcccattggcgccgaggtccccgacgtcaccgcgacccccgcgaggctgcttttcttcgcgcccacccgccgcgcggcgccgcttgaggagatggaagccccggccgctgacgccatcatgtcgcccgaagaggagctggacgggtacgagccggagcctctcgggaagcggccggctgtcctgccgctgctggagttggtcggggaatctggtaataacaccagtacggacgggtcactaccctcgacgccgccgccagcagaggaggaggaggacgagttgtaccggcagtcgctggagattatctctcggtaccttcgggagcaggccaccggcgccaaggacacaaagccaatgggcaggtctggggccaccagcaggaaggcgctggagaccttacgacgggttggggatggcgtgcagcgcaaccacgagacggccttccaaggcatgcttcggaaactggacatcaaaaacgaagacgatgtgaaatcgttgtctcgagtgatgatccatgttttcagcgacggcgtaacaaactggggcaggattgtgactctcatttcttttggtgcctttgtggctaaacacttgaagaccataaaccaagaaagctgcatcgaaccattagcagaaagtatcacagacgttctcgtaaggacaaaacgggactggctagttaaacaaagaggctgggatgggtttgtggagttcttccatgtagaggacctagaaggtggcatcaggaatgtgctgctggcttttgcaggtgttgctggagtaggagctggtttggcatatctaataagatagccttactgtaagtgcaatagttgacttttaaccaaccaccaccaccaccaaaaccagtttatgcagttggactccaagctgtaacttcctagagttgcaccctagcaacctagccagaaaagcaagtggcaagaggattatggctaacaagaataaatacatgggaagagtgctccccattgattgaagagtcactgtctgaaagaagcaaagttcagtttcagcaacaaacaaactttgtttgggaagctatggaggaggacttttagatttagtgaagatggtagggtggaaagacttaatttccttgttgagaacaggaaagtggccagtagccaggcaagtcatagaattgattacccgccgaattcattaatttactgtagtgttaagagaagcactaagaatgccagtgacctgtgtaaaagttacaagtaatagaactatgactgtaagcctcagtactgtacaagggaagcttttcctctctctaattagctttcccagtatacttcttagaaagtccaagtgttcaggacttttatacctgttatactttggcttggtttccatgattcttactttattagcctagtttatcaccaataatacttgacggaaggctcagtaattagttatgaatatggatatcctcaattcttaagacagcttgtaaatgtatttgtaaaaattgtatatatttttacagaaagtctatttctttgaaacgaaggaagtatcgaatttacattagtttttttcatacccttttgaactttgcaacttccgtaattaggaacctgtttcttacagcttttctatgctaaactttgttctgttcagttctagagtgtatacagaacgaattgatgtgtaactgtatgcagactggttgtagtggaacaaatctgataactatgcaggtttaaattttcttatctgattttggtaagtattccttaggtttttctttgaaaacctgggattgagaggttgatgaatggaaattctttcacttcattatatgcaagttttcaataattaggtctaagtggagttttaaggttactgatgacttacaaataatgggctctgattgggcaatactcatttgagttccttccatttgacctaatttaactggtgaaatttaaagtgaattcatgggctcatctttaaagcttttactaaaagattttcagctgaatggaactcattagctgtgtgcatataaaaagatcacatcaggtggatggagagacatttgatcccttgtttgcttaataaattataaaatgatggcttggaaaagcaggctagtctaaccatggtgctattattaggcttgcttgttacacacacaggtctaagcctagtatgtcaataaagcaaatacttactgttttgtttctattaatgattcccaaaccttgttgcaagtttttgcattggcatctttggatttcagtcttgatgtttgttctatcagacttaaccttttatttcctgtccttccttgaaattgctgattgttctgctccctctacagatatttatatcaattcctacagctttcccctgccatccctgaactctttctagcccttttagattttggcactgtgaaacccctgctggaaacctgagtgaccctccctccccaccaagagtccacagacctttcatctttcacgaacttgatcctgttagcaggtggtaataccatgggtgctgtgacactaacagtcattgagaggtgggaggaagtcccttttccttggactggtatcttttcaactattgttttatcctgtctttgggggcaatgtgtcaaaagtcccctcaggaattttcagaggaaagaacattttatgaggctttctctaaagtttcctttgtataggagtatgctcacttaaatttacagaaagaggtgagctgtgttaaacctcagagtttaaaagctactgataaactgaagaaagtgtctatattggaactagggtcatttgaaagcttcagtctcggaacatgacctttagtctgtggactccatttaaaaataggtatgaataagatgactaagaatgtaatggggaagaactgccctgcctgcccatctcagagccataaggtcatctttgctagagctatttttacctatgtatttatcgttcttgatcataagccgcttatttatatcatgtatctctaaggacctaaaagcactttatgtagtttttaattaatcttaagatctggttacggtaactaaaaaagcctgtctgccaaatccagtggaaacaagtgcatagatgtgaattggtttttaggggccccacttcccaattcattaggtatgactgtggaaatacagacaaggatcttagttgatattttgggcttggggcagtgagggcttaggacaccccaagtggtttgggaaaggaggaggggagtggtgggtttatagggggaggaggaggcaggtggtctaagtgctgactggctacgtagttcgggcaaatcctccaaaagggaaagggaggatttgcttagaaggatggcgctcccagtgactactttttgacttctgtttgtcttacgcttctctcagggaaaaacatgcagtcctctagtgtttcatgtacattctgtggggggtgaacaccttggttctggttaaacagctgtacttttgatagctgtgccaggaagggttaggaccaactacaaattaatgttggttgtcaaatgtagtgtgtttccctaactttctgtttttcctgagaaaaaaaaataaatcttttattcaaata

SEQ ID NO: 12192 - DNA, 1099 bp, Homo sapiens
  source 1..1099: mol_type = unassigned DNA
ccaagggtgggttggaaaccgaaacgagtcagtgttgaaacgtgtctcatcctattcctgaagccagaatattctggccatgagtcattgtttccgcccatcttgattcttttggaaatggcagctcttgttcaaagaccggaaagggtgggatgtcaatttcaagtggggtcaacctgagttctgtaaatcccagtagcgattttcccgccgcgggtgggcaggcgaatcttgcgccggtttagacaaaggaggccgtgaggacctgcatgcttttctttctcaggcatgcttcggaaactggacatcaaaaacgaagacgatgtgaaatcgttgtctcgagtgatgatccatgttttcagcgacggcgtaacaaactggggcaggattgtgactctcatttcttttggtgcctttgtggctaaacacttgaagaccataaaccaagaaagctgcatcgaaccattagcagaaagtatcacagacgttctcgtaaggacaaaacgggactggctagttaaacaaagaggctgggatgggtttgtggagttcttccatgtagaggacctagaaggtggcatcaggaatgtgctgctggcttttgcaggtgttgctggagtaggagctggtttggcatatctaataagatagccttactgtaagtgcaatagttgacttttaaccaaccaccaccaccaccaaaaccagtttatgcagttggactccaagctgtaacttcctagagttgcaccctagcaacctagccagaaaagcaagtggcaagaggattatggctaacaagaataaatacatgggaagagtgctccccattgattgaagagtcactgtctgaaagaagcaaagttcagtttcagcaacaaacaaactttgtttgggaagctatggaggaggacttttagatttagtgaagatggtagggtggaaagacttaatttccttgttgagaacaggaaagtggccagtagccaggcaagtcatagaattgattacccgccgaattcattaatttactgtagtgttaagagaagcactaagaatgccagtgacctgtgtaaaagttacaagtaatagaactatg

SEQ ID NO: 12193 - DNA, 1110 bp, Homo sapiens
  source 1..1110: mol_type = unassigned DNA
atgtttggcctcaaaagaaacgcggtaatcggactcaacctctactgtgggggggccggcttgggggccggcagcggcggcgccacccgcccgggagggcgacttttggctacggagaaggaggcctcggcccggcgagagatagggggaggggaggccggcgcggtgattggcggaagcgccggcgcaagccccccgtccaccctcacgccagactcccggagggtcgcgcggccgccgcccattggcgccgaggtccccgacgtcaccgcgacccccgcgaggctgcttttcttcgcgcccacccgccgcgcggcgccgcttgaggagatggaagccccggccgctgacgccatcatgtcgcccgaagaggagctggacgggtacgagccggagcctctcgggaagcggccggctgtcctgccgctgctggagttggtcggggaatctggtaataacaccagtacggacgggtcactaccctcgacgccgccgccagcagaggaggaggaggacgagttgtaccggcagtcgctggagattatctctcggtaccttcgggagcaggccaccggcgccaaggacacaaagccaatgggcaggtctggggccaccagcaggaaggcgctggagaccttacgacgggttggggatggcgtgcagcgcaaccacgagacggccttccaaggatgggtttgtggagttcttccatgtagaggacctagaaggtggcatcaggaatgtgctgctggcttttgcaggtgttgctggagtaggagctggtttggcatatctaataagatagccttactgtaagtgcaatagttgacttttaaccaaccaccaccaccaccaaaaccagtttatgcagttggactccaagctgtaacttcctagagttgcaccctagcaacctagccagaaaagcaagtggcaagaggattatggctaacaagaataaatacatgggaagagtgctccccattgattgaagagtcactgtctgaaagaagcaaagttcagtttcagcaacaaacaaactttgtttgggaagctatggaggaggacttttagatttagtgaagatggtagggtggaaagacttaattt

SEQ ID NO: 12194 - DNA, 3626 bp, Homo sapiens
  source 1..3626: mol_type = unassigned DNA
gcgcaaccctccggaagctgccgcccctttccccttttatgggaatactttttttaaaaaaaaagagttcgctggcgccaccccgtaggactggccgccctaaaaccgtgataaaggagctgctcgccacttctcacttccgcttccttccagtaaggagtcggggtcttccccagttttctcagccaggcggcggcggcgactggcaatgtttggcctcaaaagaaacgcggtaatcggactcaacctctactgtgggggggccggcttgggggccggcagcggcggcgccacccgcccgggagggcgacttttggccaccggcgccaaggacacaaagccaatgggcaggtctggggccaccagcaggaaggcgctggagaccttacgacgggttggggatggcgtgcagcgcaaccacgagacggccttccaaggcatgcttcggaaactggacatcaaaaacgaagacgatgtgaaatcgttgtctcgagtgatgatccatgttttcagcgacggcgtaacaaactggggcaggattgtgactctcatttcttttggtgcctttgtggctaaacacttgaagaccataaaccaagaaagctgcatcgaaccattagcagaaagtatcacagacgttctcgtaaggacaaaacgggactggctagttaaacaaagaggctgggatgggtttgtggagttcttccatgtagaggacctagaaggtggcatcaggaatgtgctgctggcttttgcaggtgttgctggagtaggagctggtttggcatatctaataagatagccttactgtaagtgcaatagttgacttttaaccaaccaccaccaccaccaaaaccagtttatgcagttggactccaagctgtaacttcctagagttgcaccctagcaacctagccagaaaagcaagtggcaagaggattatggctaacaagaataaatacatgggaagagtgctccccattgattgaagagtcactgtctgaaagaagcaaagttcagtttcagcaacaaacaaactttgtttgggaagctatggaggaggacttttagatttagtgaagatggtagggtggaaagacttaatttccttgttgagaacaggaaagtggccagtagccaggcaagtcatagaattgattacccgccgaattcattaatttactgtagtgttaagagaagcactaagaatgccagtgacctgtgtaaaagttacaagtaatagaactatgactgtaagcctcagtactgtacaagggaagcttttcctctctctaattagctttcccagtatacttcttagaaagtccaagtgttcaggacttttatacctgttatactttggcttggtttccatgattcttactttattagcctagtttatcaccaataatacttgacggaaggctcagtaattagttatgaatatggatatcctcaattcttaagacagcttgtaaatgtatttgtaaaaattgtatatatttttacagaaagtctatttctttgaaacgaaggaagtatcgaatttacattagtttttttcatacccttttgaactttgcaacttccgtaattaggaacctgtttcttacagcttttctatgctaaactttgttctgttcagttctagagtgtatacagaacgaattgatgtgtaactgtatgcagactggttgtagtggaacaaatctgataactatgcaggtttaaattttcttatctgattttggtaagtattccttaggtttttctttgaaaacctgggattgagaggttgatgaatggaaattctttcacttcattatatgcaagttttcaataattaggtctaagtggagttttaaggttactgatgacttacaaataatgggctctgattgggcaatactcatttgagttccttccatttgacctaatttaactggtgaaatttaaagtgaattcatgggctcatctttaaagcttttactaaaagattttcagctgaatggaactcattagctgtgtgcatataaaaagatcacatcaggtggatggagagacatttgatcccttgtttgcttaataaattataaaatgatggcttggaaaagcaggctagtctaaccatggtgctattattaggcttgcttgttacacacacaggtctaagcctagtatgtcaataaagcaaatacttactgttttgtttctattaatgattcccaaaccttgttgcaagtttttgcattggcatctttggatttcagtcttgatgtttgttctatcagacttaaccttttatttcctgtccttccttgaaattgctgattgttctgctccctctacagatatttatatcaattcctacagctttcccctgccatccctgaactctttctagcccttttagattttggcactgtgaaacccctgctggaaacctgagtgaccctccctccccaccaagagtccacagacctttcatctttcacgaacttgatcctgttagcaggtggtaataccatgggtgctgtgacactaacagtcattgagaggtgggaggaagtcccttttccttggactggtatcttttcaactattgttttatcctgtctttgggggcaatgtgtcaaaagtcccctcaggaattttcagaggaaagaacattttatgaggctttctctaaagtttcctttgtataggagtatgctcacttaaatttacagaaagaggtgagctgtgttaaacctcagagtttaaaagctactgataaactgaagaaagtgtctatattggaactagggtcatttgaaagcttcagtctcggaacatgacctttagtctgtggactccatttaaaaataggtatgaataagatgactaagaatgtaatggggaagaactgccctgcctgcccatctcagagccataaggtcatctttgctagagctatttttacctatgtatttatcgttcttgatcataagccgcttatttatatcatgtatctctaaggacctaaaagcactttatgtagtttttaattaatcttaagatctggttacggtaactaaaaaagcctgtctgccaaatccagtggaaacaagtgcatagatgtgaattggtttttaggggccccacttcccaattcattaggtatgactgtggaaatacagacaaggatcttagttgatattttgggcttggggcagtgagggcttaggacaccccaagtggtttgggaaaggaggaggggagtggtgggtttatagggggaggaggaggcaggtggtctaagtgctgactggctacgtagttcgggcaaatcctccaaaagggaaagggaggatttgcttagaaggatggcgctcccagtgactactttttgacttctgtttgtcttacgcttctctcagggaaaaacatgcagtcctctagtgtttcatgtacattctgtggggggtgaacaccttggttctggttaaacagctgtacttttgatagctgtgccaggaagggttaggaccaactacaaattaatgttggttgtcaaatgtagtgtgtttccctaactttctgtttttcctgagaaaaaaaaataaatcttttattcaaatacaggg

SEQ ID NO: 12195 - DNA, 1905 bp, Homo sapiens
  source 1..1905: mol_type = unassigned DNA
aggaaatgcattttgtgagaagaataattgtatttgagtgtctctgtaaaaatcaggaagtcttttagcagtagtggaggacatgctagaggacgaggaagaagaagatgacaaagatgacaaggacagtgaaaaaaagggatttataaataaaatctatgccatccaggaggtatgtgtcagtgtccagaacatcctagatgaagtggcttcctttggcgaaaggataaagaatactttcaactggactgtcccattcttaagctggctggccattgtagccctctgtgtgttcacagccatcctgtactgcattccgctgagatacattgtccttgtctggggcatcaataaatttacaaaaaagcttcggagtccatatgcaattgataacaatgaactacttgacttcctttccagagtcccttcagatgtacaagtgctgcaattctgtcttgagagctgcctgacttgccttcattttgagatctgtgatgtaaatatttcttaagagactgaatgtcactcaaacatctacttggactgctaactattatagatattgtgaactactaaatatattcctttagtatcttttagtgagtaaattcactgagtcattatttatattcataaactattactgacattcgttgtgataattcataagaaatgcgtatttgtgcttttaaatttttccccacttatcaaaaagaacataatagtacttctcattcattctggtactgttccagactcaaactgattgattgattgaatctcccaactcagattatcctagtgcatatagaatgttcaaaaactggaattcctacagaacctatcaatcaatcaatcagtttttgaacattctatatgcactaggataatctgagttgggagattcttaaaaggactctgtgatatatttatcgaataccaactgtatgaccctgttatagacaacggtcaaaccaatgattgtatactaaaatcaaatctggagttgaagtacagtgagagccaaatttaattgatacatttctaaaattatcttttataaaatttttattctgcatttaaaagtgaagaaaaactcagaagtaaatgcttatctagggaccacaggagctttttttccactttgatctcatatctaaggtctcctatgctcaaagtagtctacatttgtattaatgttattcaaaggcagtaatttcagcgaataaacttgttaaatgggcctaaatgtttataatgttgactaagcattaagaacaaacaaaaaggtataaggcagttatacctttttgctccagaaatacaagtaaagacagctaccattatacttcttgaaaaacgtctcaggtattgctaaattaatacttgcttaaattcttgggctttaaatgaatagcgtgatttcacactctagtgtgagtgagtgtacagatgatgtctattcgttggtttgattagggtatctagaatcagccttttctaattgctcagtaaagtatgaattaaaaccacatagaaaataatgtggtaaattctttcttacaatagtgtcattcctttcaattataattctttttcctgggatgattggtgtaactcactgaaagaaaacaaaacatttttttttcttttttttttggtgaaaatgttaccctctggtacctcagtttcttttatatagtggcaatttgaatagaggcagtcacataagatttacttcagctgaatggctaaaatttgagaaatactattgaaaaatctcattaaaaaatagtatgcaaataaaaactatcaaatgtccaaagcaatcatacaatgtagaaactaagagcaccatgaaaggtttcctggaacttaatgattctatctgtgcttttcaaagga

SEQ ID NO: 12196 - DNA, 5396 bp, Homo sapiens
  source 1..5396: mol_type = unassigned DNA
atggagccccgggctgccgcggcgggcgagccagagccgccggcggcgtcctcctccttccaggcccggctctggaagaacctgcagctgggggtgggcaggagcaagggcggcgggggcgggcgcgctgggggtccagagcgccgcactgcggacaccccgtcgccctccccgccacccccggtgggcacagggaatgcaccggccagggggagtggtgcaggcagcaggtggagcggcttcaagaagcggaagcaagtgctggaccgagtcttctcctcctcgcagcccaacctgtgctgctcgtcgccggagcccctggagcccggcggcgccggcagagccgagcaggggtccacgctacgccgccggatccgcgagcatttgctccccgccgtaaaggggcccgcggcggcctcgggagcagcgggagggacgcctcctggcggacgctcccccgactcagctccttcctcttcctccgcctcatcctccctgtcctcctcgccccagcctcccccgaggggggaccgcgcccgagatgagggtgcacggcgtcagggccccggggcgcacttgtgccaccagaagagctcctctctgccgggcaccgcctgcctggagcagctgctggagccgccgcctcctcccgcagagccggcgcggagtcccgcggagtctcgggccccggagacgggcgaggagcacggcagcagccagaaaataataaacactgctggaaccagtaatgcagaagtccccttggctgatcccggaatgtaccagctggacattacattaagaaggggtcaaagtttagctgctcgagatcgaggagggacgagtgatccatatgtgaagtttaaaatcggaggaaaagaagtttttagaagtaagataatacacaagaacctcaaccctgtgtgggaagaaaaagcttgtattctggttgatcatcttagggagccattgtatataaaggtatttgactatgattttggactacaggatgactttatgggctcagcctttctggatctgacacaattggagttaaacaggcccacagatgtgacccttactctgaaagatcctcattatcctgaccatgatcttggaatcattttgctctcagtcatccttacccctaaagaaggagagtccagggatgtgacaatgctaatgaggaagagttggaaaagatcaagtaaggaactttcagaaaatgaagtggttggatcttatttctctgtgaagtctctcttttggaggacgtgcggcaggccagctcttcctgtcctgggcttctgcagagcagagcttcagaatccttattgcaaaaatgtacaatttcagacccaaagtttacgcctatcagacctacacagaaaatcgcatctttggagaggaatagtcagcatcaccttgattgaagggagagacctcaaggccatggattccaacgggttgagcgatccctacgtgaagttccggcttgggcatcagaagtacaagagcaagattatgccaaaaacgttgaatcctcagtggagggaacaatttgattttcacctttatgaagaaagaggaggagtcattgatatcactgcatgggacaaagatgctgggaaaagggatgatttcattggcaggtgccaggtcgacctgtcagccctcagtagggaacagacgcacaagctggagttgcagctggaagagggtgagggacacctggtgctgctggtcactctgacagcatcagccacagtcagcatctctgacctgtctgtcaactccctggaggaccagaaggaacgagaggagatattaaagagatatagcccattgaggatatttcacaacctgaaagatgtgggatttctccaggtgaaagtcatcagagcggaagggttaatggctgccgacgtcactggaaaaagtgacccattttgtgtggtagaactgaacaacgatagactgctaacacatactgtctacaaaaatctcaatcctgagtggaataaagtcttcacgttcaacattaaagatatccattcagttcttgaagtgacagtttatgatgaagatcgggatcgaagtgctgactttctgggcaaagttgctataccattgctgtctattcaaaatggtgaacagaaagcctacgtcttgaaaaacaagcagctgacagggccaacaaagggggtcatctatcttgaaatagatgtgatttttaatgctgtgaaagccagcttacgaacattaatacccaaagaacagaagtacattgaagaggaaaacagactctctaaacagctgctactaagaaactttatcagaatgaaacgttgtgtcatggtgctggtaaatgctgcatactacgttaatagttgctttgattgggattcacccccaaggagtctcgctgcttttgtgctctttctctttgttgtctggaactttgagctctacatgataccactggttttgttgttactattgacatggaactacttcttgataatatcagggaaagataacaggcaacgtgatacagtagtggaggacatgctagaggacgaggaagaagaagatgacaaagatgacaaggacagtgaaaaaaagggatttataaataaaatctatgccatccaggaggtatgtgtcagtgtccagaacatcctagatgaagtggcttcctttggcgaaaggataaagaatactttcaactggactgtcccattcttaagctggctggccattgtagccctctgtgtgttcacagccatcctgtactgcattccgctgagatacattgtccttgtctggggcatcaataaatttacaaaaaagcttcggagtccatatgcaattgataacaatgaactacttgacttcctttccagagtcccttcagatgtacaagtggtgcaataccaagaactgaaaccagatccttctcatagcccatataaaagaaagaaaaacaatcttggctagccagctcccagcactgaggagaccagcatctgtttgggaagataaaagaaaaagccctcagcctcagcagcatttcctttctttctgctttttatttattttgcctttttatcatgatcgagagaatctgtaaatagtgtacaaaggcatatgtctttgaatatatacttctattgtacagactcaacttgataaaggttttgctactgctgtgtcaaaaccttgttagctgtggataataatataacacactgaaagaacaaatataagaatgataacactggaagatatattcttatctaattactagtggattaaatactcacctgtgctctgattaaatctacatcaattgtaaatgtcgatttgattttaaagtttttttttaatgcgactattttttatctgaaaagtaatccattacacttttctatgttttatacatttcaaaagggagggaaattccaaagcctgaataatggaatggatacatttcaatttaacatatattctggctttagatcccgacattcactcctgtgcaaattacttaggtatgacttaggctaattttaagctaataagtgaaggtacattcactccctcaagagaatcaatactcagaaggttacaaagttttctttatagaatttcaatcaatcattccatctaaaaccttaaaatctctacaggactacataacataaatactgccagtttataaacgattgcctatctgaatttttatacctaccactactttaatttatacagttagttagcaaattagcaacccagtaagtacagttatcaaaaatactaggaaactatatccatatcgcttttggtgtcagattgtatctgtgcatctaaaaatattttaataaatactcaagtgctctcagagaaaaaaaaaacctgctttctcattagattactgaaatgctttaattcatactatgattttgttattagtgtgaattttaatgtagagaattcagtgtgctaagtgatatgccagtgtttcactacattcatttattaaaaaaaatcattcttgattatgcatgaaaacctgttttgtaaaataaaataaactgcttgggggtggtggttgcctttatcaatgtttcactattatcatagaatctatacttaaaaattgcattcccaagactcttaaagtagtttttatatctcactccctggtatactaagggagcataactctggagaaaaaataatttggttggttgagaatgtcttacttccctgacttggtaggggactacactcagttgaaattgcagcagacaatgctttgcactactttattaataataaacttggatggggtaaaagtgggggttatactggaaaaactatagaaaagctaaaagaaatgtatatttcactctaaaggaagattctttaacaataaatgtaatctcattgaagctgatttttaaagtatttttattttagagataagttgttaaatactatttcttataatagaactattttgatctgtttatatactatgcttgaatgtcaattaaattccctttctacagaaaggctttgacctcaacatgctttatttaatgtatcatgtttaaaatgacatgcttctgtctgcataccatcactgtttgttgctaaaaacataatgttccatgaacatgatgttactacagaaagtttattgatgagataactgtttgaaataactttcaattataccttatgtgagacttttatgttctgtgctgacaatgtgtactcaaatgtctataagcctgatattctacaacctcagatgtatctagtggatagtaaccattaacagatgactaatttgtttcactgtatcaaatttcagatgtttagttcaatggtaatgctgactacacattcactgtattaaatacaaaagaaaataatctttcccacgtataatcagcactccttttttttttttttttggtggttcagagattgatgagggattgtgtgcatattcttaaaaactatatgtcacttggagaaaaacagatttggtttaaacaaataagacctttttcctgaaactctgactcttatatgaaaatacctctggaggggtgagcaaccaatgacattaacagaggaataagaactagcttgaggcacaaaagtgatattcagggaaatcttcattgcttttagaaactactacattcacaggctgaaaacagaatatgtatagttaaaattttaactatttatttctttccccttctcacatagctgcaattctgtcttgagagctgcctgacttgccttcattttgagatctgtgatgtaaatatttcttaagagactgaatgtcactcaaacatctacttggactg

SEQ ID NO: 12197 - DNA, 3159 bp, Homo sapiens
  source 1..3159: mol_type = unassigned DNA
attccaagtcgctgctgtgcagagcagcaagtgctccgtgcagggctgttgctatcacttggaggtgaacagcctcttttgccggtattcagtgaagaaagcaagtctaaatatgcagttctctcactggagtgaaagatgttttgttcatttctaatcaactatgctagacagctgcaagctgaaaagtgcctgcaatttgccatttatttgtaataagaaaataataaacactgctggaaccagtaatgcagaagtccccttggctgatcccggaatgtaccagctggacattacattaagaaggggtcaaagtttagctgctcgagatcgaggagggacgagtgatccatatgtgaagtttaaaatcggaggaaaagaagtttttagaagtaagataatacacaagaacctcaaccctgtgtgggaagaaaaagcttgtattctggttgatcatcttagggagccattgtatataaaggtatttgactatgattttggactacaggatgactttatgggctcagcctttctggatctgacacaattggagttaaacaggcccacagatgtgacccttactctgaaagatcctcattatcctgaccatgatcttggaatcattttgctctcagtcatccttacccctaaagaaggagagtccagggatgtgacaatgctaatgaggaagagttggaaaagatcaagtaagtttcagacccaaagtttacgcctatcagacctacacagaaaatcgcatctttggagaggaatagtcagcatcaccttgattgaagggagagacctcaaggccatggattccaacgggttgagcgatccctacgtgaagttccggcttgggcatcagaagtacaagagcaagattatgccaaaaacgttgaatcctcagtggagggaacaatttgattttcacctttatgaagaaagaggaggagtcattgatatcactgcatgggacaaagatgctgggaaaagggatgatttcattggcaggtgccaggtcgacctgtcagccctcagtagggaacagacgcacaagctggagttgcagctggaagagggtgagggacacctggtgctgctggtcactctgacagcatcagccacagtcagcatctctgacctgtctgtcaactccctggaggaccagaaggaacgagaggagatattaaagagatatagcccattgaggatatttcacaacctgaaagatgtgggatttctccaggtgaaagtcatcagagcggaagggttaatggctgccgacgtcactggaaaaagtgacccattttgtgtggtagaactgaacaacgatagactgctaacacatactgtctacaaaaatctcaatcctgagtggaataaagtcttcacgttcaacattaaagatatccattcagttcttgaagtgacagtttatgatgaagatcgggatcgaagtgctgactttctgggcaaagttgctataccattgctgtctattcaaaatggtgaacagaaagcctacgtcttgaaaaacaagcagctgacagggccaacaaagggggtcatctatcttgaaatagatgtgatttttaatgctgtgaaagccagcttacgaacattaatacccaaagaacagaagtacattgaagaggaaaacagactctctaaacagctgctactaagaaactttatcagaatgaaacgttgtgtcatggtgctggtaaatgctgcatactacgttaatagttgctttgattgggattcacccccaaggagtctcgctgcttttgtggtagtggaggacatgctagaggacgaggaagaagaagatgacaaagatgacaaggacagtgaaaaaaagggatttataaataaaatctatgccatccaggaggtatgtgtcagtgtccagaacatcctagatgaagtggcttcctttggcgaaaggataaagaatactttcaactggactgtcccattcttaagctggctggccattgtagccctctgtgtgttcacagccatcctgtactgcattccgctgagatacattgtccttgtctggggcatcaataaatttacaaaaaagcttcggagtccatatgcaattgataacaatgaactacttgacttcctttccagagtcccttcagatgtacaagtggtgcaataccaagaactgaaaccagatccttctcatagcccatataaaagaaagaaaaacaatcttggctagccagctcccagcactgaggagaccagcatctgtttgggaagataaaagaaaaagccctcagcctcagcagcatttcctttctttctgctttttatttattttgcctttttatcatgatcgagagaatctgtaaatagtgtacaaaggcatatgtctttgaatatatacttctattgtacagactcaacttgataaaggttttgctactgctgtgtcaaaaccttgttagctgtggataataatataacacactgaaagaacaaatataagaatgataacactggaagatatattcttatctaattactagtggattaaatactcacctgtgctctgattaaatctacatcaattgtaaatgtcgatttgattttaaagtttttttttaatgcgactattttttatctgaaaagtaatccattacacttttctatgttttatacatttcaaaagggagggaaattccaaagcctgaataatggaatggatacatttcaatttaacatatattctggctttagatcccgacattcactcctgtgcaaattacttaggtatgacttaggctaattttaagctaataagtgaaggtacattcactccctcaagagaatcaatactcagaaggttacaaagttttctttatagaatttcaatcaatcattccatctaaaaccttaaaatctctacaggactacataacataaatactgccagtttataaacgattgcctatctgaatttttatacctaccactactttaatttatacagttagttagcaaattagcaacccagtaagtacagttatcaaaaatactaggaaactatatccatatcgcttttggtgtcagattgtatctgtgcatctaaaaatattttaataaatactcaagtgctctcagagaaaaaaaaaa

SEQ ID NO: 12198 - DNA, 2629 bp, Homo sapiens
  source 1..2629: mol_type = unassigned DNA
acacactctgctacattgaaactgctccctgaatcttttcctccggtaaattgtgcttcctgggaaactaagggtttcagacccaaagtttacgcctatcagacctacacagaaaatcgcatctttggagaggaatagtcagcatcaccttgattgaagggagagacctcaaggccatggattccaacgggttgagcgatccctacgtgaagttccggcttgggcatcagaagtacaagagcaagattatgccaaaaacgttgaatcctcagtggagggaacaatttgattttcacctttatgaagaaagaggaggagtcattgatatcactgcatgggacaaagatgctgggaaaagggatgatttcattggcaggtgccaggtcgacctgtcagccctcagtagggaacagacgcacaagctggagttgcagctggaagagggtgagggacacctggtgctgctggtcactctgacagcatcagccacagtcagcatctctgacctgtctgtcaactccctggaggaccagaaggaacgagaggagatattaaagagatatagcccattgaggatatttcacaacctgaaagatgtgggatttctccaggtgaaagtcatcagagcggaagggttaatggctgccgacgtcactggaaaaagtgacccattttgtgtggtagaactgaacaacgatagactgctaacacatactgtctacaaaaatctcaatcctgagtggaataaagtcttcacgttcaacattaaagatatccattcagttcttgaagtgacagtttatgatgaagatcgggatcgaagtgctgactttctgggcaaagttgctataccattgctgtctattcaaaatggtgaacagaaagcctacgtcttgaaaaacaagcagctgacagggccaacaaagggggtcatctatcttgaaatagatgtgatttttaatgctgtgaaagccagcttacgaacattaatacccaaagaacagaagtacattgaagaggaaaacagactctctaaacagctgctactaagaaactttatcagaatgaaacgttgtgtcatggtgctggtaaatgctgcatactacgttaatagttgctttgattgggattcacccccaaggagtctcgctgcttttgtgctctttctctttgttgtctggaactttgagctctacatgataccactggttttgttgttactattgacatggaactacttcttgataatatcagggaaagataacaggcaacgtgatacagtagtggaggacatgctagaggacgaggaagaagaagatgacaaagatgacaaggacagtgaaaaaaagggatttataaataaaatctatgccatccaggaggtatgtgtcagtgtccagaacatcctagatgaagtggcttcctttggcgaaaggataaagaatactttcaactggactgtcccattcttaagctggctggccattgtagccctctgtgtgttcacagccatcctgtactgcattccgctgagatacattgtccttgtctggggcatcaataaatttacaaaaaagcttcggagtccatatgcaattgataacaatgaactacttgacttcctttccagagtcccttcagatgtacaagtggtgcaataccaagaactgaaaccagatccttctcatagcccatataaaagaaagaaaaacaatcttggctagccagctcccagcactgaggagaccagcatctgtttgggaagataaaagaaaaagccctcagcctcagcagcatttcctttctttctgctttttatttattttgcctttttatcatgatcgagagaatctgtaaatagtgtacaaaggcatatgtctttgaatatatacttctattgtacagactcaacttgataaaggttttgctactgctgtgtcaaaaccttgttagctgtggataataatataacacactgaaagaacaaatataagaatgataacactggaagatatattcttatctaattactagtggattaaatactcacctgtgctctgattaaatctacatcaattgtaaatgtcgatttgattttaaagtttttttttaatgcgactattttttatctgaaaagtaatccattacacttttctatgttttatacatttcaaaagggagggaaattccaaagcctgaataatggaatggatacatttcaatttaacatatattctggctttagatcccgacattcactcctgtgcaaattacttaggtatgacttaggctaattttaagctaataagtgaaggtacattcactccctcaagagaatcaatactcagaaggttacaaagttttctttatagaatttcaatcaatcattccatctaaaaccttaaaatctctacaggactacataacataaatactgccagtttataaacgattgcctatctgaatttttatacctaccactactttaatttatacagttagttagcaaattagcaacccagtaagtacagttatcaaaaatactaggaaactatatccatatcgcttttggtgtcagattgtatctgtgcatctaaaaatattttaataaatactcaagtgctctcag

SEQ ID NO: 12199 - DNA, 2337 bp, Homo sapiens
  source 1..2337: mol_type = unassigned DNA
atgctagacagctgcaagctgaaaagtgcctgcaatttgccatttatttgtaataagaaaataataaacactgctggaaccagtaatgcagaagtccccttggctgatcccggaatgtaccagctggacattacattaagaaggggtcaaagtttagctgctcgagatcgaggagggacgagtgatccatatgtgaagtttaaaatcggaggaaaagaagtttttagaagtaagataatacacaagaacctcaaccctgtgtgggaagaaaaagcttgtattctggttgatcatcttagggagccattgtatataaaggtatttgactatgattttggactacaggatgactttatgggctcagcctttctggatctgacacaattggagttaaacaggcccacagatgtgacccttactctgaaagatcctcattatcctgaccatgatcttggaatcattttgctctcagtcatccttacccctaaagaaggagagtccagggatgtgacaatgctaatgaggaagagttggaaaagatcaagtaaggaactttcagaaaatgaagtggttggatcttatttctctgtgaagtctctcttttggaggacgtgcggcaggccagctcttcctgtcctgggcttctgcagagcagagcttcagaatccttattgcaaaaatgtacaatttcagacccaaagtttacgcctatcagacctacacagaaaatcgcatctttggagaggaatagtcagcatcaccttgattgaagggagagacctcaaggccatggattccaacgggttgagcgatccctacgtgaagttccggcttgggcatcagaagtacaagagcaagattatgccaaaaacgttgaatcctcagtggagggaacaatttgattttcacctttatgaagaaagaggaggagtcattgatatcactgcatgggacaaagatgctgggaaaagggatgatttcattggcaggtgccaggtcgacctgtcagccctcagtagggaacagacgcacaagctggagttgcagctggaagagggtgagggacacctggtgctgctggtcactctgacagcatcagccacagtcagcatctctgacctgtctgtcaactccctggaggaccagaaggaacgagaggagatattaaagagatatagcccattgaggatatttcacaacctgaaagatgtgggatttctccaggtgaaagtcatcagagcggaagggttaatggctgccgacgtcactggaaaaagtgacccattttgtgtggtagaactgaacaacgatagactgctaacacatactgtctacaaaaatctcaatcctgagtggaataaagtcttcacgttcaacattaaagatatccattcagttcttgaagtgacagtttatgatgaagatcgggatcgaagtgctgactttctgggcaaagttgctataccattgctgtctattcaaaatggtgaacagaaagcctacgtcttgaaaaacaagcagctgacagggccaacaaagggggtcatctatcttgaaatagatgtgatttttaatgctgtgaaagccagcttacgaacattaatacccaaagaacagaagtacattgaagaggaaaacagactctctaaacagctgctactaagaaactttatcagaatgaaacgttgtgtcatggtgctggtaaatgctgcatactacgttaatagttgctttgattgggattcacccccaaggagtctcgctgcttttgtgctctttctctttgttgtctggaactttgagctctacatgataccactggttttgttgttactattgacatggaactacttcttgataatatcagggaaagataacaggcaacgtgatacagtagtggaggacatgctagaggacgaggaagaagaagatgacaaagatgacaaggacagtgaaaaaaagggatttataaataaaatctatgccatccaggaggtatgtgtcagtgtccagaacatcctagatgaagtggcttcctttggcgaaaggataaagaatactttcaactggactgtcccattcttaagctggctggccattgtagccctctgtgtgttcacagccatcctgtactgcattccgctgagatacattgtccttgtctggggcatcaataaatttacaaaaaagcttcggagtccatatgcaattgataacaatgaactacttgacttcctttccagagtcccttcagatgtacaagtggtgcaataccaagaactgaaaccagatccttctcatagcccatataaaagaaagaaaaacaatcttggctag

SEQ ID NO: 12200 - DNA, 2225 bp, Homo sapiens
  source 1..2225: mol_type = unassigned DNA
aagagacaggttggttaaaaatcacaacagtataaagatttaggtccacctgcaaaatgtatttttcttatctggcacactaggcttcatcatactataaacatgttagttgtgcagattcttcatatatcaaagtgtagctttgtctagatatccctctgatttattttcaccatttatatacaaacagaggcatttcaatccatatggtgcatttaggaaaatatgctttttttgctgttgtattttatcttgtggaatatatgtaaacatggtactatacatggctgcctgtttaagaggtcacctttagcattcgggaaaagggtccttggtacttgcaggttccttaggaacaaaaggatccttttatgtgtactaaacaagaatgtttctataaagacctacatcaaaggtgatttttttcggtcctaatttttaatgcaactatgctgcatgccaacgattcttatgcacctgggctccatttaggagactgtcagttgcagcattcttctttttttctttctttcctgacaaaattcttggtttggaaaacaattttcagtctctaggatctactataacattaataatatataaactagacggggtagaagaagaattctctacttacccctcacctgcttacacatacacctaagactgctaaaacaaatcaaatgcaaagaaccaaaatgagtcttagcttcggaaagcatgtgcttacactgaaagcaaaattcttttcaaggcttttgaagaaatatgttggaataaagtgagttcaagtctgatgactccaagccctccgcttttaagatactttgtccctattctttttggcccaacttgccatatattgaggaagccctcttaccccttattatcactataattaccctttcagtctgggtgagaggtgggggaaatggtaattattttttcctttcctaatttctataattcaaagatattcaatttagacagcactttcattatataagggaagaataatttccactatgttcttgcttcctattgtatgttcatctttcatttcttcctgatagttaaaacagatgctgctttatagaaaaaattagggtagaatgtcatgtcgtggcagtttattaactctaatctacctagggtcagacctgccttggcttgtggagtcatctctgttgcaataggtggtggtgaatgccctgttctcccaggtttacagaaactggagcccagggcagacatctagctgtgtaacctgcagtgccctcactgactagctgtcttaaaagtaactttgcagaatgtgtttgggcctcttgtttcattaaacaaaataaaacaagaacagtattcctttagtggtaggtgattgctgaaatattagccagaaatttaagacataggtcttacatgaggagatggaccaaaatcaagattccagaagtttattctgcatgaactccctgaagaggagccaagatgctccagtgtatggctcagtttttaccagtttgttgatttcatgtaaaggtgtttatttatttatttatttttacaaagttgggggcaaatcttttcatttcaggtttgaaaaaaataaacatcatgtgtcttctaaacatttagctggcattaacagcagcacacacccccacctccaaaaaggtgcatcttttggaaaaggggaaaccaaataagttagacatcttgccttaacaatcttaacccaaaaagtaggaaagcaagtttcatcataaatgaaacactaaagcaaggcttctaagtagactgtaacacagggggaaaaaaaaccaagatattgctaattaacccccagggcagctcctttatttcccacatagaaagcctttcctgcttggaagaagctactaaggtacaagtaaaaaaagcagttgagctggaaaggaggaagaaatgaaggagaaaaagaggaagagggggaaaaaactgggtgtattggttcattgagtcaaggcatacaagttagatcttcaaattactacaacacttttgtcagaaatgtgctttgtttaactccaactttgtttcaggcatcaataaatttacaaaaaagcttcggagtccatatgcaattgataacaatgaactacttgacttcctttccagagtcccttcagatgtacaagtggtgcaataccaagaactgaaaccagatccttctcatagcccat

SEQ ID NO: 12201 - DNA, 2214 bp, Homo sapiens
  source 1..2214: mol_type = unassigned DNA
attccaagtcgctgctgtgcagagcagcaagtgctccgtgcagggctgttgctatcacttggaggtgaacagcctcttttgccggtattcagtgaagaaagcaagtctaaatatgcagttctctcactggagtgaaagatgttttgttcatttctaatcaactatgctagacagctgcaagctgaaaagtgcctgcaatttgccatttatttgtaataagaaaataataaacactgctggaaccagtaatgcagaagtccccttggctgatcccggaatgtaccagctggacattacattaagaaggggtcaaagtttagctgctcgagatcgaggagggacgagtgatccatatgtgaagtttaaaatcggaggaaaagaagtttttagaagtaagataatacacaagaacctcaaccctgtgtgggaagaaaaagcttgtattctggttgatcatcttagggagccattgtatataaaggtatttgactatgattttggactacaggatgactttatgggctcagcctttctggatctgacacaattggagttaaacaggcccacagatgtgacccttactctgaaagatcctcattatcctgaccatgatcttggaatcattttgctctcagtcatccttacccctaaagaaggagagtccagggatgtgtttcagacccaaagtttacgcctatcagacctacacagaaaatcgcatctttggagaggaatagtcagcatcaccttgattgaagggagagacctcaaggccatggattccaacgggttgagcgatccctacgtgaagttccggcttgggcatcagaagtacaagagcaagattatgccaaaaacgttgaatcctcagtggagggaacaatttgattttcacctttatgaagaaagaggaggagtcattgatatcactgcatgggacaaagatgctgggaaaagggatgatttcattggcaggtgccaggtcgacctgtcagccctcagtagggaacagacgcacaagctggagttgcagctggaagagggtgagggacacctggtgctgctggtcactctgacagcatcagccacagtcagcatctctgacctgtctgtcaactccctggaggaccagaaggaacgagaggagatattaaagagatatagcccattgaggatatttcacaacctgaaagatgtgggatttctccaggtgaaagtcatcagagcggaagggttaatggctgccgacgtcactggaaaaagtgacccattttgtgtggtagaactgaacaacgatagactgctaacacatactgtctacaaaaatctcaatcctgagtggaataaagtcttcacgttcaacattaaagatatccattcagttcttgaagtgacagtttatgatgaagatcgggatcgaagtgctgactttctgggcaaagttgctataccattgctgtctattcaaaatggtgaacagaaagcctacgtcttgaaaaacaagcagctgacagggccaacaaagggggtcatctatcttgaaatagatgtgatttttaatgctgtgaaagccagcttacgaacattaatacccaaagaacagaagtacattgaagaggaaaacagactctctaaacagctgctactaagaaactttatcagaatgaaacgttgtgtcatggtgctggtaaatgctgcatactacgttaatagttgctttgattgggattcacccccaaggagtctcgctgcttttgtgctctttctctttgttgtctggaactttgagctctacatgataccactggttttgttgttactattgacatggaactacttcttgataatatcagggaaagataacaggcaacgtgatacagtagtggaggacatgctagaggacgaggaagaagaagatgacaaagatgacaaggacagtgaaaaaaagggatttataaataaaatctatgccatccaggaggtatgtgtcagtgtccagaacatcctagatgaagtggcttcctttggcgaaaggataaagaatactttcaactggactgtcccattcttaagctggctggccattgtagccctctgtgtgttcacagccatcctgtactgcattccgctgagatacattgtccttgtctggggcatcaataaatttacaaaaaagcttcggagtccatatgcaattgataacaatgaactact

SEQ ID NO: 12202 - DNA, 1751 bp, Homo sapiens
  source 1..1751: mol_type = unassigned DNA
ctcttttgccggtattcagtgaagaaagcaagtctaaatatgcagttctctcactggagtgaaagatgttttgttcatttctaatcaactatgctagacagctgcaagctgaaaagtgcctgcaatttgccatttatttgtaataagaagtttttagaagtaagataatacacaagaacctcaaccctgtgtgggaagaaaaagcttgtattctggttgatcatcttagggagccattgtatataaaggtatttgactatgattttggactacaggatgactttatgggctcagcctttctggatctgacacaattggagttaaacaggcccacagatgtgacccttactctgaaagatcctcattatcctgaccatgatcttggaatcattttgctctcagtcatccttacccctaaagaaggagagtccagggatgtgacaatgctaatgaggaagagttggaaaagatcaagtaaggaactttcagaaaatgaagtggttggatcttatttctctgtgaagtctctcttttggaggacgtgcggcaggccagctcttcctgtcctgggcttctgcagagcagagcttcagaatccttattgcaaaaatgtacaatttcagacccaaagtttacgcctatcagacctacacagaaaatcgcatctttggagaggaatagtcagcatcaccttgattgaagggagagacctcaaggccatggattccaacgggttgagcgatccctacgtgaagttccggcttgggcatcagaagtacaagagcaagattatgccaaaaacgttgaatcctcagtggagggaacaatttgattttcacctttatgaagaaagaggaggagtcattgatatcactgcatgggacaaagatgctgggaaaagggatgatttcattggcaggtgccaggtcgacctgtcagccctcagtagggaacagacgcacaagctggagttgcagctggaagagggtgagggacacctggtgctgctggtcactctgacagcatcagccacagtcagcatctctgacctgtctgtcaactccctggaggaccagaaggaacgagaggagatattaaagagatatagcccattgaggatatttcacaacctgaaagatgtgggatttctccaggtgaaagtcatcagagcggaagggttaatggctgccgacgtcactggaaaaagtgacccattttgtgtggtagaactgaacaacgatagactgctaacacatactgtctacaaaaatctcaatcctgagtggaataaagtcttcacgttcaacattaaagatatccattcagttcttgaagtgacagtttatgatgaagatcgggatcgaagtgctgactttctgggcaaagttgctataccattgctgtctattcaaaatggtgaacagaaagcctacgtcttgaaaaacaagcagctgacagggccaacaaagggggtcatctatcttgaaatagatgtgatttttaatgctgtgaaagccagcttacgaacattaatacccaaagaacagaagtacattgaagaggaaaacagactctctaaacagctgctactaagaaactttatcagaatgaaacgttgtgtcatggtgctggtaaatgctgcatactacgttaatagttgctttgattgggattcacccccaaggagtctcgctgcttttgtgctctttctctttgttgtctggaactttgagctctacatgataccactg

SEQ ID NO: 12203 - DNA, 2158 bp, Homo sapiens
  source 1..2158: mol_type = unassigned DNA
gcagagcagcaagtgctccgtgcagggctgttgctatcacttggaggtgaacagcctcttttgccggtattcagtgaagaaagcaagtctaaatatgcagttctctcactggagtgaaagatgttttgttcatttctaatcaactatgctagacagctgcaagctgaaaagtgcctgcaatttgccatttatttgtaataagaaaataataaacactgctggaaccagtaatgcagaagtccccttggctgatcccggaatgtaccagctggacattacattaagaaggggtcaaagtttagctgctcgagatcgaggagggacgagtgatccatatgtgaagtttaaaatcggaggaaaagaagtttttagaagtaagataatacacaagaacctcaaccctgtgtgggaagaaaaagcttgtattctggttgatcatcttagggagccattgtatataaaggtatttgactatgattttggactacaggatgactttatgggctcagcctttctggatctgacacaattggagttaaacaggcccacagatgtgacccttactctgaaagatcctcattatcctgaccatgatcttggaatcattttgctctcagtcatccttacccctaaagaaggagagtccagggatgtgacaatgctaatgaggaagagttggaaaagatcaagtaaggaactttcagaaaatgaagtggttggatcttatttctctgtgaagtctctcttttggaggacgtgcggcaggccagctcttcctgtcctgggcttctgcagagcagagcttcagaatccttattgcaaaaatgtacaatttcagacccaaagtttacgcctatcagacctacacagaaaatcgcatctttggagaggaatagtcagcatcaccttgattgaagggagagacctcaaggccatggattccaacgggttgagcgatccctacgtgaagttccggcttgggcatcagaagtacaagagcaagattatgccaaaaacgttgaatcctcagtggagggaacaatttgattttcacctttatgaagaaagaggaggagtcattgatatcactgcatgggacaaagatgctgggaaaagggatgatttcattggcaggtgccaggtcgacctgtcagccctcagtagggaacagacgcacaagctggagttgcagctggaagagggtgagggacacctggtgctgctggtcactctgacagcatcagccacagtcagcatctctgacctgtctgtcaactccctggaggaccagaaggaacgagaggagatattaaagagatatagcccattgaggatatttcacaacctgaaagatgtgggatttctccaggtgaaagtcatcagagcggaagggttaatggctgccgacgtcactggaaaaagtgacccattttgtgtggtagaactgaacaacgatagactgctaacacatactgtctacaaaaatctcaatcctgagtggaataaagtcttcacgttcaacattaaagatatccattcagttcttgaagtgacagtttatgatgaagatcgggatcgaagtgctgactttctgggcaaagttgctataccattgctgtctattcaaaatggtgaacagaaagcctacgtcttgaaaaacaagcagctgacagggccaacaaagggggtcatctatcttgaaatagatgtgatttttaatgctgtgaaagccagcttacgaacattaatacccaaagaacagaagtacattgaagaggaaaacagactctctaaacagctgctactaagaaactttatcagaatgaaacgttgtgtcatggtgctggtaaatgctgcatactacgttaatagttgctttgattgggattcacccccaaggagtctcgctgcttttgtggccttgtatgggactttcattaatgtctgagcacatggaacaaagagtgtctacgtccctttgtgttgtaagttaccagaaagttaggcagcctgcttcccatagacgtgttgttgtctccctaaagaaagcaattgtcattatcgttaagttttagaaaaaaaatctctctctctctgtctctctcagtattctttttgtagctctttcttataataaatatatggtggtactattaag

SEQ ID NO: 12204 - DNA, 2350 bp, Homo sapiens
  source 1..2350: mol_type = unassigned DNA
actctgaaagatcctcattatcctgaccatgatcttggaatcattttgctctcagtcatccttacccctaaagaaggagagtccagggatgtggaactttcagaaaatgaagtggttggatcttatttctctgtgaagtctctcttttggaggtttcagacccaaagtttacgcctatcagacctacacagaaaatcgcatctttggagaggaatagtcagcatcaccttgattgaagggagagacctcaaggccatggattccaacgggttgagcgatccctacgtgaagttccggcttgggcatcagaagtacaagagcaagattatgccaaaaacgttgaatcctcagtggagggaacaatttgattttcacctttatgaagaaagaggaggagtcattgatatcactgcatgggacaaagatgctgggaaaagggatgatttcattggcaggtgccaggtcgacctgtcagccctcagtagggaacagacgcacaagctggagttgcagctggaagagggtgagggacacctggtgctgctggtcactctgacagcatcagccacagtcagcatctctgacctgtctgtcaactccctggaggaccagaaggaacgagaggagatattaaagagatatagcccattgaggatatttcacaacctgaaagatgtgggatttctccaggtgaaagtcatcagagcggaagggttaatggctgccgacgtcactggaaaaagtgacccattttgtgtggtagaactgaacaacgatagactgctaacacatactgtctacaaaaatctcaatcctgagtggaataaagtcttcacgttcaacattaaagatatccattcagttcttgaagtgacagtttatgatgaagatcgggatcgaagtgctgactttctgggcaaagttgctataccattgctgtctattcaaaatggtgaacagaaagcctacgtcttgaaaaacaagcagctgacagggccaacaaagggggtcatctatcttgaaatagatgtgatttttaatgctgtgaaagccagcttacgaacattaatacccaaagaacagaagtacattgaagaggaaaacagactctctaaacagctgctactaagaaactttatcagaatgaaacgttgtgtcatggtgctggtaaatgctgcatactacgttaatagttgctttgattgggattcacccccaaggagtctcgctgcttttgtggtatgatcatactgtattacttacattgttattcattaaattcagtaatcatagctgcatgtttctgtggctatagtaacagttatgttgatgtggccattttaaaactcctattttaagacttgactggacagatttgccgtgggcaggaacctgatggattgtacaaggtctgagtctaagaatacattttcccccctcagatttccggaacgcaagacatctcagccaatgtatcattttctctgtgacagttaaaaagtaaaattttacatattgcataattccaaaccccaataggacagccaagaaaagtcctccatgtgaaaaataataatagtaataatctcgaccattctcaatttgattttatctgtcctatagttaatttttttcaagatatgaaaatcattggtagtagaatgctaccaatgctacttggtaatgctttaacatgtgattcaactggaagtggatgtgacctatttaagagatgttttattatttctgagatttctagcttttaaaagtcacaagtgagaattcgatagatccaaagagtcctttaatatgttcatcttgtggccttttactttgattatttaaaaacttctgatgagaccaactggcagagctagaaaatccaaaagaatactttgctctgagctttagctgggattttcttctctcacattattttggctttttcaggatttcagtttgaagtttaagtagagtcattcttttgaaatcctttattttattttcatgtttgttcaaatatgagtaccttatgcttccttatagttgccagtttagcagaatacgactttattatgggggcttacaagaagagccttaattatagtaacaaatcaacattttagtattaccattcaaatgagtgtatgcacatctgtttagtactttgagctctgtcttcctctcaggccttgtatgggactttcattaatgtctgagcacatggaacaaagagtgtctacgtccctttgtgttgtaagttaccagaaagttaggcagcctgcttcccatagacgtgttgttgtctccctaaagaaagcaattgtcattatcgttaagttttagaaaa

SEQ ID NO: 12205 - DNA, 874 bp, Homo sapiens
  source 1..874: mol_type = unassigned DNA
cttgtgccaccagaagagctcctctctgccgggcaccgcctgcctggagcagctgctggagccgccgcctcctcccgcagagccggcgcggagtcccgcggagtctcgggccccggagacgggcgaggagcacggcagcagccagaaaataataaacactgctggaaccagtaatgcagaagtccccttggctgatcccggaatgtaccagctggacattacattaagaaggggtcaaagtttagctgctcgagatcgaggagggacgagtgatccatatgtgaagtttaaaatcggaggaaaagaagtttttagaagtaagataatacacaagaacctcaaccctgtgtgggaagaaaaagcttgtattctggttgatcatcttagggagccattgtatataaaggtatttgactatgattttggactacaggatgactttatgggctcagcctttctggatctgacacaattggagttaaacaggcccacagatgtgacccttactctgaaagatcctcattatcctgaccatgatcttggaatcattttgctctcagtcatccttacccctaaagaaggagagtccagggatgtgacaatgctaatgaggaagagttggaaaagatcaagtaagtttcagacccaaagtttacgcctatcagacctacacagaaaatcgcatctttggagaggaatagtcagcatcaccttgattgaagggagagacctcaaggccatggattccaacgggttgagcgatccctacgtgaagttccggcttgggcatcagaagtacaagagcaagattatgccaaaaacgttgaatcctcagtggagggaacaatttgattttcacctttatgaagaaaga

SEQ ID NO: 12206 - DNA, 575 bp, Homo sapiens
  source 1..575: mol_type = unassigned DNA
cagaaaataataaacactgctggaaccagtaatgcagaagtccccttggctgatcccggaatgtaccagctggacattacattaagaaggggtcaaagtttagctgctcgagatcgaggagggacgagtgatccatatgtgaagtttaaaatcggaggaaaagaagtttttagaagtaagataatacacaagaacctcaaccctgtgtgggaagaaaaagcttgtattctggttgatcatcttagggagccattgtatataaaggtatttgactatgattttggactacaggatgactttatgggctcagcctttctggatctgacacaattggagttaaacaggcccacagatgtgacccttactctgaaagatcctcattatcctgaccatgatcttggaatcattttgctctcagtcatccttacccctaaagaaggagagtccagggatgtgtttcagacccaaagtttacgcctatcagacctacacagaaaatcgcatctttggagaggaatagtcagcatcaccttgattgaagggagagacctcaaggccatggattccaacgggtt

SEQ ID NO: 12207 - DNA, 1702 bp, Homo sapiens
  source 1..1702: mol_type = unassigned DNA
aaaataataaacactgctggaaccagtaatgcagaagtccccttggctgatcccggaatgtaccagctggacattacattaagaaggggtcaaagtttagctgctcgagatcgaggagggacgagtgatccatatgtgaagtttaaaatcggaggaaaagaagtttttagaagtaagataatacacaagaacctcaaccctgtgtgggaagaaaaagcttgtattctggttgatcatcttagggagccattgtatataaaggtatttgactatgattttggactacaggatgactttatgggctcagcctttctggatctgacacaattggagttaaacaggcccacagatgtgacccttactctgaaagatcctcattatcctgaccatgatcttggaatcattttgctctcagtcatccttacccctaaagaaggagagtccagggatgtgacaatgctaatgaggaagagttggaaaagatcaagtaaggtaattcttagcttgtgatctttcagcttttcttgttgagcagaactatcatctgctttcccagatctctctcatctcttcaaagtatgctaccagatttcatactattcaattgttacttttccccataaatttaagccaaccatgtgatgttttttaaatagaaatcacaccgatcaatagcttcaaatcatcctttcactattctctggtcacttctcaacatcattctcagcatctggtctcaactatatatgcaacagggtctagaaaattgctctgagccaggaataaaatgatgaggctaggggagggacaactccagacagaagaaagattcgcacaatttattttattttggggggtcacagaaaattgagtatgaggctttctaaactcagaaattcctgtatcattacatctttatagtatacaataagaacaatttttccccattgtctcttctcactttaagaaataaagtgagaggagtttatggttcctgtaacttactaagccctggctcttcttcaacttgtaagatatgcaaaatataaactaagtgtttaatttgttcagtgatgctgccactgttggacacagatcgatatcaagatgaaacaatttttatatgaatataccttgaaataaatcaaaacgattttacttgtaaaaatcttgtctgctcaaatttctacttagagtcagtattcctttttaataatgactaatttttttagaccctggaacatgacagtctttttccttccattctgattgaatcatgcttttacctaagcttttctttaattttgtcatttttattactgtgaattaatatatatcaaaatgtttttatatttatggtaatgacttaatctgtttgaacaagtgtctcttactgtacattttctccctaattcctatggcattaatggcattaatgaccaaagaataatttggcttacaaaaaagtcagggctcccattaaaaatcacctttattattttaataaaatgaaaaaggcttattaaggaaggttgctgaatatttctaacttaatgttcactgtgattttcactaatcaaaataaagtttcaagatgttttgaagaaatatttgcactgttcatatttgtattactttttcctttacagttatactttacagttattgttatattaaaagtgtatatatttttaaattcata

SEQ ID NO: 12208 - DNA, 369 bp, Homo sapiens
  source 1..369: mol_type = unassigned DNA
tctatggccatgtctgaaatgggtgtgaaggagcttgctctccttggggattgtacatctttcatatcctgcttcctactaggtttgttagagaaaatacagttgtgctacatggccaggaagaagaggaaacacacatcagtgagggggacgagtgatccatatgtgaagtttaaaatcggaggaaaagaagtttttagaagtaagataatacacaagaacctcaaccctgtgtgggaagaaaaagcttgtattctggttgatcatcttagggagccattgtatataaaggtatttgactatgattttggactacaggatgactttatgggctcagcctttctggatctgacacaattggagttaaac

SEQ ID NO: 12209 - DNA, 570 bp, Homo sapiens
  source 1..570: mol_type = unassigned DNA
cattccaagtcgctgctgtgcagagcagcaagtgctccgtgcagggctgttgctatcacttggaggtgaacagcctcttttgccggtattcagtgaagaaagcaagtctaaatatgcagttctctcactggagtgaaagatgttttgttcatttctaatcaactatgctagacagctgcaagctgaaaagtgcctgcaatttgccatttatttgtaataagaccctgtatggtaagattggaaaggacagactaaatgcagtaaacaaaataataaacactgctggaaccagtaatgcagaagtccccttggctgatcccggaatgtaccagctggacattacattaagaaggggtcaaagtttagctgctcgagatcgaggagggacgagtgatccatatgtgaagtttaaaatcggaggaaaagaagtttttagaagtaagataatacacaagaacctcaaccctgtgtgggaagaaaaagcttgtattctggttgatcatcttagggagccattgtatataaaggtatttgactatgattttggactacaggatgactttatgggct

SEQ ID NO: 12210 - DNA, 381 bp, Homo sapiens
  source 1..381: mol_type = unassigned DNA
agttttcacctatacaacactggagctcactgttggtcgtatgggagcaagaggccttctgtgaataagaaacagctaagccccagaaaataataaacactgctggaaccagtaatgcagaagtccccttggctgatcccggaatgtaccagctggacattacattaagaaggggtcaaagtttagctgctcgagatcgaggagggacgagtgatccatatgtgaagtttaaaatcggaggaaaagaagtttttagaagtaagataatacacaagaacctcaaccctgtgtgggaagaaaaagcttgtattctggttgatcatcttagggagccattgtatataaaggtatttgactatgattttggactacaggatgact

SEQ ID NO: 12211 - DNA, 483 bp, Homo sapiens
  source 1..483: mol_type = unassigned DNA
cctgttgtggcttttgccatgaggaagaggttgactactaacactgcatgtttgatttagcaggtgaagtttttagtatttaattcgctgctgtgcagagcagcaagtgctccgtgcagggctgttgctatcacttggaggtgaacagcctcttttgccggtattcagtgaagaaagcaagtctaaatatgcagttctctcactggagtgaaagatgttttgttcatttctaatcaactatgctagacagctgcaagctgaaaagtgcctgcaatttgccatttatttgtaataagaaaataataaacactgctggaaccagtaatgcagaagtccccttggctgatcccggaatgtaccagctggacattacattaagaaggggtcaaagtttagctgctcgagatcgaggagggacgagtgatccatatgtgaagtttaaaatcggaggaaaagaagtttttagaagtaagataatacaca

SEQ ID NO: 12212 - DNA, 394 bp, Homo sapiens
  source 1..394: mol_type = unassigned DNA
ggtgaacagcctcttttgccggtattcagtgaagaaagcaagtctaaatatgcagttctctcactggagtgaaagatgttttgttcatttctaatcaactatgctagacagctgcaagctgaaaagtgcctgcaatttgccatttatttgtaataagttatacctggaaggaataacttgctattcgcacaactgagtgtatgagatcctactccatccacagctgtgcacctgtgaccatgagattgttcgaatgtttgaaaggataaaatacacaaaataataaacactgctggaaccagtaatgcagaagtccccttggctgatcccggaatgtaccagctggacattacattaagaaggggtcaaagtttagctgctcgagatcgaggag

SEQ ID NO: 12213 - DNA, 703 bp, Homo sapiens
  source 1..703: mol_type = unassigned DNA
agacggtgaggattgccttcggaggtgggtgaggcccagcgtgcgcgcccaggtccggggccgatgtaccaggtgagcggccagcgcccctctggctgcgacgcgccctatggagcccccagcgcagccccgggcccagcccagaccctatccctccttcctgggctggaggtagtaacaggatccactcaccctgcggaggcagcaccagaggagggctccctggaggaggcggcaacccccatgccccaaggcaatggccctggcatcccccagggcctggacagcactgacctcgacgtccccacagaagctgtgacatgccagcctcaggggaaccccttgggctgcaccccacttctgccgaatgactctggccacccctcagagctgggcggcaccagacgggcggggaatggtgccctgggtggccccaaggcccaccggaagttgcagacacacccatctctcgccagccagggcagcaagaagagtaagagcagcagcaaatccaccacctcccagatccccctccaggcacaggaagactgctgtgtccactgcatcctgtcctgcctgttctgcgagttcctgacgctgtgcaacatcgtcctggactgcgccacctgtggctcctgcagctcggaggactcgtgcctctgctgctgctgctgtggctctggcgagtgtgccgactgcgacc

SEQ ID NO: 12214 - DNA, 1183 bp, Homo sapiens
  source 1..1183: mol_type = unassigned DNA
tccagagctcccggacagcagccggatcccggccggctcctggggcactaggacagacccccgcggctagcagcccggcctggggggcggaacactctcttcttgtcccgccccaccttcctccgggccgcaaccaccccagcccatcgctgggacgtggccgcgggtgccgagagcgctgccggcgccgtgggggccatcccggtcctggccccgacggcgccccaggacctgcgatagccaaacttttgcagagtttggacaggcaaaggaaaacgtgcagcccgcggatctccgggcctcagagagcagggagtcggggagactgaggccccgctccgagagcgcggaggaagcgcgcccagccggcttcctgtgggggctcgggcctcgggcgccccgcggacagacgtgtccggctcctggctgggccaagcccggcgcgggggaggggacccgcagaggggcgactgagaaggtccggggccgatgtaccaggtgagcggccagcgcccctctggctgcgacgcgccctatggagcccccagcgcagccccgggcccagcccagaccctatccctccttcctgggctggaggtagtaacaggatccactcaccctgcggaggcagcaccagaggagggctccctggaggaggcggcaacccccatgccccaaggcaatggccctggcatcccccagggcctggacagcactgacctcgacgtccccacagaagctgtgacatgccagcctcaggggaaccccttgggctgcaccccacttctgccgaatgactctggccacccctcagagctgggcggcaccagacgggcggggaatggtgccctgggtggccccaaggcccaccggaagttgcagacacacccatctctcgccagccagggcagcaagaagagtaagagcagcagcaaatccaccacctcccagatccccctccaggcacaggaagactgctgtgtccactgcatcctgtcctgcctgttctgcgagttcctgacgctgtgcaacatcgtcctggactgcgccacctgtggctcctgcagctcggaggactcgtgcctctgctgctgctgctgtggctctggcgagtgtgccgactgcgacctgccctgcgacctggactgcggcatcctggatgcctgctgcgagtccgcggact

SEQ ID NO: 12215 - DNA, 1622 bp, Homo sapiens
  source 1..1622: mol_type = unassigned DNA
ctcctggggcactaggacagacccccgcggctagcagcccggcctggggggcggaacactctcttcttgtcccgccccaccttcctccgggccgcaaccaccccagcccatcgctgggacgtggccgcgggtgccgagagcgctgccggcgccgtgggggccatcccggtcctggccccgacggcgccccaggacctgcgatagccgtccggggccgatgtaccaggtgagcggccagcgcccctctggctgcgacgcgccctatggagcccccagcgcagccccgggcccagcccagaccctatccctccttcctgggctggaggtagtaacaggatccactcaccctgcggaggcagcaccagaggagggctccctggaggaggcggcaacccccatgccccaaggcaatggccctggcatcccccagggcctggacagcactgacctcgacgtccccacagaagctgtgacatgccagcctcaggggaaccccttgggctgcaccccacttctgccgaatgactctggccacccctcagagctgggcggcaccagacgggcggggaatggtgccctgggtggccccaaggcccaccggaagttgcagacacacccatctctcgccagccagggcagcaagaagagtaagagcagcagcaaatccaccacctcccagatccccctccaggcacaggaagactgctgtgtccactgcatcctgtcctgcctgttctgcgagttcctgacgctgtgcaacatcgtcctggactgcgccacctgtggctcctgcagctcggaggactcgtgcctctgctgctgctgctgtggctctggcgagtgtgccgactgcgacctgccctgcgacctggactgcggcatcctggatgcctgctgcgagtccgcggactgcctggagatctgcatggagtgctgtgggctctgcttctcctcctgagcctctgtcgggggctaagccagcctggcgcccctgcagattccagcagggtccctctgagtggggccaggcccaggactgtcacacaaggcttgagaagccccctctccctggtcctctcctacccacccatgtcctctcagaaccccagccttgaaaatagtggggggcactcagaggggccacctcctcagccgtgggtggtgggcccatggcagagaagcctgaactctttactgggttaccaggttcatacattgctgaggacctgacaggacaacctaggggcagggctggggtggggaccgcagggggcagccagggctggggaacactgtgaaagttacttggggagggtgggccggtggggccgtagctctctacctctccctgctcctggtgcctgcctctctcctccaccccaggcttagaggacagaaaaatgtgaagagacgccccacccaccctcagccagccctctccagtctcctttcctaggcttttttgggggcctaacccacgcagtgaccccagagggcagggctaggcgagagcctggggtggggcgggagggggaacagtatggaaaagactggaaggggaaaggaagggaagggagggagggtctgttctatctgttgctgtaaataaagatatttgtcca

SEQ ID NO: 12216 - DNA, 353 bp, Homo sapiens
  source 1..353: mol_type = unassigned DNA
ggagcgaggggggctggagggagagaaggaagaaggaaggggcgaacggtccggggccgatgtaccaggtgagcggccagcgcccctctggctgcgacgcgccctatggagcccccagcgcagccccgggcccagcccagaccctatccctccttcctgggctggaggtagtaacaggatccactcaccctgcggaggcagcaccagaggagggctccctggaggaggcggcaacccccatgccccaaggcaatggccctggcatcccccagggcctggacagcactgacctcgacgtccccacagaagctgtgacatgccagcctcaggggaaccccttgggctgcacccca

SEQ ID NO: 12217 - DNA, 1629 bp, Homo sapiens
  source 1..1629: mol_type = unassigned DNA
ggggctggagggagagaaggaagaaggaaggggcgaacggcgtgagctggcgccgaaatgggagaaagcagcgagtgagaggggaaggggcgccaggcgagcacccgggagccagcgggacctgggcaggggcgcccggagcaggcgcgcatggcgggccccgcgcggggatccggctggaagagagcgtagcacggctcgcacgagtccggggccgatgtaccaggtgagcggccagcgcccctctggctgcgacgcgccctatggagcccccagcgcagccccgggcccagcccagaccctatccctccttcctgggctggaggtagtaacaggatccactcaccctgcggaggcagcaccagaggagggctccctggaggaggcggcaacccccatgccccaaggcaatggccctggcatcccccagggcctggacagcactgacctcgacgtccccacagaagctgtgacatgccagcctcaggggaaccccttgggctgcaccccacttctgccgaatgactctggccacccctcagagctgggcggcaccagacgggcggggaatggtgccctgggtggccccaaggcccaccggaagttgcagacacacccatctctcgccagccagggcagcaagaagagtaagagcagcagcaaatccaccacctcccagatccccctccaggcacaggaagactgctgtgtccactgcatcctgtcctgcctgttctgcgagttcctgacgctgtgcaacatcgtcctggactgcgccacctgtggctcctgcagctcggaggactcgtgcctctgctgctgctgctgtggctctggcgagtgtgccgactgcgacctgccctgcgacctggactgcggcatcctggatgcctgctgcgagtccgcggactgcctggagatctgcatggagtgctgtgggctctgcttctcctcctgagcctctgtcgggggctaagccagcctggcgcccctgcagattccagcagggtccctctgagtggggccaggcccaggactgtcacacaaggcttgagaagccccctctccctggtcctctcctacccacccatgtcctctcagaaccccagccttgaaaatagtggggggcactcagaggggccacctcctcagccgtgggtggtgggcccatggcagagaagcctgaactctttactgggttaccaggttcatacattgctgaggacctgacaggacaacctaggggcagggctggggtggggaccgcagggggcagccagggctggggaacactgtgaaagttacttggggagggtgggccggtggggccgtagctctctacctctccctgctcctggtgcctgcctctctcctccaccccaggcttagaggacagaaaaatgtgaagagacgccccacccaccctcagccagccctctccagtctcctttcctaggcttttttgggggcctaacccacgcagtgaccccagagggcagggctaggcgagagcctggggtggggcgggagggggaacagtatggaaaagactggaaggggaaaggaagggaagggagggagggtctgttctatctgttgctgtaaataaagatatttgtccatctcaga

SEQ ID NO: 12218 - DNA, 809 bp, Homo sapiens
  source 1..809: mol_type = unassigned DNA
gggcgaacggcgtgagctggcgccgaaatgggagaaagcagcgagtgagaggggaaggggcgccaggcgagcacccgggagccagcgggacctgggcaggggcgcccggagcaggcgcgcatggcgggccccgcgcggggatccggctggaagagagcgtagcacggctcgcacgagtccggggccgatgtaccaggtgagcggccagcgcccctctggctgcgacgcgccctatggagcccccagcgcagccccgggcccaggccagcctcaggggaaccccttgggctgcaccccacttctgccgaatgactctggccacccctcagagctgggcggcaccagacgggcggggaatggtgccctgggtggccccaaggcccaccggaagttgcagacacacccatctctcgccagccagggcagcaagaagagtaagagcagcagcaaatccaccacctcccagatccccctccaggcacaggaagactgctgtgtccactgcatcctgtcctgcctgttctgcgagttcctgacgctgtgcaacatcgtcctggactgcgccacctgtggctcctgcagctcggaggactcgtgcctctgctgctgctgctgtggctctggcgagtgtgccgactgcgacctgccctgcgacctggactgcggcatcctggatgcctgctgcgagtccgcggactgcctggagatctgcatggagtgctgtgggctctgcttctcctcctgagcctctgtcgggggctaagccagcctggcgcccctgcagattccagcagggtccctctgagtgg

SEQ ID NO: 12219 - DNA, 635 bp, Homo sapiens
  source 1..635: mol_type = unassigned DNA
ccgaaatgggagaaagcagcgagtgagaggggaaggggcgccaggcgagcacccgggagccagcgggacctgggcaggggcgcccggagcaggcgcgcatggcgggccccgcgcggggatccggctggaagagagcgtagcacggctcgcacgagtgagtggacgtgggaggcgcgcatctgcgggggaatcgccccttgcccgcctccggcgccgcccgctgagccctgttttccgcaggtccggggccgatgtaccaggtgagcggccagcgcccctctggctgcgacgcgccctatggagcccccagcgcagccccgggcccagcccagaccctatccctccttcctgggctggaggtagtaacaggatccactcaccctgcggaggcagcaccagaggagggctccctggaggaggcggcaacccccatgccccaaggcaatggccctggcatcccccagggcctggacagcactgacctcgacgtccccacagaagctgtgacatgccagcctcaggggaaccccttgggctgcaccccacttctgccgaatgactctggccacccctcagagctgggcggcaccagacgggcggggaatggtgccctgggtggccccaaggcccaccgg

SEQ ID NO: 12220 - DNA, 650 bp, Homo sapiens
  source 1..650: mol_type = unassigned DNA
ggggaaggggcgccaggcgagcacccgggagccagcgggacctgggcaggggcgcccggagcaggcgcgcatggcgggccccgcgcggggatccggctggaagagagcgtagcacggctcgcacgagtgagtggacgtgggaggcgcgcatctgcgggggaatcgccccttgcccgcctccggcgccgcccgctgagccctgttttccgcaggtccggggccgatgtaccaggtgagcggccagcgcccctctggctgcgacgcgccctatggagcccccagcgcagccccgggcccaggccagcctcaggggaaccccttgggctgcaccccacttctgccgaatgactctggccacccctcagagctgggcggcaccagacgggcggggaatggtgccctgggtggccccaaggcccaccggaagttgcagacacacccatctctcgccagccagggcagcaagaagagtaagagcagcagcaaatccaccacctcccagatccccctccaggcacaggaagactgctgtgtccactgcatcctgtcctgcctgttctgcgagttcctgacgctgtgcaacatcgtcctggactgcgccacctgtggctcctgcagctcggaggactcgtgcctctgctgctgctgct

SEQ ID NO: 12221 - DNA, 549 bp, Homo sapiens
  source 1..549: mol_type = unassigned DNA
atcccccagggcctggacagcactgacctcgacgtccccacagaagctgtgacatgccagcctcaggggaaccccttgggctgcaccccacttctgccgaatgactctggccacccctcagagctgggcggcaccagacgggcggggaatggtgccctgggtggccccaaggcccaccggaagttgcagacacacccatctctcgccagccagggcagcaagaagagtaagagcagcagcaaatccaccacctcccagatccccctccaggcacaggaaggtaagcacccatcccatctctccctgggagaggcctccaaagccgggttcctcgaagcatgacgcatgggcccactggagcaccttcaccaggctgttacttagagatgcaggatctcagcctccttccacgcctactggattggaatctctggtggagcttaacaagccctgcagggaacctgacgcatgaccaaatcttagaaccttgcaaagtacacccgttgggtaaaggtgtacctgccttctcaaggccacctccccacccca

SEQ ID NO: 12222 - DNA, 10736 bp, Homo sapiens
  source 1..10736: mol_type = unassigned DNA
ggagagcgagagaccgaacgaggagacgcgaggaggagggaggaggaagagagggagggaggcgggaggagcgcggaatgaaaagctcggaggggcgaaaaagcagcacagcaaagcccaagttgctgagcgagcggagcgctcccgcggcccggagccgagcggccgccgcgccccggagcccggcccggccccgcccgctctgggcccccgcaggccaaggccgccgggcgggggcggggacgaccaacttggggcgcggcgtagccccgctctcccgagagctcggagcccgggagggctacggccgcggccagacggcgggagaggagcgcggcgagcggaggcggcgagcggcgcccgcgccgcagccccggcctgggcgagagcgcgaatatttttcaaaagactcaaactttcctcctttccccgttttctggggcccttcttgcctggaattgctctccagattcccgcggggcgccgggctgctattcttcccccgggtttatcggcggctcggctaacttcacggacccggggacccgcggcgctcgtccctcggccgaacccagcccgcgctgctccccggatcaggagggccgggcccggggctgcttcgccgccgcgagtgctttcagcccggccccctggagtcgggccgctgagcccacggcagcggccgcaggactggaaacagcagattgattaactcgagcggagccccggcctccccgactccgctccgctgaggggcggccccagtgcggggaaacgacaagtttgtcagtcgtccgtggcctgttggatcgaagcgccgcctccgccgccgagaggtccccggcgcctagcatcccgcgcggacggccctgggtacccggggcggctcggcggccgggctcctcgggtcggggcgctggctgctgtgccgggcgcgccgaggcacccggggctgggccagcgccccctgcgtccccacgcgggcagcggccccgccggaggagaaacacgggtcgccgccacctccgcctcttcagtctcctggtcttcgtcgccgctctctctctcacctctcagggaaagggggggacataggggcgtcgcggggccccggcgaatgcgccccccgccgcctctcgggctgcgccgcctcgcggggatgaagcaccggccgtgaagatggaggtgacctgccttctacttctggcgctgatccccttccactgccggggacaaggagtctacgctccagcccaggcgcagatcgtgcatgcgggccaggcatgtgtggtgaaagaggacaatatcagcgagcgtgtctacaccatccgggagggggacaccctcatgctgcagtgccttgtaacagggcaccctcgaccccaggtacggtggaccaagacggcaggtagcgcctcggacaagttccaggagacatcggtgttcaacgagacgctgcgcatcgagcgtattgcacgcacgcagggcggccgctactactgcaaggctgagaacggcgtgggggtgccggccatcaagtccatccgcgtggacgtgcagtacctggatgagccaatgctgacggtgcaccagacggtgagcgatgtgcgaggcaacttctaccaggagaagacggtgttcctgcgctgtactgtcaactccaacccgcctgcccgcttcatctggaagcggggttccgataccctatcccacagccaggacaatggggttgacatctatgagcccctctacactcagggggagaccaaggtcctgaagctgaagaacctgcggccccaggactatgccagctacacctgccaggtgtctgtgcgtaacgtgtgcggcatcccagacaaggccatcaccttccggctcaccaacaccacggcaccaccagccctgaagctgtctgtgaacgaaactctggtggtgaaccctggggagaatgtgacggtgcagtgtctgctgacaggcggtgatcccctcccccagctgcagtggtcccatgggcctggcccactgcccctgggtgctctggcccagggtggcaccctcagcatcccttcagtgcaggcccgggactctggctactacaactgcacagccaccaacaatgtgggcaaccctgccaagaagactgtcaacctgctggtgcgatccatgaagaacgctacattccagatcactcctgacgtgatcaaagagagtgagaacatccagctgggccaggacctgaagctatcgtgccacgtggatgcagtgccccaggagaaggtgacctaccagtggttcaagaatggcaagccggcacgcatgtccaagcggctgctggtgacccgcaatgatcctgagctgcccgcagtcaccagcagcctagagctcattgacctgcacttcagtgactatggcacctacctgtgcatggcttctttcccaggggcacccgtgcccgacctcagcgtcgaggtcaacatctcctctgagacagtgccgcccaccatcagtgtgcccaagggtagggccgtggtgaccgtgcgcgagggatcgcctgccgagctgcaatgcgaggtgcggggcaagccgcggccgccagtgctctggtcccgcgtggacaaggaggctgcactgctgccctcggggctgcccctggaggagactccggacgggaagctgcggctggagcgagtgagccgagacatgagcgggacctaccgctgccagacggcccgctataatggcttcaacgtgcgcccccgtgaggcccaggtgcagctgaacgtgcagttcccgccggaggtggagcccagttcccaggacgtgcgccaggcgctgggccggcccgtgctcctgcgctgctcgctgctgcgaggcagcccccagcgcatcgcctcggctgtgtggcgtttcaaagggcagctgctgccgccgccgcctgttgttcccgccgccgccgaggcgccggatcacgcggagctgcgcctcgacgccgtaactcgcgacagcagcggcagctacgagtgcagcgtctccaacgatgtgggctcggctgcctgcctcttccaggtctccgccaaagcctacagcccggagttttacttcgacacccccaaccccacccgcagccacaagctgtccaagaactactcctacgtgctgcagtggactcagagggagcccgacgctgtcgaccctgtgctcaactacagactcagcatccgccagttgaaccagcacaatgcggtggtcaaggccatcccggtccggcgtgtggagaaggggcagctgctggagtacatcctgaccgatctccgtgtgccccacagctatgaggtccgcctcacaccctataccaccttcggggctggtgacatggcctcccgcatcatccactacacagagcccatcaactctccgaacctttcagacaacacctgccactttgaggatgagaagatctgtggctatacccaggacctgacagacaactttgactggacgcggcagaatgccctcacccagaaccccaaacgctcccccaacactggtccccccaccgacataagtggcacccctgagggctactacatgttcatcgagacatcgaggcctcgggagctgggggaccgtgcaaggttagtgagtcccctctacaatgccagcgccaagttctactgtgtctccttcttctaccacatgtacgggaaacacatcggctccctcaacctcctggtgcggtcccggaacaaaggggctctggacacgcacgcctggtctctcagtggcaataagggcaatgtgtggcagcaggcccatgtgcccatcagccccagtgggcccttccagattatttttgagggggttcgaggcccgggctacctgggggatattgccatagatgacgtcacactgaagaagggggagtgtccccggaagcagacggatcccaataaagtggtggtgatgccgggcagtggagccccctgccagtccagcccacagctgtgggggcccatggccatcttcctcttggcgttgcagagatgatgagagctgtgtggccacccccccaaccttgcccccggcacaccaaagtgtccacattgtaccaaagactgacccccgccagctggggtgcccaggggcagggccggcccgccagggagggggcctgcattggctgcaaggatgagcagagaacaaggacagaggccaggcactgaggccctggagacagctgttccacttgcacacacgcacacactcatgctcacacacacagagatatattaaagcacaagtttctatctgacctgccagcaccttctttactgcaaagacaggggacttgcctgaatggcatccgccaacccagggacctcggcgcaacataggccttgtccttgctgcactcgtggtgtgcttctgactttaccctgtcccctaagtcaaggccgaactccagcctggtggctttgccagaagggagccagaagtggggcagacatggagcccctcccttggtcagactctgggactcctgagatgggagaggcagggatcagaggacgaacaggtgggactttgcgagctctgtgactgtcccacgtccaggagacaaggaaggtagggcacctgctgcacacgattctgtccagagtgagcactggatggtggagaccataggtcaccccagattccttgacctatttctgggacaccatatttccctcctcagtgtgcaccctttgaagggacccagcacagggtcttgggcctgggcagtctgaagactgataacttccccactccaccctacaagcagtgggactcctgagaacacggttctctcctagcctcagcccccagctgggtctcagaggagctgggggagcggtggccagcccattttctggggtgaggcttgacttggagaaaggcagaagagacgtcccgcttctgtgatttggtgcccccatatcagacaatgaatttggaagtggagaggggccttcatttcttatctacttggcatgaaagggtgccctggataggagggtgtgtacagggcaaaatgccaaaaagcactgtctagttgaaagttcccttctccacccaggggcagtgaaggaggaggggcttatagagctgggattggtggagggagcaggtgccagtcccctcactctctgggagctgtgaaagggatccctgtccttgggtcctgggttaggcacctgagattgacatgatgggatctagatctttcctccttgacatcacctgagcccccacctagccatccatgggagagagaaggcccagccccttctagaatgactctttaggcatgcgtgcatatgtgtgtatgtgtttgtgcccgtctgtgtctaggtaccaccgtgggtacattgttgggcaggagtgtgtgcaaacacaggtctgtgtgtgcaatctcacatatctgcctgtgagactggattgagacccattcgtttctatgaatgtccgtgtacgtcagcgtgtgtgtccaccttcctgagtgatgtgttcgcttgtagggtgctggctgaatagactctgtccagccctgttctgtagtctcaagctgcctgcgatggcctgaaattccacctttcatcccctatggatgacggagagcttacagatgaccctattgaatgcaagcacctttggtgaggagcatcacagggctccttctggagcatttggtggggacagctgcagagaagaggcctggaactcgggcagcactgcagtgccaggaggcaggcggggaaccgaggcaaaggctgcccatctccccctgccaggcctgtgtgatcattatcaccaacagctggtgggtggccgggccaggatgcagcggggccttctgatgcccaatcagcacggctgccttcctgacccagtcaaggcctctgtctgaaatgagtcgctccaggttctcagcatacacttccatcgcgtctgtcgggtattgttccttaactgtcccatctgtgcagagtccattgccccaactagactgtgagctcctcctctgagccttccaagtcccccctccaccttcgccacctcccgctcgtgcccagcacaagtgagcctggtgtggaaaccactccattgcccggtggaatggattctgtaatcagtggttcctggccttgcctgcagaatagaaccaccagagtcctttaaaaagtattgctgcttggttcccacctcagaggttctgagttaattggactggagcgcagtcggacatcaagaaatgttgaaaagctccttgggttctcctgacagcaggaaccactggcctggcaccacctgggtgcttcctctgtgccctcgctggggtaggcattggagcaccagagatgaatagccccaagtgctccctctttggggttcccaaggcaccctgtgcctgcttccctcagaggaccttccaatccatttgccccgcaaccctggctgctccgacaggggagacttgtctcccttgttcccctcaggatccatagagtggacagtaaaggtgctcagtacatgttggctgagctgaactgcatacatgtggcccccaggttcctggtctttatggacgaagggcacaaggtggaggggggatggggggatgctgctggaggtctcagtgggtgcagacagccctgccttgaggatggcttgacctgggattgacaaaatgtgtctgctgaaatgctgaggtccccacgtgtgaatgggtgaggctgatgtggatgtctgtgtgtgccagcaggtgggtgggggatgtgggtgtcagtgtatgccagtgggcactgtaaatgtctaggcatgtgctggtctctgtgtgtttgtgtgttcctcagcaggaatgagtgtctttgtgtatcacctggtgacttgtcagtgtctgtgtctgtgtgtgcctgtgagccagcatctctgtatcagtgttgctcatgctgtgtctttgtgcgccatggtgtgtcagtgtctgtgtgttgatgggtggcccatgagtgacccccgccaggggagaccaggctggctggatccagcacatctccccagtggcagcctcgccctctgggtcagggtgactgaggcattttgtggccttaaaacggggtgttcagggtcagccctcagggtgctggggcccttccatcccttgtccccttcaggttggtgaaaaggactccgggggccaggtgctgtatagcagcttatggaagtctcagctgggctatcctgcccttgggagcacagacaggctcctagggtgctgagtgaagcctgaagaccaagccccctcctcctggaatgctccttccacccctacctctcagagatgggcctgacacctctttctcattcattctccttttccctgtgctctgggaaagcccctggctcaggctgtcagagtgaggatggacctcaaaagtttgatcccctcgtgcagatgaagaagctgaagcccagagtggggaaggggagtggcccaaggtcacacagctagtttgagtagagccagtcttgggagagccaagtactacagccctgggggtgtcacaccgcttgtcactgcccctgaggtctcctgccaaacaactgcagggagtttggctaacagtcctgtgtccagggtgccggtggggatgttatagatgttgctgggatcctgccctcggctccaaattctggcctctcatcccaggctgcagacccttctgccccatgacaggcctgggtgccacacagaggtggccaccctcccaccacagtgtctgcagctgctgcccttctcccaggcccccagacagaagagaccctgtttcccctcctctcccctgtgacttcacaagagcttgggctaggagtgaaggtcagcatgttctcatgtgctcatcctcttggtttccccaaagaccgggagggtcacggatggggcgtgcagaatccttgtgttttttctcgctgggcagcttgaggggctggggagtattcccagggtctttgctctggagagtccctgcagagccactggctgaggttgggttcagggttcagcggagtcctccatgcttccaaaggccgggaagcacccgcctctctatcgagtcagtgctgtgcgtgtgtgtctgagaatgtgtgtgatgtgtggagtgtgcgtgtgtttgtgtgtgtgtgtgtgtgtgttggggcagaaggaccactctttcctggggatcccttgacccttataactagaagggaccttagggagcatctaagctggtgcccccattgtacaggcgaggtccagagggatggcatctgcccaccccaccccttgccctcttgttgcctgcactcatttcccagggaccctcctaggataggactgccctccttcctggccccctcccgccatcctcccagccacccacataatcaccatctcagcccaactctggtggccctctaggtctccatgcattcttcctgccctagagtagccagctcaccaaggcctttatccccagcccaggagaagggtcagggagggaaggggctgcaccagccctgagacctcaaagacttgggagaaaagccaaaactcctcatgcccaggcccacatgtctgaccaccccagcccaccccgccaccaaggtaaaagcacaacaggagacccccttattaatgggtgaaatgattggggttgtttttttagtcacacagccccatcctcacccctttgccttgctgtctgtctccaccccagcctctgttccccatttgcctctctttcacctccaagcccccaaatgtaacctctagttgcggacgcggttgttctatcaataaagctgcagtgttctagcgctcagcgtcagccgtgtgtgttggcagggcagagtgggccagggtcggggccggggcactggagggctcctctcagctccctgggggcagcctttcttctctttggcacctgtcgacagggatcctgctctgtggcctggacagtgaggacctgcatcctggtctgctcccagtgaacttgtgtgcatttgttcattcagcaaataccaaccaaacactgcctttgtggaagcccctgtttaatgggagagatggacagtaagctaataatgacaccaagacatatataatgatgtgtacagtgagggctgggaagggaaattggtgctatgaaagaaggtatgaagagggttcttatttgggttggggcttcggggaagacttctctaagagacatttaggagagacagaatgattggagttagcctgttgggattgggagaggcttctgagcagagggaacagaatatgcaaaggccaacagggcccaaaaacttagaaggctcaaggaaggggagtaagggcaaaggaggaggactaaagttggtatggtggttgaaatgccattttcccttctcggcacccaaccctaccatccctcctacacgcttggagtcccttccctcttaatctctattctggccctacagaccccaccctgcaccctacttggggctgcctcccttattcaccaccagctagctgcatccttgccctaagatcaagttatgccaacctttccctttaccccagacctctcagaattctagaatttcagagctaggaggtccttaaaggtcacttatttcaaacatctactcatatattgtaggtgagatgggcttgccaaggtcatggggataggcagtgatgagcatttgcaaagtgaccccaaatcaagggtgtggatgtcatgatatggactacatcatatcaggcaaatgacaggaagtgtctttcaggttacttggttacaatgattcaggtaggtcgattgggcagtttcacttccatgttccagatggggaaactgaagctcagattacaagaccaagggctccctctccctaccacctaagttttattggctctcatgttgggtaacttcttgctggcacacctggcctttcttttctaatggaagaggaagggtctaagggactcaccactgctgtaggttggctccctgagcacaggaagagaaatccgctcaagctcactcaagtacaggtgcattattgtgaggacaaacacagtgagggggatgggcactcagaaatccaaacaggagttgcaacagggatggttttcctgaaccagatgggcattttggattcaaggtagctctaggatcatcatctacagaagtttctggtgcttctgtattcttctggtgcttctgtattctacctgtggtagaataaagatggctgcaaatcccatgttatccttcctgtagagaggcagagtctaattcccttcctcttgaatctgggttgctcttagtgccttgtttgtgcaatagaatgtgacatgctgagttgaagatgccttggagcttcagctcaggcctcttggaacgttctctctggaagccctgaactgccacctaggatgtcctctgagttgctctgagaccgtcatgctggaggggctctggctgaccatcccagctgagtccagccttccagccatctccaccaaagcaccagaagatatgggagtgcagctgcctcagaccttccagaccagcctaactgccacctgaattgctcggccaagctctgtccaaattcctgacccatcgtcatgggatataataaaatagttgttttaa

SEQ ID NO: 12223 - DNA, 5120 bp, Homo sapiens
  source 1..5120: mol_type = unassigned DNA
aattgagcaccattatatgccaggcactgttctaggacactagaacaagacaaaggcccctgtccttgaagagcttacagtctactggtgccaagccttataaagaaaataatgcagaaaaaagaacagagagctattttacatggggtggtcagggacttccttgagggagggaagaatgttccaggcaggggcaacatcacaagcaaaggccctaaggcaggaactggccctcaagtgttgaaagaaaagcaaggataccagtttgctagacccgagtggcagcaaatgagatcagagaagctgacagcgcccagatcaggtgtggaaggccaggagaaggacagcgatgggaagcctcaaaggagactgagcagagggggtaacatgattggagacaggggtcccctccgcagcagccctgctggatagtcctgtccagggacaggatgctcccccaagacagcccactcttttgctgggcaaatccgatacatccagggtcttccttagatgcagttcaaatctgcctcctgcaagctttcacttgctggtgtttattccaccccatggggaatgcagagcacggacagtcacacagactgtcctctctggccttctggacccaacatactcctcttgccaactgggtattactggaccttactgggccttactggacccaacatactcctcttgccaactgggtattaaacattttaaaagcccttcatctccctccacaagtcatgtactgccaacagggacacactgttttctttggaaaccctgctgcgtgcccagacagaggtcccactgccctgggacagctcccttgcctagaggggaagggtagggtgtgtgtgcatgtgtgtgtttggggttggggagattagctgattagcagggcaggaaagaaatgaaagaaaatttgcaagtcatcctgatgaaatgaaatcctgctgaagtcttctctttcccacactgagggtgtccctgcaggaatgggacattgcacccagctgggcatggggaggaggtcctgtcaacagggacagggctgcaggctatggtgggagaagagggcttggtaaatgtggaaaggtgagggtgccctggccagatctcactgcccactgtcttcacacccaccgcaggctccctcaacctcctggtgcggtcccggaacaaaggggctctggacacgcacgcctggtctctcagtggcaataagggcaatgtgtggcagcaggcccatgtgcccatcagccccagtgggcccttccagattatttttgagggggttcgaggcccgggctacctgggggatattgccatagatgacgtcacactgaagaagggggagtgtccccggaagcagacggatcccaataaagtggtggtgatgccgggcagtggagccccctgccagtccagcccacagctgtgggggcccatggccatcttcctcttggcgttgcagagatgatgagagctgtgtggccacccccccaaccttgcccccggcacaccaaagtgtccacattgtaccaaagactgacccccgccagctggggtgcccaggggcagggccggcccgccagggagggggcctgcattggctgcaaggatgagcagagaacaaggacagaggccaggcactgaggccctggagacagctgttccacttgcacacacgcacacactcatgctcacacacacagagatatattaaagcacaagtttctatctgacctgccagcaccttctttactgcaaagacaggggacttgcctgaatggcatccgccaacccagggacctcggcgcaacataggccttgtccttgctgcactcgtggtgtgcttctgactttaccctgtcccctaagtcaaggccgaactccagcctggtggctttgccagaagggagccagaagtggggcagacatggagcccctcccttggtcagactctgggactcctgagatgggagaggcagggatcagaggacgaacaggtgggactttgcgagctctgtgactgtcccacgtccaggagacaaggaaggtagggcacctgctgcacacgattctgtccagagtgagcactggatggtggagaccataggtcaccccagattccttgacctatttctgggacaccatatttccctcctcagtgtgcaccctttgaagggacccagcacagggtcttgggcctgggcagtctgaagactgataacttccccactccaccctacaagcagtgggactcctgagaacacggttctctcctagcctcagcccccagctgggtctcagaggagctgggggagcggtggccagcccattttctggggtgaggcttgacttggagaaaggcagaagagacgtcccgcttctgtgatttggtgcccccatatcagacaatgaatttggaagtggagaggggccttcatttcttatctacttggcatgaaagggtgccctggataggagggtgtgtacagggcaaaatgccaaaaagcactgtctagttgaaagttcccttctccacccaggggcagtgaaggaggaggggcttatagagctgggattggtggagggagcaggtgccagtcccctcactctctgggagctgtgaaagggatccctgtccttgggtcctgggttaggcacctgagattgacatgatgggatctagatctttcctccttgacatcacctgagcccccacctagccatccatgggagagagaaggcccagccccttctagaatgactctttaggcatgcgtgcatatgtgtgtatgtgtttgtgcccgtctgtgtctaggtaccaccgtgggtacattgttgggcaggagtgtgtgcaaacacaggtctgtgtgtgcaatctcacatatctgcctgtgagactggattgagacccattcgtttctatgaatgtccgtgtacgtcagcgtgtgtgtccaccttcctgagtgatgtgttcgcttgtagggtgctggctgaatagactctgtccagccctgttctgtagtctcaagctgcctgcgatggcctgaaattccacctttcatcccctatggatgacggagagcttacagatgaccctattgaatgcaagcacctttggtgaggagcatcacagggctccttctggagcatttggtggggacagctgcagagaagaggcctggaactcgggcagcactgcagtgccaggaggcaggcggggaaccgaggcaaaggctgcccatctccccctgccaggcctgtgtgatcattatcaccaacagctggtgggtggccgggccaggatgcagcggggccttctgatgcccaatcagcacggctgccttcctgacccagtcaaggcctctgtctgaaatgagtcgctccaggttctcagcatacacttccatcgcgtctgtcgggtattgttccttaactgtcccatctgtgcagagtccattgccccaactagactgtgagctcctcctctgagccttccaagtcccccctccaccttcgccacctcccgctcgtgcccagcacaagtgagcctggtgtggaaaccactccattgcccggtggaatggattctgtaatcagtggttcctggccttgcctgcagaatagaaccaccagagtcctttaaaaagtattgctgcttggttcccacctcagaggttctgagttaattggactggagcgcagtcggacatcaagaaatgttgaaaagctccttgggttctcctgacagcaggaaccactggcctggcaccacctgggtgcttcctctgtgccctcgctggggtaggcattggagcaccagagatgaatagccccaagtgctccctctttggggttcccaaggcaccctgtgcctgcttccctcagaggaccttccaatccatttgccccgcaaccctggctgctccgacaggggagacttgtctcccttgttcccctcaggatccatagagtggacagtaaaggtgctcagtacatgttggctgagctgaactgcatacatgtggcccccaggttcctggtctttatggacgaagggcacaaggtggaggggggatggggggatgctgctggaggtctcagtgggtgcagacagccctgccttgaggatggcttgacctgggattgacaaaatgtgtctgctgaaatgctgaggtccccacgtgtgaatgggtgaggctgatgtggatgtctgtgtgtgccagcaggtgggtgggggatgtgggtgtcagtgtatgccagtgggcactgtaaatgtctaggcatgtgctggtctctgtgtgtttgtgtgttcctcagcaggaatgagtgtctttgtgtatcacctggtgacttgtcagtgtctgtgtctgtgtgtgcctgtgagccagcatctctgtatcagtgttgctcatgctgtgtctttgtgcgccatggtgtgtcagtgtctgtgtgttgatgggtggcccatgagtgacccccgccaggggagaccaggctggctggatccagcacatctccccagtggcagcctcgccctctgggtcagggtgactgaggcattttgtggccttaaaacggggtgttcagggtcagccctcagggtgctggggcccttccatcccttgtccccttcaggttggtgaaaaggactccgggggccaggtgctgtatagcagcttatggaagtctcagctgggctatcctgcccttgggagcacagacaggctcctagggtgctgagtgaagcctgaagaccaagccccctcctcctggaatgctccttccacccctacctctcagagatgggcctgacacctctttctcattcattctccttttccctgtgctctgggaaagcccctggctcaggctgtcagagtgaggatggacctcaaaagtttgatcccctcgtgcagatgaagaagctgaagcccagagtggggaaggggagtggcccaaggtcacacagctagtttgagtagagccagtcttgggagagccaagtactacagccctgggggtgtcacaccgcttgtcactgcccctgaggtctcctgccaaacaactgcagggagtttggctaacagtcctgtgtccag

SEQ ID NO: 12224 - DNA, 3021 bp, Homo sapiens
  source 1..3021: mol_type = unassigned DNA
atggaggtgacctgccttctacttctggcgctgatccccttccactgccggggacaaggagtctacgctccagcccaggcgcagatcgtgcatgcgggccaggcatgtgtggtgaaagaggacaatatcagcgagcgtgtctacaccatccgggagggggacaccctcatgctgcagtgccttgtaacagggcaccctcgaccccaggtacggtggaccaagacggcaggtagcgcctcggacaagttccaggagacatcggtgttcaacgagacgctgcgcatcgagcgtattgcacgcacgcagggcggccgctactactgcaaggctgagaacggcgtgggggtgccggccatcaagtccatccgcgtggacgtgcagtacctggatgagccaatgctgacggtgcaccagacggtgagcgatgtgcgaggcaacttctaccaggagaagacggtgttcctgcgctgtactgtcaactccaacccgcctgcccgcttcatctggaagcggggttccgataccctatcccacagccaggacaatggggttgacatctatgagcccctctacactcagggggagaccaaggtcctgaagctgaagaacctgcggccccaggactatgccagctacacctgccaggtgtctgtgcgtaacgtgtgcggcatcccagacaaggccatcaccttccggctcaccaacaccacggcaccaccagccctgaagctgtctgtgaacgaaactctggtggtgaaccctggggagaatgtgacggtgcagtgtctgctgacaggcggtgatcccctcccccagctgcagtggtcccatgggcctggcccactgcccctgggtgctctggcccagggtggcaccctcagcatcccttcagtgcaggcccgggactctggctactacaactgcacagccaccaacaatgtgggcaaccctgccaagaagactgtcaacctgctggtgcgatccatgaagaacgctacattccagatcactcctgacgtgatcaaagagagtgagaacatccagctgggccaggacctgaagctatcgtgccacgtggatgcagtgccccaggagaaggtgacctaccagtggttcaagaatggcaagccggcacgcatgtccaagcggctgctggtgacccgcaatgatcctgagctgcccgcagtcaccagcagcctagagctcattgacctgcacttcagtgactatggcacctacctgtgcatggcttctttcccaggggcacccgtgcccgacctcagcgtcgaggtcaacatctcctctgagacagtgccgcccaccatcagtgtgcccaagggtagggccgtggtgaccgtgcgcgagggatcgcctgccgagctgcaatgcgaggtgcggggcaagccgcggccgccagtgctctggtcccgcgtggacaaggaggctgcactgctgccctcggggctgcccctggaggagactccggacgggaagctgcggctggagcgagtgagccgagacatgagcgggacctaccgctgccagacggcccgctataatggcttcaacgtgcgcccccgtgaggcccaggtgcagctgaacgtgcagttcccgccggaggtggagcccagttcccaggacgtgcgccaggcgctgggccggcccgtgctcctgcgctgctcgctgctgcgaggcagcccccagcgcatcgcctcggctgtgtggcgtttcaaagggcagctgctgccgccgccgcctgttgttcccgccgccgccgaggcgccggatcacgcggagctgcgcctcgacgccgtaactcgcgacagcagcggcagctacgagtgcagcgtctccaacgatgtgggctcggctgcctgcctcttccaggtctccgccaaagcctacagcccggagttttacttcgacacccccaaccccacccgcagccacaagctgtccaagaactactcctacgtgctgcagtggactcagagggagcccgacgctgtcgaccctgtgctcaactacagactcagcatccgccagttgaaccagcacaatgcggtggtcaaggccatcccggtccggcgtgtggagaaggggcagctgctggagtacatcctgaccgatctccgtgtgccccacagctatgaggtccgcctcacaccctataccaccttcggggctggtgacatggcctcccgcatcatccactacacagagcccatcaactctccgaacctttcagacaacacctgccactttgaggatgagaagatctgtggctatacccaggacctgacagacaactttgactggacgcggcagaatgccctcacccagaaccccaaacgctcccccaacactggtccccccaccgacataagtggcacccctgagggctactacatgttcatcgagacatcgaggcctcgggagctgggggaccgtgcaaggttagtgagtcccctctacaatgccagcgccaagttctactgtgtctccttcttctaccacatgtacgggaaacacatcggctccctcaacctcctggtgcggtcccggaacaaaggggctctggacacgcacgcctggtctctcagtggcaataagggcaatgtgtggcagcaggcccatgtgcccatcagccccagtgggcccttccagattatttttgagggggttcgaggcccgggctacctgggggatattgccatagatgacgtcacactgaagaagggggagtgtccccggaagcagacggatcccaataaaggtgcaagacgggaaggaggtgggggagctgaatctggagggagctgtgcgtggcgggggttcctgtctgttgagggagggtgtttgggtctgaataggggttcagaatgtctgagtgatgggaatcatgtggctctgactgtgtgaaggtgtgccccacactcactcaggctgtgtacttgtgtaaacaatgagaagcctggcccccaccctcgtgatgagcatactgacctgttcacggtatca

SEQ ID NO: 12225 - DNA, 201 bp, Homo sapiens
  source 1..201: mol_type = unassigned DNA
aagattctgcatccactggggctcccaaaccatttgcacagatcattttgcccgtggctgggtctggacttcataagaagcttcttctggggtaggtgagagtggatgaccaggactccaccaccctgccgagtcctctcatttccatttggcttccccaggctccctcaacctcctggtgcggtcccggaacaaaggggc

SEQ ID NO: 12226 - DNA, 478 bp, Homo sapiens
  source 1..478: mol_type = unassigned DNA
tgaaccagcacaatgcggtggtcaaggccatcccggtccggcgtgtggagaaggggcagctgctggagtacatcctgaccgatctccgtgtgccccacagctatgaggtccgcctcacaccctataccaccttcggggctggtgacatggcctcccgcatcatccactacacagagcacaacacctgccactttgaggatgagaagatctgtggctatacccaggacctgacagacaactttgactggacgcggcagaatgccctcacccagaaccccaaacgctcccccaacactggtccccccaccgacataagtggcacccctgagggctactacatgttcatcgagacatcgaggcctcgggagctgggggaccgtgcaaggttagtgagtcccctctacaatgccagcgccaagttctactgtgtctccttcttctaccacatgtacgggaaacacatcggctccctcaacct

SEQ ID NO: 12227 - DNA, 582 bp, Homo sapiens
  source 1..582: mol_type = unassigned DNA
ccacaagctgtccaagaactactcctacgtgctgcagtggactcagagggagcccgacgctgtcgaccctgtgctcaactacagactcagcatccgccagttgaaccagcacaatgcggtggtcaaggccatcccggtccggcgtgtggagaaggggcagctgctggagtacatcctgaccgatctccgtgtgccccacagctatgagacaacacctgccactttgaggatgagaagatctgtggctatacccaggacctgacagacaactttgactggacgcggcagaatgccctcacccagaaccccaaacgctcccccaacactggtccccccaccgacataagtggcacccctgagggctactacatgttcatcgagacatcgaggcctcgggagctgggggaccgtgcaaggttagtgagtcccctctacaatgccagcgccaagttctactgtgtctccttcttctaccacatgtacgggaaacacatcggtggtgaaggttgcagtgagctgagattgtaccattgcactccatcctgggcagcaagagcaaaactccatttcaaaaaaaaaaaa

SEQ ID NO: 12228 - DNA, 655 bp, Homo sapiens
  source 1..655: mol_type = unassigned DNA
gacaaccgcgccgctttcaaacatagccttcccacaggcctaggcttcgcctctctaccagcacccaaaccaggcctagaccccttcgaaacccatccaagccacgtctgggctccgcctgcgtaaggcgtaggctccacccctttcagctcggtccaatcccagcttccagccgttccagcagcaggcagcatcccttccagccccgcttccaccagcgttagagcccctcaagcccaggccacagccccatctcagcccctccccgctcgtccttgacccctgaggctacagatggggaacccttcgggagcctgaggtgtagtttaggggagagaagacgcccctcagcagcttctctggaacgttgttgcggggcactgggccagacagcacacgtttcgtgagctggcaccctagaggtgcaggcccttcggtgcccagaaacccctctcagccccagctcttcgaggcattctcagccacaagctgtccaagaactactcctacgtgctgcagtggactcagagggagcccgacgctgtcgaccctgtgctcaactacagactcagcatccgccagttgaaccagcacaatgcggtggtcaaggccatcccggtccggcgtgtggagaaggggcagctgctggagtaca

SEQ ID NO: 12229 - DNA, 2430 bp, Homo sapiens
  source 1..2430: mol_type = unassigned DNA
taacagggcaccctcgaccccaggtacggtggaccaagacggcaggtagcgcctcggacaagttccaggagacatcggtgttcaacgagacgctgcgcatcgagcgtattgcacgcacgcagggcggccgctactactgcaaggctgagaacggcgtgggggtgccggccatcaagtccatccgcgtggacgtgcagtacctggatgagccaatgctgacggtgcaccagacggtgagcgatgtgcgaggcaacttctaccaggagaagacggtgttcctgcgctgtactgtcaactccaacccgcctgcccgcttcatctggaagcggggttccgataccctatcccacagccaggacaatggggttgacatctatgagcccctctacactcaggtcaggatgggcagctggctcgccccataccacttctcctgcatccaacaggggaggggggcatggggctgagtttttgggactgccttgacttcaacaattctattcttactttggaaacacacattctgattggagttcagacagcctggggcagaaaaatcagatggaaaggtcagggagcagcaatgagggcaggagtgtccccgaggcaacatgtcctccaggaacattgctagttaggaaaaggcacccctaggggcagacaggtcatcccagtctgctgctgggtggcagagtattgggaacctgtggccaggcacagcaggatctgggggcgaggagatgactcctcttcccatgggccctgatagtcccaggagatggtggtgatgccattctgccaaggagggctttcagcggtggctgcaggccagccccatgtttgtgtgggttgtacgagtaagttcccttcttacccctccgtttcccagactggagaaaccaaggcctggtacttgccagtgtgcacaagggcaacctcagacccagagaatcccatgatgaggcactgccaaggctatggagagtgtagcatccaccccaggctcaggacccctggggctaaatggtgagggtggggttggggatggaaagagaggaattagacaggcatttgtggtaggctctggtgctgggtgaatgagtatgcgggatccctggagactcaagcaggcacctcaccccagtggtccactgctgcccagggggagaccaaggtcctgaagctgaagaacctgcggccccaggactatgccagctacacctgccaggtgtctgtgcgtaacgtgtgcggcatcccagacaaggccatcaccttccggctcaccaacaccacggcaccaccagccctgaagctgtctgtgaacgaaactctggtggtgaaccctggggagaatgtgacggtgcagtgtctgctgacaggcggtgatcccctcccccagctgcagtggtcccatgggcctggcccactgcccctgggtgctctggcccagggtggcaccctcagcatcccttcagtgcaggcccgggactctggctactacaactgcacagccaccaacaatgtgggcaaccctgccaagaagactgtcaacctgctggtgcgatccatgaagaacgctacattccagatcactcctgacgtgatcaaagagagtgagaacatccagctgggccaggacctgaagctatcgtgccacgtggatgcagtgccccaggagaaggtgacctaccagtggttcaagaatggcaagccggcacgcatgtccaagcggctgctggtgacccgcaatgatcctgagctgcccgcagtcaccagcagcctagagctcattgacctgcacttcagtgactatggcacctacctgtgcatggcttctttcccaggggcacccgtgcccgacctcagcgtcgaggtcaacatctcctctgagacagtgccgcccaccatcagtgtgcccaagggtagggccgtggtgaccgtgcgcgagggatcgcctgccgagctgcaatgcgaggtgcggggcaagccgcggccgccagtgctctggtcccgcgtggacaaggaggctgcactgctgccctcggggctgcccctggaggagactccggacgggaagctgcggctggagcgagtgagccgagacatgagcgggacctaccgctgccagacggcccgctataatggcttcaacgtgcgcccccgtgaggcccaggtgcagctgaacgtgcagtgtgagtccaccacgccacccggactaccttcccagctttccttctggctcccagccggcctgtcccctcttcatcctctcacccaccccagtccaaccaaaccccaccagctactcctgatacccctaatgctccttgacagccccatgctgtaggacacggaggtctgtgttctttgctccatttcatcaagtatctcccatcttcattttcagggacccggtgaacaaaaaaaaaa

SEQ ID NO: 12230 - DNA, 594 bp, Homo sapiens
  source 1..594: mol_type = unassigned DNA
agtctccccgcttgttagctgctgcgattgtctgcgctcccacgggccgacctaaaacaattcttgcgcacacgctgagataaataacggcgacaggtggagcagctccagcccaggcgcagatcgtgcatgcgggccaggcatgtgtggtgaaagaggacaatatcagcgagcgtgtctacaccatccgggagggggacaccctcatgctgcagtgccttgtaacagggcaccctcgaccccaggtacggtggaccaagacggcaggtagcgcctcggacaagttccaggagacatcggtgttcaacgagacgctgcgcatcgagcgtattgcacgcacgcagggcggccgctactactgcaaggctgagaacggcgtgggggtgccggccatcaagtccatccgcgtggacgtgcagtacctggatgagccaatgctgacggtgcaccagacggtgagcgatgtgcgaggcaacttctaccaggagaagacggtgttcctgcgctgtactgtcaactccaacccgcctgcccgcttcatctggaagcggggttccgataccctatcccacagccaggacaatggggttgaca

SEQ ID NO: 12231 - DNA, 542 bp, Homo sapiens
  source 1..542: mol_type = unassigned DNA
actgtccctttcctgagttcctggcccgcctggttctgtcctagaggtcctgggaggattctttcctgggctcagtggggtcaggcctctgaggaatggcctggggagatctgggctgacccctcccagatacactcaggagggagccccagacttcttctggccttggcacctcttctctaaacctcctcctccatcctctcctgccagctccagcccaggcgcagatcgtgcatgcgggccaggcatgtgtggtgaaagaggacaatatcagcgagcgtgtctacaccatccgggagggggacaccctcatgctgcagtgccttgtaacagggcaccctcgaccccaggtacggtggaccaagacggcaggtagcgcctcggacaagttccaggagacatcggtgttcaacgagacgctgcgcatcgagcgtattgcacgcacgcagggcggccgctactactgcaaggctgagaacggcgtgggggtgccggccatcaagtccatccgcgtggacgtgcagtacctggatgagccaatg

SEQ ID NO: 12232 - DNA, 5075 bp, Homo sapiens
  source 1..5075: mol_type = unassigned DNA
acttcgcctcgcagctccccttcccatcaccgccccctgctcctccccggcgtctgcgattttcccaggcacccggtgtgagtgcggcgtgcgtgtgagtgtgtgtcagggtattgtgttgtgggagagtgtgtgagtgtgtgtgagtgtgtgtgtgcatgagtgtgtggagtgcggggctcctgcgctccgctcgccgccgccgccggggaaggacagacggacggcgcttcctccttcggcgagcggttcccgggcacctcggcttggcccgggcgcgagtggagcgcgcctggctggccgccggcctcctgaaggtcccgttgcgtaccccctgggctggatatgttcatgttcacgtgaagatggatttactgtacggtctcgtgtggctgctgacagtcctcctggaggggatctctggccaaggagtgtacgctcctcccacggttcgtattgtgcactcaggcttggcctgtaacattgaagaggagcgctactccgaaagggtctacactatccgggaaggagaaacccttgagttgacttgtctagtcacaggacatccacgtccacagatcaggtggaccaaaacagcaggaagtgcctctgacagattccaagactcaagtgtcttcaatgagactttgaggattacaaatattcagcgacaccaaggaggccggtattactgtaaagcagagaatggcttggggtctccagcgataaagtcaatcagagtggatgtatactatttggatgatccagtagtaactgttcatcaaagtataggtgaagctaaagaacaattttactatgagagaacagtgttcctccggtgtgttgccaattccaatcctcctgttcggtatagctggagacgtggccaggaggtcttgctgcaaggatctgataaaggagttgagatttatgaaccattctttacccagggtgaaacaaagatcttaaaactaaagaatcttcgacctcaggactatgctaattatagctgcattgcttcagtgaggaatgtatgtaatattcctgataagatggtgtcgtttagactgtccaataaaacagcatcaccgtcaattaaactcttggtggatgatcctatagttgtaaatcctggagaggccataacattagtatgtgttacaacaggaggagagcctgcaccttctctcacctgggtcaggtcctttgggactctgcctgaaaagactgttttgaatggaggaactttgaccatacctgccatcacctcagatgatgctggtacttacagctgcattgccaataataatgtgggaaaccctgcaaaaaagtccaccaacatcattgtgagagcattaaaaaaaggacgattttggatcacaccagatccttatcacaaagatgacaacatccagattggccgtgaggtgaaaatatcttgccaagtagaagctgttccttctgaggagctaacatttagttggtttaaaaatggtcgtccattaagaagttctgagcggatggtcattacacagactgatcctgatgtctctccgggaacaacaaacttggacatcattgatttaaaattcacggattttgggacgtacacatgtgtagcatctctgaagggaggaggaatatctgatatcagtatcgatgttaatatatccagcagcacagttccacccaatctgactgttccacaggaaaaatcaccattggtcaccagagaaggagacacaatagaactgcaatgtcaagtaactggcaaacctaaaccaatcatcctttggtctagagcggataaagaagttgcaatgcctgatggatcaatgcaaatggagagttatgatggaacactgaggattgtgaatgtatctagggaaatgtcaggaatgtacagatgtcagaccagccaatacaatggatttaacgtgaaaccaagggaagccttggtgcagctcatcgttcagtatccccctgcagtggaaccagcattcttggaaatccggcaaggacaggatcgaagtgtcactatgagttgcagagtactgagagcctatccaatacgggtgctgacctatgagtggcgcttgggcaataaattattacggacgggtcaatttgactctcaggaatacacagagtacgctgtgaagagtctttccaatgaaaactatggggtttataactgtagcatcataaatgaagctggagctgggagatgcagctttcttgttacaggaaaggcctatgctccagaattctattatgatacctacaatccagtatggcagaacagacaccgtgtttattcttacagtctacagtggacacagatgaatcctgatgcagtggatcggattgttgcataccggttgggcatcaggcaggctggacagcagcgctggtgggagcaggagattaaaataaatgggaatattcaaaagggagaattaattacatataacttgacagagctaattaaaccagaagcttatgaagtccgactgactcctctcaccaaatttggtgaaggagattcaacaattcgtgtgatcaaatatagtgctcctgtaaatcctcatttgagagaatttcattgtggatttgaagatggtaatatttgtttgttcactcaagatgatacagataattttgactggacaaagcaaagtacagcaacaagaaatacaaaatatactcctaatacaggacctaatgctgaccgtagtggctccaaagaaggtttttatatgtacattgagacatcacgacccagattggaaggcgaaaaggctcgacttctcagccctgttttcagcatagctcccaaaaacccttatggacccacaaacactgcatattgtttcagcttcttttatcacatgtatggacaacatataggtgtcttaaatgtttatctacgtttgaaagggcaaacaacaatagagaatccactgtggtcttcaagtgggaataaaggacaaagatggaatgaggctcatgttaatatatacccaattacttcatttcagctcatttttgaaggtatccgaggtcctggaatagaaggtgacattgctattgatgatgtatcaattgcagaaggagaatgtgcaaaacaagacctagcaactaagaattccgttgatggtgctgttgggattttggttcatatatggctttttcccattatcgtcctcatctctatcttaagtcctcgaaggtgaccttatcctggcagaggctataaaagattcaccaggcactggcatgaagaaagagtctttgtaaatggacattgaacaaacaaactaccaaagattcctccactgactactgactcaaaaataaaataataaaaacaaatttttttaagcactggggataaaaagacatcatggaagtataacttattccagactaaacataaaagataatcttgacctgagtagagaagagaccttcaggtgcttttgtggctaaaaagattacagcgtcatctggttgaactctggaaaaaaaaaaaaaaatgaaaaaaagaaaaaaaaaagagctatagaaatccttgtcaaagcacaaagtcatggctggttttgtttcaaatgaatagtttgcttgttaccatggaaacctaatggcctgccaacaaaaacctcactgtaaacagggtacgtgaagagctggcatttattttccttacgagaaggttttcgtagagaattaaataaatgtaggcccttttacctttggctgttacccttccttgaaaataacccgaactcagaattatttaaagcattcatgtttctccccaccttatccccatcccacctttattattattatttttctcccatggctaagctagataactgtatgctgtctctttttgcatgcactactatccaggatggtaaacctgggcttacatgttacacaggcttatcggagtttgcttgcggccacttgaacacccaaactacgtcatctgttccaatgaagaaaccaaaccaccatcttttataaattgccatggaaaccaagtgccttcaatgaaacaagcctgaataattttcaactcagaagcttgcactgctaagagtggtttgtgtaaaactattttataaacaaactacagagcctaaatgtgcaaattacaggcaagacaacaaagccgcttctgaagaagaaaggaccgaagctgctgcgtaagcccatgcagacaagatatttgttgtttaacctcctagacagccatggcctttcggcttattgtccattagaaaatcacttccattgagaccagacatggagcaacactttttttcttccaggttattaaatgggtcaaccagagcaaaaggttattaagaatacttagtgcagaaggtggtaaaacacaaaagtgatttttttactctaacctccatttgaaatgaaattggccctagctttagagggaacaagaaaatgtttgggattgcagtgcatactaactctacagtggaactgggcctgaaaaatctggctttattctaaactctgagggtaatatgcctctgccctttagtcagactctgtgcaaattgtgaaatattattttattattttaccaagattataaaaacacttttacaaaaaaacaaaaacctgtaaaaataattttgagctacctgacgacaaatcatatctttaaccagccagttttccaatgcattgtaaatttcacttaaacctgttggttatgaaaatttgaagatcattttccttaaattatctcagcttttaacttcatttaaaaagacttttgtctaagaagaatattattattatatgttctttcaacaccccaggattaaaaaaactgattatgcaagcaattggaatataagtattaaattatagcatttgcaaatattaatataaaagcacaacaaaatgtagtggaaaatgacaaagcttgttttttaaaacaattctgtagaaatgtttgtgcaaattcagtaattcaacttaaaatataattttacagctatgttcaataaagcctctttccaggtaaggta

SEQ ID NO: 12233 - DNA, 2965 bp, Homo sapiens
  source 1..2965: mol_type = unassigned DNA
tcgagcatctggttattcaagctcctcccacggttcgtattgtgcactcaggcttggcctgtaacattgaagaggagcgctactccgaaagggtctacactatccgggaaggagaaacccttgagttgacttgtctagtcacaggacatccacgtccacagatcaggtggaccaaaacagcaggaagtgcctctgacagattccaagactcaagtgtcttcaatgagactttgaggattacaaatattcagcgacaccaaggaggccggtattactgtaaagcagagaatggcttggggtctccagcgataaagtcaatcagagtggatgtatactatttggatgatccagtagtaactgttcatcaaagtataggtgaagctaaagaacaattttactatgagagaacagtgttcctccggtgtgttgccaattccaatcctcctgttcggtatagctggagacgtggccaggaggtcttgctgcaaggatctgataaaggagttgagatttatgaaccattctttacccagggtgaaacaaagatcttaaaactaaagaatcttcgacctcaggactatgctaattatagctgcattgcttcagtgaggaatgtatgtaatattcctgataagatggtgtcgtttagactgtccaataaaacagcatcaccgtcaattaaactcttggtggatgatcctatagttgtaaatcctggagaggccataacattagtatgtgttacaacaggaggagagcctgcaccttctctcacctgggtcaggtcctttgggactctgcctgaaaagactgttttgaatggaggaactttgaccatacctgccatcacctcagatgatgctggtacttacagctgcattgccaataataatgtgggaaaccctgcaaaaaagtccaccaacatcattgtgagagcattaaaaaaaggacgattttggatcacaccagatccttatcacaaagatgacaacatccagattggccgtgaggtgaaaatatcttgccaagtagaagctgttccttctgaggagctaacatttagttggtttaaaaatggtcgtccattaagaagttctgagcggatggtcattacacagactgatcctgatgtctctccgggaacaacaaacttggacatcattgatttaaaattcacggattttgggacgtacacatgtgtagcatctctgaagggaggaggaatatctgatatcagtatcgatgttaatatatccagcagcacagttccacccaatctgactgttccacaggaaaaatcaccattggtcaccagagaaggagacacaatagaactgcaatgtcaagtaactggcaaacctaaaccaatcatcctttggtctagagcggataaagaagttgcaatgcctgatggatcaatgcaaatggagagttatgatggaacactgaggattgtgaatgtatctagggaaatgtcaggaatgtacagatgtcagaccagccaatacaatggatttaacgtgaaaccaagggaagccttggtgcagctcatcgttcagtatccccctgcagtggaaccagcattcttggaaatccggcaaggacaggatcgaagtgtcactatgagttgcagagtactgagagcctatccaatacgggtgctgacctatgagtggcgcttgggcaataaattattacggacgggtcaatttgactctcaggaatacacagagtacgctgtgaagagtctttccaatgaaaactatggggtttataactgtagcatcataaatgaagctggagctgggagatgcagctttcttgttacaggaaaggcctatgctccagaattctattatgatacctacaatccagtatggcagaacagacaccgtgtttattcttacagtctacagtggacacagatgaatcctgatgcagtggatcggattgttgcataccggttgggcatcaggcaggctggacagcagcgctggtgggagcaggagattaaaataaatgggaatattcaaaagggagaattaattacatataacttgacagagctaattaaaccagaagcttatgaagtccgactgactcctctcaccaaatttggtgaaggagattcaacaattcgtgtgatcaaatatagtgctcctgtaaatcctcatttgagagaatttcattgtggatttgaagatggtaatatttgtttgttcactcaagatgatacagataattttgactggacaaagcaaagtacagcaacaagaaatacaaaatatactcctaatacaggacctaatgctgaccgtagtggctccaaagaaggtttttatatgtacattgagacatcacgacccagattggaaggcgaaaaggctcgacttctcagccctgttttcagcatagctcccaaaaacccttatggacccacaaacactgcatattgtttcagcttcttttatcacatgtatggacaacatataggtgtcttaaatgtttatctacgtttgaaagggcaaacaacaatagagaatccactgtggtcttcaagtgggaataaaggacaaagatggaatgaggctcatgttaatatatacccaattacttcatttcagctcatttttgaaggtatccgaggtcctggaatagaaggtgacattgctattgatgatgtatcaattgcagaaggagaatgtgcaaaacaagacctagcaactaagaattccgttgatggtgctgttgggattttggttcatatatggctttttcccattatcgtcctcatctctatcttaagtcctcgaaggtgaccttatcctggcagaggctataaaagattcaccaggcactggcatgaagaaagagtctttgtaaatggacattgaacaaacaaactaccaaagattcctccactgactactgactcaaaaataaaataataaaaacaaattttttt

SEQ ID NO: 12234 - DNA, 3635 bp, Homo sapiens
  source 1..3635: mol_type = unassigned DNA
ggctccagccttggccagcccagaaaggggctcccacagtgcagcggcgggctgaagggctcctcaagcgcggccagagtgagtgccaaagccgaggaggcgccgagagcgaaggagggctgtgagggctgccagctggctgtcacctcacagtgtagcggacaggaagaagaatgttgccaggcagctcctcccacggttcgtattgtgcactcaggcttggcctgtaacattgaagaggagcgctactccgaaagggtctacactatccgggaaggagaaacccttgagttgacttgtctagtcacaggacatccacgtccacagatcaggtggaccaaaacagcaggaagtgcctctgacagattccaagactcaagtgtcttcaatgagactttgaggattacaaatattcagcgacaccaaggaggccggtattactgtaaagcagagaatggcttggggtctccagcgataaagtcaatcagagtggatgtatactatttggatgatccagtagtaactgttcatcaaagtataggtgaagctaaagaacaattttactatgagagaacagtgttcctccggtgtgttgccaattccaatcctcctgttcggtatagctggagacgtggccaggaggtcttgctgcaaggatctgataaaggagttgagatttatgaaccattctttacccagggtgaaacaaagatcttaaaactaaagaatcttcgacctcaggactatgctaattatagctgcattgcttcagtgaggaatgtatgtaatattcctgataagatggtgtcgtttagactgtccaataaaacagcatcaccgtcaattaaactcttggtggatgatcctatagttgtaaatcctggagaggccataacattagtatgtgttacaacaggaggagagcctgcaccttctctcacctgggtcaggtcctttgggactctgcctgaaaagactgttttgaatggaggaactttgaccatacctgccatcacctcagatgatgctggtacttacagctgcattgccaataataatgtgggaaaccctgcaaaaaagtccaccaacatcattgtgagagcattaaaaaaaggacgattttggatcacaccagatccttatcacaaagatgacaacatccagattggccgtgaggtgaaaatatcttgccaagtagaagctgttccttctgaggagctaacatttagttggtttaaaaatggtcgtccattaagaagttctgagcggatggtcattacacagactgatcctgatgtctctccgggaacaacaaacttggacatcattgatttaaaattcacggattttgggacgtacacatgtgtagcatctctgaagggaggaggaatatctgatatcagtatcgatgttaatatatccagcagcacaggaaaaatcaccattggtcaccagagaaggagacacaatagaactgcaatgtcaagtaactggcaaacctaaaccaatcatcctttggtctagagcggataaagaagttgcaatgcctgatggatcaatgcaaatggagagttatgatggaacactgaggattgtgaatgtatctagggaaatgtcaggaatgtacagatgtcagaccagccaatacaatggatttaacgtgaaaccaagggaagccttggtgcagctcatcgttcagtatccccctgcagtggaaccagcattcttggaaatccggcaaggacaggatcgaagtgtcactatgagttgcagagtactgagagcctatccaatacgggtgctgacctatgagtggcgcttgggcaataaattattacggacgggtcaatttgactctcaggaatacacagagtacgctgtgaagagtctttccaatgaaaactatggggtttataactgtagcatcataaatgaagctggagctgggagatgcagctttcttgttacaggaaaggcctatgctccagaattctattatgatacctacaatccagtatggcagaacagacaccgtgtttattcttacagtctacagtggacacagatgaatcctgatgcagtggatcggattgttgcataccggttgggcatcaggcaggctggacagcagcgctggtgggagcaggagattaaaataaatgggaatattcaaaagggagaattaattacatataacttgacagagctaattaaaccagaagcttatgaagtccgactgactcctctcaccaaatttggtgaaggagattcaacaattcgtgtgatcaaatatagtggagaatttcattgtggatttgaagatggtaatatttgtttgttcactcaagatgatacagataattttgactggacaaagcaaagtacagcaacaagaaatacaaaatatactcctaatacaggacctaatgctgaccgtagtggctccaaagaaggtttttatatgtacattgagacatcacgacccagattggaaggcgaaaaggctcgacttctcagccctgttttcagcatagctcccaaaaacccttatggacccacaaacactgcatattgtttcagcttcttttatcacatgtatggacaacatataggctcttgctatgttgcccaggctggtctcaaggaatcttcccaccttcgcctctcaaaatgctgggattacaggcatgagtcattgtgcccagccagaaagcttttgagaagttaaactactataaacttgaagtcaggagacctgggcaggaacttggctgtagcacttcatcactgtaatacttcagagaaatcacttaaaatgtctgaaccttggtttccttatctgtaaaatgagaataataactcttatttcagaaagctgtagtttaagttaaattaggcaacatacatagtatcttcaaccagatggcagacactcataatcttaggttactttgaatctgaaatagcaataataatagcaataataaaataatagttgacatttatggagtactcatcatgggctaggatactttgtggattatttctcttaattttcacgatcaacatttgtgcttattaaaatcattatcctgtttcatagataacaaaattgaaatacaaaggactttagttaccatgcccatcacctggctaagtagtgaagccataacacaaacatgggaagctggacagagtctgcctgttttattactgtgcaggaacacttgttggaagattttgcaagcctagctaagtatgtgacagttacttagtagtggtgtgagttattagattttctgcaatcaaaaagcataatgagatatttgatttaggaaaataaacataaaaataggtaaaatcattcagaaacagaatctagactgggaatcacttaaagaaccaatgaaaggaaacaaatcgcataattgccaagccattttatttattgtgggattactatattattactaatgtaggattagctcaactctaattcttcctttttgttaataatgtatactctgtttcctctttgttttgaatatgtgtcatgtactttctttctcctcttccaatttacattggatcacatattttaattgatttttaaataaatatttccaagaccaata

SEQ ID NO: 12235 - DNA, 593 bp, Homo sapiens
  source 1..593: mol_type = unassigned DNA
ggctggacagcagcgctggtgggagcaggagattaaaataaatgggaatattcaaaagggagaattaattacatataacttgacagagctaattaaaccagaagcttatgaagtccgactgactcctctcaccaaatttggtgaaggagattcaacaattcgtgtgatcaaatatagtggagaatttcattgtggatttgaagatggtaatatttgtttgttcactcaagatgatacagataattttgactggacaaagcaaagtacagcaacaagaaatacaaaatatactcctaatacaggacctaatgctgaccgtagtggctccaaagaaggtttttatatgtacattgagacatcacgacccagattggaaggcgaaaaggctcgacttctcagccctgttttcagcatagctcccaaaaacccttatggacccacaaacactgcatattgtttcagcttcttttatcacatgtatggacaacatataggtgagatagcaataattactgattcttacaaaattaatgataactaagaagaaaaaggttcataaacacacagcattaaaacaatttttggtcaaagaa

SEQ ID NO: 12236 - DNA, 644 bp, Homo sapiens
  source 1..644: mol_type = unassigned DNA
ctttctgttttcaggaaaggcctatgctccagaattctattatgatacctacaatccagtatggcagaacagacaccgtgtttattcttacagtctacagtggacacagatgaatcctgatgcagtggatcggattgttgcataccggttgggcatcaggcaggctggacagcagcgctggtgggagcaggagattaaaataaatgggaatattcaaaagggagaattaattacatataacttgacagagctaattaaaccagaagcttatgaagtccgactgactcctctcaccaaatttggtgaaggagattcaacaattcgtgtgatcaaatatagtgctcctgtaaatcctcatttgagagaatttcattgtggatttgaagatggtaatatttgtttgttcactcaagatgatacagataattttgactggacaaagcaaagtacagcaacaagaaatacaaaatatactcctaatacaggacctaatgctgaccgtagtggctccaaagaaggtatgggggtatgaccttttgtgttcatagcaatcagagacttttaaaaactgctataaatatgaaatactaatatttagccatatatttgaagattatggaataaaatattaaattttctgtaca

SEQ ID NO: 12237 - DNA, 757 bp, Homo sapiens
  source 1..757: mol_type = unassigned DNA
aaagatcttaaaactaaagaatcttcgacctcaggactatgctaattatagctgcattgcttcagtgaggaatgtatgtaatattcctgataagatggtgtcgtttagactgtccaataaaacaggaggagagcctgcaccttctctcacctgggtcaggtcctttgggactctgcctgaaaagactgttttgaatggaggaactttgaccatacctgccatcacctcagatgatgctggtacttacagctgcattgccaataataatgtgggaaaccctgcaaaaaagtccaccaacatcattgtgagagcattaaaaaaaggacgattttggatcacaccagatccttatcacaaagatgacaacatccagattggccgtgaggtgaaaatatcttgccaagtagaagctgttccttctgaggagctaacatttagttggtttaaaaatggtcgtccattaagaagttctgagcggatggtcattacacagactgatcctgatgtctctccgggaacaacaaacttggacatcattgatttaaaattcacggattttgggacgtacacatgtgtagcatctctgaagggaggaggaatatctgatatcagtatcgatgttaatatatccagcagcacagttccacccaatctgactgttccacaggaaaaatcaccattggtcaccagagaaggagacacaatagaactgcaatgtcaagtaactggcaaacctaaaccaatcatcctttggtct

SEQ ID NO: 12238 - DNA, 1918 bp, Homo sapiens
  source 1..1918: mol_type = unassigned DNA
gcttgagcctgtaccagaatgataagtggaaattagtcctcaaagtaacctcagctgtttcattattgtgtgcctcgagcatctggttattcaagctcctcccacggttcgtattgtgcactcaggcttggcctgtaacattgaagaggagcgctactccgaaagggtctacactatccgggaaggagaaacccttgagttgacttgtctagtcacaggacatccacgtccacaggtggaccaaaacagcaggaagtgcctctgacagattccaagactcaagtgtcttcaatgagactttgaggattacaaatattcagcgacaccaaggaggccggtattactgtaaagcagagaatggcttggggtctccagcgataaagtcaatcagagtggatgtatactatttggatgatccagtagtaactgttcatcaaagtataggtgaagctaaagaacaattttactatgagagaacagtgttcctccggtgtgttgccaattccaatcctcctgttcggtatagctggagacgtggccaggaggtcttgctgcaaggatctgataaaggagttgagatttatgaaccattctttacccagggtgaaacaaagatcttaaaactaaagaatcttcgacctcaggactatgctaattatagctgcattgcttcagtgaggaatgtatgtaatattcctgataagatggtgtcgtttagactgtccaataaaacagcatcaccgtcaattaaactcttggtggatgatcctatagttgtaaatcctggagaggccataacattagtatgtgttacaacaggaggagagcctgcaccttctctcacctgggtcaggtcctttgggactctgcctgaaaagactgttttgaatggaggaactttgaccatacctgccatcacctcagatgatgctggtacttacagctgcattgccaataataatgtgggaaaccctgcaaaaaagtccaccaacatcattgtgagagcattaaaaaaaggacgattttggatcacaccagatccttatcacaaagatgacaacatccagattggccgtgaggtgaaaatatcttgccaagtagaagctgttccttctgaggagctaacatttagttggtttaaaaatggtcgtccattaagaagttctgagcggatggtcattacacagactgatcctgatgtctctccgggaacaacaaacttggacatcattgatttaaaattcacggattttgggacgtacacatgtgtagcatctctgaagggaggaggaatatctgatatcagtatcgatgttaatatatccagcagcacaggtaacactattggagataaaagaaatatattgacttcttccaaaacactacccctggaaagtacccacttaactacagatagatgtggtttctccatagaatggaagctctacaaagtctgagactttgtctgcatcactcattgctataatctcaatagccgaaacaatacatggcacatagaagacaggagcagctcctcaatttgtggtgtccagtgaaaataaaaatgcatgccccttgttcaaaaattaataaactcactatggcaacatcaaagcattaaagcaaatttggggctgttctaagtgtggctacacggatggcaggctcttgaggctagatggcctaggagattttattgtgatagaaggcctacagaagatgatgcctaacctaaagaatgagttactgaagatgattacatattctgtcttcaagccaaaactgacctttgatgttccaatttgcttacaatagagtggaatactagaatgcagtataaagttctataaatctgagattgtatgattcaactgacatcattaaaatgatatttatcccaatactattgaagactaaa

SEQ ID NO: 12239 - DNA, 574 bp, Homo sapiens
  source 1..574: mol_type = unassigned DNA
aaaaaaacaaacaaacaaaaaaaatcaccattccttttaatagcttgagcctgtaccagaatgataagtggaaattagtcctcaaagtaacctcagctgtttcattattgtgtgcctcgagcatctggttattcaaggtgaggcttccatgttcaagtatgaatcccttgggatctgccgcaggactcacggtagtgctgcctgcttctcccactctgtggctgactcccctgaggtagcattctgccaggcaaagctgcctttccttcctcctactactgtgacttcagaagctcctcccacggttcgtattgtgcactcaggcttggcctgtaacattgaagaggagcgctactccgaaagggtctacactatccgggaaggagaaacccttgagttgacttgtctagtcacaggacatccacgtccacagatcaggtggaccaaaacagcaggaagtgcctctgacagattccaagactcaagtgtcttcaatgagactttgaggattacaaatattcagcgacaccaaggaggccggtattactgtaaagcagagaatggcttggggtct

SEQ ID NO: 12240 - DNA, 511 bp, Homo sapiens
  source 1..511: mol_type = unassigned DNA
gagcatctggttattcaaggcctctccagtgtctctcctatgtctgagacatagtggcaagctgataaggctgtacagtggcaagggcaaaggagatcttaacccttagtccaatttaaggatgatgaattgaggttttttaccaacaaggcagaggatcagagatgtcttgcttcagctcctcccacggttcgtattgtgcactcaggcttggcctgtaacattgaagaggagcgctactccgaaagggtctacactatccgggaaggagaaacccttgagttgacttgtctagtcacaggacatccacgtccacagacatggaatagaaatttcagaatcaaaagttgggatctaaacaggagggtctaaacacatccaaaagaagccttgaagagctttatgagaggcagtttatggcaagagaagactcattgaggttcccattagtcccacaaagagtgtactaaatttacaccttctgaactccaaattatattttaaaatgcaa

SEQ ID NO: 12241 - DNA, 2871 bp, Homo sapiens
  source 1..2871: mol_type = unassigned DNA
atggatttactgtacggtctcgtgtggctgctgacagtcctcctggaggggatctctggccaaggagtgtacgctcctcccacggttcgtattgtgcactcaggcttggcctgtaacattgaagaggagcgctactccgaaagggtctacactatccgggaaggagaaacccttgagttgacttgtctagtcacaggacatccacgtccacagatcaggtggaccaaaacagcaggaagtgcctctgacagattccaagactcaagtgtcttcaatgagactttgaggattacaaatattcagcgacaccaaggaggccggtattactgtaaagcagagaatggcttggggtctccagcgataaagtcaatcagagtggatgtatactatttggatgatccagtagtaactgttcatcaaagtataggtgaagctaaagaacaattttactatgagagaacagtgttcctccggtgtgttgccaattccaatcctcctgttcggtatagctggagacgtggccaggaggtcttgctgcaaggatctgataaaggagttgagatttatgaaccattctttacccagggtgaaacaaagatcttaaaactaaagaatcttcgacctcaggactatgctaattatagctgcattgcttcagtgaggaatgtatgtaatattcctgataagatggtgtcgtttagactgtccaataaaacagcatcaccgtcaattaaactcttggtggatgatcctatagttgtaaatcctggagaggccataacattagtatgtgttacaacaggaggagagcctgcaccttctctcacctgggtcaggtcctttgggactctgcctgaaaagactgttttgaatggaggaactttgaccatacctgccatcacctcagatgatgctggtacttacagctgcattgccaataataatgtgggaaaccctgcaaaaaagtccaccaacatcattgtgagagcattaaaaaaaggacgattttggatcacaccagatccttatcacaaagatgacaacatccagattggccgtgaggtgaaaatatcttgccaagtagaagctgttccttctgaggagctaacatttagttggtttaaaaatggtcgtccattaagaagttctgagcggatggtcattacacagactgatcctgatgtctctccgggaacaacaaacttggacatcattgatttaaaattcacggattttgggacgtacacatgtgtagcatctctgaagggaggaggaatatctgatatcagtatcgatgttaatatatccagcagcacagttccacccaatctgactgttccacaggaaaaatcaccattggtcaccagagaaggagacacaatagaactgcaatgtcaagtaactggcaaacctaaaccaatcatcctttggtctagagcggataaagaagttgcaatgcctgatggatcaatgcaaatggagagttatgatggaacactgaggattgtgaatgtatctagggaaatgtcaggaatgtacagatgtcagaccagccaatacaatggatttaacgtgaaaccaagggaagccttggtgcagctcatcgttcagtatccccctgcagtggaaccagcattcttggaaatccggcaaggacaggatcgaagtgtcactatgagttgcagagtactgagagcctatccaatacgggtgctgacctatgagtggcgcttgggcaataaattattacggacgggtcaatttgactctcaggaatacacagagtacgctgtgaagagtctttccaatgaaaactatggggtttataactgtagcatcataaatgaagctggagctgggagatgcagctttcttgttacaggaaaggcctatgctccagaattctattatgatacctacaatccagtatggcagaacagacaccgtgtttattcttacagtctacagtggacacagatgaatcctgatgcagtggatcggattgttgcataccggttgggcatcaggcaggctggacagcagcgctggtgggagcaggagattaaaataaatgggaatattcaaaagggagaattaattacatataacttgacagagctaattaaaccagaagcttatgaagtccgactgactcctctcaccaaatttggtgaaggagattcaacaattcgtgtgatcaaatatagtgctcctgtaaatcctcatttgagagaatttcattgtggatttgaagatggtaatatttgtttgttcactcaagatgatacagataattttgactggacaaagcaaagtacagcaacaagaaatacaaaatatactcctaatacaggacctaatgctgaccgtagtggctccaaagaaggtttttatatgtacattgagacatcacgacccagattggaaggcgaaaaggctcgacttctcagccctgttttcagcatagctcccaaaaacccttatggacccacaaacactgcatattgtttcagcttcttttatcacatgtatggacaacatataggtgtcttaaatgtttatctacgtttgaaagggcaaacaacaatagagaatccactgtggtcttcaagtgggaataaaggacaaagatggaatgaggctcatgttaatatatacccaattacttcatttcagctcatttttgaaggtatccgaggtcctggaatagaaggtgacattgctattgatgatgtatcaattgcagaaggagaatgtgcaaaacaagacctagcaactaagaattccgttgatggtgctgttgggattttggttcatatatggctttttcccattatcgtcctcatctctatcttaagtcctcgaaggtga

SEQ ID NO: 12242 - DNA, 494 bp, Homo sapiens
  source 1..494: mol_type = unassigned DNA
aactcggaagctcgcgctcccgggccgtgggggcgagaacgccggcggcgagccggcgtcgctcgccgcccccagacagtggcaaacttcgcggcgttcccggagctcgtccgggcgaggcagataccgcacaaataaaatcaaatccaagtcccccatcccaacccgaatgatggaggctgcggcggccggagtgaccccgccgccgccagccccagcccgctagccgcggaccaacaggatgaacttactgctgtgaatgtaaagcaaggcttcaataatcagccagccttcactggagatgaacatggctcagccagaaatattgtaattaacccatcaaagattggagcttattttagcagcatattagctgagaaactgaagcttaacactttccaggacacgggaaagaagaaaccacaagttaatgctaaagataattattggctggttactgctcgatcccagagtgcaattcatagttggttttc

SEQ ID NO: 12243 - DNA, 2757 bp, Homo sapiens
  source 1..2757: mol_type = unassigned DNA
gtccgctccacagcttcttcccgggaggggagggccaccctcgccttgggcgagcacttcagccaccagcctaggcgccaagaaaagtttttttttttttttttccagtgccccacccccacccccatcctgcgcccagctggggtgggtttgggtccattggtgaaaaaagtcacacgttcccatcagctgctcctccccctggagacaaggtaggggggagcagaggaggcaggcgccgcggaggaccctggccgacctctagtccctccgccgccgccaccggagcggtgcgtcccggggctcgagcgcagccgagtacccgccgaaggctgtccccatcagtgcgtgtctgctgccgggcagcggcagcatccaacctgctttattcctcctgcctgcagcgccacagcgagcgagcgagcgaggagggggagagagggagtctgtctgcaaagtgctgctccctggtgctcagaggcggctgctccagctccaactctcattcatttcgccggttaacatgagagatcatggccgccttcgggcttctcagctatgagcagagaccgctgaagcgcccccggctcgggccgcccgacgtctacccacaggaccccaagcagaaggaggatgaacttactgctgtgaatgtaaagcaaggcttcaataatcagccagccttcactggagatgaacatggctcagccagaaatattgtaattaacccatcaaagattggagcttattttagcagcatattagctgagaaactgaagcttaacactttccaggacacgggaaagaagaaaccacaagttaatgctaaagataattattggctggttactgctcgatcccagagtgcaattcatagttggttttctgacttagcaggaaataagccactttctattttggcaaaaaaggttcctatccttagtaaaaaagaggatgtttttgcatatttagctaaatattctgtgccaatggttcgagcaacgtggctgatcaagatgacttgtgcctattattctgctatatctgaagctaaaattaagaaacgtcaggctcctgatccgaatttggagtggacacagatatctaccagatatcttcgagagcagttggccaagatttctgacttttaccacatggcctccagcacgggcgatggccctgtccctgtgccaccagaggtggagcaagccatgaagcaatgggaatacaacgaaaagctagcatttcacatgttccaggaaggaatgttagaaaaacacgaatatttgacatggatcctggatgttttagaaaagatcagaccaatggatgatgatcttcttaaactcttgctaccactaatgctgcagtattcagatgagtttgttcagtcggcctacctgtctcgtcgtcttgcctacttttgtgcccggcgtctttccttgctgctgagcgatagccccaacctccttgctgcccactcaccccacatgatgataggaccaaacaactcgagtatcggggcccccagccctggcccccccggccctggcatgagccccgtgcagctggccttctcagattttctttcctgtgcacagcatggtcccctggtttatggacttagttgtatgttgcagactgtcactctctgttgcccaagtgccttggtgtggaattattccacaaatgaaaataagagcgcaaacccaggctcacccctggatctgctgcaggtggccccgtccagcctccccatgccgggtgggaacacggctttcaatcagcaggttcgggcaaggatttatgaagtagaacaacagataaaacaaagaggccgtgcagtggaagttcggtggtcatttgacaagtgccaagaatccacagcaggggtgactattagtcgggttttgcacacgttggaagttttggatcgtcactgttttgaccgaactgattccagcaattccatggagacactttatcataagattttctgggcaaaccaaaacaaagataaccaagaggttgcgcccaacgatgaagctgtggtgacgctgttatgtgaatgggccgtgagctgcaaacggtctggcaagcacagggccatggctgtggcaaaactcctggagaagaggcaagcagaaattgaggcagagagatgtggtgaatcagaagtcttagatgagaaggagtctatttcttcatcctctcttgctggatccagtttgcctgttttccagaatgtgctgttaaggtttttagatacacaggccccctctttgtcggacccaaacagtgaatgtgaaaaggtggaatttgtgaacctggtgctgctcttctgcgagttcatccgccatgatgtcttctcccatgacgcatacatgtgtaccctcatatctcgaggagatttgtcagtcactgcctcaactcggccgcggtcaccagtaggggaaaatgcagatgaacactattcaaaggaccatgatgtgaaaatggagattttttctcctatgcctggagaatcctgtgagaatgccaacacttcgttgggcagaagaatgtcagttaattgtgagaagttggtgaagagggaaaagccaagggaattaatttttccatctaattatgacctccttcgccacttacagtatgcaacacattttcctatacctctggtaagtcattgcttcagttaatctataccctgattattttattataagatcaataactgttgaacgtcagattattcaa

SEQ ID NO: 12244 - DNA, 2862 bp, Homo sapiens
  source 1..2862: mol_type = unassigned DNA
gtccgctccacagcttcttcccgggaggggagggccaccctcgccttgggcgagcacttcagccaccagcctaggcgccaagaaaagtttttttttttttttttccagtgccccacccccacccccatcctgcgcccagctggggtgggtttgggtccattggtgaaaaaagtcacacgttcccatcagctgctcctccccctggagacaaggtaggggggagcagaggaggcaggcgccgcggaggaccctggccgacctctagtccctccgccgccgccaccggagcggtgcgtcccggggctcgagcgcagccgagtacccgccgaaggctgtccccatcagtgcgtgtctgctgccgggcagcggcagcatccaacctgctttattcctcctgcctgcagcgccacagcgagcgagcgagcgaggagggggagagagggagtctgtctgcaaagtgctgctccctggtgctcagaggcggctgctccagctccaactctcattcatttcgccggttaacatgagagatcatggccgccttcgggcttctcagctatgagcagagaccgctgaagcgcccccggctcgggccgcccgacgtctacccacaggaccccaagcagaaggaggatgaacttactgctgtgaatgtaaagcaaggcttcaataatcagccagccttcactggagatgaacatggctcagccagaaatattgtaattaacccatcaaagattggagcttattttagcagcatattagctgagaaactgaagcttaacactttccaggacacgggaaagaagaaaccacaagttaatgctaaagataattattggctggttactgctcgatcccagagtgcaattcatagttggttttctgacttagcaggaaataagccactttctattttggcaaaaaaggttcctatccttagtaaaaaagaggatgtttttgcatatttagctaaatattctgtgccaatggttcgagcaacgtggctgatcaagatgacttgtgcctattattctgctatatctgaagctaaaattaagaaacgtcaggctcctgatccgaatttggagtggacacagatatctaccagatatcttcgagagcagttggccaagatttctgacttttaccacatggcctccagcacgggcgatggccctgtccctgtgccaccagaggtggagcaagccatgaagcaatgggaatacaacgaaaagctagcatttcacatgttccaggaaggaatgttagaaaaacacgaatatttgacatggatcctggatgttttagaaaagatcagaccaatggatgatgatcttcttaaactcttgctaccactaatgctgcagtattcagatgagtttgttcagtcggcctacctgtctcgtcgtcttgcctacttttgtgcccggcgtctttccttgctgctgagcgatagccccaacctccttgctgcccactcaccccacatgatgataggaccaaacaactcgagtatcggggcccccagccctggcccccccggccctggcatgagccccgtgcagctggccttctcagattttctttcctgtgcacagcatggtcccctggtttatggacttagttgtatgttgcagactgtcactctctgttgcccaagtgccttggtgtggaattattccacaaatgaaaataagagcgcaaacccaggctcacccctggatctgctgcaggtggccccgtccagcctccccatgccgggtgggaacacggctttcaatcagcaggttcgggcaaggatttatgaagtagaacaacagataaaacaaagaggccgtgcagtggaagttcggtggtcatttgacaagtgccaagaatccacagcaggggtgactattagtcgggttttgcacacgttggaagttttggatcgtcactgttttgaccgaactgattccagcaattccatggagacactttatcataagattttctgggcaaaccaaaacaaagataaccaagaggttgcgcccaacgatgaagctgtggtgacgctgttatgtgaatgggccgtgagctgcaaacggtctggcaagcacagggccatggctgtggcaaaactcctggagaagaggcaagcagaaattgaggcagagagatgtggtgaatcagaagtcttagatgagaaggagtctatttcttcatcctctcttgctggatccagtttgcctgttttccagaatgtgctgttaaggtttttagatacacaggccccctctttgtcggacccaaacagtgaatgtgaaaaggtggaatttgtgaacctggtgctgctcttctgcgagttcatccgccatgatgtcttctcccatgacgcatacatgtgtaccctcatatctcgaggagatttgtcagtcactgcctcaactcggccgcggtcaccagtaggggaaaatgcagatgaacactattcaaaggaccatgatgtgaaaatggaggaacagagtattatggcgcatatgggcattgactcaggaaccactaacatttttgatgaagtagacaagagtgactttaaaactgactttggttcggaatttccaattttttctcctatgcctggagaatcctgtgagaatgccaacacttcgttgggcagaagaatgtcagttaattgtgagaagttggtgaagagggaaaagccaagggaattaatttttccatctaattatgacctccttcgccacttacagtatgcaacacattttcctatacctctggtaagtcattgcttcagttaatctataccctgattattttattataagatcaataactgttgaacgtcagattattcaa

SEQ ID NO: 12245 - DNA, 10744 bp, Homo sapiens
  source 1..10744: mol_type = unassigned DNA
ccaactctcattcatttcgccggttaacatgagagatcatggccgccttcgggcttctcagctatgagcagagaccgctgaagcgcccccggctcgggccgcccgacgtctacccacaggaccccaagcagaaggaggatgaacttactgctgtgaatgtaaagcaaggcttcaataatcagccagccttcactggagatgaacatggctcagccagaaatattgtaattaacccatcaaagattggagcttattttagcagcatattagctgagaaactgaagcttaacactttccaggacacgggaaagaagaaaccacaagttaatgctaaagataattattggctggttactgctcgatcccagagtgcaattcatagttggttttctgacttagcaggaaataagccactttctattttggcaaaaaaggttcctatccttagtaaaaaagaggatgtttttgcatatttagctaaatattctgtgccaatggttcgagcaacgtggctgatcaagatgacttgtgcctattattctgctatatctgaagctaaaattaagaaacgtcaggctcctgatccgaatttggagtggacacagatatctaccagatatcttcgagagcagttggccaagatttctgacttttaccacatggcctccagcacgggcgatggccctgtccctgtgccaccagaggtggagcaagccatgaagcaatgggaatacaacgaaaagctagcatttcacatgttccaggaaggaatgttagaaaaacacgaatatttgacatggatcctggatgttttagaaaagatcagaccaatggatgatgatcttcttaaactcttgctaccactaatgctgcagtattcagatgagtttgttcagtcggcctacctgtctcgtcgtcttgcctacttttgtgcccggcgtctttccttgctgctgagcgatagccccaacctccttgctgcccactcaccccacatgatgataggaccaaacaactcgagtatcggggcccccagccctggcccccccggccctggcatgagccccgtgcagctggccttctcagattttctttcctgtgcacagcatggtcccctggtttatggacttagttgtatgttgcagactgtcactctctgttgcccaagtgccttggtgtggaattattccacaaatgaaaataagagcgcaaacccaggctcacccctggatctgctgcaggtggccccgtccagcctccccatgccgggtgggaacacggctttcaatcagcaggttcgggcaaggatttatgaagtagaacaacagataaaacaaagaggccgtgcagtggaagttcggtggtcatttgacaagtgccaagaatccacagcaggggtgactattagtcgggttttgcacacgttggaagttttggatcgtcactgttttgaccgaactgattccagcaattccatggagacactttatcataagattttctgggcaaaccaaaacaaagataaccaagaggttgcgcccaacgatgaagctgtggtgacgctgttatgtgaatgggccgtgagctgcaaacggtctggcaagcacagggccatggctgtggcaaaactcctggagaagaggcaagcagaaattgaggcagagagatgtggtgaatcagaagtcttagatgagaaggagtctatttcttcatcctctcttgctggatccagtttgcctgttttccagaatgtgctgttaaggtttttagatacacaggccccctctttgtcggacccaaacagtgaatgtgaaaaggtggaatttgtgaacctggtgctgctcttctgcgagttcatccgccatgatgtcttctcccatgacgcatacatgtgtaccctcatatctcgaggagatttgtcagtcactgcctcaactcggccgcggtcaccagtaggggaaaatgcagatgaacactattcaaaggaccatgatgtgaaaatggagattttttctcctatgcctggagaatcctgtgagaatgccaacacttcgttgggcagaagaatgtcagttaattgtgagaagttggtgaagagggaaaagccaagggaattaatttttccatctaattatgacctccttcgccacttacagtatgcaacacattttcctatacctctggatgaatcttcaagtcatgaatgtaaccagcgcacaatccttctctatggagtcggcaaagagcgtgatgaagcaaggcatcagctgaagaagattaccaaagatatcctgaaaattctaaataagaagagcaccacagagacaggggttggggacgaaggacaaaaagccaggaagaacaaacaggagacatttccaacactggagactgtgttcactaaactccagctcctttcatattttgatcaacatcaagtgacatctcagatttctaacaatgtgctagaacaaatcacaagctttgcgtcaggaacatcctatcatctccctttggctcaccacattcagctcatctttgatctcatggagccagcactgaacatcaacggactaattgacttcgcaatacagttactaaatgaactgagtgttgtggaagctgaactgctcctaaaatcctccagcctggcaggaagttatacaacaggactgtgtgtctgcatcgtggctgttctcaggcgctatcacagttgtctaatcttgaatcctgatcagacagcccaggtgtttgaagggttgtgtggtgtggtcaagcatgtcgtaaacccctcagaatgttcttcccctgaaagatgcattttagcctacctctatgatctctatgtgtcatgtagccacctcagaagtaaatttggagacctcttcagtagtgcctgttcaaaagtaaagcaaaccatatataataacgtgatgcctgcaaattcgaacttgcgatgggatccagacttcatgatggattttattgagaatccctcagcccgcagcatcaactactcaatgctgggcaagatcctcagtgacaatgcggccaatcgctacagctttgtctgcaatacactcatgaatgtatgtatgggccatcaggatgctggcaggattaacgacatagccaatttctcctctgagcttacggcttgctgcactgttcttagttcagaatggctgggggttctgaaggctctttgttgttcttcaaatcacgtgtgggggtttaatgatgtactttgcactgtagatgtgagtgacctttcattccatgattcattagctactttcattgctattctgatagcacgacagtgtttttccctggaggacgtcgtgcagcatgtcgcacttccctctcttctagcagcagcttgtggggatgcggacgccgagcctggggcgagaatgacatgccgactcttgcttcatctcttccgagctccccaggcctgcttcttacctcaagcaacgggcaaacctttccctggaataagatcatcttgtgatagacacctcttagccgctgctcacaacagcattgaagtgggagccgtgtttgctgtcttaaaagcaattatgatgcttggagatgccaaaattggcaataacagtgtcagctctttaaagaatgatgacttcaccatgagaggtttgcgatgtgatgggaatgctgatgatatctggactgcctcacaaaatccaaaatcctgtgggaaaagcatttccatagaaactgccaatttaagagaatacgctagatatgtactgaggactatctgtcaacaggaatgggtaggagagcattgcttaaaagaacctgaaagattatgtacagacaaagaacttatattggaccctgtgctttcaaatatgcaagcacagaaattactgcagcttatctgttatcctcatggcattaaagaatgtaccgagggggacaatctgcaaagacagcacattaagcgtattcttcagaatcttgagcagtggacactgaggcaatcctggttagaactccagctaatgatcaaacagtgcttgaaggaccctggctctggttctgtggccgaaatgaacaacttactggacaatattgcaaaggcaacaatagaggtattccagcagtctgcagacctaaataattcttctaattctggcatgagcctcttcaacccaaacagtattggaagtgctgatacaagtagcacgagacagaatggaataaagacattcctaagttcctccgaacgcaggggtgtatggttggtggcccccctcatcgccaggttgccaacttctgtgcaaggaagagtgctgaaagccgctggggaagagctggagaagggacagcacttgggttcttcttccaaaaaggaaagggacagacagaaacagaaaagtatgtctcttttgagtcaacaacccttcctctcactggtacttacctgccttaagggacaagatgaacaaagggaaggcctcctaacatctctccagaatcaagttaaccagattttaagtaactggagagaagaacgataccaagatgacataaaagcgcggcagatgatgcacgaagcattgcaactccgcctaaatttggtaggaggaatgtttgacacggtgcagaggagcacccagtggactacagactgggccctgctactccttcagatcattacttcaggaactgttgacatgcacactaacaatgaattattcacaacagttcttgacatgctgggtgttttaatcaatggaacgttagcctctgacctatcaaatgcatcccctgggggatctgaagagaacaagcgtgcatacatgaatttagtaaagaaactgaaaaaagagctaggagacaagcgatcagaaagtattgacaaagttcgacagttactacctttgccgaaacagacatgtgatgtcatcacttgtgaacctatgggttccttgattgacacaaaaggaaacaaaattgctggatttgactctatagataaaaaacagggtctccaggtctctacgaagcagaaggtgtccccgtgggacttgtttgagggtcagaagaacccagctcctttgtcctgggcctggtttgggacagtccgagtggaccgaagagtgatcaagtacgaggagcagcatcacctcctgctgtatcacacacaccccatgcccaagccccgcagttactacctccagccactgcccctgcctcctgaggaggaagaggaagagcccacatctccagtttctcaggaaccagaaaggaagtccgctgagctgtcagatcagggaaaaaccacaacagatgaagaaaagaaaacaaaaggaaggaagcgcaagacgaaatctagctcaagagttgatgaatatccacagagcaacatataccgagtgcctcctaattactcgcctatctcctcccaaatgatgcaccatccacagtccaccttgtggggttacaacctcgtgggccagccccagcagcccggctttttccttcagaaccaatctcttactccaggtggctccagattggaccctgcaggctcctttgtcccaaccaacaccaaacaagctctgtcaaacatgctacagcggcgctcaggcgccatgatgcagccgccttctcttcatgcaatcacatcgcagcagcagttgatacagatgaagcttctgcagcagcagcagcaacagcgacttctcaggcaagcccagactcggcctttccaacagggccagccgggggaccaggctgctctctttgctgcgcaagcacggccctcccctcagctccctcagtatccagggctgcagcaagcacagaccatgccacagggctatacaatgtatgggacacagatgcctttgcagcagacatcgcagcagcaggctggcagtgtggtcctgtctcccagctataactccagagcctatccggccgcacattccaaccccgtgctaatggaaagactcagacagattcagcagcagccgagtggctatgttcagcagcaggcctcgccgtacctgcagcccctgactggctctcagagactgaaccatcaggctctacagcagagccctctggtgggcgggggaattgatgctgtgctgacttctgcacatccaaaccttccctccgtgcccctgcctcaggatcccatgagacccagacagccgcaagttcgacagcagcagagactcctccagatgcagcagccccagcagccccagccccagcagcctccccagccccagcagtcctcgcagtcccagagtcagacccttggtctccaagcaatgcagccccagcagcccttgtttcccaggcaaggcttgcagcagacccagcagcagcagcagacggccgccttggtgcggcagctccagaagcagctttccagcaaccagccacagcaaggagtgactccgtatgggcatccttcacacttctgaatctgcaagaggagaagacatgacgttttatgtttgcactgaaaaacagaaaatcaaatttaatgcattagtcatcttaaaaatgtccctttttttcatttctttgacattttactatattttatgctacatctcacaaaaaaaaaaaaaggtgtttaaacaaaaagccaaggagaagttgtggtttgattttgttgaattcacctttaaagtaggtttacaaatgtgaatcatgcaggcaggcctactcccggaagagtgtgctagcagaccttttgaaattggtgctttttttgaatctcacatttctagaaagaatggattatgatggatctaaggtatttatgtatttcattcattaatgatgacgttgtttttttttttttaattttattttccaaactgtgctggaccaaactactgatttgaaaggcatgtcagatcttgacagaaacatggcctgtttattctgcattcacctgtgatggtgaaacggacatttatttgcatcgctctaatttgaaatgtttgtaatctcataagcactttataaactttgttcttatttatgtaggactcttctttgcttttgttgtggtcaaaaggtgctgaaacagattgttgcttcgtacttaaacttcttaaaccaagaacctaaaccaaggtttctttgagagccgccctaagatgtgcggaaacctgttagaagtagctgtactcaaatttgttttgaggcaagatcattgatgagagtcattgtgaaggtacaacatgtaaatcctaaaggcctgaaagaactgcagtggaatcgtccaactatttattgccagttttggttctcctgaaccttatgccaccttaaggggaaaaaaaaatccagtagctggcttgagattccagtgctcacacttgacatggtttccagagaatctggccccaaagtccagaaggctctggttttcataaaaggtgtatttgctgtttattttgtatggtaagtatttgctcttttgaatttaattattactgtcagtgtcagtcttggttgtgtattgcatatactgtatttataaattggtgcaaaaagcacaagtaaattatacatcaaatttattataaagaaatagtaactattttaactttgttcaagtatgtggtaatttgctcctattagagtaaaaaagaaaccagtaaattatcagtttgtgtaacttaagagtattctatataatatttttttagatttagatgcataaaattttgaatgtgaaaattgcagggcattttaaaacatatgtgggggatattttcccatgttctctgttatttcattttcttttgccatatgattttacatataatatagtcaagcatactgtgaatagacttgtctataatgagcagaccatgtaaatctactttttttaaaatgtagctagtacaactttagtagacattttcttttgcaaatcattatctataaataatttatatcttcctgggtgagttactcattgcaaagtttgactcatgcaaatgacctcaaatacatgtcagcttactttgctgtggcaacatccatgtgaactgctttgtacactgtgaaaatatttcactccagcctgcccattttgtgtttactctgggctggaaaagactttgccaaaacattaaaaactattcttttcactaaattaatagtctatctgctttcagaagatgtatcatctatctgtacacatttttgctggttttgtatatcagattttttcctctcaagaaacatacttagataagctaatgaagttgttttcttcaaagtaatatatctatataatgactgcattggcaaatcaaccgaaatgtgaatgttgtgcctagtgagtgagtcatgttccatcattatttctttccaaatttctttgccagttcagtttgaaccatatattttgtagctcagcattgcaaacaacagtaatactgttttaagaatgagtgttataattgcatagcatttgtatgcactttatactttgcagaggtgagttaaattattaatcattttgcacatgaaagctgtggggcatatcttttttctttttttaggtgaggaagttatgctacgactctaattaattccacgattctattgaaagttgaggaatgctgttttacccctgcgcattataaagaaaataactagaattactttagtcttcagattttctccctgttaattctgtatcttgagaggtttcttttttttttttttttttttcttttcttgcaaatgcattcttttgcattaagatggtcacaaggtaaagccctgtggcagaacctggtactttaccttaccagaggaaattaccttagaataagatggagcgagaccccagctccccttaaagacaagaccttgaaatcaaatggagtcagctatacctatcaatcaatcacagttcttggatataagaagcccatagactctcttgtttacactgtaggctttttcttaatagggttgcatttgtcagtcattgcatttacccttcttggcctggaagtagaggagatcaatgcgtagctttgaccacttccagccacagggtactaacatcagacataagttgcaaccaggtcacattttaggctgagatggggctaactgaaagtcagtgtgatgaaaacccaagggcgctattccacatgtctcaaatgattggcaggggctaacttattagtaattctcggttttgtgcactgagatatctaagacctatggcatttttttcccatttataaagctcctataattcttaagtaagtactaggtgaatgtttgaatagatgctggagaaattacactggaaaaccccacccctagatttagataagatcaatcatttaatattccccaaattaattcaggttgaattaagcatgtaatataaattcagtgaattacaaaaacacattttgtgtaggattgatcagattttaaatacagtgaaacttcattatatataatagacctagaccctcccaagcattttcccatcccataaagaattaatgaaatgaaatgcttatagagcaacgattcctgctcagaaaaatttccttataaacagctccaaaccaggggtgcctgagctagattttaaagttataaagaagtttcattgtatttttaaaacctttttaatgggtgtatttggacaaaaataacccccttttcacattttatgatgtgcaggtattacattgctttttacatgtggaaaagtgagcctgcatttatttttaaatgcagttattaaaacatttttgtattccccatcaatgaaaattttcagtgtgaacaaatggtgaatcataagacagttcagtgcttattttctgtaggttttagcaaaaaaatttataaaccacaaaatatttatacatcaggatggtaaatttacatcataaagattgcagatttaatattttccattgtctctgttctgagtgccatgcttgtaacattgataggaggtggacactaggcaactggtattagaagttcatttttttactgaaaaattcaggtacattagccatttgttattttatagtgaaccgtttcaatgtttgtttattgttatttgttggcaaaataaaagtgccttaagttaaaagtttgttttgagatccattaaataaatcagtatcatcagttcataatgcatttatttacaagtccttttattttgcatgttcattgtaaatttaatactgtaaatgtattcaaattcatttacatgcctatggctgcctttgattaaacttcttccaaaaaataaattctgcccagatgttgttgactttattatttcatgtcagattacttgaatatacgttgctgcataatcactaccaagtgggttctttgctgtgcatttgtatatcccagaatcggaggtttggggattctgaatgactagggtaccttgtaagtgaagctgctcacttccatgtgtcctctctttacttgccgttgagagaagggagtggtcaggcatctcccatgtgatttctggcttgggaactcccaaggccacacagtggagctgaaaggctgcccctgtcctggtgacaatactcctgggtggacgatttgtaattcggggagggtaggctacaatcattactggaacagtaatcagtgtatgaccaacactattttgagccttacagatatagtttcctctgtcataagctgt

SEQ ID NO: 12246 - DNA, 6401 bp, Homo sapiens
  source 1..6401: mol_type = unassigned DNA
tctcattcatttcgccggttaacatgagagatcatggccgccttcgggcttctcagctatgagcagagaccgctgaagcgcccccggctcgggccgcccgacgtctacccacaggaccccaagcagaaggaggatgaacttactgctgtgaatgtaaagcaaggcttcaataatcagccagccttcactggagatgaacatggctcagccagaaatattgtaattaacccatcaaagattggagcttattttagcagcatattagctgagaaactgaagcttaacactttccaggacacgggaaagaagaaaccacaagttaatgctaaagataattattggctggttactgctcgatcccagagtgcaattcatagttggttttctgacttagcaggaaataagccactttctattttggcaaaaaaggttcctatccttagtaaaaaagaggatgtttttgcatatttagctaaatattctgtgccaatggttcgagcaacgtggctgatcaagatgacttgtgcctattattctgctatatctgaagctaaaattaagaaacgtcaggctcctgatccgaatttggagtggacacagatatctaccagatatcttcgagagcagttggccaagatttctgacttttaccacatggcctccagcacgggcgatggccctgtccctgtgccaccagaggtggagcaagccatgaagcaatgggaatacaacgaaaagctagcatttcacatgttccaggaaggaatgttagaaaaacacgaatatttgacatggatcctggatgttttagaaaagatcagaccaatggatgatgatcttcttaaactcttgctaccactaatgctgcaggttcgggcaaggatttatgaagtagaacaacagataaaacaaagaggccgtgcagtggaagttcggtggtcatttgacaagtgccaagaatccacagcaggggtgactattagtcgggttttgcacacgttggaagttttggatcgtcactgttttgaccgaactgattccagcaattccatggagacactttatcataagattttctgggcaaaccaaaacaaagataaccaagaggttgcgcccaacgatgaagctgtggtgacgctgttatgtgaatgggccgtgagctgcaaacggtctggcaagcacagggccatggctgtggcaaaactcctggagaagaggcaagcagaaattgaggcagagagatgtggtgaatcagaagtcttagatgagaaggagtctatttcttcatcctctcttgctggatccagtttgcctgttttccagaatgtgctgttaaggtttttagatacacaggccccctctttgtcggacccaaacagtgaatgtgaaaaggtggaatttgtgaacctggtgctgctcttctgcgagttcatccgccatgatgtcttctcccatgacgcatacatgtgtaccctcatatctcgaggagatttgtcagtcactgcctcaactcggccgcggtcaccagtaggggaaaatgcagatgaacactattcaaaggaccatgatgtgaaaatggagattttttctcctatgcctggagaatcctgtgagaatgccaacacttcgttgggcagaagaatgtcagttaattgtgagaagttggtgaagagggaaaagccaagggaattaatttttccatctaattatgacctccttcgccacttacagtatgcaacacattttcctatacctctggatgaatcttcaagtcatgaatgtaaccagcgcacaatccttctctatggagtcggcaaagagcgtgatgaagcaaggcatcagctgaagaagattaccaaagatatcctgaaaattctaaataagaagagcaccacagagacaggggttggggacgaaggacaaaaagccaggaagaacaaacaggagacatttccaacactggagactgtgttcactaaactccagctcctttcatattttgatcaacatcaagtgacatctcagatttctaacaatgtgctagaacaaatcacaagctttgcgtcaggaacatcctatcatctccctttggctcaccacattcagctcatctttgatctcatggagccagcactgaacatcaacggactaattgacttcgcaatacagttactaaatgaactgagtgttgtggaagctgaactgctcctaaaatcctccagcctggcaggaagttatacaacaggactgtgtgtctgcatcgtggctgttctcaggcgctatcacagttgtctaatcttgaatcctgatcagacagcccaggtgtttgaagggttgtgtggtgtggtcaagcatgtcgtaaacccctcagaatgttcttcccctgaaagatgcattttagcctacctctatgatctctatgtgtcatgtagccacctcagaagtaaatttggagacctcttcagtagtgcctgttcaaaagtaaagcaaaccatatataataacgtgatgcctgcaaattcgaacttgcgatgggatccagacttcatgatggattttattgagaatccctcagcccgcagcatcaactactcaatgctgggcaagatcctcagtgacaatgcggccaatcgctacagctttgtctgcaatacactcatgaatgtatgtatgggccatcaggatgctggcaggattaacgacatagccaatttctcctctgagcttacggcttgctgcactgttcttagttcagaatggctgggggttctgaaggctctttgttgttcttcaaatcacgtgtgggggtttaatgatgtactttgcactgtagatgtgagtgacctttcattccatgattcattagctactttcattgctattctgatagcacgacagtgtttttccctggaggacgtcgtgcagcatgtcgcacttccctctcttctagcagcagcttgtggggatgcggacgccgagcctggggcgagaatgacatgccgactcttgcttcatctcttccgagctccccaggcctgcttcttacctcaagcaacgggcaaacctttccctggaataagatcatcttgtgatagacacctcttagccgctgctcacaacagcattgaagtgggagccgtgtttgctgtcttaaaagcaattatgatgcttggagatgccaaaattggcaataacagtgtcagctctttaaagaatgatgacttcaccatgagaggtttgcgatgtgatgggaatgctgatgatatctggactgcctcacaaaatccaaaatcctgtgggaaaagcatttccatagaaactgccaatttaagagaatacgctagatatgtactgaggactatctgtcaacaggaatgggtaggagagcattgcttaaaagaacctgaaagattatgtacagacaaagaacttatattggaccctgtgctttcaaatatgcaagcacagaaattactgcagcttatctgttatcctcatggcattaaagaatgtaccgagggggacaatctgcaaagacagcacattaagcgtattcttcagaatcttgagcagtggacactgaggcaatcctggttagaactccagctaatgatcaaacagtgcttgaaggaccctggctctggttctgtggccgaaatgaacaacttactggacaatattgcaaaggcaacaatagaggtattccagcagtctgcagacctaaataattcttctaattctggcatgagcctcttcaacccaaacagtattggaagtgctgatacaagtagcacgagacagaatggaataaagacattcctaagttcctccgaacgcaggggtgtatggttggtggcccccctcatcgccaggttgccaacttctgtgcaaggaagagtgctgaaagccgctggggaagagctggagaagggacagcacttgggttcttcttccaaaaaggaaagggacagacagaaacagaaaagtatgtctcttttgagtcaacaacccttcctctcactggtacttacctgccttaagggacaagatgaacaaagggaaggcctcctaacatctctccagaatcaagttaaccagattttaagtaactggagagaagaacgataccaagatgacataaaagcgcggcagatgatgcacgaagcattgcaactccgcctaaatttggtaggaggaatgtttgacacggtgcagaggagcacccagtggactacagactgggccctgctactccttcagatcattacttcaggaactgttgacatgcacactaacaatgaattattcacaacagttcttgacatgctgggtgttttaatcaatggaacgttagcctctgacctatcaaatgcatcccctgggggatctgaagagaacaagcgtgcatacatgaatttagtaaagaaactgaaaaaagagctaggagacaagcgatcagaaagtattgacaaagttcgacagttactacctttgccgaaacagacatgtgatgtcatcacttgtgaacctatgggttccttgattgacacaaaaggaaacaaaattgctggatttgactctatagataaaaaacagggtctccaggtctctacgaagcagaaggtgtccccgtgggacttgtttgagggtcagaagaacccagctcctttgtcctgggcctggtttgggacagtccgagtggaccgaagagtgatcaagtacgaggagcagcatcacctcctgctgtatcacacacaccccatgcccaagccccgcagttactacctccagccactgcccctgcctcctgaggaggaagaggaagagcccacatctccagtttctcaggaaccagaaaggaagtccgctgagctgtcagatcagggaaaaaccacaacagatgaagaaaagaaaacaaaaggaaggaagcgcaagacgaaatctagctcaagagttgatgaatatccacagagcaacatataccgagtgcctcctaattactcgcctatctcctcccaaatgatgcaccatccacagtccaccttgtggggttacaacctcgtgggccagccccagcagcccggctttttccttcagaaccaatctcttactccaggtggctccagattggaccctgcaggctcctttgtcccaaccaacaccaaacaagctctgtcaaacatgctacagcggcgctcaggcgccatgatgcagccgccttctcttcatgcaatcacatcgcagcagcagttgatacagatgaagcttctgcagcagcagcagcaacagcgacttctcaggcaagcccagactcggcctttccaacagtttcccaggcaaggcttgcagcagacccagcagcagcagcagacggccgccttggtgcggcagctccagaagcagctttccagcaaccagccacagcaaggagtgactccgtatgggcatccttcacacttctgaatctgcaagaggagaagacatgacgttttatgtttgcactgaaaaacagaaaatcaaatttaatgcattagtcatcttaaaaatgtccctttttttcatttctttgacattttactatattttatgctacatctcacaaaaaaaaaaaaaggtgtttaaacaaaaagccaaggagaagttgtggtttgattttgttgaattcacctttaaagtaggtttacaaatgtgaatcatgcaggcaggcctactcccggaagagtgtgctagcagaccttttgaaattggtgctttttttgaatctcacatttctagaaagaatggattatgatggatctaaggtatttatgtatttcattcattaatgatgacgttgtttttttttttttaattttattttccaaactgtgctggaccaaactactgatttgaaaggcatgtcagatcttgacagaaacatggcctgtttattctgcattcacctgtgatggtgaaacggacatttatttgcatcgctctaatttgaaatgtttgtaatctcataagcactttataaactttgttcttatttatgtaggactcttctttgcttttgttgtggtcaaaaggtgctgaaacagattgttgcttcgtacttaaacttcttaaaccaagaacctaaaccaaggtttctttgagagccgccctaagatgtgcggaaacctgttagaagtagctgtactcaaatttgttttgaggcaagatcattgatgagagtcattgtgaaggtacaacatgtaaatcctaaaggcctgaaagaactgcagtggaatcgtccaactatttattgccagttttggttctcctgaaccttatgccaccttaaggggaaaaaaaaatccagtagctggcttgagattccagtgctcacacttgacatggtttccagagaatctggcccc

SEQ ID NO: 12247 - DNA, 749 bp, Homo sapiens
  source 1..749: mol_type = unassigned DNA
tgatgtgaaaatggagattttttctcctatgcctggagaatcctgtgagaatgccaacacttcgttgggcagaagaatgtcagttaattgtgagaagttggtgaagagggaaaagccaagggaattaatttttccatctaattatgacctccttcgccacttacagtatgcaacacattttcctatacctctggtattgatgtctgttcctccttctgtttgagagtcacctctgaggatcataaaaaattgagataagtgatgtaaacttccacatgtgttatatgttttgtttatgttaaaatagcgaatatgccttgtgtagaattagactgcatgttataagtctgacctgttttatcatttacatttgaacttattgaaatgagaagtcatcttcagaagagactttgcacaataacatgtaataaaggtgttggcattaattcttaaatggatttgatgtagttgtatatggtatggtgagtcatggtatctaatatctttgaacaaagaatttacaacaaagaatgatttagagtttaatgtaaattttgtattttatacacaccaatacaaacaagtaattacaaacagatcaatcactttcctctcagtagttatgctgtgcaactttgtaatcatatttaattaatttttttcactaaggtaaaatgttcattaacctaattagcagctattttctagaagctaattaataaaggtaagtgtcaatgatggtattattg

SEQ ID NO: 12248 - DNA, 575 bp, Homo sapiens
  source 1..575: mol_type = unassigned DNA
taggaacagctccggtctacagctcccagcgtgagcgacgcagaagacggtgatttctgcatttccatctgaggatgaatcttcaagtcatgaatgtaaccagcgcacaatccttctctatggagtcggcaaagagcgtgatgaagcaaggcatcagctgaagaagattaccaaagatatcctgaaaattctaaataagaagagcaccacagagacaggggttggggacgaaggacaaaaagccaggaagaacaaacaggagacatttccaacactggagactgtgttcactaaactccagctcctttcatattttgatcaacatcaagtgacatctcagatttctaacaatgtgctagaacaaatcacaagctttgcgtcaggaacatcctatcatctccctttggctcaccacattcagctcatctttgatctcatggagccagcactgaacatcaacggactaattgacttcgcaatacagttactaaatgaactgagtgttgtggaagctgaactgctcctaaaatcctccagcctggcaggaagttatacaacaggactgtgtgtctgca

SEQ ID NO: 12249 - DNA, 568 bp, Homo sapiens
  source 1..568: mol_type = unassigned DNA
ttgaagcttcatggctcacagtggtgcctcatatcttactgtcagcattctaatttctagtttttcttcaaacctcagagttaagcagaagtataattacagtttttaatcattgctgtgtcttatcaaccacggcttttaagaaaatgaaaaatttttcgtttacctttcattgtggtggctggctgtccattcacctcatacggtgtcttcaagttgaaacaggtttcttgtctctaattaagaataagctttgaaactaaggtcggcagggaagtggattttctggtaaagcatgaaaacgaaacatctcccctaccagacaaggatgaatcttcaagtcatgaatgtaaccagcgcacaatccttctctatggagtcggcaaagagcgtgatgaagcaaggcatcagctgaagaagattaccaaagatatcctgaaaattctaaataagaagagcaccacagagacaggggttggggacgaaggacaaaaagccaggaagaacaaacaggagacatttccaacactggagactgtgttcactaaactccagctcctttcatatt

SEQ ID NO: 12250 - DNA, 318 bp, Homo sapiens
  source 1..318: mol_type = unassigned DNA
ttggaccctgcaggctcctttgtcccaaccaacaccaaacaagctctgtcaaacatgctacagcggcgctcaggcgccatgatgcagccgccttctcttcatgcaatcacatcgcagcagcagttgatacagatgaagcttctgcagcagcagcagcaacagcgacttctcaggcaagcccagactcggcctttccaacagatgcagcagccccagcagccccagccccagcagcctccccagccccagcagtcctcgcagtcccagagtcagacccttggtctccaagcaatgcagccccagcagcccttgtttccc

SEQ ID NO: 12251 - DNA, 7561 bp, Homo sapiens
  source 1..7561: mol_type = unassigned DNA
gctgttctccttttcccattcgtcttctgtcacttccttcctggacgcagttttctggacgagtctggttacttttaatccgaccggccgctgagagccactttctcctcctcctcctcctcctccttctcttcctcctccttcttcctcctcctcctcctcttccgagcggcctcggcgcgcgcgaatgcgcggccccgcgccccccccctcgcgcgcgctcccctcgcgcgcgcgcacacacgcacacatcgtctccagctctctgctcgctctgctcgcagtcacagacacttgagcacacgcgtacacccagacatcttcgggctgctattggattgactttgaaggttctgtgtgggtcgccgtggctgcatgtttgaatcaggtggagaagcacttcaacgctggacgaagtaaagattattgttgttattttttttttctctctctctctctcttaagaaaggaaaatatcccaaggactaatctgatcgggtcttccttcatcaggaacgaatgcaggaatttgggaactgagctgtgcaagtgctgaagaaggagatttgtttggaggaaacaggaaagagaaagaaaaggaaggaaaaaatacataatttcagggacgagagagagaagaaaaacggggactatggggagaaaaaagattcagattacgaggattatggatgaacgtaacagacaggtgacatttacaaagaggaaatttgggttgatgaagaaggcttatgagctgagcgtgctgtgtgactgtgagattgcgctgatcatcttcaacagcaccaacaagctgttccagtatgccagcaccgacatggacaaagtgcttctcaagtacacggagtacaacgagccgcatgagagccggacaaactcagacatcgtggagacgttgagaaagaagggccttaatggctgtgacagcccagaccccgatgcggacgattccgtaggtcacagccctgagtctgaggacaagtacaggaaaattaacgaagatattgatctaatgatcagcaggcaaagattgtgtgctgttccacctcccaacttcgagatgccagtctccatcccagtgtccagccacaacagtttggtgtacagcaaccctgtcagctcactgggaaaccccaacctattgccactggctcacccttctctgcagaggaatagtatgtctcctggtgtaacacatcgacctccaagtgcaggtaacacaggtggtctgatgggtggagacctcacgtctggtgcaggcaccagtgcagggaacgggtatggcaatccccgaaactcaccaggtctgctggtctcacctggtaacttgaacaagaatatgcaagcaaaatctcctcccccaatgaatttaggaatgaataaccgtaaaccagatctccgagttcttattccaccaggcagcaagaatacgatgccatcagtgtctgaggatgtcgacctgcttttgaatcaaaggataaataactcccagtcggctcagtcattggctaccccagtggtttccgtagcaactcctactttaccaggacaaggaatgggaggatatccatcagccatttcaacaacatatggtaccgagtactctctgagtagtgcagacctgtcatctctgtctgggtttaacaccgccagcgctcttcaccttggttcagtaactggctggcaacagcaacacctacataacatgccaccatctgccctcagtcagttgggagcttgcactagcactcatttatctcagagttcaaatctctccctgccttctactcaaagcctcaacatcaagtcagaacctgtttctcctcctagagaccgtaccaccaccccttcgagatacccacaacacacgcgccacgaggcggggagatctcctgttgacagcttgagcagctgtagcagttcgtacgacgggagcgaccgagaggatcaccggaacgaattccactcccccattggactcaccagaccttcgccggacgaaagggaaagtccctcagtcaagcgcatgcgactttctgaaggatgggcaacatgatcagattattacttactagtttttttttttttcttgcagtgtgtgtgtgtgctataccttaatggggaaggggggtcgatatgcattatatgtgccgtgtgtggaaaaaaaaaaagtcaggtactctgttttgtaaaagtacttttaaattgcctcagtgatacagtataaagataaacagaaatgctgagataagcttagcacttgagttgtacaacagaacacttgtacaaaatagattttaaggctaacttcttttcactgttgtgctcctttgcaaaatgtatgttacaatagatagtgtcatgttgcaggttcaacgttatttacatgtaaatagacaaaaggaaacatttgccaaaagcggcagatctttactgaaagagagagcagctgttatgcaacatatagaaaaatgtatagatgcttggacagacccggtaatgggtggccattggtaaatgttaggaacacaccaggtcacctgacatcccaagaatgctcacaaacctgcaggcatatcattggcgtatggcactcattaaaaaggatcagagaccattaaaagaggaccatacctattaaaaaaaaatgtggagttggagggctaacatatttaattaaataaataaataaatctgggtctgcatctcttattaaataaaaatataaaaatatgtacattacattttgcttattttcatataaaaggtaagacagagtttgcaaagcatttgtggctttttgtagtttacttaagccaaaatgtgtttttttccccttgatagcttcgctaatattttaaacagtcctgtaaaaaaccaaaaaggactttttgtatagaaagcactaccctaagccatgaagaactccatgctttgctaaccaagataactgttttctctttgtagaagttttgtttttgaaatgtgtatttctaattatataaaatattaagaatcttttaaaaaaatctgtgaaattaacatgcttgtgtatagctttctaatatatataatattatggtaatagcagaagttttgttatcttaatagcgggaggggggtatatttgtgcagttgcacatttgagtaactattttctttctgttttcttttactctgcttacattttataagtttaaggtcagctgtcaaaaggataacctgtggggttagaacatatcacattgcaacaccctaaattgtttttaatacattagcaatctattgggtcaactgacatccattgtatatactagtttctttcatgctatttttattttgttttttgcatttttatcaaatgcagggcccctttctgatctcaccatttcaccatgcatcttggaattcagtaagtgcatatcctaacttgcccatattctaaatcatctggttggttttcagcctagaatttgatacgctttttagaaatatgcccagaatagaaaagctatgttggggcacatgtcctgcaaatatggccctagaaacaagtgatatggaatttacttggtgaataagttataaattcccacagaagaaaaatgtgaaagactgggtgctagacaagaaggaagcaggtaaagggatagttgctttgtcatccgtttttaattattttaactgacccttgacaatcttgtcagcaatataggactgttgaacaatcccggtgtgtcaggacccccaaatgtcacttctgcataaagcatgtatgtcatctattttttcttcaataaagagatttaatagccatttcaagaaatcccataaagaacctctctatgtccctttttttaatttaaaaaaaatgactcttgtctaatattcgtctataagggattaattttcagaccctttaataagtgagtgccataagaaagtcaatatatattgtttaaaagatatttcagtctaggaaagattttccttctcttggaatgtgaagatctgtcgattcatctccaatcatatgcattgacatacacagcaaagaagatataggcagtaatatcaacactgctatatcatgtgtaggacatttcttatccattttttctcttttacttgcatagttgctatgtgtttctcattgtaaaaggctgccgctgggtggcagaagccaagagaccttattaactaggctatatttttcttaacttgatctgaaatccacaattagaccacaatgcacctttggttgtatccataaaggatgctagcctgccttgtactaatgttttatatattaaaaaaaaaaaatctatcaaccatttcatatatatcccactactcaaggtatccatggaacatgaaagaataacatttatgcagaggaaaaacaaaaacatccctgaaaatatacacactcatacacacacacgcacaggggaataaaataagaaaatcattttcctcaccatagacttgatcccatccttacaacccatccttctaacttgatgtgtataaaatatgcaaacatttcacaaatgttctttgtcatttcaaaatactttagtatatcaatatcagtagataccagtgggtgggaaagggtcattacatgaaaatatgaagaaatagccatattagttttttaacctgcaatttgcctcagcaacaaagaaaaagtgaatttttaatgctgaagataaagtaagctaaagtaccagcagaagccttggctatttatagcagttctgacaatagttttataagaacatgaagagaacagaatcacttgaaaatggatgccagtcatctcttgttcccactactgaattcttataaagtggtggcaagatagggaagggataatctgagaatttttaaaagatgatttaatgagaagaagcacaattttgattttgatgagtcactttctgtaaacaatcttggtctatctttacccttataccttatctgtaatttaccatttattgtatttgcaaagctagtatggtttttaatcacagtaaatcctttgtattccagactttagggcagagccctgagggagtattattttacataacccgtcctagagtaacattttaggcaacattcttcattgcaagtaaaagatccataagtggcattttacacggctgcgagtattgttatatctaatcctattttaaaagatttttggtaatatgaagcttgaatactggtaacagtgatgcaatatacgcaagctgcacaacctgtatattgtatgcattgctgcgtggaggctgtttatttcaacctttttaaaaattgtgttttttagtaaaatggcttattttttcccaaaggtggaatttagcattttgtaatgatgaatataaaaatacctgtcatccccagatcatttaaaagttaactaaagtgagaatgaaaaaacaaaattccaagacactttttaaaagaatgtctgccctcacacacttttatggatttgtttttcttacatacccatcttttaacttagagatagcattttttgccctctttattttgttgtttgtttctccagagagtaaacgctttgtagttctttctttaaaaaacattttttttaaagaagaagaagccacttgaaccctcaataaaggctgttgcctaagcatggcatacttcatctgttctcatttgtgccatctgccgtgatgtcgtcacttttatggcgttaatttcctgccactacagatcttttgaagattgctggaatactggtgtctgttagaatgcttcagactacagatgtaattaaaggcttttcttaatatgttttaaccaaagatgtggagcaatccaagccacatatcttctacatcaaatttttccattttggttattttcataatctggtattgcattttgccttccctgttcatacctcaaattgattcatacctcagtttaattcagagaggtcagttaagtgacggattctgttgtggtttgaatgcagtaccagtgttctcttcgagcaaagtagacctgggtcactgtaggcataggacttggattgcttcagatggtttgctgtatcatttttcttctttttcttttcctggggacttgtttccattaaatgagagtaattaaaatcgcttgtaaatgagggcatacaagcatttgcaacaaatattcaaatagaggctcacagcggcataagctggactttgtcgccactagatgacaagatgttataactaagttaaaccacatctgtgtatctcaagggacttaattcagctgtctgtagtgaataaaagtgggaaattttcaaaagtttctcctgctggaaataaggtataatttgtattttgcagacaattcagtaaagttactggctttcttagtgatgcagtgtccgtggtgcatttttttaaattaatgttttgctgtttaaatttattcaattttattgtgttttttaaaaagcagcttatgccacaagcacaaatgagctttctcagttttcaactcaaaatattatatgaaaagatggatatgtgtgtctgtgtgggaggggtgtgaattggatgacggttcttagggtattacagaattcagccagtggtggaagtctaaggttcttattgaatggttcaacttctttatcaaagaagttccatgaagatctttgataacctgtttaaatgtacagaatttttcaaaagccactgtgaaaagcagtaccataagttattttttaactaaaatctgtagaaagtgtttccaaaagagttccttttttcttcttcgaagtaatttctaaaagttgaaaacataggcttataaatctgaataaattagtgaattcatacattttagagactatcaaatatatccattattaacattcaataataatctctaaaggggaatgtccttaaaaagattgatagaaagattaatttaaaaactgaaaaggaaaacaagacaccaccagttagccagctggagaacttggacttttgcattagtagtgatatctgctccaaaaagaatgcagttcgaggaaatgttgcatgtggcttcaaaatagcagtgctttctgctttgttctcttgtattcattttcagcaaacatgtattaagcaattattatatgtaactcatgtggtgattccaggatgaatgaagttgtagccctttctcttaggaaacttataaactaataggagataaaaggcattctcagggaagtctacaaagtgctatgagggagccactttggccatcctggggcagagcagaccagaggctcagagcatggacacttcctcatccacccagcagaagcctttcacttgattttgaaggtgggcaggattgagaaaggcccagaaggggatgagttcaaagctgtttgtgggcatgtgacccctgcagtcacatatggccctagcttgtgtttcgtttagtgttctgctatcattatcctgataatatcctgataataaaattatccttaataatttta

SEQ ID NO: 12252 - DNA, 6192 bp, Homo sapiens
  source 1..6192: mol_type = unassigned DNA
caaactggggggtttctcttcaaagccagctggtctggctttattctgcaggaatttttttacctgtcagggtttggacaacaaagccctcagcaggtgctgacgggtacaacttcctggagaagcagaaaggcactggtgccaaagaagagttgcaaactgtgaagtaacttctatgaagagatgaagtaaagaacggaaggcaaatgattgtggcagtaaagaagtgtatgtgcaggaacgaatgcaggaatttgggaactgagctgtgcaagtgctgaagaaggagatttgtttggaggaaacaggaaagagaaagaaaaggaaggaaaaaatacataatttcagggacgagagagagaagaaaaacggggactatggggagaaaaaagattcagattacgaggattatggatgaacgtaacagacaggtgacatttacaaagaggaaatttgggttgatgaagaaggcttatgagctgagcgtgctgtgtgactgtgagattgcgctgatcatcttcaacagcaccaacaagctgttccagtatgccagcaccgacatggacaaagtgcttctcaagtacacggagtacaacgagccgcatgagagccggacaaactcagacatcgtggagacgttgagaaagaagggccttaatggctgtgacagcccagaccccgatgcggacgattccgcattgaacaagaaagaaaacaaaggctgtgaaagccccgatcccgactcctcttatgcactcaccccacgcactgaagaaaaatacaaaaaaattaatgaagaatttgataatatgatcaagagtcataaaattcctgctgttccacctcccaacttcgagatgccagtctccatcccagtgtccagccacaacagtttggtgtacagcaaccctgtcagctcactgggaaaccccaacctattgccactggctcacccttctctgcagaggaatagtatgtctcctggtgtaacacatcgacctccaagtgcaggtaacacaggtggtctgatgggtggagacctcacgtctggtgcaggcaccagtgcagggaacgggtatggcaatccccgaaactcaccaggtctgctggtctcacctggtaacttgaacaagaatatgcaagcaaaatctcctcccccaatgaatttaggaatgaataaccgtaaaccagatctccgagttcttattccaccaggcagcaagaatacgatgccatcagtgaatcaaaggataaataactcccagtcggctcagtcattggctaccccagtggtttccgtagcaactcctactttaccaggacaaggaatgggaggatatccatcagccatttcaacaacatatggtaccgagtactctctgagtagtgcagacctgtcatctctgtctgggtttaacaccgccagcgctcttcaccttggttcagtaactggctggcaacagcaacacctacataacatgccaccatctgccctcagtcagttgggagcttgcactagcactcatttatctcagagttcaaatctctccctgccttctactcaaagcctcaacatcaagtcagaacctgtttctcctcctagagaccgtaccaccaccccttcgagatacccacaacacacgcgccacgaggcggggagatctcctgttgacagcttgagcagctgtagcagttcgtacgacgggagcgaccgagaggatcaccggaacgaattccactcccccattggactcaccagaccttcgccggacgaaagggaaagtccctcagtcaagcgcatgcgactttctgaaggatgggcaacatgatcagattattacttactagtttttttttttttcttgcagtgtgtgtgtgtgctataccttaatggggaaggggggtcgatatgcattatatgtgccgtgtgtggaaaaaaaaaaagtcaggtactctgttttgtaaaagtacttttaaattgcctcagtgatacagtataaagataaacagaaatgctgagataagcttagcacttgagttgtacaacagaacacttgtacaaaatagattttaaggctaacttcttttcactgttgtgctcctttgcaaaatgtatgttacaatagatagtgtcatgttgcaggttcaacgttatttacatgtaaatagacaaaaggaaacatttgccaaaagcggcagatctttactgaaagagagagcagctgttatgcaacatatagaaaaatgtatagatgcttggacagacccggtaatgggtggccattggtaaatgttaggaacacaccaggtcacctgacatcccaagaatgctcacaaacctgcaggcatatcattggcgtatggcactcattaaaaaggatcagagaccattaaaagaggaccatacctattaaaaaaaaatgtggagttggagggctaacatatttaattaaataaataaataaatctgggtctgcatctcttattaaataaaaatataaaaatatgtacattacattttgcttattttcatataaaaggtaagacagagtttgcaaagcatttgtggctttttgtagtttacttaagccaaaatgtgtttttttccccttgatagcttcgctaatattttaaacagtcctgtaaaaaaccaaaaaggactttttgtatagaaagcactaccctaagccatgaagaactccatgctttgctaaccaagataactgttttctctttgtagaagttttgtttttgaaatgtgtatttctaattatataaaatattaagaatcttttaaaaaaatctgtgaaattaacatgcttgtgtatagctttctaatatatataatattatggtaatagcagaagttttgttatcttaatagcgggaggggggtatatttgtgcagttgcacatttgagtaactattttctttctgttttcttttactctgcttacattttataagtttaaggtcagctgtcaaaaggataacctgtggggttagaacatatcacattgcaacaccctaaattgtttttaatacattagcaatctattgggtcaactgacatccattgtatatactagtttctttcatgctatttttattttgttttttgcatttttatcaaatgcagggcccctttctgatctcaccatttcaccatgcatcttggaattcagtaagtgcatatcctaacttgcccatattctaaatcatctggttggttttcagcctagaatttgatacgctttttagaaatatgcccagaatagaaaagctatgttggggcacatgtcctgcaaatatggccctagaaacaagtgatatggaatttacttggtgaataagttataaattcccacagaagaaaaatgtgaaagactgggtgctagacaagaaggaagcaggtaaagggatagttgctttgtcatccgtttttaattattttaactgacccttgacaatcttgtcagcaatataggactgttgaacaatcccggtgtgtcaggacccccaaatgtcacttctgcataaagcatgtatgtcatctattttttcttcaataaagagatttaatagccatttcaagaaatcccataaagaacctctctatgtccctttttttaatttaaaaaaaatgactcttgtctaatattcgtctataagggattaattttcagaccctttaataagtgagtgccataagaaagtcaatatatattgtttaaaagatatttcagtctaggaaagattttccttctcttggaatgtgaagatctgtcgattcatctccaatcatatgcattgacatacacagcaaagaagatataggcagtaatatcaacactgctatatcatgtgtaggacatttcttatccattttttctcttttacttgcatagttgctatgtgtttctcattgtaaaaggctgccgctgggtggcagaagccaagagaccttattaactaggctatatttttcttaacttgatctgaaatccacaattagaccacaatgcacctttggttgtatccataaaggatgctagcctgccttgtactaatgttttatatattaaaaaaaaaaaatctatcaaccatttcatatatatcccactactcaaggtatccatggaacatgaaagaataacatttatgcagaggaaaaacaaaaacatccctgaaaatatacacactcatacacacacacgcacaggggaataaaataagaaaatcattttcctcaccatagacttgatcccatccttacaacccatccttctaacttgatgtgtataaaatatgcaaacatttcacaaatgttctttgtcatttcaaaatactttagtatatcaatatcagtagataccagtgggtgggaaagggtcattacatgaaaatatgaagaaatagccatattagttttttaacctgcaatttgcctcagcaacaaagaaaaagtgaatttttaatgctgaagataaagtaagctaaagtaccagcagaagccttggctatttatagcagttctgacaatagttttataagaacatgaagagaacagaatcacttgaaaatggatgccagtcatctcttgttcccactactgaattcttataaagtggtggcaagatagggaagggataatctgagaatttttaaaagatgatttaatgagaagaagcacaattttgattttgatgagtcactttctgtaaacaatcttggtctatctttacccttataccttatctgtaatttaccatttattgtatttgcaaagctagtatggtttttaatcacagtaaatcctttgtattccagactttagggcagagccctgagggagtattattttacataacccgtcctagagtaacattttaggcaacattcttcattgcaagtaaaagatccataagtggcattttacacggctgcgagtattgttatatctaatcctattttaaaagatttttggtaatatgaagcttgaatactggtaacagtgatgcaatatacgcaagctgcacaacctgtatattgtatgcattgctgcgtggaggctgtttatttcaacctttttaaaaattgtgttttttagtaaaatggcttattttttcccaaaggtggaatttagcattttgtaatgatgaatataaaaatacctgtcatccccagatcatttaaaagttaactaaagtgagaatgaaaaaacaaaattccaagacactttttaaaagaatgtctgccctcacacacttttatggatttgtttttcttacatacccatcttttaacttagagatagcattttttgccctctttattttgttgtttgtttctccagagagtaaacgctttgtagttctttctttaaaaaacattttttttaaagaagaagaagccacttgaaccctcaataaaggctgttgcctaagcatggcatacttcatctgttctcatttgtgccatctgccgtgatgtcgtcacttttatggcgttaatttcctgccactacagatcttttgaagattgctggaatactggtgtctgttagaatgcttcagactacagatgtaattaaaggcttttcttaatatgttttaaccaaagatgtggagcaatccaagccacatatcttctacatcaaatttttccattttggttattttcataatctggtattgcattttgccttccctgttcatacctcaaattgattcatacctcagtttaattcagagaggtcagttaagtgacggattctgttgtggtttgaatgcagtaccagtgttctcttcgagcaaagtagacctgggtcactgtaggcataggacttggattgcttcagatggtttgctgtatcatttttcttctttttcttttcctggggacttgtttccattaaatgagagtaattaaaatcgcttgtaaatgagggcatacaagcatttgcaacaaatattcaaatagaggctcacagcggcataagctggactttgtcgccactagatgacaagatgttataactaagttaaaccacatctgtgtatctcaagggacttaattcagctgtctgtagtgaataaaagtgggaaattttcaaaagtttctcctgctggaaataaggtataatttgtattttgcagacaattcagtaaagttactggctttcttagtga

SEQ ID NO: 12253 - DNA, 6336 bp, Homo sapiens
  source 1..6336: mol_type = unassigned DNA
agcaattctgtgttcttttgccagcactgacaaaggtctggttgtcagtgatacctttacagctaaatttactccagagtgacagaaacaggtgcacctcggcctgccagacacttgtgcagagagatcacgcatctcacggcttgacgatcaagggggcaaagcctcggtcttcatagaaaaggagaggaggcaaacgcagcccaaactggggggtttctcttcaaagccagctggtctggctttattctgcaggaatttttttacctgtcagggtttggacaacaaagccctcagcaggtgctgacgggtacaacttcctggagaagcagaaaggcactggtgccaaagaagagttgcaaactgtgaagtaacttctatgaagagatgaagtaaagaacggaaggcaaatgattgtggcagtaaagaagtgtatgtgcaggaacgaatgcaggaatttgggaactgagctgtgcaagtgctgaagaaggagatttgtttggaggaaacaggaaagagaaagaaaaggaaggaaaaaatacataatttcagggacgagagagagaagaaaaacggggactatggggagaaaaaagattcagattacgaggattatggatgaacgtaacagacaggtgacatttacaaagaggaaatttgggttgatgaagaaggcttatgagctgagcgtgctgtgtgactgtgagattgcgctgatcatcttcaacagcaccaacaagctgttccagtatgccagcaccgacatggacaaagtgcttctcaagtacacggagtacaacgagccgcatgagagccggacaaactcagacatcgtggaggcattgaacaagaaagaaaacaaaggctgtgaaagccccgatcccgactcctcttatgcactcaccccacgcactgaagaaaaatacaaaaaaattaatgaagaatttgataatatgatcaagagtcataaaattcctgctgttccacctcccaacttcgagatgccagtctccatcccagtgtccagccacaacagtttggtgtacagcaaccctgtcagctcactgggaaaccccaacctattgccactggctcacccttctctgcagaggaatagtatgtctcctggtgtaacacatcgacctccaagtgcaggtaacacaggtggtctgatgggtggagacctcacgtctggtgcaggcaccagtgcagggaacgggtatggcaatccccgaaactcaccaggtctgctggtctcacctggtaacttgaacaagaatatgcaagcaaaatctcctcccccaatgaatttaggaatgaataaccgtaaaccagatctccgagttcttattccaccaggcagcaagaatacgatgccatcagtgaatcaaaggataaataactcccagtcggctcagtcattggctaccccagtggtttccgtagcaactcctactttaccaggacaaggaatgggaggatatccatcagccatttcaacaacatatggtaccgagtactctctgagtagtgcagacctgtcatctctgtctgggtttaacaccgccagcgctcttcaccttggttcagtaactggctggcaacagcaacacctacataacatgccaccatctgccctcagtcagttgggagcttgcactagcactcatttatctcagagttcaaatctctccctgccttctactcaaagcctcaacatcaagtcagaacctgtttctcctcctagagaccgtaccaccaccccttcgagatacccacaacacacgcgccacgaggcggggagatctcctgttgacagcttgagcagctgtagcagttcgtacgacgggagcgaccgagaggatcaccggaacgaattccactcccccattggactcaccagaccttcgccggacgaaagggaaagtccctcagtcaagcgcatgcgactttctgaaggatgggcaacatgatcagattattacttactagtttttttttttttcttgcagtgtgtgtgtgtgctataccttaatggggaaggggggtcgatatgcattatatgtgccgtgtgtggaaaaaaaaaaagtcaggtactctgttttgtaaaagtacttttaaattgcctcagtgatacagtataaagataaacagaaatgctgagataagcttagcacttgagttgtacaacagaacacttgtacaaaatagattttaaggctaacttcttttcactgttgtgctcctttgcaaaatgtatgttacaatagatagtgtcatgttgcaggttcaacgttatttacatgtaaatagacaaaaggaaacatttgccaaaagcggcagatctttactgaaagagagagcagctgttatgcaacatatagaaaaatgtatagatgcttggacagacccggtaatgggtggccattggtaaatgttaggaacacaccaggtcacctgacatcccaagaatgctcacaaacctgcaggcatatcattggcgtatggcactcattaaaaaggatcagagaccattaaaagaggaccatacctattaaaaaaaaatgtggagttggagggctaacatatttaattaaataaataaataaatctgggtctgcatctcttattaaataaaaatataaaaatatgtacattacattttgcttattttcatataaaaggtaagacagagtttgcaaagcatttgtggctttttgtagtttacttaagccaaaatgtgtttttttccccttgatagcttcgctaatattttaaacagtcctgtaaaaaaccaaaaaggactttttgtatagaaagcactaccctaagccatgaagaactccatgctttgctaaccaagataactgttttctctttgtagaagttttgtttttgaaatgtgtatttctaattatataaaatattaagaatcttttaaaaaaatctgtgaaattaacatgcttgtgtatagctttctaatatatataatattatggtaatagcagaagttttgttatcttaatagcgggaggggggtatatttgtgcagttgcacatttgagtaactattttctttctgttttcttttactctgcttacattttataagtttaaggtcagctgtcaaaaggataacctgtggggttagaacatatcacattgcaacaccctaaattgtttttaatacattagcaatctattgggtcaactgacatccattgtatatactagtttctttcatgctatttttattttgttttttgcatttttatcaaatgcagggcccctttctgatctcaccatttcaccatgcatcttggaattcagtaagtgcatatcctaacttgcccatattctaaatcatctggttggttttcagcctagaatttgatacgctttttagaaatatgcccagaatagaaaagctatgttggggcacatgtcctgcaaatatggccctagaaacaagtgatatggaatttacttggtgaataagttataaattcccacagaagaaaaatgtgaaagactgggtgctagacaagaaggaagcaggtaaagggatagttgctttgtcatccgtttttaattattttaactgacccttgacaatcttgtcagcaatataggactgttgaacaatcccggtgtgtcaggacccccaaatgtcacttctgcataaagcatgtatgtcatctattttttcttcaataaagagatttaatagccatttcaagaaatcccataaagaacctctctatgtccctttttttaatttaaaaaaaatgactcttgtctaatattcgtctataagggattaattttcagaccctttaataagtgagtgccataagaaagtcaatatatattgtttaaaagatatttcagtctaggaaagattttccttctcttggaatgtgaagatctgtcgattcatctccaatcatatgcattgacatacacagcaaagaagatataggcagtaatatcaacactgctatatcatgtgtaggacatttcttatccattttttctcttttacttgcatagttgctatgtgtttctcattgtaaaaggctgccgctgggtggcagaagccaagagaccttattaactaggctatatttttcttaacttgatctgaaatccacaattagaccacaatgcacctttggttgtatccataaaggatgctagcctgccttgtactaatgttttatatattaaaaaaaaaaaatctatcaaccatttcatatatatcccactactcaaggtatccatggaacatgaaagaataacatttatgcagaggaaaaacaaaaacatccctgaaaatatacacactcatacacacacacgcacaggggaataaaataagaaaatcattttcctcaccatagacttgatcccatccttacaacccatccttctaacttgatgtgtataaaatatgcaaacatttcacaaatgttctttgtcatttcaaaatactttagtatatcaatatcagtagataccagtgggtgggaaagggtcattacatgaaaatatgaagaaatagccatattagttttttaacctgcaatttgcctcagcaacaaagaaaaagtgaatttttaatgctgaagataaagtaagctaaagtaccagcagaagccttggctatttatagcagttctgacaatagttttataagaacatgaagagaacagaatcacttgaaaatggatgccagtcatctcttgttcccactactgaattcttataaagtggtggcaagatagggaagggataatctgagaatttttaaaagatgatttaatgagaagaagcacaattttgattttgatgagtcactttctgtaaacaatcttggtctatctttacccttataccttatctgtaatttaccatttattgtatttgcaaagctagtatggtttttaatcacagtaaatcctttgtattccagactttagggcagagccctgagggagtattattttacataacccgtcctagagtaacattttaggcaacattcttcattgcaagtaaaagatccataagtggcattttacacggctgcgagtattgttatatctaatcctattttaaaagatttttggtaatatgaagcttgaatactggtaacagtgatgcaatatacgcaagctgcacaacctgtatattgtatgcattgctgcgtggaggctgtttatttcaacctttttaaaaattgtgttttttagtaaaatggcttattttttcccaaaggtggaatttagcattttgtaatgatgaatataaaaatacctgtcatccccagatcatttaaaagttaactaaagtgagaatgaaaaaacaaaattccaagacactttttaaaagaatgtctgccctcacacacttttatggatttgtttttcttacatacccatcttttaacttagagatagcattttttgccctctttattttgttgtttgtttctccagagagtaaacgctttgtagttctttctttaaaaaacattttttttaaagaagaagaagccacttgaaccctcaataaaggctgttgcctaagcatggcatacttcatctgttctcatttgtgccatctgccgtgatgtcgtcacttttatggcgttaatttcctgccactacagatcttttgaagattgctggaatactggtgtctgttagaatgcttcagactacagatgtaattaaaggcttttcttaatatgttttaaccaaagatgtggagcaatccaagccacatatcttctacatcaaatttttccattttggttattttcataatctggtattgcattttgccttccctgttcatacctcaaattgattcatacctcagtttaattcagagaggtcagttaagtgacggattctgttgtggtttgaatgcagtaccagtgttctcttcgagcaaagtagacctgggtcactgtaggcataggacttggattgcttcagatggtttgctgtatcatttttcttctttttcttttcctggggacttgtttccattaaatgagagtaattaaaatcgcttgtaaatgagggcatacaagcatttgcaacaaatattcaaatagaggctcacagcggcataagctggactttgtcgccactagatgacaagatgttataactaagttaaaccacatctgtgtatctcaagggacttaattcagctgtctgtagtgaataaaagtgggaaattttcaaaagtttctcctgctggaaataaggtataatttgtattttgcagacaattcagtaaagttactggctttcttagtga

SEQ ID NO: 12254 - DNA, 6088 bp, Homo sapiens
  source 1..6088: mol_type = unassigned DNA
gcagtcacagacacttgagcacacgcgtacacccagacatcttcgggctgctattggattgactttgaaggttctgtgtgggtcgccgtggctgcatgtttgaatcaggtggagaagcacttcaacgctggacgaagtaaagattattgttgttattttttttttctctctctctctctcttaagaaaggaaaatatcccaaggactaatctgatcgggtcttccttcatgaacgaatgcaggaatttgggaactgagctgtgcaagtgctgaagaaggagatttgtttggaggaaacaggaaagagaaagaaaaggaaggaaaaaatacataatttcagggacgagagagagaagaaaaacggggactatggggagaaaaaagattcagattacgaggattatggatgaacgtaacagacaggtgacatttacaaagaggaaatttgggttgatgaagaaggcttatgagctgagcgtgctgtgtgactgtgagattgcgctgatcatcttcaacagcaccaacaagctgttccagtatgccagcaccgacatggacaaagtgcttctcaagtacacggagtacaacgagccgcatgagagccggacaaactcagacatcgtggagacgttgagaaagaagggccttaatggctgtgacagcccagaccccgatgcggacgattccgtaggtcacagccctgagtctgaggacaagtacaggaaaattaacgaagatattgatctaatgatcagcaggcaaagattgtgtgctgttccacctcccaacttcgagatgccagtctccatcccagtgtccagccacaacagtttggtgtacagcaaccctgtcagctcactgggaaaccccaacctattgccactggctcacccttctctgcagaggaatagtatgtctcctggtgtaacacatcgacctccaagtgcaggtggtctgatgggtggagacctcacgtctggtgcaggcaccagtgcagggaacgggtatggcaatccccgaaactcaccaggtctgctggtctcacctggtaacttgaacaagaatatgcaagcaaaatctcctcccccaatgaatttaggaatgaataaccgtaaaccagatctccgagttcttattccaccaggcagcaagaatacgatgccatcagtgaatcaaaggataaataactcccagtcggctcagtcattggctaccccagtggtttccgtagcaactcctactttaccaggacaaggaatgggaggatatccatcagccatttcaacaacatatggtaccgagtactctctgagtagtgcagacctgtcatctctgtctgggtttaacaccgccagcgctcttcaccttggttcagtaactggctggcaacagcaacacctacataacatgccaccatctgccctcagtcagttgggagcttgcactagcactcatttatctcagagttcaaatctctccctgccttctactcaaagcctcaacatcaagtcagaacctgtttctcctcctagagaccgtaccaccaccccttcgagatacccacaacacacgcgccacgaggcggggagatctcctgttgacagcttgagcagctgtagcagttcgtacgacgggagcgaccgagaggatcaccggaacgaattccactcccccattggactcaccagaccttcgccggacgaaagggaaagtccctcagtcaagcgcatgcgactttctgaaggatgggcaacatgatcagattattacttactagtttttttttttttcttgcagtgtgtgtgtgtgctataccttaatggggaaggggggtcgatatgcattatatgtgccgtgtgtggaaaaaaaaaaagtcaggtactctgttttgtaaaagtacttttaaattgcctcagtgatacagtataaagataaacagaaatgctgagataagcttagcacttgagttgtacaacagaacacttgtacaaaatagattttaaggctaacttcttttcactgttgtgctcctttgcaaaatgtatgttacaatagatagtgtcatgttgcaggttcaacgttatttacatgtaaatagacaaaaggaaacatttgccaaaagcggcagatctttactgaaagagagagcagctgttatgcaacatatagaaaaatgtatagatgcttggacagacccggtaatgggtggccattggtaaatgttaggaacacaccaggtcacctgacatcccaagaatgctcacaaacctgcaggcatatcattggcgtatggcactcattaaaaaggatcagagaccattaaaagaggaccatacctattaaaaaaaaatgtggagttggagggctaacatatttaattaaataaataaataaatctgggtctgcatctcttattaaataaaaatataaaaatatgtacattacattttgcttattttcatataaaaggtaagacagagtttgcaaagcatttgtggctttttgtagtttacttaagccaaaatgtgtttttttccccttgatagcttcgctaatattttaaacagtcctgtaaaaaaccaaaaaggactttttgtatagaaagcactaccctaagccatgaagaactccatgctttgctaaccaagataactgttttctctttgtagaagttttgtttttgaaatgtgtatttctaattatataaaatattaagaatcttttaaaaaaatctgtgaaattaacatgcttgtgtatagctttctaatatatataatattatggtaatagcagaagttttgttatcttaatagcgggaggggggtatatttgtgcagttgcacatttgagtaactattttctttctgttttcttttactctgcttacattttataagtttaaggtcagctgtcaaaaggataacctgtggggttagaacatatcacattgcaacaccctaaattgtttttaatacattagcaatctattgggtcaactgacatccattgtatatactagtttctttcatgctatttttattttgttttttgcatttttatcaaatgcagggcccctttctgatctcaccatttcaccatgcatcttggaattcagtaagtgcatatcctaacttgcccatattctaaatcatctggttggttttcagcctagaatttgatacgctttttagaaatatgcccagaatagaaaagctatgttggggcacatgtcctgcaaatatggccctagaaacaagtgatatggaatttacttggtgaataagttataaattcccacagaagaaaaatgtgaaagactgggtgctagacaagaaggaagcaggtaaagggatagttgctttgtcatccgtttttaattattttaactgacccttgacaatcttgtcagcaatataggactgttgaacaatcccggtgtgtcaggacccccaaatgtcacttctgcataaagcatgtatgtcatctattttttcttcaataaagagatttaatagccatttcaagaaatcccataaagaacctctctatgtccctttttttaatttaaaaaaaatgactcttgtctaatattcgtctataagggattaattttcagaccctttaataagtgagtgccataagaaagtcaatatatattgtttaaaagatatttcagtctaggaaagattttccttctcttggaatgtgaagatctgtcgattcatctccaatcatatgcattgacatacacagcaaagaagatataggcagtaatatcaacactgctatatcatgtgtaggacatttcttatccattttttctcttttacttgcatagttgctatgtgtttctcattgtaaaaggctgccgctgggtggcagaagccaagagaccttattaactaggctatatttttcttaacttgatctgaaatccacaattagaccacaatgcacctttggttgtatccataaaggatgctagcctgccttgtactaatgttttatatattaaaaaaaaaaaatctatcaaccatttcatatatatcccactactcaaggtatccatggaacatgaaagaataacatttatgcagaggaaaaacaaaaacatccctgaaaatatacacactcatacacacacacgcacaggggaataaaataagaaaatcattttcctcaccatagacttgatcccatccttacaacccatccttctaacttgatgtgtataaaatatgcaaacatttcacaaatgttctttgtcatttcaaaatactttagtatatcaatatcagtagataccagtgggtgggaaagggtcattacatgaaaatatgaagaaatagccatattagttttttaacctgcaatttgcctcagcaacaaagaaaaagtgaatttttaatgctgaagataaagtaagctaaagtaccagcagaagccttggctatttatagcagttctgacaatagttttataagaacatgaagagaacagaatcacttgaaaatggatgccagtcatctcttgttcccactactgaattcttataaagtggtggcaagatagggaagggataatctgagaatttttaaaagatgatttaatgagaagaagcacaattttgattttgatgagtcactttctgtaaacaatcttggtctatctttacccttataccttatctgtaatttaccatttattgtatttgcaaagctagtatggtttttaatcacagtaaatcctttgtattccagactttagggcagagccctgagggagtattattttacataacccgtcctagagtaacattttaggcaacattcttcattgcaagtaaaagatccataagtggcattttacacggctgcgagtattgttatatctaatcctattttaaaagatttttggtaatatgaagcttgaatactggtaacagtgatgcaatatacgcaagctgcacaacctgtatattgtatgcattgctgcgtggaggctgtttatttcaacctttttaaaaattgtgttttttagtaaaatggcttattttttcccaaaggtggaatttagcattttgtaatgatgaatataaaaatacctgtcatccccagatcatttaaaagttaactaaagtgagaatgaaaaaacaaaattccaagacactttttaaaagaatgtctgccctcacacacttttatggatttgtttttcttacatacccatcttttaacttagagatagcattttttgccctctttattttgttgtttgtttctccagagagtaaacgctttgtagttctttctttaaaaaacattttttttaaagaagaagaagccacttgaaccctcaataaaggctgttgcctaagcatggcatacttcatctgttctcatttgtgccatctgccgtgatgtcgtcacttttatggcgttaatttcctgccactacagatcttttgaagattgctggaatactggtgtctgttagaatgcttcagactacagatgtaattaaaggcttttcttaatatgttttaaccaaagatgtggagcaatccaagccacatatcttctacatcaaatttttccattttggttattttcataatctggtattgcattttgccttccctgttcatacctcaaattgattcatacctcagtttaattcagagaggtcagttaagtgacggattctgttgtggtttgaatgcagtaccagtgttctcttcgagcaaagtagacctgggtcactgtaggcataggacttggattgcttcagatggtttgctgtatcatttttcttctttttcttttcctggggacttgtttccattaaatgagagtaattaaaatcgcttgtaaatgagggcatacaagcatttgcaacaaatattcaaatagaggctcacagcggcataagctggactttgtcgccactagatgacaagatgttataactaagttaaaccacatctgtgtatctcaagggacttaattcagctgtctgtagtgaataaaagtgggaaattttcaaaagtttctcctgctggaaataaggtataatttgtattttgcag

SEQ ID NO: 12255 - DNA, 5936 bp, Homo sapiens
  source 1..5936: mol_type = unassigned DNA
gaaactgatgatttctccagctcgcgaggaaagagtcaacggtttgggattgtgggggagagagagacggagagaaaaaggcagcgcgaagcaaagaaaggaaaatatcccaaggactaatctgatcgggtcttccttcatgaacgaatgcaggaatttgggaactgagctgtgcaagtgctgaagaaggagatttgtttggaggaaacaggaaagagaaagaaaaggaaggaaaaaatacataatttcagggacgagagagagaagaaaaacggggactatggggagaaaaaagattcagattacgaggattatggatgaacgtaacagacaggtgacatttacaaagaggaaatttgggttgatgaagaaggcttatgagctgagcgtgctgtgtgactgtgagattgcgctgatcatcttcaacagcaccaacaagctgttccagtatgccagcaccgacatggacaaagtgcttctcaagtacacggagtacaacgagccgcatgagagccggacaaactcagacatcgtggagacgttgagaaagaagggccttaatggctgtgacagcccagaccccgatgcggacgattccgtaggtcacagccctgagtctgaggacaagtacaggaaaattaacgaagatattgatctaatgatcagcaggcaaagattgtgtgctgttccacctcccaacttcgagatgccagtctccatcccagtgtccagccacaacagtttggtgtacagcaaccctgtcagctcactgggaaaccccaacctattgccactggctcacccttctctgcagaggaatagtatgtctcctggtgtaacacatcgacctccaagtgcaggtaacacaggtggtctgatgggtggagacctcacgtctggtgcaggcaccagtgcagggaacgggtatggcaatccccgaaactcaccaggtctgctggtctcacctggtaacttgaacaagaatatgcaagcaaaatctcctcccccaatgaatttaggaatgaataaccgtaaaccagatctccgagttcttattccaccaggcagcaagaatacgatgccatcagtgtctgaggatgtcgacctgcttttgaatcaaaggataaataactcccagtcggctcagtcattggctaccccagtggtttccgtagcaactcctactttaccaggacaaggaatgggaggatatccatcagccatttcaacaacatatggtaccgagtactctctgagtagtgcagacctgtcatctctgtctgggtttaacaccgccagcgctcttcaccttggttcagtaactggctggcaacagcaacacctacataacatgccaccatctgccctcagtcagttgggagaccgtaccaccaccccttcgagatacccacaacacacgcgccacgaggcggggagatctcctgttgacagcttgagcagctgtagcagttcgtacgacgggagcgaccgagaggatcaccggaacgaattccactcccccattggactcaccagaccttcgccggacgaaagggaaagtccctcagtcaagcgcatgcgactttctgaaggatgggcaacatgatcagattattacttactagtttttttttttttcttgcagtgtgtgtgtgtgctataccttaatggggaaggggggtcgatatgcattatatgtgccgtgtgtggaaaaaaaaaaagtcaggtactctgttttgtaaaagtacttttaaattgcctcagtgatacagtataaagataaacagaaatgctgagataagcttagcacttgagttgtacaacagaacacttgtacaaaatagattttaaggctaacttcttttcactgttgtgctcctttgcaaaatgtatgttacaatagatagtgtcatgttgcaggttcaacgttatttacatgtaaatagacaaaaggaaacatttgccaaaagcggcagatctttactgaaagagagagcagctgttatgcaacatatagaaaaatgtatagatgcttggacagacccggtaatgggtggccattggtaaatgttaggaacacaccaggtcacctgacatcccaagaatgctcacaaacctgcaggcatatcattggcgtatggcactcattaaaaaggatcagagaccattaaaagaggaccatacctattaaaaaaaaatgtggagttggagggctaacatatttaattaaataaataaataaatctgggtctgcatctcttattaaataaaaatataaaaatatgtacattacattttgcttattttcatataaaaggtaagacagagtttgcaaagcatttgtggctttttgtagtttacttaagccaaaatgtgtttttttccccttgatagcttcgctaatattttaaacagtcctgtaaaaaaccaaaaaggactttttgtatagaaagcactaccctaagccatgaagaactccatgctttgctaaccaagataactgttttctctttgtagaagttttgtttttgaaatgtgtatttctaattatataaaatattaagaatcttttaaaaaaatctgtgaaattaacatgcttgtgtatagctttctaatatatataatattatggtaatagcagaagttttgttatcttaatagcgggaggggggtatatttgtgcagttgcacatttgagtaactattttctttctgttttcttttactctgcttacattttataagtttaaggtcagctgtcaaaaggataacctgtggggttagaacatatcacattgcaacaccctaaattgtttttaatacattagcaatctattgggtcaactgacatccattgtatatactagtttctttcatgctatttttattttgttttttgcatttttatcaaatgcagggcccctttctgatctcaccatttcaccatgcatcttggaattcagtaagtgcatatcctaacttgcccatattctaaatcatctggttggttttcagcctagaatttgatacgctttttagaaatatgcccagaatagaaaagctatgttggggcacatgtcctgcaaatatggccctagaaacaagtgatatggaatttacttggtgaataagttataaattcccacagaagaaaaatgtgaaagactgggtgctagacaagaaggaagcaggtaaagggatagttgctttgtcatccgtttttaattattttaactgacccttgacaatcttgtcagcaatataggactgttgaacaatcccggtgtgtcaggacccccaaatgtcacttctgcataaagcatgtatgtcatctattttttcttcaataaagagatttaatagccatttcaagaaatcccataaagaacctctctatgtccctttttttaatttaaaaaaaatgactcttgtctaatattcgtctataagggattaattttcagaccctttaataagtgagtgccataagaaagtcaatatatattgtttaaaagatatttcagtctaggaaagattttccttctcttggaatgtgaagatctgtcgattcatctccaatcatatgcattgacatacacagcaaagaagatataggcagtaatatcaacactgctatatcatgtgtaggacatttcttatccattttttctcttttacttgcatagttgctatgtgtttctcattgtaaaaggctgccgctgggtggcagaagccaagagaccttattaactaggctatatttttcttaacttgatctgaaatccacaattagaccacaatgcacctttggttgtatccataaaggatgctagcctgccttgtactaatgttttatatattaaaaaaaaaaaatctatcaaccatttcatatatatcccactactcaaggtatccatggaacatgaaagaataacatttatgcagaggaaaaacaaaaacatccctgaaaatatacacactcatacacacacacgcacaggggaataaaataagaaaatcattttcctcaccatagacttgatcccatccttacaacccatccttctaacttgatgtgtataaaatatgcaaacatttcacaaatgttctttgtcatttcaaaatactttagtatatcaatatcagtagataccagtgggtgggaaagggtcattacatgaaaatatgaagaaatagccatattagttttttaacctgcaatttgcctcagcaacaaagaaaaagtgaatttttaatgctgaagataaagtaagctaaagtaccagcagaagccttggctatttatagcagttctgacaatagttttataagaacatgaagagaacagaatcacttgaaaatggatgccagtcatctcttgttcccactactgaattcttataaagtggtggcaagatagggaagggataatctgagaatttttaaaagatgatttaatgagaagaagcacaattttgattttgatgagtcactttctgtaaacaatcttggtctatctttacccttataccttatctgtaatttaccatttattgtatttgcaaagctagtatggtttttaatcacagtaaatcctttgtattccagactttagggcagagccctgagggagtattattttacataacccgtcctagagtaacattttaggcaacattcttcattgcaagtaaaagatccataagtggcattttacacggctgcgagtattgttatatctaatcctattttaaaagatttttggtaatatgaagcttgaatactggtaacagtgatgcaatatacgcaagctgcacaacctgtatattgtatgcattgctgcgtggaggctgtttatttcaacctttttaaaaattgtgttttttagtaaaatggcttattttttcccaaaggtggaatttagcattttgtaatgatgaatataaaaatacctgtcatccccagatcatttaaaagttaactaaagtgagaatgaaaaaacaaaattccaagacactttttaaaagaatgtctgccctcacacacttttatggatttgtttttcttacatacccatcttttaacttagagatagcattttttgccctctttattttgttgtttgtttctccagagagtaaacgctttgtagttctttctttaaaaaacattttttttaaagaagaagaagccacttgaaccctcaataaaggctgttgcctaagcatggcatacttcatctgttctcatttgtgccatctgccgtgatgtcgtcacttttatggcgttaatttcctgccactacagatcttttgaagattgctggaatactggtgtctgttagaatgcttcagactacagatgtaattaaaggcttttcttaatatgttttaaccaaagatgtggagcaatccaagccacatatcttctacatcaaatttttccattttggttattttcataatctggtattgcattttgccttccctgttcatacctcaaattgattcatacctcagtttaattcagagaggtcagttaagtgacggattctgttgtggtttgaatgcagtaccagtgttctcttcgagcaaagtagacctgggtcactgtaggcataggacttggattgcttcagatggtttgctgtatcatttttcttctttttcttttcctggggacttgtttccattaaatgagagtaattaaaatcgcttgtaaatgagggcatacaagcatttgcaacaaatattcaaatagaggctcacagcggcataagctggactttgtcgccactagatgacaagatgttataactaagttaaaccacatctgtgtatctcaagggacttaattcagctgtctgtagtgaataaaagtgggaaattttcaaaagtttctcctgctggaaataaggtataatttgtattttgcag

SEQ ID NO: 12256 - DNA, 4343 bp, Homo sapiens
  source 1..4343: mol_type = unassigned DNA
aaactggggggtttctcttcaaagccagctggtctggctttattctgcaggaatttttttacctgtcagggtttggacaacaaagccctcagcaggtgctgacgggtacaacttcctggagaagcagaaaggcactggtgccaaagaagagttgcaaactgtgaagtaacttctatgaagagatgaagtaaagaacggaaggcaaatgattgtggcagtaaagaagtgtatgtggaacgaatgcaggaatttgggaactgagctgtgcaagtgctgaagaaggagatttgtttggaggaaacaggaaagagaaagaaaaggaaggaaaaaatacataatttcagggacgagagagagaagaaaaacggggactatggggagaaaaaagattcagattacgaggattatggatgaacgtaacagacaggtgacatttacaaagaggaaatttgggttgatgaagaaggcttatgagctgagcgtgctgtgtgactgtgagattgcgctgatcatcttcaacagcaccaacaagctgttccagtatgccagcaccgacatggacaaagtgcttctcaagtacacggagtacaacgagccgcatgagagccggacaaactcagacatcgtggaggcattgaacaagaaagaaaacaaaggctgtgaaagccccgatcccgactcctcttatgcactcaccccacgcactgaagaaaaatacaaaaaaattaatgaagaatttgataatatgatcaagagtcataaaattcctgctgttccacctcccaacttcgagatgccagtctccatcccagtgtccagccacaacagtttggtgtacagcaaccctgtcagctcactgggaaaccccaacctattgccactggctcacccttctctgcagaggaatagtatgtctcctggtgtaacacatcgacctccaagtgcaggtaacacaggtggtctgatgggtggagacctcacgtctggtgcaggcaccagtgcagggaacgggtatggcaatccccgaaactcaccaggtctgctggtctcacctggtaacttgaacaagaatatgcaagcaaaatctcctcccccaatgaatttaggaatgaataaccgtaaaccagatctccgagttcttattccaccaggcagcaagaatacgatgccatcagtgaatcaaaggataaataactcccagtcggctcagtcattggctaccccagtggtttccgtagcaactcctactttaccaggacaaggaatgggaggatatccatcagccatttcaacaacatatggtaccgagtactctctgagtagtgcagacctgtcatctctgtctgggtttaacaccgccagcgctcttcaccttggttcagtaactggctggcaacagcaacacctacataacatgccaccatctgccctcagtcagttgggagcttgcactagcactcatttatctcagagttcaaatctctccctgccttctactcaaagcctcaacatcaagtcagaacctgtttctcctcctagagaccgtaccaccaccccttcgagatacccacaacacacgcgccacgaggcggggagatctcctgttgacagcttgagcagctgtagcagttcgtacgacgggagcgaccgagaggatcaccggaacgaattccactcccccattggactcaccagaccttcgccggacgaaagggaaagtccctcagtcaagcgcatgcgactttctgaaggatgggcaacatgatcagattattacttactagtttttttttttttcttgcagtgtgtgtgtgtgctataccttaatggggaaggggggtcgatatgcattatatgtgccgtgtgtggaaaaaaaaaaagtcaggtactctgttttgtaaaagtacttttaaattgcctcagtgatacagtataaagataaacagaaatgctgagataagcttagcacttgagttgtacaacagaacacttgtacaaaatagattttaaggctaacttcttttcactgttgtgctcctttgcaaaatgtatgttacaatagatagtgtcatgttgcaggttcaacgttatttacatgtaaatagacaaaaggaaacatttgccaaaagcggcagatctttactgaaagagagagcagctgttatgcaacatatagaaaaatgtatagatgcttggacagacccggtaatgggtggccattggtaaatgttaggaacacaccaggtcacctgacatcccaagaatgctcacaaacctgcaggcatatcattggcgtatggcactcattaaaaaggatcagagaccattaaaagaggaccatacctattaaaaaaaaatgtggagttggagggctaacatatttaattaaataaataaataaatctgggtctgcatctcttattaaataaaaatataaaaatatgtacattacattttgcttattttcatataaaaggtaagacagagtttgcaaagcatttgtggctttttgtagtttacttaagccaaaatgtgtttttttccccttgatagcttcgctaatattttaaacagtcctgtaaaaaaccaaaaaggactttttgtatagaaagcactaccctaagccatgaagaactccatgctttgctaaccaagataactgttttctctttgtagaagttttgtttttgaaatgtgtatttctaattatataaaatattaagaatcttttaaaaaaatctgtgaaattaacatgcttgtgtatagctttctaatatatataatattatggtaatagcagaagttttgttatcttaatagcgggaggggggtatatttgtgcagttgcacatttgagtaactattttctttctgttttcttttactctgcttacattttataagtttaaggtcagctgtcaaaaggataacctgtggggttagaacatatcacattgcaacaccctaaattgtttttaatacattagcaatctattgggtcaactgacatccattgtatatactagtttctttcatgctatttttattttgttttttgcatttttatcaaatgcagggcccctttctgatctcaccatttcaccatgcatcttggaattcagtaagtgcatatcctaacttgcccatattctaaatcatctggttggttttcagcctagaatttgatacgctttttagaaatatgcccagaatagaaaagctatgttggggcacatgtcctgcaaatatggccctagaaacaagtgatatggaatttacttggtgaataagttataaattcccacagaagaaaaatgtgaaagactgggtgctagacaagaaggaagcaggtaaagggatagttgctttgtcatccgtttttaattattttaactgacccttgacaatcttgtcagcaatataggactgttgaacaatcccggtgtgtcaggacccccaaatgtcacttctgcataaagcatgtatgtcatctattttttcttcaataaagagatttaatagccatttcaagaaatcccataaagaacctctctatgtccctttttttaatttaaaaaaaatgactcttgtctaatattcgtctataagggattaattttcagaccctttaataagtgagtgccataagaaagtcaatatatattgtttaaaagatatttcagtctaggaaagattttccttctcttggaatgtgaagatctgtcgattcatctccaatcatatgcattgacatacacagcaaagaagatataggcagtaatatcaacactgctatatcatgtgtaggacatttcttatccattttttctcttttacttgcatagttgctatgtgtttctcattgtaaaaggctgccgctgggtggcagaagccaagagaccttattaactaggctatatttttcttaacttgatctgaaatccacaattagaccacaatgcacctttggttgtatccataaaggatgctagcctgccttgtactaatgttttatatattaaaaaaaaaaaatctatcaaccatttcatatatatcccactactcaaggtatccatggaacatgaaagaataacatttatgcagaggaaaaacaaaaacatccctgaaaatatacacactcatacacacacacgcacaggggaataaaataagaaaatcattttcctcaccatagacttgatcccatccttacaacccatccttctaacttgatgtgtataaaatatgcaaacatttcacaaatgttctttgtcatttcaaaatactttagtatatcaatatcagtagataccagtgggtgggaaagggtcattacatgaaaa

SEQ ID NO: 12257 - DNA, 4340 bp, Homo sapiens
  source 1..4340: mol_type = unassigned DNA
gagctgttctccttttcccattcgtcttctgtcacttccttcctggacgcagttttctggacgagtctggttacttttaatccgaccggccgctgagagccactttctcctcctcctcctcctcctccttctcttcctcctccttcttcctcctcctcctcctcttccgagcggcctcggcgcgcgcgaatgcgcggccccgcgccccccccctcgcgcgcgctcccctcgcgcgcgcgcacacacgcacacatcgtctccagctctctgctcgctctgctcgcagtcacagacacttgagcacacgcgtacacccagacatcttcgggctgctattggattgactttgaaggttctgtgtgggtcgccgtggctgcatgtttgaatcaggtggagaagcacttcaacgctggacgaagtaaagattattgttgttattttttttttctctctctctctctcttaagaaaggaaaatatcccaaggactaatctgatcgggtcttccttcatgaacgaatgcaggaatttgggaactgagctgtgcaagtgctgaagaaggagatttgtttggaggaaacaggaaagagaaagaaaaggaaggaaaaaatacataatttcagggacgagagagagaagaaaaacggggactatggggagaaaaaagattcagattacgaggattatggatgaacgtaacagacaggtgacatttacaaagaggaaatttgggttgatgaagaaggcttatgagctgagcgtgctgtgtgactgtgagattgcgctgatcatcttcaacagcaccaacaagctgttccagtatgccagcaccgacatggacaaagtgcttctcaagtacacggagtacaacgagccgcatgagagccggacaaactcagacatcgtggagacgttgagaaagaagggccttaatggctgtgacagcccagaccccgatgcggacgattccgtaggtcacagccctgagtctgaggacaagtacaggaaaattaacgaagatattgatctaatgatcagcaggcaaagattgtgtgctgttccacctcccaacttcgagatgccagtctccatcccagtgtccagccacaacagtttggtgtacagcaaccctgtcagctcactgggaaaccccaacctattgccactggctcacccttctctgcagaggaatagtatgtctcctggtgtaacacatcgacctccaagtgcaggtaacacaggtggtctgatgggtggagacctcacgtctggtgcaggcaccagtgcagggaacgggtatggcaatccccgaaactcaccaggtctgctggtctcacctggtaacttgaacaagaatatgcaagcaaaatctcctcccccaatgaatttaggaatgaataaccgtaaaccagatctccgagttcttattccaccaggcagcaagaatacgatgccatcagtgtctgaggatgtcgacctgcttttgaatcaaaggataaataactcccagtcggctcagtcattggctaccccagtggtttccgtagcaactcctactttaccaggacaaggaatgggaggatatccatcagccatttcaacaacatatggtaccgagtactctctgagtagtgcagacctgtcatctctgtctgggtttaacaccgccagcgctcttcaccttggttcagtaactggctggcaacagcaacacctacataacatgccaccatctgccctcagtcagttgggagcttgcactagcactcatttatctcagagttcaaatctctccctgccttctactcaaagcctcaacatcaagtcagaacctgtttctcctcctagagaccgtaccaccaccccttcgagatacccacaacacacgcgccacgaggcggggagatctcctgttgacagcttgagcagctgtagcagttcgtacgacgggagcgaccgagaggatcaccggaacgaattccactcccccattggactcaccagaccttcgccggacgaaagggaaagtccctcagtcaagcgcatgcgactttctgaaggatgggcaacatgatcagattattacttactagtttttttttttttcttgcagtgtgtgtgtgtgctataccttaatggggaaggggggtcgatatgcattatatgtgccgtgtgtggaaaaaaaaaaagtcaggtactctgttttgtaaaagtacttttaaattgcctcagtgatacagtataaagataaacagaaatgctgagataagcttagcacttgagttgtacaacagaacacttgtacaaaatagattttaaggctaacttcttttcactgttgtgctcctttgcaaaatgtatgttacaatagatagtgtcatgttgcaggttcaacgttatttacatgtaaatagacaaaaggaaacatttgccaaaagcggcagatctttactgaaagagagagcagctgttatgcaacatatagaaaaatgtatagatgcttggacagacccggtaatgggtggccattggtaaatgttaggaacacaccaggtcacctgacatcccaagaatgctcacaaacctgcaggcatatcattggcgtatggcactcattaaaaaggatcagagaccattaaaagaggaccatacctattaaaaaaaaatgtggagttggagggctaacatatttaattaaataaataaataaatctgggtctgcatctcttattaaataaaaatataaaaatatgtacattacattttgcttattttcatataaaaggtaagacagagtttgcaaagcatttgtggctttttgtagtttacttaagccaaaatgtgtttttttccccttgatagcttcgctaatattttaaacagtcctgtaaaaaaccaaaaaggactttttgtatagaaagcactaccctaagccatgaagaactccatgctttgctaaccaagataactgttttctctttgtagaagttttgtttttgaaatgtgtatttctaattatataaaatattaagaatcttttaaaaaaatctgtgaaattaacatgcttgtgtatagctttctaatatatataatattatggtaatagcagaagttttgttatcttaatagcgggaggggggtatatttgtgcagttgcacatttgagtaactattttctttctgttttcttttactctgcttacattttataagtttaaggtcagctgtcaaaaggataacctgtggggttagaacatatcacattgcaacaccctaaattgtttttaatacattagcaatctattgggtcaactgacatccattgtatatactagtttctttcatgctatttttattttgttttttgcatttttatcaaatgcagggcccctttctgatctcaccatttcaccatgcatcttggaattcagtaagtgcatatcctaacttgcccatattctaaatcatctggttggttttcagcctagaatttgatacgctttttagaaatatgcccagaatagaaaagctatgttggggcacatgtcctgcaaatatggccctagaaacaagtgatatggaatttacttggtgaataagttataaattcccacagaagaaaaatgtgaaagactgggtgctagacaagaaggaagcaggtaaagggatagttgctttgtcatccgtttttaattattttaactgacccttgacaatcttgtcagcaatataggactgttgaacaatcccggtgtgtcaggacccccaaatgtcacttctgcataaagcatgtatgtcatctattttttcttcaataaagagatttaatagccatttcaagaaatcccataaagaacctctctatgtccctttttttaatttaaaaaaaatgactcttgtctaatattcgtctataagggattaattttcagaccctttaataagtgagtgccataagaaagtcaatatatattgtttaaaagatatttcagtctaggaaagattttccttctcttggaatgtgaagatctgtcgattcatctccaatcatatgcattgacatacacagcaaagaagatataggcagtaatatcaacactgctatatcatgtgtaggacatttcttatccattttttctcttttacttgcatagttgctatgtgtttctcattgtaaaaggctgccgctgggtggcagaagccaagagaccttattaactaggctatatttttcttaacttgatctgaaatccacaattagaccacaatgcacctttggttgtatccataaaggatgctagcctgccttgtactaatgttttatatattaaaaaaaaaaaa

SEQ ID NO: 12258 - DNA, 3467 bp, Homo sapiens
  source 1..3467: mol_type = unassigned DNA
ggaaattgtcctatatgcatttgctgtggattcatggattggctttctgtgatagagaaagcttgtttgtatctttggggtcttaaacgtgcatgggaaataccattctaacacactgcttgcttctaagcaggaacgaatgcaggaatttgggaactgagctgtgcaagtgctgaagaaggagatttgtttggaggaaacaggaaagagaaagaaaaggaaggaaaaaatacataatttcagggacgagagagagaagaaaaacggggactatggggagaaaaaagattcagattacgaggattatggatgaacgtaacagacaggtgacatttacaaagaggaaatttgggttgatgaagaaggcttatgagctgagcgtgctgtgtgactgtgagattgcgctgatcatcttcaacagcaccaacaagctgttccagtatgccagcaccgacatggacaaagtgcttctcaagtacacggagtacaacgagccgcatgagagccggacaaactcagacatcgtggaggcattgaacaagaaagaaaacaaaggctgtgaaagccccgatcccgactcctcttatgcactcaccccacgcactgaagaaaaatacaaaaaaattaatgaagaatttgataatatgatcaagagtcataaaattcctgctgttccacctcccaacttcgagatgccagtctccatcccagtgtccagccacaacagtttggtgtacagcaaccctgtcagctcactgggaaaccccaacctattgccactggctcacccttctctgcagaggaatagtatgtctcctggtgtaacacatcgacctccaagtgcaggtaacacaggtggtctgatgggtggagacctcacgtctggtgcaggcaccagtgcagggaacgggtatggcaatccccgaaactcaccaggtctgctggtctcacctggtaacttgaacaagaatatgcaagcaaaatctcctcccccaatgaatttaggaatgaataaccgtaaaccagatctccgagttcttattccaccaggcagcaagaatacgatgccatcagtgtctgaggatgtcgacctgcttttgaatcaaaggataaataactcccagtcggctcagtcattggctaccccagtggtttccgtagcaactcctactttaccaggacaaggaatgggaggatatccatcagccatttcaacaacatatggtaccgagtactctctgagtagtgcagacctgtcatctctgtctgggtttaacaccgccagcgctcttcaccttggttcagtaactggctggcaacagcaacacctacataacatgccaccatctgccctcagtcagttgggagcttgcactagcactcatttatctcagagttcaaatctctccctgccttctactcaaagcctcaacatcaagtcagaacctgtttctcctcctagagaccgtaccaccaccccttcgagatacccacaacacacgcgccacgaggcggggagatctcctgttgacagcttgagcagctgtagcagttcgtacgacgggagcgaccgagaggatcaccggaacgaattccactcccccattggactcaccagaccttcgccggacgaaagggaaagtccctcagtcaagcgcatgcgactttctgaaggatgggcaacatgatcagattattacttactagtttttttttttttcttgcagtgtgtgtgtgtgctataccttaatggggaaggggggtcgatatgcattatatgtgccgtgtgtggaaaaaaaaaaagtcaggtactctgttttgtaaaagtacttttaaattgcctcagtgatacagtataaagataaacagaaatgctgagataagcttagcacttgagttgtacaacagaacacttgtacaaaatagattttaaggctaacttcttttcactgttgtgctcctttgcaaaatgtatgttacaatagatagtgtcatgttgcaggttcaacgttatttacatgtaaatagacaaaaggaaacatttgccaaaagcggcagatctttactgaaagagagagcagctgttatgcaacatatagaaaaatgtatagatgcttggacagacccggtaatgggtggccattggtaaatgttaggaacacaccaggtcacctgacatcccaagaatgctcacaaacctgcaggcatatcattggcgtatggcactcattaaaaaggatcagagaccattaaaagaggaccatacctattaaaaaaaaatgtggagttggagggctaacatatttaattaaataaataaataaatctgggtctgcatctcttattaaataaaaatataaaaatatgtacattacattttgcttattttcatataaaaggtaagacagagtttgcaaagcatttgtggctttttgtagtttacttaagccaaaatgtgtttttttccccttgatagcttcgctaatattttaaacagtcctgtaaaaaaccaaaaaggactttttgtatagaaagcactaccctaagccatgaagaactccatgctttgctaaccaagataactgttttctctttgtagaagttttgtttttgaaatgtgtatttctaattatataaaatattaagaatcttttaaaaaaatctgtgaaattaacatgcttgtgtatagctttctaatatatataatattatggtaatagcagaagttttgttatcttaatagcgggaggggggtatatttgtgcagttgcacatttgagtaactattttctttctgttttcttttactctgcttacattttataagtttaaggtcagctgtcaaaaggataacctgtggggttagaacatatcacattgcaacaccctaaattgtttttaatacattagcaatctattgggtcaactgacatccattgtatatactagtttctttcatgctatttttattttgttttttgcatttttatcaaatgcagggcccctttctgatctcaccatttcaccatgcatcttggaattcagtaagtgcatatcctaacttgcccatattctaaatcatctggttggttttcagcctagaatttgatacgctttttagaaatatgcccagaatagaaaagctatgttggggcacatgtcctgcaaatatggccctagaaacaagtgatatggaatttacttggtgaataagttataaattcccacagaagaaaaatgtgaaagactgggtgctagacaagaaggaagcaggtaaagggatagttgctttgtcatccgtttttaattattttaactgacccttgacaatcttgtcagcaatataggactgttgaacaatcccggtgtgtcaggacccccaaatgtcacttctgcataaagcatgtatgtcatctattttttcttcaataaagagatttaatagccatttcaagaaatcccataaa

SEQ ID NO: 12259 - DNA, 3393 bp, Homo sapiens
  source 1..3393: mol_type = unassigned DNA
gctaaatgaaaggaaaggaaattgtcctatatgcatttgctgtggattcatggattggctttctgtgatagagaaagcttgtttgtatctttggggtcttaaacgtgcatgggaaataccattctaacacactgcttgcttctaagcaggaacgaatgcaggaatttgggaactgagctgtgcaagtgctgaagaaggagatttgtttggaggaaacaggaaagagaaagaaaaggaaggaaaaaatacataatttcagggacgagagagagaagaaaaacggggactatggggagaaaaaagattcagattacgaggattatggatgaacgtaacagacaggtgacatttacaaagaggaaatttgggttgatgaagaaggcttatgagctgagcgtgctgtgtgactgtgagattgcgctgatcatcttcaacagcaccaacaagctgttccagtatgccagcaccgacatggacaaagtgcttctcaagtacacggagtacaacgagccgcatgagagccggacaaactcagacatcgtggagacgttgagaaagaagggccttaatggctgtgacagcccagaccccgatgcggacgattccgtaggtcacagccctgagtctgaggacaagtacaggaaaattaacgaagatattgatctaatgatcagcaggcaaagattgtgtgctgttccacctcccaacttcgagatgccagtctccatcccagtgtccagccacaacagtttggtgtacagcaaccctgtcagctcactgggaaaccccaacctattgccactggctcacccttctctgcagaggaatagtatgtctcctggtgtaacacatcgacctccaagtgcaggtaacacaggtggtctgatgggtggagacctcacgtctggtgcaggcaccagtgcagggaacgggtatggcaatccccgaaactcaccaggtctgctggtctcacctggtaacttgaacaagaatatgcaagcaaaatctcctcccccaatgaatttaggaatgaataaccgtaaaccagatctccgagttcttattccaccaggcagcaagaatacgatgccatcagtgtctgaggatgtcgacctgcttttgaatcaaaggataaataactcccagtcggctcagtcattggctaccccagtggtttccgtagcaactcctactttaccaggacaaggaatgggaggatatccatcagccatttcaacaacatatggtaccgagtactctctgagtagtgcagacctgtcatctctgtctgggtttaacaccgccagcgctcttcaccttggttcagtaactggctggcaacagcaacacctacataacatgccaccatctgccctcagtcagttgggagaccgtaccaccaccccttcgagatacccacaacacacgcgccacgaggcggggagatctcctgttgacagcttgagcagctgtagcagttcgtacgacgggagcgaccgagaggatcaccggaacgaattccactcccccattggactcaccagaccttcgccggacgaaagggaaagtccctcagtcaagcgcatgcgactttctgaaggatgggcaacatgatcagattattacttactagtttttttttttttcttgcagtgtgtgtgtgtgctataccttaatggggaaggggggtcgatatgcattatatgtgccgtgtgtggaaaaaaaaaaagtcaggtactctgttttgtaaaagtacttttaaattgcctcagtgatacagtataaagataaacagaaatgctgagataagcttagcacttgagttgtacaacagaacacttgtacaaaatagattttaaggctaacttcttttcactgttgtgctcctttgcaaaatgtatgttacaatagatagtgtcatgttgcaggttcaacgttatttacatgtaaatagacaaaaggaaacatttgccaaaagcggcagatctttactgaaagagagagcagctgttatgcaacatatagaaaaatgtatagatgcttggacagacccggtaatgggtggccattggtaaatgttaggaacacaccaggtcacctgacatcccaagaatgctcacaaacctgcaggcatatcattggcgtatggcactcattaaaaaggatcagagaccattaaaagaggaccatacctattaaaaaaaaatgtggagttggagggctaacatatttaattaaataaataaataaatctgggtctgcatctcttattaaataaaaatataaaaatatgtacattacattttgcttattttcatataaaaggtaagacagagtttgcaaagcatttgtggctttttgtagtttacttaagccaaaatgtgtttttttccccttgatagcttcgctaatattttaaacagtcctgtaaaaaaccaaaaaggactttttgtatagaaagcactaccctaagccatgaagaactccatgctttgctaaccaagataactgttttctctttgtagaagttttgtttttgaaatgtgtatttctaattatataaaatattaagaatcttttaaaaaaatctgtgaaattaacatgcttgtgtatagctttctaatatatataatattatggtaatagcagaagttttgttatcttaatagcgggaggggggtatatttgtgcagttgcacatttgagtaactattttctttctgttttcttttactctgcttacattttataagtttaaggtcagctgtcaaaaggataacctgtggggttagaacatatcacattgcaacaccctaaattgtttttaatacattagcaatctattgggtcaactgacatccattgtatatactagtttctttcatgctatttttattttgttttttgcatttttatcaaatgcagggcccctttctgatctcaccatttcaccatgcatcttggaattcagtaagtgcatatcctaacttgcccatattctaaatcatctggttggttttcagcctagaatttgatacgctttttagaaatatgcccagaatagaaaagctatgttggggcacatgtcctgcaaatatggccctagaaacaagtgatatggaatttacttggtgaataagttataaattcccacagaagaaaaatgtgaaagactgggtgctagacaagaaggaagcaggtaaagggatagttgctttgtcatccgtttttaattattttaactgacccttgacaatcttgtcagcaatataggactgttgaacaatcccggtgtgtcaggacccccaaatgtcacttctgcataaagcatgtatgtcatctattttttcttcaataaagagatttaatagccatttcaagaaatcccataaa

SEQ ID NO: 12260 - DNA, 3446 bp, Homo sapiens
  source 1..3446: mol_type = unassigned DNA
gcagtcacagacacttgagcacacgcgtacacccagacatcttcgggctgctattggattgactttgaaggttctgtgtgggtcgccgtggctgcatgtttgaatcaggtggagaagcacttcaacgctggacgaagtaaagattattgttgttattttttttttctctctctctctctcttaagaaaggaaaatatcccaaggactaatctgatcgggtcttccttcatgaacgaatgcaggaatttgggaactgagctgtgcaagtgctgaagaaggagatttgtttggaggaaacaggaaagagaaagaaaaggaaggaaaaaatacataatttcagggacgagagagagaagaaaaacggggactatggggagaaaaaagattcagattacgaggattatggatgaacgtaacagacaggtgacatttacaaagaggaaatttgggttgatgaagaaggcttatgagctgagcgtgctgtgtgactgtgagattgcgctgatcatcttcaacagcaccaacaagctgttccagtatgccagcaccgacatggacaaagtgcttctcaagtacacggagtacaacgagccgcatgagagccggacaaactcagacatcgtggagacgttgagaaagaagggccttaatggctgtgacagcccagaccccgatgcggacgattccgtaggtcacagccctgagtctgaggacaagtacaggaaaattaacgaagatattgatctaatgatcagcaggcaaagattgtgtgctgttccacctcccaacttcgagatgccagtctccatcccagtgtccagccacaacagtttggtgtacagcaaccctgtcagctcactgggaaaccccaacctattgccactggctcacccttctctgcagaggaatagtatgtctcctggtgtaacacatcgacctccaagtgcaggtaacacaggtggtctgatgggtggagacctcacgtctggtgcaggcaccagtgcagggaacgggtatggcaatccccgaaactcaccaggtctgctggtctcacctggtaacttgaacaagaatatgcaagcaaaatctcctcccccaatgaatttaggaatgaataaccgtaaaccagatctccgagttcttattccaccaggcagcaagaatacgatgccatcagtgaatcaaaggataaataactcccagtcggctcagtcattggctaccccagtggtttccgtagcaactcctactttaccaggacaaggaatgggaggatatccatcagccatttcaacaacatatggtaccgagtactctctgagtagtgcagacctgtcatctctgtctgggtttaacaccgccagcgctcttcaccttggttcagtaactggctggcaacagcaacacctacataacatgccaccatctgccctcagtcagttgggagaccgtaccaccaccccttcgagatacccacaacacacgcgccacgaggcggggagatctcctgttgacagcttgagcagctgtagcagttcgtacgacgggagcgaccgagaggatcaccggaacgaattccactcccccattggactcaccagaccttcgccggacgaaagggaaagtccctcagtcaagcgcatgcgactttctgaaggatgggcaacatgatcagattattacttactagtttttttttttttcttgcagtgtgtgtgtgtgctataccttaatggggaaggggggtcgatatgcattatatgtgccgtgtgtggaaaaaaaaaaagtcaggtactctgttttgtaaaagtacttttaaattgcctcagtgatacagtataaagataaacagaaatgctgagataagcttagcacttgagttgtacaacagaacacttgtacaaaatagattttaaggctaacttcttttcactgttgtgctcctttgcaaaatgtatgttacaatagatagtgtcatgttgcaggttcaacgttatttacatgtaaatagacaaaaggaaacatttgccaaaagcggcagatctttactgaaagagagagcagctgttatgcaacatatagaaaaatgtatagatgcttggacagacccggtaatgggtggccattggtaaatgttaggaacacaccaggtcacctgacatcccaagaatgctcacaaacctgcaggcatatcattggcgtatggcactcattaaaaaggatcagagaccattaaaagaggaccatacctattaaaaaaaaatgtggagttggagggctaacatatttaattaaataaataaataaatctgggtctgcatctcttattaaataaaaatataaaaatatgtacattacattttgcttattttcatataaaaggtaagacagagtttgcaaagcatttgtggctttttgtagtttacttaagccaaaatgtgtttttttccccttgatagcttcgctaatattttaaacagtcctgtaaaaaaccaaaaaggactttttgtatagaaagcactaccctaagccatgaagaactccatgctttgctaaccaagataactgttttctctttgtagaagttttgtttttgaaatgtgtatttctaattatataaaatattaagaatcttttaaaaaaatctgtgaaattaacatgcttgtgtatagctttctaatatatataatattatggtaatagcagaagttttgttatcttaatagcgggaggggggtatatttgtgcagttgcacatttgagtaactattttctttctgttttcttttactctgcttacattttataagtttaaggtcagctgtcaaaaggataacctgtggggttagaacatatcacattgcaacaccctaaattgtttttaatacattagcaatctattgggtcaactgacatccattgtatatactagtttctttcatgctatttttattttgttttttgcatttttatcaaatgcagggcccctttctgatctcaccatttcaccatgcatcttggaattcagtaagtgcatatcctaacttgcccatattctaaatcatctggttggttttcagcctagaatttgatacgctttttagaaatatgcccagaatagaaaagctatgttggggcacatgtcctgcaaatatggccctagaaacaagtgatatggaatttacttggtgaataagttataaattcccacagaagaaaaatgtgaaagactgggtgctagacaagaaggaagcaggtaaagggatagttgctttgtcatccgtttttaattattttaactgacccttgacaatcttgtcagcaatataggactgttgaacaatcccggtgtgtcaggacccccaaatgtcacttctgcataaagcatgtatgtcatctattttttcttcaataaagagatttaatagccatttcaagaaatccca

SEQ ID NO: 12261 - DNA, 3469 bp, Homo sapiens
  source 1..3469: mol_type = unassigned DNA
acttgagcacacgcgtacacccagacatcttcgggctgctattggattgactttgaaggttctgtgtgggtcgccgtggctgcatgtttgaatcaggtggagaagcacttcaacgctggacgaagtaaagattattgttgttattttttttttctctctctctctctcttaagaaaggaaaatatcccaaggactaatctgatcgggtcttccttcatcaggaacgaatgcaggaatttgggaactgagctgtgcaagtgctgaagaaggagatttgtttggaggaaacaggaaagagaaagaaaaggaaggaaaaaatacataatttcagggacgagagagagaagaaaaacggggactatggggagaaaaaagattcagattacgaggattatggatgaacgtaacagacaggtgacatttacaaagaggaaatttgggttgatgaagaaggcttatgagctgagcgtgctgtgtgactgtgagattgcgctgatcatcttcaacagcaccaacaagctgttccagtatgccagcaccgacatggacaaagtgcttctcaagtacacggagtacaacgagccgcatgagagccggacaaactcagacatcgtggagacgttgagaaagaagggccttaatggctgtgacagcccagaccccgatgcggacgattccgtaggtcacagccctgagtctgaggacaagtacaggaaaattaacgaagatattgatctaatgatcagcaggcaaagattgtgtgctgttccacctcccaacttcgagatgccagtctccatcccagtgtccagccacaacagtttggtgtacagcaaccctgtcagctcactgggaaaccccaacctattgccactggctcacccttctctgcagaggaatagtatgtctcctggtgtaacacatcgacctccaagtgcaggtaacacaggtggtctgatgggtggagacctcacgtctggtgcaggcaccagtgcagggaacgggtatggcaatccccgaaactcaccaggtctgctggtctcacctggtaacttgaacaagaatatgcaagcaaaatctcctcccccaatgaatttaggaatgaataaccgtaaaccagatctccgagttcttattccaccaggcagcaagaatacgatgccatcagtgtctgaggatgtcgacctgcttttgaatcaaaggataaataactcccagtcggctcagtcattggctaccccagtggtttccgtagcaactcctactttaccaggacaaggaatgggaggatatccatcagccatttcaacaacatatggtaccgagtactctctgagtagtgcagacctgtcatctctgtctgggtttaacaccgccagcgctcttcaccttggttcagtaactggctggcaacagcaacacctacataacatgccaccatctgccctcagtcagttgggtcagaacctgtttctcctcctagagaccgtaccaccaccccttcgagatacccacaacacacgcgccacgaggcggggagatctcctgttgacagcttgagcagctgtagcagttcgtacgacgggagcgaccgagaggatcaccggaacgaattccactcccccattggactcaccagaccttcgccggacgaaagggaaagtccctcagtcaagcgcatgcgactttctgaaggatgggcaacatgatcagattattacttactagtttttttttttttcttgcagtgtgtgtgtgtgctataccttaatggggaaggggggtcgatatgcattatatgtgccgtgtgtggaaaaaaaaaaagtcaggtactctgttttgtaaaagtacttttaaattgcctcagtgatacagtataaagataaacagaaatgctgagataagcttagcacttgagttgtacaacagaacacttgtacaaaatagattttaaggctaacttcttttcactgttgtgctcctttgcaaaatgtatgttacaatagatagtgtcatgttgcaggttcaacgttatttacatgtaaatagacaaaaggaaacatttgccaaaagcggcagatctttactgaaagagagagcagctgttatgcaacatatagaaaaatgtatagatgcttggacagacccggtaatgggtggccattggtaaatgttaggaacacaccaggtcacctgacatcccaagaatgctcacaaacctgcaggcatatcattggcgtatggcactcattaaaaaggatcagagaccattaaaagaggaccatacctattaaaaaaaaatgtggagttggagggctaacatatttaattaaataaataaataaatctgggtctgcatctcttattaaataaaaatataaaaatatgtacattacattttgcttattttcatataaaaggtaagacagagtttgcaaagcatttgtggctttttgtagtttacttaagccaaaatgtgtttttttccccttgatagcttcgctaatattttaaacagtcctgtaaaaaaccaaaaaggactttttgtatagaaagcactaccctaagccatgaagaactccatgctttgctaaccaagataactgttttctctttgtagaagttttgtttttgaaatgtgtatttctaattatataaaatattaagaatcttttaaaaaaatctgtgaaattaacatgcttgtgtatagctttctaatatatataatattatggtaatagcagaagttttgttatcttaatagcgggaggggggtatatttgtgcagttgcacatttgagtaactattttctttctgttttcttttactctgcttacattttataagtttaaggtcagctgtcaaaaggataacctgtggggttagaacatatcacattgcaacaccctaaattgtttttaatacattagcaatctattgggtcaactgacatccattgtatatactagtttctttcatgctatttttattttgttttttgcatttttatcaaatgcagggcccctttctgatctcaccatttcaccatgcatcttggaattcagtaagtgcatatcctaacttgcccatattctaaatcatctggttggttttcagcctagaatttgatacgctttttagaaatatgcccagaatagaaaagctatgttggggcacatgtcctgcaaatatggccctagaaacaagtgatatggaatttacttggtgaataagttataaattcccacagaagaaaaatgtgaaagactgggtgctagacaagaaggaagcaggtaaagggatagttgctttgtcatccgtttttaattattttaactgacccttgacaatcttgtcagcaatataggactgttgaacaatcccggtgtgtcaggacccccaaatgtcacttctgcataaagcatgtatgtcatctattttttcttcaataaagagatttaatagcca

SEQ ID NO: 12262 - DNA, 3347 bp, Homo sapiens
  source 1..3347: mol_type = unassigned DNA
agtcacagacacttgagcacacgcgtacacccagacatcttcgggctgctattggattgactttgaaggttctgtgtgggtcgccgtggctgcatgtttgaatcaggtggagaagcacttcaacgctggacgaagaacgaatgcaggaatttgggaactgagctgtgcaagtgctgaagaaggagatttgtttggaggaaacaggaaagagaaagaaaaggaaggaaaaaatacataatttcagggacgagagagagaagaaaaacggggactatggggagaaaaaagattcagattacgaggattatggatgaacgtaacagacaggtgacatttacaaagaggaaatttgggttgatgaagaaggcttatgagctgagcgtgctgtgtgactgtgagattgcgctgatcatcttcaacagcaccaacaagctgttccagtatgccagcaccgacatggacaaagtgcttctcaagtacacggagtacaacgagccgcatgagagccggacaaactcagacatcgtggagacgttgagaaagaagggccttaatggctgtgacagcccagaccccgatgcggacgattccgtaggtcacagccctgagtctgaggacaagtacaggaaaattaacgaagatattgatctaatgatcagcaggcaaagattgtgtgctgttccacctcccaacttcgagatgccagtctccatcccagtgtccagccacaacagtttggtgtacagcaaccctgtcagctcactgggaaaccccaacctattgccactggctcacccttctctgcagaggaatagtatgtctcctggtgtaacacatcgacctccaagtgcaggtaacacaggtggtctgatgggtggagacctcacgtctggtgcaggcaccagtgcagggaacgggtatggcaatccccgaaactcaccaggtctgctggtctcacctggtaacttgaacaagaatatgcaagcaaaatctcctcccccaatgaatttaggaatgaataaccgtaaaccagatctccgagttcttattccaccaggcagcaagaatacgatgccatcagtgtctgaggatgtcgacctgcttttgaatcaaaggataaataactcccagtcggctcagtcattggctaccccagtggtttccgtagcaactcctactttaccaggacaaggaatgggaggatatccatcagccatttcaacaacatatggtaccgagtactctctgagtagtgcagacctgtcatctctgtctgggtttaacaccgccagcgctcttcaccttggttcagtaactggctggcaacagcaacacctacataacatgccaccatctgccctcagtcagttgggagaccgtaccaccaccccttcgagatacccacaacacacgcgccacgaggcggggagatctcctgttgacagcttgagcagctgtagcagttcgtacgacgggagcgaccgagaggatcaccggaacgaattccactcccccattggactcaccagaccttcgccggacgaaagggaaagtccctcagtcaagcgcatgcgactttctgaaggatgggcaacatgatcagattattacttactagtttttttttttttcttgcagtgtgtgtgtgtgctataccttaatggggaaggggggtcgatatgcattatatgtgccgtgtgtggaaaaaaaaaaagtcaggtactctgttttgtaaaagtacttttaaattgcctcagtgatacagtataaagataaacagaaatgctgagataagcttagcacttgagttgtacaacagaacacttgtacaaaatagattttaaggctaacttcttttcactgttgtgctcctttgcaaaatgtatgttacaatagatagtgtcatgttgcaggttcaacgttatttacatgtaaatagacaaaaggaaacatttgccaaaagcggcagatctttactgaaagagagagcagctgttatgcaacatatagaaaaatgtatagatgcttggacagacccggtaatgggtggccattggtaaatgttaggaacacaccaggtcacctgacatcccaagaatgctcacaaacctgcaggcatatcattggcgtatggcactcattaaaaaggatcagagaccattaaaagaggaccatacctattaaaaaaaaatgtggagttggagggctaacatatttaattaaataaataaataaatctgggtctgcatctcttattaaataaaaatataaaaatatgtacattacattttgcttattttcatataaaaggtaagacagagtttgcaaagcatttgtggctttttgtagtttacttaagccaaaatgtgtttttttccccttgatagcttcgctaatattttaaacagtcctgtaaaaaaccaaaaaggactttttgtatagaaagcactaccctaagccatgaagaactccatgctttgctaaccaagataactgttttctctttgtagaagttttgtttttgaaatgtgtatttctaattatataaaatattaagaatcttttaaaaaaatctgtgaaattaacatgcttgtgtatagctttctaatatatataatattatggtaatagcagaagttttgttatcttaatagcgggaggggggtatatttgtgcagttgcacatttgagtaactattttctttctgttttcttttactctgcttacattttataagtttaaggtcagctgtcaaaaggataacctgtggggttagaacatatcacattgcaacaccctaaattgtttttaatacattagcaatctattgggtcaactgacatccattgtatatactagtttctttcatgctatttttattttgttttttgcatttttatcaaatgcagggcccctttctgatctcaccatttcaccatgcatcttggaattcagtaagtgcatatcctaacttgcccatattctaaatcatctggttggttttcagcctagaatttgatacgctttttagaaatatgcccagaatagaaaagctatgttggggcacatgtcctgcaaatatggccctagaaacaagtgatatggaatttacttggtgaataagttataaattcccacagaagaaaaatgtgaaagactgggtgctagacaagaaggaagcaggtaaagggatagttgctttgtcatccgtttttaattattttaactgacccttgacaatcttgtcagcaatataggactgttgaacaatcccggtgtgtcaggacccccaaatgtcacttctgcataaagcatgtatgtcatctattttttcttcaataaagag

SEQ ID NO: 12263 - DNA, 2772 bp, Homo sapiens
  source 1..2772: mol_type = unassigned DNA
acacgcacacatcgtctccagctctctgctcgctctgctcgcagtcacagacacttgagcacacgcgtacacccagacatcttcgggctgctattggattgactttgaaggttctgtgtgggtcgccgtggctgcatgtttgaatcaggtggagaagcacttcaacgctggacgaagtaaagattattgttgttattttttttttctctctctctctctcttaagaaaggaaaatatcccaaggactaatctgatcgggtcttccttcatcaggaacgaatgcaggaatttgggaactgagctgtgcaagtgctgaagaaggagatttgtttggaggaaacaggaaagagaaagaaaaggaaggaaaaaatacataatttcagggacgagagagagaagaaaaacggggactatggggagaaaaaagattcagattacgaggattatggatgaacgtaacagacaggtgacatttacaaagaggaaatttgggttgatgaagaaggcttatgagctgagcgtgctgtgtgactgtgagattgcgctgatcatcttcaacagcaccaacaagctgttccagtatgccagcaccgacatggacaaagtgcttctcaagtacacggagtacaacgagccgcatgagagccggacaaactcagacatcgtggagacgttgagaaagaagggccttaatggctgtgacagcccagaccccgatgcggacgattccgtaggtcacagccctgagtctgaggacaagtacaggaaaattaacgaagatattgatctaatgatcagcaggcaaagattgtgtgctgttccacctcccaacttcgagatgccagtctccatcccagtgtccagccacaacagtttggtgtacagcaaccctgtcagctcactgggaaaccccaacctattgccactggctcacccttctctgcagaggaatagtatgtctcctggtgtaacacatcgacctccaagtgcaggtaacacaggtggtctgatgggtggagacctcacgtctggtgcaggcaccagtgcagggaacgggtatggcaatccccgaaactcaccaggtctgctggtctcacctggtaacttgaacaagaatatgcaagcaaaatctcctcccccaatgaatttaggaatgaataaccgtaaaccagatctccgagttcttattccaccaggcagcaagaatacgatgccatcagtgtctgaggatgtcgacctgcttttgaatcaaaggataaataactcccagtcggctcagtcattggctaccccagtggtttccgtagcaactcctactttaccaggacaaggaatgggaggatatccatcagccatttcaacaacatatggtaccgagtactctctgagtagtgcagacctgtcatctctgtctgggtttaacaccgccagcgctcttcaccttggttcagtaactggctggcaacagcaacacctacataacatgccaccatctgccctcagtcagttgggagaccgtaccaccaccccttcgagatacccacaacacacgcgccacgaggcggggagatctcctgttgacagcttgagcagctgtagcagttcgtacgacgggagcgaccgagaggatcaccggaacgaattccactcccccattggactcaccagaccttcgccggacgaaagggaaagtccctcagtcaagcgcatgcgactttctgaaggatgggcaacatgatcagattattacttactagtttttttttttttcttgcagtgtgtgtgtgtgctataccttaatggggaaggggggtcgatatgcattatatgtgccgtgtgtggaaaaaaaaaaagtcaggtactctgttttgtaaaagtacttttaaattgcctcagtgatacagtataaagataaacagaaatgctgagataagcttagcacttgagttgtacaacagaacacttgtacaaaatagattttaaggctaacttcttttcactgttgtgctcctttgcaaaatgtatgttacaatagatagtgtcatgttgcaggttcaacgttatttacatgtaaatagacaaaaggaaacatttgccaaaagcggcagatctttactgaaagagagagcagctgttatgcaacatatagaaaaatgtatagatgcttggacagacccggtaatgggtggccattggtaaatgttaggaacacaccaggtcacctgacatcccaagaatgctcacaaacctgcaggcatatcattggcgtatggcactcattaaaaaggatcagagaccattaaaagaggaccatacctattaaaaaaaaatgtggagttggagggctaacatatttaattaaataaataaataaatctgggtctgcatctcttattaaataaaaatataaaaatatgtacattacattttgcttattttcatataaaaggtaagacagagtttgcaaagcatttgtggctttttgtagtttacttaagccaaaatgtgtttttttccccttgatagcttcgctaatattttaaacagtcctgtaaaaaaccaaaaaggactttttgtatagaaagcactaccctaagccatgaagaactccatgctttgctaaccaagataactgttttctctttgtagaagttttgtttttgaaatgtgtatttctaattatataaaatattaagaatcttttaaaaaaatctgtgaaattaacatgcttgtgtatagctttctaatatatataatattatggtaatagca

SEQ ID NO: 12264 - DNA, 2851 bp, Homo sapiens
  source 1..2851: mol_type = unassigned DNA
aagggggcaaagcctcggtcttcatagaaaaggagaggaggcaaacgcagcccaaactggggggtttctcttcaaagccagctggtctggctttattctgcaggaatttttttacctgtcagggtttggacaacaaagccctcagcaggtgctgacgggtacaacttcctggagaagcagaaaggcactggtgccaaagaagagttgcaaactgtgaagtaacttctatgaagagatgaagtaaagaacggaaggcaaatgattgtggcagtaaagaagtgtatgtggaacgaatgcaggaatttgggaactgagctgtgcaagtgctgaagaaggagatttgtttggaggaaacaggaaagagaaagaaaaggaaggaaaaaatacataatttcagggacgagagagagaagaaaaacggggactatggggagaaaaaagattcagattacgaggattatggatgaacgtaacagacaggtgacatttacaaagaggaaatttgggttgatgaagaaggcttatgagctgagcgtgctgtgtgactgtgagattgcgctgatcatcttcaacagcaccaacaagctgttccagtatgccagcaccgacatggacaaagtgcttctcaagtacacggagtacaacgagccgcatgagagccggacaaactcagacatcgtggagacgttgagaaagaagggccttaatggctgtgacagcccagaccccgatgcggacgattccgtaggtcacagccctgagtctgaggacaagtacaggaaaattaacgaagatattgatctaatgatcagcaggcaaagattgtgtgctgttccacctcccaacttcgagatgccagtctccatcccagtgtccagccacaacagtttggtgtacagcaaccctgtcagctcactgggaaaccccaacctattgccactggctcacccttctctgcagaggaatagtatgtctcctggtgtaacacatcgacctccaagtgcaggtaacacaggtggtctgatgggtggagacctcacgtctggtgcaggcaccagtgcagggaacgggtatggcaatccccgaaactcaccaggtctgctggtctcacctggtaacttgaacaagaatatgcaagcaaaatctcctcccccaatgaatttaggaatgaataaccgtaaaccagatctccgagttcttattccaccaggcagcaagaatacgatgccatcagtgaatcaaaggataaataactcccagtcggctcagtcattggctaccccagtggtttccgtagcaactcctactttaccaggacaaggaatgggaggatatccatcagccatttcaacaacatatggtaccgagtactctctgagtagtgcagacctgtcatctctgtctgggtttaacaccgccagcgctcttcaccttggttcagtaactggctggcaacagcaacacctacataacatgccaccatctgccctcagtcagttgggagcttgcactagcactcatttatctcagagttcaaatctctccctgccttctactcaaagcctcaacatcaagtcagaacctgtttctcctcctagagaccgtaccaccaccccttcgagatacccacaacacacgcgccacgaggcggggagatctcctgttgacagcttgagcagctgtagcagttcgtacgacgggagcgaccgagaggatcaccggaacgaattccactcccccattggactcaccagaccttcgccggacgaaagggaaagtccctcagtcaagcgcatgcgactttctgaaggatgggcaacatgatcagattattacttactagtttttttttttttcttgcagtgtgtgtgtgtgctataccttaatggggaaggggggtcgatatgcattatatgtgccgtgtgtggaaaaaaaaaaagtcaggtactctgttttgtaaaagtacttttaaattgcctcagtgatacagtataaagataaacagaaatgctgagataagcttagcacttgagttgtacaacagaacacttgtacaaaatagattttaaggctaacttcttttcactgttgtgctcctttgcaaaatgtatgttacaatagatagtgtcatgttgcaggttcaacgttatttacatgtaaatagacaaaaggaaacatttgccaaaagcggcagatctttactgaaagagagagcagctgttatgcaacatatagaaaaatgtatagatgcttggacagacccggtaatgggtggccattggtaaatgttaggaacacaccaggtcacctgacatcccaagaatgctcacaaacctgcaggcatatcattggcgtatggcactcattaaaaaggatcagagaccattaaaagaggaccatacctattaaaaaaaaatgtggagttggagggctaacatatttaattaaataaataaataaatctgggtctgcatctcttattaaataaaaatataaaaatatgtacattacattttgcttattttcatataaaaggtaagacagagtttgcaaagcatttgtggctttttgtagtttacttaagccaaaatgtgtttttttccccttgatagcttcgctaatattttaaacagtcctgtaaaaaaccaaaaaggactttttgtatagaaagcactaccctaagccatgaagaactccatgctttgctaaccaagataactgttttctctttgtagaagttttgtttttgaaatgtgtatttctaattatataaaatattaagaatcttttaaaaaaatctgtgaaattaacatgcttgtgtatagctttctaatatatataatattatggt

SEQ ID NO: 12265 - DNA, 2247 bp, Homo sapiens
  source 1..2247: mol_type = unassigned DNA
ctccatataagcacagcgtctgagcattcttcaccgatgcttggtggggatattagctgtgttctcttacaccctttagctgtcaagtacatcagaagtggaggctgtggggacaggacaccactaatgccaaccattagtttaaattcacacttggatctgtttccaacatttctgcttttgtcatcatcacagacgttgagaaagaagggccttaatggctgtgacagcccagaccccgatgcggacgattccgtaggtcacagccctgagtctgaggacaagtacaggaaaattaacgaagatattgatctaatgatcagcaggcaaagattgtgtgctgttccacctcccaacttcgagatgccagtctccatcccagtgtccagccacaacagtttggtgtacagcaaccctgtcagctcactgggaaaccccaacctattgccactggctcacccttctctgcagaggaatagtatgtctcctggtgtaacacatcgacctccaagtgcaggtaacacaggtggtctgatgggtggagacctcacgtctggtgcaggcaccagtgcagggaacgggtatggcaatccccgaaactcaccaggtctgctggtctcacctggtaacttgaacaagaatatgcaagcaaaatctcctcccccaatgaatttaggaatgaataaccgtaaaccagatctccgagttcttattccaccaggcagcaagaatacgatgccatcagtgtctgaggatgtcgacctgcttttgaatcaaaggataaataactcccagtcggctcagtcattggctaccccagtggtttccgtagcaactcctactttaccaggacaaggaatgggaggatatccatcagccatttcaacaacatatggtaccgagtactctctgagtagtgcagacctgtcatctctgtctgggtttaacaccgccagcgctcttcaccttggttcagtaactggctggcaacagcaacacctacataacatgccaccatctgccctcagtcagttgggagaccgtaccaccaccccttcgagatacccacaacacacgcgccacgaggcggggagatctcctgttgacagcttgagcagctgtagcagttcgtacgacgggagcgaccgagaggatcaccggaacgaattccactcccccattggactcaccagaccttcgccggacgaaagggaaagtccctcagtcaagcgcatgcgactttctgaaggatgggcaacatgatcagattattacttactagtttttttttttttcttgcagtgtgtgtgtgtgctataccttaatggggaaggggggtcgatatgcattatatgtgccgtgtgtggaaaaaaaaaaagtcaggtactctgttttgtaaaagtacttttaaattgcctcagtgatacagtataaagataaacagaaatgctgagataagcttagcacttgagttgtacaacagaacacttgtacaaaatagattttaaggctaacttcttttcactgttgtgctcctttgcaaaatgtatgttacaatagatagtgtcatgttgcaggttcaacgttatttacatgtaaatagacaaaaggaaacatttgccaaaagcggcagatctttactgaaagagagagcagctgttatgcaacatatagaaaaatgtatagatgcttggacagacccggtaatgggtggccattggtaaatgttaggaacacaccaggtcacctgacatcccaagaatgctcacaaacctgcaggcatatcattggcgtatggcactcattaaaaaggatcagagaccattaaaagaggaccatacctattaaaaaaaaatgtggagttggagggctaacatatttaattaaataaataaataaatctgggtctgcatctcttattaaataaaaatataaaaatatgtacattacattttgcttattttcatataaaaggtaagacagagtttgcaaagcatttgtggctttttgtagtttacttaagccaaaatgtgtttttttccccttgatagcttcgctaatattttaaacagtcctgtaaaaaaccaaaaaggactttttgtatagaaagcactaccctaagccatgaagaactccatgctttgctaaccaagataactgttttctctttgtagaagttttgtttttgaaatgtgtatttctaattatataaaatattaagaatcttttaaaaaaatctgtgaaatt

SEQ ID NO: 12266 - DNA, 2576 bp, Homo sapiens
  source 1..2576: mol_type = unassigned DNA
gtggacctttcccacaagagccacatttcttcccttggagaattgaagcaaatatgcagaacgaatgcaggaatttgggaactgagctgtgcaagtgctgaagaaggagatttgtttggaggaaacaggaaagagaaagaaaaggaaggaaaaaatacataatttcagggacgagagagagaagaaaaacggggactatggggagaaaaaagattcagattacgaggattatggatgaacgtaacagacaggtgacatttacaaagaggaaatttgggttgatgaagaaggcttatgagctgagcgtgctgtgtgactgtgagattgcgctgatcatcttcaacagcaccaacaagctgttccagtatgccagcaccgacatggacaaagtgcttctcaagtacacggagtacaacgagccgcatgagagccggacaaactcagacatcgtggagacgttgagaaagaagggccttaatggctgtgacagcccagaccccgatgcggacgattccgtaggtcacagccctgagtctgaggacaagtacaggaaaattaacgaagatattgatctaatgatcagcaggcaaagattgtgtgctgttccacctcccaacttcgagatgccagtctccatcccagtgtccagccacaacagtttggtgtacagcaaccctgtcagctcactgggaaaccccaacctattgccactggctcacccttctctgcagaggaatagtatgtctcctggtgtaacacatcgacctccaagtgcaggtaacacaggtggtctgatgggtggagacctcacgtctggtgcaggcaccagtgcagggaacgggtatggcaatccccgaaactcaccaggtctgctggtctcacctggtaacttgaacaagaatatgcaagcaaaatctcctcccccaatgaatttaggaatgaataaccgtaaaccagatctccgagttcttattccaccaggcagcaagaatacgatgccatcagtgtctgaggatgtcgacctgcttttgaatcaaaggataaataactcccagtcggctcagtcattggctaccccagtggtttccgtagcaactcctactttaccaggacaaggaatgggaggatatccatcagccatttcaacaacatatggtaccgagtactctctgagtagtgcagacctgtcatctctgtctgggtttaacaccgccagcgctcttcaccttggttcagtaactggctggcaacagcaacacctacataacatgccaccatctgccctcagtcagttgggagcttgcactagcactcatttatctcagagttcaaatctctccctgccttctactcaaagcctcaacatcaagtcagaacctgtttctcctcctagagaccgtaccaccaccccttcgagatacccacaacacacgcgccacgaggcggggagatctcctgttgacagcttgagcagctgtagcagttcgtacgacgggagcgaccgagaggatcaccggaacgaattccactcccccattggactcaccagaccttcgccggacgaaagggaaagtccctcagtcaagcgcatgcgactttctgaaggatgggcaacatgatcagattattacttactagtttttttttttttcttgcagtgtgtgtgtgtgctataccttaatggggaaggggggtcgatatgcattatatgtgccgtgtgtggaaaaaaaaaaagtcaggtactctgttttgtaaaagtacttttaaattgcctcagtgatacagtataaagataaacagaaatgctgagataagcttagcacttgagttgtacaacagaacacttgtacaaaatagattttaaggctaacttcttttcactgttgtgctcctttgcaaaatgtatgttacaatagatagtgtcatgttgcaggttcaacgttatttacatgtaaatagacaaaaggaaacatttgccaaaagcggcagatctttactgaaagagagagcagctgttatgcaacatatagaaaaatgtatagatgcttggacagacccggtaatgggtggccattggtaaatgttaggaacacaccaggtcacctgacatcccaagaatgctcacaaacctgcaggcatatcattggcgtatggcactcattaaaaaggatcagagaccattaaaagaggaccatacctattaaaaaaaaatgtggagttggagggctaacatatttaattaaataaataaataaatctgggtctgcatctcttattaaataaaaatataaaaatatgtacattacattttgcttattttcatataaaaggtaagacagagtttgcaaagcatttgtggctttttgtagtttacttaagccaaaatgtgtttttttccccttgatagcttcgctaatattttaaacagtcctgtaaaaaaccaaaaaggactttttgtatagaaagcactaccctaagccatgaagaactccatgctttgctaaccaagataactgttttctctttgtagaagttttgtttttgaaatgtgtatttctaattatataaaatattaa

SEQ ID NO: 12267 - DNA, 2393 bp, Homo sapiens
  source 1..2393: mol_type = unassigned DNA
aaagcctcggtcttcatagaaaaggagaggaggcaaacgcagcccaaactggggggtttctcttcaaagccagctggtctggctttattctgcaggaatttttttacctgtcagggtttggacaacaaagccctcagcaggtgctgacgggtacaacttcctggagaagcagaaaggcactggtgccaaagaagagttgcaaactgtgaagtaacttctatgaagagatgaagtaaagaacggaaggcaaatgattgtggcagtaaagaagtgtatgtggaacgaatgcaggaatttgggaactgagctgtgcaagtgctgaagaaggagatttgtttggaggaaacaggaaagagaaagaaaaggaaggaaaaaatacataatttcagggacgagagagagaagaaaaacggggactatggggagaaaaaagattcagattacgaggattatggatgaacgtaacagacaggtgacatttacaaagaggaaatttgggttgatgaagaaggcttatgagctgagcgtgctgtgtgactgtgagattgcgctgatcatcttcaacagcaccaacaagctgttccagtatgccagcaccgacatggacaaagtgcttctcaagtacacggagtacaacgagccgcatgagagccggacaaactcagacatcgtggaggcattgaacaagaaagaaaacaaaggctgtgaaagccccgatcccgactcctcttatgcactcaccccacgcactgaagaaaaatacaaaaaaattaatgaagaatttgataatatgatcaagagtcataaaattcctgctgttccacctcccaacttcgagatgccagtctccatcccagtgtccagccacaacagtttggtgtacagcaaccctgtcagctcactgggaaaccccaacctattgccactggctcacccttctctgcagaggaatagtatgtctcctggtgtaacacatcgacctccaagtgcaggtaacacaggtggtctgatgggtggagacctcacgtctggtgcaggcaccagtgcagggaacgggtatggcaatccccgaaactcaccaggtctgctggtctcacctggtaacttgaacaagaatatgcaagcaaaatctcctcccccaatgaatttaggaatgaataaccgtaaaccagatctccgagttcttattccaccaggcagcaagaatacgatgccatcagtgaatcaaaggataaataactcccagtcggctcagtcattggctaccccagtggtttccgtagcaactcctactttaccaggacaaggaatgggaggatatccatcagccatttcaacaacatatggtaccgagtactctctgagtagtgcagacctgtcatctctgtctgggtttaacaccgccagcgctcttcaccttggttcagtaactggctggcaacagcaacacctacataacatgccaccatctgccctcagtcagttgggagaccgtaccaccaccccttcgagatacccacaacacacgcgccacgaggcggggagatctcctgttgacagcttgagcagctgtagcagttcgtacgacgggagcgaccgagaggatcaccggaacgaattccactcccccattggactcaccagaccttcgccggacgaaagggaaagtccctcagtcaagcgcatgcgactttctgaaggatgggcaacatgatcagattattacttactagtttttttttttttcttgcagtgtgtgtgtgtgctataccttaatggggaaggggggtcgatatgcattatatgtgccgtgtgtggaaaaaaaaaaagtcaggtactctgttttgtaaaagtacttttaaattgcctcagtgatacagtataaagataaacagaaatgctgagataagcttagcacttgagttgtacaacagaacacttgtacaaaatagattttaaggctaacttcttttcactgttgtgctcctttgcaaaatgtatgttacaatagatagtgtcatgttgcaggttcaacgttatttacatgtaaatagacaaaaggaaacatttgccaaaagcggcagatctttactgaaagagagagcagctgttatgcaacatatagaaaaatgtatagatgcttggacagacccggtaatgggtggccattggtaaatgttaggaacacaccaggtcacctgacatcccaagaatgctcacaaacctgcaggcatatcattggcgtatggcactcattaaaaaggatcagagaccattaaaagaggaccatacctattaaaaaaaaatgtggagttggagggctaacatatttaattaaataaataaataaatctgggtctgcatctcttattaaataaaaatataaaaatatg

SEQ ID NO: 12268 - DNA, 1882 bp, Homo sapiens
  source 1..1882: mol_type = unassigned DNA
gtcacagacacttgagcacacgcgtacacccagacatcttcgggctgctattggattgactttgaaggttctgtgtgggtcgccgtggctgcatgtttgaatcaggtggagaagcacttcaacgctggacgaagtaaagattattgttgttattttttttttctctctctctctctcttaagaaaggaaaatatcccaaggactaatctgatcgggtcttccttcatcaggaacgaatgcaggaatttgggaactgagctgtgcaagtgctgaagaaggagatttgtttggaggaaacaggaaagagaaagaaaaggaaggaaaaaatacataatttcagggacgagagagagaagaaaaacggggactatggggagaaaaaagattcagattacgaggattatggatgaacgtaacagacaggtgacatttacaaagaggaaatttgggttgatgaagaaggcttatgagctgagcgtgctgtgtgactgtgagattgcgctgatcatcttcaacagcaccaacaagctgttccagtatgccagcaccgacatggacaaagtgcttctcaagtacacggagtacaacgagccgcatgagagccggacaaactcagacatcgtggagacgttgagaaagaagggccttaatggctgtgacagcccagaccccgatgcggacgattccgtaggtcacagccctgagtctgaggacaagtacaggaaaattaacgaagatattgatctaatgatcagcaggcaaagattgtgtgctgttccacctcccaacttcgagatgccagtctccatcccagtgtccagccacaacagtttggtgtacagcaaccctgtcagctcactgggaaaccccaacctattgccactggctcacccttctctgcagaggaatagtatgtctcctggtgtaacacatcgacctccaagtgcaggtaacacaggtggtctgatgggtggagacctcacgtctggtgcaggcaccagtgcagggaacgggtatggcaatccccgaaactcaccaggtctgctggtctcacctggtaacttgaacaagaatatgcaagcaaaatctcctcccccaatgaatttaggaatgaataaccgtaaaccagatctccgagttcttattccaccaggcagcaagaatacgatgccatcagtgaatcaaaggataaataactcccagtcggctcagtcattggctaccccagtggtttccgtagcaactcctactttaccaggacaaggaatgggaggatatccatcagccatttcaacaacatatggtaccgagtactctctgagtagtgcagacctgtcatctctgtctgggtttaacaccgccagcgctcttcaccttggttcagtaactggctggcaacagcaacacctacataacatgccaccatctgccctcagtcagttgggagcttgcactagcactcatttatctcagagttcaaatctctccctgccttctactcaaagcctcaacatcaagtcagaacctgtttctcctcctagagaccgtaccaccaccccttcgagatacccacaacacacgcgccacgaggcggggagatctcctgttgacagcttgagcagctgtagcagttcgtacgacgggagcgaccgagaggatcaccggaacgaattccactcccccattggactcaccagaccttcgccggacgaaagggaaagtccctcagtcaagcgcatgcgactttctgaaggatgggcaacatgatcagattattacttactagtttttttttttttcttgcagtgtgtgtgtgtgctataccttaatggggaaggggggtcgatatgcattatatgtgccgtgtgtggaaaaaaaaaaa

SEQ ID NO: 12269 - DNA, 722 bp, Homo sapiens
  source 1..722: mol_type = unassigned DNA
gcaaaatctcctcccccaatgaatttaggaatgaataaccgtaaaccagatctccgagttcttattccaccaggcagcaagaatacgatgccatcagtgtctgaggatgtcgacctgcttttgaatcaaaggataaataactcccagtcggctcagtcattggctaccccagtggtttccgtagcaactcctactttaccaggacaaggaatgggaggatatccatcagccatttcaacaacatatggtaccgagtactctctgagtagtgcagacctgtcatctctgtctgggtttaacaccgccagcgctcttcaccttggttcagtaactggctggcaacagcaacacctacataacatgccaccatctgccctcagtcagttgggaccgtaccaccaccccttcgagatacccacaacacacgcgccacgaggcggggagatctcctgttgacagcttgagcagctgtagcagttcgtacgacgggagcgaccgagaggatcaccggaacgaattccactcccccattggactcaccagaccttcgccggacgaaagggaaagtccctcagtcaagcgcatgcgactttctgaaggatgggcaacatgatcagattattacttactagtttttttttttttcttgcagtgtgtgtgtgtgctataccttaatggggaaggggggtcgatatgcattatatgtgccgtgtgtggaaaaa

SEQ ID NO: 12270 - DNA, 815 bp, Homo sapiens
  source 1..815: mol_type = unassigned DNA
ggtctgatgggtggagacctcacgtctggtgcaggcaccagtgcagggaacgggtatggcaatccccgaaactcaccaggtctgctggtctcacctggtaacttgaacaagaatatgcaagcaaaatctcctcccccaatgaatttaggaatgaataaccgtaaaccagatctccgagttcttattccaccaggcagcaagaatacgatgccatcagtgaatcaaaggataaataactcccagtcggctcagtcattggctaccccagtggtttccgtagcaactcctactttaccaggacaaggaatgggaggatatccatcagccatttcaacaacatatggtaccgagtactctctgagtagtgcagacctgtcatctctgtctgggtttaacaccgccagcgctcttcaccttggttcagtaactggctggcaacagcaacacctacataacatgccaccatctgccctcagtcagttgggaccgtaccaccaccccttcgagatacccacaacacacgcgccacgaggcggggagatctcctgttgacagcttgagcagctgtagcagttcgtacgacgggagcgaccgagaggatcaccggaacgaattccactcccccattggactcaccagaccttcgccggacgaaagggaaagtccctcagtcaagcgcatgcgactttctgaaggatgggcaacatgatcagattattacttactagtttttttttttttcttgcagtgtgtgtgtgtgctataccttaatggggaaggggggtcgatatgcattatatgtgccgtgtgtggaa

SEQ ID NO: 12271 - DNA, 1345 bp, Homo sapiens
  source 1..1345: mol_type = unassigned DNA
attttagtttagctccctgagacatgaaattctcttgttcagtctgtatccccttaacatgccaacatttagtctctttcttaaaattattattttcactcaagcagatttttacttttaatctttaaaatgatgtagaaactactttgaaaaatagcatttctggagtaggatggcttttagtttcaacaaatggaattctgaacgttgagaaagaagggccttaatggctgtgacagcccagaccccgatgcggacgattccgtaggtcacagccctgagtctgaggacaagtacaggaaaattaacgaagatattgatctaatgatcagcaggcaaagattgtgtgctgttccacctcccaacttcgagatgccagtctccatcccagtgtccagccacaacagtttggtgtacagcaaccctgtcagctcactgggaaaccccaacctattgccactggctcacccttctctgcagaggaatagtatgtctcctggtgtaacacatcgacctccaagtgcaggtaacacaggtggtctgatgggtggagacctcacgtctggtgcaggcaccagtgcagggaacgggtatggcaatccccgaaactcaccaggtctgctggtctcacctggtaacttgaacaagaatatgcaagcaaaatctcctcccccaatgaatttaggaatgaataaccgtaaaccagatctccgagttcttattccaccaggcagcaagaatacgatgccatcagtgtctgaggatgtcgacctgcttttgaatcaaaggataaataactcccagtcggctcagtcattggctaccccagtggtttccgtagcaactcctactttaccaggacaaggaatgggaggatatccatcagccatttcaacaacatatggtaccgagtactctctgagtagtgcagacctgtcatctctgtctgggtttaacaccgccagcgctcttcaccttggttcagtaactggctggcaacagcaacacctacataacatgccaccatctgccctcagtcagttgggcctcaacatcaagtcagaacctgtttctcctcctagagaccgtaccaccaccccttcgagatacccacaacacacgcgccacgaggcggggagatctcctgttgacagcttgagcagctgtagcagttcgtacgacgggagcgaccgagaggatcaccggaacgaattccactcccccattggactcaccagaccttcgccggacgaaagggaaagtccctcagtcaagcgcatgcgactttctgaaggatgggcaacatgatcagattattacttactagtttttttttttttcttgc

SEQ ID NO: 12272 - DNA, 1182 bp, Homo sapiens
  source 1..1182: mol_type = unassigned DNA
atggggagaaaaaagattcagattacgaggattatggatgaacgtaacagacaggtgacatttacaaagaggaaatttgggttgatgaagaaggcttatgagctgagcgtgctgtgtgactgtgagattgcgctgatcatcttcaacagcaccaacaagctgttccagtatgccagcaccgacatggacaaagtgcttctcaagtacacggagtacaacgagccgcatgagagccggacaaactcagacatcgtggaggctgttccacctcccaacttcgagatgccagtctccatcccagtgtccagccacaacagtttggtgtacagcaaccctgtcagctcactgggaaaccccaacctattgccactggctcacccttctctgcagaggaatagtatgtctcctggtgtaacacatcgacctccaagtgcaggtaacacaggtggtctgatgggtggagacctcacgtctggtgcaggcaccagtgcagggaacgggtatggcaatccccgaaactcaccaggtctgctggtctcacctggtaacttgaacaagaatatgcaagcaaaatctcctcccccaatgaatttaggaatgaataaccgtaaaccagatctccgagttcttattccaccaggcagcaagaatacgatgccatcagtgtctgaggatgtcgacctgcttttgaatcaaaggataaataactcccagtcggctcagtcattggctaccccagtggtttccgtagcaactcctactttaccaggacaaggaatgggaggatatccatcagccatttcaacaacatatggtaccgagtactctctgagtagtgcagacctgtcatctctgtctgggtttaacaccgccagcgctcttcaccttggttcagtaactggctggcaacagcaacacctacataacatgccaccatctgccctcagtcagttgggagaccgtaccaccaccccttcgagatacccacaacacacgcgccacgaggcggggagatctcctgttgacagcttgagcagctgtagcagttcgtacgacgggagcgaccgagaggatcaccggaacgaattccactcccccattggactcaccagaccttcgccggacgaaagggaaagtccctcagtcaagcgcatgcgactttctgaaggatgggcaacatga

SEQ ID NO: 12273 - DNA, 1254 bp, Homo sapiens
  source 1..1254: mol_type = unassigned DNA
atggggagaaaaaagattcagattacgaggattatggatgaacgtaacagacaggtgacatttacaaagaggaaatttgggttgatgaagaaggcttatgagctgagcgtgctgtgtgactgtgagattgcgctgatcatcttcaacagcaccaacaagctgttccagtatgccagcaccgacatggacaaagtgcttctcaagtacacggagtacaacgagccgcatgagagccggacaaactcagacatcgtggaggctgttccacctcccaacttcgagatgccagtctccatcccagtgtccagccacaacagtttggtgtacagcaaccctgtcagctcactgggaaaccccaacctattgccactggctcacccttctctgcagaggaatagtatgtctcctggtgtaacacatcgacctccaagtgcaggtaacacaggtggtctgatgggtggagacctcacgtctggtgcaggcaccagtgcagggaacgggtatggcaatccccgaaactcaccaggtctgctggtctcacctggtaacttgaacaagaatatgcaagcaaaatctcctcccccaatgaatttaggaatgaataaccgtaaaccagatctccgagttcttattccaccaggcagcaagaatacgatgccatcagtgaatcaaaggataaataactcccagtcggctcagtcattggctaccccagtggtttccgtagcaactcctactttaccaggacaaggaatgggaggatatccatcagccatttcaacaacatatggtaccgagtactctctgagtagtgcagacctgtcatctctgtctgggtttaacaccgccagcgctcttcaccttggttcagtaactggctggcaacagcaacacctacataacatgccaccatctgccctcagtcagttgggagcttgcactagcactcatttatctcagagttcaaatctctccctgccttctactcaaagcctcaacatcaagtcagaacctgtttctcctcctagagaccgtaccaccaccccttcgagatacccacaacacacgcgccacgaggcggggagatctcctgttgacagcttgagcagctgtagcagttcgtacgacgggagcgaccgagaggatcaccggaacgaattccactcccccattggactcaccagaccttcgccggacgaaagggaaagtccctcagtcaagcgcatgcgactttctgaaggatgggcaacatga

SEQ ID NO: 12274 - DNA, 527 bp, Homo sapiens
  source 1..527: mol_type = unassigned DNA
tgaaggattgtaaatgatagggttggcagagttcatagagacacatgttaaatgattaatttcatgagatttgtaccaagttatctctttatgtggaaaactaatactgaaatctaatatttttaacttttaaaaaaattcatcagtaatgtctttttatttattttaaaagaatcaaaggataaataactcccagtcggctcagtcattggctaccccagtggtttccgtagcaactcctactttaccaggacaaggaatgggaggatatccatcagccatttcaacaacatatggtaccgagtactctctgagtagtgcagacctgtcatctctgtctgggtttaacaccgccagcgctcttcaccttggttcagtaactggctggcaacagcaacacctacataacatgccaccatctgccctcagtcagttgggagcttgcactagcactcatttatctcagagttcaaatctctccctgccttctactcaaagcctcaacatcaagtcagaacctgtttctc

SEQ ID NO: 12275 - DNA, 520 bp, Homo sapiens
  source 1..520: mol_type = unassigned DNA
tccataggtggtctgatgggtggagacctcacgtctggtgcaggcaccagtgcagggaacgggtatggcaatccccgaaactcaccaggtctgctggtctcacctggtaacttgaacaagaatatgcaagcaaaatctcctcccccaatgaatttaggaatgaataaccgtaaaccagatctccgagttcttattccaccaggcagcaagaatacgatgccatcagtggtaatacaaaactacattttaaataaatattgataatgttttgtatatgttttgctgtttttatatttgtctaacttgatgaattacttaacattctcccagaaaattaacataacagtgccattgacagagccttgcttgtatttagctattatttctggtaactggtttgcatttcccttttccgtgtaaaaaaaatatatatatatatctggtgaacttcactaggctgatgttctaggataagaaaaacattttcttttaaggctttcaatttatagttggaaaaaaa

SEQ ID NO: 12276 - DNA, 1063 bp, Homo sapiens
  source 1..1063: mol_type = unassigned DNA
catcttcgggctgctattggattgactttgaaggttctgtgtgggtcgccgtggctgcatgtttgaatcaggtggagaagcacttcaacgctggacgaagtaaagattattgttgttattttttttttctctctctctctctcttaagaaaggaaaatatcccaaggactaatctgatcgggtcttccttcatcaggaacgaatgcaggaatttgggaactgagctgtgcaagtgctgaagaaggagatttgtttggaggaaacaggaaagagaaagaaaaggaaggaaaaaatacataatttcagggacgagagagagaagaaaaacggggactatggggagaaaaaagattcagattacgaggattatggatgaacgtaacagacaggtgacatttacaaagaggaaatttgggttgatgaagaaggcttatgagctgagcgtgctgtgtgactgtgagattgcgctgatcatcttcaacagcaccaacaagctgttccagtatgccagcaccgacatggacaaagtgcttctcaagtacacggagtacaacgagccgcatgagagccggacaaactcagacatcgtggaggcattgaacaagaaagaaaacaaaggctgtgaaagccccgatcccgactcctcttatgcactcaccccacgcactgaagaaaaatacaaaaaaattaatgaagaatttgataatatgatcaagagtcataaaattcctgctgttccacctcccaacttcgagatgccagtctccatcccagtgtccagccacaacagtttggtgtacagcaaccctgtcagctcactgggaaaccccaacctattgccactggctcacccttctctgcagaggaatagtatgtctcctggtgtaacacatcgacctccaagtgcaggtaacacaggtggtctgatgggtggagacctcacgtctggtgcaggcaccagtgcagggaacgggtatggcaatccccgaaactcaccaggtctgctggtctcacctggtaacttgaacaagaatatgcaagcaaaatctcctcccccaatgaa

SEQ ID NO: 12277 - DNA, 854 bp, Homo sapiens
  source 1..854: mol_type = unassigned DNA
atgaattagctgccctacttagcatacacagcaggaacgaatgcaggaatttgggaactgagctgtgcaagtgctgaagaaggagatttgtttggaggaaacaggaaagagaaagaaaaggaaggaaaaaatacataatttcagggacgagagagagaagaaaaacggggactatggggagaaaaaagattcagattacgaggattatggatgaacgtaacagacaggtgacatttacaaagaggaaatttgggttgatgaagaaggcttatgagctgagcgtgctgtgtgactgtgagattgcgctgatcatcttcaacagcaccaacaagctgttccagtatgccagcaccgacatggacaaagtgcttctcaagtacacggagtacaacgagccgcatgagagccggacaaactcagacatcgtggaggcattgaacaagaaagaaaacaaaggctgtgaaagccccgatcccgactcctcttatgcactcaccccacgcactgaagaaaaatacaaaaaaattaatgaagaatttgataatatgatcaagagtcataaaattcctgctgttccacctcccaacttcgagatgccagtctccatcccagtgtccagccacaacagtttggtgtacagcaaccctgtcagctcactgggaaaccccaacctattgccactggctcacccttctctgcagaggaatagtatgtctcctggtgtaacacatcgacctccaagtgcaggtaacacaggtggtctgatgggtggagacctcacgtctggtgcaggcaccagtgcagggaacgggtatggcaatccccgaaactcaccaggtctgctggtctcacct

SEQ ID NO: 12278 - DNA, 100 bp, Homo sapiens
  source 1..100: mol_type = unassigned DNA
ctcacgtctggtgcaggcaccagtgcagctccagggaaggagtcttgctttctgaagttctgtgtgaggaggaaagcaagggttgtacactgaacttagt

SEQ ID NO: 12279 - DNA, 914 bp, Homo sapiens
  source 1..914: mol_type = unassigned DNA
gtttgtaaatgagatagcccagtgggagaatgatctttagcatctgtccagaagaaattcttctcgacttgggtctcaaaccactttgccttcatctgcctgcttatgccaaactcaaaatgagcagaagcctgccataatgaagttcccctttttacaggaacgaatgcaggaatttgggaactgagctgtgcaagtgctgaagaaggagatttgtttggaggaaacaggaaagagaaagaaaaggaaggaaaaaatacataatttcagggacgagagagagaagaaaaacggggactatggggagaaaaaagattcagattacgaggattatggatgaacgtaacagacaggtgacatttacaaagaggaaatttgggttgatgaagaaggcttatgagctgagcgtgctgtgtgactgtgagattgcgctgatcatcttcaacagcaccaacaagctgttccagtatgccagcaccgacatggacaaagtgcttctcaagtacacggagtacaacgagccgcatgagagccggacaaactcagacatcgtggaggcattgaacaagaaagaaaacaaaggctgtgaaagccccgatcccgactcctcttatgcactcaccccacgcactgaagaaaaatacaaaaaaattaatgaagaatttgataatatgatcaagagtcataaaattcctgctgttccacctcccaacttcgagatgccagtctccatcccagtgtccagccacaacagtttggtgtacagcaaccctgtcagctcactgggaaaccccaacctattgccactggctcacccttctctgcagaggaatagtatgtctcctggtgtaacacatcgacctccaagtgcaggtaacacaggtggtctgatgggtggagacctcacgtctggt

SEQ ID NO: 12280 - DNA, 851 bp, Homo sapiens
  source 1..851: mol_type = unassigned DNA
aaattgtcctatatgcatttgctgtggattcatggattggctttctgtgatagagaaagcttgtttgtatctttggggtcttaaacgtgcatgggaaataccattctaacacactgcttgcttctaaggaacgaatgcaggaatttgggaactgagctgtgcaagtgctgaagaaggagatttgtttggaggaaacaggaaagagaaagaaaaggaaggaaaaaatacataatttcagggacgagagagagaagaaaaacggggactatggggagaaaaaagattcagattacgaggattatggatgaacgtaacagacaggtgacatttacaaagaggaaatttgggttgatgaagaaggcttatgagctgagcgtgctgtgtgactgtgagattgcgctgatcatcttcaacagcaccaacaagctgttccagtatgccagcaccgacatggacaaagtgcttctcaagtacacggagtacaacgagccgcatgagagccggacaaactcagacatcgtggagacgttgagaaagaagggccttaatggctgtgacagcccagaccccgatgcggacgattccgtaggtcacagccctgagtctgaggacaagtacaggaaaattaacgaagatattgatctaatgatcagcaggcaaagattgtgtgctgttccacctcccaacttcgagatgccagtctccatcccagtgtccagccacaacagtttggtgtacagcaaccctgtcagctcactgggaaaccccaacctattgccactggctcacccttctctgcagaggaatagtatgtctcctggtgtaacacatcgacctccaagtgcaggtaa

SEQ ID NO: 12281 - DNA, 623 bp, Homo sapiens
  source 1..623: mol_type = unassigned DNA
ctttagcatctgtccagaagaaattcttctcgacttgggtctcaaaccactttgccttcatctgcctgcttatgccaaactcaaaatgagcagaagcctgccataatgaagttcccctttttagaacgaatgcaggaatttgggaactgagctgtgcaagtgctgaagaaggagatttgtttggaggaaacaggaaagagaaagaaaaggaaggaaaaaatacataatttcagggacgagagagagaagaaaaacggggactatggggagaaaaaagattcagattacgaggattatggatgaacgtaacagacaggtgacatttacaaagaggaaatttgggttgatgaagaaggcttatgagctgagcgtgctgtgtgactgtgagattgcgctgatcatcttcaacagcaccaacaagctgttccagtatgccagcaccgacatggacaaagtgcttctcaagtacacggagtacaacgagccgcatgagagccggacaaactcagacatcgtggaggcattgaacaagaaagaaaacaaaggctgtgaaagccccgatcccgactcctcttatgcactcaccccacgcactgaagaaaaatacaaaaaaattaatgaag

SEQ ID NO: 12282 - DNA, 609 bp, Homo sapiens
  source 1..609: mol_type = unassigned DNA
gaagctgcttcctcggtaaatatttccaaactgattagaaagttcatggccccgcgatgaagtcgagatctcaaatactgcaggaacgaatgcaggaatttgggaactgagctgtgcaagtgctgaagaaggagatttgtttggaggaaacaggaaagagaaagaaaaggaaggaaaaaatacataatttcagggacgagagagagaagaaaaacggggactatggggagaaaaaagattcagattacgaggattatggatgaacgtaacagacaggtgacatttacaaagaggaaatttgggttgatgaagaaggcttatgagctgagcgtgctgtgtgactgtgagattgcgctgatcatcttcaacagcaccaacaagctgttccagtatgccagcaccgacatggacaaagtgcttctcaagtacacggagtacaacgagccgcatgagagccggacaaactcagacatcgtggagacgttgagaaagaagggccttaatggctgtgacagcccagaccccgatgcggacgattccgtaggtcacagccctgagtctgaggacaagtacaggaaaattaacgaagatattgatctaatgatcagc

SEQ ID NO: 12283 - DNA, 557 bp, Homo sapiens
  source 1..557: mol_type = unassigned DNA
acatttcttcccttggagaattgaagcaaatatgcagtacgaacgaatgcaggaatttgggaactgagctgtgcaagtgctgaagaaggagatttgtttggaggaaacaggaaagagaaagaaaaggaaggaaaaaatacataatttcagggacgagagagagaagaaaaacggggactatggggagaaaaaagattcagattacgaggattatggatgaacgtaacagacaggtgacatttacaaagaggaaatttgggttgatgaagaaggcttatgagctgagcgtgctgtgtgactgtgagattgcgctgatcatcttcaacagcaccaacaagctgttccagtatgccagcaccgacatggacaaagtgcttctcaagtacacggagtacaacgagccgcatgagagccggacaaactcagacatcgtggagacgttgagaaagaagggccttaatggctgtgacagcccagaccccgatgcggacgattccgtaggtcacagccctgagtctgaggacaagtacaggaaaattaacgaagatattgatcta

SEQ ID NO: 12284 - DNA, 527 bp, Homo sapiens
  source 1..527: mol_type = unassigned DNA
attaactctctgatttaggaacgaatgcaggaatttgggaactgagctgtgcaagtgctgaagaaggagatttgtttggaggaaacaggaaagagaaagaaaaggaaggaaaaaatacataatttcagggacgagagagagaagaaaaacggggactatggggagaaaaaagattcagattacgaggattatggatgaacgtaacagacaggtgacatttacaaagaggaaatttgggttgatgaagaaggcttatgagctgagcgtgctgtgtgactgtgagattgcgctgatcatcttcaacagcaccaacaagctgttccagtatgccagcaccgacatggacaaagtgcttctcaagtacacggagtacaacgagccgcatgagagccggacaaactcagacatcgtggagacgttgagaaagaagggccttaatggctgtgacagcccagaccccgatgcggacgattccgtaggtcacagccctgagtctgaggacaagtacaggaaaattaacgaagata

SEQ ID NO: 12285 - DNA, 140 bp, Homo sapiens
  source 1..140: mol_type = unassigned DNA
gggatgtcctgtgccgcaatcttgaagtcattccagatattgctttaacctaccagaacttgtactccttacattttgagacgttgagaaagaagggccttaatggctgtgacagcccagaccccgatgcggacgattcc

SEQ ID NO: 12286 - DNA, 100 bp, Homo sapiens
  source 1..100: mol_type = unassigned DNA
attaaaggaaacagctcaatctttatcttgggagttcctgactgtctcagaaatgaggaatttgatatcttaagttctcagacgttgagaaagaagggcc

SEQ ID NO: 12287 - DNA, 773 bp, Homo sapiens
  source 1..773: mol_type = unassigned DNA
cacacacgcacacatcgtctccagctctctgctcgctctgctcgcagtcacagacacttgagcacacgcgtacacccagacatcttcgggctgctattggattgactttgaaggttctgtgtgggtcgccgtggctgcatgtttgaatcaggtggagaagcacttcaacgctggacgaagtaaagattattgttgttattttttttttctctctctctctctcttaagaaaggaaaatatcccaaggactaatctgatcgggtcttccttcatacttcttaggaaaggcagcattttacttcattcattaattgcaccatttacgtcctgattgctgtgcatgtggaatatattgaaagataatattaaagtgaacgaatgcaggaatttgggaactgagctgtgcaagtgctgaagaaggagatttgtttggaggaaacaggaaagagaaagaaaaggaaggaaaaaatacataatttcagggacgagagagagaagaaaaacggggactatggggagaaaaaagattcagattacgaggattatggatgaacgtaacagacaggtgacatttacaaagaggaaatttgggttgatgaagaaggcttatgagctgagcgtgctgtgtgactgtgagattgcgctgatcatcttcaacagcaccaacaagctgttccagtatgccagcaccgacatggacaaagtgcttctcaagtacacggagtacaacgagccgcatgagagccggacaaactcagacatcgtggagacgt

SEQ ID NO: 12288 - DNA, 100 bp, Homo sapiens
  source 1..100: mol_type = unassigned DNA
gacaaactcagacatcgtggagctcccacagggatgtcctgtgccgcaatcttgaagtcattccagatattgctttaacctaccagaacttgtactcctt

SEQ ID NO: 12289 - DNA, 100 bp, Homo sapiens
  source 1..100: mol_type = unassigned DNA
gacaaagtgcttctcaagtacacggagtacaacgagccgcatgagagccggacaaactcagacatcgtggagtaacagagcagcagcagccacagatggc

SEQ ID NO: 12290 - DNA, 100 bp, Homo sapiens
  source 1..100: mol_type = unassigned DNA
caaactcagacatcgtggaggttgggagacaaggaattaaaggaaacagctcaatctttatcttgggagttcctgactgtctcagaaatgaggaatttga

SEQ ID NO: 12291 - DNA, 689 bp, Homo sapiens
  source 1..689: mol_type = unassigned DNA
acacttgagcacacgcgtacacccagacatcttcgggctgctattggattgactttgaaggttctgtgtgggtcgccgtggctgcatgtttgaatcaggtggagaagcacttcaacgctggacgaagtaaagattattgttgttattttttttttctctctctctctctcttaagaaaggaaaatatcccaaggactaatctgatcgggtcttccttcatgaacgaatgcaggaatttgggaactgagctgtgcaagtgctgaagaaggagatttgtttggaggaaacaggaaagagaaagaaaaggaaggaaaaaatacataatttcagggacgagagagagaagaaaaacggggactatggggagaaaaaagattcagattacgaggattatggatgaacgtaacagacaggtgacatttacaaagaggaaatttgggttgatgaagaaggcttatgagctgagcgtgctgtgtgactgtgagattgcgctgatcatcttcaacagcaccaacaagctgttccagtatgccagcaccgacatggacaaagtgcttctcaagtacacggagtacaacgagccgcatgagagccggacaaactcagacatcgtggaggtgagagagcatgcgtggtgagccccaagcctccgcaagcaggggagtttggacctccccctgccacacaca

SEQ ID NO: 12292 - DNA, 125 bp, Homo sapiens
  source 1..125: mol_type = unassigned DNA
ggagaaaaaagattcagattacgaggattatggatgaacgtaacagacagctttcctactttgaaaggataggagaggtgacatttacaaagaggaaatttgggttgatgaagaaggcttatgag

SEQ ID NO: 12293 - DNA, 573 bp, Homo sapiens
  source 1..573: mol_type = unassigned DNA
aatttttcataacgggtgaaattgtcacctaatttcattaaaaagattaggaaactttttacaaaaaaaaatacatttcaagtgttagtctttaaaaaagcatagtttgcatcatttaaatgacttgttaaattacttatgagatcattttaattgttaaaaaataaaactacttgatctgctcctgtctgtgatataccatatatttttaacaaaaaagttatttttattcattttattgctttagctccatatagtttatttccttgataaaattagaatatgatagttcttatgaaactgacttgctgttagagtggtatttaatttttcttttttgttcagcaggaacgaatgcaggaatttgggaactgagctgtgcaagtgctgaagaaggagatttgtttggaggaaacaggaaagagaaagaaaaggaaggaaaaaatacataatttcagggacgagagagagaagaaaaacggggactatggggagaaaaaagattcagattacgaggattatggatgaacgtaacagacaggtgacatttacaaagaggaaatttgggttgat

SEQ ID NO: 12294 - DNA, 503 bp, Homo sapiens
  source 1..503: mol_type = unassigned DNA
gaggatcggcaataattggatggcgttgcagctgttgcgcctctgctgaacgcccagccagagcggattcacttttcacacaaatcaaccggagggattgttgctgcctgcaatcaataactcagcggagtgagttgctcaaactagaggcgtccctcgtctgggtctttgagggccgtccggattgagtcccagcgctctgctttccaaacaaagaagtgggcaccaaaacgcaggacgagatttttaatccccacttccaccacaaccccgggtgccaaagaagagttgcaaactgtgaagtaacttctatgaagagatgaagtaaagaacggaaggcaaatgattgtggcagtaaagaagtgtatgtggaacgaatgcaggaatttgggaactgagctgtgcaagtgctgaagaaggagatttgtttggaggaaacaggaaagagaaagaaaaggaaggaaaaaatacataatttcagggacgagagagagaagaaaaac

SEQ ID NO: 12295 - DNA, 582 bp, Homo sapiens
  source 1..582: mol_type = unassigned DNA
acacgcacacatcgtctccagctctctgctcgctctgctcgcagtcacagacacttgagcacacgcgtacacccagacatcttcgggctgctattggattgactttgaaggttctgtgtgggtcgccgtggctgcatgtttgaatcaggtggagaagcacttcaacgctggacgaagtaaagattattgttgttattttttttttctctctctctctctcttaagaaaggaaaatatcccaaggactaatctgatcgggtcttccttcataacacttattactggacccacaaacatacctgagggacacggacataaaaattatcctagaggtgtcttcactttgaaaggcagtatttgccaacagattcgttcttactgaattacaaatctcagagatttcctgtttaccagaagtcctcttggagtgcatgggatatagaagcagccattttgagcattcgctttgcaccatcaactgcctagcatctgaaattgaagtcagtcttacataggaacgaatgcaggaatttgggaactgagctgtgcaagtgctgaagaaggagatttgtttggaggaaa

SEQ ID NO: 12296 - DNA, 100 bp, Homo sapiens
  source 1..100: mol_type = unassigned DNA
caaatattttcagatgtaatttaaaaccaagtaaagaacgaatgcaggaatttgggaactgagctgtgcaagtgctgaagaaggagatttgtttggagga

SEQ ID NO: 12297 - DNA, 100 bp, Homo sapiens
  source 1..100: mol_type = unassigned DNA
gttgccttatggagtttttgaatggttctgacctgttctcatcaactactacaataacatatataattatcaggaacgaatgcaggaatttgggaactga

SEQ ID NO: 12298 - DNA, 100 bp, Homo sapiens
  source 1..100: mol_type = unassigned DNA
ggaaaatatcccaaggactaatctgatcgggtcttccttcatgaagcaaacatgtagaaaggggtggacctttcccacaagagccacatttcttcccttg

SEQ ID NO: 12299 - DNA, 421 bp, Homo sapiens
  source 1..421: mol_type = unassigned DNA
atcaaatatctcattctatttgtagaaaagtacatttagctatgtattctgctactaactcaattctaaaagttttcatcaaaacagtctttaaacataacatttgcttaaaatttggttctcccgtcaaagagacagtaggtggctgttacctttacttcaaattttactaaattttataaaaacctactatttttattaatataattcacacagcattcgaatgtttgactttttttcagacttcttaggaaaggcagcattttacttcattcattaattgcaccatttacgtcctgattgctgtgcatgtggaatatattgaaagataatattaaagtgtaagttttattaaatgttaatttgttttttatttcaataacaaatgagcaatttataataaaaacagttttccaccttt

SEQ ID NO: 12300 - DNA, 432 bp, Homo sapiens
  source 1..432: mol_type = unassigned DNA
ttgcagctgttgcgcctctgctgaacgcccagccagagcggattcacttttcacacaaatcaaccggagggattgttgctgcctgcaatcaataactcagcggagtgagttgctcaaactagaggcgtccctcgtctgggtctttgagggccgtccggattgagtcccagcgctctgctttccaaacaaagaagtgggcaccaaaacgcaggacgagatttttaatccccacttccaccacaaccccgggtgccaaagaagagttgcaaactgtgaagtaacttctatgaagagatgaagtaaagaacggaaggcaaatgattgtggcagtaaagaagtgtatgtgaaaggaaaatatcccaaggactaatctgatcgggtcttccttcatacttcttaggaaaggcagcattttacttcattcattaattg

SEQ ID NO: 12301 - DNA, 100 bp, Homo sapiens
  source 1..100: mol_type = unassigned DNA
gtgcaggaaaagcacgctggaatcgagtgctgcagacatcctggaccgtggtttttacgcaaaggaaaatatcccaaggactaatctgatcgggtcttcc

SEQ ID NO: 12302 - DNA, 160 bp, Homo sapiens
  source 1..160: mol_type = unassigned DNA
gaagagttgcaaactgtgaagtaacttctatgaagagatgaagtaaagaacggaaggcaaatgattgtggcagtaaagaagtgtatgtgcgctccaacctctcagggtgaaaaccgcgacttctgggcgtgcaggaaaagcacgctggaatcgagtgctg

SEQ ID NO: 12303 - DNA, 344 bp, Homo sapiens
  source 1..344: mol_type = unassigned DNA
aaactggggggtttctcttcaaagccagctggtctggctttattctgcaggaatttttttacctgtcagggtttggacaacaaagccctcagcaggtgctgacgggtacaacttcctggagaagcagaaaggcactggtgccaaagaagagttgcaaactgtgaagtaacttctatgaagagatgaagtaaagaacggaaggcaaatgattgtggcagtaaagaagtgtatgtggtgagtgctcacatttgtttttatcatttaccacagagttaccataaaggtaaaactgccaaactccttggccttaggtatttacagaatagacgtgtataacaataata

SEQ ID NO: 12304 - DNA, 100 bp, Homo sapiens
  source 1..100: mol_type = unassigned DNA
atgggatagaatcaatgttctgatgaacaacatttaacaattttgtgccaaagaagagttgcaaactgtgaagtaacttctatgaagagatgaagtaaag

SEQ ID NO: 12305 - DNA, 100 bp, Homo sapiens
  source 1..100: mol_type = unassigned DNA
cagaaatcagaacacaggagcatttgtctgtgctcagtatagttaaacactgcttggaaaaataaggtgccaaagaagagttgcaaactgtgaagtaact

SEQ ID NO: 12306 - DNA, 100 bp, Homo sapiens
  source 1..100: mol_type = unassigned DNA
ttgaattgaaggtttctgtgatatttcaagaaatgggatagaatcaatgttctgatgaacaacatttaacaattttgtaagtaaaggtgccaaagaagag

SEQ ID NO: 12307 - DNA, 828 bp, Homo sapiens
  source 1..828: mol_type = unassigned DNA
gaggaagagaaggaggaggaggaggaggaggagaaagtggctctcagcggccggtcggattaaaagtaaccagactcgtccagaaaactgcgtccaggaaggaagtgacagaagacgaatgggaaaaggagaacagctcacagcgtttgaaacatcgcggcaccactttcagataaaaacatagacctgaatggcatcatccagtatccaaggaaaccatgcttgcttgaagagtgagcaggtgagcaaagagacaagattacatgtttaaaccaagaaaagaatcttgaaaaagcattgaaaagaacaactttcaagtcaaaagaatcaaggtgaagagaatggatactcatgcccatgtgaatttgctgccccaagtctactggaggatcaagctgcaggtttcaatagctatagcctgaagaatctctgtaatgaactaaaacaatcagtaaaagatcagttgcagtggaagacattatactctagatttttctagtattattaaatttgaaaatgatttattccaaattttaacttagcttttaattttactagtgtcaaaatgttgtactactttggacaactgatttttccaatagagagtcaatagcatctttgcagggtggtttaaaagccaataatttaatccatattctactaaaacttttaatataagcattttacccagatgtattttttccttgttttagaaaatctgattttaattgctaaaactcgtttttaaatattaattcaatgaaagaaatgctatggttttctactttttcatttcttaaactcaagggaaaacatgggtgaaaaaca

SEQ ID NO: 12308 - DNA, 2350 bp, Homo sapiens
  source 1..2350: mol_type = unassigned DNA
agactcgtccagaaaactgcgtccaggaaggaagtgacagaagacgaatgggaaaaggagaacagctcacagcgtttgaaacatcgcgaagttgtacccgtcagcacctgctgagggctttgttgtccaaaccctgacaggtaaaaaaattcctgcagaataaagccagaccagctggctttgaagagaaaccccccagtttgggctgcgtttgcctcctctccttttctatgaagaccgaggctttgcccccttgatcgtcaagccgtgagatgcgtgatctctctgcacaagtgtctggcaggccgagggcaccactttcagataaaaacatagacctgaatggcatcatccagtatccaaggaaaccattgtgtctgtaaccagctaatgagctgcaacagagcctggccttcattttcagcaaattaagttcatccctcataggaattgtggtctggctgtggcaccgctcctaggtatgggtgggatttgtttcttctagcagttgtaggttagccacatgggtacgtgctgtcgcaccacacaacaaaattttctctataataaccagtctaagtaggcttttaccccacaaaagtagatcccatttaatttactttgtgtttatagcactccctctcaaaccgcaccattggcacagactaatatttatacaactttttattttaaactatttatttggagttgagacttcagtagcactccctgtcagattcattgaacaagcttaaattcaggatactgaaaatgtaaattgggaagagggatgtatgttcttgggattcttttctcccgtgcatggacacccaaacaactctcactgtagtaaagggaggttacacatgtgttgataacatttgtattactgctggtaggaaattgaacattgatgggtggttttaaaagcctgcttttgcctattgtgtttccacatttctttgccaatatagttggtcaaattagttatgcaaaatgcatctaaaaacttctaatccaaaagtgtcaatgttgttaaagatttcttttcatacacaaagaaatattacattgctccattattttaatggaagtcgttagtcaaatacgcttttgccacagaaagaaaagggaaaaaattcttaattttgtatctgacctctgctttggggccttactttaagttacatttttcttaaataaagcttttctgttttttaaagtgaatgacgggatgttaactttaaatagacatttaaccacataaagtatagtggcagatggttcatttttctactcagggtagacactttattcaggtaatgatatttaatcctcattttctatgaaatctgcatgttgttcttaaatctgatactattttgtgatttaaaatgagtgttgggttaactttgtttacaagtgaagtatttatccctttgattctcttttactttcttcttttggtaaacacctatccgtttctaagacccacttatatgttatctcatcaaggaaaattttcccatcctcccaaaggagaacagaactccactgtagtggaataagttttttgaggtatgaaccaatgcttctgtcctcctaatattcttacaacctctaacccgcctctgcattcaggaaaccagaatacattagggaggagacagcaaaggaaaacaaaagacaataaaggaatcgatgtatttgttttgtaactcaaagttaaagtccaaatttagaaaatagatttgaaagcataacgggtcaatttctgttgtgcctctgaagaagaaagttgagaaagaacgaagagggcttagatgctggtgggtgtctgcaaaaaagcccagacaatgcctggaataataaagaagcagagaacttccagggaggaagggaacagtctctaagatggagcaggacctggggaagtcttgcttctccactgaagaacatggaccaagaccagggcagaagggatggcagcttccccgtagagcagtgaggacggatgacgacatgaagactggactgctcattctcaccttcccttcacagtccctggcactttttaagctccttggaaattagaggcaatctaggagaaagggggatagaagcagaccttatttctgttacaatgtgaatgggagcttcaaattgaagataaaatgttatggaaaaagtgaaattatatatatattttgcacatcgtagcttggtggctttaggtttctgtgcatcaaaggaaggaattgtgtcttcctcattgtcatactctggtattggagattgtgcaacatatatagtaggtatgcaataaacagctgttaacagaatgaatcaa

SEQ ID NO: 12309 - DNA, 741 bp, Homo sapiens
  source 1..741: mol_type = unassigned DNA
gcgtccaggaaggaagtgacagaagacgaatgggaaaaggagaacagctcacagcgtttgaaacatcgcggcaccactttcagataaaaacatagacctgaatggcatcatccagtatccaaggaaaccatgcagttttgaacatctggaggcctgatttattggagattgcaaatgtacagtgtaacatagctgtggagagcgagaagatcaggattgtcaatgctgtcattgcttttactggaatccccagcacgaattgaaggtttgaccagagacaaagaagcaaatgctatcaattaacattcacatgtggtaggaattctactagtgcatgtggagagaaacatggctgctgcatggagtcataaacctcagaggaagctgagaatgagatgaaatgtatatgtaacccttgtgtatggcaagtttggcaagaaagaaaaagcatacttggcagattaagataaggtttctctctgtttactgatatagtctcaggtttgcattgtgtgatgaataataggttgggggaagatatcctttgtttattcattcatttcatcaacaaatatttaatgagtacctactatatgccatgccacaaagagtataaacctagagacagaatgttgagtcacatagacagtgctcctgatacaattatttgaactgagttaacaatacttcaaggttccatgtctaatttactggctaggttctcaacaaaatttctggata

SEQ ID NO: 12310 - DNA, 563 bp, Homo sapiens
  source 1..563: mol_type = unassigned DNA
aattattgccgatcctcccctccaacactgctctcatcacctatatactcttctctctgcccgtctctgcttccccccccttccccccccccttttctcccggccgacggagctgaaggggcgggggttccttccttggagtgtttctagagctcggaggctgctggtaggggggcaccactttcagataaaaacatagacctgaatggcatcatccagtatccaaggaaaccattgtgtctgtaaccagctaatgagctgcaacagagcctggccttcattttcagcaaattaagttcatccctcataggaattgtggtctggctgtggcaccgctcctaggtatgggtgggatttgtttcttctagcagttgtaggttagccacatgggtacgtgctgtcgcaccacacaacaaaattttctctataataaccagtctaagtaggcttttaccccacaaaagtagatcccatttaatttactttgtgtttatagcactccctctcaaaccgcaccattggcacagactaatatttatacaactttttattttaaactattt

SEQ ID NO: 12311 - DNA, 1754 bp, Homo sapiens
  source 1..1754: mol_type = unassigned DNA
ctgctctcatcacctatatactcttctctctgcccgtctctgcttccccccccttccccccccccttttctcccggccgacggagctgaaggggcgggggttccttccttggagtgtttctagagctcggaggctgctggtaggggggcaccactttcagataaaaacatagacctgaatggcatcatccagtatccaaggaaaccattgtgtctgtaaccagctaatgagctgcaacagagcctggccttcattttcagcaaattaagttcatccctcataggaattgtggtctggctgtggcaccgctcctaggttctctaaacatgaatatgcctttgggggaagacagaagaacatggaagccatgtgaaaaaaacggatcctaaggtataaacaaagtgcagatgattgtcggccatgctgcagggatttcttgtttgtcttctcagtagtgttagctaattttgtcttccaatccgcaattccttataggacttggacgctttgaacctctcaggacccctcagattctagtacataaactcggagccaaattcacagccagctctccttcaaactgccttatctgtttttgagttaattagaagggccttttaacaactttgcatttgagtcctaagaaaagtctagttcattaggcaataaagccactgtgctggcccctaatcaaggtcagtacatatcattatacgactgatccaaatttgagttggttcagttatttcatttgttcattgtccacaatgttccagtcacagtaccaggtgctcagagtgtggtgttagagacaagattcaaagtaagtaattttagaccaatgtcatatgcgccattatagaagtacggctgaaaatggaatttatataaataagcatgtgagtggttcactaaacagggatgggcaagaaagaccttacagaagagatgaatatcttagcgaataacttagcaggatttcaaagaatggacgagagttttgcaggcagatgagataggaagggtgccagagagaaaggaaagcatgggcaagggctcaggaggtggggaaaaatgtgatatagtttgaggtactggagtatgaagttaacaaggggagaatatttagaaggaaggatggagaagtaggcagagagcagattatcaggttaaaatattagaaattagtattgaagtttactagaagccagcagcacgttcaatgcaagcaggtgccatggtcatattagttttagtttagtaatcagtgtagaaggtggatgagagggggtgagtctggaggcaataagcatagttggtagtagcagtctaggtgtcacctgacaggggcctttactagcccagtggtggacatttttaatgcattagtctttcttctagtctgtgaatttcttataacgagggtgtggtcttcctcacacttgtttcttcacacttgttgcctactatcatacctgacatgcagtaaattaccatagcaagacaaaaaatctcttaaacgtgtactctttattactctgttggaccatgatgagagcaacttattgtatggctatttaaaattatttatgaagataatattttttgtgttggaaatgctacaataatttaattgtgagatttataactaagacttattgttcacatttgttttatgttttcatatatgtgatgaaatagacaatttactctgtaagtcttaaatataaaaatgattcattatttctttctga

SEQ ID NO: 12312 - DNA, 388 bp, Homo sapiens
  source 1..388: mol_type = unassigned DNA
ctgcttccccccccttccccccccccttttctcccggccgacggagctgaaggggcgggggttccttccttggagtgtttctagagctcggaggctgctggtaggggggcaccactttcagataaaaacatagacctgaatggcatcatccagtatccaaggaaaccattgtgtctgtaaccagctaatgagctgcaacagagcctggccttcattttcagcaaattaagttcatccctcataggaattgtggtctggctgtggcaccgctcctagacatgacaaactccaaaaggaaacccaagcagctatttggctcccttaattaatgaagtcgcccagtatggataattcaggttctctaaacatgaatatgcctttgggggaa

SEQ ID NO: 12313 - DNA, 501 bp, Homo sapiens
  source 1..501: mol_type = unassigned DNA
ggagtgtttctagagctcggaggctgctggtaggggggcaccactttcagataaaaacatagacctgaatggcatcatccagtatccaaggaaaccatgttctctaaacatgaatatgcctttgggggaagacagaagaacatggaagccatgtgaaaaaaacggatcctaaggcagttttgaacatctggaggcctgatttattggagattgcaaatgtacagtgtaacatagctgtggagagatctcacatgagatggcaaagaggtcaagacaaaaattctgcatttgggaaaagaataacacatggacttcctcctacaggattataggactgtgtatgtcctacacacacattatatgtcctacacgcacagtgatgaggagtgacaaaatgaagactccagaatcctctttatcagatcctgaatgtgcactttctgaagtgaagtccactatgtgctgggcacacagagaatagagcatgaaacaaaagcaaca

SEQ ID NO: 12314 - DNA, 358 bp, Homo sapiens
  source 1..358: mol_type = unassigned DNA
tttctagagctcggaggctgctggtagggggaagttgtacccgtcagcacctgctgagggctttgttgtccaaaccctgacaggtaaaaaaattcctgcagaataaagccagaccagctggctttgaagagaaaccccccagtttgggctgcgtttgcctcctctccttttctatgaagaccgaggctttgcccccttgatcgtcaagccgtgagatgcgtgatctctctgcacaagtgtctggcaggccgaggtgcacctgtttctgtcactctggagtaaatttagctgtaaagggcaccactttcagataaaaacatagacctgaatggcatcatccagtatccaaggaaaccat

SEQ ID NO: 12315 - DNA, 483 bp, Homo sapiens
  source 1..483: mol_type = unassigned DNA
ctagagctcggaggctgctggtagggggtgcttgtagacatggaagaaggcctcaccttctccatggctgacaaccgagaaggctggtctgacttggaagaagctgtgtggccaacagccaattggctgtatcacatgggcaccactttcagataaaaacatagacctgaatggcatcatccagtatccaaggaaaccattgtgtctgtaaccagctaatgagctgcaacagagcctggccttcattttcagcaaattaagttcatccctcataggaattgtggtctggctgtggcaccgctcctaggtatgggtgggatttgtttcttctagcagttgtaggttagccacatgggtacgtgctgtcgcaccacacaacaaaattttctctataataaccagtctaagtaggcttttaccccacaaaagtagatcccatttaatttactttgtgtttatagcactccctctcaaaccgcacca

SEQ ID NO: 12316 - DNA, 713 bp, Homo sapiens
  source 1..713: mol_type = unassigned DNA
ctcggaggctgctggtaggggggcaccactttcagataaaaacatagacctgaatggcatcatccagtatccaaggaaaccatgcttgcttgaagagtgagcaggtgagcaaagagacaagattacatgtttaaaccaagaaaagaatcttgaaaaacagattggaagaatgcgaaatgttattagacacaggcacagcatagcagtagaaacatcttaactgagaacttggaactgaaagagaaagcaaccaacttaaagggcagacaagacacatggttatgtaacacagcagtgggtattcacagtgatgacacaagacaaaacaattacattttcattctaaaagtaatttttaaggaggcaagggcatttataaaacattttagaaactatttaataaaaatggtaaaattaaagtgtttgtttatgtactcaacaaatatttatttggaaagtgcatgcctgggggcacatctcgttaatgaggtgatcctgtgtttagaactgaaggcagtcctcatccattctctcaaaaggtgaccttctttgttcttcttatagcctcaccacatttaattttcagaggttttgacataaattaaaaacattctttggtagattgtattgtatgaaaacaatcttcaaaagtgtaagcattgatatctggaatatctgggaaaatgtacaataaagacatctcttctggtctt

SEQ ID NO: 12317 - DNA, 362 bp, Homo sapiens
  source 1..362: mol_type = unassigned DNA
gccaattggctgtatcacatggaagttgtacccgtcagcacctgctgagggctttgttgtccaaaccctgacaggtaaaaaaattcctgcagaataaagccagaccagctggctttgaagagaaaccccccagtttgggctgcgtttgcctcctctccttttctatgaagaccgaggctttgcccccttgatcgtcaagccgtgagatgcgtgatctctctgcacaagtgtctggcaggccgagggcaccactttcagataaaaacatagacctgaatggcatcatccagtatccaaggaaaccatgttctctaaacatgaatatgcctttgggggaagacagaagaacatggaagccatgt

SEQ ID NO: 12318 - DNA, 542 bp, Homo sapiens
  source 1..542: mol_type = unassigned DNA
aaactattgggaatctaggatgccactggaacatgtaaaatggcagctaaggtctatggaaacccttcatgtttagaaactggctaaagcttgagttctcttatcttttggttaagggcaccactttcagataaaaacatagacctgaatggcatcatccagtatccaaggaaaccatgcttgcttgaagagtgagcaggtgagcaaagagacaagattacatgtttaaaccaagaaaagaatcttgaaagtaagtgtaatgaccaagatgcaaaaatctgtttggggaaattgttgggaggttggcacatcattttctttatcccctccccacaaactaatgtacatttctgcagctaatatcaaagttttaattcatgttcaggagctatgaaatctactgtggaaatttagtttctaaacaacatgctactctggagaaagacattcctaaaatatttgaaatttctactatttccgtacttcgactttttttttgttatttgtactatctccttttaaaattaaattattttcaatgt

SEQ ID NO: 12319 - DNA, 427 bp, Homo sapiens
  source 1..427: mol_type = unassigned DNA
ataggaattgtggtctggctgtggcaccgctcctagacatgacaaactccaaaaggaaacccaagcagctatttggctcccttaattaatgaagtcgcccagtatggataattcaggttctctaaacatgaatatgcctttgggggaagacagaagaacatggaagccatgtgaaaaaaacggatcctaaggctttttacctgtctgttgaactgagtgaaggacccagaggccctatgatgtggtgtagcttcgagagaaggaagcctagatccctgaatcattgtgcagaacatacttatcctacagccatataggactgttatatgagtaagcgctgaagttatttcttaggttattgaactttccaagcatatctattacattaattagtgttacctcaataaaagcatgtacttcacagaac

SEQ ID NO: 12320 - DNA, 594 bp, Homo sapiens
  source 1..594: mol_type = unassigned DNA
cagaagaacatggaagccatgtgaaaaaaacggatcctaaggcagttttgaacatctggaggcctgatttattggagattgcaaatgtacagtgtaacatagctgtggagagcgagaagatcaggattgtcaatgctgtcattgcttttactggaatccccagcacgaattgaaggtctcactttgccacctaggctggatgcaatgcaacggtatgttgatcttggttcactgcagcctcaacctcctgagctcatgtgatcctcccacctcagtcccccacgtcgcttggattacaggcctgtgccaccacacctggctaactttttttgtaatttttgtagagacagggtctcactatgtttcccatgctggtctttaatgcctgagctcaagccatccgcctgcctcggcctcccaaattgctgggattacaggcatgagccaccatgcccagcctaattcttctaaatcttatcctagtaattaagccagaatttttctctgccaagaccaatagatggaccaagaagtactcatccttgtaaactttctttggataaattgcttacatataataaattcagagttaag

SEQ ID NO: 12321 - DNA, 679 bp, Homo sapiens
  source 1..679: mol_type = unassigned DNA
cttcctgttgtcatgtgaaggacatgtttgcttccccttccaccgtgattgtaagtttcctaaggcctccccagccatgctgaactgattataggactgtgtatgtcctacacacacattatatgtcctacacgcacagtgatgaggagtgacaaaatgaagactccagaatcctctttatcagatcctgaatgtgcactttctgaagtgaagtccactatgtgctgggcacacagagaatagagcatgaaacaaaagcaacatgaccctgccctcaccaagactacagggagtgatggagcatacaactttgtttcagaatgcaattcagatcttccctttcgcttggcttcttaaaacttcttttgaggatggtaaaatttcgtgttatattaaatttcatcctgtaactgatactctgggatgatgttggccaataactagcaagactttaaataatcaactagtttaggcattgcttagcacgctccagctgacttcacaagtaaaaccatgtgaagaaagaaggttttcaggtaacacagatggaggtgatgatctttctcattttgtggaaaatattaatttctcattttttattcactgacaattagtaaaattccttactctacctaatatgtagacttctgaactatgtaagtaaaactttatagtaact

SEQ ID NO: 12322 - DNA, 498 bp, Homo sapiens
  source 1..498: mol_type = unassigned DNA
ggtctgaaaaatgatattcattgtcctaatgtgtaaatttcgacaatttgcaaatttgtagattctttagaatagaactaactcaagcccttcattctgcagctgaggctcactgcccccagtgggcagtgggtccagggggtttctgaggacagggcatgacccagccctgctgcccccaagatggcacctggcttggaggggtgaggggccctgttagtctgactttgaagaagaccagccttccagactcgcttggtgccctgacaggagccctgggctcccccagtgttgcctgggtctgactttgcctcagtgaaaactgcctcgaattctttcttgcaccgatgggcagatgggcagtgtcggaggatcgtgtcatctgtcccgtggcgctggttggcttggtcaagtcagtgttcaaactatctcctgctctttcaaggggatctggggctctagaagattagaggacttggagaggttagtgacttgctc

SEQ ID NO: 12323 - DNA, 557 bp, Homo sapiens
  source 1..557: mol_type = unassigned DNA
cagtgggcagtgggtccagggggtttctgaggacagggcatgacccagccctgctgcccccaagatggcacctggcttggaggggtgaggggccctgttagtctgactttgaagaagaccagccttccagactcgcttggtgccctgacagcagcttgtgtttcttccttcaagagtctgcttagagataataaagatcaacactattccttataacaacacctcagtatcctgcgagctgtacacaccagagtttatttaaccaccttgctgctggcatgaaagcctcaggagccctgggctcccccagtgttgcctgggtctgactttgcctcagtgaaaactgcctcgaattctttcttgcaccgatgggcagatgggcagtgtcggaggatcgtgtcatctgtcccgtggcgctggttggcttggtcaagtcagtgttcaaactatctcctgctctttcaaggggatctggggctctagaagattagaggacttggagaggttagtgacttgctcgaggtcggctaggaagcaagacccaggattccaactca

SEQ ID NO: 12324 - DNA, 1369 bp, Homo sapiens
  source 1..1369: mol_type = unassigned DNA
cttggaggggtgaggggccctgttagtctgactttgaagaagaccagccttccagactcgcttggtgccctgacagcagcttgtgtttcttccttcaagagtctgcttagagataataaagatcaacactattccttataacaacacctcagtatcctgcgagctgtacacaccagagtttatttaaccaccttgctgctggcatgaaagcctcaggagccctgggctcccccagtgttgcctgggtctgactttgcctcagtgaaaactgcctcgaattctttcttgcaccgatgggcagatgggcagtgtcggaggatcgtgtcatctgtcccgtggcgctggttggcttggtcaagtcagtgttcaaactatctcctgctctttcaaggggatctggggctctagaagattagaggacttggagaggttagtgacttgctcgaggtcggctaggaagcaagacccaggattccaactcaggtctgtgtgattcctctgcaaaatggagaggtggaaggatggatgtcaggtctgatggatggatggatgcctacatcaagatacatgcatagatggagagatggctggctacctcatgaatgctggactgttgtgagaatcaaacgagataatgtatgctgaggcatgctgtgaacactacgtgctgggtacaggagaatggaggctccagagtgaaattaatgacactttgtcgatgaagatcttgattgtgacctctgtggaaaatgagccatgaaccaaccaatgataagtctacttttcttccacgtaacaaccacaggatagatgacattcattttctaagaaacaaaatcttggcagttagatccgtggggtaaagaatatagatactaataatgaaaaccatgtagctggtcttattattctctaatcatgaagaccattattgttatttgtggactaaggagcagaaagactgatagtggacataggccagctgatttaataatttaagaaagaactgttatcctgagtaaggagcatagagacaaatataaaatgaacgcactctacctgatttaattatagtcttctggtgaagatcttgctgttatctctgtgaatcaggagagaagagattgataaggaatagacgagattggatttggtcatttccccaaggtgaagagcatggcgatttcttctgtggtaaggagcaataatgaagaccatggttgatttaatcagtctctgctgatgaagatcttggctgttacctttgtgtgtaaggaagctaaagacttaagtaaataacagtccaaaaacttgtcaattaggaatgaatgcgcaatgattcaattattctccagcgaggaagatcatg

SEQ ID NO: 12325 - DNA, 1176 bp, Homo sapiens
  source 1..1176: mol_type = unassigned DNA
caaaagatcatgattaatccagttctgcacaaaacactgaggtccattagaagacaataggtcttggctgtttcattccttttaagagctgtttaatattccacggagccctgggctcccccagtgttgcctgggtctgactttgcctcagtgaaaactgcctcgaattctttcttgcaccgatgggcagatgggcagtgtcggaggatcgtgtcatctgtcccgtggcgctggttggcttggtcaagtcagtgttcaaactatctcctgctctttcaaggggatctggggctctagaagattagaggacttggagaggttagtgacttgctcgaggtcggctaggaagcaagacccaggattccaactcaggtctgtgtgattcctctgcaaaatggagaggtggaaggatggatgtcaggtctgatggatggatggatgcctacatcaagatacatgcatagatggagagatggctggctacctcatgaatgctggactgttgtgagaatcaaacgagataatgtatgctgaggcatgctgtgaacactacgtgctgggtacaggagaatggaggctccagagtgaaattaatgacactttgtcgatgaagatcttgattgtgacctctgtggaaaatgagccatgaaccaaccaatatgaaaaataaaagaaatctacatggatcccactttggacaaagtgcgtgtcaacagttgcatgaaatggtatttcacttcttgattattgtttgtttttattctttttttagaaaaaatgaataaatgatcaaattattttgggggtaattaaataaaagaaagaacacaagtgagtcagtaaatgcttaaattaaggtagatcttggatcattgcttcatggcacactctcagaaatgctcaaatatggtgccttaaaaaaattaatgaggtttgggtgttgatgtggttagggagtatacagatagatagttgttagtggttacatttattactcttgcattgggtggatttaagggttcattatattaagaattaaacagtaagtaaattcatacataaaaggtatggttattcttgagtcaataatgagaatgtgttaggaaccaaggtttatgattaatctaaaataatttctaaaagaagttaagtctttgctgtttcgttctttctaaa

SEQ ID NO: 12326 - DNA, 286 bp, Homo sapiens
  source 1..286: mol_type = unassigned DNA
accatctatgtagcattccaatattcttgattgactcataaatttcttttacagttggcttggtcaagtcagtgttcaaactatctcctgctctttcaaggggatctggggctctagaagattagaggacttggagaggttagtgacttgctcgaggtcggctaggaagcaagacccaggattccaactcaggtctgtgtgattcctctgcaaaatggagaggtggaaggatggatgtcaggtctgatggatggatggatgcctacatcaagatacatgcatagat

SEQ ID NO: 12327 - DNA, 480 bp, Homo sapiens
  source 1..480: mol_type = unassigned DNA
aggatggatgtcaggtctgatggatggatggatgcctacatcaagatacatgcatagatggagagatggctggctacctcatgaatgctggactgttgtgagaatcaaacgagataatgtatgctgaggcatgctgtgaacactacgtgctgggtacaggagaatggaggctccagagtgaaattaatgacactttgtcgatgaagatcttgattgtgacctctgtggaaaatgagccatgaaccaaccaatgataagtctacttttcttccacgtaacaaccacaggatagatgacattcattttctaagaaacaaaatcttggcagttagatccgtggggtaaagaatatagatactaatgtaagttaacacctcaagttcatgtccttggtttggatgctttgttcaggagtgtttagtggtatttcaaaggaatcaatatctataacaaattaaaataaccaggaatggaccagtg

SEQ ID NO: 12328 - DNA, 439 bp, Homo sapiens
  source 1..439: mol_type = unassigned DNA
aaatctaggttttttcatcctttttaatatcagccttgtgttccacagaatggaggctccagagtgaaattaatgacactttgtcgatgaagatcttgattgtgacctctgtggaaaatgagccatgaaccaaccaataagcaggcttagtcacccttgacacagtttgcagttatccacctcctccaagttcttaatatgttagatccagataactgccttgtacagccacctccaggatactgcctccctaaaaaacagctagatacactgaccccacagcctatgtggaccacacagatatagtggcttgctctaaatgcaccagtgagaactctctgcaggaaacctgcttgggaaatgccatagcctgcaatacaggctttccccttcccgctggccctgtgaggcatgcaggatctgtaagtaataaactgct

SEQ ID NO: 12329 - DNA, 3757 bp, Homo sapiens
  source 1..3757: mol_type = unassigned DNA
ggaccaatgatgagtaccatggggtatctgaaacaggatttttgattaaacccatatgcaattctgaggtccattacaaagagacacgtattattccttttttgggaagtgagcctatggtaccttttccttggactttgtggttcttggggatggattgcatttttgttataaaatcagcccatgaattaaaaatttatcaatgagtaaaacataaagcataagtcatgtacttattatcagtgactgtaatgaaacatggattattattaaaacttatctgagactcccaataaattaatacccaaggcttctaccattctggtaaggagcatatggtcatttgtatgcaagagtcagtttttgttctgtgttggtggtgggttgctgactattttatgaagaaaatgaagcatctttaatcatataaatagttggttaaataaccacttaattgagaccaagcagagaccaatgatgagtgtattaatctattttttaatggatttttattaaacaaataataaaagaaacacagtctattcttcctgagggcaataactctagacagatgtaaatattcttcagtgttcttgtccagtgctgtgagatcacagatactgatgtcttttgtatatgagaaggaacttgcatttttatgtctcagtttatattttagagtcagcaaaccatggaccaattaggaacaaatgttatgatatgagaatgctgattcttgtttttttttttcatgatagacattctaagaaaaactctaggctctctcattgtttttggaatacatacatggttctttccaagtagtttcttagaaaaatgtttttaaaaagaggcttttaaaaagagccttttaaaatgtttttaaaagaaggctttatttttctctatagaatgaaaaccatgtagctggtcttattattctctaatcatgaagaccattattgttatttgtggactaaggagcagaaagactgatagtggacataggccagctgatttaataatttaagaaagaactgttatcctgagtaaggagcatagagacaaatataaaatgaacgcactctacctgatttaattatagtcttctggtgaagatcttgctgttatctctgtgaatcaggagagaagagattgataaggaatagacgagattggatttggtcatttccccaaggtgaagagcatggcgatttcttctgtggtaaggagcaataatgaagaccatggttgatttaatcagtctctgctgatgaagatcttggctgttacctttgtgtaatgaatgcgcaatgattcaattattctccagcgaggaagatcatggttgttgtctgtttgagtaatgagtgtagaaacctataatggaggcgtgatggctgatgcaatcattttccactgatgaaggttttgatggccacctgtaatgaacagccccatctgatttaatcactgtgcaatgaccgtgaactgtacagttacctccgtgtgtcacaggaagactcttttgacttaagcacccttccatggtcatgaggtttctggttgcctctgtgtgttagaagcttggagaccaatgccttctgctgtgatcgcgttctccacagttgcctctgggtaggagcctggacactaatagaaaatggatgcacttgagccgacctaagcattcatggtcatgagatttgtggttgccactgttggttaggagcatagagatcagtaatggacacacctgggctggcagaacatcttgccttgatctggagccccatgtctgcccctctgtagaggtgcacatgggccaatgatggatgcaatgagctgatcattttgctgtgatcaaggctatgttgcctctgtgttaggccaatggttgatgttcatgggtgattgatcatcctgtagcgacggtggtattgactgttccccagaggacaaggagtgtgttcttatctactcaggaggctgaggcaggagaaacgcttgaacccgagaggcggaggttgcagtgagctgagattgcgccattgcactccagcctgggcaacaagagtgaaactccatctcaaaagaaaaaaaaaagaaaacaaaacaaaaaaagaaaaaaccaatgttccaatagtttcccaaatcatgctgatgctgcctcctgagaaatattttcagaatcactgagaaaaatgtatgaaatagttaatgtccttgctctgtgtcagtggtggaggctgtctgcagtaggagcatggagaccaacaatggatgctcttaaactgatttaagcacgcttccatggtcagaagccttatggttgccacagggtattaggagcatggagaccaataatggatgtccttgttctgatttgaggatgcctccaaggtcacatactctgtttgcaccacgcttaggaaggagcgtgaagaccaagggaagatgataaacacagatcatggaggactgttttatctgtttgtgatctgccgtcctctgtgagcctcaggatggatgtttgccagccgattccatggttacaagctctatagctgcatctatgtgttaggagcatgaagaccaataatggatgcactgagctgattatgaatttagccctgatgaagacttgtgttgctgtcatgatatgaaagattccagtaatgaacgcacttgagttgattcaagcacgcttccatggtcatgagctctgtggttgcatctgtgtgttaggagcatgcagaccaatagtgataatctcgaggtgatttatgcattcttccatggccaccagccttatgattgcatctgtgcgtcacagcttagagatcaataatggatgcaacaagctctttgaatcattctgttgggatcaagattgttgtgttccctctgtttggaaagagaccaagaatggatacgctcaggtgatttaagcagtcttccatggccacgagctctgtggttgcctctgtatattaagagcacagagattaaaaatgggtgcacttgagccgattgaaacattcctccttgcatctttcttctgtgattgcatctatttgttagtagcatagagaccaataatagatggcttgtgctgatggaaggattcctccctggtgacatgctgtgtctgcctcttgattgggagcacgcagacctacaatgatgcactttttatgatttgagaattccttcatggtcacgtgctctgtttttatcatggttgggagcctgcagagcaataagggacatgcctttgctgatttgaggattcctctgaggttgggagctaagtttgcatcatgcttagaaaggagtgtgcagacctgtaatgattgcactttgctgattgaaggattccttcaagtccatgtgctccacttgcaccatttttaggatggagcctggagacctataatgaacaacttgtgctgtgttaaggattcctccatgatcacgcgccccatttgtacaccatgcttgggaaggtgcatgcagaccaatgttagtaatagtcaaaattcctgtgtcggtttgtgtggtttgctaaacaggactcaatgtatcatgaaacagtgtattatatagtcaactatggtcaactatgtcccagtgatatttatgagagggatctgaagtatttattgataatgcatatatgaaaaacggagaagaattaatgaaacagatatatctgtgttagaatgattctgtataaagatagggaatatcaagt

SEQ ID NO: 12330 - DNA, 456 bp, Homo sapiens
  source 1..456: mol_type = unassigned DNA
agaatgaaaaccatgtagctggtcttattattctctaatcatgaagaccattattgttatttgtggactaaggagcagaaagactgatagtggacataggccagctgatttaataatttaagaaagaactgttatcctgagtaaggagcatagagacaaatataaaatgaacgcactctacctgatttaattatagtcttctggtgaagatcttgctgttatctctgtgaatcaggagagaagagattgataaggaatagacgagattggatttggtcatttccccaaggtgaagagcatggcgatttcttctgtggtaaggagcaataatgaagaccatggttgatttaatcagtctctgctgatgaagatcttggctgttacctttgtgtgtaaggaagctaaagacttaaaatgaatgcgcaatgattcaattattctccagcgaggaagatc

SEQ ID NO: 12331 - DNA, 469 bp, Homo sapiens
  source 1..469: mol_type = unassigned DNA
cataggccagctgatttaataatttaagaaagaactgttatcctgagtaaggagcatagagacaaatataaaatgaacgcactctacctgatttaattatagtcttctggtgaagatcttgctgttatctctgtgaatcaggagagaagagattgatgaatagacgagattggatttggtcatttccccaaggtgaagagcatggcgatttcttctgtggtaaggagcaataatgaagaccatggttgatttaatcagtctctgctgatgaagatcttggctgttacctttgtgtaatgaatgcgcaatgattcaattattctccagcgaggaagatcatggttgttgtctgtttgagtaatgagtgtagaaacctatgtaagtaacaaagtgattgcttttgctttagtggttgttaagagagttaagtctttctggaaaggaataaatgactatgtatacaaataaa

SEQ ID NO: 12332 - DNA, 541 bp, Homo sapiens
  source 1..541: mol_type = unassigned DNA
ctgagtaaggagcatagagacaaatataaaatgaacgcactctacctgatttaattatagtcttctggtgaagatcttgctgttatctctgtgaatcaggagagaagagattgatgaatagacgagattggatttggtcatttccccaaggtgaagagcatggcgatttcttctgtggtaaggagcaataatgaagaccatggttgatttaatcagtctctgctgatgaagatcttggctgttacctttgtgtgtaaggaagctaaagacttaagtaaataacagtccaaaaacttgtcaattagggtaaatttttcattaatgttcactgaattatttaaagttaaggcatatgtagatcaatgagatgaatgtgttatgaaacttagattgtggttagtccaattaagcacaattttggttaaaaataagatgaaagacattttattcatttttttatctgattaataattcatcttattttgtactgcatttaatttaagatttattcactaataaaatctatggctgcactgttcaa

SEQ ID NO: 12333 - DNA, 644 bp, Homo sapiens
  source 1..644: mol_type = unassigned DNA
gttgtctgtttgagtaatgagtgtagaaacctataatggaggcgtgatggctgatgcaatcattttccactgatgaaggttttgatggccacctgtaatgaacagccccatctgatttaatcactgtgcaatgaccgtgaactgtacagttacctccgtgtgtcacaggaagactcttttgacttaagcacccttccatggtcatgaggtttctggttgcctctgtgtgttagaagcttggagaccaatgccttctgctgtgatcgcgttctccacagttgcctctgggtaggagcctggacactaatagaaaatggatgcactggagctgatttaaacattctttggtggtcacaagatgtatagctgcctctgtatgtttggcgcatggaaaaaaatatgagtttttgtggacatacactctttatttgaaaagtatgaaatataatccaagaaagccagccatggctcagtgataaatatggaattgatatgaaacattatattgattaatcacctttgaggatgattaataaaagagagaaagtgattctatatagagatgcaggactatttcaggctcattcatgatctaggtttttgtgcttcatggttattttattatcatcaataaaaagaaaaaa

SEQ ID NO: 12334 - DNA, 800 bp, Homo sapiens
  source 1..800: mol_type = unassigned DNA
aatggaggcgtgatggctgatgcaatcattttccactgatgaaggttttgatggccacctgtaatgaacagccccatctgatttaatcactgtgcaatgaccgtgaactgtacagttacctccgtgtgtcacaggaagactcttttgacttaagcacccttccatggtcatgaggtttctggttgcctctgtgtgttagaagcttggagaccaatgccttctgctgtgatcgcgttctccacagttgcctctgggtaggagcctggacactaatagaaaatggatgcacttgagccgacctaagcattcatggtcatgagatttgtggttgccactgttggttaggagcatagagatcagtaatggacacacctgggctggcagaacatcttgccttgatctggagccccatgtctgcccctctgtagaggtgcacatgggccaatgatggatgcaatgagctgatcattttgctgtgatcaaggctatgttgcctctgtgttaggccaatggttgatgttcatgggtgattgatcatcctgtagcgacggtggtattgactgttccccagaggacaaggagtgtgttcttatgtaagtcatagttgacattcttgtttttgattgggtagtttgcctgttcattgatgttcatagtactatagaaggtagataaatggccacatacctaaagaaaatcaaaggggacaaaaagtgagagtctgttataaactaaggattataattaatgtaattcagtacaactgtggacaattttgaaaagataaagattgatgtcat

SEQ ID NO: 12335 - DNA, 737 bp, Homo sapiens
  source 1..737: mol_type = unassigned DNA
aggacataggctgctaatgaacagccccatctgatttaatcactgtgcaatgaccgtgaactgtacagttacctccgtgtgtcacaggaagactcttttgacttaagcacccttccatggtcatgaggtttctggttgcctctgtgtgttagaagcttggagaccaatgccttctgctgtgatcgcgttctccacagttgcctctgggtaggagcctggacactaatagaaaatggatgcacttgagccgacctaagcattcatggtcatgagatttgtggttgccactgttggttaggagcatagagatcagtaatggacacacctgggctggcagaacatcttgccttgatctggagccccatgtctgcccctctgtagaggtgcacatgggccaatgatggatgcaatgagctgatcattttgctgtgatcaaggctatgttgcctctgtgttaggccaatgtgagtaatggttcttgtcttggtttaggttgtttaatggtattcctgatattattaaaaattatttaatataataaaaagttaattggcttaatgacaatgtgcaacattgaggttaattaatgaaagagatgtagtctctgtgggaaattattgtatagacaaatgtaaggattcttcaaatatcttgttcttgggttttcaaaatcatgtattcattttattatcaaagaagaaatgatttattcaataaatatttagaaatgaatgatg

SEQ ID NO: 12336 - DNA, 485 bp, Homo sapiens
  source 1..485: mol_type = unassigned DNA
gatcgcgttctccacagttgcctctgggtaggagcctggacactaatagaaaatggatgcacttgagccgacctaagcattcatggtcatgagatttgtggttgccactgttggttaggagcatagagatcagtaatggacacacctgggctggcagaacatcttgccttgatctggagccccatgtctgcccctctgtagaggtgcacatgggccaatgatggatgcaatgagctgatcattttgctgtgatcaaggctatgttgcctctgtgttaggccaatggttgatgttcatgggtgattgatcatcctgtagcgacggtggtattgactgttccccagaggacaaggagtgtgttcttatctactcaggaggctgaggcaggagaaacgcttgaacccgagaggcggaggttgcagtgagctgagattgcgccattgcactccagcctgggcaacaagagtgaaactccatctcaaaag

SEQ ID NO: 12337 - DNA, 924 bp, Homo sapiens
  source 1..924: mol_type = unassigned DNA
gatgaggagtgtgaagcatgtccactcaatgtaaatggtgagacaacagaaatcattaaaatgtattgaaaatatgaataccatttaaaaaacgaacaattcaagtgtaatctttgactacggatgacataagcagtatagtgaagtttcttattttgcatcagaacaagtgtgctgttgttcatttttttaaaagaaaattgataagtattaccacaattaatagatacctgaatgactaagagaagggtcaaatgaatgaatccgtgaaaaatatttcaatcctgttaccttctctgctttgcacttcccagaatggacacacctgggctggcagaacatcttgccttgatctggagccccatgtctgcccctctgtagaggtgcacatgggccaatgatggatgcaatgagctgatcattttgctgtgatcaaggctatgttgcctctgtgttaggccaatggttgatgttcatgggtgattgatcatcctgtagcgacggtggtattgactgttccccagaggacaaggagtgtgttcttataatggacatcatgattgggattgtctttattaaactttgtcaggagagtaaagatcaatgtggccacatgttgtggctcatgcctgtaatcccaacactgtaatcccagcactgtaatcccagcctgtaatcccaggctgaggtgggcggatcacctgaggttgggagttcgagaccagcctgaccaacatggagaaaccccgtctctactaaaaatacaaaattagccgggcatggtggcgcatgtctttaattccagctactcaggaggctgaggcaggagaaacgcttgaacccgagaggcggaggttgcagtgagctgagattgcgccattgcactccagcctgggcaacaagagtgaaactccatctcaaaag

SEQ ID NO: 12338 - DNA, 480 bp, Homo sapiens
  source 1..480: mol_type = unassigned DNA
ggttgatgttcatgggtgattgatcatcctgtagcgacggtggtattgactgttccccagaggacaaggagtgtgttcttataatggacatcatgattgggattgtctttattaaactttgtcaggagagtaaagatcaatgtggccacatgttgtggctcatgcctgtaatcccaacactgtaatcccagcactgtaatcccagcctgtaatcccaggctgaggtgggcggatcacctgaggttgggagttcgagaccagcctgaccaacatggagaaaccccgtctctactaaaaatacaaaattagccgggcatggtggcgcatgtctttaattccagctactcaggaggctgaggcaggagaaacgcttgaacccgagaggcggaggttgcagtgagctgagattgcgccattgcactccagcctgggcaacaagagtgaaactccatctcaaaagaaaaaaaaaagaaaacaaaa

SEQ ID NO: 12339 - DNA, 823 bp, Homo sapiens
  source 1..823: mol_type = unassigned DNA
agacaagagcctccatggtgtctgcctgtataaccaagttttctatgagagggacaatgggtcatagattgaacacttgggcattacatctgtgagaataagtctatagtaaatttcagtaaatttgagggatctaattatggggtttcagtagatcctggggatttattgcattattcgaaggaaataaatgaaagaatcagcaaaacatacagacacacatataaataattaaagatgaagaggataaagctggattaattgaggaaaatgctatcagacaggaatttttggttctgtaattctgaaacactgcaatgcattaagaaacctgtacatcaagggtgtcacctgtctagggtagggtaatatagagtagttgttctcaaatgcgagcattggagtgacctggagggcttgtaaaatacagaaggtcacctacattctcaggatttctgattcagtaggtttggtgtggggtctgagaatctaaatttctaataacttaatttctgtaggttccaatagtttcccaaatcatgctgatgctgcctcctgagaaatattttcagaatcactgagaaaaatgtatgaaatagttaatgtccttgctctgtgtcagtggtaagttccagtttgtttattttattgagaaaaagaaggtaattaattaattaagcaattaatatttatttatttatatttgagatggagtctcactctgtttgttgcccaggcggaggttgcagtgagctgagattgcatcattgcactccagcctgggcgacagagtgagactccatctcaaaaaaaaaaaaaaaaa

SEQ ID NO: 12340 - DNA, 625 bp, Homo sapiens
  source 1..625: mol_type = unassigned DNA
gttccaatagtttcccaaatcatgctgatgctgcctcctgagaaatattttcagaatcactgagaaaaatgtatgaaatagttaatgtccttgctctgtgtcagtggtggaggctgtctgcagtaggagcatggagaccaacaatggatgctcttaaactgatttaagcacgcttccatggtcagaagccttatggttgccacagggtattaggagcatggagaccaataatggatgtccttgttctgatttgaggatgcctccaaggtcacatactctgtttgcaccacgcttaggaaggagcgtgaagaccaaggggagtaatagtcaaagtccttacctttgtttgggtggtttgtttaagagtaatcaacgtattatttaaaagtgtgaaatacagtcaaagatggccaatgttattccagtgatatgggagtgacatgaagtattatattgatgatgcatatataaaaaacaggatagttaatgaaacacccaatgtttgagtgattctgtatactgatagggaatatcaagagtgttactgggttttgtgaatcacgggccttgaaagtattattaatgaataaatgacataatcaatagacaaggtagaaatgaatag

SEQ ID NO: 12341 - DNA, 2155 bp, Homo sapiens
  source 1..2155: mol_type = unassigned DNA
aatggatgtccttgttctgatttgaggatgcctccaaggtcacatactctgtttgcaccacgcttaggaaggagcgtgaagaccaagggaagatgataaacacagatcatggaggactgttttatctgtttgtgatctgccgtcctctgtgagcctcaggatggatgtttgccagccgattccatggttacaagctctatagctgcatctatgtgttaggagcatgaagaccaataatggatgcactgagctgattatgaatttagccctgatgaagacttgtgttgctgtcatgatatgaaagattccagtaatgaacgcacttgagttgattcaagcacgcttccatggtcatgagctctgtggttgcatctgtgtgttaggagcatgcagaccaatagtgataatctcgaggtgatttatgcattcttccatggccaccagccttatgattgcatctgtgcgtcacagcttagagatcaataatggatgcaacaagctctttgaatcattctgttgggatcaagattgttgtgttccctctgtttggaaagagaccaagaatggatacgctcaggtgatttaagcagtcttccatggccacgagctctgtggttgcctctgtatattaagagcacagagattaaaaatgggtgcacttgagccgattgaaacattcctccttgcatctttcttctgtgattgcatctatttgttagtagcatagagaccaataatagatggcttgtgctgatggaaggattcctccctggtgacatgctgtgtctgcctcttgattgggagcacgcagacctacaatgatgcactttttatgatttgagaattccttcatggtcacgtgctctgtttttatcatggttgggagcctgcagagcaataagggacatgcctttgctgatttgaggattcctctgaggttgggagctaagtttgcatcatgcttagaaaggagtgtgcagacctgtaatgattgcactttgctgattgaaggattccttcaagtccatgtgctccacttgcaccatttttaggatggagcctggagacctataatgaacaacttgtgctgtgttaaggattcctccatgatcacgcgccccatttgtacaccatgcttgggaaggtgcatgcagaccaataatggacgtacttgtgatgatttaaagatgcctccaaggtcacgtgctctgtttgcaccatgcttaggaaggagcgtacagaccaaaaatggatgaattgtgcaccttgaaaagttcttccatggtcacctgaggcatctgcgtcatgattaggctccggatgactaataatggacgtacttgttctgatttgaggacttcttcatggtcacatgttctgtttgcaccatgcttaggaaggagcatgtgtaccaataatggaagcacagaagctggttttaatagttaagagctgtatggtccatctctgtgctagaagctggagaccaataacagtcactccctgcactgattctgccatgaccacttgctctatggttgttttaaggaacctacagacaaataatggattatcattggtgaagatcttagctgttccatagaaggaacacacttatcactacagtgattctgtaatgatgaagacctttatgggtcagtgatgggtagaccagagctgattaaattattctcccattgatgaggaactttaccttatccctcagagtaaggagaatgtcatataatgaaagatactgatctctgttcttggttaagttccaagaaccatctaagtttcgtgcccctcagctgtaaaagggaagtacatttcatttgtttattctgtaaaactctcggtgtgtgccatggccatgcactgatgatgagcacatgtgtgcggcccctgcccccgtggagcgcatgcatggtcctccagccagagaccgcgctgggagaaatcaggggttcactcctggtcggaggagcaatccatcagtcatcctgcccagagcttgtgaaggtgcagtggcctgagccaggcttccaagaggacaaccgtgatgggctctgtgtgcgttgctgggaggacttttcaatgtgatggcagcctgggggaagacagtgtcaccacgacagtgtcacggaacatgcag

SEQ ID NO: 12342 - DNA, 1634 bp, Homo sapiens
  source 1..1634: mol_type = unassigned DNA
cacagatcatggaggactgttttatctgtttgtgatctgccgtcctctgtgagcctcaggatggatgtttgccagccgattccatggttacaagctctatagctgcatctatgtgttaggagcatgaagaccaataatggatgcactgagctgattatgaatttagccctgatgaagacttgtgttgctgtcatgatatgaaagattccagtaatgaacgcacttgagttgattcaagcacgcttccatggtcatgagctctgtggttgcatctgtgtgttaggagcatgcagaccaatagtgataatctcgaggtgatttatgcattcttccatggccaccagccttatgattgcatctgtgcgtcacagcttagagatcaataatggatgcaacaagctctttgaatcattctgttgggatcaagattgttgtgttccctctgtttggaaagagaccaagaatggatacgctcaggtgatttaagcagtcttccatggccacgagctctgtggttgcctctgtatattaagagcacagagattaaaaatgggtgcacttgagccgattgaaacattcctccttgcatctttcttctgtgattgcatctatttgttagtagcatagagaccaataatagatggcttgtgctgatggaaggattcctccctggtgacatgctgtgtctgcctcttgattgggagcacgcagacctacaatgatgcactttttatgatttgagaattccttcatggtcacgtgctctgtttttatcatggttgggagcctgcagagcaataagggacatgcctttgctgatttgaggattcctctgaggttgggagctaagtttgcatcatgcttagaaaggagtgtgcagacctgtaatgattgcactttgctgattgaaggattccttcaagtccatgtgctccacttgcaccatttttaggatggagcctggagacctataatgaacaacttgtgctgtgttaaggattcctccatgatcacgcgccccatttgtacaccatgcttgggaaggtgcatgcagaccaatgttagtaatagtcaaaattcctgtgtcggtttgtgtggtttgctaaacaggactcaatgtatcatgaaacagtgtattatatagtcaactatggtcaactatgtcccagtgatatttatgagagggatctgaagtatttattgataatgcatatatgaaaaacggagaagaattaatgaaacagatatatctgtgttagaatgattctgtataaagatagggaatatcaagtctgttcttagtgttttgtgaatcacagagtgtaaaattattcccagtgaattaatgaataaatttaaagacaacatagaaatgaatgcagaaaaagagggtcaaccctggatcgatgatgagcactggtggagtatgagtcacatacgatgaatacgtgtctggaactctgaggtccatcgcagaagtcagtttcctctgtttcaactaactctgtagatagatgacaagaatagagaatgaattttttttgtttatgagtttttattttataattggttcaatgaaagaataaaacatatatgaataaataaataagttatgcattgtccaattataaaaa

SEQ ID NO: 12343 - DNA, 1237 bp, Homo sapiens
  source 1..1237: mol_type = unassigned DNA
gttgggagctaagtttgcatcatgcttagaaaggagtgtgcagacctgtaatgattgcactttgctgattgaaggattccttcaagtccatgtgctccacttgcaccatttttaggatggagcctggagacctataatgaacaacttgtgctgtgttaaggattcctccatgatcacgcgccccatttgtacaccatgcttgggaaggtgcatgcagaccaataatggacgtacttgtgatgatttaaagatgcctccaaggtcacgtgctctgtttgcaccatgcttaggaaggagcgtacagaccaaaaatggatgaattgtgcaccttgaaaagttcttccatggtcacctgaggcatctgcgtcatgattaggctccggatgactaataatggacgtacttgttctgatttgaggacttcttcatggtcacatgttctgtttgcaccatgcttaggaaggagcatgtgtaccaataatggaagcacagaagctggttttaatagttaagagctgtatggtccatctctgtgctagaagctggagaccaataacagtcactccctgcactgattctgccatgaccacttgctctatggttgttttaaggaacctacagacaaataatggattatcattggtgaagatcttagctgttccatagaaggaacacacttatcactacagtgattctgtaatgatgaagacctttatgggatgggtagaccagagctgattaaattattctcccattgatgaggaactttaccttatccctcagagtaaggagaatgtcatataatgtaagtaataaagttcttgagttgggttgttggttcatgatttctactgtcatttaaaaagataattaaattttaaaaggtcatactaggcctatgatgagaatgtgttgtggaccgaaattaatccaatttagcacaaatgaagtgtaagaaaaaatttagctttcccattcattttcaatagttaaatgtcacattgtatgtttgtctcattgattatttaaagactcttctcttgataaaggctgttactcatttatggagtcagtattctagttgttgagtaggatggtggttcaagtttgttcatttgatatctaaaagttgttcaaattaaatgtagaggggccatgtctggaccaatgatgtgaatggaatgcatctgaataaaaattatgatcaatcagtttttggaacaactgaggtccactg

SEQ ID NO: 12344 - DNA, 66 bp, Homo sapiens
  source 1..66: mol_type = unassigned DNA
ttggcttggtcaagtcagtgttcaaactatctcctgctctttcaaggggatctggggctctagaag

SEQ ID NO: 12345 - DNA, 7571 bp, Homo sapiens
  source 1..7571: mol_type = unassigned DNA
actttcccggtgcgcaaaactgggcgactgggaacgcgttgagacgttcctctttcccgcttctccacctttacgcctgaaagaagactcccaaagattgctttcttctgggacgctgcttggacgctaaccgcgttgattggaacagattttgtgtcttggctggctttgggtgaagaccggggagaaaaggttgcgctgcgattctcaagatctctggacctgggttgttcttcagaaaaaaatggttatttctttgaactcatgcctgagctttatttgtttattgttatgccactggattgggacagcatcacctctgaatcttgaagaccctaatgtgtgtagccactgggaaagctactcagtgactgtgcaagagtcatacccacatccctttgatcaaatttactacacgagctgcactgacattctaaactggtttaaatgcacgcggcacagagtcagctatcggacagcctatcgacatggggagaagactatgtataggcgcaagtctcagtgttgtcctggattttatgaaagcggggaaatgtgtgtcccccactgtgctgataaatgtgtccatggtcgctgtattgctccaaacacctgtcagtgtgagcctggctggggagggaccaactgctccagtgcctgcgatggtgatcactggggtccccactgcaccagccggtgccagtgcaaaaatggggctctgtgcaaccccatcaccggggcttgccactgtgctgcgggcttccggggctggcgctgcgaggaccgctgtgagcagggcacctatggtaacgactgtcatcagagatgccagtgccagaatggagccacctgcgaccacgtcacgggggaatgccgctgcccaccaggatacaccggagccttctgtgaggatctttgtcctcctggtaaacatggtccacagtgtgagcagagatgcccttgtcaaaatggaggagtgtgtcatcacgtcactggagaatgctcttgcccttctggctggatgggcacagtgtgtggtcagccttgccccgagggtcgctttggaaagaactgttcccaagaatgccagtgccataatggagggacgtgtgatgctgccacaggccaatgtcattgcagtccaggatacacaggggaacggtgccaggatgagtgtcctgttgggacctatggcgttctctgtgctgagacctgccagtgtgtcaacggagggaagtgttaccacgtgagcggcgcatgcctctgtgaagcaggctttgctggcgagcgctgcgaagcacgcctgtgtcctgaggggctctacggcatcaaatgtgacaaacggtgtccctgccacctggaaaacactcatagctgtcaccccatgtctggagagtgtgcctgcaagccgggctggtcaggactctactgtaatgagacatgttctcctggattctacggggaagcttgccagcagatctgcagctgccaaaatggggcagactgtgacagtgtgactggaaagtgcacctgtgccccaggattcaaaggaattgactgctctaccccatgccctctgggaacctatgggataaactgttcctctcgctgtggctgtaaaaatgatgcagtctgctctcctgtggacgggtcttgtacttgcaaggcaggctggcacggggtggactgctccatcagatgtcccagtggcacatggggctttggctgtaacttaacatgccagtgcctcaacgggggagcctgcaacaccctggacgggacctgcacgtgtgcacctggatggcgcggggagaaatgcgaacttccctgccaggatggcacgtacgggctgaactgtgctgagcgctgcgactgcagccacgcagatggctgccaccctaccacgggccattgccgctgcctccccggatggtcaggtgtccactgtgacagcgtgtgtgctgagggacgctggggccccaactgctccctgccctgctactgtaaaaatggggcttcatgctcccctgatgatggcatctgcgagtgtgcaccaggcttccgaggcaccacttgtcagaggatctgctcccctggtttttatgggcatcgctgcagccagacatgcccacagtgcgttcacagcagcgggccctgccaccacatcaccggcctgtgtgactgcttgcctggcttcacaggcgccctctgcaatgaagtgtgtcccagtggcagatttgggaaaaactgtgcaggaatttgtacctgcaccaacaacggaacctgtaaccccattgacagatcttgtcagtgttaccccggttggattggcagtgactgctctcaaccatgtccacctgcccactggggcccaaactgcatccacacgtgcaactgccataatggagctttctgcagcgcctacgatggggaatgtaaatgcactcctggctggacagggctctactgcactcagagatgtcctctagggttttatggaaaagattgtgcactgatatgccaatgtcaaaacggagctgactgcgaccacatttctgggcagtgtacttgccgcactggattcatgggacggcactgtgagcagaagtgcccttcaggaacatatggctatggctgtcgccagatatgtgattgtctgaacaactccacctgcgaccacatcactgggacctgttactgcagccccggatggaagggagcgagatgtgatcaagctggtgttatcatagttggaaatctgaacagcttaagccgaaccagtactgctctccctgctgattcctaccagatcggggccattgcaggcatcatcattcttgtcctagttgttctcttcctactggcattgttcattatttatagacacaagcagaagggaaaggaatcaagcatgccagcagttacctacacccctgctatgagggtcgtcaatgcagattataccatttcaggaacccttcctcacagcaatggtggaaacgctaatagccactacttcaccaatcccagttaccacacgctcacccagtgtgccacatcccctcacgtcaacaacagggacaggatgactgtcacgaagtcaaaaaacaatcaactgtttgtgaatcttaaaaatgtgaaccctgggaagagaggccctgtgggggactgcactgggacattgccggctgactggaaacatggcggctacctcaacgagctcggtgcttttggacttgacagaagctatatgggaaaatccttaaaagacctgggaaagaattctgaatataattcaagtaactgctccctaagcagttctgagaacccatatgccactattaaagacccacctgtacttatcccgaaaagctcagagtgtggttatgtggagatgaaatcgccggcacgaagagattccccatatgcagagatcaataactcaacttcagccaacaggaatgtctatgaagttgaacctacagtgagtgttgtccaaggagtattcagcaataatgggcgtctctcccaggatccatatgacctcccaaagaacagtcacatcccttgtcattatgacctgctgccagtccgagacagttcatcctcccctaagcaagaggacagtggtggtagcagcagcaacagcagcagcagcagtgaatgacaccaaaggaccgcttggtagccactggaaccctttccagaactgctgtttggttcttctccatcctcaattttgccactttcatgtgaatgttagtcaattcggtgggcaatttttggacatgaaccagaaagctgaaagctgaggctgacacggactgtaggtgctttttgttcaggtggattcgaaggagttagagatgtgatttcccattgctgttagttttagaactatacccgtgaagcatgacttattgtaagatgttggctgaaagcatgaacttgcagaactccctcggagacgcaggttgcagtggacattgggattgttgcttgaaaaattaaaatttgaatattttctctctcatttgcatcatacagctctacctaggattgtacagtttaccataaaatttacttcatgaaagtgggaatcactgaacatgtagaagacaaggaacatattgttaactcctgattcttaactttattcaactggactcagaattgtagggataatatgaatgcaggaggaaacattctgtcaggcggtatgactggacagactttgaatatactctaaaagtggacagaaaatttacgaaaatcttagattttgtttagaatgagaaaatatacaattagaattattttagaaatagtaggaagtattgcagaagtcaatacacaaatgtgccaggcagaggtggttttctctgtttgactctcaaccaacttcagatctatgacattattctgatcactggctccatcatacatattcaccacttgagattcataacatatcaatagttatttcataaatatagaaatgaaataattttatttttgacagactggatggaatgagtgtgtaatgattgataaaggttgtaaattttaaatgcaagatgacgcttacgttctgtaaaccattagtaatacatgctgtaatatagaattagtggaacattttgattaatctttccctagaagtgactgaaatatttttgtgcatatttgagaaagggaactttccttttattaattgtcaatttagagaaactatgcttaagctggtcttttgcattgctaatgtgacatgtacccaacttttcattaatttgtatttccatttttaaattgcatattctatgttttgtagtgtttggattgttaatgaaaaaatattatatgttcgttattccttgtattattgccacttatcttttgcttgataaaaatgcgttgttcttttttcttttggagggacaagatgaaaatatataatttgaattgattaaaattggtcgttactaaaatagtatagtaaccacaagtgattggcttataaatgaagtagaaatgctttttaatattccaaaatagagttccttttgatctgttggtgctgagccttggttaaaccagggagaaggggagcagaaaggaaacgttgttactgatgagtaccacagactcatcttaaaaaaaactctcattatggtgatcatagaattgaccatccaaactgggacactcttgagagtaaatggagggcattattaataattatcttgtaatgaacttaaatctggactgttccaggcaaaccagacttatcttgcaatatgagaatgctgacacaatgcaggaaagccagtttcccttttgttgatctacttgaccaagcaaaggggctgaaaaactgaataaggaaacaactttataagagaaacagtggtcttcaatcttttaaagacatgaaatcctatatggcattctgtctcagtgagtcagttaacaaatacgtatgtgcaacccttctgctagtagtgcacataagtgattatccctgccaggtatcgagttggaatatccagttatttcatgtcacacatcggcacgtatgatggtggtttggtcagatggataatacagcagacacacttagaacactcactgcactggtggctgttcattttgaggaactccaaagtcaattcaaggaaataaggaatgacctggaacaggccttagaaacaattgatttattccaatagttaaccactggctggctcccaactctaggtgataggcatctaattgagacatgtgtgagtcaatagccatcggggtcctttttggtgagaagaaataagacattttctcccttttaaagatcatctcttcagagctgcatggtaaatttgaatttccccattgttctctagagctaggtcaaaaaaacaactgtttcttttcttattccactattaataaattgaaagcttgctgtacaaaggcaacagcaacttaaaaaagaaaatctggacaatagatgtggactccaaggggccactgccatcccttcctgtgtgctctttttgacaagtaaatcactccagttagctgatgtcctgaaatgacatttgtacctgaggcaattcttattagagcttactcaggacttttcaaacatcaggacacacatagcaatttggatgttgtaaaactacgtgttacatttggagaggtcttgttgagaaggcaaaattttctaaatattttgatatcaatttgggtaaagaaaggaatacttttgttagaatgagaattaaagagaaaacaaaagaatcttggcaaaattttccctctgaaattacaaactttaggaacttttccagatgtatcgaatttaatttgacattgatgtcactcttcataccaagtgaatctattctcatgaactttgaacccatgttaattttggaccctataactaatttcctttctgtatcccatggtggtcaaagcagtaaaggagtttagagatacttagcaaatgccattcatatagtattgttagccaaactattattccttccttagaagttgatgtatcagaaaatttataagttatttgtatttatatataagtacatcagaacttgcccacatgataactcatgtttgctttaataaggaaaatatgttatttgaggttaattatatgatagtgaggaacattttacaattatttacagtgtttgacattaattgctgtcctatgatacagtagtaatgttaacagagagtttaatatgtttagcattatctttatggaatttatattcaccaatttcaggaaaaccaaccatagaactttataataggacagttataacctgactgaaccaaatccatcagcataatgactgtgtgttctgagaaatgcaaacaactttatgaaagtgtggtcatcttgacccccaaagagccacagtagctgtcaattattgagatttttaaatggtaaatattgcaaaagttaaacaagggtaccacaatatcatttataattgatgtcaatattagtagtccactttatgcttaaaataaaatcataaaaaatcaagttttaaggttatattttttaaaataatgaattttctatctctaggcaacatgtctttattattcaagctgaatgtttaagagagattttggtcttaaaggcttcacatcatgaaagtgtacatgcatatgcaagtgtgaattacgtggtatggatgtttgcttgtttattaactaaagatgtacagcaaactgcccgtttagagtcctgttaatattgatgtcctaacactgggtctgcttatgctagttcagtatttggtctaggcttcattttgatatgactgaattgcaatctatatttttaaaaagaaaaatcaaaatacattagggtttacttggttgtggcaaacaaacaaaaaatgctttcagtgttgaaatatctctattttccaaagatgataaactttcatcgttcttagcctacattgtcatttatatcaccaaatgagtttatagattaatgcaataaactttctaataaaaaa

SEQ ID NO: 12346 - DNA, 2365 bp, Homo sapiens
  source 1..2365: mol_type = unassigned DNA
aaaactgggcgactgggaacgcgttgagacgttcctctttcccgcttctccacctttacgcctgaaagaagactcccaaagattgctttcttctgggacgctgcttggacgctaaccgcgttgattggaacagattttgtgtcttggctggctttgggtgaagaccggggagaaaaggttgcgctgcgattctcaagatctctggacctgggttgttcttcagaaaaaaatggttatttctttgaactcatgcctgagctttatttgtttattgttatgccactggattgggacagcatcacctctgaatcttgaagaccctaatgtgtgtagccactgggaaagctactcagtgactgtgcaagagtcatacccacatccctttgatcaaatttactacacgagctgcactgacattctaaactggtttaaatgcacgcggcacagagtcagctatcggacagcctatcgacatggggagaagactatgtataggcgcaagtctcagtgttgtcctggattttatgaaagcggggaaatgtgtgtcccccactgtgctgataaatgtgtccatggtcgctgtattgctccaaacacctgtcagtgtgagcctggctggggagggaccaactgctccagtgcctgcgatggtgatcactggggtccccactgcaccagccggtgccagtgcaaaaatggggctctgtgcaaccccatcaccggggcttgccactgtgctgcgggcttccggggctggcgctgcgaggaccgctgtgagcagggcacctatggtaacgactgtcatcagagatgccagtgccagaatggagccacctgcgaccacgtcacgggggaatgccgctgcccaccaggatacaccggagccttctgtgaggatctttgtcctcctggtaaacatggtccacagtgtgagcagagatgcccttgtcaaaatggaggagtgtgtcatcacgtcactggagaatgctcttgcccttctggctggatgggcacagtgtgtggtcagccttgccccgagggtcgctttggaaagaactgttcccaagaatgccagtgccataatggagggacgtgtgatgctgccacaggccaatgtcattgcagtccaggatacacaggggaacggtgccaggatgagtgtcctgttgggacctatggcgttctctgtgctgagacctgccagtgtgtcaacggagggaagtgttaccacgtgagcggcgcatgcctctgtgaagcaggctttgctggcgagcgctgcgaagcacgcctgtgtcctgaggggctctacggcatcaaatgtgacaaacggtgtccctgccacctggaaaacactcatagctgtcaccccatgtctggagagtgtgcctgcaagccgggctggtcaggactctactgtaatgagacatgttctcctggattctacggggaagcttgccagcagatctgcagctgccaaaatggggcagactgtgacagtgtgactggaaagtgcacctgtgccccaggattcaaaggaattgactgctctaccccatgccctctgggaacctatgggataaactgttcctctcgctgtggctgtaaaaatgatgcagtctgctctcctgtggacgggtcttgtacttgcaaggcaggctggcacggggtggactgctccatcagatgtcccagtggcacatggggctttggctgtaacttaacatgccagtgcctcaacgggggagcctgcaacaccctggacgggacctgcacgtgtgcacctggatggcgcggggagaaatgcgaacttccctgccaggatggcacgtacgggctgaactgtgctgagcgctgcgactgcagccacgcagatggctgccaccctaccacgggccattgccgctgcctccccggatggtcaggattgttttgactattctgggtccttgaatttccatgtgaatggtaacatcaatatgttaatttccacaaagaagcaaggtggaaatttaatggagattgaatctatagatcaatttggggaatactgtccacttaacaatatgaagtcttcagattcataaacatgggatgtcaccagcaacctcttcagtagtgtctctcagccccttggaaaatgttgagagcttctttggtttctaaaggagtaaactgagatgaactgtcatgtgcttgatttctagtgtctgagagctaccttgggaaacaggctaaggctggtgcaatggactttattttctaccaataggagctacccacagacacgaggcctccccaaccctgtagttccatcttgacttgcaaaacctgagataacttgacttcacaataggaaattctgcct

SEQ ID NO: 12347 - DNA, 2238 bp, Homo sapiens
  source 1..2238: mol_type = unassigned DNA
aaactgggcgactgggaacgcgttgagacgttcctctttcccgcttctccacctttacgcctgaaagaagactcccaaagattgctttcttctgggacgctgcttggacgctaaccgcgttgattggaacagattttgtgtcttggctggctttgggtgaagaccggggagaaaaggttgcgctgcgattctcaagatctctggacctggattatcattgcaaatccattaaagaaggagaagcaagcggatttcagagaggttgttcttcagaaaaaaatggttatttctttgaactcatgcctgagctttatttgtttattgttatgccactggattgggacagcatcacctctgaatcttgaagaccctaatgtgtgtagccactgggaaagctactcagtgactgtgcaagagtcatacccacatccctttgatcaaatttactacacgagctgcactgacattctaaactggtttaaatgcacgcggcacagagtcagctatcggacagcctatcgacatggggagaagactatgtataggcgcaagtctcagtgttgtcctggattttatgaaagcggggaaatgtgtgtcccccactgtgctgataaatgtgtccatggtcgctgtattgctccaaacacctgtcagtgtgagcctggctggggagggaccaactgctccagtgcctgcgatggtgatcactggggtccccactgcaccagccggtgccagtgcaaaaatggggctctgtgcaaccccatcaccggggcttgccactgtgctgcgggcttccggggctggcgctgcgaggaccgctgtgagcagggcacctatggtaacgactgtcatcagagatgccagtgccagaatggagccacctgcgaccacgtcacgggggaatgccgctgcccaccaggatacaccggagccttctgtgaggatctttgtcctcctggtaaacatggtccacagtgtgagcagagatgcccttgtcaaaatggaggagtgtgtcatcacgtcactggagaatgctcttgcccttctggctggatgggcacagtgtgtggtcagccttgccccgagggtcgctttggaaagaactgttcccaagaatgccagtgccataatggagggacgtgtgatgctgccacaggccaatgtcattgcagtccaggatacacaggggaacggtgccaggatgagtgtcctgttgggacctatggcgttctctgtgctgagacctgccagtgtgtcaacggagggaagtgttaccacgtgagcggcgcatgcctctgtgaagcaggctttgctggcgagcgctgcgaagcacgcctgtgtcctgaggggctctacggcatcaaatgtgacaaacggtgtccctgccacctggaaaacactcatagctgtcaccccatgtctggagagtgtgcctgcaagccgggctggtcaggactctactgtaatgagacatgttctcctggattctacggggaagcttgccagcagatctgcagctgccaaaatggggcagactgtgacagtgtgactggaaagtgcacctgtgccccaggattcaaaggaattgactgctctaccccatgccctctgggaacctatgggataaactgttcctctcgctgtggctgtaaaaatgatgcagtctgctctcctgtggacgggtcttgtacttgcaaggcaggctggcacggggtggactgctccatcagatgtcccagtggcacatggggctttggctgtaacttaacatgccagtgcctcaacgggggagcctgcaacaccctggacgggacctgcacgtgtgcacctggatggcgcggggagaaatgcgaacttccctgccaggatggcacgtacgggctgaactgtgctgagcgctgcgactgcagccacgcagatggctgccaccctaccacgggccattgccgctgcctccccggatggtcaggattgttttgactattctgggtccttgaatttccatgtgaatggtaacatcaatatgttaatttccacaaagaagcaaggtggaaatttaatggagattgaatctatagatcaatttggggaatactgtccacttaacaatatgaagtcttcagattcataaacatgggatgtcaccagcaacctcttcagtagtgtctctcagccccttggaaaatgttgagagcttctttggtttctaaaggagtaaactgagatgaactgtca

SEQ ID NO: 12348 - DNA, 7594 bp, Homo sapiens
  source 1..7594: mol_type = unassigned DNA
tgggaacgcgttgagacgttcctctttcccgcttctccacctttacgcctgaaagaagactcccaaagattgctttcttctgggacgctgcttggacgctaaccgcgttgattggaacagattttgtgtcttggctggctttgggtgaagaccggggagaaaaggttgcgctgcgattctcaagatctctggacctggattatcattgcaaatccattaaagaaggagaagcaagcggatttcagagaggttgttcttcagaaaaaaatggttatttctttgaactcatgcctgagctttatttgtttattgttatgccactggattgggacagcatcacctctgaatcttgaagaccctaatgtgtgtagccactgggaaagctactcagtgactgtgcaagagtcatacccacatccctttgatcaaatttactacacgagctgcactgacattctaaactggtttaaatgcacgcggcacagagtcagctatcggacagcctatcgacatggggagaagactatgtataggcgcaagtctcagtgttgtcctggattttatgaaagcggggaaatgtgtgtcccccactgtgctgataaatgtgtccatggtcgctgtattgctccaaacacctgtcagtgtgagcctggctggggagggaccaactgctccagtgcctgcgatggtgatcactggggtccccactgcaccagccggtgccagtgcaaaaatggggctctgtgcaaccccatcaccggggcttgccactgtgctgcgggcttccggggctggcgctgcgaggaccgctgtgagcagggcacctatggtaacgactgtcatcagagatgccagtgccagaatggagccacctgcgaccacgtcacgggggaatgccgctgcccaccaggatacaccggagccttctgtgaggatctttgtcctcctggtaaacatggtccacagtgtgagcagagatgcccttgtcaaaatggaggagtgtgtcatcacgtcactggagaatgctcttgcccttctggctggatgggcacagtgtgtggtcagccttgccccgagggtcgctttggaaagaactgttcccaagaatgccagtgccataatggagggacgtgtgatgctgccacaggccaatgtcattgcagtccaggatacacaggggaacggtgccaggatgagtgtcctgttgggacctatggcgttctctgtgctgagacctgccagtgtgtcaacggagggaagtgttaccacgtgagcggcgcatgcctctgtgaagcaggctttgctggcgagcgctgcgaagcacgcctgtgtcctgaggggctctacggcatcaaatgtgacaaacggtgtccctgccacctggaaaacactcatagctgtcaccccatgtctggagagtgtgcctgcaagccgggctggtcaggactctactgtaatgagacatgttctcctggattctacggggaagcttgccagcagatctgcagctgccaaaatggggcagactgtgacagtgtgactggaaagtgcacctgtgccccaggattcaaaggaattgactgctctaccccatgccctctgggaacctatgggataaactgttcctctcgctgtggctgtaaaaatgatgcagtctgctctcctgtggacgggtcttgtacttgcaaggcaggctggcacggggtggactgctccatcagatgtcccagtggcacatggggctttggctgtaacttaacatgccagtgcctcaacgggggagcctgcaacaccctggacgggacctgcacgtgtgcacctggatggcgcggggagaaatgcgaacttccctgccaggatggcacgtacgggctgaactgtgctgagcgctgcgactgcagccacgcagatggctgccaccctaccacgggccattgccgctgcctccccggatggtcaggtgtccactgtgacagcgtgtgtgctgagggacgctggggccccaactgctccctgccctgctactgtaaaaatggggcttcatgctcccctgatgatggcatctgcgagtgtgcaccaggcttccgaggcaccacttgtcagaggatctgctcccctggtttttatgggcatcgctgcagccagacatgcccacagtgcgttcacagcagcgggccctgccaccacatcaccggcctgtgtgactgcttgcctggcttcacaggcgccctctgcaatgaagtgtgtcccagtggcagatttgggaaaaactgtgcaggaatttgtacctgcaccaacaacggaacctgtaaccccattgacagatcttgtcagtgttaccccggttggattggcagtgactgctctcaaccatgtccacctgcccactggggcccaaactgcatccacacgtgcaactgccataatggagctttctgcagcgcctacgatggggaatgtaaatgcactcctggctggacagggctctactgcactcagagatgtcctctagggttttatggaaaagattgtgcactgatatgccaatgtcaaaacggagctgactgcgaccacatttctgggcagtgtacttgccgcactggattcatgggacggcactgtgagcagaagtgcccttcaggaacatatggctatggctgtcgccagatatgtgattgtctgaacaactccacctgcgaccacatcactgggacctgttactgcagccccggatggaagggagcgagatgtgatcaagctggtgttatcatagttggaaatctgaacagcttaagccgaaccagtactgctctccctgctgattcctaccagatcggggccattgcaggcatcatcattcttgtcctagttgttctcttcctactggcattgttcattatttatagacacaagcagaagggaaaggaatcaagcatgccagcagttacctacacccctgctatgagggtcgtcaatgcagattataccatttcaggaacccttcctcacagcaatggtggaaacgctaatagccactacttcaccaatcccagttaccacacgctcacccagtgtgccacatcccctcacgtcaacaacagggacaggatgactgtcacgaagtcaaaaaacaatcaactgtttgtgaatcttaaaaatgtgaaccctgggaagagaggccctgtgggggactgcactgggacattgccggctgactggaaacatggcggctacctcaacgagctcggtgcttttggacttgacagaagctatatgggaaaatccttaaaagacctgggaaagaattctgaatataattcaagtaactgctccctaagcagttctgagaacccatatgccactattaaagacccacctgtacttatcccgaaaagctcagagtgtggttatgtggagatgaaatcgccggcacgaagagattccccatatgcagagatcaataactcaacttcagccaacaggaatgtctatgaagttgaacctacagtgagtgttgtccaaggagtattcagcaataatgggcgtctctcccaggatccatatgacctcccaaagaacagtcacatcccttgtcattatgacctgctgccagtccgagacagttcatcctcccctaagcaagaggacagtggtggtagcagcagcaacagcagcagcagcagtgaatgacaccaaaggaccgcttggtagccactggaaccctttccagaactgctgtttggttcttctccatcctcaattttgccactttcatgtgaatgttagtcaattcggtgggcaatttttggacatgaaccagaaagctgaaagctgaggctgacacggactgtaggtgctttttgttcaggtggattcgaaggagttagagatgtgatttcccattgctgttagttttagaactatacccgtgaagcatgacttattgtaagatgttggctgaaagcatgaacttgcagaactccctcggagacgcaggttgcagtggacattgggattgttgcttgaaaaattaaaatttgaatattttctctctcatttgcatcatacagctctacctaggattgtacagtttaccataaaatttacttcatgaaagtgggaatcactgaacatgtagaagacaaggaacatattgttaactcctgattcttaactttattcaactggactcagaattgtagggataatatgaatgcaggaggaaacattctgtcaggcggtatgactggacagactttgaatatactctaaaagtggacagaaaatttacgaaaatcttagattttgtttagaatgagaaaatatacaattagaattattttagaaatagtaggaagtattgcagaagtcaatacacaaatgtgccaggcagaggtggttttctctgtttgactctcaaccaacttcagatctatgacattattctgatcactggctccatcatacatattcaccacttgagattcataacatatcaatagttatttcataaatatagaaatgaaataattttatttttgacagactggatggaatgagtgtgtaatgattgataaaggttgtaaattttaaatgcaagatgacgcttacgttctgtaaaccattagtaatacatgctgtaatatagaattagtggaacattttgattaatctttccctagaagtgactgaaatatttttgtgcatatttgagaaagggaactttccttttattaattgtcaatttagagaaactatgcttaagctggtcttttgcattgctaatgtgacatgtacccaacttttcattaatttgtatttccatttttaaattgcatattctatgttttgtagtgtttggattgttaatgaaaaaatattatatgttcgttattccttgtattattgccacttatcttttgcttgataaaaatgcgttgttcttttttcttttggagggacaagatgaaaatatataatttgaattgattaaaattggtcgttactaaaatagtatagtaaccacaagtgattggcttataaatgaagtagaaatgctttttaatattccaaaatagagttccttttgatctgttggtgctgagccttggttaaaccagggagaaggggagcagaaaggaaacgttgttactgatgagtaccacagactcatcttaaaaaaaactctcattatggtgatcatagaattgaccatccaaactgggacactcttgagagtaaatggagggcattattaataattatcttgtaatgaacttaaatctggactgttccaggcaaaccagacttatcttgcaatatgagaatgctgacacaatgcaggaaagccagtttcccttttgttgatctacttgaccaagcaaaggggctgaaaaactgaataaggaaacaactttataagagaaacagtggtcttcaatcttttaaagacatgaaatcctatatggcattctgtctcagtgagtcagttaacaaatacgtatgtgcaacccttctgctagtagtgcacataagtgattatccctgccaggtatcgagttggaatatccagttatttcatgtcacacatcggcacgtatgatggtggtttggtcagatggataatacagcagacacacttagaacactcactgcactggtggctgttcattttgaggaactccaaagtcaattcaaggaaataaggaatgacctggaacaggccttagaaacaattgatttattccaatagttaaccactggctggctcccaactctaggtgataggcatctaattgagacatgtgtgagtcaatagccatcggggtcctttttggtgagaagaaataagacattttctcccttttaaagatcatctcttcagagctgcatggtaaatttgaatttccccattgttctctagagctaggtcaaaaaaacaactgtttcttttcttattccactattaataaattgaaagcttgctgtacaaaggcaacagcaacttaaaaaagaaaatctggacaatagatgtggactccaaggggccactgccatcccttcctgtgtgctctttttgacaagtaaatcactccagttagctgatgtcctgaaatgacatttgtacctgaggcaattcttattagagcttactcaggacttttcaaacatcaggacacacatagcaatttggatgttgtaaaactacgtgttacatttggagaggtcttgttgagaaggcaaaattttctaaatattttgatatcaatttgggtaaagaaaggaatacttttgttagaatgagaattaaagagaaaacaaaagaatcttggcaaaattttccctctgaaattacaaactttaggaacttttccagatgtatcgaatttaatttgacattgatgtcactcttcataccaagtgaatctattctcatgaactttgaacccatgttaattttggaccctataactaatttcctttctgtatcccatggtggtcaaagcagtaaaggagtttagagatacttagcaaatgccattcatatagtattgttagccaaactattattccttccttagaagttgatgtatcagaaaatttataagttatttgtatttatatataagtacatcagaacttgcccacatgataactcatgtttgctttaataaggaaaatatgttatttgaggttaattatatgatagtgaggaacattttacaattatttacagtgtttgacattaattgctgtcctatgatacagtagtaatgttaacagagagtttaatatgtttagcattatctttatggaatttatattcaccaatttcaggaaaaccaaccatagaactttataataggacagttataacctgactgaaccaaatccatcagcataatgactgtgtgttctgagaaatgcaaacaactttatgaaagtgtggtcatcttgacccccaaagagccacagtagctgtcaattattgagatttttaaatggtaaatattgcaaaagttaaacaagggtaccacaatatcatttataattgatgtcaatattagtagtccactttatgcttaaaataaaatcataaaaaatcaagttttaaggttatattttttaaaataatgaattttctatctctaggcaacatgtctttattattcaagctgaatgtttaagagagattttggtcttaaaggcttcacatcatgaaagtgtacatgcatatgcaagtgtgaattacgtggtatggatgtttgcttgtttattaactaaagatgtacagcaaactgcccgtttagagtcctgttaatattgatgtcctaacactgggtctgcttatgctagttcagtatttggtctaggcttcattttgatatgactgaattgcaatctatatttttaaaaagaaaaatcaaaatacattagggtttacttggttgtggcaaacaaacaaaaaatgctttcagtgttgaaatatctctattttccaaagatgataaactttcatcgttcttagcctacattgtcatttatatcaccaaatgagtttatagattaatgcaataaactttctaataaaaaa

SEQ ID NO: 12349 - DNA, 542 bp, Homo sapiens
  source 1..542: mol_type = unassigned DNA
cctttctcttggacagagctccaatgccacttttaaaaagataatgaagtgaatttttgagggctgatctttactccttgccatttggcagcccttcttcccaacagagggcaataccccactagccaaacatttcgtgttagaaaactccaagccttcctactggcaggcacttcccatgttggaatcgaggacgtctgattttggtagctcagagtttcccagatctaaagaggacttggcttattagttaaagaactttctaactgaggaggaatgattaccattcagctttaagtgccaggatgagtgtcctgttgggacctatggcgttctctgtgctgagacctgccagtgtgtcaacggagggaagtgttaccacgtgagcggcgcatgcctctgtgaagcaggctttgctggcgagcgctgcgaagcacgcctgtgtcctgaggggctctacggcatcaaatgtgacaaacggtgtccctgccacctggaaaacactcatagctgtcaccccatgtctggagagtgtgcctgca

SEQ ID NO: 12350 - DNA, 583 bp, Homo sapiens
  source 1..583: mol_type = unassigned DNA
gtgctgagcgctgcgactgcagccacgcagatggctgccaccctaccacgggccattgccgctgcctccccggatggtcagtctgctcccctggtttttatgggcatcgctgcagccagacatgcccacagtgcgttcacagcagcgggccctgccaccacatcaccggcctgtgtgactgcttgcctggcttcacaggcgccctctgcaatgaagtgtgtcccagtggcagatttgggaaaaactgtgcaggaatttgtacctgcaccaacaacggaacctgtaaccccattgacagatcttgtcagtgttaccccggttggattggcagtgactgctctcaaccatgtccacctgcccactggggcccaaactgcatccacacgtgcaactgccataatggagctttctgcagcgcctacgatggggaatgtaaatgcactcctggctggacagggctctactgcactcagagatgtcctctagggttttatggaaaagattgtgcactgatatgccaatgtcaaaacggagctgactgcgaccacatttctgggcagtgtacttgccgcactggattcat

SEQ ID NO: 12351 - DNA, 463 bp, Homo sapiens
  source 1..463: mol_type = unassigned DNA
ttggtggtctgtgtttcagggcagattgttttgtaaaaaggtccttcagcatttagaatcataaaatcataggaacatttacttgagctggaagcagtgacatggaggcctcttttctcatttatagatgataaaactgcagcctgaaagcttaagtgaaagttcagaatatctaggtcaatttttttagatgccagatttcttgaatctcaacccatgcctttagcgttatcacttgacggaccataaggaagaactatgtaatgcccaattttgaatttaatgagtaaggtattagggtaatgctatcaggtattatcaggacaaatctttctgtcatggaaaataactttgcacagaacaatatcttctgagctggtgttatcatagttggaaatctgaacagcttaagccgaaccagtactgctctccctgctgattcctaccagatcggggccattgc

SEQ ID NO: 12352 - DNA, 686 bp, Homo sapiens
  source 1..686: mol_type = unassigned DNA
acagcagcctttctctgggcatggataggccgacaacatctgacaatgaggaatgtttgctttttcttcctgctctgtttccaaattaatgttttatgaactgaaaatatgcaggcattagcacagaaggaggtttttacacaagcagaagggaaaggaatcaagcatgccagcagttacctacacccctgctatgagggtcgtcaatgcagattataccatttcaggaacccttcctcacagcaatggtggaaacgctaatagccactacttcaccaatcccagttaccacacgctcacccagtgtgccacatcccctcacgtcaacaacagggacaggatgactgtcacgaagtcaaaaaacaatcaactgtttgtgaatcttaaaaatgtgaaccctgggaagagaggccctgtgggggactgcactgggacattgccggctgactggaaacatggcggctacctcaacgagctcggtgcttttggacttgacagaagctatatgggaaaatccttaaaagacctgggaaagaattctgaatataattcaagtaactgctccctaagcagttctgagaacccatatgccactattaaagacccacctgtacttatcccgaaaagctcagagtgtggttatgtggagatgaaatcgccggcacgaagagattccccatatgcag

SEQ ID NO: 12353 - DNA, 449 bp, Homo sapiens
  source 1..449: mol_type = unassigned DNA
aatctgaacagcttaagccgaaccagtactgctctccctgctgattcctaccagatcggggccattgcaggcatcatcattcttgtcctagttgttctcttcctactggcattgttcattatttatagacacaagcagaagggaaaggaatcaagcatgccagcagttacctacacccctgctatgagggtcgtcaatgcagattataccatttcaggaacccttcctcacagcaatggtggaaacgctaatagccactacttcaccaatcccagttaccacacgctcacccagtgtgccacatcccctcacgtcaacaacagggacaggatgactgtcacgaagtcaaaaaacaatcaactgtttgtgaatcttaaaaatgtgaaccctgggaagagaggccctgtgggggactgcactgggacattgccggctgactggaaacatgg

SEQ ID NO: 12354 - DNA, 565 bp, Homo sapiens
  source 1..565: mol_type = unassigned DNA
acccagtgtgccacatcccctcacgtcaacaacagggacaggatgactgtcacgaagtcaaaaaacaatcaactgtttgtgaatcttaaaaatgtgaaccctgggaagagaggccctgtgggggactgcactgggacattgccggctgactggaaacatggcggctacctcaacgagctcggtgcttttggacttgacagaagctatatgggaaaatccttaaaagacctgggaaagaattctgaatataattcaagtaactgctccctaagcagttctgagaacccatatgccactattaaagacccacctgtacttatcccgaaaagctcagagtgtggttatgtggagatgaaatcgccggcacgaagagattccccatatgcagagatcaataactcaacttcagccaacaggaatgtctatgaagttgtttagaccagacagagacagtggcaacaggaagaagagaaggaacctacatgatggactggcactggataatctggccaggatggactggtgagacagatgctcctgtttatctggattaattgaattgcta

SEQ ID NO: 12355 - DNA, 6163 bp, Homo sapiens
  source 1..6163: mol_type = unassigned DNA
cgctcccggtgcccgctgcccgccgcccggctcccggctgctcgcggccccctgctcctgcctggcgctctggccaggctcgggctccggaggacaggaccgcgcgactggccggccgatccctgggccggccgcgggagcagcctcctttgttctcctgtgcagggcccgggatggtgctctccctgacggggctcattgccttctccttcctgcaagccacccttgccctgaaccccgaggaccccaacgtgtgcagccactgggagagctatgctgtgactgtccaggaatcgtatgcacaccccttcgatcagatctattacacacgatgcacagacatcctcaactggttcaagtgcaccaggcaccggatcagttataagacggcgtatcggagaggcctccggaccatgtaccggcggaggtcccagtgctgccctggctactatgagagcggagacttctgcatacccctgtgtacggaggagtgtgtgcacggccgctgcgtttccccggacacctgccactgcgagcctggctggggagggcccgactgctccagcggctgcgacagcgaccactgggggccccactgcagcaaccggtgccagtgccagaacggcgccctgtgtaaccccatcacaggcgcctgcgtgtgcgccgccggcttccgtggatggcgctgcgaggagctctgcgcacctggcacccacggcaagggatgccagctgccgtgccagtgccgacacggtgccagctgcgacccccgcgccggcgagtgcctctgcgcacctggctacaccggcgtctactgcgaggagctgtgccctcctgggagccatggagctcactgtgagctgcgctgcccctgtcagaatgggggcacctgccaccacatcactggcgagtgtgcctgccccccaggctggacgggagcagtgtgtgcccagccctgcccaccagggacatttggccagaactgcagccaggattgtccttgccaccatggagggcagtgtgaccacgtgactggacagtgccactgtacagctggatacatgggggacaggtgccaagaggagtgccccttcgggtccttcggcttccagtgctcacagcactgtgactgccacaatggggggcagtgttcacccaccacgggtgcctgcgagtgtgagcctggctacaagggcccacgctgccaggagcgactgtgcccggagggcctgcatggcccaggctgcaccctgccctgcccctgtgacgctgacaacaccatcagctgccacccagtaactggagcttgtacctgccagccaggctggtctggtcaccactgcaatgaatcctgccctgttggctactatggcgatggctgccagctgccttgcacctgtcagaatggcgccgactgccacagcatcactgggggctgcacttgtgctccgggcttcatgggagaggtctgtgccgtttcctgtgcagcagggacctatggccccaactgctcgtccatctgtagctgtaacaatggtggcacctgctccccagtagatggctcctgtacctgcaaggaagggtggcagggcctggactgcaccctgccatgtcccagtgggacgtggggcctgaactgcaacgagagctgcacctgtgccaatggggcagcctgcagccccatagacggctcctgctcctgcactcctggctggctgggagacacctgtgagctgccttgcccggatggcacatttgggctgaactgcagtgaacactgtgactgcagccatgctgatggatgtgaccccgtcacaggccactgctgctgcctggccggatggacaggcatccgctgtgacagcacgtgtccacctggccgctggggccccaactgctctgtctcctgcagctgtgagaatggaggctcctgctccccagaggatgggagctgcgagtgtgcccctggcttccgaggacccttatgccagagaatctgcccccctgggttctatggccacggctgcgcccagccatgccccctctgcgtgcacagcagcaggccctgccaccacatcagcggcatctgtgagtgcctcccaggattctctggagctctctgcaaccaagtgtgtgctggaggatactttgggcaggactgtgcccagctctgctcctgtgccaacaacgggacctgcagccctatcgatggctcctgccagtgctttcctggatggattggcaaggactgctcacaggcttgcccacccgggttctggggccccgcctgcttccacgcatgcagctgccacaacggggcgagctgcagcgccgaggacggggcctgccactgcacccctggctggactggactcttctgcacacagcgctgcccagcagcattttttgggaaggactgtgggcgcgtatgccagtgtcagaatggcgccagctgtgaccacatcagtggcaagtgcacctgccgcacaggcttcaccgggcaacactgtgagcagagatgtgccccaggaacctttggctatgggtgtcagcagctatgtgagtgcatgaacaactccacctgtgaccatgtcaccggcacctgttactgcagccctggcttcaaaggaatcaggtgtgaccaagctgccctcatgatggaggagctgaatccctacaccaagatcagcccagcactgggtgcagagcggcactcggtgggtgctgtcacaggcatcatgctcctgttattcctcattgtggtgctgctgggcctatttgcctggcatcggcggcggcagaaagagaagggccgagacctggctccccgtgtctcctacacacctgccatgaggatgaccagcaccgactactccctctcaggtgcttgtggaatggatagacgtcagaacacatacattatggacaaaggcttcaaagattacatgaaagaatccgtgtgcagttctagtacttgttccttgaatagcagtgaaaacccttacgccacaattaaggacccacccatcctcacctgcaagcttccagaaagcagctatgtagaaatgaagtcgcctgtgcacatggggtctccgtacacagatgtgccatccttgtcgacatctaataaaaatatatatgaagttgagcccacagtcagtgtggtccaagaaggttgcggtcataactccagctatatccagaatgcatacgacctacctaggaacagccatattcctggtcattatgacctcctcccagtaagacagagccctgccaatgggccgtcccaggacaagcaatcttaagagggataagcttctctcttgcagtgtgctctactgaatattctgactctgaaagaagacagtcccttgacttgaagtaatggtacagactggctccagctgcatgttagttattacgttcacctggaactaaagaagagcgtccaggtgggactgggataattgttcaaggaattgtgttctcaaaggcaaatcctatcacccactcagccccaaatgccctggattatatgatttttaaaacattttaagatacagctactcatcaacatcagctaaatatagctgatatatatatatatatttatctgaaacgtgatattttaaaaacatgtaggtttaacaaaccttcctaggacaaaaaggagactggggagggaagaggattactttaaagcacctgaaacgtatatgtacttttggttgctgttaccatcaacatctgttttattaccgaagacaattagtacacagacatgaactgttcttaaacagaacagtcttaaaatgtctgtacatatctgtctggtccatcaaattacaacagccaagattacagaatctatatagtctaatgctgacaacttctattttaaaaaacaagactttactttcttctgccccctaagtgataggtttaaacacacagagacacacacacacgtttccaaagtgcagcagtgtctctttcagtctacaataagattcctagggcagctttatcaaattttgccaattcaaagttcaaggacattacaagttagtcctggctttgtcatatctacttagtccatccgacacctgaatcattccatgtaaaacagagctctaagatgatcctttaagcaagcagtcatagactggtcgggattaagtaaaagacggctagttggcctcctcattttatttggtcagcatcccttgactcaagagtacttgctttcaagttcttcataaatcttgagattgacgtagtatgaaacctaaaagtatacaggaaattggacaaatgtggatacagcaagtttacactgcttaaagtacattatgctttttaatggaactaaatgatcaaaaaaagaatggactgtaaccagttgctgtaacgtgatgtaaaaacgttactgtaaacagcatgaggatatgaagtccttccaccttctatcttaaaactactacttactgagctagcccaatatgcattacaatgagctaatgctccagatcccagtattcagatgtgtctataccttccactatgaacacagataaactgaggctcagataagtccaaatgaaatgaaatcaactcccaagccctaaagagaaccttctcacaagaattaaaaacaaaaagggcaaacctaggaagctaacggctactcctgtaccactctattcactggtacagtccagccagtaaaaaacacttccaaaaagatacacagaagaggaactaaatgactgcgaagctggaatactgctacaggaagtatgagagttctgaaacccttgatagaaactggaagcctgccatggaacacaatactttgggcaataatcagaaaaagcaaaaaaataaataaatgagtacatctccccttcccacatcactcaaggcataagcagattttactgttagaggaaaatatgtaatacttacatgaatgttgcatgtgtgcatgggagcaactgagtagcaatagtaaatttactttccaaaaaagccttattaaaatataaatattagaaaattactttggagacccaagtaaatatttctcatacatatgtagaaagaaatataggtaagcagcttacctcagtatttcagggcagcaagtgtttgtgaagcaaggatgagcagcatgaagatgtcagatcagcaaggagaaacttcaactcaatcccaggttttctcttcttcccttatcctgcatgtacaataactgctgcctggcaaactgcaaacaagcagcatcactcaagtttgaagtttcgccgcttttgtcaactatcctctgggcaaaggtattcagcaagaggtggaatggctagacactgaatcaagagatttcagtgttactctggtcaagttagtcgccctctctgggctcccttttttcctatgcataaaaaggggagaagcagagagtgggaagacagctctactaacccttcagctctagcagtccatgactttttaaggaaatgtaatacaagtcaaaccaggcaatacagaggagaagggaaaggcagagggtgtgattatggtgacaatagctgccttcccctatcgaacagttatcagtaaaagacatttcaatcttacaaagcaactgttagaaacttctgtctaacaccatcacaaataggttcatggtcagcctaaacatgtatactgtgcattttatgggtgactttgaaagatctgttcaattatttttcagaaactaaattttcaaaaaattaatatgtgtacaattaaaatgaatgaaagaaaaaccattattgtacagaggtattaatgagactatgaaacggcaatacttttttaaatcacagatttgtaatatatgttcactgtgcagagggattgtaccttgtacaaaataaaacaaatttctcaaactaatttaacaagaatgcctactgttgtgttgcaaatggaaaacgtgcttataatctacaccttaagtttaagggtagaactaacctacatcctgcttgggcactttgaacacctggaagaatgaaaattattctagtagatgtttgaaaataagtgaaaaacttgtatcaaatttttgatagacgagtctctttctttaaagtaataaatgtgagcaccatat

SEQ ID NO: 12356 - DNA, 5707 bp, Homo sapiens
  source 1..5707: mol_type = unassigned DNA
gcccgctgcccgccgcccggctcccggctgctcgcggccccctgctcctgcctggcgctctggccaggctcgggctccggaggacaggaccgcgcgactggccggccgatccctgggccggccgcgggagcagctatgctgtgactgtccaggaatcgtatgcacaccccttcgatcagatctattacacacgatgcacagacatcctcaactggttcaagtgcaccaggcaccgccctgtgtacggaggagtgtgtgcacggccgctgcgtttccccggacacctgccactgcgagcctggctggggagggcccgactgctccagcggctgcgacagcgaccactgggggccccactgcagcaaccggtgccagtgccagaacggcgccctgtgtaaccccatcacaggcgcctgcgtgtgcgccgccggcttccgtggatggcgctgcgaggagctctgcgcacctggcacccacggcaagggatgccagctgccgtgccagtgccgacacggtgccagctgcgacccccgcgccggcgagtgcctctgcgcacctggctacaccggcgtctactgcgaggagctgtgccctcctgggagccatggagctcactgtgagctgcgctgcccctgtcagaatgggggcacctgccaccacatcactggcgagtgtgcctgccccccaggctggacgggagcagtgtgtgcccagccctgcccaccagggacatttggccagaactgcagccaggattgtccttgccaccatggagggcagtgtgaccacgtgactggacagtgccactgtacagctggatacatgggggacaggtgccaagaggagtgccccttcgggtccttcggcttccagtgctcacagcactgtgactgccacaatggggggcagtgttcacccaccacgggtgcctgcgagtgtgagcctggctacaagggcccacgctgccaggagcgactgtgcccggagggcctgcatggcccaggctgcaccctgccctgcccctgtgacgctgacaacaccatcagctgccacccagtaactggagcttgtacctgccagccaggctggtctggtcaccactgcaatgaatcctgccctgttggctactatggcgatggctgccagctgccttgcacctgtcagaatggcgccgactgccacagcatcactgggggctgcacttgtgctccgggcttcatgggagaggtctgtgccgtttcctgtgcagcagggacctatggccccaactgctcgtccatctgtagctgtaacaatggtggcacctgctccccagtagatggctcctgtacctgcaaggaagggtggcagggcctggactgcaccctgccatgtcccagtgggacgtggggcctgaactgcaacgagagctgcacctgtgccaatggggcagcctgcagccccatagacggctcctgctcctgcactcctggctggctgggagacacctgtgagctgccttgcccggatggcacatttgggctgaactgcagtgaacactgtgactgcagccatgctgatggatgtgaccccgtcacaggccactgctgctgcctggccggatggacaggcatccgctgtgacagcacgtgtccacctggccgctggggccccaactgctctgtctcctgcagctgtgagaatggaggctcctgctccccagaggatgggagctgcgagtgtgcccctggcttccgaggacccttatgccagagaatctgcccccctgggttctatggccacggctgcgcccagccatgccccctctgcgtgcacagcagcaggccctgccaccacatcagcggcatctgtgagtgcctcccaggattctctggagctctctgcaaccaagtgtgtgctggaggatactttgggcaggactgtgcccagctctgctcctgtgccaacaacgggacctgcagccctatcgatggctcctgccagtgctttcctggatggattggcaaggactgctcacaggcttgcccacccgggttctggggccccgcctgcttccacgcatgcagctgccacaacggggcgagctgcagcgccgaggacggggcctgccactgcacccctggctggactggactcttctgcacacagcgctgcccagcagcattttttgggaaggactgtgggcgcgtatgccagtgtcagaatggcgccagctgtgaccacatcagtggcaagtgcacctgccgcacaggcttcaccgggcaacactgtgagcagagatgtgccccaggaacctttggctatgggtgtcagcagctatgtgagtgcatgaacaactccacctgtgaccatgtcaccggcacctgttactgcagccctggcttcaaaggaatcaggtgtgaccaagctgccctcatgatggaggagctgaatccctacaccaagatcagcccagcactgggtgcagagcggcactcggtgggtgctgtcacaggcatcatgctcctgttattcctcattgtggtgctgctgggcctatttgcctggcatcggcggcggcagaaagagaagggccgagacctggctccccgtgtctcctacacacctgccatgaggatgaccagcaccgactactccctctcaggtgcttgtggaatggatagacgtcagaacacatacattatggacaaaggcttcaaagattacatgaaagaatccgtgtgcagttctagtacttgttccttgaatagcagtgaaaacccttacgccacaattaaggacccacccatcctcacctgcaagcttccagaaagcagctatgtagaaatgaagtcgcctgtgcacatggggtctccgtacacagatgtgccatccttgtcgacatctaataaaaatatatatgaagttgagcccacagtcagtgtggtccaagaaggttgcggtcataactccagctatatccagaatgcatacgacctacctaggaacagccatattcctggtcattatgacctcctcccagtaagacagagccctgccaatgggccgtcccaggacaagcaatcttaagagggataagcttctctcttgcagtgtgctctactgaatattctgactctgaaagaagacagtcccttgacttgaagtaatggtacagactggctccagctgcatgttagttattacgttcacctggaactaaagaagagcgtccaggtgggactgggataattgttcaaggaattgtgttctcaaaggcaaatcctatcacccactcagccccaaatgccctggattatatgatttttaaaacattttaagatacagctactcatcaacatcagctaaatatagctgatatatatatatatatttatctgaaacgtgatattttaaaaacatgtaggtttaacaaaccttcctaggacaaaaaggagactggggagggaagaggattactttaaagcacctgaaacgtatatgtacttttggttgctgttaccatcaacatctgttttattaccgaagacaattagtacacagacatgaactgttcttaaacagaacagtcttaaaatgtctgtacatatctgtctggtccatcaaattacaacagccaagattacagaatctatatagtctaatgctgacaacttctattttaaaaaacaagactttactttcttctgccccctaagtgataggtttaaacacacagagacacacacacacgtttccaaagtgcagcagtgtctctttcagtctacaataagattcctagggcagctttatcaaattttgccaattcaaagttcaaggacattacaagttagtcctggctttgtcatatctacttagtccatccgacacctgaatcattccatgtaaaacagagctctaagatgatcctttaagcaagcagtcatagactggtcgggattaagtaaaagacggctagttggcctcctcattttatttggtcagcatcccttgactcaagagtacttgctttcaagttcttcataaatcttgagattgacgtagtatgaaacctaaaagtatacaggaaattggacaaatgtggatacagcaagtttacactgcttaaagtacattatgctttttaatggaactaaatgatcaaaaaaagaatggactgtaaccagttgctgtaacgtgatgtaaaaacgttactgtaaacagcatgaggatatgaagtccttccaccttctatcttaaaactactacttactgagctagcccaatatgcattacaatgagctaatgctccagatcccagtattcagatgtgtctataccttccactatgaacacagataaactgaggctcagataagtccaaatgaaatgaaatcaactcccaagccctaaagagaaccttctcacaagaattaaaaacaaaaagggcaaacctaggaagctaacggctactcctgtaccactctattcactggtacagtccagccagtaaaaaacacttccaaaaagatacacagaagaggaactaaatgactgcgaagctggaatactgctacaggaagtatgagagttctgaaacccttgatagaaactggaagcctgccatggaacacaatactttgggcaataatcagaaaaagcaaaaaaataaataaatgagtacatctccccttcccacatcactcaaggcataagcagattttactgttagaggaaaatatgtaatacttacatgaatgttgcatgtgtgcatgggagcaactgagtagcaatagtaaatttactttccaaaaaagccttattaaaatataaatattagaaaattactttggagacccaagtaaatatttctcatacatatgtagaaagaaatataggtaagcagcttacctcagtatttcagggcagcaagtgtttgtgaagcaaggatgagcagcatgaagatgtcagatcagcaaggagaaacttcaactcaatcccaggttttctcttcttcccttatcctgcatgtacaataactgctgcctggcaaactgcaaacaagcagcatcactcaagtttgaagtttcgccgcttttgtcaactatcctctgggcaaaggtattcagcaagaggtggaatggctagacactgaatcaagagatttcagtgttactctggtcaagttagtcgccctctctgggctcccttttttcctatgcataaaaaggggagaagcagagagtgggaagacagctctactaacccttcagctctagcagtccatgactttttaaggaaatgtaatacaagtcaaaccaggcaatacagaggagaagggaaaggcagagggtgtgattatggtgacaatagctgccttcccctatcgaacagttatcagtaaaagacatttcaatcttacaaagcaactgttagaaacttctgtctaacaccatcacaaataggttcatggtcagcctaaacatgtatactgtgcattttatgggtgactttgaaagatctgttcaattatttttcagaaactaaattttcaaaaaattaatatgtgtacaattaaaatgaatgaaagaaaaaccattattgtacagaggtattaatgagactatgaaacggcaatacttttttaaatcacagatttgtaatatatgttcactgtgcagagggattgtaccttgtacaaaataaaacaaatttctcaaactaattt

SEQ ID NO: 12357 - DNA, 3423 bp, Homo sapiens
  source 1..3423: mol_type = unassigned DNA
atggtgctctccctgacggggctcattgccttctccttcctgcaagccacccttgccctgaaccccgaggaccccaacgtgtgcagccactgggagagctatgctgtgactgtccaggaatcgtatgcacaccccttcgatcagatctattacacacgatgcacagacatcctcaactggttcaagtgcaccaggcaccggatcagttataagacggcgtatcggagaggcctccggaccatgtaccggcggaggtcccagtgctgccctggctactatgagagcggagacttctgcatacccctgtgtacggaggagtgtgtgcacggccgctgcgtttccccggacacctgccactgcgagcctggctggggagggcccgactgctccagcggctgcgacagcgaccactgggggccccactgcagcaaccggtgccagtgccagaacggcgccctgtgtaaccccatcacaggcgcctgcgtgtgcgccgccggcttccgtggatggcgctgcgaggagctctgcgcacctggcacccacggcaagggatgccagctgccgtgccagtgccgacacggtgccagctgcgacccccgcgccggcgagtgcctctgcgcacctggctacaccggcgtctactgcgaggagctgtgccctcctgggagccatggagctcactgtgagctgcgctgcccctgtcagaatgggggcacctgccaccacatcactggcgagtgtgcctgccccccaggctggacgggagcagtgtgtgcccagccctgcccaccagggacatttggccagaactgcagccaggattgtccttgccaccatggagggcagtgtgaccacgtgactggacagtgccactgtacagctggatacatgggggacaggtgccaagaggagtgccccttcgggtccttcggcttccagtgctcacagcactgtgactgccacaatggggggcagtgttcacccaccacgggtgcctgcgagtgtgagcctggctacaagggcccacgctgccaggagcgactgtgcccggagggcctgcatggcccaggctgcaccctgccctgcccctgtgacgctgacaacaccatcagctgccacccagtaactggagcttgtacctgccagccaggctggtctggtcaccactgcaatgaatcctgccctgttggctactatggcgatggctgccagctgccttgcacctgtcagaatggcgccgactgccacagcatcactgggggctgcacttgtgctccgggcttcatgggagaggtctgtgccgtttcctgtgcagcagggacctatggccccaactgctcgtccatctgtagctgtaacaatggtggcacctgctccccagtagatggctcctgtacctgcaaggaagggtggcagggcctggactgcaccctgccatgtcccagtgggacgtggggcctgaactgcaacgagagctgcacctgtgccaatggggcagcctgcagccccatagacggctcctgctcctgcactcctggctggctgggagacacctgtgagctgccttgcccggatggcacatttgggctgaactgcagtgaacactgtgactgcagccatgctgatggatgtgaccccgtcacaggccactgctgctgcctggccggatggacaggcatccgctgtgacagcacgtgtccacctggccgctggggccccaactgctctgtctcctgcagctgtgagaatggaggctcctgctccccagaggatgggagctgcgagtgtgcccctggcttccgaggacccttatgccagagaatctgcccccctgggttctatggccacggctgcgcccagccatgccccctctgcgtgcacagcagcaggccctgccaccacatcagcggcatctgtgagtgcctcccaggattctctggagctctctgcaaccaagtgtgtgctggaggatactttgggcaggactgtgcccagctctgctcctgtgccaacaacgggacctgcagccctatcgatggctcctgccagtgctttcctggatggattggcaaggactgctcacaggcttgcccacccgggttctggggccccgcctgcttccacgcatgcagctgccacaacggggcgagctgcagcgccgaggacggggcctgccactgcacccctggctggactggactcttctgcacacagcgctgcccagcagcattttttgggaaggactgtgggcgcgtatgccagtgtcagaatggcgccagctgtgaccacatcagtggcaagtgcacctgccgcacaggcttcaccgggcaacactgtgagcagagatgtgccccaggaacctttggctatgggtgtcagcagctatgtgagtgcatgaacaactccacctgtgaccatgtcaccggcacctgttactgcagccctggcttcaaaggaatcaggtgtgaccaagctgccctcatgatggaggagctgaatccctacaccaagatcagcccagcactgggtgcagagcggcactcggtgggtgctgtcacaggcatcatgctcctgttattcctcattgtggtgctgctgggcctatttgcctggcatcggcggcggcagaaagagaagggccgagacctggctccccgtgtctcctacacacctgccatgaggatgaccagcaccgactactccctctcagatttgtctcaaagtagcagccatgcccactgcttttccaattccagctaccacgcactggcatgtggggggcctgccaccagccaggccagcactctggacaggaacagccccaccaagctcagtaacaagtcccttgacagagacacagcaggctggaccccctacagctatgtgaacgtgttagactcccatttccagatcagtgccctggaggccaggtacccgcccgaggacttctacattgaacttagacacctcagccgccccgctgagccacactcaccaggtgcttgtggaatggatagacgtcagaacacatacattatggacaaaggcttcaaagattacatgaaagaatccgtgtgcagttctagtacttgttccttgaatagcagtgaaaacccttacgccacaattaaggacccacccatcctcacctgcaagcttccagaaagcagctatgtagaaatgaagtcgcctgtgcacatggggtctccgtacacagatgtgccatccttgtcgacatctaataaaaatatatatgaagttgagcccacagtcagtgtggtccaagaaggttgcggtcataactccagctatatccagaatgcatacgacctacctaggaacagccatattcctggtcattatgacctcctcccagtaagacagagccctgccaatgggccgtcccaggacaagcaatcttaa

SEQ ID NO: 12358 - DNA, 909 bp, Homo sapiens
  source 1..909: mol_type = unassigned DNA
tagtcacatagggactcaggaatcgggccaaagccagaaccagatctcctaacattagaggggttacacgcatctgaacccaggcccaggagacctgaagcgcaagaaggccagccccaggctcaggccctccctctgcccgcagctgccctcatgatggaggagctgaatccctacaccaagatcagcccagcactgggtgcagagcggcactcggtgggtgctgtcacaggcatcatgctcctgttattcctcattgtggtgctgctgggcctatttgcctggcatcggcggcggcagaaagagaagggccgagacctggctccccgtgtctcctacacacctgccatgaggatgaccagcaccgactactccctctcagcatcaaccacaccatggtggcctgtcatggaacacctagctcgccctttctctcaacggcctaggacccagctcagtaacaagtcccttgacagagacacagcaggctggaccccctacagctatgtgaacgtgttagatcagtgccctggaggccaggtacccgcccgaggacttctacattgaacttagacacctcagccgccccgctgagccacactcaccaggtgcttgtggaatggatagacgtcagaacacatacattatggacaaaggcttcaaaggcaggtggatgactcagctggagaacaaagtggcttcctgagattacatgaaagaatccgtgtgcagttctagtacttgttccttgaatagcagtgaaaacccttacgccacaattaaggacccacccatcctcacctgcaagcttccagaaagcagctatgtagaaatgaagtcgcctgtgcacatggggtctccgtacacagatgtgccatccttgtcgacatctaataaaaatatatatga

SEQ ID NO: 12359 - DNA, 3216 bp, Homo sapiens
  source 1..3216: mol_type = unassigned DNA
ggagcagtgtgtgcccagccctgcccaccagggacatttggccagaactgcagccaggattgtccttgccaccatggagggcagtgtgaccacgtgactggacagtgccactgtacagctggatacatgggggacaggtgccaagaggagtgccccttcgggtccttcggcttccagtgctcacagcactgtgactgccacaatggggggcagtgttcacccaccacgggtgcctgcgagtgtgagcctggctacaagggcccacgctgccaggagcgactgtgcccggagggcctgcatggcccaggctgcaccctgccctgcccctgtgacgctgacaacaccatcagctgccacccagtaactggagcttgtacctgccagccaggctggtctggtcaccactgcaatgaatcctgccctgttggctactatggcgatggctgccagctgccttgcacctgtcagaatggcgccgactgccacagcatcactgggggctgcacttgtgctccgggcttcatgggagaggtctgtgccgtttcctgtgcagcagggacctatggccccaactgctcgtccatctgtagctgtaacaatggtggcacctgctccccagtagatggctcctgtacctgcaaggaagggtggcagggcctggactgcaccctgccatgtcccagtgggacgtggggcctgaactgcaacgagagctgcacctgtgccaatggggcagcctgcagccccatagacggctcctgctcctgcactcctggctggctgggagacacctgtgagctgccttgcccggatggcacatttgggctgaactgcagtgaacactgtgactgcagccatgctgatggatgtgaccccgtcacaggccactgctgctgcctggccggatggacaggcatccgctgtgacagcacgtgtccacctggccgctggggccccaactgctctgtctcctgcagctgtgagaatggaggctcctgctccccagaggatgggagctgcgagtgtgcccctggcttccgaggacccttatgccagagaatctgcccccctgggttctatggccacggctgcgcccagccatgccccctctgcgtgcacagcagcaggccctgccaccacatcagcggcatctgtgagtgcctcccaggattctctggagctctctgcaaccaagtgtgtgctggaggatactttgggcaggactgtgcccagctctgctcctgtgccaacaacgggacctgcagccctatcgatggctcctgccagtgctttcctggatggattggcaaggactgctcacaggcttgcccacccgggttctggggccccgcctgcttccacgcatgcagctgccacaacggggcgagctgcagcgccgaggacggggcctgccactgcacccctggctggactggactcttctgcacacagcgtaagccccacctcctggcctcccagccacttagaataccatgctgcggcctactggccactgtgggcattgtccagaccagcagggagggaggaatgcaggcagccccaggactggtggtacctgactcctgccccacgagaactgaggagctctgcaggggcagctccagacctgactggattcaggggattgacaagcccaaagtcctggaaggtcagggctgcaaggctgcccagcagcattttttgggaaggactgtgggcgcgtatgccagtgtcagaatggcgccagctgtgaccacatcagtggcaagtgcacctgccgcacaggcttcaccgggcaacactgtgagcagagatgtgccccaggaacctttggctatgggtgtcagcagctatgtgagtgcatgaacaactccacctgtgaccatgtcaccggcacctgttactgcagccctggcttcaaaggaatcaggtgtgaccaagctgccctcatgatggaggagctgaatccctacaccaagatcagcccagcactgggtgcagagcggcactcggtgggtgctgtcacaggcatcatgctcctgttattcctcattgtggtgctgctgggcctatttgcctggcatcggcggcggcagaaagagaagggccgagacctggctccccgtgtctcctacacacctgccatgaggatgaccagcaccgactactccctctcagctcagtaacaagtcccttgacagagacacagcaggctggaccccctacagctatgtgaacgtgttagactcccatttccagatcagtgccctggaggccaggtacccgcccgaggacttctacattgaacttagacacctcagccgccccgctgagccacactcaccagataagccttggatccaggagaggacagacaggaccagagctgagaggtgcttgtggaatggatagacgtcagaacacatacattatggacaaaggcttcaaaggcaggtggatgactcagctggagaacaaagtggcttcctgaggtggagtttccagcttgcccagcccttccccattctccagtcccagtagagatggggtacagaagagtccataattcaacacccttttctcaccacccagccaacacatacatgcactgctccatcctctgctcctgtatggaagatacttccccctgagcttagcccctccccacagacatcaacttctcttttatccatttaggatcatcccctgctccagagccaacaattgattccccaaaactttaaagtagccccgacttttctggtgaaaatgagaagaggcactatcaactggccgaggttcttttaggcattgaacttcaaggctctcctactgccctaactcagtcatgggatatccacaaaaaacttaagagcttagcctttttctctcagctgggcttagccccatagatgaaagacattccttgttaagggtaaggtgtagctgctgcagatacagtttgcctttagagatatggacaggagccctggataacaagacacgtagtgagggaaaacatcttgattggtatcaagagaagacaggggttgagtcctgactaaactatttactaacattaggaattatattagcaaattttctgagcttcagattcctcattctaaagtagaaacaacagtcctttctgcccagccctattcacgatgtaacaagtttcaaatgacctaattggaatgaagactatacgtgcta

SEQ ID NO: 12360 - DNA, 733 bp, Homo sapiens
  source 1..733: mol_type = unassigned DNA
atttgtctcaaagtagcagccatgcccactgcttttccaattccagctaccacgcactggcatgtggggggcctgccaccagccaggccagcactctggacaggaacagccccaccaagctcagtaacaagtcccttgacagagacacagcaggctggaccccctacagctatgtgaacgtgttagactcccatttccagatcagtgccctggaggccaggtacccgcccgaggacttctacattgaacttagacacctcagccgccccgctgagccacactcaccagataagccttggatccaggagaggacagacaggaccagagctgagaggtgcttgtggaatggatagacgtcagaacacatacattatggacaaaggcttcaaaggcaggtggatgactcagctggagaacaaagtggcttcctgaggtggagtttccagcttgcccagcccttccccattctccagtcccagtagagatggggtacagaagagtccataattcaacacccttttctcaccacccagccaacacatacatgcactgctccatcctctgctcctgtatggaagatacttccccctgagcttagcccctccccacagacatcaacttctcttttatccatttaggatcatcccctgctccagagccaacaattgattccccaaaactttaaagtagccccgacttttctggtgaaaatgagaagaggcactatcaactg

SEQ ID NO: 12361 - DNA, 740 bp, Homo sapiens
  source 1..740: mol_type = unassigned DNA
ctggaccccctacagctatgtgaacgtgttagatcagtgccctggaggccaggtacccgcccgaggacttctacattgaacttagacacctcagccgccccgctgagccacactcaccaggtgcttgtggaatggatagacgtcagaacacatacattatggacaaaggcttcaaagatgccaactaaatgtcttcggaaatgtaaagcgtcattatccaaccaattagtacgagttaaattgattataaaatctgaaataaagttgatctacctgccccagaggcctcctgtcgttgcactagcaaggaatgccaccctgcacctgctggctttctgggggcacaaggaatgaaaatgatacgcagtgttaatattgtatggcactccaacctcaagagatctctgcctccaagagcagagaagccaagacaaatccctaacacatgggaactgcaagttggatcatccctctaggaagtctacaggtgaagccaaagatgaaaggtcaggtcctgccctaggtttaaatgccggaatgtgtgaaatagggggctttggaactctgtcacttgccactctgttgctcattaactgtgaccttagactggactgtgagctttccaaggctcagtttcctcatctgcaaggttgggataattttgcctgtcctattgtctaatgcctgtcctactgtctaacaaggttatcatgagtaaccaataaaatcaccaatgggaa

SEQ ID NO: 12362 - DNA, 524 bp, Homo sapiens
  source 1..524: mol_type = unassigned DNA
ccccatccaggctccagttgatagtgcctccccttggcacagatttgtctcaaagtagcagccatgcccactgcttttccaattccagctaccacgcactggcatgtggggggcctgccaccagccaggccagcactctggacaggaacagccccaccaagctcagtaacaagtcccttgacagagacacagcaggctggaccccctacagctatgtgaacgtgttagactcccatttccagatcagtgccctggaggccaggtacccgcccgaggacttctacattgaacttagacacctcagccgccccgctgagccacactcaccagataagccttggatccaggagaggacagacaggaccagagctgagaggtgcttgtggaatggatagacgtcagaacacatacattatggacaaaggcttcaaagttgcacctgcttagcaaatgcttgtgggttttttatagatgccaactaaatgtcttcggaaatgtaaagcgtcattatccaaccaattagt

SEQ ID NO: 12363 - DNA, 577 bp, Homo sapiens
  source 1..577: mol_type = unassigned DNA
gatgtgccccaggaacctttggctatgggtgtcagcagctatgtgagtgcatgaacaactccacctgtgaccatgtcaccggcacctgttactgcagccctggcttcaaaggaatcaggtgtgaccaagctgccctcatgatggaggagctgaatccctacaccaagatcagcccagcactgggtgcagagcggcactcggtgggtgctgtcacaggcatcatgctcctgttattcctcattgtggtgctgctgggcctatttgcctggcatcggcggcggcagaaagagaagggccgagacctggctccccgtgtctcctacacacctgccatgaggatgaccagcaccgactactccctctcaggtaagggccatgctcctggcctccctcctcttcccctccacacacacataccccaggaatggttgtgcctgtagggttggctgctgtggctgaatgtggaagctcagtctcccctagagtgacagtggggatggggagcaggagcctacctagagaagatatctggggttccaagggaaaattgtttcctgagtccctagctctgagcagc

SEQ ID NO: 12364 - DNA, 454 bp, Homo sapiens
  source 1..454: mol_type = unassigned DNA
gtgcctcccaggattctctggagctctctgcaaccaagctagcaagtggcagaaacaaattctgattccgacatgcatgctgaagggatgaaaagtgaaacaagcacagagatctgcatcagaagtggcaccatgtggtctgtgccgagtgccaagggtaaaggcagagaatgctgtgggagtgcagaggagctggctctggctggagatggcaacttccaagcccttctccccgtcatattcaggccaccatccctaatccctccccatatgctttcctgacttgacctcagaatccttcacaataccgactccaagaactgctaccactcagcaggagttgaaaagagatataaagcttatttgcattggtgttccaccctaccagctctttgtgggggaaaaaccctgatctgtaacatctgcagatttttaaaatataaatattcctacc

SEQ ID NO: 12365 - DNA, 864 bp, Homo sapiens
  source 1..864: mol_type = unassigned DNA
tgcttttccatcttccagtgtgtgacatcctttgtctcctattcctcttttctttggagcagtgtgtgcccagccctgcccaccagggacatttggccagaactgcagccaggattgtccttgccaccatggagggcagtgtgaccacgtgactggacagtgccactgtacagctggatacatgggggacaggtgccaagaggagtgccccttcgggtccttcggcttccagtgctcacagcactgtgactgccacaatggggggcagtgttcacccaccacgggtgcctgcgagtgtgagcctggctacaagggcccacgctgccaggagcgactgtgcccggagggcctgcatggcccaggctgcaccctgccctgcccctgtgacgctgacaacaccatcagctgccacccagtaactggagcttgtacctgccagccaggctggtctggtcaccactgcaatgaatcctgccctgttggctactatggcgatggctgccagctgccttgcacctgtcagaatggcgccgactgccacagcatcactgggggctgcacttgtgctccgggcttcatgggagaggtctgtgccgtttcctgtgcagcagggacctatggccccaactgctcgtccatctgtagctgtaacaatggtggcacctgctccccagtagatggctcctgtacctgcaaggaagggtggcagggcctggactgcaccctgccatgtcccagtgggacgtggggcctgaactgcaacgagagctgcacctgtgccaatggggcagcctgcagccccatagacggctcctgctcctgcactcctggctggctgggagacacctgtgagctgccttgccc

SEQ ID NO: 12366 - DNA, 333 bp, Homo sapiens
  source 1..333: mol_type = unassigned DNA
ctcctccacctgcttttccatcttccaggagcagtgtgtgcccagccctgcccaccagggacatttggccagaactgcagccaggattgtccttgccaccatggagggcagtgtgaccacgtgactggacagtgccactgtacagctggatacatgggggacaggtgccaagaggagtgccccttcgggtccttcggcttccagtgctcacagcactgtgactgccacaatggggggcagtgttcacccaccacgggtgcctgcgagtgtgagcctggctacaagggcccacgctgccaggagcgactgtgcccggagggcctgcatggccca

SEQ ID NO: 12367 - DNA, 760 bp, Homo sapiens
  source 1..760: mol_type = unassigned DNA
agttatcactcctccacctgcttttccatcttccagtgtgtgacatcctttgtctcctattcctcttttctttgtgggtttatacctgtacccctttgactctcatgtcagctgggtttgagaaagaagctgagcaaagtgcacgtctccataccagcatgtttactcagcctccttccttatgtcttctcagcactttactgtgtacccatgtgagagtacttactgccttgtacttagcggtttttttggctctttctgtggtagactaggaggacaggaatcaaatcgaatcacccctagtgtctcacacagcacctcgtatacaataggcagttcctaaattgtgctgaataactggatgagcaagttggcctcagtctcccatctcccatctctaagaggagggctttggagccctggtgtccagctgtctgaacttcttctgggaagttgggtggtccctggagccacagcaggtgtgccattcccaggaaagtttggcatttctggagcaccgccatgcatgtcttcccacctttcttttagggagcagtgtgtgcccagccctgcccaccagggacatttggccagaactgcagccaggattgtccttgccaccatggagggcagtgtgaccacgtgactggacagtgccactgtacagctggatacatgggggacaggtgccaagaggagtgccccttcgggtccttcggcttccagtgctcacagcactgtgactgccacaatggggggc

SEQ ID NO: 12368 - DNA, 472 bp, Homo sapiens
  source 1..472: mol_type = unassigned DNA
attgcccaggaagcagaaaccaaagcagttatcactcctccacctgcttttccatcttccaggagcagtgtgtgcccagccctgcccaccagggacatttggccagaactgcagccaggattgtccttgccaccatggagggcagtgtgaccacgtgactggacagtgccactgtacagctggatacatgggggacagaacccgatgaggtttagtgagtatcgtcccattttatgaaaaagaagaggatgtcagagctttaggcttggaatcaataaaatatggtggtacaaactcattgctggggggactgagccgacctggcatgaaaggcagaaatgactggggcgaactaaaccatggactacttcctggaggaggagagagaaaaggggaggaggctgtgagcagcgtggagcacaccaggcctgggccagatggccaggaggaccacatcctggaggatcttgaa

SEQ ID NO: 12369 - DNA, 5914 bp, Homo sapiens
  source 1..5914: mol_type = unassigned DNA
gcccgctgcccgccgcccggctcccggctgctcgcggccccctgctcctgcctggcgctctggccaggctcgggctccggaggacaggaccgcgcgactggccggccgatccctgggccggccgcgggagcagggcccgggatggtgctctccctgacggggctcattgccttctccttcctgcaagccacccttgccctgaaccccgaggaccccaacgtgtgcagccactgggagagctatgctgtgactgtccaggaatcgtatgcacaccccttcgatcagatctattacacacgatgcacagacatcctcaactggttcaagtgcaccaggcaccggatcagttataagacggcgtatcggagaggcctccggaccatgtaccggcggaggtcccagtgctgccctggctactatgagagcggagacttctgcatacccctgtgtacggaggagtgtgtgcacggccgctgcgtttccccggacacctgccactgcgagcctggctggggagggcccgactgctccagcggctgcgacagcgaccactgggggccccactgcagcaaccggtgccagtgccagaacggcgccctgtgtaaccccatcacaggcgcctgcgtgtgcgccgccggcttccgtggatggcgctgcgaggagctctgcgcacctggcacccacggcaagggatgccagctgccgtgccagtgccgacacggtgccagctgcgacccccgcgccggcgagtgcctctgcgcacctggctacaccggcgtctactgcgaggagctgtgccctcctgggagccatggagctcactgtgagctgcgctgcccctgtcagaatgggggcacctgccaccacatcactggcgagtgtgcctgccccccaggctggacgggagcagtgtgtgcccagccctgcccaccagggacatttggccagaactgcagccaggattgtccttgccaccatggagggcagtgtgaccacgtgactggacagtgccactgtacagctggatacatgggggacaggtgccaagaggagtgccccttcgggtccttcggcttccagtgctcacagcactgtgactgccacaatggggggcagtgttcacccaccacgggtgcctgcgagtgtgagcctggctacaagggcccacgctgccaggagcgactgtgcccggagggcctgcatggcccaggctgcaccctgccctgcccctgtgacgctgacaacaccatcagctgccacccagtaactggagcttgtacctgccagccaggctggtctggtcaccactgcaatgaatcctgccctgttggctactatggcgatggctgccagctgccttgcacctgtcagaatggcgccgactgccacagcatcactgggggctgcacttgtgctccgggcttcatgggagaggtctgtgccgtttcctgtgcagcagggacctatggccccaactgctcgtccatctgtagctgtaacaatggtggcacctgctccccagtagatggctcctgtacctgcaaggaagggtggcagggcctggactgcaccctgccatgtcccagtgggacgtggggcctgaactgcaacgagagctgcacctgtgccaatggggcagcctgcagccccatagacggctcctgctcctgcactcctggctggctgggagacacctgtgagctgccttgcccggatggcacatttgggctgaactgcagtgaacactgtgactgcagccatgctgatggatgtgaccccgtcacaggccactgctgctgcctggccggatggacaggcatccgctgtgacagcacgtgtccacctggccgctggggccccaactgctctgtctcctgcagctgtgagaatggaggctcctgctccccagaggatgggagctgcgagtgtgcccctggcttccgaggacccttatgccagagaatctgcccccctgggttctatggccacggctgcgcccagccatgccccctctgcgtgcacagcagcaggccctgccaccacatcagcggcatctgtgagtgcctcccaggattctctggagctctctgcaaccaagtgtgtgctggaggatactttgggcaggactgtgcccagctctgctcctgtgccaacaacgggacctgcagccctatcgatggctcctgccagtgctttcctggatggattggcaaggactgctcacaggcttgcccacccgggttctggggccccgcctgcttccacgcatgcagctgccacaacggggcgagctgcagcgccgaggacggggcctgccactgcacccctggctggactggactcttctgcacacagcgctgcccagcagcattttttgggaaggactgtgggcgcgtatgccagtgtcagaatggcgccagctgtgaccacatcagtggcaagtgcacctgccgcacaggcttcaccgggcaacactgtgagcagagatgtgccccaggaacctttggctatgggtgtcagcagctatgtgagtgcatgaacaactccacctgtgaccatgtcaccggcacctgttactgcagccctggcttcaaaggaatcaggtgtgaccaagctgccctcatgatggaggagctgaatccctacaccaagatcagcccagcactgggtgcagagcggcactcggtgggtgctgtcacaggcatcatgctcctgttattcctcattgtggtgctgctgggcctatttgcctggcatcggcggcggcagaaagagaagggccgagacctggctccccgtgtctcctacacacctgccatgaggatgaccagcaccgactactccctctcaggtgcttgtggaatggatagacgtcagaacacatacattatggacaaaggcttcaaagattacatgaaagaatccgtgtgcagttctagtacttgttccttgaatagcagtgaaaacccttacgccacaattaaggacccacccatcctcacctgcaagcttccagaaagcagctatgtagaaatgaagtcgcctgtgcacatggggtctccgtacacagatgtgccatccttgtcgacatctaataaaaatatatatgaagttgagcccacagtcagtgtggtccaagaaggttgcggtcataactccagctatatccagaatgcatacgacctacctaggaacagccatattcctggtcattatgacctcctcccagtaagacagagccctgccaatgggccgtcccaggacaagcaatcttaagagggataagcttctctcttgcagtgtgctctactgaatattctgactctgaaagaagacagtcccttgacttgaagtaatggtacagactggctccagctgcatgttagttattacgttcacctggaactaaagaagagcgtccaggtgggactgggataattgttcaaggaattgtgttctcaaaggcaaatcctatcacccactcagccccaaatgccctggattatatgatttttaaaacattttaagatacagctactcatcaacatcagctaaatatagctgatatatatatatatatttatctgaaacgtgatattttaaaaacatgtaggtttaacaaaccttcctaggacaaaaaggagactggggagggaagaggattactttaaagcacctgaaacgtatatgtacttttggttgctgttaccatcaacatctgttttattaccgaagacaattagtacacagacatgaactgttcttaaacagaacagtcttaaaatgtctgtacatatctgtctggtccatcaaattacaacagccaagattacagaatctatatagtctaatgctgacaacttctattttaaaaaacaagactttactttcttctgccccctaagtgataggtttaaacacacagagacacacacacacgtttccaaagtgcagcagtgtctctttcagtctacaataagattcctagggcagctttatcaaattttgccaattcaaagttcaaggacattacaagttagtcctggctttgtcatatctacttagtccatccgacacctgaatcattccatgtaaaacagagctctaagatgatcctttaagcaagcagtcatagactggtcgggattaagtaaaagacggctagttggcctcctcattttatttggtcagcatcccttgactcaagagtacttgctttcaagttcttcataaatcttgagattgacgtagtatgaaacctaaaagtatacaggaaattggacaaatgtggatacagcaagtttacactgcttaaagtacattatgctttttaatggaactaaatgatcaaaaaaagaatggactgtaaccagttgctgtaacgtgatgtaaaaacgttactgtaaacagcatgaggatatgaagtccttccaccttctatcttaaaactactacttactgagctagcccaatatgcattacaatgagctaatgctccagatcccagtattcagatgtgtctataccttccactatgaacacagataaactgaggctcagataagtccaaatgaaatgaaatcaactcccaagccctaaagagaaccttctcacaagaattaaaaacaaaaagggcaaacctaggaagctaacggctactcctgtaccactctattcactggtacagtccagccagtaaaaaacacttccaaaaagatacacagaagaggaactaaatgactgcgaagctggaatactgctacaggaagtatgagagttctgaaacccttgatagaaactggaagcctgccatggaacacaatactttgggcaataatcagaaaaagcaaaaaaataaataaatgagtacatctccccttcccacatcactcaaggcataagcagattttactgttagaggaaaatatgtaatacttacatgaatgttgcatgtgtgcatgggagcaactgagtagcaatagtaaatttactttccaaaaaagccttattaaaatataaatattagaaaattactttggagacccaagtaaatatttctcatacatatgtagaaagaaatataggtaagcagcttacctcagtatttcagggcagcaagtgtttgtgaagcaaggatgagcagcatgaagatgtcagatcagcaaggagaaacttcaactcaatcccaggttttctcttcttcccttatcctgcatgtacaataactgctgcctggcaaactgcaaacaagcagcatcactcaagtttgaagtttcgccgcttttgtcaactatcctctgggcaaaggtattcagcaagaggtggaatggctagacactgaatcaagagatttcagtgttactctggtcaagttagtcgccctctctgggctcccttttttcctatgcataaaaaggggagaagcagagagtgggaagacagctctactaacccttcagctctagcagtccatgactttttaaggaaatgtaatacaagtcaaaccaggcaatacagaggagaagggaaaggcagagggtgtgattatggtgacaatagctgccttcccctatcgaacagttatcagtaaaagacatttcaatcttacaaagcaactgttagaaacttctgtctaacaccatcacaaataggttcatggtcagcctaaacatgtatactgtgcattttatgggtgactttgaaagatctgttcaattatttttcagaaactaaattttcaaaaaattaatatgtgtacaattaaaatgaatgaaagaaaaaccattattgtacagaggtattaatgagactatgaaacggcaatacttttttaaatcacagatttgtaatatatgttcactgtgcagagggattgtaccttgtacaaaataaaacaaatttctcaaactaattt

SEQ ID NO: 12370 - DNA, 292 bp, Homo sapiens
  source 1..292: mol_type = unassigned DNA
atttgtctcaaagtagcagccatgcccactgcttttccaattccagctaccacgcactggcatgtggggggcctgccaccagccaggccagcactctggacaggaacagccccaccaagctcagtaacaagtcccttgacagagacacagcaggctggaccccctacagctatgtgaacgtgttagactcccatttccagatcagtgccctggaggccaggtacccgcccgaggacttctacattgaacttagacacctcagccgccccgctgagccacactcaccaggtca

SEQ ID NO: 12371 - DNA, 120 bp, Homo sapiens
  source 1..120: mol_type = unassigned DNA
ctggaccccctacagctatgtgaacgtgttagatcagtgccctggaggccaggtacccgcccgaggacttctacattgaacttagacacctcagccgccccgctgagccacactcaccag

SEQ ID NO: 12372 - DNA, 330 bp, Homo sapiens
  source 1..330: mol_type = unassigned DNA
ccccatccaggctccagttgatagtgcctccccttggcacagatttgtctcaaagtagcagccatgcccactgcttttccaattccagctaccacgcactggcatgtggggggcctgccaccagccaggccagcactctggacaggaacagccccaccaagctcagtaacaagtcccttgacagagacacagcaggctggaccccctacagctatgtgaacgtgttagactcccatttccagatcagtgccctggaggccaggtacccgcccgaggacttctacattgaacttagacacctcagccgccccgctgagccacactcaccag

SEQ ID NO: 12373 - DNA, 608 bp, Homo sapiens
  source 1..608: mol_type = unassigned DNA
tagtcacatagggactcaggaatcgggccaaagccagaaccagatctcctaacattagaggggttacacgcatctgaacccaggcccaggagacctgaagcgcaagaaggccagccccaggctcaggccctccctctgcccgcagctgccctcatgatggaggagctgaatccctacaccaagatcagcccagcactgggtgcagagcggcactcggtgggtgctgtcacaggcatcatgctcctgttattcctcattgtggtgctgctgggcctatttgcctggcatcggcggcggcagaaagagaagggccgagacctggctccccgtgtctcctacacacctgccatgaggatgaccagcaccgactactccctctcagcatcaaccacaccatggtggcctgtcatggaacacctagctcgccctttctctcaacggcctaggacccagctcagtaacaagtcccttgacagagacacagcaggctggaccccctacagctatgtgaacgtgttagatcagtgccctggaggccaggtacccgcccgaggacttctacattgaacttagacacctcagccgccccgctgagccacactcaccag

SEQ ID NO: 12374 - DNA, 2347 bp, Homo sapiens
  source 1..2347: mol_type = unassigned DNA
ggagcagtgtgtgcccagccctgcccaccagggacatttggccagaactgcagccaggattgtccttgccaccatggagggcagtgtgaccacgtgactggacagtgccactgtacagctggatacatgggggacaggtgccaagaggagtgccccttcgggtccttcggcttccagtgctcacagcactgtgactgccacaatggggggcagtgttcacccaccacgggtgcctgcgagtgtgagcctggctacaagggcccacgctgccaggagcgactgtgcccggagggcctgcatggcccaggctgcaccctgccctgcccctgtgacgctgacaacaccatcagctgccacccagtaactggagcttgtacctgccagccaggctggtctggtcaccactgcaatgaatcctgccctgttggctactatggcgatggctgccagctgccttgcacctgtcagaatggcgccgactgccacagcatcactgggggctgcacttgtgctccgggcttcatgggagaggtctgtgccgtttcctgtgcagcagggacctatggccccaactgctcgtccatctgtagctgtaacaatggtggcacctgctccccagtagatggctcctgtacctgcaaggaagggtggcagggcctggactgcaccctgccatgtcccagtgggacgtggggcctgaactgcaacgagagctgcacctgtgccaatggggcagcctgcagccccatagacggctcctgctcctgcactcctggctggctgggagacacctgtgagctgccttgcccggatggcacatttgggctgaactgcagtgaacactgtgactgcagccatgctgatggatgtgaccccgtcacaggccactgctgctgcctggccggatggacaggcatccgctgtgacagcacgtgtccacctggccgctggggccccaactgctctgtctcctgcagctgtgagaatggaggctcctgctccccagaggatgggagctgcgagtgtgcccctggcttccgaggacccttatgccagagaatctgcccccctgggttctatggccacggctgcgcccagccatgccccctctgcgtgcacagcagcaggccctgccaccacatcagcggcatctgtgagtgcctcccaggattctctggagctctctgcaaccaagtgtgtgctggaggatactttgggcaggactgtgcccagctctgctcctgtgccaacaacgggacctgcagccctatcgatggctcctgccagtgctttcctggatggattggcaaggactgctcacaggcttgcccacccgggttctggggccccgcctgcttccacgcatgcagctgccacaacggggcgagctgcagcgccgaggacggggcctgccactgcacccctggctggactggactcttctgcacacagcgtaagccccacctcctggcctcccagccacttagaataccatgctgcggcctactggccactgtgggcattgtccagaccagcagggagggaggaatgcaggcagccccaggactggtggtacctgactcctgccccacgagaactgaggagctctgcaggggcagctccagacctgactggattcaggggattgacaagcccaaagtcctggaaggtcagggctgcaaggctgcccagcagcattttttgggaaggactgtgggcgcgtatgccagtgtcagaatggcgccagctgtgaccacatcagtggcaagtgcacctgccgcacaggcttcaccgggcaacactgtgagcagagatgtgccccaggaacctttggctatgggtgtcagcagctatgtgagtgcatgaacaactccacctgtgaccatgtcaccggcacctgttactgcagccctggcttcaaaggaatcaggtgtgaccaagctgccctcatgatggaggagctgaatccctacaccaagatcagcccagcactgggtgcagagcggcactcggtgggtgctgtcacaggcatcatgctcctgttattcctcattgtggtgctgctgggcctatttgcctggcatcggcggcggcagaaagagaagggccgagacctggctccccgtgtctcctacacacctgccatgaggatgaccagcaccgactactccctctcagctcagtaacaagtcccttgacagagacacagcaggctggaccccctacagctatgtgaacgtgttagactcccatttccagatcagtgccctggaggccaggtacccgcccgaggacttctacattgaacttagacacctcagccgccccgctgagccacactcaccag

SEQ ID NO: 12375 - DNA, 577 bp, Homo sapiens; identical to SEQ ID NO: 12363
  source 1..577: mol_type = unassigned DNA

SEQ ID NO: 12376 - DNA, 2644 bp, Homo sapiens
  source 1..2644: mol_type = unassigned DNA
gcccgctgcccgccgcccggctcccggctgctcgcggccccctgctcctgcctggcgctctggccaggctcgggctccggaggacaggaccgcgcgactggccggccgatccctgggccggccgcgggagcagctatgctgtgactgtccaggaatcgtatgcacaccccttcgatcagatctattacacacgatgcacagacatcctcaactggttcaagtgcaccaggcaccgccctgtgtacggaggagtgtgtgcacggccgctgcgtttccccggacacctgccactgcgagcctggctggggagggcccgactgctccagcggctgcgacagcgaccactgggggccccactgcagcaaccggtgccagtgccagaacggcgccctgtgtaaccccatcacaggcgcctgcgtgtgcgccgccggcttccgtggatggcgctgcgaggagctctgcgcacctggcacccacggcaagggatgccagctgccgtgccagtgccgacacggtgccagctgcgacccccgcgccggcgagtgcctctgcgcacctggctacaccggcgtctactgcgaggagctgtgccctcctgggagccatggagctcactgtgagctgcgctgcccctgtcagaatgggggcacctgccaccacatcactggcgagtgtgcctgccccccaggctggacgggagcagtgtgtgcccagccctgcccaccagggacatttggccagaactgcagccaggattgtccttgccaccatggagggcagtgtgaccacgtgactggacagtgccactgtacagctggatacatgggggacaggtgccaagaggagtgccccttcgggtccttcggcttccagtgctcacagcactgtgactgccacaatggggggcagtgttcacccaccacgggtgcctgcgagtgtgagcctggctacaagggcccacgctgccaggagcgactgtgcccggagggcctgcatggcccaggctgcaccctgccctgcccctgtgacgctgacaacaccatcagctgccacccagtaactggagcttgtacctgccagccaggctggtctggtcaccactgcaatgaatcctgccctgttggctactatggcgatggctgccagctgccttgcacctgtcagaatggcgccgactgccacagcatcactgggggctgcacttgtgctccgggcttcatgggagaggtctgtgccgtttcctgtgcagcagggacctatggccccaactgctcgtccatctgtagctgtaacaatggtggcacctgctccccagtagatggctcctgtacctgcaaggaagggtggcagggcctggactgcaccctgccatgtcccagtgggacgtggggcctgaactgcaacgagagctgcacctgtgccaatggggcagcctgcagccccatagacggctcctgctcctgcactcctggctggctgggagacacctgtgagctgccttgcccggatggcacatttgggctgaactgcagtgaacactgtgactgcagccatgctgatggatgtgaccccgtcacaggccactgctgctgcctggccggatggacaggcatccgctgtgacagcacgtgtccacctggccgctggggccccaactgctctgtctcctgcagctgtgagaatggaggctcctgctccccagaggatgggagctgcgagtgtgcccctggcttccgaggacccttatgccagagaatctgcccccctgggttctatggccacggctgcgcccagccatgccccctctgcgtgcacagcagcaggccctgccaccacatcagcggcatctgtgagtgcctcccaggattctctggagctctctgcaaccaagtgtgtgctggaggatactttgggcaggactgtgcccagctctgctcctgtgccaacaacgggacctgcagccctatcgatggctcctgccagtgctttcctggatggattggcaaggactgctcacaggcttgcccacccgggttctggggccccgcctgcttccacgcatgcagctgccacaacggggcgagctgcagcgccgaggacggggcctgccactgcacccctggctggactggactcttctgcacacagcgctgcccagcagcattttttgggaaggactgtgggcgcgtatgccagtgtcagaatggcgccagctgtgaccacatcagtggcaagtgcacctgccgcacaggcttcaccgggcaacactgtgagcagagatgtgccccaggaacctttggctatgggtgtcagcagctatgtgagtgcatgaacaactccacctgtgaccatgtcaccggcacctgttactgcagccctggcttcaaaggaatcaggtgtgaccaagctgccctcatgatggaggagctgaatccctacaccaagatcagcccagcactgggtgcagagcggcactcggtgggtgctgtcacaggcatcatgctcctgttattcctcattgtggtgctgctgggcctatttgcctggcatcggcggcggcagaaagagaagggccgagacctggctccccgtgtctcctacacacctgccatgaggatgaccagcaccgactactccctctcag

SEQ ID NO: 12377 - DNA, 2883 bp, Homo sapiens
  source 1..2883: mol_type = unassigned DNA
cgctcccggtgcccgctgcccgccgcccggctcccggctgctcgcggccccctgctcctgcctggcgctctggccaggctcgggctccggaggacaggaccgcgcgactggccggccgatccctgggccggccgcgggagcagcctcctttgttctcctgtgcagggcccgggatggtgctctccctgacggggctcattgccttctccttcctgcaagccacccttgccctgaaccccgaggaccccaacgtgtgcagccactgggagagctatgctgtgactgtccaggaatcgtatgcacaccccttcgatcagatctattacacacgatgcacagacatcctcaactggttcaagtgcaccaggcaccggatcagttataagacggcgtatcggagaggcctccggaccatgtaccggcggaggtcccagtgctgccctggctactatgagagcggagacttctgcatacccctgtgtacggaggagtgtgtgcacggccgctgcgtttccccggacacctgccactgcgagcctggctggggagggcccgactgctccagcggctgcgacagcgaccactgggggccccactgcagcaaccggtgccagtgccagaacggcgccctgtgtaaccccatcacaggcgcctgcgtgtgcgccgccggcttccgtggatggcgctgcgaggagctctgcgcacctggcacccacggcaagggatgccagctgccgtgccagtgccgacacggtgccagctgcgacccccgcgccggcgagtgcctctgcgcacctggctacaccggcgtctactgcgaggagctgtgccctcctgggagccatggagctcactgtgagctgcgctgcccctgtcagaatgggggcacctgccaccacatcactggcgagtgtgcctgccccccaggctggacgggagcagtgtgtgcccagccctgcccaccagggacatttggccagaactgcagccaggattgtccttgccaccatggagggcagtgtgaccacgtgactggacagtgccactgtacagctggatacatgggggacaggtgccaagaggagtgccccttcgggtccttcggcttccagtgctcacagcactgtgactgccacaatggggggcagtgttcacccaccacgggtgcctgcgagtgtgagcctggctacaagggcccacgctgccaggagcgactgtgcccggagggcctgcatggcccaggctgcaccctgccctgcccctgtgacgctgacaacaccatcagctgccacccagtaactggagcttgtacctgccagccaggctggtctggtcaccactgcaatgaatcctgccctgttggctactatggcgatggctgccagctgccttgcacctgtcagaatggcgccgactgccacagcatcactgggggctgcacttgtgctccgggcttcatgggagaggtctgtgccgtttcctgtgcagcagggacctatggccccaactgctcgtccatctgtagctgtaacaatggtggcacctgctccccagtagatggctcctgtacctgcaaggaagggtggcagggcctggactgcaccctgccatgtcccagtgggacgtggggcctgaactgcaacgagagctgcacctgtgccaatggggcagcctgcagccccatagacggctcctgctcctgcactcctggctggctgggagacacctgtgagctgccttgcccggatggcacatttgggctgaactgcagtgaacactgtgactgcagccatgctgatggatgtgaccccgtcacaggccactgctgctgcctggccggatggacaggcatccgctgtgacagcacgtgtccacctggccgctggggccccaactgctctgtctcctgcagctgtgagaatggaggctcctgctccccagaggatgggagctgcgagtgtgcccctggcttccgaggacccttatgccagagaatctgcccccctgggttctatggccacggctgcgcccagccatgccccctctgcgtgcacagcagcaggccctgccaccacatcagcggcatctgtgagtgcctcccaggattctctggagctctctgcaaccaagtgtgtgctggaggatactttgggcaggactgtgcccagctctgctcctgtgccaacaacgggacctgcagccctatcgatggctcctgccagtgctttcctggatggattggcaaggactgctcacaggcttgcccacccgggttctggggccccgcctgcttccacgcatgcagctgccacaacggggcgagctgcagcgccgaggacggggcctgccactgcacccctggctggactggactcttctgcacacagcgctgcccagcagcattttttgggaaggactgtgggcgcgtatgccagtgtcagaatggcgccagctgtgaccacatcagtggcaagtgcacctgccgcacaggcttcaccgggcaacactgtgagcagagatgtgccccaggaacctttggctatgggtgtcagcagctatgtgagtgcatgaacaactccacctgtgaccatgtcaccggcacctgttactgcagccctggcttcaaaggaatcaggtgtgaccaagctgccctcatgatggaggagctgaatccctacaccaagatcagcccagcactgggtgcagagcggcactcggtgggtgctgtcacaggcatcatgctcctgttattcctcattgtggtgctgctgggcctatttgcctggcatcggcggcggcagaaagagaagggccgagacctggctccccgtgtctcctacacacctgccatgaggatgaccagcaccgactactccctctcag

SEQ ID NO: 12378 - DNA, 454 bp, Homo sapiens; identical to SEQ ID NO: 12364
  source 1..454: mol_type = unassigned DNA

SEQ ID NO: 12379 - DNA, 864 bp, Homo sapiens; identical to SEQ ID NO: 12365
  source 1..864: mol_type = unassigned DNA

SEQ ID NO: 12380 - DNA, 333 bp, Homo sapiens; identical to SEQ ID NO: 12366
  source 1..333: mol_type = unassigned DNA

SEQ ID NO: 12381 - DNA, 760 bp, Homo sapiens; identical to SEQ ID NO: 12367
  source 1..760: mol_type = unassigned DNA

SEQ ID NO: 12382 - DNA, 472 bp, Homo sapiens; identical to SEQ ID NO: 12368
  source 1..472: mol_type = unassigned DNA

SEQ ID NO: 12383 - DNA, 4800 bp, Homo sapiens
  source 1..4800: mol_type = unassigned DNA
ggacaaaagccaggatggatgttcaaaaatggtatttgagaacttcaaagctggctctggccttggcaattatccgctcaaaaccagcagacaaaagcagcagagaatacacagagcaccttgctatgttgctgtctgaggagcagtcaaaatggagatcaaaagttgaaatcttggaagctgaagttatgcaattacgtcaaaaacttcttgtgagcaggctttgttcaggatcctttaagagtggatacgtttcctcccagttggaggctcaggaacctaagagttctgaaagtacattaacttcgatggaagattctggatgtgatttgtcgaatgagcagagaactgaatcctcagacctgtcccagcactttgtggaaagctgtacccccactcactttccaccactgcctcttgtgaaaagaccttgtgctatcctgcaaaatcctttgtcttctcacatgcaattcttgcaatatctacttgaattaaagaacttgacagaatcaggtaatcttaaaagagacttaacccactttgaaaaagactcttccacagtctctgattctgtttttcaattgctggatggcctgatcactttttaccgtaatcccaaacttcctttttcaagattttggacagaagctgttggtactttagctagtctgatcagtgactataacttatctagtcatattcttaaaaagtgttccaagaagttggaagaatttgagaaaaccctactacatgctattttaggaaacaatcatataaatcagtttcaggtgcagcattatgtctctcagagtctggttaccttgggaaattgcagcttgttgagaaaatctattatatctctgcttctatcagaagtaaatggctttgctgatgatctgggagccatcaatcaggagcaagccagttatgatgtgtcacgctatgaaaacattttctacctgttctgggttctggagcagcttcttcaaaaggaaaccgaagaaggcaacacttcaagtataggtcatgatgaccaagaaatcaagaaatttcttcagaagcatgatgaaactattttccaactttctgatgcatttcctttgtttactttttatttatggagagtgggcattcttttgagctcagcacagatagaaactcttagaaaataactccattccttagcaatttaccacgtttgaagcataataaagtagaatatatgaaaatctcatactgaaaagattttcaatagtattttaattagcattttagaattgatctctaaatataattatcaattcaacttaatggttagtcttaaattgtatgaaattttatgagtcatatttctatactaaaatcagccagtttcggttggtaatgccatccttattcccatgtaactgtatcttatttcactcaatatagtttagctctattattctgtaaaatggaccattaattgtctgtcccttaaaagatattgaagttgtaaaagatttccatataattgatgctaaatggtaatcaaagaaagagatttttaaagaagtttagttgcattatcaacacaaagtgttggaatataagaagtggtcataaatgcaatttttaaaactttttcttacatagttgaacttatatcattgctttcaccttagacgagaatcatatagaagtagaacttttttaacatttggaaacttaattgctttttatttatttcaatttcatatggctaatacatttgtcgagctcttttgaaaatactattaattagttgtttaaaatgttctttgtttttcaacaaatacttgtttcaattctgttaattaaatatgttataatagtcttgtaattgttaaatagtatacaattaagtcactagacatattttataaattctaatatccatctaaaagtgaaatttatagttatttggtggaatttttcagttatacaatttcattgacttcatttcaatgattaaaatcataaccgcaaacttaatgagcatatgttacatttcctatagtgccatttagggaacacaaaatataaatttcctttattaatgatatgtgatggtgtttcataagttaattagcattcctaaatgtcgttggcattaaaagtaatcttgataattccatctacaatgtatatacaattatgtcatctggcacaaacaattatctttggaattatttctagcatttttgaaaagataatgcctttttgataatcctgaaactacatgtatgtcagtcagcttttgttatgtgacagatagataatcaatcacaaaatatctatcagtggcatacaacaataatatttctcagatatatgcaggtcactcaaggatcagctgatttggactggacttgactttaatgaaaagctctgctgaggttgcacataccacaggaataggcttcttgctaaaagtcaggctttcttctcttccacatgtgcatattctgagaaccagacttgggggatagtagcttctcagtggaagctcctctcatggcagtggcaattgagcaagacgaaaggctaggctgagaaatgtcacattagcacttccatccacatgcattgtcaaagtacatcaaatggtcaagcccaaagaaaagtgactgacaggggagtagacttgagtgggagaacttgcagttacagggcaatgagcatggatgtaggtaggtaattattagggccaataatttacttcacaacaagtaccagttgaatacaagaagtatattccaaatcttggattaggagggatttttctaatgtctgattcctgtgaacacctgtgaaggcttatggaagtcacttcagttgatatagcattacacaaaatccactttccatgacaccttcatcttctttcattgtgattaaacaagattggtaaatacacaagtatcagcaatggccctttccctattgcagccagccaacgtaatgatcagctaagagacttttggagctacaacaaatttattaatttcagtggtctccaaggcttcaaggtctgaaaattagcctaggaaatatatttattataaaagaagatgcaagatgttgggatcactgtgaatgcacaaaatggagaaacattttatttccatttggtatccattttatataaacatttaacttccaccaagtatatgatactttaattatcctgggtttcagtctatatcagagtgaatggtgtagtaaattagtattaaggtccaaatctactggtcaaaaagaagataaaatgataaaatgagacatttttatctgtgtttcagtaaagcagtgaattaatgaatgatttaaactggtattacaatgtttaagaatgttataacagtttatatttaggtaatgtctaactttagaattaaggttttagggataagagtaatggagtcagtagtaattgggcagcattgaaactggatataagataggataggaaataaagagaaccatagaatgatcataaaaatgaagcaaataaaaagtgatgataattgctataactcttatactatttaatataagctataataaatatatgataatatattttatatgagagtaaatatatattaaatattttatatacatttatataataaaatatatgaataagtaatattatacatatatatacgatatgtataataaataccaaatagccaggtacttacctaagcattttacatatattaaactgtttgattctcccagcacctgtaatgagaaaggtacgattatttcctgaatctgtattttagagatgaagaactcagaacttgcccaagttcacaacaccaggaagtggcagttaggtttcatcctgaggcagtccatcttccaattccacactcctactttactgcactgcctgttatgtgcagctctcctggcacttcagtaaactttcacaaacacagcttctttgcaattgtcatcaaagctttatacatgcttaactatgaaccttaaggcacaacagtggaaattactagcttatgattagcttattttggattttttaattgctgtaaacaagttgtcctatctataagtaaaccagaggaacagcatctttgaccttttcagggttgtagcatcttgctactcaagactgtagccaagttacagattgtcttcaaacgataatgtcctaaaaggtacagagctccctccagaggtgtttaggtagactgtgaggctgtaatgataagcaaaatggggagagaaaacaaatctgactggtttgttcttggaaaaatatatacgattatctcacaggccttgtactttttaatggtatttgttgtcttttagccaaggtcagcatatttcaagagaggcagggaaacaaggcatttgcatttccaaaattttatgtacatttacagattttctgaacgccatattatggggaaaatattgacagctctgctttattgtaacctaatttcatttattcatcaaatatgaagcaccaattgtctacaaaccaattatttgcaaaaataaaacatactaagctttaacttttgtcagatttatgaaaccaagctttctcttagcagtcaatataatgacccaactacatcaatatttgctgaaggagataattaacttgttaatgtttatctaatattgaaaaaatatataggattttattattgttaaaagttaattgattccgaattatttatagaattgtataatacaaaatttatctggttaataaatatactggtcttg

SEQ ID NO: 12384 - DNA, 468 bp, Homo sapiens
  source 1..468: mol_type = unassigned DNA
ccctgctgatcgattatttgataattgattttccccgcagccaatgcgcggcggcctgggcgggggcgcctcctgattggccgagcactcctccacggctgcctaccgagatttggtacgacgatctaccccattacgggggcatggatggagtaggcatcccctccacgatgtatggggacccgcatgcagccaggtccatgcagccggtccaccacctgaaccacgggcctcctctgcactcgcatcagtacccgcacacagctcataccaacgccatggcccccagcatgggctcctctgtcaatgacgctttaaagagagataaagatgccatttatggacaccccctcttccctctcttagcactgatttttgagaaatgtgaattagctacttgtaccccccgcgagccgggggtggcgggcggggacgtctgctcgtcagagtcattcaatgaagatatag

SEQ ID NO: 12385 - DNA, 2773 bp, Homo sapiens
  source 1..2773: mol_type = unassigned DNA
cggaatccacctctccgcctgtgcaacacacactttacacacgcacggggactgcaagcgggcagcatcgatcgtggctcctttaagacaaactcagacagacattttttttaaccctccttctctaatctccttccagtgcagcacttgcaaagagggagagagagggagagaaagaaagagagagagagaagagagaaactgattaggaattaggactgattcaagggaagcgagcgctagggctttgtgcatttgaatattaacatttgaggtgttctgaccagaagaagacagagcggatgatcattcattcaccacgttgacaacctcgcctgtgattgacagctggagtggcagaaagccatgagatttggtagttgggtctgaggggcgctcttttttttccttttctttctttctttctttttttttttttaaactgatttttgggggagagaagatctgcttttttttgcccccgctgctgtcttggaaacggagcgcttttatgctcagtgactcgggcgctttgcttcaggtcccgtagaccgaagatctgggaccagtagctcacgttgctggagacgttaagggatttttcgtcgtgcttttttttttttttttttttttttccgggggagtttgaatatttgtttcttttcacactggccttaaagaggatatattagaagttgaagtaggaagggagccagagaggccgatggcgcaaaggtacgacgatctaccccattacgggggcatggatggagtaggcatcccctccacgatgtatggggacccgcatgcagccaggtccatgcagccggtccaccacctgaaccacgggcctcctctgcactcgcatcagtacccgcacacagctcataccaacgccatggcccccagcatgggctcctctgtcaatgacgctttaaagagagataaagatgccatttatggacaccccctcttccctctcttagcactgatttttgagaaatgtgaattagctacttgtaccccccgcgagccgggggtggcgggcggggacgtctgctcgtcagagtcattcaatgaagatatagccgtgttcgccaaacagattcgcgcagaaaaacctctattttcttctaatccagaactggataacttgatgattcaagccatacaagtattaaggtttcatctattggaattagagaaggtacacgaattatgtgacaatttctgccaccggtatattagctgtttgaaagggaaaatgcctatcgatttggtgatagacgatagagaaggaggatcaaaatcagacagtgaagatataacaagatcagcaaatctaactgaccagccctcttggaacagagatcatgatgacacggcatctactcgttcaggaggaaccccaggcccttccagcggtggccacacgtcacacagtggggacaacagcagtgagcaaggtgatggcttggacaacagtgtagcttcccccagcacaggtgacgatgatgaccctgataaggacaaaaagcgtcacaaaaagcgtggcatctttcccaaagtagccacaaatatcatgagggcgtggctgttccagcatctaacacacccttacccttctgaagaacagaaaaagcagttggcacaagacacgggactcaccatccttcaagtgaacaattggtttattaatgcccggagaagaatagtgcagcccatgatagaccagtccaaccgagcaggcaagtcccccatagtgactgtattcaagtcacgcaagcgaaaaccatcctcaagccattcaccgggaggtccgctacctggtaaataaactgggagtgagtataggaacgcctggcaattaaaattaaaccagtttcgtttcataacaacactaatcaatttaacatcattataaaacgtttggagaaggtggaaaaaaaaagccaacagagaaaagtaactcttaaataatatgctcagttacaatattctttgtacacattcaatatattaatgttattttttttctgagtttgccttcccagctctttctgctactatgaccactccctggtgcatggcttggtgtggaattgctgtaaactttattacctgtcaaaagggcaaaggggtcaggattgcttgtgggactcagtaaagttcaaagacattcaatgaggtagagcttttgtgtgctttaataacccaaggcagcttacttctgaagcagcttttcatgtacagttaaaacacgggattcaggtagtggtataaatacatggttcttatttctcagaccttctcttgttaatatccatcttctggtgttcgactttttttttttttaataacagtctttttgttttgtttttaaattatgagcttaaaatggcgatacttctatgggatcctggcttgtggatctaaaaatccaagaaacatctctctaggatttgtttttgcattataatatgccagtaagataacaagagtatttgctaggggtgatgtgagtctttactttctttatgaaatactctctcatctcttagggagcactatggaaaactatgttagcatcgcattgaggcaacacacatttactcctgtaactttttttcttccaacacccattatgtggtcaccagacaaaacccaagcagaaagtttccacaccttaactgttccctctttgagctagatgttttaaaaactcagtcacagaggtgtgtagatctagtctgagagaaatttcactttgaat

SEQ ID NO: 12386 - DNA, 1900 bp, Homo sapiens
  source 1..1900: mol_type = unassigned DNA
acacacgcacggggactgcaagcgggcagcatcgatcgtggctcctttaagacaaactcagacagacattttttttaaccctccttctctaatctccttccagtgcagcacttgcaaagagggagagagagggagagaaagaaagagagagagagaagagagaaactgattaggaattaggactgattcaagggaagcgagcgctagggctttgtgcatttgaatattaacatttgaggtgttctgaccagaagaagacagagcggatgatcattcattcaccacgttgacaacctcgcctgtgattgacagctggagtggcagaaagccatgagatttggtagttgggtctgaggggcgctcttttttttccttttctttctttctttctttttttttttttaaactgatttttgggggagagaagatctgcttttttttgcccccgctgctgtcttggaaacggagcgcttttatgctcagtgactcgggcgctttgcttcaggtcccgtagaccgaagatctgggaccagtagctcacgttgctggagacgttaagggatttttcgtcgtgcttttttttttttttttttttttttccgggggagtttgaatatttgtttcttttcacactggccttaaagaggatatattagaagttgaagtaggaagggagccagagaggccgatggcgcaaaggtacgacgatctaccccattacgggggcatggatggagtaggcatcccctccacgatgtatggggacccgcatgcagccaggtccatgcagccggtccaccacctgaaccacgggcctcctctgcactcgcatcagtacccgcacacagctcataccaacgccatggcccccagcatgggctcctctgtcaatgacgctttaaagagagataaagatgccatttatggattcgcgcagaaaaacctctattttcttctaatccagaactggataacttgatgattcaagccatacaagtattaaggtttcatctattggaattagagaaggtacacgaattatgtgacaatttctgccaccggtatattagctgtttgaaagggaaaatgcctatcgatttggtgatagacgatagagaaggaggatcaaaatcagacagtgaagatataacaagatcagcaaatctaactgaccaggtatgcgcttttcaatttcaacatccctgggaaaaaaaaaaatctgtatgcatattgcttgctgggtcactaccacctccttttattatttgcatatgattaagtcccttttagatacatttccatcgaaatgaaaatttttgaataatgtggctattattgcttcattaaggctggctctgggattcgacctgaagagatgagcttgtaaaagctttgctagcaaacttgacctgtttcttgtcgcttttaatttttgtctttattttatttaccctctataataatgggagtgttaactgccagtgaccgcctctgattgtaggggctttgttccggagcatttttcccccttctatcttcaagaaaagacaagtgtagggtctgcttatttcttattttattaggaataaatccaagataggtggtctaagaaagacagcgagagtttgaaatctagcaaatgctggctattttctccctgtctgtacggttcattagcctgtcttgtcagttttcctcggccgaacgcttctagacctcactgaacattgctttgtgtggtgttcactgcaagctcacccattttattgtacttaatagaaaaaataagaccaggccgaggttataaaaacagataaatatggacttttctcctccttctttccactcatcctccagctggtatgtgctctgggccctctgggttggcagcttgtggaca

SEQ ID NO: 12387 - DNA, 4291 bp, Homo sapiens
  source 1..4291: mol_type = unassigned DNA
atttgaggtgttctgaccagaagaagacagagcggatgatcattcattcaccacgttgacaacctcgcctgtgattgacagctggagtggcagaaagccatgagatttggtagttgggtctgaggggcgctcttttttttccttttctttctttctttctttttttttttttaaactgatttttgggggagagaagatctgcttttttttgcccccgctgctgtcttggaaacggagcgcttttatgctcagtgactcgggcgctttgcttcaggtcccgtagaccgaagatctgggaccagtagctcacgttgctggagacgttaagggatttttcgtcgtgcttttttttttttttttttttttttccgggggagtttgaatatttgtttcttttcacactggccttaaagaggatatattagaagttgaagtaggaagggagccagagaggccgatggcgcaaaggtacgacgatctaccccattacgggggcatggatggagtaggcatcccctccacgatgtatggggacccgcatgcagccaggtccatgcagccggtccaccacctgaaccacgggcctcctctgcactcgcatcagtacccgcacacagctcataccaacgccatggcccccagcatgggctcctctgtcaatgacgctttaaagagagataaagatgccatttatggacaccccctcttccctctcttagcactgatttttgagaaatgtgaattagctacttgtaccccccgcgagccgggggtggcgggcggggacgtctgctcgtcagagtcattcaatgaagatatagccgtgttcgccaaacagattcgcgcagaaaaacctctattttcttctaatccagaactggataacttgatgattcaagccatacaagtattaaggtttcatctattggaattagagaaggtacacgaattatgtgacaatttctgccaccggtatattagctgtttgaaagggaaaatgcctatcgatttggtgatagacgatagagaaggaggatcaaaatcagacagtgaagatataacaagatcagcaaatctaactgaccagccctcttggaacagagatcatgatgacacggcatctactcgttcaggaggaaccccaggcccttccagcggtggccacacgtcacacagtggggacaacagcagtgagcaaggtgatggcttggacaacagtgtagcttcccccagcacaggtgacgatgatgaccctgataaggacaaaaagcgtcacaaaaagcgtggcatctttcccaaagtagccacaaatatcatgagggcgtggctgttccagcatctaacacacccttacccttctgaagaacagaaaaagcagttggcacaagacacgggactcaccatccttcaagtgaacaattggtttattaatgcccggagaagaatagtgcagcccatgatagaccagtccaaccgagcagtaagtcaaggaacaccttataatcctgatggacagcccatgggaggtttcgtaatggacggtcagcaacatatgggaattagagcaccaggacctatgagtggaatgggcatgaatatgggcatggaggggcagtggcactacatgtaaccttcatctagttaaccaatcgcaaagcaagggggaaggctgcaaagtatgccaggggagtatgtagcccggggtggtccaatgggtgtgagtatgggacagccaagttatacccaaccccagatgcccccccatcctgctcagctgcgtcatgggccccccatgcatacgtacattcctggacaccctcaccacccaacagtgatgatgcatggaggaccgccccaccctggaatgccaatgtcagcatcaagccccacagttcttaatacaggagacccaacaatgagtggacaagtcatggacattcatgctcagtagcttaagggaatatgcattgtctgcaatggtgactgatttcaaatcatgttttttctgcaatgactgtggagttccattcttggcatctactctggaccaaggagcatccctaattcttcatagggacctttaaaaagcaggaaataccaactgaagtcaatttgggggacatgctaaataactatataagacattaagagaacaaagagtgaaatattgtaaatgctattatactgttatccatattacgttgtttcttatagattttttaaaaaaaatgtgaaatttttccacactatgtgtgttgtttccatagctcttcacttcctccagaagcctccttacattaaaaagccttacagttatcctgcaagggacaggaaggtctgatttgcaggatttttagagcattaaaataactatcaggcagaagaatctttcttctcgcctaggatttcagccatgcgcgcgctctctctctttctctctcttttcctctctctccctctttctagcctggggcttgaatttgcatgtctaattcatttactcaccatatttgaattggcctgaacagatgtaaatcgggaaggatgggaaaaactgcagtcatcaacaatgattaatcagctgttgcaggcagtgtcttaaggagactggtaggaggaggcatggaaaccaaaaggccgtgtgtttagaagcctaattgtcacatcaagcatcattgtccccatgcaacaaccaccaccttatacatcacttcctgttttaagcagctctaaaacatagactgaagatttatttttaatatgttgactttatttctgagcaaagcatcggtcatgtgtgtattttttcatagtcccaccttggagcatttatgtagacattgtaaataaattttgtgcaaaaaggactggaaaaatgaactgtattattgcaatttttttttgtaaaagtagcagtttggtatgagttggcatgcatacaagatttactaagtgggataagctaattatactttttgttgtggataaacaaatgcttgttgatagcctttttctatcaagaaaccaaggagctaattattaataacaatcattgcacactgagtcttagcgtttctgatggaaacagtttggattgtataataacgccaagcccagttgtagtcgtttgagtgcagtaatgaaatctgaatctaaaataaaaacaagattatttttgtcatgctgactccactgcttgaaaaatttgtttactgccccccagatttttaaagattaatacagtaaatataaaaattaattttggctccctaagccatatatgtatttgacaattttaaccgcaaagtaagttgtttaataataaccactgatttctttaagctgacttaatgaactcctaatatcagcaaatttgaggcctaaaggcactaaactaactctagactcagaattacatccaacagaattactcatctaatatcagtgaaattattcttgcacataaaggcaaacctaagtacaaagttaagtcttttactaaaggatgttacctaggatgagcagtatatgtttattaggaaattaactacatgaattgaagagaccagacttcaaaatctaatttttataaatatgctctatgttctcattggataaaactggttattaaccaattttccagaacagctgtacaagatttctgcatggcagccggctaaatggtagaaaataatatgtttaagctggaatagcttataattttatttaaataaaattgctgctataaaaagtgcttcccaaagctaaggaaaatatacaaatattttaattaaggcaaattcgttttaaaaaataagcctttcagtagtgattgctttgtaaacaaaggatgggtcggaggagagagagccttaaactcaagtctgacattcaggcccaagtcaccctataaaccggcccttagcaattctattttctattcgaaaagagaaaccagctgtgggttggctttactaggtgatgtgtgattgactgactcacctgctggagtagcaatgcattctcaccttttgctgatggggccttgtttctaaacacgtggatgcgcagagagcaaggctcagcctactgcagccatctctggcagcgcttctacccctccccagcccatagatgggattgtttaaatctcccttgttgacctagtggcaattcttcctctacctaaatagtcgatgtgagtgaaatcattctcttttgataggtggttgctagcagttaacaaccatttatttactttaacaattaataataaactttataaactgtc

SEQ ID NO: 12388 - DNA, 5111 bp, Homo sapiens
  source 1..5111: mol_type = unassigned DNA
ctttttttttttttaaactgatttttgggggagagaagatctgcttttttttgcccccgctgctgtcttggaaacggagcgcttttatgctcagtgactcgggcgctttgcttcaggtcccgtagaccgaagatctgggaccagtagctcacgttgctggagacgttaagggatttttcgtcgtgcttttttttttttttttttttttttccgggggagtttgaatatttgtttcttttcacactggccttaaagaggatatattagaagttgaagtaggaagggagccagagaggccgatggcgcaaaggtacgacgatctaccccattacgggggcatggatggagtaggcatcccctccacgatgtatggggacccgcatgcagccaggtccatgcagccggtccaccacctgaaccacgggcctcctctgcactcgcatcagtacccgcacacagctcataccaacgccatggcccccagcatgggctcctctgtcaatgacgctttaaagagagataaagatgccatttatggacaccccctcttccctctcttagcactgatttttgagaaatgtgaattagctacttgtaccccccgcgagccgggggtggcgggcggggacgtctgctcgtcagagtcattcaatgaagatatagccgtgttcgccaaacagattcgcgcagaaaaacctctattttcttctaatccagaactggataacttgatgattcaagccatacaagtattaaggtttcatctattggaattagagaaggtacacgaattatgtgacaatttctgccaccggtatattagctgtttgaaagggaaaatgcctatcgatttggtgatagacgatagagaaggaggatcaaaatcagacagtgaagatataacaagatcagcaaatctaactgaccagccctcttggaacagagatcatgatgacacggcatctactcgttcaggaggaaccccaggcccttccagcggtggccacacgtcacacagtggggacaacagcagtgagcaaggtgatggcttggacaacagtgtagcttcccccagcacaggtgacgatgatgaccctgataaggacaaaaagcgtcacaaaaagcgtggcatctttcccaaagtagccacaaatatcatgagggcgtggctgttccagcatctaacacacccttacccttctgaagaacagaaaaagcagttggcacaagacacgggactcaccatccttcaagtgaacaattggtttattaatgcccggagaagaatagtgcagcccatgatagaccagtccaaccgagcagtaagtcaaggaacaccttataatcctgatggacagcccatgggaggtttcgtaatggacggtcagcaacatatgggaattagagcaccaggtaagactttgtttttgtggtagttcctcatttttgactccaagagtgtcatcccctcatcaacacaggtaaatccgcctcatccttttctgttatctcaagctggctgccttgccttgtctgctatctgtgcatctaagatattgcagaggggaagccaggatctttatgcactgaagatctcactatttctcaaccctctagatcctgttttttttttaagggtcttttggcactatctgttgactttgctcattttctggcctcttcttggatttttatctcccttctaggacctatgagtggaatgggcatgaatatgggcatggaggggcagtggcactacatgtaaccttcatctagttaaccaatcgcaaagcaagggggaagtaagtacaaatggggtctttgttttcactttgtcctaggaatatttttcctcttgcattttcttatgttctccttgcccatagcttcatgcttgttcattcctttccattaaactcctggtttcttgcttccatcattttctttttggttgtgatcaagcttttaagcttataaatactgtgtatgatgtacatttatcctgtgtgttgctattgtacagtactgaccacatgacaaaacaagaagcagtcaggaggtgggggagtgggttgtcatagcaacagactgatttgcaaaatgtaagcagtctgcagcagtgcaaggagagggaagagcatgtccccaaagtgtcataaatctgtctaaccgcagttgatgcatgagttacatttctacactaacctgcaagacaccgaaaagctaaacagagacttcttttaggtaaaataaacacaagctttacttagggtaagtaaaggcatattttgagctccagtcaactaaactttgattttttttcttagtttattcctttgtctgtccatcataatgggattacgtgtggcaatgggaaaagggagaatacaaaatagaggtgtgcacagcaggctgcggggcttagcccaggctaattgactatatccaaattaagtatgccatcacttgcagtgtgacaaatggatttgacttattcagtatacaaaaatagagatcattaatgcaatcatcagtggcaggcctagtgaagtgggcctaggaaaactgtcccagattctcactcttgcattttctctcctataaagacactccagcaattcgagttcaaacaagtaaaactgttttgaacaccaaggctcttgttcacttcctaaattacccctaatagcactgttcttgctttgtttttgaaattaaaagcagttatttcagagtcttgcttgtgtctctgattatatttatgcactatttaaaatcactgctgaggccaggggtaattcgtactggtcatcttctctgggtgtgagtcaaatataagtttaacaattagctctgaaaacattccattgagctggggaatgcaacagtcttattacctcatcatggaattctctagcttagttaatttaaatattgtttcttagtttctgggtcaattaaatttaaatgatgtattttatgcttcgtgaccaattaaattactaggttattacaaaaaaaattatcatcttttttgattaaagagctgtgggtacagtatattttataagcaattttcattagttcaaaaatgttcctttaggctagattaagcagccattcattgttagagcctggagaccttattcgaaggtgttcatcgtattcacagtgcactattacttagaactaaagccaattgaacctacttagcaatagcgttatgcctttcacccttgatgattatggagcttatagctctcagaaacaatacacctgtcagtttccatcaactatagcaatccatgcagaagacaagaggccccctcaaagcaggaggggtattgttttaggtccaatttttcttattgttctcaaaatcattataaggtggacagtgttttgtgaagattttcttttccccagctctaagaaaccatgtggaaagaattcattgataactgttttgatttttttctttttttaagtacaggttttgctaagtaatcacccttagtgagcctgtgtagttcagctgcctgtgagatgtttggtgaccagctcagtgtattcttgtattcttgatagagaatatttcaggagacaaaagtgcttcttcagaccagacctcaaataacaattttattctttttaataaataagacctcagtaggcggacctgataacagtgacaatgaaaggaaaatagtggcaaaatgtgagtttccagcatgatgtttctcattttattttcttctgtatgaatcaaaagaatgctttacaaaaccatgttcccttaatcacagggttctctggcttttataggattgtcatagccaggaccacactattgctttttcataacattttctttttgtttctttcttttgaatttcttacagggctgcaaagtatgccaggggagtatgtagcccggggtggtccaatgggtgtgagtatgggacagccaagttatacccaaccccagatgcccccccatcctgctcagctgcgtcatgggccccccatgcatacgtacattcctggacaccctcaccacccaacagtgatgatgcatggaggaccgccccaccctggaatgccaatgtcagcatcaagccccacagttcttaatacaggagacccaacaatgagtggacaagtcatggacattcatgctcagtagcttaagggaatatgcattgtctgcaatggtgactgatttcaaatcatgttttttctgcaatgactgtggagttccattcttggcatctactctggaccaaggagcatccctaattcttcatagggacctttaaaaagcaggaaataccaactgaagtcaatttgggggacatgctaaataactatataagacattaagagaacaaagagtgaaatattgtaaatgctattatactgttatccatattacgttgtttcttatagattttttaaaaaaaatgtgaaatttttccacactatgtgtgttgtttccatagctcttcacttcctccagaagcctccttacattaaaaagccttacagttatcctgcaagggacaggaaggtctgatttgcaggatttttagagcattaaaataactatcaggcagaagaatctttcttctcgcctaggatttcagccatgcgcgcgctctctctctttctctctcttttcctctctctccctctttctagcctggggcttgaatttgcatgtctaattcatttactcaccatatttgaattggcctgaacagatgtaaatcgggaaggatgggaaaaactgcagtcatcaacaatgattaatcagctgttgcaggcagtgtcttaaggagactggtaggaggaggcatggaaaccaaaaggccgtgtgtttagaagcctaattgtcacatcaagcatcattgtccccatgcaacaaccaccaccttatacatcacttcctgttttaagcagctctaaaacatagactgaagatttatttttaatatgttgactttatttctgagcaaagcatcggtcatgtgtgtattttttcatagtcccaccttggagcatttatgtagacattgtaaataaattttgtgcaaaaaggactggaaaaa

SEQ ID NO: 12389 - DNA, 474 bp, Homo sapiens
  source 1..474: mol_type = unassigned DNA
tttgcttttgaatttgctttaaacctgtacgacgatctaccccattacgggggcatggatggagtaggcatcccctccacgatgtatggggacccgcatgcagccaggtccatgcagccggtccaccacctgaaccacgggcctcctctgcactcgcatcagtacccgcacacagctcataccaacgccatggcccccagcatgggctcctctgtcaatgacgctttaaagagagataaagatgccatttatggacaccccctcttccctctcttagcactgatttttgagaaatgtgaattagctacttgtaccccccgcgagccgggggtggcgggcggggacgtctgctcgtcagagtcattcaatgaagatatagccgtgttcgccaaacagattcgcgcagaaaaacctctattttcttctaatccagaactggataacttgatgattcaagccatacaagtattaagg

SEQ ID NO: 12390 - DNA, 3530 bp, Homo sapiens
  source 1..3530: mol_type = unassigned DNA
gagacatgcccgtttcaccttctaccctcgggagaatgcttctctttctctctttctttcttctttccttcttgccaaaggagcctgaatttctaaactagttgatagggacacaagttagggcaagatcattcatcccagacgagtctcgctgagaattctgtattttttacttaaagctttaattttaaaataagaaaaactcagctttatagatgcaaggccaccgaattccgggtggaaggacccagctgtattgaccttatataagctcggtgccttgccgttctcccatttgcccgcctggcctcctgaaccttctttctctcctgtttgtcatgcagtacgacgatctaccccattacgggggcatggatggagtaggcatcccctccacgatgtatggggacccgcatgcagccaggtccatgcagccggtccaccacctgaaccacgggcctcctctgcactcgcatcagtacccgcacacagctcataccaacgccatggcccccagcatgggctcctctgtcaatgacgctttaaagagagataaagatgccatttatggacaccccctcttccctctcttagcactgatttttgagaaatgtgaattagctacttgtaccccccgcgagccgggggtggcgggcggggacgtctgctcgtcagagtcattcaatgaagatatagccgtgttcgccaaacagattcgcgcagaaaaacctctattttcttctaatccagaactggataacttgatgattcaagccatacaagtattaaggtttcatctattggaattagagaaggtacacgaattatgtgacaatttctgccaccggtatattagctgtttgaaagggaaaatgcctatcgatttggtgatagacgatagagaaggaggatcaaaatcagacagtgaagatataacaagatcagcaaatctaactgaccagccctcttggaacagagatcatgatgacacggcatctactcgttcaggaggaaccccaggcccttccagcggtggccacacgtcacacagtggggacaacagcagtgagcaaggtgatggcttggacaacagtgtagcttcccccagcacaggtgacgatgatgaccctgataaggacaaaaagcgtcacaaaaagcgtggcatctttcccaaagtagccacaaatatcatgagggcgtggctgttccagcatctaacacacccttacccttctgaagaacagaaaaagcagttggcacaagacacgggactcaccatccttcaagtgaacaattggtttattaatgcccggagaagaatagtgcagcccatgatagaccagtccaaccgagcagtaagtcaaggaacaccttataatcctgatggacagcccatgggaggtttcgtaatggacggtcagcaacatatgggaattagagcaccagggctgcaaagtatgccaggggagtatgtagcccggggtggtccaatgggtgtgagtatgggacagccaagttatacccaaccccagatgcccccccatcctgctcagctgcgtcatgggccccccatgcatacgtacattcctggacaccctcaccacccaacagtgatgatgcatggaggaccgccccaccctggaatgccaatgtcagcatcaagccccacagttcttaatacaggagacccaacaatgagtggacaagtcatggacattcatgctcagtagcttaagggaatatgcattgtctgcaatggtgactgatttcaaatcatgttttttctgcaatgactgtggagttccattcttggcatctactctggaccaaggagcatccctaattcttcatagggacctttaaaaagcaggaaataccaactgaagtcaatttgggggacatgctaaataactatataagacattaagagaacaaagagtgaaatattgtaaatgctattatactgttatccatattacgttgtttcttatagattttttaaaaaaaatgtgaaatttttccacactatgtgtgttgtttccatagctcttcacttcctccagaagcctccttacattaaaaagccttacagttatcctgcaagggacaggaaggtctgatttgcaggatttttagagcattaaaataactatcaggcagaagaatctttcttctcgcctaggatttcagccatgcgcgcgctctctctctttctctctcttttcctctctctccctctttctagcctggggcttgaatttgcatgtctaattcatttactcaccatatttgaattggcctgaacagatgtaaatcgggaaggatgggaaaaactgcagtcatcaacaatgattaatcagctgttgcaggcagtgtcttaaggagactggtaggaggaggcatggaaaccaaaaggccgtgtgtttagaagcctaattgtcacatcaagcatcattgtccccatgcaacaaccaccaccttatacatcacttcctgttttaagcagctctaaaacatagactgaagatttatttttaatatgttgactttatttctgagcaaagcatcggtcatgtgtgtattttttcatagtcccaccttggagcatttatgtagacattgtaaataaattttgtgcaaaaaggactggaaaaatgaactgtattattgcaatttttttttgtaaaagtagcagtttggtatgagttggcatgcatacaagatttactaagtgggataagctaattatactttttgttgtggataaacaaatgcttgttgatagcctttttctatcaagaaaccaaggagctaattattaataacaatcattgcacactgagtcttagcgtttctgatggaaacagtttggattgtataataacgccaagcccagttgtagtcgtttgagtgcagtaatgaaatctgaatctaaaataaaaacaagattatttttgtcatgctgactccactgcttgaaaaatttgtttactgccccccagatttttaaagattaatacagtaaatataaaaattaattttggctccctaagccatatatgtatttgacaattttaaccgcaaagtaagttgtttaataataaccactgatttctttaagctgacttaatgaactcctaatatcagcaaatttgaggcctaaaggcactaaactaactctagactcagaattacatccaacagaattactcatctaatatcagtgaaattattcttgcacataaaggcaaacctaagtacaaagttaagtcttttactaaaggatgttacctaggatgagcagtatatgtttattaggaaattaactacatgaattgaagagaccagacttcaaaatctaatttttataaatatgctctatgttctcattggataaaactggttattaaccaattttccagaacagctgtacaagatttctgcatggcagccggctaaatggtagaaaataatatgtttaagctggaatagcttataattttatttaaataaaattgctgctataaaaa

SEQ ID NO: 12391 - DNA, 2836 bp, Homo sapiens
  source 1..2836: mol_type = unassigned DNA
gttgacagtcggccccacggccatggacgtcctttccccaagttagctgagcgcctgccaccgagatcccccgagcctgggcttcgcgcggccgcctaggaggaacccgcaggaaccagccctccccaactctccgcccggcgcctttctcctccaccggatcctggatgtgcagtggaggggacgagggcttgtcgggtgggaaacttaattcaaaatggctgctggaaacgcttgggttttattcgtagcaaatgttgccaatttctccggccagatacgctaaaccgatcctcagataccgtccatggctcagggcctccgacttcagggctccaggaggaaggggagacaccccctcttccctctcttagcactgatttttgagaaatgtgaattagctacttgtaccccccgcgagccgggggtggcgggcggggacgtctgctcgtcagagtcattcaatgaagatatagccgtgttcgccaaacagattcgcgcagaaaaacctctattttcttctaatccagaactggataacttgatgattcaagccatacaagtattaaggtttcatctattggaattagagaaggtacacgaattatgtgacaatttctgccaccggtatattagctgtttgaaagggaaaatgcctatcgatttggtgatagacgatagagaaggaggatcaaaatcagacagtgaagatataacaagatcagcaaatctaactgaccagccctcttggaacagagatcatgatgacacggcatctactcgttcaggaggaaccccaggcccttccagcggtggccacacgtcacacagtggggacaacagcagtgagcaaggtgatggcttggacaacagtgtagcttcccccagcacaggtgacgatgatgaccctgataaggacaaaaagcgtcacaaaaagcgtggcatctttcccaaagtagccacaaatatcatgagggcgtggctgttccagcatctaacacacccttacccttctgaagaacagaaaaagcagttggcacaagacacgggactcaccatccttcaagtgaacaattggtttattaatgcccggagaagaatagtgcagcccatgatagaccagtccaaccgagcagtaagtcaaggaacaccttataatcctgatggacagcccatgggaggtttcgtaatggacggtcagcaacatatgggaattagagcaccaggacctatgagtggaatgggcatgaatatgggcatggaggggcagtggcactacatgtaaccttcatctagttaaccaatcgcaaagcaagggggaaggctgcaaagtatgccaggggagtatgtagcccggggtggtccaatgggtgtgagtatgggacagccaagttatacccaaccccagatgcccccccatcctgctcagctgcgtcatgggccccccatgcatacgtacattcctggacaccctcaccacccaacagtgatgatgcatggaggaccgccccaccctggaatgccaatgtcagcatcaagccccacagttcttaatacaggagacccaacaatgagtggacaagtcatggacattcatgctcagtagcttaagggaatatgcattgtctgcaatggtgactgatttcaaatcatgttttttctgcaatgactgtggagttccattcttggcatctactctggaccaaggagcatccctaattcttcatagggacctttaaaaagcaggaaataccaactgaagtcaatttgggggacatgctaaataactatataagacattaagagaacaaagagtgaaatattgtaaatgctattatactgttatccatattacgttgtttcttatagattttttaaaaaaaatgtgaaatttttccacactatgtgtgttgtttccatagctcttcacttcctccagaagcctccttacattaaaaagccttacagttatcctgcaagggacaggaaggtctgatttgcaggatttttagagcattaaaataactatcaggcagaagaatctttcttctcgcctaggatttcagccatgcgcgcgctctctctctttctctctcttttcctctctctccctctttctagcctggggcttgaatttgcatgtctaattcatttactcaccatatttgaattggcctgaacagatgtaaatcgggaaggatgggaaaaactgcagtcatcaacaatgattaatcagctgttgcaggcagtgtcttaaggagactggtaggaggaggcatggaaaccaaaaggccgtgtgtttagaagcctaattgtcacatcaagcatcattgtccccatgcaacaaccaccaccttatacatcacttcctgttttaagcagctctaaaacatagactgaagatttatttttaatatgttgactttatttctgagcaaagcatcggtcatgtgtgtattttttcatagtcccaccttggagcatttatgtagacattgtaaataaattttgtgcaaaaaggactggaaaaatgaactgtattattgcaatttttttttgtaaaagtagcagtttggtatgagttggcatgcatacaagatttactaagtgggataagctaattatactttttgttgtggataaacaaatgcttgttgatagcctttttctatcaagaaaccaaggagctaattattaataacaatcattgcacactgagtcttagcgtttctgatggaaacagtttggattgtataataacgccaagcccagttgtagtcgtttgagtgcagtaatgaaatctgaatctaaaataaaaacaagattatttttgtca

SEQ ID NO: 12392 - DNA, 551 bp, Homo sapiens
  source 1..551: mol_type = unassigned DNA
cactttcaaaagtagccagcacgtagtcggccttaagccatgcatgttacctccaacctcagattttctctctgtctgagtgtctgtttgcagataacttaaaatcacccatctgcatccccactcaccctccagaaagcaaacgtggagagctcactctgcagaataaaatcaagaacaccacggttgtagctgctgtggactcggcggtctgagcagcctccccgagagccgtagttgctagtagaagtacacgaattatgtgacaatttctgccaccggtatattagctgtttgaaagggaaaatgcctatcgatttggtgatagacgatagagaaggaggatcaaaatcagacagtgaagatataacaagatcagcaaatctaactgaccagccctcttggaacagagatcatgatgacacggcatctactcgttcaggaggaaccccaggcccttccagcggtggccacacgtcacacagtggggacaacagcagtgagcaaggtgatggcttggacaacagtgtagcttcccccagcacaggtga

SEQ ID NO: 12393 - DNA, 363 bp, Homo sapiens
  source 1..363: mol_type = unassigned DNA
agctttgctttgagagccctgagatttctagaccggtcttcccgtgcctgcagatgattcaagccatacaagtattaaggtttcatctattggaattagagaaggtacacgaattatgtgacaatttctgccaccggtatattagctgtttgaaagggaaaatgcctatcgatttggtgatagacgatagagaaggaggatcaaaatcagacagtgaagatataacaagatcagcaaatctaactgaccagccctcttggaacagagatcatgatgacacggcatctactcgttcaggaggaaccccaggcccttccagcggtggccacacgtcacacagtggggacaacagcagtgagcaag

SEQ ID NO: 12394 - DNA, 526 bp, Homo sapiens
  source 1..526: mol_type = unassigned DNA
agaccggtcttcccgtgcctgcaggttggctgcaaatgtttctgtacacggacaactggtccgggacaagatcccggggaaataaattcatctcgagaggggccgggcgagccagcgcggggaaacgcgagcttttgttttttatgacagccgggctgcgcagctctaatcagcgcggggatttatctcccggcctgtcagcatgtgtgcttaaactttgcggacttcctagccctctaagtcccatcacgagggcagccaccggacaagagcccccaaacaaccagtttgcctgaaaggtatgattcaagccatacaagtattaaggtttcatctattggaattagagaaggtacacgaattatgtgacaatttctgccaccggtatattagctgtttgaaagggaaaatgcctatcgatttggtgatagacgatagagaaggaggatcaaaatcagacagtgaagatataacaagatcagcaaatctaactgaccagaacaaggagcactgatactaagttacg

SEQ ID NO: 12395 - DNA, 532 bp, Homo sapiens
  source 1..532: mol_type = unassigned DNA
aggacaattgccctgtgtttcccctatttggaagtttggatctcacaaggggggtggattgcacttgtcaatgtcatttatgcactcctgattatattcccatttttttatttctgtcataatgtaggtacacgaattatgtgacaatttctgccaccggtatattagctgtttgaaagggaaaatgcctatcgatttggtgatagacgatagagaaggaggatcaaaatcagacagtgaagatataacaagatcagcaaatctaactgaccagccctcttggaacagagatcatgatgacacggcatctactcgttcaggaggaaccccaggcccttccagcggtggccacacgtcacacagtggggacaacagcagtgagcaaggtgatggcttggacaacagtgtagcttcccccagcacaggtgacgatgatgaccctgataaggacaaaaagcgtcacaaaaagcgtggcatctttcccaaagtagccacaaatatcatgagggcgtggctgttccagcatctaaca

SEQ ID NO: 12396 - DNA, 564 bp, Homo sapiens
  source 1..564: mol_type = unassigned DNA
atcgatttggtgatagacgatagagaaggaggatcaaaatcagacagtgaagatataacaagatcagcaaatctaactgaccagccctcttggaacagagatcatgatgacacggcatctactcgttcaggaggaaccccaggcccttccagcggtggccacacgtcacacagtggggacaacagcagtgagcaaggtgatggcttggacaacagtgtagcttcccccagcacaggtgacgatgatgaccctgataaggacaaaaagcgtcacaaaaagcgtggcatctttcccaaagtagccacaaatatcatgagggcgtggctgttccagcatctaacacacccttacccttctgaagaacagaaaaagcagttggcacaagacacgggactcaccatccttcaagtgaacaattgtattacagagagccatacaagggaggaaaagggcaaaggtttattaatgcccggagaagaatagtgcagcccatgatagaccagtccaaccgagcagtaagtcaaggaacaccttataatcctgatggacagcccatgggaggtt

SEQ ID NO: 12397 - DNA, 573 bp, Homo sapiens
  source 1..573: mol_type = unassigned DNA
tttggctgagctcgtggcgctgttggcctatgcgcctgggctcgcttgtgtgaccccctggggctcacccaagtttcagctggtcggaggacagcaaacccaagaacaaggagcactgatactaagttacggatgtaaaataaaacactgggaagcaaacagtcttataaagaggattttataacatcagccctcttggaacagagatcatgatgacacggcatctactcgttcaggaggaaccccaggcccttccagcggtggccacacgtcacacagtggggacaacagcagtgagcaaggtgatggcttggacaacagtgtagcttcccccagcacaggtgacgatgatgaccctgataaggacaaaaagcgtcacaaaaagcgtggcatctttcccaaagtagccacaaatatcatgagggcgtggctgttccagcatctaacacacccttacccttctgaagaacagaaaaagcagttggcacaagacacgggactcaccatccttcaagtgaacaattggtttattaatgcccggagaagaatagtgcagcccatgatagaccagtc

SEQ ID NO: 12398 - DNA, 1733 bp, Homo sapiens
  source 1..1733: mol_type = unassigned DNA
acagatcatagcggaatcagaatttccagcaaggaaaatcttttcatggtgaattaagtggtggatgaagaaaaatggtgatgaaaaaagccctcttggaacagagatcatgatgacacggcatctactcgttcaggaggaaccccaggcccttccagcggtggccacacgtcacacagtggggacaacagcagtgagcaagcacccttacccttctgaagaacagaaaaagcagttggcacaagacacgggactcaccatccttcaagtgaacaattggtttattaatgcccggagaagaatagtgcagcccatgatagaccagtccaaccgagcagtaagtcaaggaacaccttataatcctgatggacagcccatgggaggtttcgtaatggacggtcagcaacatatgggaattagagcaccaggacctatgagtggaatgggcatgaatatgggcatggaggggcagtggcactacatgtaaccttcatctagttaaccaatcgcaaagcaagggggaaggctgcaaagtatgccaggggagtatgtagcccggggtggtccaatgggtgtgagtatgggacagccaagttatacccaaccccagatgcccccccatcctgctcagctgcgtcatgggccccccatgcatacgtacattcctggacaccctcaccacccaacagtgatgatgcatggaggaccgccccaccctggaatgccaatgtcagcatcaagccccacagttcttaatacaggagacccaacaatgagtggacaagtcatggacattcatgctcagtagcttaagggaatatgcattgtctgcaatggtgactgatttcaaatcatgttttttctgcaatgactgtggagttccattcttggcatctactctggaccaaggagcatccctaattcttcatagggacctttaaaaagcaggaaataccaactgaagtcaatttgggggacatgctaaataactatataagacattaagagaacaaagagtgaaatattgtaaatgctattatactgttatccatattacgttgtttcttatagattttttaaaaaaaatgtgaaatttttccacactatgtgtgttgtttccatagctcttcacttcctccagaagcctccttacattaaaaagccttacagttatcctgcaagggacaggaaggtctgatttgcaggatttttagagcattaaaataactatcaggcagaagaatctttcttctcgcctaggatttcagccatgcgcgcgctctctctctttctctctcttttcctctctctccctctttctagcctggggcttgaatttgcatgtctaattcatttactcaccatatttgaattggcctgaacagatgtaaatcgggaaggatgggaaaaactgcagtcatcaacaatgattaatcagctgttgcaggcagtgtcttaaggagactggtaggaggaggcatggaaaccaaaaggccgtgtgtttagaagcctaattgtcacatcaagcatcattgtccccatgcaacaaccaccaccttatacatcacttcctgttttaagcagctctaaaacatagactgaagatttatttttaatatgttgactttatttctgagcaaagcatcggtcatgtgtgtattttttcatagtcccaccttggagcatttatgtagacattgtaaataaattttgtgcaaaaaggactggaaaaa

SEQ ID NO: 12399 - DNA, 553 bp, Homo sapiens
  source 1..553: mol_type = unassigned DNA
acaggagagcagtattcagttctggggaaagaaagggctgggccaggggaggggaagagagattcccagccagctgatgttggagagaagactagatccagaagaggaccaagagcagagaaggaagtaattccttggtttctgtgacttctttctcacccaagatagatttcaggtgatggcttggacaacagtgtagcttcccccagcacaggtgacgatgatgaccctgataaggacaaaaagcgtcacaaaaagcgtggcatctttcccaaagtagccacaaatatcatgagggcgtggctgttccagcatctaacacacccttacccttctgaagaacagaaaaagcagttggcacaagacacgggactcaccatccttcaagtgaacaattggtttattaatgcccggagaagaatagtgcagcccatgatagaccagtccaaccgagcagtaagtcaaggaacaccttataatcctgatggacagcccatgggaggtttcgtaatggacggtcagcaacatatgggaattagagcaccagggctgc

SEQ ID NO: 12400 - DNA, 558 bp, Homo sapiens
  source 1..558: mol_type = unassigned DNA
ggagaagtcagctccaggaatgaagtcactgctgacattttacaaatgtggttcagagctgctgcctgctgccgtgtggtcggccggcggttctccaagtttgtttagtgatctcaaaagtaaaaaaggaaagaaattctcgagagaccacattgaggtgactatatcaaattgcggagtgaatggaaatgctaaaggtgatggcttggacaacagtgtagcttcccccagcacaggtgacgatgatgaccctgataaggacaaaaagcgtcacaaaaagcgtggcatctttcccaaagtagccacaaatatcatgagggcgtggctgttccagcatctaacacacccttacccttctgaagaacagaaaaagcagttggcacaagacacgggactcaccatccttcaagtgaacaattggtttattaatgcccggagaagaatagtgcagcccatgatagaccagtccaaccgagcagtaagtcaaggaacaccttataatcctgatggacagcccatgggaggtttcgtaatggacggtcagcaacatatgggaat

SEQ ID NO: 12401 - DNA, 4822 bp, Homo sapiens
  source 1..4822: mol_type = unassigned DNA
cgggccgctcgtaaccttcagttcgggggcttgacaatttttttcttctttttcttctttttcttttctttctttttttttccaactgaggggaagagaagagaaagagggggaaaggaggaccgaagaggaggaggaggggaggggggaggaggaggaggtggaggaggaggaggaagatcaggaggaggaggaagaagaggaaaaaagagaaaaagaagaaatatcacagaaaaaaaaattcttcgttgtctagactgggctttttttcccccctaaaaaatagcatattggagaattgggagaagtctctttggtttggaaaaaaaaaaaaggaatcttcagcctagatcactttcttatccggactgggatattaaatatacgacacatccaggagtttattggagcgcagactgatggcgcaaaggtacgatgagctgccccattacggcgggatggacggagtaggggttcccgcttccatgtacggagaccctcacgcgccgcggccgatccccccggttcaccacctgaaccacgggccgccgctccacgccacacagcactacggcgcgcacgccccgcaccccaatgtcatgccggccagtatgggatccgctgtcaacgacgccttgaagcgggacaaggacgcgatctatgggcacccgttgtttcctctgttagctctggtctttgagaagtgcgagctggcgacctgcactccccgggaacctggagtggctggcggagacgtctgctcctccgactccttcaacgaggacatcgcggtcttcgccaagcaggttcgcgccgaaaagccacttttttcctcaaatccagagctggacaatttgatgatacaagcaatacaagtactaaggtttcatcttttggagttagaaaaggtccacgaactgtgcgataacttctgccaccgatacattagctgtttgaaggggaaaatgcccatcgacctcgtcattgatgaaagagacggcagctccaagtcagatcatgaagaactttcaggctcctccacaaatctcgctgaccataacccttcttcttggcgagaccacgatgatgcaacctcaacccactcagcaggcaccccagggccctccagtgggggccatgcttcccagagcggagacaacagcagtgagcaaggggatggtttagacaacagtgtagcttcacctggtacaggtgacgatgatgatccggataaggacaaaaaacgccagaagaaaagaggcattttccccaaagtagcaacaaatatcatgagagcatggctcttccagcatctcacacatccgtacccttccgaagagcagaagaaacagttagcgcaagacacaggacttacaattctccaagtaaacaactggtttattaatgccagaagaagaatagtacagcccatgattgaccagtcaaatcgagcaggttttcttcttgatccttcagtgagccaaggagcagcatatagtccagagggtcagcccatggggagctttgtgttggatggtcagcaacacatggggatccggcctgcaggtttgcagagcatgccaggggactacgtttctcagggtggtcctatgggaatgagtatggcacagccaagttacactcctccccagatgaccccacaccctactcaattaagacatggacccccaatgcattcatatttgccaagccatccccaccacccagccatgatgatgcacggaggaccccctacccaccctggaatgactatgtcagcacagagccccacaatgttaaattctgtagatcccaatgttggcggacaggttatggacattcatgcccaatagtataagggaactcaagggaaaaggaaacacacgcaaaaactattttaagactttctgaactttgaccagatgttgacacttaatatgaaattccagacagctgtgattattttttacttttgtcatttttcatcaagcaacagaggaccaatgcaacaagaacacaaatgtgaaatcatgggctgactgagacaattctgtccatgtaaagatcctctggaaaaagactccgagagttataactactgtagtataaatataggaactaagttaaacttgtacatttctgttgatcacgccgttatgttgcctcaaatagttttagaagagaaaaaaaaatatatccttgttttccacactatgtgtgttgttcccaaaagaatgactgttttggttcatcagtgaattcaccatccaggagagactgtggtatatattttaaacctgttgggccaatgagaaaagaaccacactggagatcatgatgaacttttggctgaacctcatcactcgaactccagcttcaagaatgtgttttcatgcccggcctttgttcctccataaatgtgtcctttagtttcaaacagatctttatagttcgtgcttcataagccaattcttattattatttttgggggactcttcttcaaagagcttgccaatgaagatttaaagacagagcaggagcttcttccaggagttctgagccttggttgtggacaaaacaatcttaagttgggcagctttcctcaacacaaaaaaaagttattaatggtcattgaaccataactaggactttatcagaaactcaaagcttgggggataaaaaggagcaagagaatactgtaacaaacttcgtacagagttcggtctattaattgtttcatgttagatattctatgtgtttacctcaattgaaaaaaaaaagaatgtttttgctagtatcagatctgctgtggaattggtattgtatgtccatgaattcttcttttctcagcacgtgttcctcactagaagaaaatgctgttacctttaagctttgtcaaatttacattaaaatacttgtatgaggactgtgacgttatgttaaaaaaaaaaaggtgttaagtcacaaaaagcggtaataaatatttcatttttgattttttgttaggcttttgcgtttttaatggttttaggacaagactgcacaatgccaactctatacagtgttaaaagtaggtttttccccccagcagttgagtatattttaaactcatcaataatttttaaggtaatcatctatagcctttcaatgtctatttgacctataagttccaccagcagaaaacttctaaaggtacgaaactatgtgtacatgatgagccaggttgaaagatccccttgaacatgctcaacctcctttttagatgcatgacgttaaaaaatatatactttcagataaagcttttcatgggcatcctctgccagaataaaggacttttcagggttaattttacaacataagaaataatgtctgtgctcaaaggtaatttatctgcctgtgtttttcctctgcctgtcttactacaatattgttggatatgtaaatgaaaatttacatatgggtgttcatagataagtaaacaacttctatggagtttgaaattctgactttaaaagattacttaatcattaatattttataaattatattgtggtatatttttatttcagacacatccatgtgcagggatgctagtgtgatgatttgataactaaacttaaacttttttctgaaaacaaaacaaaacaaaatggacggtataatgccattttcaaaattttatgcaacattcctggaaatctataccattagcttattgatactgcacaaacaatgtctgctaaagtgtgcaaaaagggtgaggcatgtcccctcaattttcaaataaatatactatcctggaattttttaactcttaaattttgaatctttgtttagaaagaataatgtcatatactttggctagatatgtgatgtcaaccggctaaggaaattattcatcatctctgcaaacttaaacttggaagaaatccatagttattatttggggctcttccatctttccatttcagacagcatttatggaggttctatataaatgaacgaggaaatacacttctattgttttgtgttatatttagtcaggtagaatttttacaaatacatttcagtttaagtgttgtgttgctgtttaaacatagaaataatgcttctgacacaaactaacttaatagagaaattcagtgccacttgggaaagagagatagcttccctctcatttttgctattctattttacatgaagtctttttgtaaattttaaatatttgcctatttttactttaaatacttttatgtaaactatgaaaattccccattataaatcaactctcacatcaggtgggaaaaagaacctttttttctttccactcagtaaattctgaagggtttccttggcaattggctcgtgtttaggatgtgttttatgcaattatcaagttatctcattgaagtttagagaccagagctctcaactcttggttttaatgaataaagtcatctcatgcttagtttattcgtcaaacccacgtcctatcatgttaactttaaccttcttaaatatttggagatgaatgataattgtaatatttgtttgcattaccttgctctcccccacccccaaccccatgataacacagagaagtgatagatttgtccaatttttataatgctttttttacaccaccccggaaggcacttgctcctatctcgggtttactatttagtgtaaagagttccgatttgggtatatttaagaaagactcagctgtcaaaagcaaagaaactgggaatggtgttttgacaaccatatagtgttaaaggaaatactgtagtctgaataaaattgcttatgttctccaaaa

SEQ ID NO: 12402 - DNA, 4829 bp, Homo sapiens
  source 1..4829: mol_type = unassigned DNA
accgcttggagggagtgtgctctgagttaagctggtctcttctggtcctggaaaaaaatgagtattgacaaggttgctggatctgcgcagaaaagaaagtgccacttaataaaaaatttagcccggcagtggtaccgtctgcagagcttgctgcccttggacgttagcaggaagccttcggggtgctgtaatcggcgggcagaggagagggaggccgcggaattaaaaggaacaaaagctagagcgccatgccaaacgtccccggcaagacccagttaggcaggagccgggagtgatgggaaaatgaactagaacatattggagaattgggagaagtctctttggtttggaaaaaaaaaaaaggaatcttcagcctagatcactttcttatccggactgggatattaaatatacgacacatccaggagtttattggagcgcagactgatggcgcaaaggtacgatgagctgccccattacggcgggatggacggagtaggggttcccgcttccatgtacggagaccctcacgcgccgcggccgatccccccggttcaccacctgaaccacgggccgccgctccacgccacacagcactacggcgcgcacgccccgcaccccaatgtcatgccggccagtatgggatccgctgtcaacgacgccttgaagcgggacaaggacgcgatctatgggcacccgttgtttcctctgttagctctggtctttgagaagtgcgagctggcgacctgcactccccgggaacctggagtggctggcggagacgtctgctcctccgactccttcaacgaggacatcgcggtcttcgccaagcaggttcgcgccgaaaagccacttttttcctcaaatccagagctggacaatttgatgatacaagcaatacaagtactaaggtttcatcttttggagttagaaaaggtccacgaactgtgcgataacttctgccaccgatacattagctgtttgaaggggaaaatgcccatcgacctcgtcattgatgaaagagacggcagctccaagtcagatcatgaagaactttcaggctcctccacaaatctcgctgaccataacccttcttcttggcgagaccacgatgatgcaacctcaacccactcagcaggcaccccagggccctccagtgggggccatgcttcccagagcggagacaacagcagtgagcaaggggatggtttagacaacagtgtagcttcacctggtacaggtgacgatgatgatccggataaggacaaaaaacgccagaagaaaagaggcattttccccaaagtagcaacaaatatcatgagagcatggctcttccagcatctcacacatccgtacccttccgaagagcagaagaaacagttagcgcaagacacaggacttacaattctccaagtaaacaactggtttattaatgccagaagaagaatagtacagcccatgattgaccagtcaaatcgagcagtgagccaaggagcagcatatagtccagagggtcagcccatggggagctttgtgttggatggtcagcaacacatggggatccggcctgcaggtttgcagagcatgccaggggactacgtttctcagggtggtcctatgggaatgagtatggcacagccaagttacactcctccccagatgaccccacaccctactcaattaagacatggacccccaatgcattcatatttgccaagccatccccaccacccagccatgatgatgcacggaggaccccctacccaccctggaatgactatgtcagcacagagccccacaatgttaaattctgtagatcccaatgttggcggacaggttatggacattcatgcccaatagtataagggaactcaagggaaaaggaaacacacgcaaaaactattttaagactttctgaactttgaccagatgttgacacttaatatgaaattccagacagctgtgattattttttacttttgtcatttttcatcaagcaacagaggaccaatgcaacaagaacacaaatgtgaaatcatgggctgactgagacaattctgtccatgtaaagatcctctggaaaaagactccgagagttataactactgtagtataaatataggaactaagttaaacttgtacatttctgttgatcacgccgttatgttgcctcaaatagttttagaagagaaaaaaaaatatatccttgttttccacactatgtgtgttgttcccaaaagaatgactgttttggttcatcagtgaattcaccatccaggagagactgtggtatatattttaaacctgttgggccaatgagaaaagaaccacactggagatcatgatgaacttttggctgaacctcatcactcgaactccagcttcaagaatgtgttttcatgcccggcctttgttcctccataaatgtgtcctttagtttcaaacagatctttatagttcgtgcttcataagccaattcttattattatttttgggggactcttcttcaaagagcttgccaatgaagatttaaagacagagcaggagcttcttccaggagttctgagccttggttgtggacaaaacaatcttaagttgggcagctttcctcaacacaaaaaaaagttattaatggtcattgaaccataactaggactttatcagaaactcaaagcttgggggataaaaaggagcaagagaatactgtaacaaacttcgtacagagttcggtctattaattgtttcatgttagatattctatgtgtttacctcaattgaaaaaaaaaagaatgtttttgctagtatcagatctgctgtggaattggtattgtatgtccatgaattcttcttttctcagcacgtgttcctcactagaagaaaatgctgttacctttaagctttgtcaaatttacattaaaatacttgtatgaggactgtgacgttatgttaaaaaaaaaaaggtgttaagtcacaaaaagcggtaataaatatttcatttttgattttttgttaggcttttgcgtttttaatggttttaggacaagactgcacaatgccaactctatacagtgttaaaagtaggtttttccccccagcagttgagtatattttaaactcatcaataatttttaaggtaatcatctatagcctttcaatgtctatttgacctataagttccaccagcagaaaacttctaaaggtacgaaactatgtgtacatgatgagccaggttgaaagatccccttgaacatgctcaacctcctttttagatgcatgacgttaaaaaatatatactttcagataaagcttttcatgggcatcctctgccagaataaaggacttttcagggttaattttacaacataagaaataatgtctgtgctcaaaggtaatttatctgcctgtgtttttcctctgcctgtcttactacaatattgttggatatgtaaatgaaaatttacatatgggtgttcatagataagtaaacaacttctatggagtttgaaattctgactttaaaagattacttaatcattaatattttataaattatattgtggtatatttttatttcagacacatccatgtgcagggatgctagtgtgatgatttgataactaaacttaaacttttttctgaaaacaaaacaaaacaaaatggacggtataatgccattttcaaaattttatgcaacattcctggaaatctataccattagcttattgatactgcacaaacaatgtctgctaaagtgtgcaaaaagggtgaggcatgtcccctcaattttcaaataaatatactatcctggaattttttaactcttaaattttgaatctttgtttagaaagaataatgtcatatactttggctagatatgtgatgtcaaccggctaaggaaattattcatcatctctgcaaacttaaacttggaagaaatccatagttattatttggggctcttccatctttccatttcagacagcatttatggaggttctatataaatgaacgaggaaatacacttctattgttttgtgttatatttagtcaggtagaatttttacaaatacatttcagtttaagtgttgtgttgctgtttaaacatagaaataatgcttctgacacaaactaacttaatagagaaattcagtgccacttgggaaagagagatagcttccctctcatttttgctattctattttacatgaagtctttttgtaaattttaaatatttgcctatttttactttaaatacttttatgtaaactatgaaaattccccattataaatcaactctcacatcaggtgggaaaaagaacctttttttctttccactcagtaaattctgaagggtttccttggcaattggctcgtgtttaggatgtgttttatgcaattatcaagttatctcattgaagtttagagaccagagctctcaactcttggttttaatgaataaagtcatctcatgcttagtttattcgtcaaacccacgtcctatcatgttaactttaaccttcttaaatatttggagatgaatgataattgtaatatttgtttgcattaccttgctctcccccacccccaaccccatgataacacagagaagtgatagatttgtccaatttttataatgctttttttacaccaccccggaaggcacttgctcctatctcgggtttactatttagtgtaaagagttccgatttgggtatatttaagaaagactcagctgtcaaaagcaaagaaactgggaatggtgttttgacaaccatatagtgttaaaggaaatactgtagtctgaataaaattgcttatgttctccaaaa

SEQ ID NO: 12403 - DNA, 2748 bp, Homo sapiens
  source 1..2748: mol_type = unassigned DNA
catctttatcccttcctctcttttctgttcgccctcttctccctgctctttttccctttccacccccctcctctgttctccctcacctcctgcgccccctcccccttcccgggttctgacagtacgatgagctgccccattacggcgggatggacggagtaggggttcccgcttccatgtacggagaccctcacgcgccgcggccgatccccccggttcaccacctgaaccacgggccgccgctccacgccacacagcactacggcgcgcacgccccgcaccccaatgtcatgccggccagtatgggatccgctgtcaacgacgccttgaagcgggacaaggacgcgatctatggctctggtctttgagaagtgcgagctggcgacctgcactccccgggaacctggagtggctggcggagacgtctgctcctccgactccttcaacgaggacatcgcggtcttcgccaagcaggttcgcgccgaaaagccacttttttcctcaaatccagagctggacaatttgatgatacaagcaatacaagtactaaggtttcatcttttggagttagaaaaggtccacgaactgtgcgataacttctgccaccgatacattagctgtttgaaggggaaaatgcccatcgacctcgtcattgatgaaagagacggcagctccaagtcagatcatgaagaactttcaggctcctccacaaatctcgctgaccataacccttcttcttggcgagaccacgatgatgcaacctcaacccactcagcaggcaccccagggccctccagtgggggccatgcttcccagagcggagacaacagcagtgagcaaggggatggtttagacaacagtgtagcttcacctggtacaggtgacgatgatgatccggataaggacaaaaaacgccagaagaaaagaggcattttccccaaagtagcaacaaatatcatgagagcatggctcttccagcatctcacacatccgtacccttccgaagagcagaagaaacagttagcgcaagacacaggacttacaattctccaagtaaacaactggtttattaatgccagaagaagaatagtacagcccatgattgaccagtcaaatcgagcagtgagccaaggagcagcatatagtccagagggtcagcccatggggagctttgtgttggatggtcagcaacacatggggatccggcctgcaggacctatgagtggaatgggcatgaatatgggcatggatgggcaatggcactacatgtaaccttcatcatgtaaagcaatcgcaaagcaagggggaagtttgcagagcatgccaggggactacgtttctcagggtggtcctatgggaatgagtatggcacagccaagttacactcctccccagatgaccccacaccctactcaattaagacatggacccccaatgcattcatatttgccaagccatccccaccacccagccatgatgatgcacggaggaccccctacccaccctggaatgactatgtcagcacagagccccacaatgttaaattctgtagatcccaatgttggcggacaggttatggacattcatgcccaatagtataagggaactcaagggaaaaggaaacacacgcaaaaactattttaagactttctgaactttgaccagatgttgacacttaatatgaaattccagacagctgtgattattttttacttttgtcatttttcatcaagcaacagaggaccaatgcaacaagaacacaaatgtgaaatcatgggctgactgagacaattctgtccatgtaaagatcctctggaaaaagactccgagagttataactactgtagtataaatataggaactaagttaaacttgtacatttctgttgatcacgccgttatgttgcctcaaatagttttagaagagaaaaaaaaatatatccttgttttccacactatgtgtgttgttcccaaaagaatgactgttttggttcatcagtgaattcaccatccaggagagactgtggtatatattttaaacctgttgggccaatgagaaaagaaccacactggagatcatgatgaacttttggctgaacctcatcactcgaactccagcttcaagaatgtgttttcatgcccggcctttgttcctccataaatgtgtcctttagtttcaaacagatctttatagttcgtgcttcataagccaattcttattattatttttgggggactcttcttcaaagagcttgccaatgaagatttaaagacagagcaggagcttcttccaggagttctgagccttggttgtggacaaaacaatcttaagttgggcagctttcctcaacacaaaaaaaagttattaatggtcattgaaccataactaggactttatcagaaactcaaagcttgggggataaaaaggagcaagagaatactgtaacaaacttcgtacagagttcggtctattaattgtttcatgttagatattctatgtgtttacctcaattgaaaaaaaaaagaatgtttttgctagtatcagatctgctgtggaattggtattgtatgtccatgaattcttcttttctcagcacgtgttcctcactagaagaaaatgctgttacctttaagctttgtcaaatttacattaaaatacttgtatgaggactgtgacgttatgttaaaaaaaaaaaggtgttaagtcacaaaaagcggtaataaatatttcatttttgattttttgtta

SEQ ID NO: 12404 - DNA, 3230 bp, Homo sapiens
  source 1..3230: mol_type = unassigned DNA
gggtggaaatatcaggtcagtcctccttggttgctgtaaaagtggtggggaaagagtagataattaagttctttttctgattggaggagggatgcttctggaagtctttgtgatctagtcagatattcattcctcagcaacatttcaggtgacaggtgggaagaaagatgcagtttcaactctccttttgttttcacctctacatagctgatcactttcttttttgacaactgagctacactttcttaagtaataaagaagtccattgttttgcaaacaaacaccatatgcaaaagactcctttggttttctcccagctattattcctcagcttaattgtattcccaccagagtgctcacaggaggcccgaccgagtggggcctgactgtcctcctccaaagggacttcagcttcctcggaacacagagctgccagcacacactgaatttttctggctaatttcaaagagtgagttttcagttcctgcctgtggccccaggtggactcattaatcatgaagtccccctgtgcttaagatctgaaactggaaatattgacagatgttatcaatgggtatatttttagggagaagctagctggatgctccctgctcctccgaaatgcgtggtcagtgaatcgtgtgcatgagctcaaatgtgtggggaatacacgtcgttaagtgcacagggacaagggtaactcacaaatggtagaaaattgttttgtttttattaaatttggagaaataaaggagatttcttatcatcttactctgtttgtacatgaatatttgatgggcattattaaacattaaagtaacatgaagtaggcacttatttttggatttccaacaaaattagatccaggcttcttagatgaaataactgcttctcctttgcattcctgcgattcagccaccacctgatttgcaaacgtttcttgagctctaatatcaaacatgtgtacctgaggctctgtctttctagtgggttgaaaggtggctgggtttatggttggcagttaccttatcctctgccctgggtgtcccagcttaggctggaaaggctgcccccagctggcactgacctctgaatgacccctaactttacaggcttaaactgcaggagttgccgaagagcagaagtctttctggccagcacttattactgctgtgttggtgataaaacttcagacagcctaattgatggctttgctgacctaacaataccttgtgaaagccgagtgctagagcctggtctccatttatgaccagctgcaaggggaagctgggtctccctatcacggggagtctagggaaagggggaaagtcttccagcctgtgaactttaaccagattcctacttgtgcaagaagcagaagcacaatttgaagttaatagaagctttctcatggagaactttattccgtccctgagctcttctagcaagttgttttggagttgactacgcagtgacgacggagattacccagtcaactatttttgaacgctgaaagggaaaatcacctttaaattgaaaagataattttcagaagagatttgactgtattttgtgctcctcagcattcatgcaaaggtgttcgcagagtacagaaacggagtatgatgactggacttctctgttctctttcaggtttattaatgccagaagaagaatagtacagcccatgattgaccagtcaaatcgagcaggcaaccaaggagcagcatatagtccagagggtcagcccatggggagctttgtgttggatggtcagcaacacatggggatccggcctgcaggtttgcagagcatgccaggggactacgtttctcagggtggtcctatgggaatgagtatggcacagccaagttacactcctccccagatgaccccacaccctactcaattaagacatggacccccaatgcattcatatttgccaagccatccccaccacccagccatgatgatgcacggaggaccccctacccaccctggaatgactatgtcagcacagagccccacaatgttaaattctgtagatcccaatgttggcggacaggttatggacattcatgcccaatagtataagggaactcaagggaaaaggaaacacacgcaaaaactattttaagactttctgaactttgaccagatgttgacacttaatatgaaattccagacagctgtgattattttttacttttgtcatttttcatcaagcaacagaggaccaatgcaacaagaacacaaatgtgaaatcatgggctgactgagacaattctgtccatgtaaagatcctctggaaaaagactccgagagttataactactgtagtataaatataggaactaagttaaacttgtacatttctgttgatcacgccgttatgttgcctcaaatagttttagaagagaaaaaaaaatatatccttgttttccacactatgtgtgttgttcccaaaagaatgactgttttggttcatcagtgaattcaccatccaggagagactgtggtatatattttaaacctgttgggccaatgagaaaagaaccacactggagatcatgatgaacttttggctgaacctcatcactcgaactccagcttcaagaatgtgttttcatgcccggcctttgttcctccataaatgtgtcctttagtttcaaacagatctttatagttcgtgcttcataagccaattcttattattatttttgggggactcttcttcaaagagcttgccaatgaagatttaaagacagagcaggagcttcttccaggagttctgagccttggttgtggacaaaacaatcttaagttgggcagctttcctcaacacaaaaaaaagttattaatggtcattgaaccataactaggactttatcagaaactcaaagcttgggggataaaaaggagcaagagaatactgtaacaaacttcgtacagagttcggtctattaattgtttcatgttagatattctatgtgtttacctcaattgaaaaaaaaaagaatgtttttgctagtatcagatctgctgtggaattggtattgtatgtccatgaattcttcttttctcagcacgtgttcctcactagaagaaaatgctgttacctttaagctttgtcaaatttacattaaaatacttgtatgaggactgtgacgttatgttaaaaaaaaaaaggtgttaagtcacaaaaagcggtaataaatatttcatttttg

SEQ ID NO: 12405 - DNA, 2775 bp, Homo sapiens
  source 1..2775: mol_type = unassigned DNA
aggaggaggaggaagatcaggaggaggaggaagaagaggaaaaaagagaaaaagaagaaatatcacagaaaaaaaaattcttcgttgtctagactgggctttttttcccccctaaaaaatagcatattggagaattgggagaagtctctttggtttggaaaaaaaaaaaaggaatcttcagcctagatcactttcttatccggactgggatattaaatatacgacacatccaggagtttattggagcgcagactgatggcgcaaaggtacgatgagctgccccattacggcgggatggacggagtaggggttcccgcttccatgtacggagaccctcacgcgccgcggccgatccccccggttcaccacctgaaccacgggccgccgctccacgccacacagcactacggcgcgcacgccccgcaccccaatgtcatgccggccagtatgggatccgctgtcaacgacgccttgaagcgggacaaggacgcgatctatgggcacccgttgtttcctctgttagctctggtctttgagaagtgcgagctggcgacctgcactccccgggaacctggagtggctggcggagacgtctgctcctccgactccttcaacgaggacatcgcggtcttcgccaagcaggttcgcgccgaaaagccacttttttcctcaaatccagagctggacaatttgatgatacaagcaatacaagtactaaggtttcatcttttggagttagaaaaggtccacgaactgtgcgataacttctgccaccgatacattagctgtttgaaggggaaaatgcccatcgacctcgtcattgatgaaagagacggcagctccaagtcagatcatgaagaactttcaggctcctccacaaatctcgctgaccataacccttcttcttggcgagaccacgatgatgcaacctcaacccactcagcaggcaccccagggccctccagtgggggccatgcttcccagagcggagacaacagcagtgagcaaggggatggtttagacaacagtgtagcttcacctggtacaggtgacgatgatgatccggataaggacaaaaaacgccagaagaaaagaggcattttccccaaagtagcaacaaatatcatgagagcatggctcttccagcatctcacagtttattaatgccagaagaagaatagtacagcccatgattgaccagtcaaatcgagcagtgagccaaggagcagcatatagtccagagggtcagcccatggggagctttgtgttggatggtcagcaacacatggggatccggcctgcaggacctatgagtggaatgggcatgaatatgggcatggatgggcaatggcactacatgtaaccttcatcatgtaaagcaatcgcaaagcaagggggaagtttgcagagcatgccaggggactacgtttctcagggtggtcctatgggaatgagtatggcacagccaagttacactcctccccagatgaccccacaccctactcaattaagacatggacccccaatgcattcatatttgccaagccatccccaccacccagccatgatgatgcacggaggaccccctacccaccctggaatgactatgtcagcacagagccccacaatgttaaattctgtagatcccaatgttggcggacaggttatggacattcatgcccaatagtataagggaactcaagggaaaaggaaacacacgcaaaaactattttaagactttctgaactttgaccagatgttgacacttaatatgaaattccagacagctgtgattattttttacttttgtcatttttcatcaagcaacagaggaccaatgcaacaagaacacaaatgtgaaatcatgggctgactgagacaattctgtccatgtaaagatcctctggaaaaagactccgagagttataactactgtagtataaatataggaactaagttaaacttgtacatttctgttgatcacgccgttatgttgcctcaaatagttttagaagagaaaaaaaaatatatccttgttttccacactatgtgtgttgttcccaaaagaatgactgttttggttcatcagtgaattcaccatccaggagagactgtggtatatattttaaacctgttgggccaatgagaaaagaaccacactggagatcatgatgaacttttggctgaacctcatcactcgaactccagcttcaagaatgtgttttcatgcccggcctttgttcctccataaatgtgtcctttagtttcaaacagatctttatagttcgtgcttcataagccaattcttattattatttttgggggactcttcttcaaagagcttgccaatgaagatttaaagacagagcaggagcttcttccaggagttctgagccttggttgtggacaaaacaatcttaagttgggcagctttcctcaacacaaaaaaaagttattaatggtcattgaaccataactaggactttatcagaaactcaaagcttgggggataaaaaggagcaagagaatactgtaacaaacttcgtacagagttcggtctattaattgtttcatgttagatattctatgtgtttacctcaattgaaaaaaaaaagaatgtttttgctagtatcagatctgctgtggaattggtattgtatgtccatgaattcttcttttctcagcacgtgttcctcactagaagaaaatgctgttacctttaagctttgtcaaatttacattaaaatacttgtatgaggactgtgacgttatgtt

SEQ ID NO: 12406 - DNA, 2538 bp, Homo sapiens
  source 1..2538: mol_type = unassigned DNA
cttttctgttcgccctcttctccctgctctttttccctttccacccccctcctctgttctccctcacctcctgcgccccctcccccttcccgggttctgacagtacgatgagctgccccattacggcgggatggacggagtaggggttcccgcttccatgtacggagaccctcacgcgccgcggccgatccccccggttcaccacctgaaccacgggccgccgctccacgccacacagcactacggcgcgcacgccccgcaccccaatgtcatgccggccagtatgggatccgctgtcaacgacgccttgaagcgggacaaggacgcgatctatgggcacccgttgtttcctctgttagctctggtctttgagaagtgcgagctggcgacctgcactccccgggaacctggagtggctggcggagacgtctgctcctccgactccttcaacgaggacatcgcggtcttcgccaagcaggttcgcgccgaaaagccacttttttcctcaaatccagagctggacaatttgatgatacaagcaatacaagtactaaggtttcatcttttggagttagaaaaggtccacgaactgtgcgataacttctgccaccgatacattagctgtttgaaggggaaaatgcccatcgacctcgtcattgatgaaagagacggcagctccaagtcagatcatgaagaactttcaggctcctccacaaatctcgctgaccataacccttcttcttggcgagaccacgatgatgcaacctcaacccactcagcaggcaccccagggccctccagtgggggccatgcttcccagagcggagacaacagcagtgagcaaggggatggtttagacaacagtgtagcttcacctggtacaggtgacgatgatgatccggataaggacaaaaaacgccagaagaaaagaggcattttccccaaagtagcaacaaatatcatgagagcatggctcttccagcatctcacacatccgtacccttccgaagagcagaagaaacagttagcgcaagacacaggacttacaattctccaagtaaacaactggtttattaatgccagaagaagaatagtacagcccatgattgaccagtcaaatcgagcaggttttcttcttgatccttcagtgagccaaggagcagcatatagtccagagggtcagcccatggggagctttgtgttggatggtcagcaacacatggggatccggcctgcaggacctatgagtggaatgggcatgaatatgggcatggatgggcaatggcactacatgtaaccttcatcatgtaaagcaatcgcaaagcaagggggaagtttgcagagcatgccaggggactacgtttctcagggtggtcctatgggaatgagtatggcacagccaagttacactcctccccagatgaccccacaccctactcaattaagacatggacccccaatgcattcatatttgccaagccatccccaccacccagccatgatgatgcacggaggaccccctacccaccctggaatgactatgtcagcacagagccccacaatgttaaattctgtagatcccaatgttggcggacaggttatggacattcatgcccaatagtataagggaactcaagggaaaaggaaacacacgcaaaaactattttaagactttctgaactttgaccagatgttgacacttaatatgaaattccagacagctgtgattattttttacttttgtcatttttcatcaagcaacagaggaccaatgcaacaagaacacaaatgtgaaatcatgggctgactgagacaattctgtccatgtaaagatcctctggaaaaagactccgagagttataactactgtagtataaatataggaactaagttaaacttgtacatttctgttgatcacgccgttatgttgcctcaaatagttttagaagagaaaaaaaaatatatccttgttttccacactatgtgtgttgttcccaaaagaatgactgttttggttcatcagtgaattcaccatccaggagagactgtggtatatattttaaacctgttgggccaatgagaaaagaaccacactggagatcatgatgaacttttggctgaacctcatcactcgaactccagcttcaagaatgtgttttcatgcccggcctttgttcctccataaatgtgtcctttagtttcaaacagatctttatagttcgtgcttcataagccaattcttattattatttttgggggactcttcttcaaagagcttgccaatgaagatttaaagacagagcaggagcttcttccaggagttctgagccttggttgtggacaaaacaatcttaagttgggcagctttcctcaacacaaaaaaaagttattaatggtcattgaaccataactaggactttatcagaaactcaaagcttgggggataaaaaggagcaagagaatactgtaacaaacttcgtacagagttcggtctattaattgtttcatgttagatattctatgtgtttacctcaattg

SEQ ID NO: 12407 - DNA, 2321 bp, Homo sapiens
  source 1..2321: mol_type = unassigned DNA
attggagcgcagactgatggcgcaaaggtacgatgagctgccccattacggcgggatggacggagtaggggttcccgcttccatgtacggagaccctcacgcgccgcggccgatccccccggttcaccacctgaaccacgggccgccgctccacgccacacagcactacggcgcgcacgccccgcaccccaatgtcatgccggccagtatgggatccgctgtcaacgacgccttgaagcgggacaaggacgcgatctatgggttcgcgccgaaaagccacttttttcctcaaatccagagctggacaatttgatgatacaagcaatacaagtactaaggtttcatcttttggagttagaaaaggtccacgaactgtgcgataacttctgccaccgatacattagctgtttgaaggggaaaatgcccatcgacctcgtcattgatgaaagagacggcagctccaagtcagatcatgaagaactttcaggctcctccacaaatctcgctgaccataacccttcttcttggcgagaccacgatgatgcaacctcaacccactcagcaggcaccccagggccctccagtgggggccatgcttcccagagcggagacaacagcagtgagcaaggggatggtttagacaacagtgtagcttcacctggtacaggtgacgatgatgatccggataaggacaaaaaacgccagaagaaaagaggcattttccccaaagtagcaacaaatatcatgagagcatggctcttccagcatctcacacatccgtacccttccgaagagcagaagaaacagttagcgcaagacacaggacttacaattctccaagtaaacaactggtttattaatgccagaagaagaatagtacagcccatgattgaccagtcaaatcgagcaggttttcttcttgatccttcagtgagccaaggagcagcatatagtccagagggtcagcccatggggagctttgtgttggatggtcagcaacacatggggatccggcctgcaggacctatgagtggaatgggcatgaatatgggcatggatgggcaatggcactacatgtaaccttcatcatgtaaagcaatcgcaaagcaagggggaagtttgcagagcatgccaggggactacgtttctcagggtggtcctatgggaatgagtatggcacagccaagttacactcctccccagatgaccccacaccctactcaattaagacatggacccccaatgcattcatatttgccaagccatccccaccacccagccatgatgatgcacggaggaccccctacccaccctggaatgactatgtcagcacagagccccacaatgttaaattctgtagatcccaatgttggcggacaggttatggacattcatgcccaatagtataagggaactcaagggaaaaggaaacacacgcaaaaactattttaagactttctgaactttgaccagatgttgacacttaatatgaaattccagacagctgtgattattttttacttttgtcatttttcatcaagcaacagaggaccaatgcaacaagaacacaaatgtgaaatcatgggctgactgagacaattctgtccatgtaaagatcctctggaaaaagactccgagagttataactactgtagtataaatataggaactaagttaaacttgtacatttctgttgatcacgccgttatgttgcctcaaatagttttagaagagaaaaaaaaatatatccttgttttccacactatgtgtgttgttcccaaaagaatgactgttttggttcatcagtgaattcaccatccaggagagactgtggtatatattttaaacctgttgggccaatgagaaaagaaccacactggagatcatgatgaacttttggctgaacctcatcactcgaactccagcttcaagaatgtgttttcatgcccggcctttgttcctccataaatgtgtcctttagtttcaaacagatctttatagttcgtgcttcataagccaattcttattattatttttgggggactcttcttcaaagagcttgccaatgaagatttaaagacagagcaggagcttcttccaggagttctgagccttggttgtggacaaaacaatcttaagttgggcagctttcctcaacacaaaaaaaagttattaatggtcattgaaccataactaggactttatcagaaactcaaagcttgggggataaaaaggagcaagagaatactgtaacaaacttcgtacagagttcggtctattaattgtttcatgttagatattctatgtgtttacctcaattg

SEQ ID NO: 12408 - DNA, 2666 bp, Homo sapiens
  source 1..2666: mol_type = unassigned DNA
cggcttctttccctcccgtgcctctgcgtgtgtgcgagtgtgtgtgcgtgcgtgtgtgcgtgtctgggcgcgcgtgttccagcgctgtgcgagcgggcgggcggcgagtgcgtgtgagtggtgtgtgtgtgtgcgtgtgcaatcgttacacgctttcgcctcgctccagcttttaccccagcagcgcgattcccccggttctcctgctgccgctgctgcgccgctgccgccgtggctcgcgcggctcggggcgggcacgggctgcgtaggagccgccgccggggccgccgctggggccgcgctgccgcagccgctgcgccgccgcctagactactagcctgggctgcttgttttgtctctgaaattgacaaggacgcagggaatccgctgctaaataatgtttctgtacgatgagctgccccattacggcgggatggacggagtaggggttcccgcttccatgtacggagaccctcacgcgccgcggccgatccccccggttcaccacctgaaccacgggccgccgctccacgccacacagcactacggcgcgcacgccccgcaccccaatgtcatgccggccagtatgggatccgctgtcaacgacgccttgaagcgggacaaggacgcgatctatgggcacccgttgtttcctctgttagctctggtctttgagaagtgcgagctggcgacctgcactccccgggaacctggagtggctggcggagacgtctgctcctccgactccttcaacgaggacatcgcggtcttcgccaagcaggttcgcgccgaaaagccacttttttcctcaaatccagagctggacaatttgatgatacaagcaatacaagtactaaggtttcatcttttggagttagaaaaggtccacgaactgtgcgataacttctgccaccgatacattagctgtttgaaggggaaaatgcccatcgacctcgtcattgatgaaagagacggcagctccaagtcagatcatgaagaactttcaggctcctccacaaatctcgctgaccataacccttcttcttggcgagaccacgatgatgcaacctcaacccactcagcaggcaccccagggccctccagtgggggccatgcttcccagagcggagacaacagcagtgagcaaggggatggtttagacaacagtgtagcttcacctggtacaggtgacgatgatgatccggataaggacaaaaaacgccagaagaaaagaggcattttccccaaagtagcaacaaatatcatgagagcatggctcttccagcatctcacacatccgtacccttccgaagagcagaagaaacagttagcgcaagacacaggacttacaattctccaagtaaacaactggtttattaatgccagaagaagaatagtacagcccatgattgaccagtcaaatcgagcagtgagccaaggagcagcatatagtccagagggtcagcccatggggagctttgtgttggatggtcagcaacacatggggatccggcctgcaggacctatgagtggaatgggcatgaatatgggcatggatgggcaatggcactacatgtaaccttcatcatgtaaagcaatcgcaaagcaagggggaagtttgcagagcatgccaggggactacgtttctcagggtggtcctatgggaatgagtatggcacagccaagttacactcctccccagatgaccccacaccctactcaattaagacatggacccccaatgcattcatatttgccaagccatccccaccacccagccatgatgatgcacggaggaccccctacccaccctggaatgactatgtcagcacagagccccacaatgttaaattctgtagatcccaatgttggcggacaggttatggacattcatgcccaatagtataagggaactcaagggaaaaggaaacacacgcaaaaactattttaagactttctgaactttgaccagatgttgacacttaatatgaaattccagacagctgtgattattttttacttttgtcatttttcatcaagcaacagaggaccaatgcaacaagaacacaaatgtgaaatcatgggctgactgagacaattctgtccatgtaaagatcctctggaaaaagactccgagagttataactactgtagtataaatataggaactaagttaaacttgtacatttctgttgatcacgccgttatgttgcctcaaatagttttagaagagaaaaaaaaatatatccttgttttccacactatgtgtgttgttcccaaaagaatgactgttttggttcatcagtgaattcaccatccaggagagactgtggtatatattttaaacctgttgggccaatgagaaaagaaccacactggagatcatgatgaacttttggctgaacctcatcactcgaactccagcttcaagaatgtgttttcatgcccggcctttgttcctccataaatgtgtcctttagtttcaaacagatctttatagttcgtgcttcataagccaattcttattattatttttgggggactcttcttcaaagagcttgccaatgaagatttaaagacagagcaggagcttcttccaggagttctgagccttggttgtggacaaaacaatcttaagttgggcagctttcctcaacacaaaaaaa

SEQ ID NO: 12409 - DNA, 2295 bp, Homo sapiens
  source 1..2295: mol_type = unassigned DNA
cccgatgcctcctctcccttcaacgcttctgctgctgctcgctgcttgatgatggcggccagtattttaaaaaatagcaaaattattcatcggcttctttccctcccgtgcctctgcgtgtgtgcgagtgtgtgtgcgtgcgtgtgtgcgtgtctgggcgcgcgtgttccagcgctgtgcgagcgggcgggcggcgagtgcgtgtgagtggtgtgtgtgtgtgcgtgtgcaatcgttacacgctttcgcctcgctccagcttttaccccagcagcgcgattcccccggttctcctgctgccgctgctgcgccgctgccgccgtggctcgcgcggctcggggcgggcacgggctgcgtaggagccgccgccggggccgccgctggggccgcgctgccgcagccgctgcgccgccgcctagactactagcctgggctgcttgttttgtctctgaaattgacaaggacgcagggaatccgctgctaaataatgtttctgtacgatgagctgccccattacggcgggatggacggagtaggggttcccgcttccatgtacggagaccctcacgcgccgcggccgatccccccggttcaccacctgaaccacgggccgccgctccacgccacacagcactacggcgcgcacgccccgcaccccaatgtcatgccggccagtatgggatccgctgtcaacgacgccttgaagcgggacaaggacgcgatctatggctctggtctttgagaagtgcgagctggcgacctgcactccccgggaacctggagtggctggcggagacgtctgctcctccgactccttcaacgaggacatcgcggtcttcgccaagcaggttcgcgccgaaaagccacttttttcctcaaatccagagctggacaatttgatgatacaagcaatacaagtactaaggtttcatcttttggagttagaaaaggtccacgaactgtgcgataacttctgccaccgatacattagctgtttgaaggggaaaatgcccatcgacctcgtcattgatgaaagagacggcagctccaagtcagatcatgaagaactttcaggctcctccacaaatctcgctgaccataacccttcttcttggcgagaccacgatgatgcaacctcaacccactcagcaggcaccccagggccctccagtgggggccatgcttcccagagcggagacaacagcagtgagcaaggggatggtttagacaacagtgtagcttcacctggtacaggtgacgatgatgatccggataaggacaaaaaacgccagaagaaaagaggcattttccccaaagtagcaacaaatatcatgagagcatggctcttccagcatctcacacatccgtacccttccgaagagcagaagaaacagttagcgcaagacacaggacttacaattctccaagtaaacaactggtttattaatgccagaagaagaatagtacagcccatgattgaccagtcaaatcgagcagtgagccaaggagcagcatatagtccagagggtcagcccatggggagctttgtgttggatggtcagcaacacatggggatccggcctgcaggacctatgagtggaatgggcatgaatatgggcatggatgggcaatggcactacatgtaaccttcatcatgtaaagcaatcgcaaagcaagggggaagtttgcagagcatgccaggggactacgtttctcagggtggtcctatgggaatgagtatggcacagccaagttacactcctccccagatgaccccacaccctactcaattaagacatggacccccaatgcattcatatttgccaagccatccccaccacccagccatgatgatgcacggaggaccccctacccaccctggaatgactatgtcagcacagagccccacaatgttaaattctgtagatcccaatgttggcggacaggttatggacattcatgcccaatagtataagggaactcaagggaaaaggaaacacacgcaaaaactattttaagactttctgaactttgaccagatgttgacacttaatatgaaattccagacagctgtgattattttttacttttgtcatttttcatcaagcaacagaggaccaatgcaacaagaacacaaatgtgaaatcatgggctgactgagacaattctgtccatgtaaagatcctctggaaaaagactccgagagttataactactgtagtataaatataggaactaagttaaacttgtacatttctgttgatcacgccgttatgttgcctcaaatagttttag

SEQ ID NO: 12410 - DNA, 2917 bp, Homo sapiens
  source 1..2917: mol_type = unassigned DNA
ggctcggcgcggcgcgctcctcctcgctcccgctccccactcccgggatgtgtctccgccgtacgacgggctatggccaccacgacttccgggttccgtcatttcgttctcccgccgccgacccgcgccgccaaactgaggctcttcaataagccaggcagcagccaacctgccaacacctactgacactcactcatctcccagagagagaaagagagcgagagagagcgagcgcgagagagcgagcgcgagtgagagcgagcgagcgagcgagaaagagagagagggagagacaaaatacctaccaggaaagggggggaggaagtccaatttttgcaaactattcatttttttttcttgatttttctcactgctttctttgaacaatactttaaagagagaggatcgtattatagataccgcgggggcaaagctaaaaaaggggggaggggggaggaaaaaattcaagaagcagaaacccctcgcggagttttactggaagaaaaaaacgggtctgaaagattcctcctcttcatcatcatcaaccatcattcattcactaccttgacattccgggctttgattgacagctggagtggcaaaaagccatgaaacacgacagttcggttacatgtgggctgctgacgggccgctcgtaaccttcagttcgggggcttgacaatttttttcttctttttcttctttttcttttctttctttttttttccaactgaggggaagagaagagaaagagggggaaaggaggaccgaagaggaggaggaggggaggggggaggaggaggaggtggaggaggaggaggaagatcaggaggaggaggaagaagaggaaaaaagagaaaaagaagaaatatcacagaaaaaaaaattcttcgttgtctagactgggctttttttcccccctaaaaaatagcatattggagaattgggagaagtctctttggtttggaaaaaaaaaaaaggaatcttcagcctagatcactttcttatccggactgggatattaaatatacgacacatccaggagtttattggagcgcagactgatggcgcaaaggtacgatgagctgccccattacggcgggatggacggagtaggggttcccgcttccatgtacggagaccctcacgcgccgcggccgatccccccggttcaccacctgaaccacgggccgccgctccacgccacacagcactacggcgcgcacgccccgcaccccaatgtcatgccggccagtatgggatccgctgtcaacgacgccttgaagcgggacaaggacgcgatctatgggcacccgttgtttcctctgttagctctggtctttgagaagtgcgagctggcgacctgcactccccgggaacctggagtggctggcggagacgtctgctcctccgactccttcaacgaggacatcgcggtcttcgccaagcaggttcgcgccgaaaagccacttttttcctcaaatccagagctggacaatttgatgatacaagcaatacaagtactaaggtttcatcttttggagttagaaaaggtccacgaactgtgcgataacttctgccaccgatacattagctgtttgaaggggaaaatgcccatcgacctcgtcattgatgaaagagacggcagctccaagtcagatcatgaagaactttcaggctcctccacaaatctcgctgaccataacccttcttcttggcgagaccacgatgatgcaacctcaacccactcagcaggcaccccagggccctccagtgggggccatgcttcccagagcggagacaacagcagtgagcaaggggatggtttagacaacagtgtagcttcacctggtacaggtgacgatgatgatccggataaggacaaaaaacgccagaagaaaagaggcattttccccaaagtagcaacaaatatcatgagagcatggctcttccagcatctcacacatccgtacccttccgaagagcagaagaaacagttagcgcaagacacaggacttacaattctccaagtaaacaactggtttattaatgccagaagaagaatagtacagcccatgattgaccagtcaaatcgagcaggttttcttcttgatccttcagtgagccaaggagcagcatatagtccagagggtcagcccatggggagctttgtgttggatggtcagcaacacatggggatccggcctgcaggacctatgagtggaatgggcatgaatatgggcatggatgggcaatggcactacatgtaaccttcatcatgtaaagcaatcgcaaagcaagggggaagtttgcagagcatgccaggggactacgtttctcagggtggtcctatgggaatgagtatggcacagccaagttacactcctccccagatgaccccacaccctactcaattaagacatggacccccaatgcattcatatttgccaagccatccccaccacccagccatgatgatgcacggaggaccccctacccaccctggaatgactatgtcagcacagagccccacaatgttaaattctgtagatcccaatgttggcggacaggttatggacattcatgcccaatagtataagggaactcaagggaaaaggaaacacacgcaaaaactattttaagactttctgaactttgaccagatgttgacacttaatatgaaattccagacagctgtgattattttttacttttgtcatttttcatcaagcaacagaggaccaatgcaacaagaacacaaatgtgaaatcatgggctgactgagacaattctgtccatgtaaagatcctctggaaaaagactccgagagttataactactgtagtataaatataggaactaagttaaacttgtacatttctgttgatcacgccgttatgttgcctcaaatagtttt

SEQ ID NO: 12411 - DNA, 541 bp, Homo sapiens
  source 1..541: mol_type = unassigned DNA
ctgtgtcctcgaatgaccacaatcaggttttcttcttgatccttcagtgagccaaggagcagcatatagtccagagggtcagcccatggggagctttgtgttggatggtcagcaacacatggggatccggcctgcaggtttgcagagcatgccaggggactacgtttctcagggtggtcctatgggaatgagtatggcacagccaagttacactcctccccagatgaccccacaccctactcaattaagacatggacccccaatgcattcatatttgccaagccatccccaccacccagccatgatgatgcacggaggaccccctacccaccctggaatgactatgtcagcacagagccccacaatgttaaattctgtagatcccaatgttggcggacaggttatggacattcatgcccaatagtataagggaactcaagggaaaaggaaacacacgcaaaaactattttaagactttctgaactttgaccagatgttgacacttaatatgaaattccagacagctgtgattattttttac

SEQ ID NO: 12412 - DNA, 554 bp, Homo sapiens
  source 1..554: mol_type = unassigned DNA
cgaatgaccacaatcaggttttcttcttgatccttcagtgagccaaggagcagcatatagtccagagggtcagcccatggggagctttgtgttggatggtcagcaacacatggggatccggcctgcaggacctatgagtggaatgggcatgaatatgggcatggatgggcaatggcactacatgtaaccttcatcatgtaaagcaatcgcaaagcaagggggaagtttgcagagcatgccaggggactacgtttctcagggtggtcctatgggaatgagtatggcacagccaagttacactcctccccagatgaccccacaccctactcaattaagacatggacccccaatgcattcatatttgccaagccatccccaccacccagccatgatgatgcacggaggaccccctacccaccctggaatgactatgtcagcacagagccccacaatgttaaattctgtagatcccaatgttggcggacaggttatggacattcatgcccaatagtataagggaactcaagggaaaaggaaacacacgcaaaaactat

SEQ ID NO: 12413 - DNA, 558 bp, Homo sapiens
  source 1..558: mol_type = unassigned DNA
gttgtcctctattagaaacttcaaggagaagagccttctctgaccctcctgagcatctctgctggtttcaaggtttattaatgccagaagaagaatagtacagcccatgattgaccagtcaaatcgagcagtgagccaaggagcagcatatagtccagagggtcagcccatggggagctttgtgttggatggtcagcaacacatggggatccggcctgcaggacctatgagtggaatgggcatgaatatgggcatggatgggcaatggcactacatgtaaccttcatcatgtaaagcaatcgcaaagcaagggggaagtttgcagagcatgccaggggactacgtttctcagggtggtcctatgggaatgagtatggcacagccaagttacactcctccccagatgaccccacaccctactcaattaagacatggacccccaatgcattcatatttgccaagccatccccaccacccagccatgatgatgcacggaggaccccctacccaccctggaatgactatgtcagcacagagccccacaatgttaaattctgt

SEQ ID NO: 12414 - DNA, 567 bp, Homo sapiens
  source 1..567: mol_type = unassigned DNA
tttatgaccagctgcaaggggaagctgggtctccctatcacggggagtctagggaaagggggaaagtcttccagcctgtgaactttaaccagattcctacttgtgcaagaagcagaagcacaatttgaagttaatagaagctttctcatggagaactttattccgtccctgagctcttctagcaagttgttttggagttgactacgcagtgacgacggagattacccagtcaactatttttgaacgctgaaagggaaaatcacctttaaattgaaaagataattttcagaagagatttgactgtattttgtgctcctcagcattcatgcaaaggtgttcgcagagtacagaaacggatgagccaaggagcagcatatagtccagagggtcagcccatggggagctttgtgttggatggtcagcaacacatggggatccggcctgcaggacctatgagtggaatgggcatgaatatgggcatggatgggcaatggcactacatgtaaccttcatcatgtaaagcaatcgcaaagcaagggggaagtttgcagagcatgccaggggact

SEQ ID NO: 12415 - DNA, 547 bp, Homo sapiens
  source 1..547: mol_type = unassigned DNA
tttcttctttctcctctgtgtcctcgaatgaccacaatcaggttttcttcttgatccttcagtgagccaaggagcagcatatagtccagagggtcagcccatggggagctttgtgttggatggtcagcaacacatggggatccggcctgcaggacctatgagtggaatgggcatgaatatgggcatggatgggcaatggcactacatgtaaccttcatcatgtaaagcaatcgcaaagcaagggggaagtaagtacagtcgggtgcgatctgtcttcactatcacttcagagactttattttattttttataatttgcccccattttatttttccttgcccataactgcatgcctttccaaactaaggacctgtttttaaatatatatcacccatctctgaagtcacagatgacactgatgtgcacttttgaaaaggccaactgacaagcctgcgtgtgttttaagcaggtgggactgccttttagcctatttactgtggccccaatgtgcacaaacacagacatcaggcagatattggacatttaa

SEQ ID NO: 12416 - DNA, 740 bp, Homo sapiens
  source 1..740: mol_type = unassigned DNA
tcagacagcctaattgatggctttgctgacctaacaataccttgtgaaagccgagtgctagagcctggtctccatttatgaccagctgcaaggggaagctgggtctccctatcacggggagtctagggaaagggggaaagtcttccagcctgtgaactttaaccagattcctacttgtgcaagaagcagaagcacaatttgaagttaatagaagctttctcatggagaactttattccgtccctgagctcttctagcaagttgttttggagttgactacgcagtgacgacggagattacccagtcaactatttttgaacgctgaaagggaaaatcacctttaaattgaaaagataattttcagaagagatttgactgtattttgtgctcctcagcattcatgcaaaggtgttcgcagagtacagaaacggagtatgatgactggacttctctgttctctttcaggtttattaatgccagaagaagaatagtacagcccatgattgaccagtcaaatcgagcaggttttcttcttgatccttcagtgagccaaggagcagcatatagtccagagggtcagcccatggggagctttgtgttggatggtcagcaacacatggggatccggcctgcaggacctatgagtggaatgggcatgaatatgggcatggatgggcaatggcactacatgtaaccttcatcatgtaaagcaatcgcaaagcaagggggaagtaagtacag

SEQ ID NO: 12417 - DNA, 1442 bp, Homo sapiens
  source 1..1442: mol_type = unassigned DNA
aggaggaggaggaagatcaggaggaggaggaagaagaggaaaaaagagaaaaagaagaaatatcacagaaaaaaaaattcttcgttgtctagactgggctttttttcccccctaaaaaatagcatattggagaattgggagaagtctctttggtttggaaaaaaaaaaaaggaatcttcagcctagatcactttcttatccggactgggatattaaatatacgacacatccaggagtttattggagcgcagactgatggcgcaaaggtacgatgagctgccccattacggcgggatggacggagtaggggttcccgcttccatgtacggagaccctcacgcgccgcggccgatccccccggttcaccacctgaaccacgggccgccgctccacgccacacagcactacggcgcgcacgccccgcaccccaatgtcatgccggccagtatgggatccgctgtcaacgacgccttgaagcgggacaaggacgcgatctatgggcacccgttgtttcctctgttagctctggtctttgagaagtgcgagctggcgacctgcactccccgggaacctggagtggctggcggagacgtctgctcctccgactccttcaacgaggacatcgcggtcttcgccaagcaggttcgcgccgaaaagccacttttttcctcaaatccagagctggacaatttgatgatacaagcaatacaagtactaaggtttcatcttttggagttagaaaaggtccacgaactgtgcgataacttctgccaccgatacattagctgtttgaaggggaaaatgcccatcgacctcgtcattgatgaaagagacggcagctccaagtcagatcatgaagaactttcaggctcctccacaaatctcgctgaccataacccttcttcttggcgagaccacgatgatgcaacctcaacccactcagcaggcaccccagggccctccagtgggggccatgcttcccagagcggagacaacagcagtgagcaaggggatggtttagacaacagtgtagcttcacctggtacaggtgacgatgatgatccggataaggacaaaaaacgccagaagaaaagaggcattttccccaaagtagcaacaaatatcatgagagcatggctcttccagcatctcacacatccgtacccttccgaagagcagaagaaacagttagcgcaagacacaggacttacaattctccaagtaaacaactggtttattaatgccagaagaagaatagtacagcccatgattgaccagtcaaatcgagcagtgagccaaggagcagcatatagtccagagggtcagcccatggggagctttgtgttggatggtcagcaacacatggggatccggcctgcaggacctatgagtggaatgggcatgaatatgggcatggatgggcaatggcactacatgtaacc

SEQ ID NO: 12418 - DNA, 561 bp, Homo sapiens
  source 1..561: mol_type = unassigned DNA
acttgtccacttgagggcttgacaggcagctaacagctggcctgctagactgtatgggagaatcagcctacatcttcttctgagcagatgacaagctaatcagagacatatccatagcacagggcatgtccccggtcactgagctacctacgcctttccccagttgatctgatctctcttcaacggttcagtccccttccctgcgcaaagcaatccatgcagaatcttcaattccagctattcttgattcctcctcagagtgttcagggatggcagctttccagtatccaaagaaatgacctttgagtgaacctctaaccttccccaaacttcaaggagaagagccttctctgaccctcctgagcatctctgctggtttcaaggtttattaatgccagaagaagaatagtacagcccatgattgaccagtcaaatcgagcagtgagccaaggagcagcatatagtccagagggtcagcccatggggagctttgtgttggatggtcagcaacacatggggatccggcctgcaggacctatgagtggaatgggcatgaatatg

SEQ ID NO: 12419 - DNA, 705 bp, Homo sapiens
  source 1..705: mol_type = unassigned DNA
gaaggatttcgctggatgatacaagcaatacaagtactaaggtttcatcttttggagttagaaaaggtccacgaactgtgcgataacttctgccaccgatacattagctgtttgaaggggaaaatgcccatcgacctcgtcattgatgaaagagacggcagctccaagtcagatcatgaagaactttcaggctcctccacaaatctcgctgaccataacccttcttcttggcgagaccacgatgatgcaacctcaacccactcagcaggcaccccagggccctccagtgggggccatgcttcccagagcggagacaacagcagtgagcaaggggatggtttagacaacagtgtagcttcacctggtacaggtgacgatgatgatccggataaggacaaaaaacgccagaagaaaagaggcattttccccaaagtagcaacaaatatcatgagagcatggctcttccagcatctcacacatccgtacccttccgaagagcagaagaaacagttagcgcaagacacaggacttacaattctccaagtaaacaactggtttattaatgccagaagaagaatagtacagcccatgattgaccagtcaaatcgagcagtgagccaaggagcagcatatagtccagagggtcagcccatggggagctttgtgttggatggtcagcaacacatggggatccggcctgcaggt

SEQ ID NO: 12420 - DNA, 1643 bp, Homo sapiens
  source 1..1643: mol_type = unassigned DNA
ttttcctcacaacttttaactccgttgttttggctggtttggtttctgtgtgctcaacttgtgctcggtacttttctcctttctgactttgtttttatttttattttctctctctctctctctctctctctctctctctctctctctctctccccctctcctccttttcctcctcctcctctcttctctcttacctccctccctctctctcatctttatcccttcctctcttttctgttcgccctcttctccctgctctttttccctttccacccccctcctctgttctccctcacctcctgcgccccctcccccttcccgggttctgacagtacgatgagctgccccattacggcgggatggacggagtaggggttcccgcttccatgtacggagaccctcacgcgccgcggccgatccccccggttcaccacctgaaccacgggccgccgctccacgccacacagcactacggcgcgcacgccccgcaccccaatgtcatgccggccagtatgggatccgctgtcaacgacgccttgaagcgggacaaggacgcgatctatgggcacccgttgtttcctctgttagctctggtctttgagaagtgcgagctggcgacctgcactccccgggaacctggagtggctggcggagacgtctgctcctccgactccttcaacgaggacatcgcggtcttcgccaagcaggttcgcgccgaaaagccacttttttcctcaaatccagagctggacaatttgatgatacaagcaatacaagtactaaggtttcatcttttggagttagaaaaggtccacgaactgtgcgataacttctgccaccgatacattagctgtttgaaggggaaaatgcccatcgacctcgtcattgatgaaagagacggcagctccaagtcagatcatgaagaactttcaggctcctccacaaatctcgctgaccataacccttcttcttggcgagaccacgatgatgcaacctcaacccactcagcaggcaccccagggccctccagtgggggccatgcttcccagagcggagacaacagcagtgagcaaggggatggtttagacaacagtgtagcttcacctggtacaggtgacgatgatgatccggataaggacaaaaaacgccagaagaaaagaggcattttccccaaagtagcaacaaatatcatgagagcatggctcttccagcatctcacagtaagtcaagatgaaagagaaaaaaaaaatagtttttgttgttttgctagcaagttatacggtctcatactgatttttttttaaactaaggtgcctattttcttattcttgaaatctgatgactaacagactagttaaagttttttttttcatcaactattaccatccaaagagcaccctctagaaagtagcaggtttttgttttaagaagctgggaatggactttatttaaaatgatctaagaccctaaacagcatatataagtaaatttgttatttatgctaaaagtatgagagcaacttcggatactgcaacagcaaccaagggaaatggctgtaaggagctcacaaatccataaacgttgctgattacactgttaacgaaagctgtctcctctaggaggccaaaaaaaaaaaaaaaaaa

SEQ ID NO: 12421 - DNA, 545 bp, Homo sapiens
  source 1..545: mol_type = unassigned DNA
atacaagtactaaggtttcatcttttggagttagaaaaggtccacgaactgtgcgataacttctgccaccgatacattagctgtttgaaggggaaaatgcccatcgacctcgtcattgatgaaagagacggcagctccaagtcagatcatgaagaactttcaggctcctccacaaatctcgctgaccataacccttcttcttggcgagaccacgatgatgcaacctcaacccactcagcaggcaccccagggccctccagtgggggccatgcttcccagagcggagacaacagcagtgagcaagaatttttcagatttatccccattttccagatgaagtggcttggccttggagagggtcagttacttgactgtcacgatagaaagaggaagcagaagaatgaagacaaagccatttaaaattttcttgttctttaccttttgcataaaaggtattcagttcacaaatgatgtaaaatttaattaaggcaagtgactgtcctgagaaagtcattaaaaccctcatgtcatttctctaatcaaaa

SEQ ID NO: 12422 - DNA, 565 bp, Homo sapiens
  source 1..565: mol_type = unassigned DNA
atttaattccctggactcccactctgaacccagttatttccagtcctgtttctttctctctctattgtaacttgttgctcagagaagtctctggagaataatatctgctgcaacaattactctattgtttccttgccttcaactattacaccctttaattagagttagtttggaagacatcacactgttgctctttgcaaatgtaaccttgcaacctggtatttttcctttctaaaaatgaaacaaaacaacaacaacaacaacatgagctaaaccctccaccatgaccttcgttctaggtccacgaactgtgcgataacttctgccaccgatacattagctgtttgaaggggaaaatgcccatcgacctcgtcattgatgaaagagacggcagctccaagtcagatcatgaagaactttcaggctcctccacaaatctcgctgaccataacccttcttcttggcgagaccacgatgatgcaacctcaacccactcagcaggcaccccagggccctccagtgggggccatgcttcccagagcggagacaacagcagtgagcaagg

SEQ ID NO: 12423 - DNA, 605 bp, Homo sapiens
  source 1..605: mol_type = unassigned DNA
ggaagatggctggaaattattttatattctgagagcacttggcgaggggtgagatgcacgatcctaacgtgtaccacacgagctcttccggctgagggcacccgttgtttcctctgttagctctggtctttgagaagtgcgagctggcgacctgcactccccgggaacctggagtggctggcggagacgtctgctcctccgactccttcaacgaggacatcgcggtcttcgccaagcaggttcgcgccgaaaagccacttttttcctcaaatccagagctggacaatttgatgatacaagcaatacaagtactaaggtttcatcttttggagttagaaaaggtccacgaactgtgcgataacttctgccaccgatacattagctgtttgaaggggaaaatgcccatcgacctcgtcattgatgaaagagacggcagctccaagtcagatcatgaagaactttcaggctcctccacaaatctcgctgaccataacccttcttcttggcgagaccacgatgatgcaacctcaacccactcagcaggcaccccagggccctccagtgggggccatgcttcccagagcggagacaacagcagtgagcaa

SEQ ID NO: 12424 - DNA, 1088 bp, Homo sapiens
  source 1..1088: mol_type = unassigned DNA
tgactgcctcctcacttcctccctcccgattccgccgcggcccccaaagactctcggggtggccccttgtccgcaccgcttggagggagtgtgctctgagttaagctggtctcttctggtcctggaaaaaaatgagtattgacaaggttgctggatctgcgcagaaaagaaagtgccacttaataaaaaatttagcccggcagtggtaccgtctgcagagcttgctgcccttggacgttagcaggaagccttcggggtgctgtaatcggcgggcagaggagagggaggccgcggaattaaaaggaacaaaagctagagcgccatgccaaacgtccccggcaagacccagttaggcaggagccgggagtgatgggaaaatgaactagaatacgatgagctgccccattacggcgggatggacggagtaggggttcccgcttccatgtacggagaccctcacgcgccgcggccgatccccccggttcaccacctgaaccacgggccgccgctccacgccacacagcactacggcgcgcacgccccgcaccccaatgtcatgccggccagtatgggatccgctgtcaacgacgccttgaagcgggacaaggacgcgatctatggctctggtctttgagaagtgcgagctggcgacctgcactccccgggaacctggagtggctggcggagacgtctgctcctccgactccttcaacgaggacatcgcggtcttcgccaagcaggttcgcgccgaaaagccacttttttcctcaaatccagagctggacaatttgatgatacaagcaatacaagtactaaggtttcatcttttggagttagaaaaggtccacgaactgtgcgataacttctgccaccgatacattagctgtttgaaggggaaaatgcccatcgacctcgtcattgatgaaagagacggcagctccaagtcagatcatgaagaactttcaggctcctccacaaatctcgctgaccataacccttcttcttggcgagaccacgatgatgcaacctcaacccactcagcaggcaccccagggccctccagtgggggccatgcttcccagagcgga

SEQ ID NO: 12425 - DNA, 552 bp, Homo sapiens
  source 1..552: mol_type = unassigned DNA
gttgattacagttcttgctccttcccctctgcaccccgtctctgtgtgtgtgtctctgcgtggcgctgcccgttaggcacccgttgtttcctctgttagctctggtctttgagaagtgcgagctggcgacctgcactccccgggaacctggagtggctggcggagacgtctgctcctccgactccttcaacgaggacatcgcggtcttcgccaagcaggttcgcgccgaaaagccacttttttcctcaaatccagagctggacaatttgatgatacaagcaatacaagtactaaggtttcatcttttggagttagaaaaggtccacgaactgtgcgataacttctgccaccgatacattagctgtttgaaggggaaaatgcccatcgacctcgtcattgatgaaagagacggcagctccaagtcagatcatgaagaactttcaggctcctccacaaatctcgctgaccataacccttcttcttggcgagaccacgatgatgcaacctcaacccactcagcaggcaccccagggccctccagtgggggccatg

SEQ ID NO: 12426 - DNA, 552 bp, Homo sapiens
  source 1..552: mol_type = unassigned DNA
ctatctgttcctctggcccagtccgctctctacgcctcctccccatccctgagcctgggggcgaattggaagtggagataaatatgggtgtttgttttcccccccagcaggaatacaggggtcgaccctcgaattaaagttgacctgctcctaatctggggcttggcctttttcccccgcctccagctacttgaacaagaattggggagaggggctgtgagggacccgggagtgcccgggaggcaaggaagctgggcgcctctccgagcggtcccaggcagcagtggagagccacagcctcttggactgctggatatggaactcgaggccctgagaacgaccctgagttcctggctacagcttagtcgtaccaggtcccccttaatggggccaggaccagaatgccctgattcttcttcagggactccactaatttaaggttcgcgccgaaaagccacttttttcctcaaatccagagctggacaatttgatgatacaagcaatacaagtactaaggtttcatcttttggagttagaaaaggtaagcaggaa

SEQ ID NO: 12427 - DNA, 3056 bp, Homo sapiens
  source 1..3056: mol_type = unassigned DNA
ttggctacatcggacccagatgactgcctcctcacttcctccctcccgattccgccgcggcccccaaagactctcggggtggccccttgtccgcaccgcttggagggagtgtgctctgagttaagctggtctcttctggtcctggaaaaaaatgagtattgacaaggttgctggatctgcgcagaaaagaaagtgccacttaataaaaaatttagcccggcagtggtaccgtctgcagagcttgctgcccttggacgttagcaggaagccttcggggtgctgtaatcggcgggcagaggagagggaggccgcggaattaaaaggaacaaaagctagagcgccatgccaaacgtccccggcaagacccagttaggcaggagccgggagtgatgggaaaatgaactagaatacgatgagctgccccattacggcgggatggacggagtaggggttcccgcttccatgtacggagaccctcacgcgccgcggccgatccccccggttcaccacctgaaccacgggccgccgctccacgccacacagcactacggcgcgcacgccccgcaccccaatgtcatgccggccagtatgggatccgctgtcaacgacgccttgaagcgggacaaggacgcgatctatgggcacccgttgtttcctctgttagctctggtctttgagaagtgcgagctggcgacctgcactccccgggaacctggagtggctggcggagacgtctgctcctccgactccttcaacgaggacatcgcggtcttcgccaagcaggttcgcgccgaaaagccacttttttcctcaaatccagagctggacaatttgatgatacaagcaatacaagtactaaggtttcatcttttggagttagaaaaggtccacgaactgtgcgataacttctgccaccgatacattagctgtttgaaggggaaaatgcccatcgacctcgtcattgatgaaagagacggcagctccaagtcagatcatgaagaactttcaggctcctccacaaatctcgctgaccataacccttcttcttggcgagaccacgatgatgcaacctcaacccactcagcaggcaccccagggccctccagtgggggccatgcttcccagagcggagacaacagcagtgagcaaggggatggtttagacaacagtgtagcttcacctggtacaggtgacgatgatgatccggataaggacaaaaaacgccagaagaaaagaggcattttccccaaagtagcaacaaatatcatgagagcatggctcttccagcatctcacacatccgtacccttccgaagagcagaagaaacagttagcgcaagacacaggacttacaattctccaagtaaacaactggtttattaatgccagaagaagaatagtacagcccatgattgaccagtcaaatcgagcagtgagccaaggagcagcatatagtccagagggtcagcccatggggagctttgtgttggatggtcagcaacacatggggatccggcctgcaggacctatgagtggaatgggcatgaatatgggcatggatgggcaatggcactacatgtaaccttcatcatgtaaagcaatcgcaaagcaagggggaagtttgcagagcatgccaggggactacgtttctcagggtggtcctatgggaatgagtatggcacagccaagttacactcctccccagatgaccccacaccctactcaattaagacatggacccccaatgcattcatatttgccaagccatccccaccacccagccatgatgatgcacggaggaccccctacccaccctggaatgactatgtcagcacagagccccacaatgttaaattctgtagatcccaatgttggcggacaggttatggacattcatgcccaatagtataagggaactcaagggaaaaggaaacacacgcaaaaactattttaagactttctgaactttgaccagatgttgacacttaatatgaaattccagacagctgtgattattttttacttttgtcatttttcatcaagcaacagaggaccaatgcaacaagaacacaaatgtgaaatcatgggctgactgagacaattctgtccatgtaaagatcctctggaaaaagactccgagagttataactactgtagtataaatataggaactaagttaaacttgtacatttctgttgatcacgccgttatgttgcctcaaatagttttagaagagaaaaaaaaatatatccttgttttccacactatgtgtgttgttcccaaaagaatgactgttttggttcatcagtgaattcaccatccaggagagactgtggtatatattttaaacctgttgggccaatgagaaaagaaccacactggagatcatgatgaacttttggctgaacctcatcactcgaactccagcttcaagaatgtgttttcatgcccggcctttgttcctccataaatgtgtcctttagtttcaaacagatctttatagttcgtgcttcataagccaattcttattattatttttgggggactcttcttcaaagagcttgccaatgaagatttaaagacagagcaggagcttcttccaggagttctgagccttggttgtggacaaaacaatcttaagttgggcagctttcctcaacacaaaaaaaagttattaatggtcattgaaccataactaggactttatcagaaactcaaagcttgggggataaaaaggagcaagagaatactgtaacaaacttcgtacagagttcggtctattaattgtttcatgttagatattctatgtgtttacctcaattgaaaaaaaaaagaatgtttttgctagtatcagatctgctgtggaattggtattgtatgtccatgaattcttcttttctcagcacgtgttcctcactagaagaaaatgctgttacctttaagctttgtcaaatttacattaaaatacttgtatgaggactgtgacgttatgttaaaaaaaaaaaggtgttaagtcacaaaaagcggtaataaatatttcatttttgattttttgtt

SEQ ID NO: 12428 - DNA, 2195 bp, Homo sapiens
  source 1..2195: mol_type = unassigned DNA
actctcctcctcctttctgcctctctgtccccctctctctgtccctggtctcccccctctttctgcctctctatccccctctctctgccctcccccacccgcagtctctctcctctgttcctgggcttcctcctccatctcagccgcccgcacctcaccgtccccccttttttctgctctcctccgtccttcccttcgctctacttttgttccaagccgcccctgcctctccagggctaggagtgggacaggggtgggagaggtggtctcaccaggctgctggccccacggagcctgtctccctggggatgggaacggggatagaagacaggggaggaggcgcgcgcccgttttgggggttccgggtaggctgtgaggaccgcttttggtgagagtgccttgagcagcggggagcagttggattcaacttcagggcacaggagaagttaggagaagagggagagggaaagagtgggacacacagaaccagggtgcccagccaggcgagggtccgaggcaggaacgttctagcctcttcccgtgcgagtcctgctgcctctttgagcctccgtgtcttcatcactgaggaagggatttgacctgatgagaggaaggtgcccctggcttcccagtatgatgagctgccgcactacccaggcatcgtggatggccccgcagccctggctagcttcccagagacagtgcccgcagtaccagggccctatggcccgcaccggcctccccagcccctgcccccaggcttggacagcgacggcctgaagagggagaaggatgagatctatggacacccgctcttccccctcttggccctggtctttgagaaatgtgaactggctacatgctctccccgtgacggggccggagctgggctggggacaccccctggaggtgacgtctgctcctctgattccttcaacgaggacatcgctgcctttgccaagcaggttcgctctgagaggcccctcttctcctccaacccagaactggacaatctgatgatccaggccatccaggtgctgcggttccacctgctggagctggagaaggtccacgacctgtgcgacaacttctgtcaccgctacatcacctgcctcaagggaaagatgcccatcgacctggtcatcgaggatcgggacggcggctgcagggaggacttcgaggactacccagcctcctgccccagcctcccagaccagaataatatgtggattcgagaccatgaggatagtgggtctgtacatttggggaccccaggtccatccagtgggggcctggcctcccagagtggggacaactccagtgaccaaggagacgggctggacaccagcgtggcctctcccagttctggtggagaagatgaggacttggaccaggagcgacggcgaaacaagaagagggggatcttccccaaggtggccaccaacatcatgcgagcctggttgttccagcacctctcgcacccgtacccctcggaggagcagaagaaacagctggcgcaggacacggggctcaccatcctgcaagtcaacaactggttcattaacgcccggagacgcatcgtgcaacctatgatcgatcaatccaaccgcacagggcagggtgcagccttcagcccagagggccagcccatcgggggctataccgagacgcagccacacgtggccgtccggcctccgggatcagtggggatgagtttgaacttggaaggagaatggcattatctatagaggctgatgcaggagagacccagcctccggctgtgacccccagcctcacacctgcctctggttcccgcctggtcctccagcttcaggaccccacctccaaaggcccctctgctcaatgcctacctccctagggccctgctgggacatgggggcctgagtgcccatccaagggctctcaaggacaccggcaaggcctccaggccctgagccccacttctgccttcacctctgcctgggacccgagctgggctcctgggccttggtccccagaagatggcggctagggcctcgccgccaggacagagaagggacggggtggctgggcagtcagggaaggagggtcgcccggatccgacattttggagagattccttcactctcctgtcccccctacctcccttctctaatttcttcttttttttaatgataaagtcttaaaaacacgga

SEQ ID NO: 12429 - DNA, 1758 bp, Homo sapiens
  source 1..1758: mol_type = unassigned DNA
atgcgctcctggccgtgacccccgctgggggcgggggccggggtccatgcgcggagtccccacccggcccggcgcctgccgctgacggcggcgggggtgggggggcgcgcgcctggcctcctgcccaccccctggcgtcaacaccgcgggccgtcaggggctgcggccccgggctgcgccctcccccgcggccaggctctggagggacccaggagctgccgccggcctcagcccatggcccggaggtatgatgagctgccgcactacccaggcatcgtggatggccccgcagccctggctagcttcccagagacagtgcccgcagtaccagggccctatggcccgcaccggcctccccagcccctgcccccaggcttggacagcgacggcctgaagagggagaaggatgagatctatggacacccgctcttccccctcttggccctggtctttgagaaatgtgaactggctacatgctctccccgtgacggggccggagctgggctggggacaccccctggaggtgacgtctgctcctctgattccttcaacgaggacatcgctgcctttgccaagcaggttcgctctgagaggcccctcttctcctccaacccagaactggacaatctgatgatccaggccatccaggtgctgcggttccacctgctggagctggagaagggaaagatgcccatcgacctggtcatcgaggatcgggacggcggctgcagggaggacttcgaggactacccagcctcctgccccagcctcccagaccagaataatatgtggattcgagaccatgaggatagtgggtctgtacatttggggaccccaggtccatccagtgggggcctggcctcccagagtggggacaactccagtgaccaaggagacgggctggacaccagcgtggcctctcccagttctggtggagaagatgaggacttggaccaggagcgacggcgaaacaagaagagggggatcttccccaaggtggccaccaacatcatgcgagcctggttgttccagcacctctcgcacccgtacccctcggaggagcagaagaaacagctggcgcaggacacggggctcaccatcctgcaagtcaacaactggttcattaacgcccggagacgcatcgtgcaacctatgatcgatcaatccaaccgcacagggcagggtgcagccttcagcccagagggccagcccatcgggggctataccgagacgcagccacacgtggccgtccggcctccgggatcagtggggatgagtttgaacttggaaggagaatggcattatctatagaggctgatgcaggagagacccagcctccggctgtgacccccagcctcacacctgcctctggttcccgcctggtcctccagcttcaggaccccacctccaaaggcccctctgctcaatgcctacctccctagggccctgctgggacatgggggcctgagtgcccatccaagggctctcaaggacaccggcaaggcctccaggccctgagccccacttctgccttcacctctgcctgggacccgagctgggctcctgggccttggtccccagaagatggcggctagggcctcgccgccaggacagagaagggacggggtggctgggcagtcagggaaggagggtcgcccggatccgacattttggagagattccttcactctcctgtcccccctacctcccttctctaatttcttcttttttttaatgataaagtcttaaaaacacgga

SEQ ID NO: 12430 - DNA, 2104 bp, Homo sapiens
  source 1..2104: mol_type = unassigned DNA
gaccgggaacggggagcgcggctgccagcacccctgagccgccgccggaccctccgtcgccccgggccgccccccgccccctgcggtccccggtgtgtccgtctcgggacggttcgattccctccagagccggggaagggacggggggggcccagaggagggggcctcgggcgccccgcctgcgcctgctgcccccgccccggcggcgatgcgctcctggccgtgacccccgctgggggcgggggccggggtccatgcgcggagtccccacccggcccggcgcctgccgctgacggcggcgggggtgggggggcgcgcgcctggcctcctgcccaccccctggcgtcaacaccgcgggccgtcaggggctgcggccccgggctgcgccctcccccgcggccaggctctggagggacccaggagctgccgccggcctcagcccatggcccggaggtatgatgagctgccgcactacccaggcatcgtggatggccccgcagccctggctagcttcccagagacagtgcccgcagtaccagggccctatggcccgcaccggcctccccagcccctgcccccaggcttggacagcgacggcctgaagagggagaaggatgagatctatggacacccgctcttccccctcttggccctggtctttgagaaatgtgaactggctacatgctctccccgtgacggggccggagctgggctggggacaccccctggaggtgacgtctgctcctctgattccttcaacgaggacatcgctgcctttgccaagcaggttcgctctgagaggcccctcttctcctccaacccagaactggacaatctgatgatccaggccatccaggtgctgcggttccacctgctggagctggagaagggaaagatgcccatcgacctggtcatcgaggatcgggacggcggctgcagggaggacttcgaggactacccagcctcctgccccagcctcccagaccagaataatatgtggattcgagaccatgaggatagtgggtctgtacatttggggaccccaggtccatccagtgggggcctggcctcccagagtggggacaactccagtgaccaaggagacgggctggacaccagcgtggcctctcccagttctggtggagaagatgaggacttggaccaggagcgacggcgaaacaagaagagggggatcttccccaaggtggccaccaacatcatgcgagcctggttgttccagcacctctcgagacgctcagaagcgccggttctcccagacgtctgcctgggcctgggctccccatcccccggaccccggtgggccagaccttggggttcagactgcggccggccaggcaggcagagtgactcttgctggtggctgcagcacccgtacccctcggaggagcagaagaaacagctggcgcaggacacggggctcaccatcctgcaagtcaacaactggttcattaacgcccggagacgcatcgtgcaacctatgatcgatcaatccaaccgcacagggcagggtgcagccttcagcccagagggccagcccatcgggggctataccgagacgcagccacacgtggccgtccggcctccgggatcagtggggatgagtttgaacttggaaggagaatggcattatctatagaggctgatgcaggagagacccagcctccggctgtgacccccagcctcacacctgcctctggttcccgcctggtcctccagcttcaggaccccacctccaaaggcccctctgctcaatgcctacctccctagggccctgctgggacatgggggcctgagtgcccatccaagggctctcaaggacaccggcaaggcctccaggccctgagccccacttctgccttcacctctgcctgggacccgagctgggctcctgggccttggtccccagaagatggcggctagggcctcgccgccaggacagagaagggacggggtggctgggcagtcagggaaggagggtcgcccggatccgacattttggagagattccttcactctcctgtcccccctacctcccttctctaatttcttcttttttttaatgataaagtcttaaaaacacgga

SEQ ID NO: 12431 - DNA, 1199 bp, Homo sapiens
  source 1..1199: mol_type = unassigned DNA
ccgcccccgtccctgagcacccccgccctgcccccgtgggtggccccccccagtaccccggtgcccccccaggtccacgacctgtgcgacaacttctgtcaccgctacatcacctgcctcaagggaaagatgcccatcgacctggtcatcgaggatcgggacggcggctgcagggaggacttcgaggactacccagcctcctgccccagcctcccagaccagaataatatgtggattcgagaccatgaggatagtgggtctgtacatttggggaccccaggtccatccagtgggggcctggcctcccagagtggggacaactccagtgaccaaggagacgggctggacaccagcgtggcctctcccagttctggtggagaagatgaggacttggaccaggagcgacggcgaaacaagaagagggggatcttccccaaggtggccaccaacatcatgcgagcctggttgttccagcacctctcgcacccgtacccctcggaggagcagaagaaacagctggcgcaggacacggggctcaccatcctgcaagtcaacaactggttcattaacgcccggagacgcatcgtgcaacctatgatcgatcaatccaaccgcacagggcagggtgcagccttcagcccagagggccagcccatcgggggctataccgagacgcagccacacgtggccgtccggcctccgggatcagtggggatgagtttgaacttggaaggagaatggcattatctatagaggctgatgcaggagagacccagcctccggctgtgacccccagcctcacacctgcctctggttcccgcctggtcctccagcttcaggaccccacctccaaaggcccctctgctcaatgcctacctccctagggccctgctgggacatgggggcctgagtgcccatccaagggctctcaaggacaccggcaaggcctccaggccctgagccccacttctgccttcacctctgcctgggacccgagctgggctcctgggccttggtccccagaagatggcggctagggcctcgccgccaggacagagaagggacggggtggctgggcagtcagggaaggagggtcgcccggatccgacattttggagagattccttcactctcctgtcccccctacctcccttctctaatttcttcttttttttaatgataaagtcttaaaaacacgg

SEQ ID NO: 12432 - DNA, 1883 bp, Homo sapiens
  source 1..1883: mol_type = unassigned DNA
ttatctgccaactgtgaaatgaaatagaagacagggaggcttcgtatgtgtactttgtgtacaacaatgcgcggttcctacaggaggtgtccatggatctccctctctgtctgtctctctctctgtctctgtcactgtcttctcacgccactttctccatctcttttccctcccagccagaccctgccgtctctccctctgggtcctcctgcccacatgtcaggaatctctgcctggacggggtcctcactccccaccgaggcagctccaggggacctggagggcttcaagcttgggggctcagacacctggggaccacagtatgatgagctgccgcactacccaggcatcgtggatggccccgcagccctggctagcttcccagagacagtgcccgcagtaccagggccctatggcccgcaccggcctccccagcccctgcccccaggcttggacagcgacggcctgaagagggagaaggatgagatctatggacacccgctcttccccctcttggccctggtctttgagaaatgtgaactggctacatgctctccccgtgacggggccggagctgggctggggacaccccctggaggtgacgtctgctcctctgattccttcaacgaggacatcgctgcctttgccaagcaggttcgctctgagaggcccctcttctcctccaacccagaactggacaatctgatgatccaggccatccaggtgctgcggttccacctgctggagctggagaaggtccacgacctgtgcgacaacttctgtcaccgctacatcacctgcctcaagggaaagatgcccatcgacctggtcatcgaggatcgggacggcggctgcagggaggacttcgaggactacccagcctcctgccccagcctcccagaccagaataatatgtggattcgagaccatgaggatagtgggtctgtacatttggggaccccaggtccatccagtgggggcctggcctcccagagtggggacaactccagtgaccaaggagacgggctggacaccagcgtggcctctcccagttctggtggagaagatgaggacttggaccaggagcgacggcgaaacaagaagagggggatcttccccaaggtggccaccaacatcatgcgagcctggttgttccagcacctctcgcacccgtacccctcggaggagcagaagaaacagctggcgcaggacacggggctcaccatcctgcaagtcaacaactggttcattaacgcccggagacgcatcgtgcaacctatgatcgatcaatccaaccgcacagggcagggtgcagccttcagcccagagggccagcccatcgggggctataccgagacgcagccacacgtggccgtccggcctccgggatcagtggggatgagtttgaacttggaaggagaatggcattatctatagaggctgatgcaggagagacccagcctccggctgtgacccccagcctcacacctgcctctggttcccgcctggtcctccagcttcaggaccccacctccaaaggcccctctgctcaatgcctacctccctagggccctgctgggacatgggggcctgagtgcccatccaagggctctcaaggacaccggcaaggcctccaggccctgagccccacttctgccttcacctctgcctgggacccgagctgggctcctgggccttggtccccagaagatggcggctagggcctcgccgccaggacagagaagggacggggtggctgggcagtcagggaaggagggtcgcccggatccgacattttggagagattccttcactctcctgtcccccctacctcccttctctaatttcttcttttttttaatgataaagtcttaaaaacacgg

SEQ ID NO: 12433 - DNA, 1918 bp, Homo sapiens
  source 1..1918: mol_type = unassigned DNA
ggggcgggggccggggtccatgcgcggagtccccacccggcccggcgcctgccgctgacggcggcgggggtgggggggcgcgcgcctggcctcctgcccaccccctggcgtcaacaccgcgggccgtcaggggctgcggccccgggctgcgccctcccccgcggccaggctctggagggacccaggagctgccgccggcctcagcccatggcccggaggtatgatgagctgccgcactacccaggcatcgtggatggccccgcagccctggctagcttcccagagacagtgcccgcagtaccagggccctatggcccgcaccggcctccccagcccctgcccccaggcttggacagcgacggcctgaagagggagaaggatgagatctatggacacccgctcttccccctcttggccctggtctttgagaaatgtgaactggctacatgctctccccgtgacggggccggagctgggctggggacaccccctggaggtgacgtctgctcctctgattccttcaacgaggacatcgctgcctttgccaagcaggttcgctctgagaggcccctcttctcctccaacccagaactggacaatctgatgatccaggccatccaggtgctgcggttccacctgctggagctggagaaggtccacgacctgtgcgacaacttctgtcaccgctacatcacctgcctcaagggaaagatgcccatcgacctggtcatcgaggatcgggacggcggctgcagggaggacttcgaggactacccagcctcctgccccagcctcccagaccagaataatatgtggattcgagaccatgaggatagtgggtctgtacatttggggaccccaggtccatccagtgggggcctggcctcccagagtggggacaactccagtgaccaaggagacgggctggacaccagcgtggcctctcccagttctggtggagaagatgaggacttggaccaggagcgacggcgaaacaagaagagggggatcttccccaaggtggccaccaacatcatgcgagcctggttgttccagcacctctcgagacgctcagaagcgccggttctcccagacgtctgcctgggcctgggctccccatcccccggaccccggtgggccagaccttggggttcagactgcggccggccaggcaggcagagtgactcttgctggtggctgcagcacccgtacccctcggaggagcagaagaaacagctggcgcaggacacggggctcaccatcctgcaagtcaacaactggttcattaacgcccggagacgcatcgtgcaacctatgatcgatcaatccaaccgcacagggcagggtgcagccttcagcccagagggccagcccatcgggggctataccgagacgcagccacacgtggccgtccggcctccgggatcagtggggatgagtttgaacttggaaggagaatggcattatctatagaggctgatgcaggagagacccagcctccggctgtgacccccagcctcacacctgcctctggttcccgcctggtcctccagcttcaggaccccacctccaaaggcccctctgctcaatgcctacctccctagggccctgctgggacatgggggcctgagtgcccatccaagggctctcaaggacaccggcaaggcctccaggccctgagccccacttctgccttcacctctgcctgggacccgagctgggctcctgggccttggtccccagaagatggcggctagggcctcgccgccaggacagagaagggacggggtggctgggcagtcagggaaggagggtcgcccggatccgacattttggagagattccttcactctcctgtcccccctacctcccttctctaatttcttcttttttttaatgataaagtcttaaaaacacg

SEQ ID NO: 12434 - DNA, 1060 bp, Homo sapiens
  source 1..1060: mol_type = unassigned DNA
aggaggcgtggtcaccagaactggagagaggagcagattgcttgacagcggctaagatttttggtagaagaatacagttaatctaaaaccacttggcagatttaacccaacgttaaactgaaaaacaaagaactgttactgcagtccatatggaataatatgtggattcgagaccatgaggatagtgggtctgtacatttggggaccccaggtccatccagtgggggcctggcctcccagagtggggacaactccagtgaccaaggagacgggctggacaccagcgtggcctctcccagttctggtggagaagatgaggacttggaccaggagcgacggcgaaacaagaagagggggatcttccccaaggtggccaccaacatcatgcgagcctggttgttccagcacctctcgcacccgtacccctcggaggagcagaagaaacagctggcgcaggacacggggctcaccatcctgcaagtcaacaactggttcattaacgcccggagacgcatcgtgcaacctatgatcgatcaatccaaccgcacagggcagggtgcagccttcagcccagagggccagcccatcgggggctataccgagacgcagccacacgtggccgtccggcctccggacccagcctccggctgtgacccccagcctcacacctgcctctggttcccgcctggtcctccagcttcaggaccccacctccaaaggcccctctgctcaatgcctacctccctagggccctgctgggacatgggggcctgagtgcccatccaagggctctcaaggacaccggcaaggcctccaggccctgagccccacttctgccttcacctctgcctgggacccgagctgggctcctgggccttggtccccagaagatggcggctagggcctcgccgccaggacagagaagggacggggtggctgggcagtcagggaaggagggtcgcccggatccgacattttggagagattccttcactctcctgtcccccctacctcccttctctaatttcttcttttttttaatgataaagtcttaaaaaca

SEQ ID NO: 12435 - DNA, 1715 bp, Homo sapiens
  source 1..1715: mol_type = unassigned DNA
atgcgcggagtccccacccggcccggcgcctgccgctgacggcggcgggggtgggggggcgcgcgcctggcctcctgcccaccccctggcgtcaacaccgcgggccgtcaggggctgcggccccgggctgcgccctcccccgcggccaggctctggagggacccaggagctgccgccggcctcagcccatggcccggaggtatgatgagctgccgcactacccaggcatcgtggatggccccgcagccctggctagcttcccagagacagtgcccgcagtaccagggccctatggcccgcaccggcctccccagcccctgcccccaggcttggacagcgacggcctgaagagggagaaggatgagatctatggacacccgctcttccccctcttggccctggtctttgagaaatgtgaactggctacatgctctccccgtgacggggccggagctgggctggggacaccccctggaggtgacgtctgctcctctgattccttcaacgaggacatcgctgcctttgccaagcaggttcgctctgagaggcccctcttctcctccaacccagaactggacaatctgatgatccaggccatccaggtgctgcggttccacctgctggagctggagaaggtccacgacctgtgcgacaacttctgtcaccgctacatcacctgcctcaagggaaagatgcccatcgacctggtcatcgaggatcgggacggcggctgcagggaggacttcgaggactacccagcctcctgccccagcctcccagaccagaataatatgtggattcgagaccatgaggatagtgggtctgtacatttggggaccccaggtccatccagtgggggcctggcctcccagagtggggacaactccagtgaccaaggagacgggctggacaccagcgtggcctctcccagttctggtggagaagatgaggacttggaccaggagcgacggcgaaacaagaagagggggatcttccccaaggtggccaccaacatcatgcgagcctggttgttccagcacctctcgcacccgtacccctcggaggagcagaagaaacagctggcgcaggacacggggctcaccatcctgcaagtcaacaactggttcattaacgcccggagacgcatcgtgcaacctatgatcgatcaatccaaccgcacagggcagggtgcagccttcagcccagagggccagcccatcgggggctataccgagacgcagccacacgtggccgtccggcctccgggatcagtggggatgagtttgaacttggaaggagaatggcattatctatagaggctgatgcaggagagacccagcctccggctgtgacccccagcctcacacctgcctctggttcccgcctggtcctccagcttcaggaccccacctccaaaggcccctctgctcaatgcctacctccctagggccctgctgggacatgggggcctgagtgcccatccaagggctctcaaggacaccggcaaggcctccaggccctgagccccacttctgccttcacctctgcctgggacccgagctgggctcctgggccttggtccccagaagatggcggctagggcctcgccgccaggacagagaagggacggggtggctgggcagtcagggaaggagggtcgcccggatccgacattttggagagattccttcactctcctgtcccccctacctccc

SEQ ID NO: 12436 - DNA, 1828 bp, Homo sapiens
  source 1..1828: mol_type = unassigned DNA
aggctctggagggacccaggagctgccgccggcctcagcccatggcccggaggtatgatgagctgccgcactacccaggcatcgtggatggccccgcagccctggctagcttcccagagacagtgcccgcagtaccagggccctatggcccgcaccggcctccccagcccctgcccccaggcttggacagcgacggcctgaagagggagaaggatgagatctatggacacccgctcttccccctcttggccctggtctttgagaaatgtgaactggctacatgctctccccgtgacggggccggagctgggctggggacaccccctggaggtgacgtctgctcctctgattccttcaacgaggacatcgctgcctttgccaagcaggttcgctctgagaggcccctcttctcctccaacccagaactggacaatctgatgatccaggccatccaggtgctgcggttccacctgctggagctggagaaggtccacgacctgtgcgacaacttctgtcaccgctacatcacctgcctcaagggaaagatgcccatcgacctggtcatcgaggatcgggacggcggctgcagggaggacttcgaggactacccagcctcctgccccagcctcccagaccagaataatatgtggattcgagaccatgaggatagtgggtctgtacatttggggaccccaggtccatccagtgggggcctggcctcccagagtggggacaactccagtgaccaaggagacgggctggacaccagcgtggcctctcccagttctggtggagaagatgaggacttggaccaggagcgacggcgaaacaagaagagggggatcttccccaaggtggccaccaacatcatgcgagcctggttgttccagcacctctcgagacgctcagaagcgccggttctcccagacgtctgcctgggcctgggctccccatcccccggaccccggtgggccagaccttggggttcagactgcggccggccaggcaggcagagtgactcttgctggtggctgcagcacccgtacccctcggaggagcagaagaaacagctggcgcaggacacggggctcaccatcctgcaagtcaacaactggttcattaacgcccggagacgcatcgtgcaacctatgatcgatcaatccaaccgcacagggcagggtgcagccttcagcccagagggccagcccatcgggggctataccgagacgcagccacacgtggccgtccggcctccgggatcagtggggatgagtttgaacttggaaggagaatggcattatctatagaggctgatgcaggagaggtgtgagggtctaagggctggggattgtgcaattctcaaacctccattagacctcaggactccaagagtgggcacttccagagtagtgggtcagcctgggtccctgtactgtgggttctctgaggcttgatgggaagatattcatccatctgtccgtccgtccatccatccatccatccatccatcctcctcctccatgtatccatccatctacccactcactcacccatccatatctttatccatccgttactcaattactcattcacccgcaatccatccatccaaacctagtccacccacctacccactcattacccatctgaccacacattcacccactcactccattcatctctccactcgccaacccactcatccatctacctccacactgaccaaccacccacacatctacccatttatctgtgcattcacccacctccctacccaggcttccacccacctacccatcaactcacccatccatccacccacacatcc

SEQ ID NO: 12437 - DNA, 378 bp, Homo sapiens
  source 1..378: mol_type = unassigned DNA
ttccccaaggtggccaccaacatcatgcgagcctggttgttccagcacctctcggcgggggctggcaggcatgtaattgccccaagcctgaggctcccttggtctccatcctggggagcgcagagacgctcagaagcgccggttctcccagacgtctgcctgggcctgggctccccatcccccggaccccggtgggccagaccttggggttcagactgcggccggccaggcaggcagagtgactcttgctggtggctgcagcacccgtacccctcggaggagcagaagaaacagctggcgcaggacacggggctcaccatcctgcaagtcaacaactggttcattaacgcccggagacgcatcgtgcaacctatgatc

SEQ ID NO: 12438 - DNA, 532 bp, Homo sapiens
  source 1..532: mol_type = unassigned DNA
ccggcctctctcttccctcccaggttcgctctgagaggcccctcttctcctccaacccagaactggacaatctgggaaagatgcccatcgacctggtcatcgaggatcgggacggcggctgcagggaggacttcgaggactacccagcctcctgccccagcctcccagaccagaataatatgtggattcgagaccatgaggatagtgggtctgtacatttggggaccccaggtccatccagtgggggcctggcctcccagagtggggacaactccagtgaccaaggagacgggctggacaccagcgtggcctctcccagttctggtggagaagatgaggacttggaccaggagcgacggcgaaacaagaagagggggatcttccccaaggtggccaccaacatcatgcgagcctggttgttccagcacctctcgagacgctcagaagcgccggttctcccagacgtctgcctgggcctgggctccccatcccccggaccccggtgggccagaccttggggttcagactgcgg

SEQ ID NO: 12439 - DNA, 733 bp, Homo sapiens
  source 1..733: mol_type = unassigned DNA
cggccccgggctgcgccctcccccgcggccaggctctggagggacccaggagctgccgccggcctcagcccatggcccggaggtatgatgagctgccgcactacccaggcatcgtggatggccccgcagccctggctagcttcccagagacagtgcccgcagtaccagggccctatggcccgcaccggcctccccagcccctgcccccaggcttggacagcgacggcctgaagagggagaaggatgagatctatggacacccgctcttccccctcttggccctggtctttgagaaatgtgaactggctacatgctctccccgtgacggggccggagctgggctggggacaccccctggaggtgacgtctgctcctctgattccttcaacgaggacatcgctgcctttgccaagcaggttcgctctgagaggcccctcttctcctccaacccagaactggacaatctgatgatccaggccatccaggtgctgcggttccacctgctggagctggagaaggtgagcgcgtctcacctccccacaccctcacttgcccctgtcatcccaccccctctcgtcgcctctgccccccaccttccagctctctccccaccggagttgaagcagaatgccgcccccgtccctgagcacccccgccctgcccccgtgggtggccccccccagtaccccggtgcccccccaggtccacgacctgtgcgacaacttctgtcacc

SEQ ID NO: 12440 - DNA, 515 bp, Homo sapiens
  source 1..515: mol_type = unassigned DNA
gaccgggaacggggagcgcggctgccagcacccctgagccgccgccggaccctccgtcgccccgggccgccccccgccccctgcggtccccgtatgatgagctgccgcactacccaggcatcgtggatggccccgcagccctggctagcttcccagagacagtgcccgcagtaccagggccctatggcccgcaccggcctccccagcccctgcccccaggcttggacagcgacggcctgaagagggagaaggatgagatctatggacacccgctcttccccctcttggccctggtctttgagaaatgtgaactggctacatgctctccccgtgacggggccggagctgggctggggacaccccctggaggtgacgtctgctcctctgattccttcaacgaggacatcgctgcctttgccaagcaggttcgctctgagaggcccctcttctcctccaacccagaactggacaatctgatgatccaggccatccaggtgctgcggttccacctgctg

SEQ ID NO: 12441 - DNA, 1809 bp, Homo sapiens
  source 1..1809: mol_type = unassigned DNA
cacatgagtgtgcacgtgggttggtgtgtatggctgtgtctacatgtgtggtagattcacgtggcgagtggagtgtgacatgttgttgagacttactctgatgcgcttatctgccaactgtgaaatgaaatagaagacagggaggcttcgtatgtgtactttgtgtacaacaatgcgcggttcctacaggaggtgtccatggatctccctctctgtctgtctctctctctgtctctgtcactgtcttctcacgccactttctccatctcttttccctcccagccagaccctgccgtctctccctctgggtcctcctgcccacatgtcaggaatctctgcctggacggggtcctcactccccaccgaggcagctccaggggacctggagggcttcaagcttgggggctcagacacctggggaccacaggcaggtttctgggacacagaagggcatctcctgggttccaggatagagaagctcctcagccgagtctcggggtgctgacccctccctggggctccgcccttctcttctcaccttcccccagtatgatgagctgccgcactacccaggcatcgtggatggccccgcagccctggctagcttcccagagacagtgcccgcagtaccagggccctatggcccgcaccggcctccccagcccctgcccccaggcttggacagcgacggcctgaagagggagaaggatgagatctatggacacccgctcttccccctcttggccctggtctttgagaaatgtgaactggctacatgctctccccgtgacggggccggagctgggctggggacaccccctggaggtgacgtctgctcctctgattccttcaacgaggacatcgctgcctttgccaagcaggtgggcacctcccacccaccacacaccgagtcagagagccagcgaggaggggtgggtggaaggcgggacatccccctgccggcctctctcttccctcccaggttcgctctgagaggcccctcttctcctccaacccagaactggacaatctggtgagacccgagccctcccccacaccccctcctccaatgggtctccttccctgacgccccatccctggggttggtggggggggtgcagagagaaggccacctggtccatgtccccaaaccgtcatgattgttgcccacgtgccgtgtggtacagcctagagtctgagaacgggacccatggcccgagttcaaatcccagctctgccactcaccagctctgtgacccagggcaagtcactctgcatctccgtgccttggtgtcccgtctgtgaagtgtggctggtagtaatgtctgtcttggagggctgctgtgggggtttaatgagtgaatgcgattcaagtgcgtggaacagcacctggcacagaatagggctcaaaaagtgtctgatgttccatccgtcagaagatcagcacctatgccaaagtgagcgcagggactgctgcccaaggagaggaggctgggtgcggcagctcacgcctgtaatgccagcactttgggaggccaaggccaggagatagcttgaggccagggatcgagaccagcctgggcaacgtagcgagaccccacctctacaaaaacatttaattagcggggtgtggtggcatgcacctgtggtctcagctactttggaggctgaggcgggaggatcgcttgagccccaagaggtcgaggctgtagtgacccttgatcagctccactgcataccagcccaggcaacagggcaagaccctgtctctcatagagagctagagaaagagaaagaaagaaagaaaaa

SEQ ID NO: 12442 - DNA, 3954 bp, Homo sapiens
  source 1..3954: mol_type = unassigned DNA
aacctgctgggcccgccgggactcgcccccctgcccgctcctctcctccagccccggccggcctcggctcggcccccggcccgccccttccagccctcggcacctcccgccggccgcttggctccgccactcggcactcactgcccgggccgcccggacagggagcttcgctggcgcgcttggccggcgacaggacaggttcgggacgtccatctgtccatccgtccggagagaaattacagatccgcagccccgggatggggccggccccgctgccgctgctgctgggcctcttcctccccgcgctctggcgtagagctatcactgaggcaagggaagaagccaagccttacccgctattcccgggaccttttccagggagcctgcaaactgaccacacaccgctgttatcccttcctcacgccagtgggtaccagcctgccttgatgttttcaccaacccagcctggaagaccacatacaggaaacgtagccattccccaggtgacctctgtcgaatcaaagcccctaccgcctcttgccttcaaacacacagttggacacataatactttctgaacataaaggtgtcaaatttaattgctcaatcagtgtacctaatatataccaggacaccacaatttcttggtggaaagatgggaaggaattgcttggggcacatcatgcaattacacagttttatccagatgatgaagttacagcaataatcgcttccttcagcataaccagtgtgcagcgttcagacaatgggtcgtatatctgtaagatgaaaataaacaatgaagagatcgtgtctgatcccatctacatcgaagtacaaggacttcctcactttactaagcagcctgagagcatgaatgtcaccagaaacacagccttcaacctcacctgtcaggctgtgggcccgcctgagcccgtcaacattttctgggttcaaaacagtagccgtgttaacgaacagcctgaaaaatccccctccgtgctaactgttccaggcctgacggagatggcggtcttcagttgtgaggcccacaatgacaaagggctgaccgtgtccaagggagtgcagatcaacatcaaagcaattccctccccaccaactgaagtcagcatccgtaacagcactgcacacagcattctgatctcctgggttcctggttttgatggatactccccgttcaggaattgcagcattcaggtcaaggaagctgatccgctgagtaatggctcagtcatgatttttaacacctctgccttaccacatctgtaccaaatcaagcagctgcaagccctggctaattacagcattggtgtttcctgcatgaatgaaataggctggtctgcagtgagcccttggattctagccagcacgactgaaggagccccatcagtagcacctttaaatgtcactgtgtttctgaatgaatctagtgataatgtggacatcagatggatgaagcctccgactaagcagcaggatggagaactggtgggctaccggatatcccacgtgtggcagagtgcagggatttccaaagagctcttggaggaagttggccagaatggcagccgagctcggatctctgttcaagtccacaatgctacgtgcacagtgaggattgcagccgtcaccagagggggagttgggcccttcagtgatccagtgaaaatatttatccctgcacacggttgggtagattatgccccctcttcaactccggcgcctggcaacgcagatcctgtgctcatcatctttggctgcttttgtggatttattttgattgggttgattttatacatctccttggccatcagaaaaagagtccaggagacaaagtttgggaatgcattcacagaggaggattctgaattagtggtgaattatatagcaaagaaatccttctgtcggcgagccattgaacttaccttacatagcttgggagtcagtgaggaactacaaaataaactagaagatgttgtgattgacaggaatcttctaattcttggaaaaattctgggtgaaggagagtttgggtctgtaatggaaggaaatcttaagcaggaagatgggacctctctgaaagtggcagtgaagaccatgaagttggacaactcttcacagcgggagatcgaggagtttctcagtgaggcagcgtgcatgaaagacttcagccacccaaatgtcattcgacttctaggtgtgtgtatagaaatgagctctcaaggcatcccaaagcccatggtaattttacccttcatgaaatacggggacctgcatacttacttactttattcccgattggagacaggaccaaagcatattcctctgcagacactattgaagttcatggtggatattgccctgggaatggagtatctgagcaacaggaattttcttcatcgagatttagctgctcgaaactgcatgttgcgagatgacatgactgtctgtgttgcggacttcggcctctctaagaagatttacagtggcgattattaccgccaaggccgcattgctaagatgcctgttaaatggatcgccatagaaagtcttgcagaccgagtctacacaagtaaaagtgatgtgtgggcatttggcgtgaccatgtgggaaatagctacgcggggaatgactccctatcctggggtccagaaccatgagatgtatgactatcttctccatggccacaggttgaagcagcccgaagactgcctggatgaactgtatgaaataatgtactcttgctggagaaccgatcccttagaccgccccaccttttcagtattgaggctgcagctagaaaaactcttagaaagtttgcctgacgttcggaaccaagcagacgttatttacgtcaatacacagttgctggagagctctgagggcctggcccagggctccacccttgctccactggacttgaacatcgaccctgactctataattgcctcctgcactccccgcgctgccatcagtgtggtcacagcagaagttcatgacagcaaacctcatgaaggacggtacatcctgaatgggggcagtgaggaatgggaagatctgacttctgccccctctgctgcagtcacagctgaaaagaacagtgttttaccgggggagagacttgttaggaatggggtctcctggtcccattcgagcatgctgcccttgggaagctcattgcccgatgaacttttgtttgctgacgactcctcagaaggctcagaagtcctgatgtgaggagaggtgcggggagacattccaaaaatcaagccaattcttctgctgtaggagaatccaattgtacctgatgtttttggtatttgtcttccttaccaagtgaactccatggccccaaagcaccagatgaatgttgttaagtaagctgtcattaaaaatacataatatatatttatttaaagagaaaaaatatgtgtatatcatggaaaaagacaaggatattttaataaaacattacttatttcatttcacttatcttgcatatcttaaaattaagcttcagctgctccttgatattaacatttgtacagagttgaagttgttttttcaagttcttttctttttcatgactattaaatgtaaaaatatttgtaaaatgaaatgccatatttgacttggcttctggtcttgatgtatttgataagaatgattcattcaatgtttaaagttgtataactgattaattttctgatatggcttcctaataaaatatgaataaggaaggatatgttgaacttacttgagacttgaaagacagtggtcggcagcggccttgtggcctttgcaaaggaattcccttaatgcctggtccttggggcaattgctctgaccattcttggcattgctttatagagatatggaaaaaccacaccagggtctgtagataaggaataaagaatattgaaggattgaaaaa

SEQ ID NO: 12443 - DNA, 3189 bp, Homo sapiens
  source 1..3189: mol_type = unassigned DNA
cgcccggacagggagcttcgctggcgcgcttggccggcgacaggacaggttcgggacgtccatctgtccatccgtccggagagaaattacagatccgcagccccgggatggggccggccccgctgccgctgctgctgggcctcttcctccccgcgctctggcgtagagcataaccagtgtgcagcgttcagacaatgggtcgtatatctgtaagatgaaaataaacaatgaagagatcgtgtctgatcccatctacatcgaagtacaaggacttcctcactttactaagcagcctgagagcatgaatgtcaccagaaacacagccttcaacctcacctgtcaggctgtgggcccgcctgagcccgtcaacattttctgggttcaaaacagtagccgtgttaacgaacagcctgaaaaatccccctccgtgctaactgttccaggcctgacggagatggcggtcttcagttgtgaggcccacaatgacaaagggctgaccgtgtccaagggagtgcagatcaacatcaaagcaattccctccccaccaactgaagtcagcatccgtaacagcactgcacacagcattctgatctcctgggttcctggttttgatggatactccccgttcaggaattgcagcattcaggtcaaggaagctgatccgctgagtaatggctcagtcatgatttttaacacctctgccttaccacatctgtaccaaatcaagcagctgcaagccctggctaattacagcattggtgtttcctgcatgaatgaaataggctggtctgcagtgagcccttggattctagccagcacgactgaaggagccccatcagtagcacctttaaatgtcactgtgtttctgaatgaatctagtgataatgtggacatcagatggatgaagcctccgactaagcagcaggatggagaactggtgggctaccggatatcccacgtgtggcagagtgcagggatttccaaagagctcttggaggaagttggccagaatggcagccgagctcggatctctgttcaagtccacaatgctacgtgcacagtgaggattgcagccgtcaccagagggggagttgggcccttcagtgatccagtgaaaatatttatccctgcacacggttgggtagattatgccccctcttcaactccggcgcctggcaacgcagatcctgtgctcatcatctttggctgcttttgtggatttattttgattgggttgattttatacatctccttggccatcagaaaaagagtccaggagacaaagtttgggaatgcattcacagaggaggattctgaattagtggtgaattatatagcaaagaaatccttctgtcggcgagccattgaacttaccttacatagcttgggagtcagtgaggaactacaaaataaactagaagatgttgtgattgacaggaatcttctaattcttggaaaaattctgggtgaaggagagtttgggtctgtaatggaaggaaatcttaagcaggaagatgggacctctctgaaagtggcagtgaagaccatgaagttggacaactcttcacagcgggagatcgaggagtttctcagtgaggcagcgtgcatgaaagacttcagccacccaaatgtcattcgacttctaggtgtgtgtatagaaatgagctctcaaggcatcccaaagcccatggtaattttacccttcatgaaatacggggacctgcatacttacttactttattcccgattggagacaggaccaaagcatattcctctgcagacactattgaagttcatggtggatattgccctgggaatggagtatctgagcaacaggaattttcttcatcgagatttagctgctcgaaactgcatgttgcgagatgacatgactgtctgtgttgcggacttcggcctctctaagaagatttacagtggcgattattaccgccaaggccgcattgctaagatgcctgttaaatggatcgccatagaaagtcttgcagaccgagtctacacaagtaaaagtgatgtgtgggcatttggcgtgaccatgtgggaaatagctacgcggggaatgactccctatcctggggtccagaaccatgagatgtatgactatcttctccatggccacaggttgaagcagcccgaagactgcctggatgaactgtatgaaataatgtactcttgctggagaaccgatcccttagaccgccccaccttttcagtattgaggctgcagctagaaaaactcttagaaagtttgcctgacgttcggaaccaagcagacgttatttacgtcaatacacagttgctggagagctctgagggcctggcccagggctccacccttgctccactggacttgaacatcgaccctgactctataattgcctcctgcactccccgcgctgccatcagtgtggtcacagcagaagttcatgacagcaaacctcatgaaggacggtacatcctgaatgggggcagtgaggaatgggaagatctgacttctgccccctctgctgcagtcacagctgaaaagaacagtgttttaccgggggagagacttgttaggaatggggtctcctggtcccattcgagcatgctgcccttgggaagctcattgcccgatgaacttttgtttgctgacgactcctcagaaggctcagaagtcctgatgtgaggagaggtgcggggagacattccaaaaatcaagccaattcttctgctgtaggagaatccaattgtacctgatgtttttggtatttgtcttccttaccaagtgaactccatggccccaaagcaccagatgaatgttgttaagtaagctgtcattaaaaatacataatatatatttatttaaagagaaaaaatatgtgtatatcatggaaaaagacaaggatattttaataaaacattacttatttcatttcacttatcttgcatatcttaaaattaagcttcagctgctccttgatattaacatttgtacagagttgaagttgttttttcaagttcttttctttttcatgactattaaatgtaaaaatatttgtaaaatgaaatgccatatttgacttggcttctggtcttgatgtatttgataagaatgattcattcaatgtttaaagttgtataactgattaattttctgatatggcttcctaataaaatatgaataaggaa

SEQ ID NO: 12444 - DNA, 2972 bp, Homo sapiens
  source 1..2972: mol_type = unassigned DNA
ggcgacaggacaggttcgggacgtccatctgtccatccgtccggagagaaattacagatccgcagccccgggatggggccggccccgctgccgctgctgctgggcctcttcctccccgcgctctggcgtagagctatcactgaggcaagggaagaagccaagccttacccgctattcccgggaccttttccagggagcctgcaaactgaccacacaccgctgttatcccttcctcacgccagtgggtaccagcctgccttgatgttttcaccaacccagcctggaagaccacatacaggaaacgtagccattccccagcataaccagtgtgcagcgttcagacaatgggtcgtatatctgtaagatgaaaataaacaatgaagagatcgtgtctgatcccatctacatcgaagtacaaggacttcctcactttactaagcagcctgagagcatgaatgtcaccagaaacacagccttcaacctcacctgtcaggctgtgggcccgcctgagcccgtcaacattttctgggttcaaaacagtagccgtgttaacgaacagcctgaaaaatccccctccgtgctaactgttccaggcctgacggagatggcggtcttcagttgtgaggcccacaatgacaaagggctgaccgtgtccaagggagtgcagatcaacatcaaagcaattccctccccaccaactgaagtcagcatccgtaacagcactgcacacagcattctgatctcctgggttcctggttttgatggatactccccgttcaggaattgcagcattcaggtcaaggaagctgatccgctgagtaatggctcagtcatgatttttaacacctctgccttaccacatctgtaccaaatcaagcagctgcaagccctggctaattacagcattggtgtttcctgcatgaatgaaataggctggtctgcagtgagcccttggattctagccagcacgactgaaggagccccatcagtagcacctttaaatgtcactgtgtttctgaatgaatctagtgataatgtggacatcagatggatgaagcctccgactaagcagcaggatggagaactggtgggctaccggatatcccacgtgtggcagagtgcagggatttccaaagagctcttggaggaagttggccagaatggcagccgagctcggatctctgttcaagtccacaatgctacgtgcacagtgaggattgcagccgtcaccagagggggagttgggcccttcagtgatccagtgaaaatatttatccctgcacacggttgggtagattatgccccctcttcaactccggcgcctggcaacgcagatcctgtgctcatcatctttggctgcttttgtggatttattttgattgggttgattttatacatctccttggccatcagaaaaagagtccaggagacaaagtttgggaatgcattcacagaggaggattctgaattagtggtgaattatatagcaaagaaatccttctgtcggcgagccattgaacttaccttacatagcttgggagtcagtgaggaactacaaaataaactagaagatgttgtgattgacaggaatcttctaattcttggaaaaattctgggtgaaggagagtttgggtctgtaatggaaggaaatcttaagcaggaagatgggacctctctgaaagtggcagtgaagaccatgaagttggacaactcttcacagcgggagatcgaggagtttctcagtgaggcagcgtgcatgaaagacttcagccacccaaatgtcattcgacttctaggtgtgtgtatagaaatgagctctcaaggcatcccaaagcccatggtaattttacccttcatgaaatacggggacctgcatacttacttactttattcccgattggagacaggaccaaagcatattcctctgcagacactattgaagttcatggtggatattgccctgggaatggagtatctgagcaacaggaattttcttcatcgagatttagctgctcgaaactgcatgttgcgagatgacatgactgtctgtgttgcggacttcggcctctctaagaagatttacagtggcgattattaccgccaaggccgcattgctaagatgcctgttaaatggatcgccatagaaagtcttgcagaccgagtctacacaagtaaaagtgatgtgtgggcatttggcgtgaccatgtgggaaatagctacgcggggaatgactccctatcctggggtccagaaccatgagatgtatgactatcttctccatggccacaggttgaagcagcccgaagactgcctggatgaactgtatgaaataatgtactcttgctggagaaccgatcccttagaccgccccaccttttcagtattgaggctgcagctagaaaaactcttagaaagtttgcctgacgttcggaaccaagcagacgttatttacgtcaatacacagttgctggagagctctgagggcctggcccagggctccacccttgctccactggacttgaacatcgaccctgactctataattgcctcctgcactccccgcgctgccatcagtgtggtcacagcagaagttcatgacagcaaacctcatgaaggacggtacatcctgaatgggggcagtgaggaatgggaagatctgacttctgccccctctgctgcagtcacagctgaaaagaacagtgttttaccgggggagagacttgttaggaatggggtctcctggtcccattcgagcatgctgcccttgggaagctcattgcccgatgaacttttgtttgctgacgactcctcagaaggctcagaagtcctgatgtgaggagaggtgcggggagacattccaaaaatcaagccaattcttctgctgtaggagaatccaattgtacctgatgtttttggtatttgtcttccttaccaagtgaactccatggccccaaagcaccagatgaatgttg

SEQ ID NO: 12445 - DNA, 545 bp, Homo sapiens
  source 1..545: mol_type = unassigned DNA
gatcctgtgctcatcatctttggctgcttttgtggatttattttgattgggttgattttatacatctccttggccatcagaaaaagagtccaggagacaaagtttgggaatgcattcacagaggaggattctgaattagtggtgaattatatagcaaagaaatccttctgtcggcgagccattgaacttaccttacatagcttgggagtcagtgaggaactacaaaataaactagaagatgttgtgattgacaggaatcttctaattcttggaaaaattctgggtgaaggtaagcaatttaaagtaattcttttaaaatgtgggataagaaggtagcagtttagaataattctttaacatatatttattaaataaaatagcatctcaggactctgagttatactatggatagttatattttattatttaaaatgatagactattgatttttgaaactcagatctggcacatgaaaagattctcttcaatgcctagcacatacaggtccttgaaaaatattaattttctttcttcattgaaaagca

SEQ ID NO: 12446 - DNA, 771 bp, Homo sapiens
  source 1..771: mol_type = unassigned DNA
catattcctctgcagacactattgaagttcatggtggatattgccctgggaatggagtatctgagcaacaggaattttcttcatcgagatttagctgctcgaaactgcatcacccacctggccatcttagcaagaagcccagcatcttgctcttactgcaggttgcgagatgacatgactgtctgtgttgcggacttcggcctctctaagaagatttacagtggcgattattaccgccaaggccgcattgctaagatgcctgttaaatggatcgccatagaaagtcttgcagaccgagtctacacaagtaaaagtgatgtgtgggcatttggcgtgaccatgtgggaaatagctacgcggggaatgactccctatcctggggtccagaaccatgagatgtatgactatcttctccatggccacaggttgaagcagcccgaagactgcctggatgaactgtatgaaataatgtactcttgctggagaaccgatcccttagaccgccccaccttttcagtattgaggctgcagctagaaaaactcttagaaagtttgcctgacgttcggaaccaagcagacgttatttacgtcaatacacagttgctggagagctctgagggcctggcccagggctccacccttgctccactggacttgaacatcgaccctgactctataattgcctcctgcactccccgcgctgccatcagtgtggtcacagcagaagttcatgacagcaaacctcatgaaggacggtacatcctgaatggg

SEQ ID NO: 12447 - DNA, 3600 bp, Homo sapiens
  source 1..3600: mol_type = unassigned DNA
ctcggcactcactgcccgggccgcccggacagggagcttcgctggcgcgcttggccggcgacaggacaggttcgggacgtccatctgtccatccgtccggagagaaattacagatccgcagccccgggatggggccggccccgctgccgctgctgctgggcctcttcctccccgcgctctggcgtagagctatcactgaggcaagggaagaagccaagccttacccgctattcccgggaccttttccagggagcctgcaaactgaccacacaccgctgttatcccttcctcacgccagtgggtaccagcctgccttgatgttttcaccaacccagcctggaagaccacatacaggaaacgtagccattccccaggtgacctctgtcgaatcaaagcccctaccgcctcttgccttcaaacacacagttggacacataatactttctgaacataaaggtgtcaaatttaattgctcaatcagtgtacctaatatataccaggacaccacaatttcttggtggaaagatgggaaggaattgcttggggcacatcatgcaattacacagttttatccagatgatgaagttacagcaataatcgcttccttcagcataaccagtgtgcagcgttcagacaatgggtcgtatatctgtaagatgaaaataaacaatgaagagatcgtgtctgatcccatctacatcgaagtacaaggacttcctcactttactaagcagcctgagagcatgaatgtcaccagaaacacagccttcaacctcacctgtcaggctgtgggcccgcctgagcccgtcaacattttctgggttcaaaacagtagccgtgttaacgaacagcctgaaaaatccccctccgtgctaactgttccaggcctgacggagatggcggtcttcagttgtgaggcccacaatgacaaagggctgaccgtgtccaagggagtgcagatcaacatcaaagcaattccctccccaccaactgaagtcagcatccgtaacagcactgcacacagcattctgatctcctgggttcctggttttgatggatactccccgttcaggaattgcagcattcaggtcaaggaagctgatccgctgagtaatggctcagtcatgatttttaacacctctgccttaccacatctgtaccaaatcaagcagctgcaagccctggctaattacagcattggtgtttcctgcatgaatgaaataggctggtctgcagtgagcccttggattctagccagcacgactgaaggagccccatcagtagcacctttaaatgtcactgtgtttctgaatgaatctagtgataatgtggacatcagatggatgaagcctccgactaagcagcaggatggagaactggtgggctaccggatatcccacgtgtggcagagtgcagggatttccaaagagctcttggaggaagttggccagaatggcagccgagctcggatctctgttcaagtccacaatgctacgtgcacagtgaggattgcagccgtcaccagagggggagttgggcccttcagtgatccagtgaaaatatttatccctgcacacggttgggtagattatgccccctcttcaactccggcgcctggcaacgcagatcctgtgctcatcatctttggctgcttttgtggatttattttgattgggttgattttatacatctccttggccatcagaaaaagagtccaggagacaaagtttgggaatgcattcacagaggaggattctgaattagtggtgaattatatagcaaagaaatccttctgtcggcgagccattgaacttaccttacatagcttgggagtcagtgaggaactacaaaataaactagaagatgttgtgattgacaggaatcttctaattcttggaaaaattctgggtgaaggagagtttgggtctgtaatggaaggaaatcttaagcaggaagatgggacctctctgaaagtggcagtgaagaccatgaagttggacaactcttcacagcgggagatcgaggagtttctcagtgaggcagcgtgcatgaaagacttcagccacccaaatgtcattcgacttctaggtgtgtgtatagaaatgagctctcaaggcatcccaaagcccatggtaattttacccttcatgaaatacggggacctgcatacttacttactttattcccgattggagacaggaccaaagcatattcctctgcagacactattgaagttcatggtggatattgccctgggaatggagtatctgagcaacaggaattttcttcatcgagatttagctgctcgaaactgcatgttgcgagatgacatgactgtctgtgttgcggacttcggcctctctaagaagatttacagtggcgattattaccgccaaggccgcattgctaagatgcctgttaaatggatcgccatagaaagtcttgcagaccgagtctacacaagtaaaagtgatgtgtgggcatttggcgtgaccatgtgggaaatagctacgcggggaatgactccctatcctggggtccagaaccatgagatgtatgactatcttctccatggccacaggttgaagcagcccgaagactgcctggatgaactgtatgaaataatgtactcttgctggagaaccgatcccttagaccgccccaccttttcagtattgaggctgcagctagaaaaactcttagaaagtttgcctgacgttcggaaccaagcagacgttatttacgtcaatacacagttgctggagagctctgagggcctggcccagggctccacccttgctccactggacttgaacatcgaccctgactctataattgcctcctgcactccccgcgctgccatcagtgtggtcacagcagaagttcatgacagcaaacctcatgaaggacggtacatcctgaatgggggcagtgaggaatgggaagatctgacttctgccccctctgctgcagtcacagctgaaaagaacagtgttttaccgggggagagacttgttaggaatggggtctcctggtcccattcgagcatgctgcccttgggaagctcattgcccgatgaacttttgtttgctgacgactcctcagaaggctcagaagtcctgatgtgaggagaggtgcggggagacattccaaaaatcaagccaattcttctgctgtaggagaatccaattgtacctgatgtttttggtatttgtcttccttaccaagtgaactccatggccccaaagcaccagatgaatgttgttaagtaagctgtcattaaaaatacataatatatatttatttaaagagaaaaaatatgtgtatatcatggaaaaagacaaggatattttaataaaacattacttatttcatttcacttatcttgcatatcttaaaattaagcttcagctgctccttgatattaacatttgtacagagttgaagttgttttttcaagttcttttctttttcatgactattaaatgtaaaaatatttgtaaaatgaaatgccatatttgacttggcttctggtcttgatgtatttgataagaatgattaattttctgatatggcttcctaataaaatatgaataagga

SEQ ID NO: 12448 - DNA, 3104 bp, Homo sapiens
  source 1..3104: mol_type = unassigned DNA
actcactgcccgggccgcccggacagggagcttcgctggcgcgcttggccggcgacaggacaggttcgggacgtccatctgtccatccgtccggagagaaattacagatccgcagccccgggatggggccggccccgctgccgctgctgctgggcctcttcctccccgcgctctggcgtagagctatcactgaggcaagggaagaagccaagccttacccgctattcccgggaccttttccagggagcctgcaaactgaccacacaccgctgttatcccttcctcacgccagtgggtaccagcctgccttgatgttttcaccaacccagcctggaagaccacatacaggaaacgtagccattccccaggtgacctctgtcgaatcaaagcccctaccgcctcttgccttcaaacacacagttggacacataatactttctgaacataaaggtgtcaaatttaattgctcaatcagtgtacctaatatataccaggacaccacaatttcttggtggaaagatgggaaggaattgcttggggcacatcatgcaattacacagttttatccagatgatgaagttacagcaataatcgcttccttcagcataaccagtgtgcagcgttcagacaatgggtcgtatatctgtaagatgaaaataaacaatgaagagatcgtgtctgatcccatctacatcgaagtacaaggacttcctcactttactaagcagcctgagagcatgaatgtcaccagaaacacagccttcaacctcacctgtcaggctgtgggcccgcctgagcccgtcaacattttctgggttcaaaacagtagccgtgttaacgaacagcctgaaaaatccccctccgtgctaactgttccaggcctgacggagatggcggtcttcagttgtgaggcccacaatgacaaagggctgaccgtgtccaagggagtgcagatcaacatcaaagcaattccctccccaccaactgaagtcagcatccgtaacagcactgcacacagcattctgatctcctgggttcctggttttgatggatactccccgttcaggaattgcagcattcaggtcaaggaagctgatccgctgagtaatggctcagtcatgatttttaacacctctgccttaccacatctgtaccaaatcaagcagctgcaagccctggctaattacagcattggtgtttcctgcatgaatgaaataggctggtctgcagtgagcccttggattctagccagcacgactgaaggagccccatcagtagcacctttaaatgtcactgtgtttctgaatgaatctagtgataatgtggacatcagatggatgaagcctccgactaagcagcaggatggagaactggtgggctaccggatatcccacgtgtggcagagtgcagggatttccaaagagctcttggaggaagttggccagaatggcagccgagctcggatctctgttcaagtccacaatgctacgtgcacagtgaggattgcagccgtcaccagagggggagttgggcccttcagtgatccagtgaaaatatttatccctgcacacggaggcagagattgcatactgctttgccatgtttttacccattcaagccttggcagacagaacttgcagtccttaccttgcagggctccaggacaaacccacatgacattttacaaaataaagaaatgcaaagtttctaacattttaaactacagtagaagtaaatttgttcttccctgttacaagttgggtagattatgccccctcttcaactccggcgcctggcaacgcagatcctgtgctcatcatctttggctgcttttgtggattttgattgggttgattttatacatctccttggccatcagaaaaagagtccaggagacaaagtttgggaatgcattcacagaggaggattctgaattagtggtgaattatatagcaaagaaatccttctgtcggcgagccattgaacttaccttacatagcttgggagtcagtgaggaactacaaaataaactagaagatgttgtgattgacaggaatcttctaattcttggaaaaattctgggtgaaggagagtttgggtctgtaatggaaggaaatcttaagcaggaagatgggacctctctgaaagtggcagtgaagaccatgaagttggacaactcttcacagcgggagatcgaggagtttctcagtgaggcagcgtgcatgaaagacttcagccacccaaatgtcattcgacttctagggttatgcatgattgatgctgtgtttgtaatttcaggtattattatcctgctttatgaaaatcaccgagactcttccaaagagcataggccagcctgtatttttttacatcatattcctctgcagacactattgaagttcatggtggatattgccctgggaatggagtatctgagcaacaggaattttcttcatcgagatttagctgctcgaaactgcatgttgcgagatgacatgactgtctgtgttgcggacttcggcctctctaagaagatttacagtggcgattattaccgccaaggccgcattgctaagatgcctgttaaatggatcgccatagaaagtcttgcagaccgagtctacacaagtaaaagtgatgtgtgggcatttggcgtgaccatgtgggaaatagctacgcggggaatgactccctatcctggggtccagaaccatgagatgtatgactatcttctccatggccacaggttgaagcagcccgaagccaggtgggcatgtgcagaggggaggtcgaggttgcagatgaaattgcccatttgtgggagtagggccaccaaaaaagtctcaataatttttataaaaagtagaatgaatgctgataaaaacaaaggcatggattgcacaaagagatgtactcttgctggagaaccgatccctgaccgccccaccttttcagtattgaggctgcagctagaaaaactcttagaaagtttgcctgacgttcggaaccaagcagacgttatttacgtcaatacacagttgctggagagctctgagggcctggccctccacccttgctccactggacttgaacatcgaccctga

SEQ ID NO: 12449 - DNA, 3325 bp, Homo sapiens
  source 1..3325: mol_type = unassigned DNA
tccaaggcggccccggcgctggggctgcgcggcaggcggagcggccgcgggcttgggggcttcgccggggccgggcggccggcgcccccggctgctcccgccgccgcccggacccgcgccccgccggggcagcggtggtgagagccccgactccccggacgccgcccgccgtgccatggggttcccggccgcggcgctgctctgcgcgctgtgctgcggcctcctggccccggctgcccgcgccggctactccgaggagcgctgcagctggaggggcagcggcctcacccaggagcccggcagcgtggggcagctggccctggcctgtgcggagggcgcggttgagtggctgtacccggctggggcgctgcgcctgaccctgggcggccccgatcccagagcgcggcccggcatcgcctgtctgcggccggtgcggcccttcgcgggcgcccaggtcttcgcggagcgcgcagggggcgccctggagctgctgctggccgagggcccgggcccggcagggggccgctgcgtgcgctggggtccccgcgagcgccgggccctcttcctgcaggccacgccgcaccaggacatcagccgccgcgtggccgccttccgctttgagctgcgcgaggacgggcgccccgagctgcccccgcaggcccacggtctcggcgtagacggtgcctgcaggccctgcagcgacgctgagctgctcctggccgcatgcaccagcgacttcgtaattcacgggatcatccatggggtcacccatgacgtggagctgcaggagtctgtcatcactgtggtggccgcccgtgtcctccgccagacaccgccgctgttccaggcggggcgatccggggaccaggggctgacctccattcgtaccccactgcgctgtggcgtccacccgggcccaggcaccttcctcttcatgggctggagccgctttggggaggcccggctgggctgtgccccacgattccaggagttccgccgtgcctacgaggctgcccgtgctgcccacctccacccctgcgaggtggcgctgcactgaggggctgggtgctggggaggggctggtaggagggagggtgggcccactgctttggaggtgatgggactatcaataagaactctgttcacgcaagctgctgtggacctggtctcctgtgtccagcccagccttgggcctgcctcgcagctgtgaggatggctccaattcctgcctcctggcgggagactgaggctcaggggaatggtatcttgttcaagaccatttggcaactgagagggagagcagatgtcaggaggagctacacccacattccggggaggggccgctgctgggtggggggcacgtggggacctgcactcatgcaagcttctgctctgctgcacccaccagccccgtccttgcccgcacccttgcctgcttccctggctggctcccacttgcctcccgtgccaggtgcttctggggctcagcaggagaggaaaggggcagaggggcatagggtccctcgggtacggtgggggcaggcgggcgcacagcgctccggctctgagccaggcctgtgagggaaggggctgcaggctggcagggtgccgacttcccccatggctgctgtgagcccgcagagtcatccttggccccgtcccgcccttggggaagaatgggcccctctgtcctcaggccccttcgacgtgctgagcatccagacgtggcgaggagcccgaagggtgtggggtcccctctgcagggtcctgcttgttgcctgtttccggcgggcggggtgcacaatggggtctctaaggaccgtttcccgccactggccccattgtcactgtctccgccttcctcctcggcctttcagccgcataaagggccagtgaggtttgggacagccacagcccaaggctccgaggctaaaagcccctgggtgggggtgttccaggacacctggccctgtgtgagctgcctcctctcaccccaacccctcggatcctgggaaagagacagccatggctcaagggccagggacccctgggctgagccccagaaatggctttccattctcgcctgggccggggtgggggtggaggccagaggccctgcccaggcagatgaagcccccagctttcaagggggaaactgaggctgtgtgagggacacagctgtgcagggcccacaaacacggtcctttctctaggttagcggatgcagatgcctgatgagtgccatgccctctgtggacacctggggaggggggtcacctccagcgccgccctgggacttccactgcacgtgcaagagacttaccctttcacacagatcacctgcctgccgcagggctgatgaggatgggtgaggagcgcagccactgggtgtcatgcactgtgggggttctcccaccttctgcccctcctcaggttccttgctgcttctctcctctcccaactgtggcacgctgagggctcaggcacaggaccgctcctctggggcagcctccaataacccttggacaacctccactttttcatcttcagccctgaccactccctggggcccatagccttacatccatctgcccccagcccaaacacttctgcaaacactagaaaaggaggtagcccgtgtgccctcctgcaccgcctcctccactcctgtcttggagaggctttcccgtgggccgagcaacccccttacctttggcacttgccctgattctctggccagcttcctacaacctctccttttcagccacacccaagtccacctgttcacaaacaccctgggctgggccctggccgaaccctggcttctacctacctgtctcaggaagtgcctgagccttgcacctacagaccctcccagagaaagccctggctttgcaaccagctgtcttctcatgagacacagggccacaggagcaccacggtgcccaaatgggtcttggagcattagaccaggggcttcatgcctgccctggggacaggtggccaaagtggcatgggagatagggagacagtgtgggtgagcaggtgggcaggagctacaggagcctggggcctgtggatcacagacaccgccaggcaagtgccagttcacacaggtacaggtggctgcagagtgcccaaaggccaagcagcagagtgcctggtgtggacgggagaggagtggggaggttgggcgcagtggctcacgcctgtaatcccaacactttgggaggcccaggcaagcagatcatgaggtcaggagatggagaccatcctggccaacatggtgaaaccgtctctaataaaacacaaaaaattagccaga

SEQ ID NO: 12450 - DNA, 503 bp, Homo sapiens
  source 1..503: mol_type = unassigned DNA
gccggggcagcggtggtgagagccccgactccccggacgccgcccgccgtgccatggggttcccggccgcggcgctgctctgcgcgctgtgctgcggcctcctggccccggctgcccgcgccggctactccgaggagcgctgcagctggaggggcaggccacgccgcaccaggacatcagccgccgcgtggccgccttccgctttgagctgcgcgaggacgggcgccccgagctgcccccgcaggcccacggtctcggcgtagacggtgcctgcaggccctgcagcgacgctgagctgctcctggccgcatgcaccagcgacttcgtaattcacgggatcatccatggggtcacccatgacgtggagctgcaggagtctgtcatcactgtggtggccgcccgtgtcctccgccagacaccgccgctgttccaggcggggcgatccggggaccaggggctgacctccattcgtaccccactgcgctgtggcgtccacccgggcc

SEQ ID NO: 12451 - DNA, 915 bp, Homo sapiens
  source 1..915: mol_type = unassigned DNA
ctggccccggctgcccgcgccggctactccgaggagcgctgcagctggaggggcagcggcctcacccaggagcccggcagcgtggggcagctggccctggcctgtgcggagggcgcggttgagtggctgtacccggctggggcgctgcgcctgaccctgggcggccccgatcccagagcgcggcccggcatcgcctgtctgcggccggtgcggcccttcgcgggcgcccaggtcttcgcggagcgcgcagggggcgccctggagctgctgctggccgagggcccgggcccggcagggggccgctgcgtgcgctggggtccccgcgagcgccgggccctcttcctgcaggccacgccgcaccaggacatcagccgccgcgtggccgccttccgctttgagctgcgcgaggacgggcgccccgagctgcccccgcaggcccacggtctcggcgtagacggtgcctgcaggccctgcagcgacgctgagctgctcctggccgcatgcaccagcgacttcggtgagtgtccccgccatggggggagcctggagcctgccttcccctgaatgcctaccgcagccacatgcctccccacagtaattcacgggatcatccatggggtcacccatgacgtggagctgcaggagtctgtcatcactgtggtggccgcccgtgtcctccgccagacaccgccgctgttccaggcggggcgatccggggaccaggggctgacctccattcgtaccccactgcgctgtggcgtccacccgggcccaggcaccttcctcttcatgggctggagccgctttggggaggcccggctgggctgtgccccacgattccaggagttccgccgtgcctacgaggctgcccgtgctgcccacctccacccctgcgaggtggcgctgcactgaggg

SEQ ID NO: 12452 - DNA, 523 bp, Homo sapiens
  source 1..523: mol_type = unassigned DNA
cgcggttgagtggctgtacccggctggggcgctgcgcctgaccctgggcggccccgatcccagagcgcggcccggcatcgcctgtctgcggccggtgcggcccttcgcgggcgcccaggtcttcgcggagcgcgcagggggcgccctggagctgctgctggccgagggcccgggcccggcagggggccgctgcgtgcgctggggtccccgcgagcgccgggccctcttcctgcaggccacgccgcaccaggacatcagccgccgcgtggccgccttccgctttgagctgcgcgaggacgggcgccccgagctgcccccgcaggcccacggtctcggcgtagacggtgcctgcaggccctgcagcgacgctgagctgctcctggccgcatgcaccagcgacttcgtaattcacgggatcatccatggggtcacccatgacgtggagctgcaggagtctgtcatcactgtgggtgggcccactgctttggaggtgatgggactatcaataagaactctgttcacg

SEQ ID NO: 12453 - DNA, 1174 bp, Homo sapiens
  source 1..1174: mol_type = unassigned DNA
cagctcttgcttggctctcctggagcttggcgcctgaccctgaaagggatgggctctcgctattctgccccctggccctgggccagggaccccagaccacccttcctctgcccccacttcctatcaccctagctgggctgctgctcttcagacctcagatccgggaaactagaggggtcccagatgctggggtgcatatgtcagatgggagtgcaggagggcggcccaggacagctgatcgctaggcatggcccccaggcccacgtctgtgtgcattcctgccttggaggtgcctgcaggccctgcagcgacgctgagctgctcctggccgcatgcaccagcgacttcggtgagtgtccccgccatggggggagcctggagcctgccttcccctgaatgcctaccgcagccacatgcctccccacagtaattcacgggatcatccatggggtcacccatgacgtggagctgcaggagtctgtcatcactgtggtggccgcccgtgtcctccgccagacaccgccgctgttccaggcggggcgatccggggaccaggggctgacctccattcgtaccccactgcgctgtggcgtccacccgggcccaggcaccttcctcttcatgggctggagccgctttggggaggcccggctgggctgtgccccacgattccaggagttccgccgtgcctacgaggctgcccgtgctgcccacctccacccctgcgaggtggcgctgcactgaggggctgggtgctggggaggggctggtaggagggagggtgggcccactgctttggaggtgatgggactatcaataagaactctgttcacgcaagctgctgtggacctggtctcctgtgtccagcccagccttgggcctgcctcgcagctgtgaggatggctccaattcctgcctcctggcgggagactgaggctcaggggaatggtatcttgttcaagaccatttggcaactgagagggagagcagatgtcaggaggagctacacccacattccggggaggggccgctgctgggtggggggcacgtggggacctgcactcatgcaagcttctgctctgctgcacccaccagccccgtccttgcccgcacccttgcctgcttccctggctggctcccacttgcctcccgtgccaggtgcttctggggctca

SEQ ID NO: 12454 - DNA, 612 bp, Homo sapiens
  source 1..612: mol_type = unassigned DNA
tcagacctcagatccgggaaactagaggggtcccagatgctggggtgcatatgtcagatgggagtgcaggagggcggcccaggacagctgatcgctaggcatggcccccaggcccacgtctgtgtgcattcctgccttggaggtgcctgcaggccctgcagcgacgctgagctgctcctggccgcatgcaccagcgacttcgtaattcacgggatcatccatggggtcacccatgacgtggagctgcaggagtctgtcatcactgtggtggccgcccgtgtcctccgccagacaccgccgctgttccaggcggggcgatccggggaccaggggctgacctccattcgtaccccactgcgctgtggcgtccacccgggcccaggcaccttcctcttcatgggctggagccgctttggggaggcccggctgggctgtgccccacgattccaggagttccgccgtgcctacgaggctgcccgtgctgcccacctccacccctgcgaggtggcgctgcactgaggggctgggtgctggggaggggctggtaggagggagggtgggcccactgctttggaggtgatgggactatcaataagaactctgttcacgcaa

SEQ ID NO: 12455 - DNA, 4076 bp, Homo sapiens
  source 1..4076: mol_type = unassigned DNA
taaagagatagagtctcactatgttgcccagacaggatttgaattcctgggctcaaggtatgcttctgtcttagctcctcagtagctgagaccatgggcacccaccactgtgcccagattcgggctttcttgtaaaaagcggatggatgcttgaaactattttctgaatccctttggctcccaaatgtgaatattctgggaaatatttttatccaaattagctgagtaatcgagtagttaggcacattttgaagactgaggcttgtcctttaaaagaagggcagcccacaaactgacttccttgagccaaaaattgttttaaaaggggaagtacagcccaaaacagtgattttaaaatatcaacaaaaagagtcaaattctgtaaaatatttaaagagatttattctgagccaaatatgagtgaccatgtcctgtgacacagccctcgggaaatcctgagaacatgtgcccaaggtggtcagggtacagcttggttttctacattttagggagacatgaggcttcaatcaaatacatttaagaaatacattggttcagtccagaaaggcaggacaacccgacgcgaggcagggagcttccaggttatagaggtcactggagagcccggtggggtgtaagtacactgcgcttataaaactctagcaggaagctagcagctgtctccaaacccagagaaggggaaacaggaatcgattaggaataaaggattataatccactttccttctgaggaaaagctgggaaccttctcattttgccttatgaaaactaagctgaatcgactgctgccaaacatctattaggcaaaattggcctcttgcccatgatttgactttccagcacagccagttctttttctcctctgcagctgattggctctggagtgtggccagaagcctctctcctgcaattaaaggagtcgggtctctaactgttgatctgtttttttcccttctgagcaatggagcttaccatctttatcctgagactggccatttacatcctgacatttcccttgtacctgctgaactttctgggcttgtggagctggatatgcaaaaaatggttcccctacttcttggtgaggttcactgtgatatacaacgaacagatggcaagcaagaagcgggagctcttcagtaacctgcaggagtttgcgggcccctccgggaaactctccctgctggaagtgggctgtggcacgggggccaacttcaagttctacccacctgggtgcagggtgacctgtattgaccccaaccccaactttgagaagtttttgatcaagagcattgcagagaaccgacacctgcagtttgagcgctttgtggtagctgccggggagaacatgcaccaggtggctgatggctctgtggatgtggtggtctgcaccctggtgctgtgctctgtgaagaaccaggagcggattctccgcgaggtgtgcagagtgctgagaccgggaggggctttctatttcatggagcatgtggcagctgagtgttcgacttggaattacttctggcaacaagtcctggatcctgcctggcaccttctgtttgatgggtgcaacctgaccagagagagctggaaggccctggagcgggccagcttctctaagctgaagctgcagcacatccaggccccactgtcctgggagttggtgcgccctcatatctatggatatgctgtgaaatagtgtgagctggcagttaagagctgaatggctcaaagaatttaaagcttcagttttacatttaaaatgctaagtgggagaagagaaaccttttttttggggggcggtttttttggtttgttgttggttttttttttttttttggcgggaagaaagagttttgctcttgttgcccaggctggagtgcaatgacgtgatctccgctcactgcaacctccacctcgcgggtttaagcgattcttctgcctcagcctccctagtagctgggattacaggtgcccaccaccatgcccagctaatttgtatttttagttgagacagggtttcactacgttggccaggctggtcttgaactcctgatctcaggcaatccacccacctcagcctcccaaagtgctgggatgacaggcgtgagcaaccgcacccagcttaaggtttttttgttttgttttgagacggagttttcgctcttgttgcccaggctggagtgcaatgctgtgatctcagcttaccacaacctccacctcccgggttcaagtgattcacctgcctcagcctcctgagtagctggtattacaggcatgcgtcaccacgccggctaattttgtacttttagtagagatggtgtttccccacgttggtcagtctggtctcaaattcctgacctcaggtgatctgcctgcctcggcctcccaaagtgctgtgattacagacgtcagccaccatgcctggcctgaaaccttttttaggtaaagttgaattccatccttaaaagtttctgttatatcctatttagccattttctattgtctcccaaagaattcacatcaaaaaaacagctttgaactcccccttcaaaggaaacagtcgactttcataattagcatctaccattatccccaaatcttattttattcattgacttgaaattttttccaattgcttttttttttttttttttaaggttaagagcagaggtttactaggccaaagaaagagaatagctctctgttgcagagaggggtcctggagaaatgggttaccccagttgtcttatttaaatggttacccatcagattttaattttatcttctctttgagagcttggtaataagaagcacttaaatcactccaaagaagactttaaaaagggagcagtgaaaaggtcttaataatttattgattgaattaagaaatactagctaattaagaatctgagtctaaacagcacagattttttctttctgcttttaaattgtgttttaaaaaaagagacagggggctgggcgtggtggctcacgcctgtaatcctagcactttgggaggccgaggcgggtggatcacgaggtaggagttaaagaccagcctggccaacatggcaaaaccctactaaagatacaaaaaaaaaaaaaaattagccaggcgtggtggtgggtgcctgtaatcccaggtacttggaaggctgaggcaggagaatctcttgaacccagaaggcgaaggttgcagtgaaccgagatcatgccattgtactctagcctgggtgacaagagcaagactccgtctcaaaaaaaaaaaaaaaaaaaaaaagaagtagagacagggagacagggtctcactgtgttgcctaggccggtcttgaactcctgggctcaagtgattctcccaccttgacctcctaaattgttgggattacaggtgtgagacagtgcacctggccgaaatagctcaagtttctgaaaaacaaatctgaatctatttgttattcttagcgtcactggtctggctttcagaattaacatacaaggttgccacacctagttctgcccagctttatgtcttttattccagtattccaccaaagtttgttttcctgcattccagttctcaagtcttaagataaagattgtacttgacagtttagtatatccataaaactatttgaggtggttaaggttcttgggttcattttccttaatactttgctgaatattgtagattgtaggcaatgaaaaagtctactaaattaggaaaaccttgaataattaggtatcctaggtaagagcccctaaacatcaagcaatctgtgagtctgtaaagaaataaatattttttggattattcttatctaattccacccctgttggaagatgatttctttgttctttgcaactatggaagctgtgaaaatcatcacaagtgcctctgaaagcgagtgttaggttggttagagggtttaatattttctgcaatggtttgtaggaattttaataaatgtagtatattttctgagatgattttgtaaaagtactattttaaatatcaaatcaaccaataaattcacatttgtgttaggaacagaaata

SEQ ID NO: 12456 - DNA, 618 bp, Homo sapiens
  source 1..618: mol_type = unassigned DNA
acatttaagaaatacattggttcagtccagaaaggcaggacaacccgacgcgaggcagggagcttccaggttatagcaatggagcttaccatctttatcctgagactggccatttacatcctgacatttcccttgtacctgctgaactttctgggcttgtggagctggatatgcaaaaaatggttcccctacttcttggtgaggttcactgtgatatacaacgaacagatggcaagcaagaagcgggagctcttcagtaacctgcaggagtttgcgggcccctccgggaaactctccctgctggaagtgggctgtggcacgggggccaacttcaagttctacccacctgggtgcagggtgacctgtattgaccccaaccccaactttgagaagtttttgatcaagagcattgcagagaaccgacacctgcagtttgagcgctttgtggtagctgccggggagaacatgcaccaggtggctgatggctctgtggatgtggtggtctgcaccctggtgctgtgctctgtgaagaaccaggagcggattctccgcgaggtgtgcagagtgctgagaccgggaggggctttctatttcatggagcatgtggcagctgagtgt

SEQ ID NO: 12457 - DNA, 1825 bp, Homo sapiens
  source 1..1825: mol_type = unassigned DNA
tgcaattaaaggagtcgggtctctaactgttgatctgtttttttcccttctgagcaatggagcttaccatctttatcctgagactggccatttacatcctgacatttcccttgtacctgctgaactttctgggcttgtggagctggatatgcaaaaaatggttcccctacttcttggtgaggttcactgtgatatacaacgaacagatggcaagcaagaagcgggagctcttcagtaacctgcaggagtttgcgggcccctccgggaaactctccctgctggaagtgggctgtggcacgggggccaacttcaagttctacccacctgggtgcagggtgacctgtattgaccccaaccccaactttgagaagtttttgatcaagagcattgcagagaaccgacacctgcagtttgagcgctttgtggtagctgccggggagaacatgcaccaggtggctgatggctctgtggatgtggtggtctgcaccctggtgctgtgctctgtgaagaaccaggagcggattctccgcgaggtgtgcagagtgctgagaccgggaggggctttctatttcatggagcatgtggcagctgagtgttcgacttggaattacttctggcaacaagtcctggatcctgcctggcaccttctgtttgatgggtgcaacctgaccagagagagctggaaggccctggagcgggccagcttctctaagctgaagctgcagcacatccaggccccactgtcctgggagttggtgcgccctcatatctatggatatgctgtgaaatagtgtgagctggcagttaagagctgaatggctcaaagaatttaaagcttcagttttacatttaaaatgctaagtgggagaagagaaaccttttttttggggggcggtttttttggtttgttgttggttttttttttttttttggcaggagaatctcttgaacccagaaggcgaaggttgcagtgaaccgagatcatgccattgtactctagcctgggtgacaagagcaagactccgtctcaaaaaaaaaaaaaaaaaaaaaaagaagtagagacagggagacagggtctcactgtgttgcctaggccggtcttgaactcctgggctcaagtgattctcccaccttgacctcctaaattgttgggattacaggtgtgagacagtgcacctggccgaaatagctcaagtttctgaaaaacaaatctgaatctatttgttattcttagcgtcactggtctggctttcagaattaacatacaaggttgccacacctagttctgcccagctttatgtcttttattccagtattccaccaaagtttgttttcctgcattccagttctcaagtcttaagataaagattgtacttgacagtttagtatatccataaaactatttgaggtggttaaggttcttgggttcattttccttaatactttgctgaatattgtagattgtaggcaatgaaaaagtctactaaattaggaaaaccttgaataattaggtatcctaggtaagagcccctaaacatcaagcaatctgtgagtctgtaaagaaataaatattttttggattattcttatctaattccacccctgttggaagatgatttctttgttctttgcaactatggaagctgtgaaaatcatcacaagtgcctctgaaagcgagtgttaggttggttagagggtttaatattttctgcaatggtttgtaggaattttaataaatgtagtatattttctgagatgattttgtaaaagtactattttaaatatcaaatcaaccaataaattcacatttgtgttaggaacagaa

SEQ ID NO: 12458 - DNA, 1846 bp, Homo sapiens
  source 1..1846: mol_type = unassigned DNA
ggagcttaccatctttatcctgagactggccatttacatcctgacatttcccttgtacctgctgaactttctgggcttgtggagctggatatgcaaaaaatggttcccctacttcttggtgaggttcactgtgatatacaacgaacagatggcaagcaagaagcgggagctcttcagtaacctgcaggagtttgcgggcccctccgggaaactctccctgctggaagtgggctgtggcacgggggccaacttcaagttctacccacctgggtgcagggtgacctgtattgaccccaaccccaactttgagaagtttttgatcaagagcattgcagagaaccgacacctgcagtttgagcgctttgtggtagctgccggggagaacatgcaccaggtggctgatggctctgtggatgtggtggtctgcaccctggtgctgtgctctgtgaagaaccaggagcggattctccgcgaggtgtgcagagtgctgagaccgggaggggctttctatttcatggagcatgtggcagctgagtgttcgacttggaattacttctggcaacaagtcctggatcctgcctggcaccttctgtttgatgggtgcaacctgaccagagagagctggaaggccctggagcgggccagcttctctaagctgaagctgcagcacatccaggccccactgtcctgggagttggtgcgccctcatatctatggatatgctgtgaaatagtgtgagctggcagttaagagctgaatggctcaaagaatttaaagcttcagttttacatttaaaatgctaagtgggagaagagaaaccttttttttggggggcggtttttttggtttgttgttggttttttttttttttttggcgggaagaaagagttttgctcttgttgcccaggctggagtgcaatgacgtgatctccgctcactgcaacctccacctcgcgggtttaagcgattcttctgcctcagcctccctagtagctgggattacaggtacttggaaggctgaggcaggagaatctcttgaacccagaaggcgaaggttgcagtgaaccgagatcatgccattgtactctagcctgggtgacaagagcaagactccgtctcaaaaaaaaaaaaaaaaaaaaaaagaagtagagacagggagacagggtctcactgtgttgcctaggccggtcttgaactcctgggctcaagtgattctcccaccttgacctcctaaattgttgggattacaggtgtgagacagtgcacctggccgaaatagctcaagtttctgaaaaacaaatctgaatctatttgttattcttagcgtcactggtctggctttcagaattaacatacaaggttgccacacctagttctgcccagctttatgtcttttattccagtattccaccaaagtttgttttcctgcattccagttctcaagtcttaagataaagattgtacttgacagtttagtatatccataaaactatttgaggtggttaaggttcttgggttcattttccttaatactttgctgaatattgtagattgtaggcaatgaaaaagtctactaaattaggaaaaccttgaataattaggtatcctaggtaagagcccctaaacatcaagcaatctgtgagtctgtaaagaaataaatattttttggattattcttatctaattccacccctgttggaagatgatttctttgttctttgcaactatggaagctgtgaaaatcatcacaagtgcctctgaaagcgagtgttaggttggttagagggtttaatattttctgcaatggtttgtaggaattttaataaatgtagtatattttctgaga

SEQ ID NO: 12459 - DNA, 3390 bp, Homo sapiens
  source 1..3390: mol_type = unassigned DNA
agaaggggaaacaggaatcgattaggaataaaggattataatccactttccttctgaggaaaagctgggaaccttctcattttgccttatgaaaactaagctgaatcgactgctgccaaacatctattaggcaaaattggcctcttgcccatgatttgactttccagcacagccagttctttttctcctctgcagctgattggctctggagtgtggccagaagcctctctcctgcaattaaaggagtcgggtctctaactgttgatctgtttttttcccttctgagcaatggagcttaccatctttatcctgagactggccatttacatcctgacatttcccttgtacctgctgaactttctgggcttgtggagctggatatgcaaaaaatggttcccctacttcttggtgaggttcactgtgatatacaacgaacagatggcaagcaagaagcgggagctcttcagtaacctgcaggagtttgcgggcccctccgggaaactctccctgctggaagtgggctgtggcacgggggccaacttcaagttctacccacctgggtgcagggtgacctgtattgaccccaaccccaactttgagaagtttttgatcaagagcattgcagagaaccgacacctgcagtttgagcgctttgtggtagctgccggggagaacatgcaccaggtggctgatggctctgtggatgtggtggtctgcaccctggtgctgtgctctgtgaagaaccaggagcggattctccgcgaggtgtgcagagtgctgagaccgggaggggctttctatttcatggagcatgtggcagctgagtgttcgacttggaattacttctggcaacaagtcctggatcctgcctggcaccttctgtttgatgggtgcaacctgaccagagagagctggaaggccctggagcgggccagcttctctaagctgaagctgcagcacatccaggccccactgtcctgggagttggtgcgccctcatatctatggatatgctgtgaaatagtgtgagctggcagttaagagctgaatggctcaaagaatttaaagcttcagttttacatttaaaatgctaagtgggagaagagaaaccttttttttggggggcggtttttttggtttgttgttggttttttttttttttttggcgggaagaaagagttttgctcttgttgcccaggctggagtgcaatgacgtgatctccgctcactgcaacctccacctcgcgggtttaagcgattcttctgcctcagcctccctagtagctgggattacaggtgcccaccaccatgcccagctaatttgtatttttagttgagacagggtttcactacgttggccaggctggtcttgaactcctgatctcaggcaatccacccacctcagcctcccaaagtgctgggatgacaggcgtgagcaaccgcacccagcttaaggtttttttgttttgttttgagacggagttttcgctcttgttgcccaggctggagtgcaatgctgtgatctcagcttaccacaacctccacctcccgggttcaagtgattcacctgcctcagcctcctgagtagctggtattacaggcatgcgtcaccacgccggctaattttgtacttttagtagagatggtgtttccccacgttggtcagtctggtctcaaattcctgacctcaggtgatctgcctgcctcggcctcccaaagtgctgtgattacagacgtcagccaccatgcctggcctgaaaccttttttaggtaaagttgaattccatccttaaaagtttctgttatatcctatttagccattttctattgtctcccaaagaattcacatcaaaaaaacagctttgaactcccccttcaaaggaaacagtcgactttcataattagcatctaccattatccccaaatcttattttattcattgacttgaaattttttccaattgcttttttttttttttttttaaggttaagagcagaggtttactaggccaaagaaagagaatagctctctgttgcagagaggggtcctggagaaatgggttaccccagttgtcttatttaaatggttacccatcagattttaattttatcttctctttgagagcttggtaataagaagcacttaaatcactccaaagaagactttaaaaagggagcagtgaaaaggtcttaataatttattgattgaattaagaaatactagctaattaagaatctgagtctaaacagcacagattttttctttctgcttttaaattgtgttttaaaaaaagagacagggggctgggcgtggtggctcacgcctgtaatcctagcactttgggaggccgaggcgggtggatcacgaggtaggagttaaagaccagcctggccaacatggcaaaaccctactaaagatacaaaaaaaaaaaaaaattagccaggcgtggtggtgggtgcctgtaatcccaggtacttggaaggctgaggcaggagaatctcttgaacccagaaggcgaaggttgcagtgaaccgagatcatgccattgtactctagcctgggtgacaagagcaagactccgtctcaaaaaaaaaaaaaaaaaaaaaaagaagtagagacagggagacagggtctcactgtgttgcctaggccggtcttgaactcctgggctcaagtgattctcccaccttgacctcctaaattgttgggattacaggtgtgagacagtgcacctggccgaaatagctcaagtttctgaaaaacaaatctgaatctatttgttattcttagcgtcactggtctggctttcagaattaacatacaaggttgccacacctagttctgcccagctttatgtcttttattccagtattccaccaaagtttgttttcctgcattccagttctcaagtcttaagataaagattgtacttgacagtttagtatatccataaaactatttgaggtggttaaggttcttgggttcattttccttaatactttgctgaatattgtagattgtaggcaatgaaaaagtctactaaattaggaaaaccttgaataattaggtatcctaggtaagagcccctaaacatcaagcaatctgtgagtctgtaaagaaataaatattttttggattattcttatctaattccacccctgttggaagatgatttctttgttctttgcaactatggaagctgtgaaaatcatcacaagtgcctctgaaagcgagtgttaggttggttagagggtttaatattttctgcaatggtttgtaggaattttaataaatgtagtatattttctgagatgattttgtaaaagtactattttaaatatcaaatcaaccaataaattcacatttgtgttaggaacagaaatatggttta

SEQ ID NO: 12460 - DNA, 104 bp, Homo sapiens
  source 1..104: mol_type = unassigned DNA
caggaggctctctgagaagagacagcaaagcttcttagatggatcgaaagaccacgagctgggataccaagttctatgaaaagcctgttacattaggcaacaag

SEQ ID NO: 12461 - DNA, 763 bp, Homo sapiens
  source 1..763: mol_type = unassigned DNA
aggctctctgagaagagacagcaaagcttcttagatggatcgaaagaccacgagctgggataccaagttctatgaaaagtggtatgtgtgcaacagagagaaattatgcgaatcactccaggctgtctttgttcagagttaccttgatcaaggaacacagatcttcttaaacaacagcattgagaaatcgggctggctatttatccaattatatcattcttttgtgtcatctgtttttagcctgtttatgtctagaacatctatcaatgggttgctaggaagaggctcaatgtttgtgttttcaccagatcagtttcagagactgcttaaaattaatccagactggaaaacccacagacttcttgatttaggtgctggagatggagaagtcacaaaaatcatgagccctcattttgaagaaatctatgccactgagctttctgaaactatgatatggcagcttcagaaaaagaaatacagagtccttggtataaatgaatggcagaatacggggttccagtatgatgtcatcagctgcctgaacttgctggaccgctgtgatcagcccctgactttgttaaaagatatcagaagtgtcttggagccaactagaggcagggtcatccttgcccttgtcctcccctttcatccctatgtggaaaacgtaggtggcaagtgggagaaaccatcagaaattttggaaatcaaaggacagaactgggaagaacaagtgaatagtctgcctgaagttttcagaaaagct

SEQ ID NO: 12462 - DNA, 3256 bp, Homo sapiens
  source 1..3256: mol_type = unassigned DNA
ggccgctcgtaagtgctccggatggaaactggtgcagggggcagcggcgttccgcggccggaagggaagggggaggtgccgaggctgcgcgccggctgctcctccccacccccagcctttgccctgaagggggctggatgggcaaggcggccgcgatggctcgagctcgggcggtggcggcggtggccggaggcggcggtgcctcctcctcctcgccccggcgccggcggtgatccgagcgagcggccgcggcccccgatgagactgctggcgggctggctgtgcctgagcctggcgtccgtgtggctggcgcggaggatgtggacgctgcggagcccgctcacccgctccctgtacgtgaacatgactagcggcccgggtgggccggcggcggccgcgggcggcaggaaggagaaccaccagtggtatgtgtgcaacagagagaaattatgcgaatcactccaggctgtctttgttcagagttaccttgatcaaggaacacagatcttcttaaacaacagcattgagaaatcgggctggctatttatccaattatatcattcttttgtgtcatctgtttttagcctgtttatgtctagaacatctatcaatgggttgctaggaagaggctcaatgtttgtgttttcaccagatcagtttcagagactgcttaaaattaatccagactggaaaacccacagacttcttgatttaggtgctggagatggagaagtcacaaaaatcatgagccctcattttgaagaaatctatgccactgagctttctgaaactatgatatggcagcttcagaaaaagaaatacagagtccttggtataaatgaatggcagaatacggggttccagtatgatgtcatcagctgcctgaacttgctggaccgctgtgatcagcccctgactttgttaaaagatatcagaagtgtcttggagccaactagaggcagggtcatccttgcccttgtcctcccctttcatccctatgtggaaaacgtaggtggcaagtgggagaaaccatcagaaattttggaaatcaaaggacagaactgggaagaacaagtgaatagtctgcctgaagttttcagaaaagctggttttgttatcgaagctttcaccagactaccatacctgtgtgaaggcgacatgtataatgactactacgttctggatgacgctgtctttgttctcaaaccagtataaacacgtggaggtcgaagtcttcagagtccgcaccctccgggatgtgcccttggaagagggtctgtgttcacaattacgtgaagggaggacccttggggaccgccattctaaatatcatgtaggaatttaaaaagccaaaatactaattatttctttgtagtgtgtaaaggaatgtttttaaaagacaaaaacccaactctttgtggatttttatcaactctttactcagagccactctccaatgcaggtcacactccaattatgatggaagatattttttatacttaattgcagtagggactcattcccagacaaagcaatagtcacgacttcatggaaccaatcaatggattgttttttgaagactggcaataaagctgtccattcaattccaaatactggttttaaggtatagccactgatattctttcatgtttagaaattctttctgttattattcaagaaaatgtttttaatcatgctaataaacttttttggagatgactttggcatcatgtttgaattcatataaagctcccctagcattttttattggtttggcttcaggagtacccaaatagtagcattatgagaatgacgcagacaatttgaataggggggaaggaaggcttcagacttgggggaaggggagattattgcaaattgcagtgaacactgagtcagtaaaaaaaaaaaacagaaacaaaaacccagcctcattcagatacagaacttcagggacccctccccccacccccccagttaatgctgctgtgaaaaatgcaaaataacctggttctgactttgtgatcactcatgtcccatacactgaactttgtttttttctggacaatctcaggttctcagaattgaaacattcagttttgtctactgacaaaatgcaactaaaaatgttttaattcaacttcttactctacacttatatacctctctcccagagcttggctcttccctgaaatccttaaaggagtttattatttgccaagaatatggtttgatgaagaccgtgtcagactcatgcattctggaatccgtgagtgcctccaaccataaacccagaaatgctgccatagaggaacccattagcaagatcaataaccatcgtggatattccaaagagcagagcatttaacccagaatctgaaatctcagtaataacagaaatgtcaatatgagattgtggttattaacaatatgttatcctcactactttatttcttttttcatccaggtgtttcattaagtattctcatttatatgctcatagaagtcatcagatcaacacattcactccaacacctgggtataaaggcgaattaaaacctgaagaattactttattattcattaagaactgcattcccacatcctcacaccaatatcttccactgttactgtgcagtcataataagagttgggttatgtgatttatgcaaaattgttattggtgtgttctaatgatttttttccaggaattcaagtaagtgaagtacaaatacttagcaccatagattgtaaaaatagaaagaggaaatgagaaaacttaatgtcgttcttgtacagttgagttttgcttctttataaactgtctgttaaaatcaggggttgctgttagactgtcaagcagaagtgatggatgttcaaggaggcaggttgccccaaagtgttttctaactttcaagtagagaactttatgctctaataagaaaaatacaactcattcttaaccacccccccaaaacagagaaaacacatacatttatgcattttaaagataaaaagtagtttctcaaaaaaatctgaagttctctgaaaaccagcttattaaaagtgctgttttgtggtgaaaattgaaaccaaatccactcacatttcctatcgggtcttgaaattcttggtggtgtgtcaccattccactagatggcagtgttgcttactgagtgtcaatggcttttttccccgtaaatggaatcatgtttttctcccccaaagtacaataaagctgccttgtctgcaccatt

SEQ ID NO: 12463 - DNA, 1817 bp, Homo sapiens
  source 1..1817: mol_type = unassigned DNA
ggctgcgcgccggctgctcctccccacccccagcctttgccctgaagggggctggatgggcaaggcggccgcgatggctcgagctcgggcggtggcggcggtggccggaggcggcggtgcctcctcctcctcgccccggcgccggcggtgatccgagcgagcggccgcggcccccgatgagactgctggcgggctggctgtgcctgagcctggcgtccgtgtggctggcgcggaggatgtggacgctgcggagcccgctcacccgctccctgtacgtgaacatgactagcggcccgggtgggccggcggcggccgcgggcggcaggaaggagaaccaccagtggtatgtgtgcaacagagagaaattatgcgaatcactccaggctgtctttgttcagagttaccttgatcaaggaacacagatcttcttaaacaacagcattgagaaatcgggctggctatttatccaattatatcattcttttgtgtcatctgtttttagcctgtttatgtctagaacatctatcaatgggttgctaggaagaggctcaatgtttgtgttttcaccagatcagtttcagagactgcttaaaattaatccagactggaaaacccacagacttcttgatttaggtgctggagatggagaagtcacaaaaatcatgagccctcattttgaagaaatctatgccactgagctttctgaaactatgatatggcagcttcagaaaaagaaatacagagtccttggtataaatgaatggcagaatacggggttccagtatgatgtcatcagctgcctgaacttgctggaccgctgtgatcagcccctgactttgttaaaagatatcagaagtgtcttggagccaactagaggcagggtcatccttgcccttgtcctcccctttcatccctatgtggaaaacggtggcaagtgggagaaaccatcagaaattttggaaatcaaaggacagaactgggaagaacaagtgaatagtctgcctgaagttttcagaaaagctggttttgttatcgaagctttcaccagactaccatacctgtgtgaaggcgacatgtataatgactactacgttctggatgacgctgtctttgttctcaaaccagtataaacacgtggaggtcgaagtcttcagagtccgcaccctccgggatgtgcccttggaagagggtctgtgttcacaattacgtgaagggaggacccttggggaccgccattctaaatatcatgtaggaatttaaaaagccaaaatactaattatttctttgtagtgtgtaaaggaatgtttttaaaagacaaaaacccaactctttgtggatttttatcaactctttactcagagccactctccaatgcaggtcacactccaattatgatggaagatattttttatacttaattgcagtagggactcattcccagacaaagcaatagtcacgacttcatggaaccaatcaatggattgttttttgaagactggcaataaagctgtccattcaattccaaatactggttttaaggtatagccactgatattctttcatgtttagaaattctttctgttattattcaagaaaatgtttttaatcatgctaataaacttttttggagatgactttggcatcatgtttgaattcatataaagctcccctagcattttttattggtttggcttcaggagtacccaaatagtagcattatgagaatgacgcagacaatttgaataggggggaaggaaggcttcagacttgggggaaggggagattattgcaaattgcagtgaacactgagtcagtaa

SEQ ID NO: 12464 - DNA, 701 bp, Homo sapiens
  source 1..701: mol_type = unassigned DNA
ctttgccctgaagggggctggatgggcaaggcggccgcgatggctcgagctcgggcggtggcggcggtggccggaggcggcggtgcctcctcctcctcgccccggcgccggcggtgatccgagcgagcggccgcggcccccgatgagactgctggcgggctggctgtgcctgagcctggcgtccgtgtggctggcgcggaggatgtggacgctgcggagcccgctcacccgctccctgtacgtgaacatgactagcggcccgggtgggccggcggcggccgcgggcggcaggaaggagaaccaccaggttgctaggaagaggctcaatgtttgtgttttcaccagatcagtttcagagactgcttaaaattaatccagactggaaaacccacagacttcttgatttaggtgctggagatggagaagtcacaaaaatcatgagccctcattttgaagaaatctatgccactgagctttctgaaactatgatatggcagcttcagaaaaagaaatacagagtccttggtataaatgaatggcagaatacggggttccagtatgatgtcatcagctgcctgaacttgctggaccgctgtgatcagcccctgactttgttaaaagatatcagaagtgtcttggagccaactagaggcagggtcatccttgcccttgtcctcccctttcatccctatgtggaaaac

SEQ ID NO: 12465 - DNA, 447 bp, Homo sapiens
  source 1..447: mol_type = unassigned DNA
gcggccgcggcccccgatgagactgctggcgggctggctgtgcctgagcctggcgtccgtgtggctggcgcggaggatgtggacgctgcggagcccgctcacccgctcccttggtatgtgtgcaacagagagaaattatgcgaatcactccaggctgtctttgttcagagttaccttgatcaaggaacacagatcttcttaaacaacagcattgagaaatcgggctggctatttatccaattatatcattcttttgtgtcatctgtttttagcctgtttatgtctagaacatctatcaatgggttgctaggaagaggctcaatgtttgtgttttcaccagatcagtttcagagactgcttaaaattaatccagactggaaaacccacagacttcttgatttaggtgctggagatggagaagtcacaaaaatcatgagccctcatttt

SEQ ID NO: 12466 - DNA, 785 bp, Homo sapiens
  source 1..785: mol_type = unassigned DNA
ggaaaggcaacttaatctggtcactggagtgttaaattctgttgcttactttgctatttgggtttgtttggtgattttgagttaaggcattggattatgtgactgttttcttgtctaaaaacaaggatgctgctagctgtttgccttctgatgttgaatctcagtgaaagagaggccagcagagctttctaaatctcggtggtatgtgtgcaacagagagaaattatgcgaatcactccaggctgtctttgttcagagttaccttgatcaaggaacacagatcttcttaaacaacagcattgagaaatcgggctggctatttatccaattatatcattcttttgtgtcatctgtttttagcctgtttatgtctagaacatctatcaatgggttgctaggaagaggctcaatgtttgtgttttcaccagatcagtttcagagactgcttaaaattaatccagactggaaaacccacagacttcttgatttaggtgctggagatggagaagtcacaaaaatcatgagccctcattttgaagaaatctatgccactgagctttctgaaactatgatatggcagcttcagaaaaagaaatacagagtccttggtataaatgaatggcagaatacggggttccagtatgatgtcatcagctgcctgaacttgctggaccgctgtgatcagcccctgactttgttaaaagatatcagaagtgtcttggagccaactagaggcagggtcatccttgcccttgtcctcccctttcatccctatgtggaaaacg

SEQ ID NO: 12467 - DNA, 376 bp, Homo sapiens
  source 1..376: mol_type = unassigned DNA
agagttaccttgatcaaggaacacagatcttcttaaacaacagcattgagaaatcgggctggctatttatccaattatatcattcttttgtgtcatctgtttttagcctgtttatgtctagaacatctatcaatggagtccttggtataaatgaatggcagaatacggggttccagtatgatgtcatcagctgcctgaacttgctggaccgctgtgatcagcccctgactttgttaaaagatatcagaagtgtcttggagccaactagaggcagggtcatccttgcccttgtcctcccctttcatccctatgtggaaaacgtaggtggcaagtgggagaaaccatcagaaattttggaaatcaaaggacagaactg

SEQ ID NO: 12468 - DNA, 480 bp, Homo sapiens
  source 1..480: mol_type = unassigned DNA
accagatcagtttcagagactgcttaaaattaatccagactggaaaacccacagacttcttgatttaggtgctggagatggagaagtcacaaaaatcatgagccctcattttgaagaaatctatgccactgagctttctgaaactatgatatggcagcttcagaaaaagaaatacagagtccttggtataaatgaatggcagaatacggggttccagtatgatgtcatcagctgcctgaacttgctggaccgctgtgatcagcccctgactttgttaaaagatatcagaagtgtcttggagccaactagaggcagggtcatccttgcccttgtcctcccctttcatccctatgtggaaaacggtaagtgtggtcagtcaggctagctcttactgaggatagctgtttattggtatttgtgattttgtgctgtgtacaattaaatattgtctagtatgtcttataatagcctgcagtttaa

SEQ ID NO: 12469 - DNA, 5603 bp, Homo sapiens
  source 1..5603: mol_type = unassigned DNA
ggttattaaaagtagaagcaaaaagtcacccatagtccttttgcctgaaataactcccattaacattttgatatatttcttcacagatgagaaaaaattaagaactttccccccttccctgccctataatccaaattgtgtgggcaaatctgagattactagatgtattggaaatcctttctctttcatagataaaaaaacagaagtagacagaattttaaaaatagatatactatgggatggctattggagtcatggcagttttttttttcttaaatgaaaagtacttttatagaaattgttctttgaaaatattcagcaaataatcatttattgctttctatgtgcagatcaagtttgtatgataattaaattattgataacttatacctacgattttaagaatattttcaaccctttggtcagattgtctccaattagcataatagcaaagagacttttcaaggttaatatgaaactttttctcagctatttttttattgtctatttctcaggggaaaaaggaaacttatcctcttaggcagttttcataatgttatacatttaaaaattaatctgaaggagcttaaaatataaatgcattaggtgaaaaatagcagttgatttaaataaaatgaaggaggagaagaaaaagaaccttaccgacacaaaatagaatgagattggtttgcagatggcgagcgatgttgcttctgctcgcagtccccatttctgtgtatgccggggcgggttggggtgtgtatttgaaaggaaagttggctttcttttttcagaagggaagaagagctgaagagaggaacctcttatgaaggaaccataatcaggaactttttgaaattgtgcaaggatggcttcaccatttaacattgagattttggcctggagcacatttagaaatgtgcatatcttttttttttccatggattttacagttgtcataggtgttagatgtttctgggtgagattttgatttacacctagcacatatttccaggaaggagtattgtttgacaaataattcgtacttggatttttcagaacagttcagtcactgtctagggtacctgctctgggtgccactctgggccagtaactgctgggaacaaagaacagcagaaggagaagtggctttgtgtagagatgagaaaagttagtaaacaacacattctaatgcagcgaataaataaattgtctgttattaactttttgtactccagttttgaatccaaagacacctgccttccccccttttttgacagggtctctatcacccaggctggaatgcagtggcaagattgcaggtcattgcagcctcagcttcctgagtagctgggactacaggcatgcaccaccacccctggctaatttttttttttttttgtagattctgtgttgtctaggctagtcctgccctcaagcgatccccctgccttggcctcccaaagtgttaggattacaggtgtgagccaccatgcctggcccaaagacccccttttaatgtgttgagaaacaaatatgtgggccctctgtcctctgtgtcctctcccccagcacttagtggtgattcagtaagggtcttctttgtaaagcagcagaaacagactcaggctgacttaaaaggaaatttatgcaaacatttgaaggtagatcctagagtcactgggagggctagtgaatcttgtgtggggtccacagccaggaagaatgcctcaaatcacaccataaacaggtctgaagaggatgctactgccactgccaaacactaggtgccatcagccctgttgtcagcatcgctcaaccactgccccagccccttggtctcactgccattgctccacccccagagaaggagaagctcacatccccactactctgggtcactggctctccattccagggcatgggcaagtgtgcctggcttaggctgcgtgccagtgcctcagctgcacggcaggccaggaaagcggctcccaggccttgtgtctctcccagactctgggcaggcaattccccagacatgggaagagcgtcatctgcaccactgaaaattatgaaaaatctccccaccatgatatgatgtctgtgcccttggcatctgctcatgatatattttctcattaacagaaagttattctcagtctgttttgtttttttttttttttttttttttgagacagagtctcgctctgtcgcccaggctggagtgcagtggcacgatcttggctcgctgcaagctccgcctcccgggttcacaccattctcctgcctcagcctcccaagtagctgggactacaggtgcatgttgccatgcccagctaatttttttgtattttttttagtagagacggggtttcactgtgttagtcaggatggtcttgatctcctgacctcgtgatccgcccacctcggcctcccaaagtgctgggattacaggcatgtgccaccacgcccggcctcaatctggttttaacacttcaacagatgtatgtagtttttgtatcaccatagcacctaaaaagtacccccaaagttaaatatactgtcatctctgtgtgtgtgtctgtagtcagtgccaggtttgtatgtgaatttgaggaccttccctagtccccttgtcccccaggcatctcctgctcataggtttggaaatgactgatagaggcttcatctctagtccaagaaatgctggacggtgtatccatcctactgttccatctctctctggtcctggagcttaatgtttatgaaattgttctgaaaaggcaaagaatgagtcaacttccctagaaaaactccccaatgatctgcttttctaaattaaaatccttcatgagcctgtttttattttcagcctaataaatctctctaggtagtaagttgcataagtttactatgccagtggtattttcttgcatttgtccaaaactgtccttcagatattacatgttgctctctgtttcagtattccagcatttaatgaccagttttccaaacccattaaccattacaccctgcagtcagtctattggcagatactacccaaaactgtcagagaagataacagtgtggggccttggatccagacaaacctgggcttacatttccatactgacactcattaaccttgcaagcgtgggcaagttcttcaccccttctgagtctgttctttatctgcccacctgtctcaaagagtacctgggaagtacaaaagaggtaactcatgaagccctcaggcttggaacgtaccaagtccttggtagatatggctcctccctgcttccctctttaaatcacttgtttgttcaagaatttaactgaatgttcttatttgtattagtaggtggcaagtgggagaaaccatcagaaattttggaaatcaaaggacagaactgggaagaacaagtgaatagtctgcctgaagttttcagaaaagctggttttgttatcgaagctttcaccagactaccatacctgtgtgaaggcgacatgtataatgactactacgttctggatgacgctgtctttgttctcaaaccagtataaacacgtggaggtcgaagtcttcagagtccgcaccctccgggatgtgcccttggaagagggtctgtgttcacaattacgtgaagggaggacccttggggaccgccattctaaatatcatgtaggaatttaaaaagccaaaatactaattatttctttgtagtgtgtaaaggaatgtttttaaaagacaaaaacccaactctttgtggatttttatcaactctttactcagagccactctccaatgcaggtcacactccaattatgatggaagatattttttatacttaattgcagtagggactcattcccagacaaagcaatagtcacgacttcatggaaccaatcaatggattgttttttgaagactggcaataaagctgtccattcaattccaaatactggttttaaggtatagccactgatattctttcatgtttagaaattctttctgttattattcaagaaaatgtttttaatcatgctaataaacttttttggagatgactttggcatcatgtttgaattcatataaagctcccctagcattttttattggtttggcttcaggagtacccaaatagtagcattatgagaatgacgcagacaatttgaataggggggaaggaaggcttcagacttgggggaaggggagattattgcaaattgcagtgaacactgagtcagtaaaaaaaaaaaacagaaacaaaaacccagcctcattcagatacagaacttcagggacccctccccccacccccccagttaatgctgctgtgaaaaatgcaaaataacctggttctgactttgtgatcactcatgtcccatacactgaactttgtttttttctggacaatctcaggttctcagaattgaaacattcagttttgtctactgacaaaatgcaactaaaaatgttttaattcaacttcttactctacacttatatacctctctcccagagcttggctcttccctgaaatccttaaaggagtttattatttgccaagaatatggtttgatgaagaccgtgtcagactcatgcattctggaatccgtgagtgcctccaaccataaacccagaaatgctgccatagaggaacccattagcaagatcaataaccatcgtggatattccaaagagcagagcatttaacccagaatctgaaatctcagtaataacagaaatgtcaatatgagattgtggttattaacaatatgttatcctcactactttatttcttttttcatccaggtgtttcattaagtattctcatttatatgctcatagaagtcatcagatcaacacattcactccaacacctgggtataaaggcgaattaaaacctgaagaattactttattattcattaagaactgcattcccacatcctcacaccaatatcttccactgttactgtgcagtcataataagagttgggttatgtgatttatgcaaaattgttattggtgtgttctaatgatttttttccaggaattcaagtaagtgaagtacaaatacttagcaccatagattgtaaaaatagaaagaggaaatgagaaaacttaatgtcgttcttgtacagttgagttttgcttctttataaactgtctgttaaaatcaggggttgctgttagactgtcaagcagaagtgatggatgttcaaggaggcaggttgccccaaagtgttttctaactttcaagtagagaactttatgctctaataagaaaaatacaactcattcttaaccacccccccaaaacagagaaaacacatacatttatgcattttaaagataaaaagtagtttctcaaaaaaatctgaagttctctgaaaaccagcttattaaaagtgctgttttgtggtgaaaattgaaaccaaatccactcacatttcctatcgggtcttgaaattcttggtggtgtgtcaccattccactagatggcagtgttgcttactgagtgtcaatggcttttttccccgtaaatggaatcatgtttttctcccccaaagtacaataaagctgccttgtctgcacca

SEQ ID NO: 12470 - DNA, 2890 bp, Homo sapiens
  source 1..2890: mol_type = unassigned DNA
atgtggacgctgcggagcccgctcacccgctccctgtacgtgaaggagaaccaccagtggtatgtgtgcaacagagagaaattatgcgaatcactccaggctgtctttgttcagagttaccttgatcaaggaacacagatcttcttaaacaacagcattgagaaatcgggctggctatttatccaattatatcattcttttgtgtcatctgtttttagcctgtttatgtctagaacatctatcaatgggttgctaggaagaggctcaatgtttgtgttttcaccagatcagtttcagagactgcttaaaattaatccagactggaaaacccacagacttcttgatttaggtgctggagatggagaagtcacaaaaatcatgagccctcattttgaagaaatctatgccactgagctttctgaaactatgatatggcagcttcagaaaaagaaatacagagtccttggtataaatgaatggcagaatacggggttccagtatgatgtcatcagctgcctgaacttgctggaccgctgtgatcagcccctgactttgttaaaagatatcagaagtgtcttggagccaactagaggcagggtcatccttgcccttgtcctcccctttcatccctatgtggaaaacgtaggtggcaagtgggagaaaccatcagaaattttggaaatcaaaggacagaactgggaagaacaagtgaatagtctgcctgaagttttcagaaaagctggttttgttatcgaagctttcaccagactaccatacctgtgtgaaggcgacatgtataatgactactacgttctggatgacgctgtctttgttctcaaaccagtataaacacgtggaggtcgaagtcttcagagtccgcaccctccgggatgtgcccttggaagagggtctgtgttcacaattacgtgaagggaggacccttggggaccgccattctaaatatcatgtaggaatttaaaaagccaaaatactaattatttctttgtagtgtgtaaaggaatgtttttaaaagacaaaaacccaactctttgtggatttttatcaactctttactcagagccactctccaatgcaggtcacactccaattatgatggaagatattttttatacttaattgcagtagggactcattcccagacaaagcaatagtcacgacttcatggaaccaatcaatggattgttttttgaagactggcaataaagctgtccattcaattccaaatactggttttaaggtatagccactgatattctttcatgtttagaaattctttctgttattattcaagaaaatgtttttaatcatgctaataaacttttttggagatgactttggcatcatgtttgaattcatataaagctcccctagcattttttattggtttggcttcaggagtacccaaatagtagcattatgagaatgacgcagacaatttgaataggggggaaggaaggcttcagacttgggggaaggggagattattgcaaattgcagtgaacactgagtcagtaaaaaaaaaaaacagaaacaaaaacccagcctcattcagatacagaacttcagggacccctccccccacccccccagttaatgctgctgtgaaaaatgcaaaataacctggttctgactttgtgatcactcatgtcccatacactgaactttgtttttttctggacaatctcaggttctcagaattgaaacattcagttttgtctactgacaaaatgcaactaaaaatgttttaattcaacttcttactctacacttatatacctctctcccagagcttggctcttccctgaaatccttaaaggagtttattatttgccaagaatatggtttgatgaagaccgtgtcagactcatgcattctggaatccgtgagtgcctccaaccataaacccagaaatgctgccatagaggaacccattagcaagatcaataaccatcgtggatattccaaagagcagagcatttaacccagaatctgaaatctcagtaataacagaaatgtcaatatgagattgtggttattaacaatatgttatcctcactactttatttcttttttcatccaggtgtttcattaagtattctcatttatatgctcatagaagtcatcagatcaacacattcactccaacacctgggtataaaggcgaattaaaacctgaagaattactttattattcattaagaactgcattcccacatcctcacaccaatatcttccactgttactgtgcagtcataataagagttgggttatgtgatttatgcaaaattgttattggtgtgttctaatgatttttttccaggaattcaagtaagtgaagtacaaatacttagcaccatagattgtaaaaatagaaagaggaaatgagaaaacttaatgtcgttcttgtacagttgagttttgcttctttataaactgtctgttaaaatcaggggttgctgttagactgtcaagcagaagtgatggatgttcaaggaggcaggttgccccaaagtgttttctaactttcaagtagagaactttatgctctaataagaaaaatacaactcattcttaaccacccccccaaaacagagaaaacacatacatttatgcattttaaagataaaaagtagtttctcaaaaaaatctgaagttctctgaaaaccagcttattaaaagtgctgttttgtggtgaaaattgaaaccaaatccactcacatttcctatcgggtcttgaaattcttggtggtgtgtcaccattccactagatggcagtgttgcttactgagtgtcaatggcttttttccccgtaaatggaatcatgtttttctcccccaaagtacaataaagctgccttgtctgcaccatt

SEQ ID NO: 12471 - DNA, 3256 bp, Homo sapiens
  source 1..3256: mol_type = unassigned DNA
ggccgcttgtaagtgctccggatggaaactggtgcagggggcagcggcgttccgcggccggaagggaagggggaggtgccgaggctgcgcgccggctgctcctccccacccccagcctttgccctgaagggggctggatgggcaaggcggccgcgatggctcgagctcgggcggtggcggcggtggccggaggcggcggtgcctcctcctcctcgccccggcgccggcggtgatccgagcgagcggccgcggcccccgatgagactgctggcgggctggctgtgcctgagcctggcgtccgtgtggctggcgcggaggatgtggacgctgcggagcccgctcacccgctccctgtacgtgaacatgactagcggcccgggtgggccggcggcggccgcgggcggcaggaaggagaaccaccagtggtatgtgtgcaacagagagaaattatgcgaatcactccaggctgtctttgttcagagttaccttgatcaaggaacacagatcttcttaaacaacagcattgagaaatcgggctggctatttatccaattatatcattcttttgtgtcatctgtttttagcctgtttatgtctagaacatctatcaatgggttgctaggaagaggctcaatgtttgtgttttcaccagatcagtttcagagactgcttaaaattaatccagactggaaaacccacagacttcttgatttaggtgctggagatggagaagtcacaaaaatcatgagccctcattttgaagaaatctatgccactgagctttctgaaactatgatatggcagcttcagaaaaagaaatacagagtccttggtataaatgaatggcagaatacggggttccagtatgatgtcatcagctgcctgaacttgctggaccgctgtgatcagcccctgactttgttaaaagatatcagaagtgtcttggagccaactagaggcagggtcatccttgcccttgtcctcccctttcatccctatgtggaaaacgtaggtggcaagtgggagaaaccatcagaaattttggaaatcaaaggacagaactgggaagaacaagtgaatagtctgcctgaagttttcagaaaagctggttttgttatcgaagctttcaccagactaccatacctgtgtgaaggcgacatgtataatgactactacgttctggatgacgctgtctttgttctcaaaccagtataaacacgtggaggtcgaagtcttcagagtccgcaccctccgggatgtgcccttggaagagggtctgtgttcacaattacgtgaagggaggacccttggggaccgccattctaaatatcatgtaggaatttaaaaagccaaaatactaattatttctttgtagtgtgtaaaggaatgtttttaaaagacaaaaacccaactctttgtggatttttatcaactctttactcagagccactctccaatgcaggtcacactccaattatgatggaagatattttttatacttaattgcagtagggactcattcccagacaaagcaatagtcacgacttcatggaaccaatcaatggattgttttttgaagactggcaataaagctgtccattcaattccaaatactggttttaaggtatagccactgatattctttcatgtttagaaattctttctgttattattcaagaaaatgtttttaatcatgctaataaacttttttggagatgactttggcatcatgtttgaattcatataaagctcccctagcattttttattggtttggcttcaggagtacccaaatagtagcattatgagaatgacgcagacaatttgaataggggggaaggaaggcttcagacttgggggaaggggagattattgcaaattgcagtgaacactgagtcagtaaaaaaaaaaaacagaaacaaaaacccagcctcattcagatacagaacttcagggacccctccccccacccccccagttaatgctgctgtgaaaaatgcaaaataacctggttctgactttgtgatcactcatgtcccatacactgaactttgtttttttctggacaatctcaggttctcagaattgaaacattcagttttgtctactgacaaaatgcaactaaaaatgttttaattcaacttcttactctacacttatatacctctctcccagagcttggctcttccctgaaatccttaaaggagtttattatttgccaagaatatggtttgatgaagaccgtgtcagactcatgcattctggaatccgtgagtgcctccaaccataaacccagaaatgctgccatagaggaacccattagcaagatcaataaccatcgtggatattccaaagagcagagcatttaacccagaatctgaaatctcagtaataacagaaatgtcaatatgagattgtggttattaacaatatgttatcctcactactttatttcttttttcatccaggtgtttcattaagtattctcatttatatgctcatagaagtcatcagatcaacacattcactccaacacctgggtataaaggcgaattaaaacctgaagaattactttattattcattaagaactgcattcccacatcctcacaccaatatcttccactgttactgtgcagtcataataagagttgggttatgtgatttatgcaaaattgttattggtgtgttctaatgatttttttccaggaattcaagtaagtgaagtacaaatacttagcaccatagattgtaaaaatagaaagaggaaatgagaaaacttaatgtcgttcttgtacagttgagttttgcttctttataaactgtctgttaaaatcaggggttgctgttagactgtcaagcagaagtgatggatgttcaaggaggcaggttgccccaaagtgttttctaactttcaagtagagaactttatgctctaataagaaaaatacaactcattcttaaccacccccccaaaacagagaaaacacatacatttatgcattttaaagataaaaagtagtttctcaaaaaaatctgaagttctctgaaaaccagcttattaaaagtgctgttttgtggtgaaaattgaaaccaaatccactcacatttcctatcgggtcttgaaattcttggtggtgtgtcaccattccactagatggcagtgttgcttactgagtgtcaatggcttttttccccgtaaatggaatcatgtttttctcccccaaagtacaataaagctgccttgtctgcaccatt

SEQ ID NO: 12472 - DNA, 2890 bp, Homo sapiens; identical to SEQ ID NO: 12470
  source 1..2890: mol_type = unassigned DNA

SEQ ID NO: 12473 - DNA, 5603 bp, Homo sapiens
  source 1..5603: mol_type = unassigned DNA
ggttattaaaagtagaagcaaaaagtcacccatagtccttttgcctgaaataactcccattaacattttgatatatttcttcacagatgagaaaaaattaagaactttccccccttccctgccctataatccaaattgtgtgggcaaatctgagattactagatgtattggaaatcctttctctttcatagataaaaaaacagaagtagacagaattttaaaaatagatatactatgggatggctattggagtcatggcagttttttttttcttaaatgaaaagtacttttatagaaattgttctttgaaaatattcagcaaataatcatttattgctttctatgtgcagatcaagtttgtatgataattaaattattgataacttatacctacgattttaagaatattttcaaccctttggtcagattgtctccaattagcataatagcaaagagacttttcaaggttaatatgaaactttttctcagctatttttttattgtctatttctcaggggaaaaaggaaacttatcctcttaggcagttttcataatgttatacatttaaaaattaatctgaaggagcttaaaatataaatgcattaggtgaaaaatagcagttgatttaaataaaatgaaggaggagaagaaaaagaaccttaccgacacaaaatagaatgagattggtttgcagatggcgagcgatgttgcttctgctcgcagtccccatttctgtgtatgccggggcgggttggggtgtgtatttgaaaggaaagttggctttcttttttcagaagggaagaagagctgaagagaggaacctcttatgaaggaaccataatcaggaactttttgaaattgtgcaaggatggcttcaccatttaacattgagattttggcctggagcacatttagaaatgtgcatatcttttttttttccatggattttacagttgtcataggtgttagatgtttctgggtgagattttgatttacacctagcacatatttccaggaaggagtattgtttgacaaataattcgtacttggatttttcagaacagttcagtcactgtctagggtacctgctctgggtgccactctgggccagtaactgctgggaacaaagaacagcagaaggagaagtggctttgtgtagagatgagaaaagttagtaaacaacacattctaatgcagcgaataaataaattgtctgttattaactttttgtactccagttttgaatccaaagacacctgccttccccccttttttgacagggtctctatcacccaggctggaatgcagtggcaagattgcaggtcattgcagcctcagcttcctgagtagctgggactacaggcatgcaccaccacccctggctaatttttttttttttttgtagattctgtgttgtctaggctagtcctgccctcaagcgatccccctgccttggcctcccaaagtgttaggattacaggtgtgagccaccatgcctggcccaaagacccccttttaatgtgttgagaaacaaatatgtgggccctctgtcctctgtgtcctctcccccagcacttagtggtgattcagtaagggtcttctttgtaaagcagcagaaacagactcaggctgacttaaaaggaaatttatgcaaacatttgaaggtagatcctagagtcactgggagggctagtgaatcttgtgtggggtccacagccaggaagaatgcctcaaatcacaccataaacaggtctgaagaggatgctactgccactgccaaacactaggtgccatcagccctgttgtcagcatcgctcaaccactgccccagccccttggtctcactgccattgctccacccccagagaaggagaagctcacatccccactactctgggtcactggctctccattccagggcgtgggcaagtgtgcctggcttaggctgcgtgccagtgcctcagctgcacggcaggccaggaaagcggctcccaggccttgtgtctctcccagactctgggcaggcaattccccagacatgggaagagcgtcatctgcaccactgaaaattatgaaaaatctccccaccatgatatgatgtctgtgcccttggcatctgctcatgatatattttctcattaacagaaagttattctcagtctgttttgtttttttttttttttttttttttgagacagagtctcgctctgtcgcccaggctggagtgcagtggcacgatcttggctcgctgcaagctccgcctcccgggttcacaccattctcctgcctcagcctcccaagtagctgggactacaggtgcatgttgccatgcccagctaatttttttgtattttttttagtagagacggggtttcactgtgttagtcaggatggtcttgatctcctgacctcgtgatccgcccacctcggcctcccaaagtgctgggattacaggcatgtgccaccacgcccggcctcaatctggttttaacacttcaacagatgtatgtagtttttgtatcaccatagcacctaaaaagtacccccaaagttaaatatactgtcatctctgtgtgtgtgtctgtagtcagtgccaggtttgtatgtgaatttgaggaccttccctagtccccttgtcccccaggcatctcctgctcataggtttggaaatgactgatagaggcttcatctctagtccaagaaatgctggacggtgtatccatcctactgttccatctctctctggtcctggagcttaatgtttatgaaattgttctgaaaaggcaaagaatgagtcaacttccctagaaaaactccccaatgatctgcttttctaaattaaaatccttcatgagcctgtttttattttcagcctaataaatctctctaggtagtaagttgcataagtttactatgccagtggtattttcttgcatttgtccaaaactgtccttcagatattacatgttgctctctgtttcagtattccagcatttaatgaccagttttccaaacccattaaccattacaccctgcagtcagtctattggcagatactacccaaaactgtcagagaagataacagtgtggggccttggatccagacaaacctgggcttacatttccatactgacactcattaaccttgcaagcgtgggcaagttcttcaccccttctgagtctgttctttatctgcccacctgtctcaaagagtacctgggaagtacaaaagaggtaactcatgaagccctcaggcttggaacgtaccaagtccttggtagatatggctcctccctgcttccctctttaaatcacttgtttgttcaagaatttaactgaatgttcttatttgtattagtaggtggcaagtgggagaaaccatcagaaattttggaaatcaaaggacagaactgggaagaacaagtgaatagtctgcctgaagttttcagaaaagctggttttgttatcgaagctttcaccagactaccatacctgtgtgaaggcgacatgtataatgactactacgttctggatgacgctgtctttgttctcaaaccagtataaacacgtggaggtcgaagtcttcagagtccgcaccctccgggatgtgcccttggaagagggtctgtgttcacaattacgtgaagggaggacccttggggaccgccattctaaatatcatgtaggaatttaaaaagccaaaatactaattatttctttgtagtgtgtaaaggaatgtttttaaaagacaaaaacccaactctttgtggatttttatcaactctttactcagagccactctccaatgcaggtcacactccaattatgatggaagatattttttatacttaattgcagtagggactcattcccagacaaagcaatagtcacgacttcatggaaccaatcaatggattgttttttgaagactggcaataaagctgtccattcaattccaaatactggttttaaggtatagccactgatattctttcatgtttagaaattctttctgttattattcaagaaaatgtttttaatcatgctaataaacttttttggagatgactttggcatcatgtttgaattcatataaagctcccctagcattttttattggtttggcttcaggagtacccaaatagtagcattatgagaatgacgcagacaatttgaataggggggaaggaaggcttcagacttgggggaaggggagattattgcaaattgcagtgaacactgagtcagtaaaaaaaaaaaacagaaacaaaaacccagcctcattcagatacagaacttcagggacccctccccccacccccccagttaatgctgctgtgaaaaatgcaaaataacctggttctgactttgtgatcactcatgtcccatacactgaactttgtttttttctggacaatctcaggttctcagaattgaaacattcagttttgtctactgacaaaatgcaactaaaaatgttttaattcaacttcttactctacacttatatacctctctcccagagcttggctcttccctgaaatccttaaaggagtttattatttgccaagaatatggtttgatgaagaccgtgtcagactcatgcattctggaatccgtgagtgcctccaaccataaacccagaaatgctgccatagaggaacccattagcaagatcaataaccatcgtggatattccaaagagcagagcatttaacccagaatctgaaatctcagtaataacagaaatgtcaatatgagattgtggttattaacaatatgttatcctcactactttatttcttttttcatccaggtgtttcattaagtattctcatttatatgctcatagaagtcatcagatcaacacattcactccaacacctgggtataaaggcgaattaaaacctgaagaattactttattattcattaagaactgcattcccacatcctcacaccaatatcttccactgttactgtgcagtcataataagagttgggttatgtgatttatgcaaaattgttattggtgtgttctaatgatttttttccaggaattcaagtaagtgaagtacaaatacttagcaccatagattgtaaaaatagaaagaggaaatgagaaaacttaatgtcgttcttgtacagttgagttttgcttctttataaactgtctgttaaaatcaggggttgctgttagactgtcaagcagaagtgatggatgttcaaggaggcaggttgccccaaagtgttttctaactttcaagtagagaactttatgctctaataagaaaaatacaactcattcttaaccacccccccaaaacagagaaaacacatacatttatgcattttaaagataaaaagtagtttctcaaaaaaatctgaagttctctgaaaaccagcttattaaaagtgctgttttgtggtgaaaattgaaaccaaatccactcacatttcctatcgggtcttgaaattcttggtggtgtgtcaccattccactagatggcagtgttgcttactgagtgtcaatggcttttttccccgtaaatggaatcatgtttttctcccccaaagtacaataaagctgccttgtctgcacca

SEQ ID NO: 12474 - DNA, 1817 bp, Homo sapiens; identical to SEQ ID NO: 12463
  source 1..1817: mol_type = unassigned DNA

SEQ ID NO: 12475 - DNA, 763 bp, Homo sapiens; identical to SEQ ID NO: 12461
  source 1..763: mol_type = unassigned DNA

SEQ ID NO: 12476 - DNA, 376 bp, Homo sapiens; identical to SEQ ID NO: 12467
  source 1..376: mol_type = unassigned DNA

SEQ ID NO: 12477 - DNA, 480 bp, Homo sapiens; identical to SEQ ID NO: 12468
  source 1..480: mol_type = unassigned DNA

SEQ ID NO: 12478 - DNA, 785 bp, Homo sapiens; identical to SEQ ID NO: 12466
  source 1..785: mol_type = unassigned DNA

SEQ ID NO: 12479 - DNA, 701 bp, Homo sapiens; identical to SEQ ID NO: 12464
  source 1..701: mol_type = unassigned DNA

SEQ ID NO: 12480 - DNA, 447 bp, Homo sapiens; identical to SEQ ID NO: 12465
  source 1..447: mol_type = unassigned DNA

SEQ ID NO: 12481 - DNA, 104 bp, Homo sapiens; identical to SEQ ID NO: 12460
  source 1..104: mol_type = unassigned DNA

SEQ ID NO: 12482 - DNA, 5827 bp, Homo sapiens
  source 1..5827: mol_type = unassigned DNA
ttagcaggtctttctgcagggctgagctatcgctagggaacccacggtgactgaatcaaagggaagaaagacccaagacctggatctcccttttacatggaccctaaagcaaaggaaaatggcaaatgcacgacagcggcctcctgaacatcaccaaggtatccttctcagaccgaggtaaatacacgtgtgtggcttctaacatctacggcaccgtgaacaacacggtgaccttgcgcgtcatcttcacttctggagacatgggtgtctactacatggtcgtgtgcctggtggccttcaccatcgtcatggtcctcaatatcacccgcctgtgcatgatgagcagccatctaaagaagactgagaaggccatcaatgagttctttaggaccgaaggtgcagagaagctgcagaaggcatttgagatcgccaagcgcatccccatcatcacctccgccaaaactctagagcttgccaaagtcacccagttcaaaaccatggagttcgcccgctacatcgaagagcttgccaggagcgtgcctctgccgcctctcattatgaactgcaggactatcatggaggagattatggaggtggttgggctggaggagcaggggcagaattttgtgaggcatactccagagggccaggaggccgcagacagggatgaggtctacacaatccccaactctctgaagcggagcgactcccctgccgctgactcggacgcctcatcgctgcacgagcaacctcagcaaattgccatcaaggtgtcagttcacccgcagtccaaaaaagagcatgcagatgaccaagagggtggacagtttgaagtcaaagatgtagaggagacagaactgtcggcggaacattcccccgaaactgcagaaccttctaccgatgtcacgtccaccgagctaacatctgaagagccaacacctgttgaggtaccagataaggtactgccgccagcttacctggaagccacagagccagcagtgacacatgacaaaaacacctgcattatttacgaaagccatgtctaataccaaccccgaaaagctatgcatatcaagaaaatcaggggctgctccttgtaatacagatgtagtacgcacttgccgctaagccttaccaggagactctcatcccttaggtaggagtgatgccactttaaaaggagaaacacctgcctgcagtgaatgggactggaatttccccagtagagaagggtgcgagaaacatcagggtgcagaattgataccagacagaaggtgtctatgtgataatgagtttcagaggctgatctctgccaaataccttaattggtgatgccttcttggcaaagagtacaccactgtaagatattctgagttcaagaaccctgtccagtgccccctgcattgcttttccttttaaaaagtataggtctgctacaatagcaaatgcacgtacgtgggttttttgcagtttcttctcagttttaattttgcttttcctttataatggggtcattgttattaatactaattgttctttctggtttagtcctcattgccacttttgtccttatgtttccctagaacacgtacctcagagactttggtatcagtcaccagtaccagggctgatatctacaagtcacattacatttgtcatgttccaaagtagttacgaggcttgttatttttttttcattccccaggcctatttccatagatagctttttttgtttgtttccaacgaagctgctgttaaacgaaactgagaaaaactttgccccggaatagcactttaatagtcaaaaatgtgtttacctgtctgattgagtgagccttttggtgagctcagctgagatgtagagggagattgtaaaaggttaaatatacccacaccacccatgaaagtcactgtttaagttacatcatcctccaaataaagactgattctttacctggaaaatatattgcttccaaagacatcagattcagtggattcctgtaggttatagaatattggcttccaaacaggcttgcagggaccatatgctgttggatgacatataaccaggtccacttttatgaactgcatagctgacttggttgtccttaaagaggaaagcgaaaggttagggtaatagcaaagggaactgtgccatcagattttatgccaaaactgttgaataattatgcagtcctgcaagaaagtggttatatgtgaggtgcgtgatgttatggaaagaagacaaaattagtcatccaaaggcttaatacccactgtgccaataaccagctgcctggctttggacaagtctggacctcaggtcccttatctgtagaaggggcagatgacatgagctctgagcactgttgaaatggtatcactgtcacacagaaccaaaccaatattcacatccttgctccttttcacaatgactttaaagatttttgctttcatctcttggtccacctaacattttcatgcttcattacttaaataagaatgttggttttgagaaatagcattttaaacaaattgtggatcttctccttccaaaaaaaccattaggaccacatctgcaattaagatttaatattggtgagaatgagtggttttatttaattttcccttaaaagcaaaggagacagtaatcttaataaattcataggggccgtggccacatcaggtaatggggttatgatgtccaagattgcatggatcacattggtgatgagagcagacccagatgtttagtcctcactctgtcaccatctgaggaggtgaccttggacaactcccttcctctctctgggatttaatctttttcatctgtaaaatatgcaggtagtactcgagggtctacaggatcccttctagttgaaacatttatagttcacagaaagtttgcagtcttccaggataaccaacccccgttgcatgagacaagcaaaaaatgggtccatgaaattggatacttttgccatccaaactttacaacaaacattatctggctctgtaattgagagcagtgggcttggttttaaacctagccttgattagtttgtttatagataactgttgtggaaggtgatagaactagtcatggagtttgatgagacatctcttgaaaaggactgaactgttgacttctggttagaagtgctttgggcagtcacataaagaaatgagcagtgagaaatcaggagaaattatgactcctgttgggctttctggactagcattgtatgtttttgggttgcagaaaagttttaacaccacctcttagaatataaaaattttccagttgtcatggaggtccacagattcattaccatgggtttatatgcccaaagcaacaacagaggacttaagttcattttgtgatactgtatggatgttaccccatcctattcagttgtcattccacccaaacccatgtgtaggtttccacatggaaaggagaaggcatccattccacctagacattgaatagtgataataagctaaaagtgggcagattttcagtggagcaagagcagaaatatgcggccaaagaatgtttcctgattggttttgctgctttagactgcagtggggagagcttatgtagattttcaaaactttctccctctttaaggcatcataatgctctcggttttgataacaactgacataaagggaggttgacttaaaatgggaatttctccttccaaaaatgctacactcttcctatccatcctacagcttctttatgaaatgagaggccctcctgctagaatatgaaatgcagaagacctcatgactttcagctgatttttcaaagataaagtgaactgttcagcttcatagaaattcatgcgagtgtgactgaacgtgtgtgcatacacactcgtgcacattggactcatttgggcagttttaaaagcttcacactaaatccaaagcctcgtcctttgggtcgtatgtagtcgtttgtaaaatcaatttctggcttctgagtcatcctggtcatatctctagcaatgtttttcttgaaattctgaaaatgattcacatatgtgtgtacatttaattcacttagatgatctgtaaacttggatggtatttattctaaatggggaaaacaattttatatggaaaaatctatgtaatttataatggttttgttttatatattatattttcatatctctagggcacatctatcctcatctttttgtataccatacttagcaaaaagaaatactaatacttgactaaaatctctaggaaccaaacgtgatacatgtgatatatagcttctagaaatcgctctaaaaatctctgaatgtctcatccatcccaagcattattgtgctgtgtcattatgtccagaatgatttgtcttggatgcttatgagcatttgtttttcacaactaaggttgaaagacctgacatctcacacaatggggttctggaattcccctttcctcctttatctgtttttattgtttgtttcatttttaattgcaccagtctatgttgtcgaaactttgttttgaagggcaaatgtgagataacaagaaagcaatgtgatggaaagactggatgaatttacctatggctatgtaaattattttaatggactgataagatgtttcaagtctcatgcttggatctttatttattggtgatctaggatctgctcagctctttagcacatgaagaaaatcaggtacaaaggacatttgcatgtttggaacagcatgctctaagccccgtgcagccaacacaaattaacttgactgtagaaacaccaattccagctgctggaagaaatggtttagaaaggcaaaccagataccttttattctgccctaggaaatacagtgttgatcagtgctaaaactcttcagtggcagtcactgtggttcttttaactggggatttcctttcagtgtttcatttggtaccaaaacagaacatttaccttacatttcagatactctgttttctcagcattgttcagatactttcctttaccgctcttcacgtacccttttggcattgagtaattctataaatgtttctatccttggtttttaaaccaagttattcatactcttaaaatatctaccaaatctcattgtattttcacatattttgagcatcaagatactggtcattttaaaaaatccttcagtaaatagcacagtttattttcctaatgacatttttagggtttcttcattgatcaaccaggtttgggttacacaaatcaattgtgggggaaaaatcaaataaaacaattgcttattatattttccaaaggactgagcatttatcttttattcacgaagatatcatatgaggatgataatgatctttaacagattttttagagatagaatttataaagaggctgatactaagaatactacaatcaaaattgaagctagagaatgtaaaaatagaaagtaaatagttctaagaatattctggcataaattatttttatttagccaataaaatagcctccaaatgtatatctcagacaccatagagctgctaacaatgagaatcaaggaagatgcttgcacttagatttcgtttgttgtatttcagtagttctggatgtcctttgttaaaattggaaaatggaaaaatgtctcgacagaaatgtcaatctggtgattctgtgaactgtaaaatgttcacttttaaaaataaagttgtaaacaagttactcatataagttggtattacagtagcaaaaacagaaaaccatgtgatccatcctgtattttgattgatgctttaataaagggtttgcacagctgtgtggaa

SEQ ID NO: 12483 - DNA, 6318 bp, Homo sapiens
  source 1..6318: mol_type = unassigned DNA
ccgcgctcccggcagccggcggcgcagctcgcaacgctgtgaggcgccggcggaggcggctcgcccgcagtaggcgctaccgggcgtccggcgcagagtgcggcgcagcggccgctgtcgggctggccatggcgaggggtgcacggcggccacctgagtggcgcggcggtgtcaggttcttgctcaagtaccaactctatggacccaggacaggtttgtcccatgacctgctgtgaacagtgtgttgtctgatagaagattcggttggcaaaccatctctctattgccttacagagcaagcaaagaagatggatcgattgaagagccatctgactgtgtgctttctaccttctgtgccctttttaatcctagtatccactctagccaccgctaagagtgtgactaacagcactttaaatggcactaacgtggtcttgggctctgtgcccgtaatcattgccagaactgaccatatcatagtcaaggaagggaacagtgccttgattaactgtagtgtttatggcatccctgacccacagttcaagtggtataattccattggcaagctgctgaaagaagaagaggatgagaaggagagaggaggaggaaaatggcaaatgcacgacagcggcctcctgaacatcaccaaggtatccttctcagaccgaggtaaatacacgtgtgtggcttctaacatctacggcaccgtgaacaacacggtgaccttgcgcgtcatcttcacttctggagacatgggtgtctactacatggtcgtgtgcctggtggccttcaccatcgtcatggtcctcaatatcacccgcctgtgcatgatgagcagccatctaaagaagactgagaaggccatcaatgagttctttaggaccgaaggtgcagagaagctgcagaaggcatttgagatcgccaagcgcatccccatcatcacctccgccaaaactctagagcttgccaaagtcacccagttcaaaaccatggagttcgcccgctacatcgaagagcttgccaggagcgtgcctctgccgcctctcattatgaactgcaggactatcatggaggagattatggaggtggttgggctggaggagcaggggcagaattttgtgaggcatactccagagggccaggaggccgcagacagggatgaggtctacacaatccccaactctctgaagcggagcgactcccctgccgctgactcggacgcctcatcgctgcacgagcaacctcagcaaattgccatcaaggtgtcagttcacccgcagtccaaaaaagagcatgcagatgaccaagagggtggacagtttgaagtcaaagatgtagaggagacagaactgtcggcggaacattcccccgaaactgcagaaccttctaccgatgtcacgtccaccgagctaacatctgaagagccaacacctgttgaggtaccagataaggtactgccgccagcttacctggaagccacagagccagcagtgacacatgacaaaaacacctgcattatttacgaaagccatgtctaataccaaccccgaaaagctatgcatatcaagaaaatcaggggctgctccttgtaatacagatgtagtacgcacttgccgctaagccttaccaggagactctcatcccttaggtaggagtgatgccactttaaaaggagaaacacctgcctgcagtgaatgggactggaatttccccagtagagaagggtgcgagaaacatcagggtgcagaattgataccagacagaaggtgtctatgtgataatgagtttcagaggctgatctctgccaaataccttaattggtgatgccttcttggcaaagagtacaccactgtaagatattctgagttcaagaaccctgtccagtgccccctgcattgcttttccttttaaaaagtataggtctgctacaatagcaaatgcacgtacgtgggttttttgcagtttcttctcagttttaattttgcttttcctttataatggggtcattgttattaatactaattgttctttctggtttagtcctcattgccacttttgtccttatgtttccctagaacacgtacctcagagactttggtatcagtcaccagtaccagggctgatatctacaagtcacattacatttgtcatgttccaaagtagttacgaggcttgttatttttttttcattccccaggcctatttccatagatagctttttttgtttgtttccaacgaagctgctgttaaacgaaactgagaaaaactttgccccggaatagcactttaatagtcaaaaatgtgtttacctgtctgattgagtgagccttttggtgagctcagctgagatgtagagggagattgtaaaaggttaaatatacccacaccacccatgaaagtcactgtttaagttacatcatcctccaaataaagactgattctttacctggaaaatatattgcttccaaagacatcagattcagtggattcctgtaggttatagaatattggcttccaaacaggcttgcagggaccatatgctgttggatgacatataaccaggtccacttttatgaactgcatagctgacttggttgtccttaaagaggaaagcgaaaggttagggtaatagcaaagggaactgtgccatcagattttatgccaaaactgttgaataattatgcagtcctgcaagaaagtggttatatgtgaggtgcgtgatgttatggaaagaagacaaaattagtcatccaaaggcttaatacccactgtgccaataaccagctgcctggctttggacaagtctggacctcaggtcccttatctgtagaaggggcagatgacatgagctctgagcactgttgaaatggtatcactgtcacacagaaccaaaccaatattcacatccttgctccttttcacaatgactttaaagatttttgctttcatctcttggtccacctaacattttcatgcttcattacttaaataagaatgttggttttgagaaatagcattttaaacaaattgtggatcttctccttccaaaaaaaccattaggaccacatctgcaattaagatttaatattggtgagaatgagtggttttatttaattttcccttaaaagcaaaggagacagtaatcttaataaattcataggggccgtggccacatcaggtaatggggttatgatgtccaagattgcatggatcacattggtgatgagagcagacccagatgtttagtcctcactctgtcaccatctgaggaggtgaccttggacaactcccttcctctctctgggatttaatctttttcatctgtaaaatatgcaggtagtactcgagggtctacaggatcccttctagttgaaacatttatagttcacagaaagtttgcagtcttccaggataaccaacccccgttgcatgagacaagcaaaaaatgggtccatgaaattggatacttttgccatccaaactttacaacaaacattatctggctctgtaattgagagcagtgggcttggttttaaacctagccttgattagtttgtttatagataactgttgtggaaggtgatagaactagtcatggagtttgatgagacatctcttgaaaaggactgaactgttgacttctggttagaagtgctttgggcagtcacataaagaaatgagcagtgagaaatcaggagaaattatgactcctgttgggctttctggactagcattgtatgtttttgggttgcagaaaagttttaacaccacctcttagaatataaaaattttccagttgtcatggaggtccacagattcattaccatgggtttatatgcccaaagcaacaacagaggacttaagttcattttgtgatactgtatggatgttaccccatcctattcagttgtcattccacccaaacccatgtgtaggtttccacatggaaaggagaaggcatccattccacctagacattgaatagtgataataagctaaaagtgggcagattttcagtggagcaagagcagaaatatgcggccaaagaatgtttcctgattggttttgctgctttagactgcagtggggagagcttatgtagattttcaaaactttctccctctttaaggcatcataatgctctcggttttgataacaactgacataaagggaggttgacttaaaatgggaatttctccttccaaaaatgctacactcttcctatccatcctacagcttctttatgaaatgagaggccctcctgctagaatatgaaatgcagaagacctcatgactttcagctgatttttcaaagataaagtgaactgttcagcttcatagaaattcatgcgagtgtgactgaacgtgtgtgcatacacactcgtgcacattggactcatttgggcagttttaaaagcttcacactaaatccaaagcctcgtcctttgggtcgtatgtagtcgtttgtaaaatcaatttctggcttctgagtcatcctggtcatatctctagcaatgtttttcttgaaattctgaaaatgattcacatatgtgtgtacatttaattcacttagatgatctgtaaacttggatggtatttattctaaatggggaaaacaattttatatggaaaaatctatgtaatttataatggttttgttttatatattatattttcatatctctagggcacatctatcctcatctttttgtataccatacttagcaaaaagaaatactaatacttgactaaaatctctaggaaccaaacgtgatacatgtgatatatagcttctagaaatcgctctaaaaatctctgaatgtctcatccatcccaagcattattgtgctgtgtcattatgtccagaatgatttgtcttggatgcttatgagcatttgtttttcacaactaaggttgaaagacctgacatctcacacaatggggttctggaattcccctttcctcctttatctgtttttattgtttgtttcatttttaattgcaccagtctatgttgtcgaaactttgttttgaagggcaaatgtgagataacaagaaagcaatgtgatggaaagactggatgaatttacctatggctatgtaaattattttaatggactgataagatgtttcaagtctcatgcttggatctttatttattggtgatctaggatctgctcagctctttagcacatgaagaaaatcaggtacaaaggacatttgcatgtttggaacagcatgctctaagccccgtgcagccaacacaaattaacttgactgtagaaacaccaattccagctgctggaagaaatggtttagaaaggcaaaccagataccttttattctgccctaggaaatacagtgttgatcagtgctaaaactcttcagtggcagtcactgtggttcttttaactggggatttcctttcagtgtttcatttggtaccaaaacagaacatttaccttacatttcagatactctgttttctcagcattgttcagatactttcctttaccgctcttcacgtacccttttggcattgagtaattctataaatgtttctatccttggtttttaaaccaagttattcatactcttaaaatatctaccaaatctcattgtattttcacatattttgagcatcaagatactggtcattttaaaaaatccttcagtaaatagcacagtttattttcctaatgacatttttagggtttcttcattgatcaaccaggtttgggttacacaaatcaattgtgggggaaaaatcaaataaaacaattgcttattatattttccaaaggactgagcatttatcttttattcacgaagatatcatatgaggatgataatgatctttaacagattttttagagatagaatttataaagaggctgatactaagaatactacaatcaaaattgaagctagagaatgtaaaaatagaaagtaaatagttctaagaatattctggcataaattatttttatttagccaataaaatagcctccaaatgtatatctcagacaccatagagctgctaacaatgagaatcaaggaagatgcttgcacttagatttcgtttgttgtatttcagtagttctggatgtcctttgttaaaattggaaaatggaaaaatgtctcgacagaaatgtcaatctggtgattctgtgaactgtaaaatgttcacttttaaaaataaagttgtaaacaagttactcatataagttggtattacagtagcaaaaacagaaaaccatgtgatccatcctgtattttgattgatgctttaataaagggtttgcacagctgtgtgga

SEQ ID NO: 12484 - DNA, 564 bp, Homo sapiens
  source 1..564: mol_type = unassigned DNA
gcagagtgcggcgcagcggccgctgtcgggctggccatggcgaggggtgcacggcggccacctgagtggcgcggcggtgtcaggaaaatggcaaatgcacgacagcggcctcctgaacatcaccaaggtatccttctcagaccgaggtaaatacacgtgtgtggcttctaacatctacggcaccgtgaacaacacggtgaccttgcgcgtcatcttcacttctggagacatgggtgtctactacatggtcgtgtgcctggtggccttcaccatcgtcatggtcctcaatatcacccgcctgtgcatgatgagcagccatctaaagaagactgagaaggccatcaatgagttctttaggaccgaaggtgcagagaagctgcagaaggcatttgagatcgccaagcgcatccccatcatcacctccgccaaaactctagagcttgccaaagtcacccagttcaaaaccatggagttcgcccgctacatcgaagagcttgccaggagcgtgcctctgccgcctctcattatgaactgcaggactatcatggaggagattatggaggt

SEQ ID NO: 12485 - DNA, 550 bp, Homo sapiens
  source 1..550: mol_type = unassigned DNA
atcgctagggaacccacggtgactgaatcaaagggaagaaagacccaagacctggatctcccttttacatggaccctaaagcaaaggtcctgtaggtgaaaaatgttgaagagcctctcactcagactgagtgaatatgagaagaactagatggaaaaggcatcctcactaccgatagcaaggtcagacagtgttaggatttgtgccggaacatgtgtgtgtacatggcatgcacatgcacaaaaaggcgttcaaaaatcatcggtgagtcactcaaggagcacactgccattcactttgtgattagcctggaaaggagcaatttcatgtctcgtttctgctgaaaaggaaaatggcaaatgcacgacagcggcctcctgaacatcaccaaggtatccttctcagaccgaggtaaatacacgtgtgtggcttctaacatctacggcaccgtgaacaacacggtgaccttgcgcgtcatcttcacttctggagacatgggtgtctactacatggtcgtgtgcctggtggccttcaccatcgtcatggtcct

SEQ ID NO: 12486 - DNA, 551 bp, Homo sapiens
  source 1..551: mol_type = unassigned DNA
gctgtcgggctggccatggcgaggggtgcacggcggccacctgagtggcgcggcggtgtcaggttcttgctcaagtaccaactctatggacccaggacaggtttgtcccatgacctgctgtgaacagtgtgttgtctgatagaagattcggttggcaaaccatctctctattgccttacagagcaagcaaagaagatggatcgattgaagagccatctgactgtgtgctttctaccttctgtgccctttttaatcctaatgatgattgtttccagaggaatctagtaatggactgaaaacgaaagagacgttttggtatccttgtcttccattggaaacaggaaattgctggcagagagagctgtgatgatctcatttaactagatggttacagctcatgctataggaaaatggcaaatgcacgacagcggcctcctgaacatcaccaaggtatccttctcagaccgaggtaaatacacgtgtgtggcttctaacatctacggcaccgtgaacaacacggtgaccttgcgcgtcatcttcacttctggaga

SEQ ID NO: 12487 - DNA, 1505 bp, Homo sapiens
  source 1..1505: mol_type = unassigned DNA
gaggagaagaagccactaacattgcaggatcgtgtagcgaaacttctgtaggtacttaataattttagagtactctactttttaattaaaaaatcaacttatggttcattagaaaaaacgtggaaattacaaataatatttttaaagaaaatgaaaaaaaaattcctggaaccccaccactcagaaagtcaccagggaacggcccgctgggtttttttccagactcttccatctgtggactttgctttaagagacgtttaagacttacagcgcagtcgcccgggaaggcctgagaagctttcggaagcaaggtggtttgctcgtgattgcatttgattgcaaggagacaggagcccaagctgtgaccagtgacgcagactggaagtcccgtttactgggagagaagaggttaaggaacacccaggtgaacaattaggtcctccacaatgaagacaggtaatgtggaggaaagagagcttgtcatggttcttgctcaagtaccaactctatggacccaggacaggtttgtcccatgacctgctgtgaacagtgtgttgtctgatagaagattcggttggcaaaccatctctctattgccttacagagcaagcaaagaagatggatcgattgaagagccatctgactgtgtgctttctaccttctgtgccctttttaatcctagtatccactctagccaccgctaagagtgtgactaacagcactttaaatggcactaacgtggtcttgggctctgtgcccgtaatcattgccagaactgaccatatcatagtcaaggaagggaacagtgccttgattaactgtagtgtttatggcatccctgacccacagttcaagtggtataattccattggcaagctgctgaaagaagaagaggatgagaaggagagaggaggaggtaggctttaaagttgtatcaaatgtcataataaaatataaacaggagctttggagccagcacccgtgatgttagttcttctcatgcaaatgatttaaagatctcatcttgtcttgtttttctaaggcaggagagaatatatatccttaaggattcaaagaagcaattaattcatttttttccctcattgacacagaagacaaaggacaaacacagaagtctttttaaaggcttcttggaattttgtaatataatacatccaatacattatagagacaaatgtaaaatggattttcctaaataatatattcaatttttaagggagttttgttttctttcatggagatggctggaataaacaatatagccattgtttatcattaaatgtccatttaattcattggccgtggatttaaagaccacacttctgaaagaaacctcagtgcaagtctcagccactggctgggattcctggagacctggctgcagtttctaggctgaggcagggagggagggaggatgcaataacaaggaaggatgtgggacaacaggagactgcttggtttttaataaatgcatttctgaccaa

SEQ ID NO: 12488 - DNA, 548 bp, Homo sapiens
  source 1..548: mol_type = unassigned DNA
agcctagaaaattacagtcgacttcatgagcttcatttggatttctcatcatgcaatagcaaagtcacagttattcctactgagatcacaatgatgctgccagagcctcccctgagcttgagagccctcctcttctaagcagcatttggaggttcttgctcaagtaccaactctatggacccaggacagagcaagcaaagaagatggatcgattgaagagccatctgactgtgtgctttctaccttctgtgccctttttaatcctagtatccactctagccaccgctaagagtgtgactaacagcactttaaatggcactaacgtggtcttgggctctgtgcccgtaatcattgccagaactgaccatatcatagtcaaggaagggaacagtgccttgattaactgtagtgtttatggcatccctgacccacagttcaagtggtataattccattggcaagctgctgaaagaagaagaggatgagaaggagagaggaggaggtaggctttaaagttgtatcaaatgtcataataaaatataaacagga

SEQ ID NO: 12489 - DNA, 667 bp, Homo sapiens
  source 1..667: mol_type = unassigned DNA
gtaggcgctaccgggcgtccggcgcagagtgcggcgcagcggccgctgtcgggctggccatggcgaggggtgcacggcggccacctgagtggcgcggcggtgtcagagcccaagctgtgaccagtgacgcagactggaagtcccgtttactgggagagaagaggttaaggaacacccaggtgaacaattaggtcctccacaatgaagacaggtaatgtggaggaaagagagcttgtcatggttcttgctcaagtaccaactctatggacccaggacaggtttgtcccatgacctgctgtgaacagtgtgttgtctgatagaagattcggttggcaaaccatctctctattgccttacagagcaagcaaagaagatggatcgattgaagagccatctgactgtgtgctttctaccttctgtgccctttttaatcctagtatccactctagccaccgctaagagtgtgactaacagcactttaaatggcactaacgtggtcttgggctctgtgcccgtaatcattgccagaactgaccatatcatagtcaaggaagggaacagtgccttgattaactgtagtgtttatggcatccctgacccacagttcaagtggtataattccattggcaagctgctgaaagaagaagaggatgagaaggagagagga

SEQ ID NO: 12490 - DNA, 481 bp, Homo sapiens
  source 1..481: mol_type = unassigned DNA
aggctcctgtaggtgggaagctccgcgctcccggcagccggcggcgcagctcgcaacgctgtgaggcgccggcggaggcggctcgcccgcagtaggcgctaccgggcgtccggcgcagagtgcggcgcagcggccgctgtcgggctggccatggcgaggggtgcacggcggccacctgagtggcgcggcggtgtcagagcaagcaaagaagatggatcgattgaagagccatctgactgtgtgctttctaccttctgtgccctttttaatcctagtatccactctagccaccgctaagagtgtgactaacagcactttaaatggcactaacgtggtcttgggctctgtgcccgtaatcattgccagaactgaccatatcatagtcaaggaagggaacagtgccttgattaactgtagtgtttatggcatccctgacccacagttcaagtggtataattccattggcaagctgctgaaagaa

SEQ ID NO: 12491 - DNA, 725 bp, Homo sapiens
  source 1..725: mol_type = unassigned DNA
ccgtaatgtctggtgatgttccccagcctgtgggaggcagatgagattgaaaccagggtgtacatgagtgacctggagcccgtaagtaacagtaacacagagcagagagcgctagatgaggtggagctcagaggagcatgggaagttgaatgagacagtaaggagcattctggaagctataatgggtagttaggagaatgccagagtgattctgatgcagtccttccaaatgccggcagagcccaagctgtgaccagtgacgcagactggaagtcccgtttactgggagagaagaggttaaggaacacccaggtgaacaattaggtcctccacaatgaagacaggtaatgtggaggaaagagagcttgtcatggttcttgctcaagtaccaactctatggacccaggacaggtttgtcccatgacctgctgtgaacagtgtgttgtctgatagaagattcggttggcaaaccatctctctattgccttacagagcaagcaaagaagatggatcgattgaagagccatctgactgtgtgctttctaccttctgtgccctttttaatcctagtatccactctagccaccgctaagagtgtgactaacagcactttaaatggcactaacgtggtcttgggctctgtgcccgtaatcattgccagaactgaccatatcatagtcaaggaagggaacagtgccttgattaactgtagtgtttatggcatc

SEQ ID NO: 12492 - DNA, 563 bp, Homo sapiens
  source 1..563: mol_type = unassigned DNA
gcacatggcctgggcctttgggctccccactgtgaggcctctcacggtgggacccaggctttgggtagctggctccatgctctagcaaagcctcacttagcagtggggaggtcccaagaagagaagcgagatacccatataaagcaagcctgcttagccttccagggtccttcaaatcttaccaaatgaaagccagcttgctccacctactgtcaagccagcatctcattctccccattcttgtctcttaaacaactactcaaaaaaggagagccatgaaagtcaccagcctagaaaattacagtcgacttcatgagcttcatttggatttctcatcatgcaatagcaaagtcacagttattcctactgagatcacaatgatgctgccagagcctcccctgagcttgagagccctcctcttctaagcagcatttggagcatcctccattgtatagtgggaaagtggatatctggctttccttccttcctgaggaaattatgaacaagaagaacaaactccaagctaaatacaagtcacgacttttccagaatccaaaagtaaa

SEQ ID NO: 12493 - DNA, 581 bp, Homo sapiens
  source 1..581: mol_type = unassigned DNA
gtctgcgcatcgcttaccgtggagccgttccagtgcgtgggccacgcgtccgcccttttccgcgtcacatgaccacgaacactcttccgctacggctcccagaaggggccagcccgcgcctttcgcgcttctgccctggccctctgcgggccgctccgccggtgctgtccctgggcgcctccgtgctctcagccaaccacctctgagagcgcccactcgagcgccccgggagccagagggcgggggtcctcgccgggaccctcctgtgggcccagggggacaaaagtggctctcaatccagcacatgcacattgaagcaagttaaaggatttaatatgaagcacagaagcagatagtgccaaatagcaagcagtagttgttacacatttctggaaaagcagtgtccgtgttgttatgtacacctccaaaaaaagttcaaatgtggtgagcagggcagcatttccttctcccactgctgctgagatggcagaaattagtcgaattcagtacgaaatggaatatactgaaggcattagtcagcgaatgagggtcccagaaaagttaaaagtagcaccgccaaa

SEQ ID NO: 12494 - DNA, 2004 bp, Homo sapiens
  source 1..2004: mol_type = unassigned DNA
gtggagccgttccagtgcgtgggccacgcgtccgcccttttccgcgtcacatgaccacgaacactcttccgctacggctcccagaaggggccagcccgcgcctttcgcgcttctgccctggccctctgcgggccgctccgccggtgctgtccctgggcgcctccgtgctctcagccaaccacctctgagagcgcccactcgagcgccccgggagccagagggcgggggtcctcgccgggaccctcctgtgggcccagggggacaaaagtggctctcaatccagcacatgcacattgaagcaagttaaaggatttaatatgaagcacagaagcagatagtgccaaatagcaagcagtagttgttacacatttggtgagcagggcagcatttccttctcccactgctgctgagatggcagaaattagtcgaattcagtacgaaatggaatatactgaaggcattagtcagcgaatgagggtcccagaaaagttaaaagtagcaccgccaaacgctgacctggaacaaggattccaagaaggagttccaaatgctagtgtgataatgcaagttccggagaggattgttgtagcaggaaataatgaagatgtttcattttcaagaccagcagatcttgaccttattcagtcaactccctttaaacccctggcactgaaaacaccacctcgtgtacttacgctgagtgaaagaccactagattttctggatttagaaagacctcctacaacccctcaaaatgaagaaatccgagcagttggcagactaaaaagagagcggtctatgagtgaaaatgctgttcgccaaaatggacagctggtcagaaatgattctcttgtgacaccatcgccacaacaggctcgggtctgtcctccccatatgttacctgaagatggagctaatctttcctctgctcgtggcattttgtcgcttatccagtcttctactcgtagggcataccagcagatcttggatgtgctggatgaaaatcgcagacctgtgttgcgtggtgggtctgctgccgccacttctaatcctcatcatgacaacgtcaggtatggcatttcaaatatagatacaaccattgaaggaacgtcagatgacctgactgttgtagatgcagcttcactaagacgacagataatcaaactaaatagacgtctacaacttctggaagaggagaacaaagaacgtgctaaaagagaaatggtcatgtattcaattactgtagctttctggctgcttaatagctggctctggtttcgccgctagaggtaacatcagccctcaaaaatactgtctcaacagctggaaatataaaagatttgcaaacttctttgtttctgtctctgcattgtatgccattttatagtccacaccctgaaaatgtatttcttccagaaagtctggaggaaggacctatatttgtagaagtaaaggtatattctgtcactcagctgtattcacgtctgagcagttctgcagtaacacctgcttaaaattctccctttgcatgttttgtaaataggctccagttttgttttttaaaaggaatttattttttgcctcatcagtccacccaactgattctgaatgggagagagtctgtagagaattgattcagaaaagtgtctgtgaaagaaaaacaattattttgtcctgtttctcaaacagtgttaagcagttttgttaatagacatttttgcatcgacacttcaacattaacactttcaaagtcatggtctggtgccagatttaagaaactcgaaccacctaatatttcataaccttcttcattaggtacttgtacagattaatttctaacattgcagcagtttcatatgtgtgcaatatgtgcattctttcattttagttttgcacttggttttctataaagtacgtttttactcagttcatgcgtgaacaatttaaaaaacgacagaataaggtacaaatgtagtgtatttaataaactgtcaaccaaagaag

SEQ ID NO: 12495 - DNA, 820 bp, Homo sapiens
  source 1..820: mol_type = unassigned DNA
gaccacgaacactcttccgctacggctcccagaaggggccagcccgcgcctttcgcgcttctgccctggccctctgcgggccgctccgccggtgctgtccctgggcgcctccgtgctctcagccaaccacctctgagagcgcccactcgagcgccccgggagccagagggcgggggtcctcgccgggaccctcctgtgggcccaggggaaataatgaagatgtttcattttcaagaccagcagatcttgaccttattcagtcaactccctttaaacccctggcactgaaaacaccacctcgtgtacttacgctgagtgaaagaccactagattttctggatttagaaagacctcctacaacccctcaaaatgaagaaatccgagcagttggcagactaaaaagagagcggtctatgagtgaaaatgctgttcgccaaaatggacagctggtcagaaatgattctctgtatggcatttcaaatatagatacaaccattgaaggaacgtcagatgacctgactgttgtagatgcagcttcactaagacgacagataatcaaactaaatagacgtctacaacttctggaagaggagaacaaagaacgtgctaaaagagaaatggtcatgtattcaattactgtagctttctggctgcttaatagctggctctggtttcgccgctagaggtaacatcagccctcaaaaatactgtctcaacagctggaaatataaaagatttgcaaacttctttgtttctgtctctgcattgtatgccattttatagtccacaccctgaaaatgtatttcttccagaaagtctg

SEQ ID NO: 12496 - DNA, 639 bp, Homo sapiens
  source 1..639: mol_type = unassigned DNA
cttccgctacggctcccagaaggggccagcccgcgcctttcgcgcttctgccctggccctctgcgggccgctccgccggtgctgtccctgggcgcctccgtgctctcagccaaccacctctgagagcgcccactcgagcgccccgggagccagagggcgggggtcctcgccgggaccctcctgtgggcccagggggacaaaagtggctctcaatccagcacatgcacattgaagcaagttaaaggatttaatatgaagcacagaagcagatagtgccaaatagcaagcagtagttgttacacattttcagccctgtctttaaatttttctcccacagggtgagcagggcagcatttccttctcccactgctgctgagatggcagaaattagtcgaattcagtacgaaatggaatatactgaaggcattagtcagcgaatgagggtcccagaaaagttaaaagtagcaccgccaaacgctgacctggaacaaggattccaagaaggagttccaaatgctagtgtgataatgcaagttccggagaggattgttgtagcaggaaataatgaagatgtttcattttcaagaccagcagatcttgaccttattcagtcaactccctttaaacccctggcactga

SEQ ID NO: 12497 - DNA, 2186 bp, Homo sapiens
  source 1..2186: mol_type = unassigned DNA
gctacggctcccagaaggggccagcccgcgcctttcgcgcttctgccctggccctctgcgggccgctccgccggtgctgtccctgggcgcctccgtgctctcagccaaccacctctgagagcgcccactcgagcgccccgggagccagagggcgggggtcctcgccgggaccctcctgtgggcccagggggacaaaagtggctctcaatccagcacatgcacattgaagcaagttaaaggatttaatatgaagcacagaagcagatagtgccaaatagcaagcagtagttgttacacatttctggaaaagcagtgtccgtgttgttatgtacacctccaaaaaaagttcaaatgtgtaggggaattgttgtgtaaagtaaactgaactgcagggtagcagtattttaatagctattatagacctgtatttactgtatttaaatgagtaaaggaacaagcagtgacacatcactaggaagggtgagcagggcagcatttccttctcccactgctgctgagatggcagaaattagtcgaattcagtacgaaatggaatatactgaaggcattagtcagcgaatgagggtcccagaaaagttaaaagtagcaccgccaaacgctgacctggaacaaggattccaagaaggagttccaaatgctagtgtgataatgcaagttccggagaggattgttgtagcaggaaataatgaagatgtttcattttcaagaccagcagatcttgaccttattcagtcaactccctttaaacccctggcactgaaaacaccacctcgtgtacttacgctgagtgaaagaccactagattttctggatttagaaagacctcctacaacccctcaaaatgaagaaatccgagcagttggcagactaaaaagagagcggtctatgagtgaaaatgctgttcgccaaaatggacagctggtcagaaatgattctctgtggcacagatcagattctgccccaagaaataaaatttcaaggttccaggcaccgatttctgcaccggagtacactgtgacaccatcgccacaacaggctcgggtctgtcctccccatatgttacctgaagatggagctaatctttcctctgctcgtggcattttgtcgcttatccagtcttctactcgtagggcataccagcagatcttggatgtgctggatgaaaatcgcagacctgtgttgcgtggtgggtctgctgccgccacttctaatcctcatcatgacaacgtcaggtatggcatttcaaatatagatacaaccattgaaggaacgtcagatgacctgactgttgtagatgcagcttcactaagacgacagataatcaaactaaatagacgtctacaacttctggaagaggagaacaaagaacgtgctaaaagagaaatggtcatgtattcaattactgtagctttctggctgcttaatagctggctctggtttcgccgctagaggtaacatcagccctcaaaaatactgtctcaacagctggaaatataaaagatttgcaaacttctttgtttctgtctctgcattgtatgccattttatagtccacaccctgaaaatgtatttcttccagaaagtctggaggaaggacctatatttgtagaagtaaaggtatattctgtcactcagctgtattcacgtctgagcagttctgcagtaacacctgcttaaaattctccctttgcatgttttgtaaataggctccagttttgttttttaaaaggaatttattttttgcctcatcagtccacccaactgattctgaatgggagagagtctgtagagaattgattcagaaaagtgtctgtgaaagaaaaacaattattttgtcctgtttctcaaacagtgttaagcagttttgttaatagacatttttgcatcgacacttcaacattaacactttcaaagtcatggtctggtgccagatttaagaaactcgaaccacctaatatttcataaccttcttcattaggtacttgtacagattaatttctaacattgcagcagtttcatatgtgtgcaatatgtgcattctttcattttagttttgcacttggttttctataaagtacgtttttactcagttcatgcgtgaacaatttaaaaaacgacagaataaggtacaaatgtagtgtatttaataaactgtcaaccaaagaa

SEQ ID NO: 12498 - DNA, 1085 bp, Homo sapiens
  source 1..1085: mol_type = unassigned DNA
cagaaggggccagcccgcgcctttcgcgcttctgccctggccctctgcgggccgctccgccggtgctgtccctgggcgcctccgtgctctcagccaaccacctctgagagcgcccactcgagcgccccgggagccagagggcgggggtcctcgccgggaccctcctgtgggcccagggggacaaaagtggctctcaatccagcacatgcacattgaagcaagttaaaggatttaatatgaagcacagaagcagatagtgccaaatagcaagcagtagttgttacacatttggtgagcagggcagcatttccttctcccactgctgctgagatggcagaaattagtcgaattcagtacgaaatggaatatactgaaggcattagtcagcgaatgagggtcccagaaaagttaaaagtagcaccgccaaacgctgacctggaacaaggattccaagaaggagttccaaatgctagtgtgataatgcaagttccggagaggattgttgtagcaggaaataatgaagatgtttcattttcaagaccagcagatcttgaccttattcagtcaactccctttaaacccctggcactgaaaacaccacctcgtgtacttacgctgagtgaaagaccactagattttctggatttagaaagacctcctacaacccctcaaaatgaagaaatccgagcagttggcagactaaaaagagagcggtctatgagtgaaaatgctgttcgccaaaatggacagctggtcagaaatgattctctgtatggcatttcaaatatagatacaaccattgaaggaacgtcagatgacctgactgttgtagatgcagcttcactaagacgacagataatcaaactaaatagacgtctacaacttctggaagaggagaacaaagaacgtgctaaaagagaaatggtcatgtattcaattactgtagctttctggctgcttaatagctggctctggtttcgccgctagaggtaacatcagccctcaaaaatactgtctcaacagctggaaatataaaagatttgcaaacttctttgtttctgtctctgcattgtatgccattttat

SEQ ID NO: 12499 - DNA, 560 bp, Homo sapiens
  source 1..560: mol_type = unassigned DNA
agaaggggccagcccgcgcctttcgcgcttctgccctggccctctgcgggccgctccgccggtgctgtccctgggcgcctccgtgctctcagccaaccacctctgagagcgcccactcgagcgccccgggagccagagggcgggggtcctcgccgggaccctcctgtgggcccaggggaaataatgaagatgtttcattttcaagaccagcagatcttgaccttattcagtcaactccctttaaacccctggcactgaaaacaccacctcgtgtacttacgctgagtgaaagaccactagattttctggatttagaaagacctcctacaacccctcaaaatgaagaaatccgagcagttggcagactaaaaagagagcggtctatgagtgaaaatgctgttcgccaaaatggacagctggtcagaaatgattctctgtggcacagatcagattctgccccaagaaataaaatttcaaggttccaggcaccgatttctgcaccggagtacactgtgacaccatcgccacaacaggctcgggtctgtcctccccatatgtta

SEQ ID NO: 12500 - DNA, 584 bp, Homo sapiens
  source 1..584: mol_type = unassigned DNA
ggccagcccgcgcctttcgcgcttctgccctggccctctgcgggccgctccgccggtgctgtccctgggcgcctccgtgctctcagccaaccacctctgagagcgcccactcgagcgccccgggagccagagggcgggggtcctcgccgggaccctcctgtgggcccaggggaaataatgaagatgtttcattttcaagaccagcagatcttgaccttattcagtcaactccctttaaacccctggcactgaaaacaccacctcgtgtacttacgctgagtgaaagaccactagattttctggatttagaaagacctcctacaacccctcaaaatgaagaaatccgagcagttggcagactaaaaagagagcggtctatgagtgaaaatgctgttcgccaaaatggacagctggtcagaaatgattctcttgtgacaccatcgccacaacaggctcgggtctgtcctccccatatgttacctgaagatggagctaatctttcctctgctcgtggcattttgtcgcttatccagtcttctactcgtagggcataccagcagatcttggatgtgctggatgaaaat

SEQ ID NO: 12501 - DNA, 1548 bp, Homo sapiens
  source 1..1548: mol_type = unassigned DNA
ccagcccgcgcctttcgcgcttctgccctggccctctgcgggccgctccgccggtgctgtccctgggcgcctccgtgctctcagccaaccacctctgagagcgcccactcgagcgccccgggagccagagggcgggggtcctcgccgggaccctcctgtgggcccagggggtgagcagggcagcatttccttctcccactgctgctgagatggcagaaattagtcgaattcagtacgaaatggaatatactgaaggcattagtcagcgaatgagggtcccagaaaagttaaaagtagcaccgccaaacgctgacctggaacaaggattccaagaaggagttccaaatgctagtgtgataatgcaagttccggagaggattgttgtagcaggaaataatgaagatgtttcattttcaagaccagcagatcttgaccttattcagtcaactccctttaaacccctggcactgaaaacaccacctcgtgtacttacgctgagtgaaagaccactagattttctggatttagaaagacctcctacaacccctcaaaatgaagaaatccgagcagttggcagactaaaaagagagcggtctatgagtgaaaatgctgttcgccaaaatggacagctggtcagaaatgattctctgtatggcatttcaaatatagatacaaccattgaaggaacgtcagatgacctgactgttgtagatgcagcttcactaagacgacagataatcaaactaaatagacgtctacaacttctggaagaggagaacaaagaacgtgctaaaagagaaatggtcatgtattcaattactgtagctttctggctgcttaatagctggctctggtttcgccgctagaggtaacatcagccctcaaaaatactgtctcaacagctggaaatataaaagatttgcaaacttctttgtttctgtctctgcattgtatgccattttatagtccacaccctgaaaatgtatttcttccagaaagtctggaggaaggacctatatttgtagaagtaaaggtatattctgtcactcagctgtattcacgtctgagcagttctgcagtaacacctgcttaaaattctccctttgcatgttttgtaaataggctccagttttgttttttaaaaggaatttattttttgcctcatcagtccacccaactgattctgaatgggagagagtctgtagagaattgattcagaaaagtgtctgtgaaagaaaaacaattattttgtcctgtttctcaaacagtgttaagcagttttgttaatagacatttttgcatcgacacttcaacattaacactttcaaagtcatggtctggtgccagatttaagaaactcgaaccacctaatatttcataaccttcttcattaggtacttgtacagattaatttctaacattgcagcagtttcatatgtgtgcaatatgtgcattctttcattttagttttgcacttggttttctataaagtacgtttttactcagttcatgcgtgaacaatttaaaaaacgacagaataaggtacaa

SEQ ID NO: 12502 - DNA, 736 bp, Homo sapiens
  source 1..736: mol_type = unassigned DNA
agcccgcgcctttcgcgcttctgccctggccctctgcgggccgctccgccggtgctgtccctgggcgcctccgtgctctcagccaaccacctctgagagcgcccactcgagcgccccgggagccagagggcgggggtcctcgccgggaccctcctgtgggcccaggggtgagtgttgacgtcttcccgacccgcgacctgccgcccgagctggctgccaggcctatcgccgccgccgagaccctccggccaacagggacccgcggtggccccggcccccccgggtgagcagggcagcatttccttctcccactgctgctgagatggcagaaattagtcgaattcagtacgaaatggaatatactgaaggcattagtcagcgaatgagggtcccagaaaagttaaaagtagcaccgccaaacgctgacctggaacaaggattccaagaaggagttccaaatgctagtgtgataatgcaagttccggagaggattgttgtagcaggaaataatgaagatgtttcattttcaagaccagcagatcttgaccttattcagtcaactccctttaaacccctggcactgaaaacaccacctcgtgtacttacgctgagtgaaagaccactagattttctggatttagaaagacctcctacaacccctcaaaatgaagaaatccgagcagttggcagactaaaaagagagcggtctatgagtgaaaatgctgttcgccaaaat

SEQ ID NO: 12503 - DNA, 1247 bp, Homo sapiens
  source 1..1247: mol_type = unassigned DNA
gcccgcgcctttcgcgcttctgccctggccctctgcgggccgctccgccggtgctgtccctgggcgcctccgtgctctcagccaaccacctctgagagcgcccactcgagcgccccgggagccagagggcgggggtcctcgccgggaccctcctgtgggcccagggggacaaaagtggctctcaatccagcacatgcacattgaagcaagttaaaggatttaatatgaagcacagaagcagatagtgccaaatagcaagcagtagttgttacacatttctggaaaagcagtgtccgtgttgttatgtacacctccaaaaaaagttcaaatgtgtaggggaattgttgtgtaaagtaaactgaactgcagggtagcagtattttaatagctattatagacctgtatttactgtatttaaatgagtaaaggaacaagcagtgacacatcactaggaagggtgagcagggcagcatttccttctcccactgctgctgagatggcagaaattagtcgaattcagtacgaaatggaatatactgaaggcattagtcagcgaatgagggtcccagaaaagttaaaagtagcaccgccaaacgctgacctggaacaaggattccaagaaggagttccaaatgctagtgtgataatgcaagttccggagaggattgttgtagcaggaaataatgaagatgtttcattttcaagaccagcagatcttgaccttattcagtcaactccctttaaacccctggcactgaaaacaccacctcgtgtacttacgctgagtgaaagaccactagattttctggatttagaaagacctcctacaacccctcaaaatgaagaaatccgagcagttggcagactaaaaagagagcggtctatgagtgaaaatgctgttcgccaaaatggacagctggtcagaaatgattctctacctgtgttgcgtggtgggtctgctgccgccacttctaatcctcatcatgacaacgtcaggtatggcatttcaaatatagatacaaccattgaaggaacgtcagatgacctgactgttgtagatgcagcttcactaagacgacagataatcaaactaaatagacgtctacaacttctggaagaggagaacaaagaacgtgctaaaagagaaatggtcatgtattcaattactgtagctttctggctgcttaatagctggctctggtttcgccgctagaggtaacatcagccctcaaaaatactgtctcaac

SEQ ID NO: 12504 - DNA, 3524 bp, Homo sapiens
  source 1..3524: mol_type = unassigned DNA
cgcgcctttcgcgcttctgccctggccctctgcgggccgctccgccggtgctgtccctgggcgcctccgtgctctcagccaaccacctctgagagcgcccactcgagcgccccgggagccagagggcgggggtcctcgccgggaccctcctgtgggcccagggggacaaaagtggctctcaatccagcacatgcacattgaagcaagttaaaggatttaatatgaagcacagaagcagatagtgccaaatagcaagcagtagttgttacacatttgtgagtaaaaatggtcccttttggcttactttcttagtctttaaatcgtctgcatgccaaatccttaaagatctatgtccccagagattttttgataaagaataaaagatgtgagttagcagtcatagtcaaaccagttgctggggctgagcgtcctgagcaacctctaagagctctcctaggcatctcagtgaggcgggggcttagggtggggctatatctccagcatggagtttaggaaataccttagccatggtaaagtcatgtatactgtctttaactttttatgtctttaatttatatatagtgtctttgctgaaaatttagtgtaatttccatttgaagtttaccctaaattttgaagtttatttttatttaaagaaaccattagacgtcaaatatgtaggctgcctcagttacatttactttttaccctttgtattcccttcatgatttattcatttgggcttagtcttaaaaaaggatttttcccctttggagtataatgattagaggagttttatggcagtattgttttcttcgaatctgacttcacatttgtatatacatttgatacagcttctctgtatcctgtttgcaaaatcataagacagtgactgtgcttacaactgtctttatgatttttgaggtatagaaaaactcttcttaggatagatttaacaattggtttctcaaatcaagccctaagccatgttcaaatccaaaagtcattttacgtagatatttacttttattcatagttttcttatgaaatgaattgttgaaatactgatttttattctttcttttttacagctggaaaagcagtgtccgtgttgttatgtacacctccaaaaaaagttcaaatgtgtaggggaattgttgtgtaaagtaaactgaactgcagggtagcagtattttaatagctattatagacctgtatttactgtatttaaatgagtaaaggaacaagcagtgacacatcactaggaaggtcagtgaaattttattcagttgagctggtattataggtttgagagacaatggctttaaagcttactgccgtaggctaaccatgctcttttacatttttatcagcttttgtattggcggcaacattctttctactgcattaaaaaaaaaaacacatgtaaatatgatattaaatacagattaatagtgtaaaactttcagtccctccaaaaatgaatacaaacatgaggatttattattacaaattctaaatttggtattcattgcatctcagtcattaggagaagttttagtttgtatgatgtgattttcagggagttgcatcttcttttttagtaaattcagagttaatgttatgcatctgtcatttaaaggttttgaataacagatgcatttgtcatttaaaggttttattttttcatgcatgacagtaatttttaattttatatttttaaagtccaagcagctttccctcaaattgatgaggaaattttaagtttaaattttattgcaggcatttttttagttacaagcagcatgcatgtttacgcagagagtatgtgtgtatgtgtgtgtacacatttgtgttgtaattctataataatttaaaaaatttgctcctaagcaatatcctcaaggtacaatttcagctgataattaagaaggcattttgttgaggaagacattttctttcatcttttatttttgctttgtatgtgttcagtacttgcaaatgagaagtttcctttcgctctttctataaggtattgtcttctaacttcactgcgtagaggagactgacattttaacagtcagccctgtctttaaatttttctcccacagggtgagcagggcagcatttccttctcccactgctgctgagatggcagaaattagtcgaattcagtacgaaatggaatatactgaaggcattagtcagcgaatgagggtcccagaaaagttaaaagtagcaccgccaaacgctgacctggaacaaggattccaagaaggagttccaaatgctagtgtgataatgcaagttccggagaggattgttgtagcaggaaataatgaagatgtttcattttcaagaccagcagatcttgaccttattcagtcaactccctttaaacccctggcactgaaaacaccacctcgtgtacttacgctgagtgaaagaccactagattttctggatttagaaagacctcctacaacccctcaaaatgaagaaatccgagcagttggcagactaaaaagagagcggtctatgagtgaaaatgctgttcgccaaaatggacagctggtcagaaatgattctctgtatggcatttcaaatatagatacaaccattgaaggaacgtcagatgacctgactgttgtagatgcagcttcactaagacgacagataatcaaactaaatagacgtctacaacttctggaagaggagaacaaagaacgtgctaaaagagaaatggtcatgtattcaattactgtagctttctggctgcttaatagctggctctggtttcgccgctagaggtaacatcagccctcaaaaatactgtctcaacagctggaaatataaaagatttgcaaacttctttgtttctgtctctgcattgtatgccattttatagtccacaccctgaaaatgtatttcttccagaaagtctggaggaaggacctatatttgtagaagtaaaggtatattctgtcactcagctgtattcacgtctgagcagttctgcagtaacacctgcttaaaattctccctttgcatgttttgtaaataggctccagttttgttttttaaaaggaatttattttttgcctcatcagtccacccaactgattctgaatgggagagagtctgtagagaattgattcagaaaagtgtctgtgaaagaaaaacaattattttgtcctgtttctcaaacagtgttaagcagttttgttaatagacatttttgcatcgacacttcaacattaacactttcaaagtcatggtctggtgccagatttaagaaactcgaaccacctaatatttcataaccttcttcattaggtacttgtacagattaatttctaacattgcagcagtttcatatgtgtgcaatatgtgcattctttcattttagttttgcacttggttttctataaagtacgtttttactcagttcatgcgtgaacaatttaaaaaacgacagaataaggtacaaatgtagtgtatttaataaactgtcaaccaaagaa

SEQ ID NO: 12505 - DNA, 1760 bp, Homo sapiens
  source 1..1760: mol_type = unassigned DNA
gcctttcgcgcttctgccctggccctctgcgggccgctccgccggtgctgtccctgggcgcctccgtgctctcagccaaccacctctgagagcgcccactcgagcgccccgggagccagagggcgggggtcctcgccgggaccctcctgtgggcccagggggacaaaagtggctctcaatccagcacatgcacattgaagcaagttaaaggatttaatatgaagcacagaagcagatagtgccaaatagcaagcagtagttgttacacatttggtgagcagggcagcatttccttctcccactgctgctgagatggcagaaattagtcgaattcagtacgaaatggaatatactgaaggcattagtcagcgaatgagggtcccagaaaagttaaaagtagcaccgccaaacgctgacctggaacaaggattccaagaaggagttccaaatgctagtgtgataatgcaagttccggagaggattgttgtagcaggaaataatgaagatgtttcattttcaagaccagcagatcttgaccttattcagtcaactccctttaaacccctggcactgaaaacaccacctcgtgtacttacgctgagtgaaagaccactagattttctggatttagaaagacctcctacaacccctcaaaatgaagaaatccgagcagttggcagactaaaaagagagcggtctatgagtgaaaatgctgttcgccaaaatggacagctggtcagaaatgattctctgtggcacagatcagattctgccccaagaaataaaatttcaaggttccaggcaccgatttctgcaccggagtacacgtatggcatttcaaatatagatacaaccattgaaggaacgtcagatgacctgactgttgtagatgcagcttcactaagacgacagataatcaaactaaatagacgtctacaacttctggaagaggagaacaaagaacgtgctaaaagagaaatggtcatgtattcaattactgtagctttctggctgcttaatagctggctctggtttcgccgctagaggtaacatcagccctcaaaaatactgtctcaacagctggaaatataaaagatttgcaaacttctttgtttctgtctctgcattgtatgccattttatagtccacaccctgaaaatgtatttcttccagaaagtctggaggaaggacctatatttgtagaagtaaaggtatattctgtcactcagctgtattcacgtctgagcagttctgcagtaacacctgcttaaaattctccctttgcatgttttgtaaataggctccagttttgttttttaaaaggaatttattttttgcctcatcagtccacccaactgattctgaatgggagagagtctgtagagaattgattcagaaaagtgtctgtgaaagaaaaacaattattttgtcctgtttctcaaacagtgttaagcagttttgttaatagacatttttgcatcgacacttcaacattaacactttcaaagtcatggtctggtgccagatttaagaaactcgaaccacctaatatttcataaccttcttcattaggtacttgtacagattaatttctaacattgcagcagtttcatatgtgtgcaatatgtgcattctttcattttagttttgcacttggttttctataaagtacgtttttactcagttcatgcgtgaacaatttaaaaaacgacagaataaggtacaaatgtagtgtatttaataaactgtcaaccaaagaa

SEQ ID NO: 12506 - DNA, 558 bp, Homo sapiens
  source 1..558: mol_type = unassigned DNA
tttcgcgcttctgccctggccctctgcgggccgctccgccggtgctgtccctgggcgcctccgtgctctcagccaaccacctctgagagcgcccactcgagcgccccgggagccagagggcgggggtcctcgccgggaccctcctgtgggcccagggggacaaaagtggctctcaatccagcacatgcacattgaagcaagttaaaggatttaatatgaagcacagaagcagatagtgccaaatagcaagcagtagttgttacacatttctggaaaagcagtgtccgtgttgttatgtacacctccaaaaaaagttcaaatgtgtaggggaattgttgtgtaaagtaaactgaactgcaggggtgagcagggcagcatttccttctcccactgctgctgagatggcagaaattagtcgaattcagtacgaaatggaatatactgaaggcattagtcagcgaatgagggtcccagaaaagttaaaagtagcaccgccaaacgctgacctggaacaaggattccaagaaggagttccaaatgctagtgtgataatgcaag

SEQ ID NO: 12507 - DNA, 597 bp, Homo sapiens
  source 1..597: mol_type = unassigned DNA
tttcgcgcttctgccctggccctctgcgggccgctccgccggtgctgtccctgggcgcctccgtgctctcagccaaccacctctgagagcgcccactcgagcgccccgggagccagagggcgggggtcctcgccgggaccctcctgtgggcccaggggaaataatgaagatgtttcattttcaagaccagcagatcttgaccttattcagtcaactccctttaaacccctggcactgaaaacaccacctcgtgtacttacgctgagtgaaagaccactagattttctggatttagaaagacctcctacaacccctcaaaatgaagaaatccgagcagttggcagactaaaaagagagcggtctatgagtgaaaatgctgttcgccaaaatggacagctggtcagaaatgattctctgtgagtagaagcactagcattttatctcgtttgtaagttttctcaggatattttctgtacccatgtttttctaaataattacttcatgtagtttttaaaatttgttttacatcaattttatatttttgtaatactttttgtaatcttaaaatctggccattttgttggtcctgagaatttt

SEQ ID NO: 12508 - DNA, 576 bp, Homo sapiens
  source 1..576: mol_type = unassigned DNA
tttcgcgcttctgccctggccctctgcgggccgctccgccggtgctgtccctgggcgcctccgtgctctcagccaaccacctctgagagcgcccactcgagcgccccgggagccagagggcgggggtcctcgccgggaccctcctgtgggcccaggggaaataatgaagatgtttcattttcaagaccagcagatcttgaccttattcagtcaactccctttaaacccctggcactgaaaacaccacctcgtgtacttacgctgagtgaaagaccactagattttctggatttagaaagacctcctacaacccctcaaaatgaagaaatccgagcagttggcagactaaaaagagagcggtctatgagtgaaaatgctgttcgccaaaatggacagctggtcagaaatgattctctgtggcacagatcagattctgccccaagaaataaaatttcaaggttccaggcaccgatttctgcaccggagtacacgtatggcatttcaaatatagatacaaccattgaaggaacgtcagatgacctgactgttgtagatgcagcttcactaagacgacag

SEQ ID NO: 12509 - DNA, 647 bp, Homo sapiens
  source 1..647: mol_type = unassigned DNA
tttcgcgcttctgccctggccctctgcgggccgctccgccggtgctgtccctgggcgcctccgtgctctcagccaaccacctctgagagcgcccactcgagcgccccgggagccagagggcgggggtcctcgccgggaccctcctgtgggcccaggggaaataatgaagatgtttcattttcaagaccagcagatcttgaccttattcagtcaactccctttaaacccctggcactgaaaacaccacctcgtgtacttacgctgagtgaaagaccactagattttctggatttagaaagacctcctacaacccctcaaaatgaagaaatccgagcagttggcagactaaaaagagagcggtctatgagtgaaaatgctgttcgccaaaatggacagctggtcagaaatgattctctgtatggcatttcaaatatagatacaaccattgaaggaacgtcagatgacctgactgttgtagatgcagcttcactaagacgacagataatcaaactaaatagacgtctacaacttctggaagaggagaacaaagaacgtgctaaaagagaaatggtcatgtattcaattactgtagctttctggctgcttaatagctggctctggtttcgccgctagaggtaacatcagcc

SEQ ID NO: 12510 - DNA, 1716 bp, Homo sapiens
  source 1..1716: mol_type = unassigned DNA
cgcttctgccctggccctctgcgggccgctccgccggtgctgtccctgggcgcctccgtgctctcagccaaccacctctgagagcgcccactcgagcgccccgggagccagagggcgggggtcctcgccgggaccctcctgtgggcccagggggacaaaagtggctctcaatccagcacatgcacattgaagcaagttaaaggatttaatatgaagcacagaagcagatagtgccaaatagcaagcagtagttgttacacatttggtgagcagggcagcatttccttctcccactgctgctgagatggcagaaattagtcgaattcagtacgaaatggaatatactgaaggcattagtcagcgaatgagggtcccagaaaagttaaaagtagcaccgccaaacgctgacctggaacaaggattccaagaaggagttccaaatgctagtgtgataatgcaagttccggagaggattgttgtagcaggaaataatgaagatgtttcattttcaagaccagcagatcttgaccttattcagtcaactccctttaaacccctggcactgaaaacaccacctcgtgtacttacgctgagtgaaagaccactagattttctggatttagaaagacctcctacaacccctcaaaatgaagaaatccgagcagttggcagactaaaaagagagcggtctatgagtgaaaatgctgttcgccaaaatggacagctggtcagaaatgattctctacctgtgttgcgtggtgggtctgctgccgccacttctaatcctcatcatgacaacgtcaggtatggcatttcaaatatagatacaaccattgaaggaacgtcagatgacctgactgttgtagatgcagcttcactaagacgacagataatcaaactaaatagacgtctacaacttctggaagaggagaacaaagaacgtgctaaaagagaaatggtcatgtattcaattactgtagctttctggctgcttaatagctggctctggtttcgccgctagaggtaacatcagccctcaaaaatactgtctcaacagctggaaatataaaagatttgcaaacttctttgtttctgtctctgcattgtatgccattttatagtccacaccctgaaaatgtatttcttccagaaagtctggaggaaggacctatatttgtagaagtaaaggtatattctgtcactcagctgtattcacgtctgagcagttctgcagtaacacctgcttaaaattctccctttgcatgttttgtaaataggctccagttttgttttttaaaaggaatttattttttgcctcatcagtccacccaactgattctgaatgggagagagtctgtagagaattgattcagaaaagtgtctgtgaaagaaaaacaattattttgtcctgtttctcaaacagtgttaagcagttttgttaatagacatttttgcatcgacacttcaacattaacactttcaaagtcatggtctggtgccagatttaagaaactcgaaccacctaatatttcataaccttcttcattaggtacttgtacagattaatttctaacattgcagcagtttcatatgtgtgcaatatgtgcattctttcattttagttttgcacttggttttctataaagtacgtttttactcagttcatgcgtgaacaatttaaaaaacgacagaataaggtacaaatgtagtgtattt

SEQ ID NO: 12511 - DNA, 527 bp, Homo sapiens
  source 1..527: mol_type = unassigned DNA
actcgagcgccccgggagccagagggcgggggtcctcgccgggaccctcctgtgggcccagggggacaaaagtggctctcaatccagcacatgcacattgaagcaagttaaaggatttaatatgaagcacagaagcagatagtgccaaatagcaagcagtagttgttacacatttgtgagtaaaaatggtcccttttggcttactttcttagtctttaaatcgtctgcatgccaaatccttaaagatctatgtccccagagattttttgataaagaataaaagatctggaaaagcagtgtccgtgttgttatgtacacctccaaaaaaagttcaaatgtgtaggggaattgttgtgtaaagtaaactgaactgcagggtagcagtattttaatagctattatagacctgtatttactgtatttaaatgagtaaaggaacaagcagtgacacatcactaggaagggtgagcagggcagcatttccttctcccactgctgctgagatggcagaaattagtcgaattcag

SEQ ID NO: 12512 - DNA, 566 bp, Homo sapiens
  source 1..566: mol_type = unassigned DNA
ttcccgacccgcgacctgccgcccgagctggctgccaggcctatcgccgccgccgagaccctccggccaacagggacccgcggtggccccggcccccccgggacaaaagtggctctcaatccagcacatgcacattgaagcaagttaaaggatttaatatgaagcacagaagcagatagtgccaaatagcaagcagtagttgttacacatttctggaaaagcagtgtccgtgttgttatgtacacctccaaaaaaagttcaaatgtgtaggggaattgttgtgtaaagtaaactgaactgcagggtagcagtattttaatagctattatagacctgtatttactgtatttaaatgagtaaaggaacaagcagtgacacatcactaggaagggtgagcagggcagcatttccttctcccactgctgctgagatggcagaaattagtcgaattcagtacgaaatggaatatactgaaggcattagtcagcgaatgagggtcccagaaaagttaaaagtagcaccgccaaacgctgacctggaacaaggattccaagaaggagttccaa

SEQ ID NO: 12513 - DNA, 720 bp, Homo sapiens
  source 1..720: mol_type = unassigned DNA
ccgcgacctgccgcccgagctggctgccaggcctatcgccgccgccgagaccctccggccaacagggacccgcggtggccccggcccccccggtagtgtctccctgacccgagtcccgtccccgggcctcttgccttcaaccctggtctttcctcctccccgggaccttgagtccccgaggagagcgagggagaggagcgtcttctgcagggacaaaagtggctctcaatccagcacatgcacattgaagcaagttaaaggatttaatatgaagcacagaagcagatagtgccaaatagcaagcagtagttgttacacatttctggaaaagcagtgtccgtgttgttatgtacacctccaaaaaaagttcaaatgtgtaggggaattgttgtgtaaagtaaactgaactgcagggtagcagtattttaatagctattatagacctgtatttactgtatttaaatgagtaaaggaacaagcagtgacacatcactaggaagggtgagcagggcagcatttccttctcccactgctgctgagatggcagaaattagtcgaattcagtacgaaatggaatatactgaaggcattagtcagcgaatgagggtcccagaaaagttaaaagtagcaccgccaaacgctgacctggaacaaggattccaagaaggagttccaaatgctagtgtgataatgcaagttccggagaggattgttgtagca

SEQ ID NO: 12514 - DNA, 726 bp, Homo sapiens
  source 1..726: mol_type = unassigned DNA
atatactgaaggcattagtcagcgaatgagggtcccagaaaagttaaaagtagcaccgccaaacgctgacctggaacaaggattccaagaaggagttccaaatgctagtgtgataatgcaagttccggagaggattgttgtagcaggaaataatgaagatgtttcattttcaagaccagcagatcttgaccttattcagtcaactccctttaaacccctggcactgaaaacaccacctcgtgtacttacgctgagtgaaagaccactagattttctggatttagaaagacctcctacaacccctcaaaatgaagaaatccgagcagttggcagactaaaaagagagcggtctatgagtgaaaatgctgttcgccaaaatggacagctggtcagaaatgattctctgtggcacagatcagattctgccccaagaaataaaatttcaaggttccaggcaccgatttctgcaccggagtacacatgtaatacacattggatgacatttagcctgatgttagttttgccttgacgttgagaatgttgagccctcattccactgtcgtagtcttgtgacaccatcgccacaacaggctcgggtctgtcctccccatatgttacctgaagatggagctaatctttcctctgctcgtggcattttgtcgcttatccagtcttctactcgtagggcataccagcagatcttggatgtgctggatgaaaatcgca

SEQ ID NO: 12515 - DNA, 729 bp, Homo sapiens
  source 1..729: mol_type = unassigned DNA
atccgagcagttggcagactaaaaagagagcggtctatgagtgaaaatgctgttcgccaaaatggacagctggtcagaaatgattctcttgtgacaccatcgccacaacaggctcgggtctgtcctccccatatgttacctgaagatggagctaatctttcctctgctcgtggcattttgtcgcttatccagtcttctactcgtagggcataccagcagatcttggatgtgctggatgaaaatcgcaggtatggcatttcaaatatagatacaaccattgaaggaacgtcagatgacctgactgttgtagatgcagcttcactaagacgacagataatcaaactaaatagacgtctacaacttctggaagaggagaacaaagaacgtgctaaaagagaaatggtcatgtattcaattactgtagctttctggctgcttaatagctggctctggtttcgccgctagaggtaacatcagccctcaaaaatactgtctcaacagctggaaatataaaagatttgcaaacttctttgtttctgtctctgcattgtatgccattttatagtccacaccctgaaaatgtatttcttccagaaagtctggaggaaggacctatatttgtagaagtaaaggtatattctgtcactcagctgtattcacgtctgagcagttctgcagtaacacctgcttaaaattctccctttgcatgttttgtaaataggctccagt

SEQ ID NO: 12516 - DNA, 1653 bp, Homo sapiens
  source 1..1653: mol_type = unassigned DNA
cttcaacttcattggctttacgaagtgtttgaaatggtgtttttatggaatcacacttttgattcatgtgtttaaactttgacatctgtatgtgagaattccctgtcctactcttctaatcatccataagtcgacagcagtgttgtttcttagaagttggtttattgaattggaatataaacacgaagtaaagaatgctgcttctccatgggaggggttgaacacattcattgctgtagttctcttccctctctacagttctttcatattcagtttatttattttgatgtttagggttacaaagttataagtgctgccttgtagctagtttttggaaacaattcaaaatatttattctttgactgttttcttgtggggagagtgaagggtgggaaaggggcaagaacactaagaaaattaagataaagactgctcagctgaagttttataaaaatctgacttgagtgtttttctcttcatttgctgtgcttgtgtaaacagtgtgacaccatcgccacaacaggctcgggtctgtcctccccatatgttacctgaagatggagctaatctttcctctgctcgtggcattttgtcgcttatccagtcttctactcgtagggcataccagcagatcttggatgtgctggatgaaaatcgcagacctgtgttgcgtggtgggtctgctgccgccacttctaatcctcatcatgacaacgtcaggtatggcatttcaaatatagatacaaccattgaaggaacgtcagatgacctgactgttgtagatgcagcttcactaagacgacagataatcaaactaaatagacgtctacaacttctggaagaggagaacaaagaacgtgctaaaagagaaatggtcatgtattcaattactgtagctttctggctgcttaatagctggctctggtttcgccgctagaggtaacatcagccctcaaaaatactgtctcaacagctggaaatataaaagatttgcaaacttctttgtttctgtctctgcattgtatgccattttatagtccacaccctgaaaatgtatttcttccagaaagtctggaggaaggacctatatttgtagaagtaaaggtatattctgtcactcagctgtattcacgtctgagcagttctgcagtaacacctgcttaaaattctccctttgcatgttttgtaaataggctccagttttgttttttaaaaggaatttattttttgcctcatcagtccacccaactgattctgaatgggagagagtctgtagagaattgattcagaaaagtgtctgtgaaagaaaaacaattattttgtcctgtttctcaaacagtgttaagcagttttgttaatagacatttttgcatcgacacttcaacattaacactttcaaagtcatggtctggtgccagatttaagaaactcgaaccacctaatatttcataaccttcttcattaggtacttgtacagattaatttctaacattgcagcagtttcatatgtgtgcaatatgtgcattctttcattttagttttgcacttggttttctataaagtacgtttttactcagttcatgcgtgaacaatttaaaaaacgacagaataaggtacaaatgtagtgtatttaataaactgtcaaccaaagaa

SEQ ID NO: 12517 - DNA, 1824 bp, Homo sapiens
  source 1..1824: mol_type = unassigned DNA
attttaaaagataaaacgtattggaaaggttactgcttatcaaagtagaaagctaactgtcctctagcgccaaagtatatactgagaatgagtggaaatccccaccaagtttcccattgcaccttagtcttcatttccagcagccctgtatgtcactcctggctgtctcaagatcagactcaaattgtggattgcccttcctgtaatgtgctctagcacgtctcctgatctcagcttcagagtggaggcttgcattttcactctggagagctgagagtttgaatgagacacagctgcaacgagacatcaggcactactcaaaattaatgaggtgggagggaaggaagtgtgggaaatggagtttcttgaaatttatgaatacggtttttgagatagagctgttgatatcagatgagcaactgtggtcataccggtgcagctaaccaggtcctgatatgcttttaaaggtgctagtgattttttttttccaactggaagaaaggaattacactttttaagcagagttgtcctctgtcttaaatttcataaagtaaagcaccaagaaaattattttatatgttggtgctgttttgtcgtgtaaatatagattccctttgtttctttgatcaatagtaatgttgagtttatgaaaatgataaaatggaggacacatgagacaaggattttttaaagtagttgagagatattatattgtattgaaatatacaatataatcctatttgacatttatttgtcttgtttttgcttttattttattacttctctgtttcctgattctgtcttgtgccttctcccgcaaaaacctgccttagacctgtgttgcgtggtgggtctgctgccgccacttctaatcctcatcatgacaacgtcaggtatggcatttcaaatatagatacaaccattgaaggaacgtcagatgacctgactgttgtagatgcagcttcactaagacgacagataatcaaactaaatagacgtctacaacttctggaagaggagaacaaagaacgtgctaaaagagaaatggtcatgtattcaattactgtagctttctggctgcttaatagctggctctggtttcgccgctagaggtaacatcagccctcaaaaatactgtctcaacagctggaaatataaaagatttgcaaacttctttgtttctgtctctgcattgtatgccattttatagtccacaccctgaaaatgtatttcttccagaaagtctggaggaaggacctatatttgtagaagtaaaggtatattctgtcactcagctgtattcacgtctgagcagttctgcagtaacacctgcttaaaattctccctttgcatgttttgtaaataggctccagttttgttttttaaaaggaatttattttttgcctcatcagtccacccaactgattctgaatgggagagagtctgtagagaattgattcagaaaagtgtctgtgaaagaaaaacaattattttgtcctgtttctcaaacagtgttaagcagttttgttaatagacatttttgcatcgacacttcaacattaacactttcaaagtcatggtctggtgccagatttaagaaactcgaaccacctaatatttcataaccttcttcattaggtacttgtacagattaatttctaacattgcagcagtttcatatgtgtgcaatatgtgcattctttcattttagttttgcacttggttttctataaagtacgtttttactcagttcatgcgtgaacaatttaaaaaacgacagaataaggtacaaatgtagtgtatttaataaactgtcaaccaaag

SEQ ID NO: 12518 - DNA, 660 bp, Homo sapiens
  source 1..660: mol_type = unassigned DNA
atatggacataagtttgtgtaagaattatattttgttctatcctaagtggcagctctcaaaccttttcagccagggaccctttttagcatcgccaatccttctggcttgagaattttctatgtgtttctttagtcaggatttttttcccattctccagtttttagtgccctttttcaatattgtagacagttgtcattttaagcttttttctttcctttattagtacaaattcaggtagtaaaatattttagtaattcatattattaagtaccaattttctgaatactactttgagcattacacaaagcatgatgtggcgtgccatttactctgagttctactttactattcatttgtatttctatctcttatctgcaggtatggcatttcaaatatagatacaaccattgaaggaacgtcagatgacctgactgttgtagatgcagcttcactaagacgacagataatcaaactaaatagacgtctacaacttctggaagaggagaacaaagaacgtgctaaaagagaaatggtcatgtattcaattactgtagctttctggctgcttaatagctggctctggtttcgccgctagaggtaacatcagccctcaaaaatactgtctcaacagctggaaatataaaagatttgcaaacttc

SEQ ID NO: 12519 - DNA, 1710 bp, Homo sapiens
  source 1..1710: mol_type = unassigned DNA
ggacaaaagtggctctcaatccagcacatgcacattgaagcaagttaaaggatttaatatgaagcacagaagcagatagtgccaaatagcaagcagtagttgttacacatttctggaaaagcagtgtccgtgttgttatgtacacctccaaaaaaagttcaaatgtgtaggggaattgttgtgtaaagtaaactgaactgcagggtagcagtattttaatagctattatagacctgtatttactgtatttaaatgagtaaaggaacaagcagtgacacatcactaggaaggattccaagaaggagttccaaatgctagtgtgataatgcaagttccggagaggattgttgtagcaggaaataatgaagatgtttcattttcaagaccagcagatcttgaccttattcagtcaactccctttaaacccctggcactgaaaacaccacctcgtgtacttacgctgagtgaaagaccactagattttctggatttagaaagacctcctacaacccctcaaaatgaagaaatccgagcagttggcagactaaaaagagagcggtctatgagtgaaaatgctgttcgccaaaatggacagctggtcagaaatgattctcttgtgacaccatcgccacaacaggctcgggtctgtcctccccatatgttacctgaagatggagctaatctttcctctgctcgtggcattttgtcgcttatccagtcttctactcgtagggcataccagcagatcttggatgtgctggatgaaaatcgcaggtatggcatttcaaatatagatacaaccattgaaggaacgtcagatgacctgactgttgtagatgcagcttcactaagacgacagataatcaaactaaatagacgtctacaacttctggaagaggagaacaaagaacgtgctaaaagagaaatggtcatgtattcaattactgtagctttctggctgcttaatagctggctctggtttcgccgctagaggtaacatcagccctcaaaaatactgtctcaacagctggaaatataaaagatttgcaaacttctttgtttctgtctctgcattgtatgccattttatagtccacaccctgaaaatgtatttcttccagaaagtctggaggaaggacctatatttgtagaagtaaaggtatattctgtcactcagctgtattcacgtctgagcagttctgcagtaacacctgcttaaaattctccctttgcatgttttgtaaataggctccagttttgttttttaaaaggaatttattttttgcctcatcagtccacccaactgattctgaatgggagagagtctgtagagaattgattcagaaaagtgtctgtgaaagaaaaacaattattttgtcctgtttctcaaacagtgttaagcagttttgttaatagacatttttgcatcgacacttcaacattaacactttcaaagtcatggtctggtgccagatttaagaaactcgaaccacctaatatttcataaccttcttcattaggtacttgtacagattaatttctaacattgcagcagtttcatatgtgtgcaatatgtgcattctttcattttagttttgcacttggttttctataaagtacgtttttactcagttcatgcgtgaacaatttaaaaaacgacagaataaggtacaaatgtagtgtatttaataaactgtcaaccaaagaagta

SEQ ID NO: 12520 - DNA, 1989 bp, Homo sapiens
  source 1..1989: mol_type = unassigned DNA
agaaccccgcggggtctgagcagcccagcgtgcccattccagcgcccgcgtccccgcagcatgccgcgcccccgcctgctggccgcgctgtgcggcgcgctgctctgcgcccccagcctcctcgtcgccctggggtgatgtggccttttccagaaggaggaaacaccatacctatcttacacacagatatctgttccaaaaacccctgccacaacggtggtttatgcgaggagatttcccaagaagtgcgaggagatgtcttcccctcgtacacctgcacgtgccttaagggctacgcgggcaaccactgtgagacgaaatgtgtcgagccactgggcctggagaatgggaacattgccaactcacagatcgccgcctcgtctgtgcgtgtgaccttcttgggtttgcagcattgggtcccggagctggcccgcctgaaccgcgcaggcatggtcaatgcctggacacccagcagcaatgacgataacccctggatccaggtgaacctgctgcggaggatgtgggtaacaggtgtggtgacgcagggtgccagccgcttggccagtcatgagtacctgaaggccttcaaggtggcctacagccttaatggacacgaattcgatttcatccatgatgttaataaaaaacacaaggagtttgtgggtaactggaacaaaaacgcggtgcatgtcaacctgtttgagacccctgtggaggctcagtacgtgagattgtaccccacgagctgccacacggcctgcactctgcgctttgagctactgggctgtgagctgaacggatgcgccaatcccctgggcctgaagaataacagcatccctgacaagcagatcacggcctccagcagctacaagacctggggcttgcatctcttcagctggaacccctcctatgcacggctggacaagcagggcaacttcaacgcctgggttgcggggagctacggtaacgatcagtggctgcaggtggacctgggctcctcgaaggaggtgacaggcatcatcacccagggggcccgtaactttggctctgtccagtttgtggcatcctacaaggttgcctacagtaatgacagtgcgaactggactgagtaccaggaccccaggactggcagcagtaagatcttccctggcaactgggacaaccactcccacaagaagaacttgtttgagacgcccatcctggctcgctatgtgcgcatcctgcctgtagcctggcacaaccgcatcgccctgcgcctggagctgctgggctgttagtggccacctgccacccccaggtcttcctgctttccatgggcccgctgcctcttggcttctcagcccctttaaatcaccatagggctggggactggggaaggggagggtgttcagaggcagcaccaccacacagtcacccctccctccctctttcccaccctccacctctcacgggccctgccccagcccctaagccccgtcccctaacccccagtcctcactgtcctgttttcttaggcactgagggatctgagtaggtctgggatggacaggaaagggcaaagtagggcgtgtggtttccctgcccctgtccggaccgccgatcccaggtgcgtgtgtctctgtctctcctagcccctctctcacacatcacattcccatggtggcctcaagaaaggcccggaagcgccaggctggagataacagcctcttgcccgtcggccctgcgtcggccctggggtaccatgtggccacaactgctgtggccccctgtccccaagacacttccccttgtctccctggttgcctctcttgccccttgtcctgaagcccagcgacacagaagggggtggggcgggtctatggggagaaagggagcgaggtcagaggagggcatgggttggcagggtgggcgtttggggccctctatgctggcttttcaccccagaggacacaggcagcttccaaaatatatttatcttcttcacgggaa

SEQ ID NO: 12521 - DNA, 1752 bp, Homo sapiens
  source 1..1752: mol_type = unassigned DNA
ccagaaccccgcggggtctgagcagcccagcgtgcccattccagcgcccgcgtccccgcagcatgccgcgcccccgcctgctggccgcgctgtgcggcgcgctgctctgcgcccccagcctcctcgtcgccctggatatctgttccaaaaacccctgccacaacggtggtttatgcgaggagatttcccaagaagtgcgaggagatgtcttcccctcgtacacctgcacgtgccttaagggctacgcgggcaaccactgtgagacgaaatgtgtcgagccactgggcctggagaatgggaacattgccaactcacagatcgccgcctcgtctgtgcgtgtgaccttcttgggtttgcagcattgggtcccggagctggcccgcctgaaccgcgcaggcatggtcaatgcctggacacccagcagcaatgacgataacccctggatccaggtgaacctgctgcggaggatgtgggtaacaggtgtggtgacgcagggtgccagccgcttggccagtcatgagtacctgaaggccttcaaggtggcctacagccttaatggacacgaattcgatttcatccatgatgttaataaaaaacacaaggagtttgtgggtaactggaacaaaaacgcggtgcatgtcaacctgtttgagacccctgtggaggctcagtacgtgagattgtaccccacgagctgccacacggcctgcactctgcgctttgagctactgggctgtgagctgaacggatgcgccaatcccctgggcctgaagaataacagcatccctgacaagcagatcacggcctccagcagctacaagacctggggcttgcatctcttcagctggaacccctcctatgcacggctggacaagcagggcaacttcaacgcctgggttgcggggagctacggtaacgatcagtggctgcagatcttccctggcaactgggacaaccactcccacaagaagaacttgtttgagacgcccatcctggctcgctatgtgcgcatcctgcctgtagcctggcacaaccgcatcgccctgcgcctggagctgctgggctgttagtggccacctgccacccccaggtcttcctgctttccatgggcccgctgcctcttggcttctcagcccctttaaatcaccatagggctggggactggggaaggggagggtgttcagaggcagcaccaccacacagtcacccctccctccctctttcccaccctccacctctcacgggccctgccccagcccctaagccccgtcccctaacccccagtcctcactgtcctgttttcttaggcactgagggatctgagtaggtctgggatggacaggaaagggcaaagtagggcgtgtggtttccctgcccctgtccggaccgccgatcccaggtgcgtgtgtctctgtctctcctagcccctctctcacacatcacattcccatggtggcctcaagaaaggcccggaagcgccaggctggagataacagcctcttgcccgtcggccctgcgtcggccctggggtaccatgtggccacaactgctgtggccccctgtccccaagacacttccccttgtctccctggttgcctctcttgccccttgtcctgaagcccagcgacacagaagggggtggggcgggtctatggggagaaagggagcgaggtcagaggagggcatgggttggcagggtgggcgtttggggccctctatgctggcttttcaccccagaggacacaggcagct

SEQ ID NO: 12522 - DNA, 1937 bp, Homo sapiens
  source 1..1937: mol_type = unassigned DNA
tgatttattccggtcccagaggagaaggcgccagaaccccgcggggtctgagcagcccagcgtgcccattccagcgcccgcgtccccgcagcatgccgcgcccccgcctgctggccgcgctgtgcggcgcgctgctctgcgcccccagcctcctcgtcgccctggatatctgttccaaaaacccctgccacaacggtggtttatgcgaggagatttcccaagaagtgcgaggagatgtcttcccctcgtacacctgcacgtgccttaagggctacgcgggcaaccactgtgagacgaaatgtgtcgagccactgggcctggagaatgggaacattgccaactcacagatcgccgcctcgtctgtgcgtgtgaccttcttgggtttgcagcattgggtcccggagctggcccgcctgaaccgcgcaggcatggtcaatgcctggacacccagcagcaatgacgataacccctggatccaggtgaacctgctgcggaggatgtgggtaacaggtgtggtgacgcagggtgccagccgcttggccagtcatgagtacctgaaggccttcaaggtggcctacagccttaatggacacgaattcgatttcatccatgatgttaataaaaaacacaaggagtttgtgggtaactggaacaaaaacgcggtgcatgtcaacctgtttgagacccctgtggaggctcagtacgtgagattgtaccccacgagctgccacacggcctgcactctgcgctttgagctactgggctgtgagctgaacggatgcgccaatcccctgggcctgaagaataacagcatccctgacaagcagatcacggcctccagcagctacaagacctggggcttgcatctcttcagctggaacccctcctatgcacggctggacaagcagggcaacttcaacgcctgggttgcggggagctacggtaacgatcagtggctgcaggtggacctgggctcctcgaaggaggtgacaggcatcatcacccagggggcccgtaactttggctctgtccagtttgtggcatcctacaaggttgcctacagtaatgacagtgcgaactggactgagtaccaggaccccaggactggcagcagtaagatcttccctggcaactgggacaaccactcccacaagaagaacttgtttgagacgcccatcctggctcgctatgtgcgcatcctgcctgtagcctggcacaaccgcatcgccctgcgcctggagctgctgggctgttagtggccacctgccacccccaggtcttcctgctttccatgggcccgctgcctcttggcttctcagcccctttaaatcaccatagggctggggactggggaaggggagggtgttcagaggcagcaccaccacacagtcacccctccctccctctttcccaccctccacctctcacgggccctgccccagcccctaagccccgtcccctaacccccagtcctcactgtcctgttttcttaggcactgagggatctgagtaggtctgggatggacaggaaagggcaaagtagggcgtgtggtttccctgcccctgtccggaccgccgatcccaggtgcgtgtgtctctgtctctcctagcccctctctcacacatcacattcccatggtggcctcaagaaaggcccggaagcgccaggctggagataacagcctcttgcccgtcggccctgcgtcggccctggggtaccatgtggccacaactgctgtggccccctgtccccaagacacttccccttgtctccctggttgcctctcttgccccttgtcctgaagcccagcgacacagaagggggtggggcgggtctatggggagaaagggagcgaggtcagaggagggcatgggttggcagggtgggcgtttggggccctctatgctggcttttcaccccagaggacacaggcagc

SEQ ID NO: 12523 - DNA, 1689 bp, Homo sapiens
  source 1..1689: mol_type = unassigned DNA
ccagaaccccgcggggtctgagcagcccagcgtgcccattccagcgcccgcgtccccgcagcatgccgcgcccccgcctgctggccgcgctgtgcggcgcgctgctctgcgcccccagcctcctcgtcgccctggatatctgttccaaaaacccctgccacaacggtggtttatgcgaggagatttcccaagaagtgcgaggagatgtcttcccctcgtacacctgcacgtgccttaagggctacgcgggcaaccactgtgagacgaaatgtgtcgagccactgggcctggagaatgggaacattgccaactcacagatcgccgcctcgtctgtgcgtgtgaccttcttgggtttgcagcattgggtcccggagctggcccgcctgaaccgcgcaggcatggtcaatgcctggacacccagcagcaatgacgataacccctggatccaggtgaacctgctgcggaggatgtgggtaacaggtgtggtgacgcagggtgccagccgcttggccagtcatgagtacctgaaggccttcaaggtggcctacagccttaatggacacgaattcgatttcatccatgatgttaataaaaaacacaaggagtttgtgggtaactggaacaaaaacgcggtgcatgtcaacctgtttgagacccctgtggaggctcagtacgtgagattgtaccccacgagctgccacacggcctgcactctgcgctttgagctactgggctgtgagctgaacggatgcgccaatcccctgggcctgaagaataacagcatccctgacaagcagatcacggcctccagcagctacaagacctggggcttgcatctcttcagctggaacccctcctatgcacggctggacaagcagggcaacttcaacgcctgggttgcggggagctacggtaacgatcagtggctgcaggtggacctgggctcctcgaaggaggtgacaggcatcatcacccagggggcccgtaactttggctctgtccagtttgtggcatcctacaaggttgcctacagtaatgacagtgcgaactggactgagtaccaggaccccaggactggcagcagtaagatcttccctggcaactgggacaaccactcccacaagaagaacttgtttgagacgcccatcctggctcgctatgtgcgcatcctgcctgtagcctggcacaaccgcatcgccctgcgcctggagctgctgggctgttagtggccacctgccacccccaggcactgagggatctgagtaggtctgggatggacaggaaagggcaaagtagggcgtgtggtttccctgcccctgtccggaccgccgatcccaggtgcgtgtgtctctgtctctcctagcccctctctcacacatcacattcccatggtggcctcaagaaaggcccggaagcgccaggctggagataacagcctcttgcccgtcggccctgcgtcggccctggggtaccatgtggccacaactgctgtggccccctgtccccaagacacttccccttgtctccctggttgcctctcttgccccttgtcctgaagcccagcgacacagaagggggtggggcgggtctatggggagaaagggagcgaggtcagaggagggcatgggttggcagggtgggcgtttggggccctctatgctggcttttcaccccagaggacacaggcag

SEQ ID NO: 12524 - DNA, 801 bp, Homo sapiens
  source 1..801: mol_type = unassigned DNA
ctgtgaggagctgagcccggctggttgaggtgaggaggtggtggggtcggcagtgagaaggtcgcacagttggccctgcaaggcggatggagctgctttctgttgcccaagagcatgacaggggctggtcaggatccacagagttctttctgcttcatcgccttgtgctcctgcccctgggagctgtggatcccagatccagatgacagcccaccttgctggcaggatgcgccaatcccctgggcctgaagaataacagcatccctgacaagcagatcacggcctccagcagctacaagacctggggcttgcatctcttcagctggaacccctcctatgcacggctggacaagcagggcaacttcaacgcctgggttgcggggagctacggtaacgatcagtggctgcaggtggacctgggctcctcgaaggaggtgacaggcatcatcacccagggggcccgtaactttggctctgtccagtttgtggcatcctacaaggttgcctacagtaatgacagtgcgaactggactgagtaccaggaccccaggactggcagcagtaagatcttccctggcaactgggacaaccactcccacaagaagaacttgtttgagacgcccatcctggctcgctatgtgcgcatcctgcctgtagcctggcacaaccgcatcgccctgcgcctggagctgctgggctgttagtggccacctgccacccccaggtcttcctgctttccatgggcccgctgcctcttggcttctcagcccctttaaatcaccatagggctggggactgggg

SEQ ID NO: 12525 - DNA, 1172 bp, Homo sapiens
  source 1..1172: mol_type = unassigned DNA
agaaccccgcggggtctgagcagcccagcgtgcccattccagcgcccgcgtccccgcagcatgccgcgcccccgcctgctggccgcgctgtgcggcgcgctgctctgcgcccccagcctcctcgtcgccctggaatgtgtcgagccactgggcctggagaatgggaacattgccaactcacagatcgccgcctcgtctgtgcgtgtgaccttcttgggtttgcagcattgggtcccggagctggcccgcctgaaccgcgcaggcatggtcaatgcctggacacccagcagcaatgacgataacccctggatccaggtgaacctgctgcggaggatgtgggtaacaggtgtggtgacgcagggtgccagccgcttggccagtcatgagtacctgaaggccttcaaggtggcctacagccttaatggacacgaattcgatttcatccatgatgttaataaaaaacacaaggagtttgtgggtaactggaacaaaaacgcggtgcatgtcaacctgtttgagacccctgtggaggctcagtacgtgagattgtaccccacgagctgccacacggcctgcactctgcgctttgagctactgggctgtgagctgaacggatgcgccaatcccctgggcctgaagaataacagcatccctgacaagcagatcacggcctccagcagctacaagacctggggcttgcatctcttcagctggaacccctcctatgcacggctggacaagcagggcaacttcaacgcctgggttgcggggagctacggtaacgatcagtggctgcaggtggacctgggctcctcgaaggaggtgacaggcatcatcacccagggggcccgtaactttggctctgtccagtttgtggcatcctacaaggttgcctacagtaatgacagtgcgaactggactgagtaccaggaccccaggactggcagcagtaagatcttccctggcaactgggacaaccactcccacaagaagaacttgtttgagacgcccatcctggctcgctatgtgcgcatcctgcctgtagcctggcacaaccgcatcgccctgcgcctggagctgctgggctgttagtggccacctgccacccccaggtcttcctgctttccatgggcccgctgcctcttggcttctcagcccctttaaatcaccat

SEQ ID NO: 12526 - DNA, 849 bp, Homo sapiens
  source 1..849: mol_type = unassigned DNA
gagcagcccagcgtgcccattccagcgcccgcgtccccgcagcatgccgcgcccccgcctgctggccgcgctgtgcggcgcgctgctctgcgcccccagcctcctcgtcgccctggatatctgttccaaaaacccctgccacaacggtggtttatgcgaggagatttcccaagaagtgcgaggagatgtcttcccctcgtacacctgcacgtgccttaagggctacgcgggcaaccactgtgagacgaaatgtgtcgagccactgggcctggagaatgggaacattgccaactcacagatcgccgcctcgtctgtgcgtgtgaccttcttgggtttgcagcattgggtcccggagctggcccgcctgaaccgcgcaggcatggtcaatgcctggacacccagcagcaatgacgataacccctggatccaggtgaacctgctgcggaggatgtgggtaacaggtgtggtgacgcagggtgccagccgcttggccagtcatgagtacctgaaggccttcaaggtggcctacagccttaatggacacgaattcgatttcatccatgatgttaataaaaaacacaaggagtttgtgggtaactggaacaaaaacgcggtgcatgtcaacctgtttgagacccctgtggaggctcagtacgtgagattgtaccccacgagctgccacacggcctgcactctgcgctttgagctactgggctgtgagctgaacgcagctacaagacctggggcttgcatctcttcagctggaacccctcctatgcacggctggacaagcagggcaacttcaacgcctgggttgcggggagctacggtaacgatcagtggctgcag

SEQ ID NO: 12527 - DNA, 2464 bp, Homo sapiens
  source 1..2464: mol_type = unassigned DNA
ttgccttctgctagaaggaaatgtaggctactgggaaaggacagagccaggtctgtgtgcctctccctggagtccctgacacttgctgttttggcttgaagcctttggccattaaagttgcctgtatccaggcatgactggcccctgctcagggccaagagagggtgagtcttgcaaaccaaggaagcccaggtaccctgtctgcttccttcagggtctggaccactcctttccctataggccttccagtcggctggagagtgttggtgcatgtgtgcatgtgtgcacgtgtgcatgtgtgtgggtggggctgaggtctgggggtacctgggattccacaagggattcctctttgcagacatatggtgtctttggtaaattaattatttaattcgatggatgtttattaagatattgattaagcccctcctgggtgcttggctctagggaatgattccttgacctcatgtaatttgcattgtagcaaggaaggcagacttgaggcgaggagcagatgacagagagcagtaacagctctgaagaaaagctagaggctgatgagatgaccatgacttggggtgaggggagagagcaagacaaggactgctctgtcgggaaggcctttgactgggggcctgaatgatggagagccagccacatgaaaaacttaaaaacagcactgcaaaaagagcactgcaggcaaggaattggtaaatgcaaaggccctggggcatgttgaagggtggaaggaaggccagtggagctggagccaagagatggaggggcagcttggtgggtgaagagccccagggacccgcagtgtcatcacctaggagcttcttagaaatgcagactgaggccgggtgcggtggctcacgcctgtaatcccagcactttgggaggccgaggcgagcggatcacctgaggtcaggagatcaagaccagcttggccaacatggcgaagccccgtctctactaaaaaaatacaaaaattagccaggcgtggtggcaggtgcctgtaatcccagctactagggaggctgaggcaggataattgcctgaacccggtcagaaggtggaggttgcagtgagccgagatcatgccactgcactccagcctgggtgacagagcgagactgtgtctcaaacaaacaaacaaaaaaacaaaaaaaaagaaatacagactgaaagccccagcctagacttgctgaaacataagctttttttttttatatcaagatccccaggtgatctgtgagaattactcccctagtatctcattttatagatggggagactgagagccagagagaggaagggacttcctagagtgctggagctgacagtcctgtccctgccctggtgccccttccaactgcattttaccagaaaggctgtctgacttcctggggaggctgagagtgaggagggtatgaaccactagaagcagatgatctgtagaggggtctgcgttgagcacattgtgcagaattggtgtcctctgcaaagctgcccaggttttagcctgcctcaggcctctcctcttctggggccaagggacaaccagctctcagcccgggagcctctctttgagggggaaggtggtggttccctggtgcatcaccatcaggagatgatggtaccatcagcaggcattgtcaacacaccctggaggcaaatgtcttgagtggtgagagtacaggtgggcagtgatataacttagctggctcccagtactcttgagtggtgagagtattggagggcagtgatataacttagctggctcccagagggcagggggctctccagtcccaccgtccactcctgcctccctcaattccccagagggatagacacttgtggagtgaggattcttccaggtgggagacacccccatcattctcttgggagttgtatctcttgcccatccccaactgttctatccatatgcaggtgcagatacaagtgcaaggcagcccggcacattcctgagtgtttggggcagggctgagtgaaacaaaggccagcttcccgggccagccctcacaggcctgtgtgacagcatccccagaacatttgagtgtgcgaaggccctctgggagacactaagtcagggggcttctggggaatggaaatagagatgttcctgtgccccaggagttgtctgatttctctaactgccagctgctggagggcagggatgttgtcctgttcatcactgggtcgtcactaggcaggccttcatcatctagctgggatgtgtagctggtagaggtgacgtcatagtgtgacattaggagtttgtatgtgacttgagcatgatgcttaatgtctttcagttttctcatctatagaatgggcttactaatttctacttcatttagtgtttttttttctttttttttttggtggcaggttaaatgactgaagtaagcactgaataaacaatgtggttgttattaaa

SEQ ID NO: 12528 - DNA, 456 bp, Homo sapiens
  source 1..456: mol_type = unassigned DNA
ttcgatttcatccatgatgttaataaaaaacacaaggagtttgtgggtaactggaacaaaaacgcggtgcatgtcaacctgtttgagacccctgtggaggctcagtacgtgagattgtaccccacgagctgccacacggcctgcactctgcgctttgagctactgggctgtgagctgaacgcaaggaaggcagacttgaggcgaggagcagatgacagagagcagtaacagctctgaagaaaagctagaggctgatgagatgaccatgacttggggtgaggggagagagcaagacaaggactgctctgtcgggaaggcctttgactgggggcctgaatgatggagagccagccacatgaaaaacttaaaaacagcactgcaaaaagagcactgcaggcaaggaattggttaaatgactgaagtaagcactgaataaacaatgtggttgttattaaa

SEQ ID NO: 12529 - DNA, 500 bp, Homo sapiens
  source 1..500: mol_type = unassigned DNA
gctggccatcagtggaactgtagggctcgctaagcagagctgcagagtggagacaccacccaaatacccctcagagctgagttcagtgcctggctgggttcagtgtttttagtatgaacttgagtagcaaggaaggcagacttgaggcgaggagcagatgacagagagcagtaacagctctgaagaaaagctagaggctgatgagatgaccatgacttggggtgaggggagagagcaagacaaggactgctctgtcgggaaggcctttgactgggggcctgaatgatggagagccagccacatgaaaaacttaaaaacagcactgcaaaaagagcactgcaggcaaggaattggtaaatgcaaaggccctggggcatgttgaagggtggaaggaaggccagtggagctggagccaagagatggaggggcagcttggtgggtgaagagccccagggacccgcagtgtcatcacctaggagcttcttagaaatgcagactga

SEQ ID NO: 12530 - DNA, 611 bp, Homo sapiens
  source 1..611: mol_type = unassigned DNA
cagtcatgagtacctgaaggccttcaaggtggcctacagccttaatggacacgaattcgatttcatccatgatgttaataaaaaacacaaggagtttgtgggtaactggaacaaaaacgcggtgcatgtcaacctgtttgagacccctgtggaggctcagtacgtgagattgtaccccacgagctgccacacggcctgcactctgcgctttgagctactgggctgtgagctgaacggtgagtgctgggggtgcgggtaggggggcactgttggccaatcctaggaggtggccctccctgctgcctcttttctcagccaaactgagctaggtagggcagcaacaaggcacggggaccaggcttcactcgggcaacgcactctagggggtcacctggccatagcagccccacccaggtgtttgctgtctgccaacccatgacccagggcattctgattgatagagaaaaagacatcagttttcaaagtattttcccttcttctggttggctcctctcctgtagcttctagaacatgtagcgttaggtgtgtttggcagatgtcagctttacgagggcagagaatctgtctgttttgtttgcttcggtattccc

SEQ ID NO: 12531 - DNA, 531 bp, Homo sapiens
  source 1..531: mol_type = unassigned DNA
agaaccccgcggggtctgagcagcccagcgtgcccattccagcgcccgcgtccccgcagcatgccgcgcccccgcctgctggccgcgctgtgcggcgcgctgctctgcgcccccagcctcctcgtcgccctggaatgtgtcgagccactgggcctggagaatgggaacattgccaactcacagatcgccgcctcgtctgtgcgtgtgaccttcttgggtttgcagcattgggtcccggagctggcccgcctgaaccgcgcaggcatggtcaatgcctggacacccagcagcaatgacgataacccctggatccaggtgaacctgctgcggaggatgtgggtaacaggtgtggtgtttgctgtctgccaacccatgacccagggcattctgattgatagagaaaaagacatcagttttcaaagtattttcccttcttctggttggctcctctcctgtagcttctagaacatgtagcgttaggtgtgtttggcagatgtcagctttacgagggcagagaatctgtctgttttg

SEQ ID NO: 12532 - DNA, 1031 bp, Homo sapiens
  source 1..1031: mol_type = unassigned DNA
agaaccccgcggggtctgagcagcccagcgtgcccattccagcgcccgcgtccccgcagcatgccgcgcccccgcctgctggccgcgctgtgcggcgcgctgctctgcgcccccagcctcctcgtcgccctggaatgtgtcgagccactgggcctggagaatgggaacattgccaactcacagatcgccgcctcgtctgtgcgtgtgaccttcttgggtttgcagcattgggtcccggagctggcccgcctgaaccgcgcaggcatggtcaatgcctggacacccagcagcaatgacgataacccctggatccaggtgaacctgctgcggaggatgtgggtaacaggtgtggtgacgcagggtgccagccgcttggccagtcatgagtacctgaaggccttcaaggtggcctacagccttaatggacacgaattcgatttcatccatgatgttaataaaaaacacaaggtaggtcttgttggggcccgaaagaagggctgtggtccataccccctaaggttctagcattgactgaggacccccagcgagtccagagaaccctaggtgattggctatgatgtgggtcttcgggtgcatcttggcttctagaaattgggaaacccagactgtgtccatgttctgtggtttataagcaatagtcccactttagagatgagactagtgagattcaaaatggcacagtgacctgttgagggtgatagtggtggtggagctgggtttcattctgagccttcatgggtacatgtacagttgtgtaggttgtacactgctcaaggatgtcattgctaagcaggcaccattcacagtacaggcattgtacatttgtggaactctgtcagaaaattgtcataataaactatttgagaaaggagtgccttttcctaatttgcaaagaggtaccctgtaggttacaggtggccctgtgtcagctataggggtttatgcccaggctccatgatgattaaggaaagtgagaggagaatctttgtggagggccgtggggtggccaa

SEQ ID NO: 12533 - DNA, 680 bp, Homo sapiens
  source 1..680: mol_type = unassigned DNA
tgggccgattcgcctacacatggacttccttggctctaggcggactcaggctccatccagcacacgggggaagagggagaggaagagataatgggcgagtttgagtggagggtccttttgggctggacccatctgctacttctcacctgtgtccccagctccttcctgatcatctgctcatcttacctgtctctgtccccagatatctgttccaaaaacccctgccacaacggtggtttatgcgaggagatttcccaagaagtgcgaggagatgtcttcccctcgtacacctgcacgtgccttaagggctacgcgggcaaccactgtgagacgaaatgtgtcgagccactgggcctggagaatgggaacattgccaactcacagatcgccgcctcgtctgtgcgtgtgaccttcttgggtttgcagcattgggtcccggagctggcccgcctgaaccgcgcaggcatggtcaatgcctggacacccagcagcaatgacgataacccctggatccaggtgaacctgctgcggaggatgtgggtaacaggtgtggtgacgcagggtgccagccgcttggccagtcatgagtacctgaaggccttcaaggtggcctacagccttaatggacacgaattcgatttcatccatgatgttaataaaaaacacaaggtaggtcttgt

SEQ ID NO: 12534 - DNA, 358 bp, Homo sapiens
  source 1..358: mol_type = unassigned DNA
tgcctgcctctccagaccccagctgccagctcttccaccagtgggcagtggtccccagcaccactgccattgtcagccagcacttttctggacactcccaggccacttggaaagctgggcgcttcccttatgtgggccgattcgcctacacatggacttccttggctctaggcggactcaggctccatccagcacacgggggaagagggagaggaagagataatggatatctgttccaaaaacccctgccacaacggtggtttatgcgaggagatttcccaagaagtgcgaggagatgtcttcccctcgtacacctgcacgtgccttaagggctacgcgggcaaccactgtgagacga

SEQ ID NO: 12535 - DNA, 534 bp, Homo sapiens
  source 1..534: mol_type = unassigned DNA
gccgcgcccccgcctgctggccgcgctgtgcggcgcgctgctctgcgcccccagcctcctcgtcgccctggacccagctcaaatattccctcctctggggaacttctaattccccagcagaaatcatgcctccagtgacggtccatgcaggcttctggagcgttgggcaatcttcctcatctgtggacttgctggcctctttccccttggcttcttgaggcctgcgctgcatctgatttctctgtctcgggggcctagcatggtcattggccctcccagtgtttcctggatgatcatcgtgctgttcctgagtcagggctgccattggaggtgacatctgtgactgcaacctgtgcctgaattggtgggcggaacctgctcaatgggccagaacaatgcttccttccactgcccctgcctgaaagtcctcatgggcctcctttgcaatcaaactgctgccaagagacctgccctggaccttgcctgcctctccagaccccagctgccagctcttccaccagtgggcagtggtcc

SEQ ID NO: 12536 - DNA, 435 bp, Homo sapiens
  source 1..435: mol_type = unassigned DNA
gagcagcccagcgtgcccattccagcgcccgcgtccccgcagcatgccgcgcccccgcctgctggccgcgctgtgcggcgcgctgctctgcgcccccagcctcctcgtcgccctggtgggatttctgcatttcagccagagggacctgtctgcagctaccagatgctccccaccctgggagagctcagcggcatgtctgcacatgggccttttcagccttcttcatcccgcaattggaactgactttcccactcccatctcacacttgagaatctctgtttcttgtttcttgttttttattttatttttattttttctcccccctggtggacaatggtgaggagggtgaaggaaggttaaaagccactgctctacgggatgaaaaactaaacttgtcattcttcagatccctcccagtctggccccagcctaccc

SEQ ID NO: 12537 - DNA, 6414 bp, Homo sapiens
  source 1..6414: mol_type = unassigned DNA
ccggcgggcggcgctgccgcttcccaatcgcgccctcccagcgccggggacgcggcgcccgcgctcccgcccgagcccggggaaacggagacaaggaggcgccgccgccccctccccgcggctgcgccccagccctgcgcccgcagcatgcccgccgccgggccgagcgccgccctcccccaggagctcgaggaggcgacgccgctgccggccgcgggaccgcggctgcgagggtagcggggccggagccgggccccccgaggcgccgcgcggcgggcggagagggaggaggagcaggcatcctccgcggcgcgcgggcggcggccctgctgcccggcgcgcccatggcccggccgcagggagaatgcaagctgctctccacgcgctcggcgtcccccggagccgctcgcgtcgccgccgccccctagccgccagcgctcggccgctggctgcgctaggacccgcggccgccggccgccgagcgcgggagggcaggcaggggcaggagccggagggcccggggcgcggcgcggcatgtagctgcgggctcccgcgtccgcgtgaggctgtcggcccggggccccgccatggctgggatggacagtggcaacctgaagaccgcgaggctgtggcgggacgccgccctgcgtgccaggaagctgcggagcaacctgcgccagctcacgcttaccgccgccggggcctgccccggggccggggccgacgcgctcgagtcccccgcctccccccagctcgtgctgccggccaacctcggggacattgaggcactgaacctggggaacaacggcctggaggaggtacccgaggggctggggtcggcgctgggcagcctgcgcgtcctggtcctgcgcaggaaccgcttcgcccggctgcccccggcggtggccgagctcggccaccacctcaccgagctggacgtgagccacaaccggctgaccgccctgggcgcggaggtggtgagtgctctgagggagctgcggaagctcaacctcagccacaaccagctgcccgccctgcccgcccagctgggcgctctcgctcacctggaggagctggatgtcagctttaaccggctggcgcacctgcctgactccctctcctgcctctcccgcctgcgcaccctggacgtggatcacaaccagctcactgccttcccccggcagctgctgcagctggtggccctggaggagctggacgtgtccagcaaccggctgcggggcctgcctgaggatatcagtgccctgcgtgccctcaagatcctctggctgagtggggccgagcttggcacgctgcccgccggcttctgcgagctggccagtttggagagcctcatgctagacaacaacgggctgcaggctctgcccgcccagttcagctgcctgcagcggctcaaaatgctcaacctctcctccaacctcttcgaggagttccctgccgcgctgctgcccctggctggtctggaggagctctaccttagtcgcaaccagctcacctcggtgccatcccttatctcgggcctgggccggcttctcaccttgtggctggataataaccgcatccgctacctgccggactccatcgtggagctgaccggcctggaggagctcgtgctgcaggggaaccagatcgcggtgctgcccgaccactttggccagctctcccgggtgggtttgtggaagatcaaagacaacccactgatccagcccccctacgaggtctgcatgaaggggatcccctacatcgcagcctaccagaaggaactggctcattcccagccggcggtgcagccccggctcaagctgctcctgatggggcataaggctgcaggaaagactttgctgcgccactgcctcaccgaggagagagtggagggatgcccaggaggaggggacaaggagaagtgctacccaccgtcacctccccctgtgagcaagggcatcgaggtgaccagctggacggccgatgcctcccggggcctgcggttcatcgtgtatgacttagctggggatgaaagttatgaggtgatccagcccttcttcctgtccccaggggccctatacgtgctggtggtcaacttggccacctatgagcctcgccactttcctaccaccgtgggctccttcttgcatcgggtcggggcgagagtgccccacgcggtggtgtgcatcgtgggcacccacgcagacctgtgcggagagcgtgagctggaggagaaatgtctggacattcaccgccagatcgccctgcaggagaagcacgacgcggagggactgagccgcttggccaaggtggtggacgaggcactggcccgggacttcgagctgcgctctgccagcccccacgcagcctactatggcgtttcggacaagaaccttcgacggcgcaaggcccattttcaatacctgctcaaccaccggctgcagatcctctcccccgtgttgcctgttagctgcagggacccgcgccacttacgacgccttcgggacaagttgctgtcagttgctgagcaccgagagatcttccccaacttacacagagtactgcctcgatcctggcaggtgctggaggaactgcatttccagccacctcaggcccagcgactgtggctaagctggtgggactcggcgcgcttgggcctgcaggcgggtctgaccgaggaccgactgcagagtgccctctcctacctgcatgagagcggcaagctactctactttgaggacagtccggctctcaaggagcacgtcttccacaacctcacccgcctcatcgacatcctcaatgtcttcttccagagggatccctctttgctgctgcataagctgctcctagggaccagtggagagggcaaggcggagggggaaagctccccgcccatggcgcggtccacccccagccaggaactgctccgggccacccagctccatcagtatgtggagggctttctgttgcatgggctcttgccagctcatgtcattcggttgctgcttaagcctcatgtccaggcccagcaggacttgcagctgttgctggagctgctggagaagatgggactctgttactgcctcaataaacccaagggcaagcctttgaatgggtccacagcttggtacaagttcccatgctatgtgcagaacgaggtgccccatgcagaagcctggattaatgggaccaacctagctgggcagtcttttgtggctgagcagttgcagattgaatatagctttccttttacttttccacttgggttgtttgcacgctacagtgtccagatcaacagccatgtggtgcacaggtcggatggtaaatttcagatctttgcctatagagggaaagttcctgtggttgtgagttacagacctgccaggggagtcctgcagccagacaccctgtccattgctagccatgcatcattaccaaatatatggaccgcatggcaagccataacccccttggtggaggaactgaatgtcctacttcaggaatggcctggactgcactacaccgtgcacattctctgttctaagtgccttaagagaggatcgcccaatccacatgcttttccaggggagttgctgagtcagcccagaccggaaggagtggcagagatcatttgccccaagaacggcagcgagcgagtaaatgttgccttggtttacccacccacgccgactgtgatcagcccctgttccaagaagaatgttggtgaaaagcacagaaaccagtgacgtttgtggctgtggaatttccatggagaaaagagagcatctgaacacctggaccatcttttgcacctggcagaccctctgcactcaccccagcgtgttctgtgaacttgagtgacaacgcgtgcttgcagggtgctttttggacgactggggaagaggtggggagggggtggtggggggaagcatggacgagaacatggagcaaatgttttacaacctgaacctcagaactgtgatcctccaaggagcgcgctacttgaagaaaagaaaaaaaaaaaaaaaaagtcgaatggcttctcagggattttgttttccgtgcacatataagccatagttacagtacaggtggcagtatttagagcactcagatttcagttctgttaaatgtgaaagagggatcgactgacgttcattgctgttccataactagtgtaaaatatgtatatgtttatctttatttttataatatgcaaatacatttaaatttatacagtttgaagcttctagcgttagttcacactgggtgcaatattctgcatgagaactgtgccaagatggggctgatttcttattttagtataagacttttttgttttttctttattctttaatcctcttcacattaaaaaaaaaatctctctgttagcccatggattaagtgttggttcatagagattgccaataatcagaaagaaccttaaatgtgcatttaagacagtgtcccttcccttcttttcaatgaaggtccctgcctatataaatcatctggcacgctggtgggaaatcctttgctcttccaacgtgttattagtgctgggcagagatggggcacactcaggggccaaagaggacaaaaagtccatgcaaaacttgagtcttttaatggcttaagataatcaggagtcagttctgaatcttacaaagtgctctgcttaataagtaccttacttagcagagcactttgcaaacatattacttattagcagagctctttgtagaccttccacatctggctgtcagatcttaaggttgtgaatttaggctccagttacattcactggagagcataatcccacacgggttatttataaatacagagcctctgattggacggtctcctgccaagaactagtaatacccttgttttaaaatcttcacaaggtaaaacttaaaaagccaaccaaacaaattgctctccattctacttttaattgggccaaacagcatatgctacagtagtaacatgtttttcggagagtgtaaaaaactctgtttacatttgcctcctccgtgggttgatcgaaaatgtataaaactgactgcttctcgccagcctcagacaagaagagtgagttgctggtactcgctactcttttacttcttttgtaaagtattgactcttggaaggctacagtatacaaagtctcaacatgttttttaaaagaaataaggagcaagcgactgccctgctagaaatcacaaaccgatttttgtagaatattttgtgccccaggcattaatttcactgactccagaacctgcagttcagagaatgatttcttatgatgataaaaatcgaatgggatcagacgatgtttgcatttttttaatacttgaataggacacctcaagtttgagatttcattttcttttagaacacagtcacaagattaatctggtgaatccttttgtcacagttctcgtgtgtgtgtgcgcgtctccgtgtgtgtgtgtgtgcatgtgtgtaaaactgaatggtcacatttaattgctttttggaccattgaatagttgggaagtaagaattttttaattggcatgagacggttcctcaactgttaaattaaccaactttgacctgtctttagaaaaaggcttatttgtatgattttgggctaactccccggggaccatattaaatgacaaaaatgctcctttgggtgacacaccctacaaagtatttgctgttacgaacataaacgcccacattcttaatatctaatatttttgaccagtgatgttttatgctgtcatctgaaccctagagaagcagtgtcagaggaaaccttggtgtcacatgtgtcttagcaaaagggttaccatgatcgagggtcatgtgaccaaaagatgctccagagaagcttgagaatttgtttcaagttgggaggagggttggagatacaaaaatcactctgctctacaggactcttcagctgtctatgcaagaaattccgttttctctttcagcacctggaaagacacagcagcccaccgaggcgataggtgattcactaagcacaagaggaatgttttctaagcaaggcgtcccttgcctctcaaacaaatgccctccaagtttgttagggtttctattcctgcaacttgtggtatcaaaaccacttcctggaattgtcaaagcactgccaaaataaatgtttttcccccttctaagaaaaaaaaaatgacagtgctcatatttgacacttgtgtattggactctcttttgaatgaataaaaaggaaaaggggtttggtgtaattcctgatggggtgcgtgttgtttttcatgccatggtttgtgaattttaattgtggtttcccatttcgttgttgtaactgggcagaaattaaaaaagaaaaatcaataaaaatacaaagaaatggttaaa

SEQ ID NO: 12538 - DNA, 577 bp, Homo sapiens
  source 1..577: mol_type = unassigned DNA
agccagccaaatgtgtttcagatcctaaatcctccacctaaggggagttgctgagtcagcccagaccggaaggagtggcagagatcatttgccccaagaacggcagcgagcgagtaaatgttgccttggtttacccacccacgccgactgtgatcagcccctgttccaagtatcttcatactttcttggaaaattaagtggaaaagatagtgcttcttttccttatgccatcatttttactgtacccaaactgtgactttaggagcaccaatttttaagggaagaatgttggtgaaaagcacagaaaccagtgacgtttgtggctgtggaatttccatggagaaaagagagcatctgaacacctggaccatcttttgcacctggcagaccctctgcactcaccccagcgtgttctgtgaacttgagtgacaacgcgtgcttgcagggtgctttttggacgactggggaagaggtggggagggggtggtggggggaagcatggacgagaacatggagcaaatgttttacaacctgaacctcagaactgtgatcctccaaggagcgcgctacttgaaga

SEQ ID NO: 12539 - DNA, 444 bp, Homo sapiens
  source 1..444: mol_type = unassigned DNA
ccacagttaatcagtgatttcctcagatgtccacatgctcctacggggagttgctgagtcagcccagaccggaaggagtggcagagatcatttgccccaagaacggcagcgagcgagtaaatgttgccttggtttacccacccacgccgactgtgatcagcccctgttccaagaagaatgttggtgaaaagcacagaaaccagtgacgtttgtggctgtggaatttccatggagaaaagagagcatctgaacacctggaccatcttttgcacctggcagaccctctgcactcaccccagcgtgttctgtgaacttgagtgacaacgcgtgcttgcagggtgctttttggacgactggggaagaggtggggagggggtggtggggggaagcatggacgagaacatggagcaaatgttttacaacctgaacctcagaactgtgatc

SEQ ID NO: 12540 - DNA, 585 bp, Homo sapiens
  source 1..585: mol_type = unassigned DNA
agaggaattggctgcccgtggccgggtggagagtcctcgtcttgtgtgtggccagggtctcaaggcctcatgctacacacttgcgtatagcatctcgtgcaggcttcaccacagtcttacgaggcatgcggtgaccttgcccttagacgtgtgcactcaggcctagagctgtcagagccatttgtcgagcgacccgctgctaggagatggcagagctggagccagaccccaaagccagcgctgcgctgttctccttttgacgcgggcttatccacagttaatcagtgatttcctcagatgtccacatgctcctacggggagttgctgagtcagcccagaccggaaggagtggcagagatcatttgccccaagaacggcagcgagcgagtaaatgttgccttggtttacccacccacgccgactgtgatcagcccctgttccaagtatcttcatactttcttggaaaattaagtggaaaagatagtgcttcttttccttatgccatcatttttactgtacccaaactgtgactttaggagcaccaatttttaagggaagaatgttggtgaaaagcacagaaaccag

SEQ ID NO: 12541 - DNA, 2154 bp, Homo sapiens
  source 1..2154: mol_type = unassigned DNA
gagggggcgtgcagcagagtgcgttcctcgtctgccagccggcttggctagcgcgcggcggccgtggctaaggctgctacgaagcgagcttgggaggagcagcggcctgcggggcagaggagcatcccgtctaccaggtcccaagcggcgtggcccgcgggtcatggccaaaggagaaggcgccgagagcggctccgcggcggggctgctacccaccagcatcctccaaagcactgaacgcccggcccaggtgaagaaagaaccgaaaaagaagaaacaacagttgtctgtttgcaacaagctttgctatgcacttgggggagccccctaccaggtgacgggctgtgccctgggtttcttccttcagatctacctattggatgtggctcaggtgggccctttctctgcctccatcatcctgtttgtgggccgagcctgggatgccatcacagaccccctggtgggcctctgcatcagcaaatccccctggacctgcctgggtcgccttatgccctggatcatcttctccacgcccctggccgtcattgcctacttcctcatctggttcgtgcccgacttcccacacggccagacctattggtacctgcttttctattgcctctttgaaacaatggtcacgtgtttccatgttccctactcggctctcaccatgttcatcagcaccgagcagactgagcgggattctgccaccgcctatcggatgactgtggaagtgctgggcacagtgctgggcacggcgatccagggacaaatcgtgggccaagcagacacgccttgtttccaggacctcaatagctctacagtagcttcacaaagtgccaaccatacacatggcaccacctcacacagggaaacgcaaaaggcatacctgctggcagcgggggtcattgtctgtatctatataatctgtgctgtcatcctgatcctgggcgtgcgggagcagagagaaccctatgaagcccagcagtctgagccaatcgcctacttccggggcctacggctggtcatgagccacggcccatacatcaaacttattactggcttcctcttcacctccttggctttcatgctggtggaggggaactttgtcttgttttgcacctacaccttgggcttccgcaatgaattccagaatctactcctggccatcatgctctcggccactttaaccattcccatctggcagtggttcttgacccggtttggcaagaagacagctgtatatgttgggatctcatcagcagtgccatttctcatcttggtggccctcatggagagtaacctcatcattacatatgcggtagctgtggcagctggcatcagtgtggcagctgccttcttactaccctggtccatgctgcctgatgtcattgacgacttccatctgaagcagccccacttccatggaaccgagcccatcttcttctccttctatgtcttcttcaccaagtttgcctctggagtgtcactgggcatttctaccctcagtctggactttgcagggtaccagacccgtggctgctcgcagccggaacgtgtcaagtttacactgaacatgctcgtgaccatggctcccatagttctcatcctgctgggcctgctgctcttcaaaatgtaccccattgatgaggagaggcggcggcagaataagaaggccctgcaggcactgagggacgaggccagcagctctggctgctcagaaacagactccacagagctggctagcatcctctagggcccgccacgttgcccgaagccaccatgcagaaggccacagaagggatcaggacctgtctgccggcttgctgagcagctggactgcaggtgctaggaagggaactgaagactcaaggaggtggcccaggacacttgctgtgctcactgtggggccggctgctctgtggcctcctgcctcccctctgcctgcctgtggggccaagccctggggctgccactgtgaatatgccaaggactgatcgggcctagcccggaacactaatgtagaaacctttttttttacagagcctaattaataacttaatgactgtgtacatagcaatgtgtgtgtatgtatatgtctgtgagctattaatgttattaattttcataaaagctggaaagcagctgcctgtt

SEQ ID NO: 12542 - DNA, 946 bp, Homo sapiens
  source 1..946: mol_type = unassigned DNA
gagtgcgttcctcgtctgccagccggcttggctagcgcgcggcggccgtggctaaggctgctacgaagcgagcttgggaggagcagcggcctgcggggcagaggagcatcccgtctaccaggtcccaagcggcgtggcccgcgggtcatggccaaaggagaaggcgccgagagcggctccgcggcggggctgctacccaccagcatcctccaaagcactgaacgcccggcccagaaagaaccgaaaaagaagaaacaacagttgtctgtttgcaacaagctttgctatgcacttgggggagccccctaccaggtgacgggctgtgccctgggtttcttccttcagatctacctattggatgtggctcaggtgggccctttctctgcctccatcatcctgtttgtgggccgagcctgggatgccatcacagaccccctggtgggcctctgcatcagcaaatccccctggacctgcctgggtcgccttatgccctggatcatcttctccacgcccctggccgtcattgcctacttcctcatctggttcgtgcccgacttcccacacggccagacctattggtacctgcttttctattgcctctttgaaacaatggtcacgtgtttccatgttccctactcggctctcaccatgttcatcagcaccgagcagactgagcgggattctgccaccgcctatcggatgactgtggaagtgctgggcacagtgctgggcacggcgatccagggacaaatcgtgggccaagcagacacgccttgtttccaggacctcaatagctctacagtagcttcacaaagtgccaaccatacacatggcaccacctcacacagggaaacgcaaaaggcatacctgctggcagcgggggtcattgtctgtatctatataatctgtgctgtcatcctgatcctgggcgtgcgggagcagagag

SEQ ID NO: 12543 - DNA, 2173 bp, Homo sapiens
  source 1..2173: mol_type = unassigned DNA
gcgttcctcgtctgccagccggcttggctagcgcgcggcggccgtggctaaggctgctacgaagcgagcttgggaggagcagcggcctgcggggcagaggagcatcccgtctaccaggtcccaagcggcgtggcccgcgggtcatggccaaaggagaaggcgccgagagcggctccgcggcggggctgctacccaccagcatcctccaaagcactgaacgcccggcccaggtgaagaaagaaccgaaaaagaagaaacaacagttgtctgtttgcaacaagctttgctatgcacttgggggagccccctaccaggtgacgggctgtgccctgggtttcttccttcagatctacctattggatgtggctcagaaggatgaggaagttgtcttttgcttctcctcattccaggtgggccctttctctgcctccatcatcctgtttgtgggccgagcctgggatgccatcacagaccccctggtgggcctctgcatcagcaaatccccctggacctgcctgggtcgccttatgccctggatcatcttctccacgcccctggccgtcattgcctacttcctcatctggttcgtgcccgacttcccacacggccagacctattggtacctgcttttctattgcctctttgaaacaatggtcacgtgtttccatgttccctactcggctctcaccatgttcatcagcaccgagcagactgagcgggattctgccaccgcctatcggatgactgtggaagtgctgggcacagtgctgggcacggcgatccagggacaaatcgtgggccaagcagacacgccttgtttccaggacctcaatagctctacagtagcttcacaaagtgccaaccatacacatggcaccacctcacacagggaaacgcaaaaggcatacctgctggcagcgggggtcattgtctgtatctatataatctgtgctgtcatcctgatcctgggcgtgcgggagcagagagaaccctatgaagcccagcagtctgagccaatcgcctacttccggggcctacggctggtcatgagccacggcccatacatcaaacttattactggcttcctcttcacctccttggctttcatgctggtggaggggaactttgtcttgttttgcacctacaccttgggcttccgcaatgaattccagaatctactcctggccatcatgctctcggccactttaaccattcccatctggcagtggttcttgacccggtttggcaagaagacagctgtatatgttgggatctcatcagcagtgccatttctcatcttggtggccctcatggagagtaacctcatcattacatatgcggtagctgtggcagctggcatcagtgtggcagctgccttcttactaccctggtccatgctgcctgatgtcattgacgacttccatctgaagcagccccacttccatggaaccgagcccatcttcttctccttctatgtcttcttcaccaagtttgcctctggagtgtcactgggcatttctaccctcagtctggactttgcagggtaccagacccgtggctgctcgcagccggaacgtgtcaagtttacactgaacatgctcgtgaccatggctcccatagttctcatcctgctgggcctgctgctcttcaaaatgtaccccattgatgaggagaggcggcggcagaataagaaggccctgcaggcactgagggacgaggccagcagctctggctgctcagaaacagactccacagagctggctagcatcctctagggcccgccacgttgcccgaagccaccatgcagaaggccacagaagggatcaggacctgtctgccggcttgctgagcagctggactgcaggtgctaggaagggaactgaagactcaaggaggtggcccaggacacttgctgtgctcactgtggggccggctgctctgtggcctcctgcctcccctctgcctgcctgtggggccaagccctggggctgccactgtgaatatgccaaggactgatcgggcctagcccggaacactaatgtagaaacctttttttttacagagcctaattaataacttaatgactgtgtacatagcaatgtgtgtgtatgtatatgtctgtgagctattaatgttattaattttcataaaagctggaaagcagctgcctgtt

SEQ ID NO: 12544 - DNA, 1929 bp, Homo sapiens
  source 1..1929: mol_type = unassigned DNA
cgtctgccagccggcttggctagcgcgcggcggccgtggctaaggctgctacgaagcgagcttgggaggagcagcggcctgcggggcagaggagcatcccgtctaccaggtcccaagcggcgtggcccgcgggtcatggccaaaggagaaggcgccgagagcggctccgcggcggggctgctacccaccagcatcctccaaagcactgaacgcccggcccaggtgaagaaagaaccgaaaaagaagaaacaacagttgtctgtttgcaacaagctttgctatgcacttgggggagccccctaccaggtgacgggctgtgccctgggtttcttccttcagatctacctattggatgtggctcaggtgggccctttctctgcctccatcatcctgtttgtgggccgagcctgggatgccatcacagaccccctggtgggcctctgcatcagcaaatccccctggacctgcctgggtcgccttatgccctggatcatcttctccacgcccctggccgtcattgcctacttcctcatctggttcgtgcccgacttcccacacggccagacctattggtacctgcttttctattgcctctttgaaacaatggtcacgtgtttccatgttccctactcggctctcaccatgttcatcagcaccgagcagactgagcgggattctgccaccgcctatcggatgactgtggaagtgctgggcacagtgctgggcacggcgatccagggacaaatcgtgggccaagcagacacgccttgtttccaggacctcaatagctctacagtagcttcacaaagtgccaaccatacacatggcaccacctcacacagggaaacgcaaaaggcatacctgctggcagcgggggtcattgtctgtatctatataatctgtgctgtcatcctgatcctgggcgtgcgggagcagagagaaccctatgaagcccagcagtctgagccaatcgcctacttccggggcctacggctggtcatgagccacggcccatacatcaaacttattactggcttcctcttcacctccttggctttcatgctggtggaggggaactttgtcttgttttgcacctacaccttgggcttccgcaatgaattccagaatctactcctggccatcatggtccatgctgcctgatgtcattgacgacttccatctgaagcagccccacttccatggaaccgagcccatcttcttctccttctatgtcttcttcaccaagtttgcctctggagtgtcactgggcatttctaccctcagtctggactttgcagggtaccagacccgtggctgctcgcagccggaacgtgtcaagtttacactgaacatgctcgtgaccatggctcccatagttctcatcctgctgggcctgctgctcttcaaaatgtaccccattgatgaggagaggcggcggcagaataagaaggccctgcaggcactgagggacgaggccagcagctctggctgctcagaaacagactccacagagctggctagcatcctctagggcccgccacgttgcccgaagccaccatgcagaaggccacagaagggatcaggacctgtctgccggcttgctgagcagctggactgcaggtgctaggaagggaactgaagactcaaggaggtggcccaggacacttgctgtgctcactgtggggccggctgctctgtggcctcctgcctcccctctgcctgcctgtggggccaagccctggggctgccactgtgaatatgccaaggactgatcgggcctagcccggaacactaatgtagaaacctttttttttacagagcctaattaataacttaatgactgtgtacatagcaatgtgtgtgtatgtatatgtctgtgagctattaatgttattaattttcataaaagctggaaagcagctgcctgtt

SEQ ID NO: 12545 - DNA, 923 bp, Homo sapiens
  source 1..923: mol_type = unassigned DNA
tgactaccggggctcctgcaccagctgtcttctctgtgtagcatctaacttggcaagcatcgcatcttagttgtatccatttacagagggggaacactgaactccagaaggaacaaaaaacttcagcagctaatttttgagtgggccctttctctgcctccatcatcctgtttgtgggccgagcctgggatgccatcacagaccccctggtgggcctctgcatcagcaaatccccctggacctgcctgggtcgccttatgccctggatcatcttctccacgcccctggccgtcattgcctacttcctcatctggttcgtgcccgacttcccacacggccagacctattggtacctgcttttctattgcctctttgaaacaatggtcacgtgtttccatgttccctactcggctctcaccatgttcatcagcaccgagcagactgagcgggattctgccaccgcctatcggatgactgtggaagtgctgggcacagtgctgggcacggcgatccagggacaaatcgtgggccaagcagacacgccttgtttccaggacctcaatagctctacagtagcttcacaaagtgccaaccatacacatggcaccacctcacacagggaaacgcaaaaggcatacctgctggcagcgggggtcattgtctgtatctatataatctgtgctgtcatcctgatcctgggcgtgcgggagcagagagaaccctatgaagcccagcagtctgagccaatcgcctacttccggggcctacggctggtcatgagccacggcccatacatcaaacttattactggcttcctcttcacctccttggctttcatgctggtggaggggaactttgtcttgttttgcacctacaccttgggcttccgcaatgaattccagaatctactcctggccatcatg

SEQ ID NO: 12546 - DNA, 2432 bp, Homo sapiens
  source 1..2432: mol_type = unassigned DNA
ggtatatataacttttaaattatgtcaacttttctgtttgccaactagtatgtaagttccacaagggcaatgattttttatctgttctctagttatcctaagtaattagaatagcgcccagcccatagctggaacttatgaggaaatgaggaaacgagcttcagataatttaaataacttcccaagactaagttttatagttagttggtggagctagaatggaatccctgaagagtggctcaaaggcctttctctttaccatggcctgtgctgccttgctatactgatgccatgaagttagtccatcctgaggtctaaccccttttgatggtgtggaactcacatggggaaggcggacatttgcccacctgggccttcaactccttcacttggagctggcctctccccatcatgccagcttccctgtgtgtgaatgggtgtgtgtgtgtgtgtgaatggggtgtgtgaagtgtgtatgtgaatgggggtgtgtgtgaatggggtgtgtgtgtgtgaatgatgtgtgtgtgaatgaggtgtgtgtgaatggggtgtgtgtgtgtgtgaatgaggtgtgtgtgtgaatggggtgtgtgtgtgaatggggtgtgtgtgtgcggttgatgactatccgtgtgagaacacgggagttggggctgctccttctctttgcctccttgcccaggcacctgaggtcttggactcctgtcctaactctcagcccattagaggctgctgcctctggactagactcaggctctgacctcacactccatgcctaggatttcagtctggggtcccagttcccatctgccattccgggcttggtcatcagcctcttcccagaggcccaggatgggtggatttggcaggagtatggggaaggaaggaagagcttagcttccttccctgtggggaccctgtgaggcacagcagactgggctgggcctggtcctgggctccagcctccagcctccactcacaccctcctcttcctcaggatcatcttctccacgcccctggccgtcattgcctacttcctcatctggttcgtgcccgacttcccacacggccagacctattggtacctgcttttctattgcctctttgaaacaatggtcacgtgtttccatgttccctactcggctctcaccatgttcatcagcaccgagcagactgagcgggattctgccaccgcctatcggatgactgtggaagtgctgggcacagtgctgggcacggcgatccagggacaaatcgtgggccaagcagacacgccttgtttccaggacctcaatagctctacagtagcttcacaaagtgccaaccatacacatggcaccacctcacacagggaaacgcaaaaggcatacctgctggcagcgggggtcattgtctgtatctatataatctgtgctgtcatcctgatcctgggcgtgcgggagcagagagctctcggccactttaaccattcccatctggcagtggttcttgacccggtttggcaagaagacagctgtatatgttgggatctcatcagcagtgccatttctcatcttggtggccctcatggagagtaacctcatcattacatatgcggtagctgtggcagctggcatcagtgtggcagctgccttcttactaccctggtccatgctgcctgatgtcattgacgacttccatctgaagcagccccacttccatggaaccgagcccatcttcttctccttctatgtcttcttcaccaagtttgcctctggagtgtcactgggcatttctaccctcagtctggactttgcagggtaccagacccgtggctgctcgcagccggaacgtgtcaagtttacactgaacatgctcgtgaccatggctcccatagttctcatcctgctgggcctgctgctcttcaaaatgtaccccattgatgaggagaggcggcggcagaataagaaggccctgcaggcactgagggacgaggccagcagctctggctgctcagaaacagactccacagagctggctagcatcctctagggcccgccacgttgcccgaagccaccatgcagaaggccacagaagggatcaggacctgtctgccggcttgctgagcagctggactgcaggtgctaggaagggaactgaagactcaaggaggtggcccaggacacttgctgtgctcactgtggggccggctgctctgtggcctcctgcctcccctctgcctgcctgtggggccaagccctggggctgccactgtgaatatgccaaggactgatcgggcctagcccggaacactaatgtagaaacctttttttttacagagcctaattaataacttaatgactgtgtacatagcaatgtgtgtgtatgtatatgtctgtgagctattaatgttattaattttcataaaagctggaaagcagctgcctgtt

SEQ ID NO: 12547 - DNA, 793 bp, Homo sapiens
  source 1..793: mol_type = unassigned DNA
tcctgatcctgggcgtgcgggagcagagagaaccctatgaagcccagcagtctgagccaatcgcctacttccggggcctacggctggtcatgagccacggcccatacatcaaacttattactggcttcctcttcacctccttggctttcatgctggtggaggggaactttgtcttgttttgcacctacaccttgggcttccgcaatgaattccagaatctactcctggccatcatgctctcggccactttaaccattcccatctggcagtggttcttgacccggtttggcaagaagacagctgtatatgttgggatctcagtgagtggggttgaagagcagagcctgggttgagttgggatgtctggtgggaacctcccagctgattcatcttcctgcacccccttccctagtcagcagtgccatttctcatcttggtggccctcatggagagtaacctcatcattacatatgcggtagctgtggcagctggcatcagtgtggcagctgccttcttactaccctggtccatgctgcctgatgtcattgacgacttccatctgaagcagccccacttccatggaaccgagcccatcttcttctccttctatgtcttcttcaccaagtttgcctctggagtgtcactgggcatttctaccctcagtctggactttgcagggtaccagacccgtggctgctcgcagccggaacgtgtcaagtttacactgaacatgctcgtgaccatggctcccatagttctcatcctgctgggcctgctgctcttcaaaatgtac

SEQ ID NO: 12548 - DNA, 683 bp, Homo sapiens
  source 1..683: mol_type = unassigned DNA
gtgcctgtcatcttcgttgctgcccacatgatgtcatctggctgctcttgggcagggctgggagccactttggggttctgggaagggcaggaggggctctgtggctctaaagcacctccctttaaccccctttgtccatccacagctctcggccactttaaccattcccatctggcagtggttcttgacccggtttggcaagaagacagctgtatatgttgggatctcagtgagtggggttgaagagcagagcctgggttgagttgggatgtctggtgggaacctcccagctgattcatcttcctgcacccccttccctagtcagcagtgccatttctcatcttggtggccctcatggagagtaacctcatcattacatatgcggtagctgtggcagctggcatcagtgtggcagctgccttcttactaccctggtccatgctgcctgatgtcattgacgacttccatctgaagcagccccacttccatggaaccgagcccatcttcttctccttctatgtcttcttcaccaagtttgcctctggagtgtcactgggcatttctaccctcagtctggactttgcagggtaccagacccgtggctgctcgcagccggaacgtgtcaagtttacactgaacatgctcgtgaccatggctcccatagttctcatcctgctgggcct

SEQ ID NO: 12549 - DNA, 905 bp, Homo sapiens
  source 1..905: mol_type = unassigned DNA
catccacagctctcggccactttaaccattcccatctggcagtggttcttgacccggtttggcaagaagacagctgtatatgttgggatctcagtgagtggggttgaagagcagagcctgggttgagttgggatgtctggtgggaacctcccagctgattcatcttcctgcacccccttccctagtcagcagtgccatttctcatcttggtggccctcatggagagtaacctcatcattacatatgcggtagctgtggcagctggcatcagtgtggcagctgccttcttactaccctggtaggtatatacaggcccccctcctcgggtatctccagcccctagtccccagttttgaagctccttagggagagttctatgcagtgttctcccacaggccattctgtgggtccaggttaggagtgggggaggtctgtcctgtacagttgtacaggtagtgagctttgcaagaacacctagtcagagtgaaaaatgggggctgtaatctggcctgggctccacttgccacgctgagcacctccaggcagggttacttcctcttagagcaagaggccttttcttattcatgtgaaggtcccatatcctcactgagctgtgtacccatggtactgcaagcttccagagggccacctcttctcattaacacagaggcccgttaggtgggtcagtcctcatggctgtcactactctgcgcaggtccatgctgcctgatgtcattgacgacttccatctgaagcagccccacttccatggaaccgagcccatcttcttctccttctatgtcttcttcaccaagtttgcctctggagtgtcactgggcatttctaccctcagtctggactttgcagggtaccagacccgtggctgctcgcagccggaacgtgtc

SEQ ID NO: 12550 - DNA, 1914 bp, Homo sapiens
  source 1..1914: mol_type = unassigned DNA
agaactataagaggcgcggagggggcgtgcagcagagtgcgttcctcgtctgccagccggcttggctagcgcgcggcggccgtggctaaggctgctacgaagcgagcttgggaggagcagcggcctgcggggcagaggagcatcccgtctaccaggtcccaagcggcgtggcccgcgggtcatggccaaaggagaaggcgccgagagcggctccgcggcggggctgctacccaccagcatcctccaaagcactgaacgcccggcccaggtgaaggatcatcttctccacgcccctggccgtcattgcctacttcctcatctggttcgtgcccgacttcccacacggccagacctattggtacctgcttttctattgcctctttgaaacaatggtcacgtgtttccatgttccctactcggctctcaccatgttcatcagcaccgagcagactgagcgggattctgccaccgcctatcggatgactgtggaagtgctgggcacagtgctgggcacggcgatccagggacaaatcgtgggccaagcagacacgccttgtttccaggacctcaatagctctacagtagcttcacaaagtgccaaccatacacatggcaccacctcacacagggaaacgcaaaaggcatacctgctggcagcgggggtcattgtctgtatctatataatctgtgctgtcatcctgatcctgggcgtgcgggagcagagagaaccctatgaagcccagcagtctgagccaatcgcctacttccggggcctacggctggtcatgagccacggcccatacatcaaacttattactggcttcctcttcacctccttggctttcatgctggtggaggggaactttgtcttgttttgcacctacaccttgggcttccgcaatgaattccagaatctactcctggccatcatgctctcggccactttaaccattcccatctggcagtggttcttgacccggtttggcaagaagacagctgtatatgttgggatctcatcagcagtgccatttctcatcttggtggccctcatggagagtaacctcatcattacatatgcggtagctgtggcagctggcatcagtgtggcagctgccttcttactaccctggtccatgctgcctgatgtcattgacgacttccatctgaagcagccccacttccatggaaccgagcccatcttcttctccttctatgtcttcttcaccaagtttgcctctggagtgtcactgggcatttctaccctcagtctggactttgcagggtaccagacccgtggctgctcgcagccggaacgtgtcaagtttacactgaacatgctcgtgaccatggctcccatagttctcatcctgctgggcctgctgctcttcaaaatgtaccccattgatgaggagaggcggcggcagaataagaaggccctgcaggcactgagggacgaggccagcagctctggctgctcagaaacagactccacagagctggctagcatcctctagggcccgccacgttgcccgaagccaccatgcagaaggccacagaagggatcaggacctgtctgccggcttgctgagcagctggactgcaggtgctaggaagggaactgaagactcaaggaggtggcccaggacacttgctgtgctcactgtggggccggctgctctgtggcctcctgcctcccctctgcctgcctgtggggccaagccctggggctgccactgtgaatatgccaaggactgatcgggcctagcccggaacactaatgtagaaacctttttttttacagagcctaattaataacttaatgactgtgtacatagcaatgtgtgtgtatgtatatgtctgtgagctattaatgttattaattttcataaaagctggaaagcagctgcctgtttc

SEQ ID NO: 12551 - DNA, 347 bp, Homo sapiens
  source 1..347: mol_type = unassigned DNA
gttggggtggaagggaaatatttccgggtgggtgtgagctgttgggcttccaggtcagctcttggccatgcagccatgcctgcaggatgatcagaagtcacggcacctcatgggaaggttaagactggagcaaagcttttccaagtgtgacccagagaccagtagcatcagcatcacctgagacctgtgaacactgaagctccagctcagacatgttggggaccattttaataagatacctagctgattttttgcacagcaaactttgaaaacccctggtctaaggggtagtatttgtatcacttatggaatataatctcagggaaattaaatctgctcaattgaca

SEQ ID NO: 12552 - DNA, 4049 bp, Homo sapiens
  source 1..4049: mol_type = unassigned DNA
aggtccgcggctgctgctgcgtccgacccccggccggcgcgggtatggagcttgggggtcactgggacatgaactcggccccgaggctggtctcggagaccgcagagcggaaacaggagcagaagacaggaaccgaggcggaggctgccgactccggtgccgtcggagcccgccgcttcctgctctgtctctacttggtgggcttcttggatttgtttggtgtcagcatggttgtgcctttattgagccttcatgtcaagtcccttggagcaagtccaacagttgctggaatagtaggctcctcctatggcattttgcaactcttttctagcacattggtgggctgctggagcgatgtagtgggaagacggtcttccttgctggcatgcattctactcagtgctctgggctatctccttctcggagcagccaccaatgtgtttctgtttgtcctggctagagtcccggcaggtatttttaaacacactctctccatctcaagggctctactttctgatgtggttccagagaaggaacggccgcttgtaatcggacacttcaacacagcctccggtgtgggcttcatcttgggccccgtggtcggtggctatctcactgaattagaggatgggttttatctcacagccttcatctgctttttggtcttcattctcaatgctggtctcgtttggttctttccatggagggaagcaaaaccgggcagtacagagaagggcctgccattgcgaaagacccatgtgctgttgggaaggagccatgacacagtgcaggaggcagccaccagccgcagagccagggccagcaagaagactgcccagccctgggtcgaagtagtgttggccttgcggaacatgaagaacctgctgttttccgaaatgtgggacatatttctggtgcgcttgctgatggccatggcagtcatgctgtactacagtaactttgtcctggccctggaggagcgctttggggtgcggcccaaggtgacaggctacctcatcagttacagcagcatgctgggggccgtggccggccttgccctggggccaatcctacggctgtacaagcacaactcgcaggcactgctgctgcattccagcatactcacctgcacactgctgctgctctactccttggcccccaccatgggtgcagttgtcctctcctccactctcctgtccttctccactgccattggcaggacgtgcatcacggacctccagctgactgtgggcggggcccaggccagcggcacccttattggcgtggggcagtctgtgactgcagtgggccgcatcatcgcccctctcctctcgggggttgcccaggaggtcagcccttgcggcccccccagcctgggcgctgtgttagccttagtggccattttcataatgtctctaaacaagcgacactctagtggtgatgggaatagtaaattaaaaagtgagtagatggatttggacaacataaagcaacaaaatttgagatggttgaatgagggccggaggccatgatgaaaagggcactttggaaagggttggggtggaagggaaatatttccgggtgggtgtgagctgttgggcttccaggtcagctcttggccatgcagccatgcctgcaggatgatcagaagtcacggcacctcatgggaaggttaagactggagcaaagcttttccaaggtgagcatattcagcgtttacctggaagtctcttcttcccacctgggctaatcaggttacaattttcaagggtaaacaaactaccagctacaggatagggaagtggtggtggaataagagaacatgatacctggaggaagggaagaaaccacaagcattttcctactgaaaaatagggtgacatgtcagtcaaattctgatcaactggaacttgagtttccagttaaattccatacactaggagggagttttctatcaaaatcctgcagattgaagaagctggtttattagaaccagcctgtcgcttttcaaagctgcttaaaaataagatactgacctcacccctagagatgattcagtgggcctgggtggggccaagaaatccgtggtgttttgtaagcactgctggcgatttctcatggcagtaaagaccacactgagactgcactgattttgattaaagtacataggcttggctgtttttacacagctaactaaatttggactcttaaaattgtgtttgtaatcacagtgtgttacacctttcccagctctcagcagttgtactgcatgatggagcagcgggcccctgggacctgttccctgtgctccctgcctctgagagcccagcttgctctgaagttggactaaaccacttagatgctggggttgccacagcctgctcctggaagcctgcattccagtcaggttgcatccttctggtgctgacagaacccagtggtgaagccaaagcacaggaatgctttaaaaatgaacagtttatgcagaataagggtcaggagtcatgccagaccagaacttgatgctactgtgtcttgtgttaagaatcatttcctggccaggctcggtggctcaggcctgtaatcccagcactttgggaggctgaggcaggtgaatcacttggtcaggagatggagaccattctggctaacatggtgaaaccccgtctctactaaaaatacaaaaaaaaaattagccgggcgtgatggcgggcgcctgcagtcccagctattcgggaggctgaggtagaatggcgtgaacctgggaggcggagcttgcggtgagccaagattgtgccactgctctccagcctgggcgacagagtgagactccgtctcaaaaaaaaaagaatcatttcctttatttttagtttcacgcctgcaaacacaagcattctgttgatcaacggaaatattttgatgtgccatttcttgtctaaacaagtttcatatacagcaccgagggggccacgagaggcagaggcccagacagaaggtgaacatagccttgcagggagacatatgccaggcaggatgaccattgggattgcatcaagtattaatcagttacttaagggcttcctgtcagacagttgaagttcacattccttttacttttcttaattagtccactaggatggtatgcctgttttcaacttaacacatgcatacttgtaaatattttagtatgctacagtaatttgtcatatctttaatatttattgtttgtaaagcagtaaacatttctgtattttagaagtcatggagtaaaatcaaatatttatgataaataattggaagtatgttttagtttgaagattgtcctttttcctatcttgctgcaaggaaaaatggacttctgattaggttttacaattgtgaacttttatgtaaatgttaagtgctttcgaggagaccaaactattattaatatataaaatggccttgcccttaaggagcaaattaaatctcatggagattagactcaaaaggcaataaataatcgagggtttatgcaatgaaatagaatttcagaagagtttggatctcaaagattgtccttcactctcagaaacaggcaagtttcttaaaagcccttatagtcgtgtttttattttaaaaatcgtagcactttatttttgaagtttaaaaagcccataaacttaatgagtctttataatcagacacatggaaatatagaaaaccaaagactgatcttagaatatagagtagagagacatgtttgttattctccactagtgactttagtattttgttatgtgatgttttttaggtgcaccttttctcatgactccttttactttatctaatgtcttcctctttaaagtgtgacccagagaccagtagcatcagcatcacctgagacctgtgaacactgaagctccagctcagacatgttggggaccattttaataagatacctagctgattttttgcacagcaaactttgaaaacccctggtctaaggggtagtatttgtatcacttatggaatataatctcagggaaattaaatctgctcaattgaca

SEQ ID NO: 12553 - DNA, 2990 bp, Homo sapiens
  source 1..2990: mol_type = unassigned DNA
ggggcggggctgggctcccggggtaggtccgcggctgctgctgcgtccgacccccggccggcgcgggtatggagcttgggggtcactgggacatgaactcggccccgaggctggtctcggagaccgcagagcggaaacaggagcagaagacaggaaccgaggcggaggctgccgactccggtgccgtcggagcccgccgcttcctgctctgtctctacttggtgggcttcttggatttgtttggtgtcagcatggttgtgcctttattgagccttcatgtcaagtcccttggagcaagtccaacagttgctggaatagtagacgacgtatgttcaaagagattttgagatttgagcactataaccaagtcccatgccactagtggcaacaggtacttatggagcctctgcaaggagctggctgtgtgtataaaagggctcctcctatggcattttgcaactcttttctagcacattggtgggctgctggagcgatgtagtgggaagacggtcttccttgctggcatgcattctactcagtgctctgggctatctccttctcggagcagccaccaatgtgtttctgtttgtcctggctagagtcccggcaggtatttttaaacacactctctccatctcaagggctctactttctgatgtggttccagagaaggaacggccgcttgtaatcggacacttcaacacagcctccggtgtgggcttcatcttgggccccgtggtcggtggctatctcactgaattagaggatgggttttatctcacagccttcatctgctttttggtcttcattctcaatgctggtctcgtttggttctttccatggagggaagcaaaaccgggcagtacagagaagggcctgccattgcgaaagacccatgtgctgttgggaaggagccatgacacagtgcaggaggcagccaccagccgcagagccagggccagcaagaagactgcccagccctgggtcgaagtagtgttggccttgcggaacatgaagaacctgctgttttccgaaatgtgggacatatttctggtgcgcttgctgatggccatggcagtcatgctgtactacagtaactttgtcctggccctggaggagcgctttggggtgcggcccaaggtgacaggctacctcatcagttacagcagcatgctgggggccgtggccggccttgccctggggccaatcctacggctgtacaagcacaactcgcaggcactgctgctgcattccagcatactcacctgcacactgctgctgctctactccttggcccccaccatgggtgcagttgtcctctcctccactctcctgtccttctccactgccattggcaggacgtgcatcacggacctccagctgactgtgggcggggcccaggccagcggcacccttattggcgtggggcagtctgtgactgcagtgggccgcatcatcgcccctctcctctcgggggttgcccaggaggtcagcccttgcggcccccccagcctgggcgctgtgttagccttagtggccattttcataatgtctctaaacaagcgacactctagtggtgatgggaatagtaaattaaaaagtgagtagatggatttggacaacataaagcaacaaaatttgagatggttgaatgagggccggaggccatgatgaaaagggcactttggaaagggttggggtggaagggaaatatttccgggtgggtgtgagctgttgggcttccaggtcagctcttggccatgcagccatgcctgcaggatgatcagaagtcacggcacctcatgggaaggttaagactggagcaaagcttttccaaggtgagcatattcagcgtttacctggaagtctcttcttcccacctgggctaatcaggttacaattttcaagggtaaacaaactaccagctacaggatagggaagtggtggtggaataagagaacatgatacctggaggaagggaagaaaccacaagcattttcctactgaaaaatagggtgacatgtcagtcaaattctgatcaactggaacttgagtttccagttaaattccatacactaggagggagttttctatcaaaatcctgcagattgaagaagctggtttattagaaccagcctgtcgcttttcaaagctgcttaaaaataagatactgacctcacccctagagatgattcagtgggcctgggtggggccaagaaatccgtggtgttttgtaagcactgctggcgatttctcatggcagtaaagaccacactgagactgcactgattttgattaaagtacataggcttggctgtttttacacagctaactaaatttggactcttaaaattgtgtttgtaatcacagtgtgttacacctttcccagctctcagcagttgtactgcatgatggagcagcgggcccctgggacctgttccctgtgctccctgcctctgagagcccagcttgctctgaagttggactaaaccacttagatgctggggttgccacagcctgctcctggaagcctgcattccagtcaggttgcatccttctggtgctgacagaacccagtggtgaagccaaagcacaggaatgctttaaaaatgaacagtttatgcagaataagggtcaggagtcatgccagaccagaacttgatgctactgtgtcttgtgttaagaatcatttcctggccaggctcggtggctcaggcctgtaatcccagcactttgggaggctgaggcaggtgaatcacttggtcaggagatggagaccattctggctaacatggtgaaaccccgtctctactaaaaatacaaaaaaaaaattagccgggcgtgatggcgggcgcctgcagtcccagctattcgggaggctgaggtagaatggcgtgaacctgggaggcggagcttgcggtgagccaagattgtgccactgctctccagcctgggcgacagagtgagactccgtctcaaaaaaaaaagaa

SEQ ID NO: 12554 - DNA, 2440 bp, Homo sapiens
  source 1..2440: mol_type = unassigned DNA
ggggcggggctgggctcccggggtaggtccgcggctgctgctgcgtccgacccccggccggcgcgggtatggagcttgggggtcactgggacatgaactcggccccgaggctggtctcggagaccgcagagcggaaacaggagcagaagacaggaaccgaggcggaggctgccgactccggtgccgtcggagcccgccgcttcctgctctgtctctacttggtgggcttcttgcatggttgtgcctttattgagccttcatgtcaagtcccttggagcaagtccaacagttgctggaatagtagacgacgtatgttcaaagagattttgagatttgagcactataaccaagtcccatgccactagtggcaacaggtacttatggagcctctgcaaggagctggctgtgtgtataaaagggctcctcctatggcattttgcaactcttttctagcacattggtgggctgctggagcgatgtagtgggaagacggtcttccttgctggcatgcattctactcagtgctctgggctatctccttctcggagcagccaccaatgtgtttctgtttgtcctggctagagtcccggcaggtatttttaaacacactctctccatctcaagggctctactttctgatgtggttccagagaaggaacggccgcttgtaatcggacacttcaacacagcctccggtgtgggcttcatcttgggccccgtggtcggtggctatctcactgaattagaggatgggttttatctcacagccttcatctgctttttggtcttcattctcaatgctggtctcgtttggttctttccatggagggaagcaaaaccgggcagtacagagaagggcctgccattgcgaaagacccatgtgctgttgggaaggagccatgacacagtgcaggaggcagccaccagccgcagagccagggccagcaagaagactgcccagccctgggtcgaagtagtgttggccttgcggaacatgaagaacctgctgttttccgaaatgtgggacatatttctggtgcgcttgctgatggccatggcagtcatgctgtactacagtaactttgtcctggccctggaggagcgctttggggtgcggcccaaggtgacaggctacctcatcagttacagcagcatgctgggggccgtggccggccttgccctggggccaatcctacggctgtacaagcacaactcgcaggcactgctgctgcattccagcatactcacctgcacactgctgctgctctactccttggcccccaccatgggtgcagttgtcctctcctccactctcctgtccttctccactgccattggcaggacgtgcatcacggacctccagctgactgtgggcggggcccaggccagcggcacccttattggcgtggggcagtctgtgactgcagtgggccgcatcatcgcccctctcctctcgggggttgcccaggaggtcagcccttgcggcccccccagcctgggcgctgtgttagccttagtggccattttcataatgtctctaaacaagcgacactctagtggtgatgggaatagtaaattaaaaagtgagtagatggatttggacaacataaagcaacaaaatttgagatggttgaatgagggccggaggccatgatgaaaagggcactttggaaagggttggggtggaagggaaatatttccgggtgggtgtgagctgttgggcttccaggtcagctcttggccatgcagccatgcctgcaggatgatcagaagtcacggcacctcatgggaaggttaagactggagcaaagcttttccaaggtgagcatattcagcgtttacctggaagtctcttcttcccacctgggctaatcaggttacaattttcaagggtaaacaaactaccagctacaggatagggaagtggtggtggaataagagaacatgatacctggaggaagggaagaaaccacaagcattttcctactgaaaaatagggtgacatgtcagtcaaattctgatcaactggaacttgagtttccagttaaattccatacactaggagggagttttctatcaaaatcctgcagattgaagaagctggtttattagaaccagcctgtcgcttttcaaagctgcttaaaaataagatactgacctcacccctagagatgattcagtgggcctgggtggggccaagaaatccgtggtgttttgtaagcactgctggcgatttctcatggcagtaaagaccacactgagactgcactgattttgattaaagtacataggcttggctgtttttacacagctaactaaatttggactcttaaaattgtgtttgtaatcacagtgtgttacacctttcccagctctcagcagttgtactgcatgatggagcagcgggcccctgggacctgttccctgtgctccctgcctc

SEQ ID NO: 12555 - DNA, 1183 bp, Homo sapiens
  source 1..1183: mol_type = unassigned DNA
ggggcggggctgggctcccggggtaggtccgcggctgctgctgcgtccgacccccggccggcgcgggtatggagcttgggggtcactgggacatgaactcggccccgaggctggtctcggagaccgcagagcggaaacaggagcagaagacaggaaccgaggcggaggctgccgactccggtgccgtcggagcccgccgcttcctgctctgtctctacttggtgggcttcttggatttgtttggtgtcagcatggttgtgcctttattgagccttcatgtcaagtcccttggagcaagtccaacagttgctggaatagtagacgacgtatgttcaaagagattttgagatttgagcactataaccaagtcccatgccactagtggcaacaggtacttatggagcctctgcaaggagctggctgtgtgtataaaagggctcctcctatggcattttgcaactcttttctagcacattggtgggctgctggagcgatgtagtgggaagacggtcttccttgctggcatgcattctactcagtgctctgggctatctccttctcggagcagccaccaatgtgtttctgtttgtcctggctagagtcccggcagggctctactttctgatgtggttccagagaaggaacggccgcttgtaatcggacacttcaacacagcctccggtgtgggcttcatcttgggccccgtggtcggtggctatctcactgaattagaggatgggttttatctcacagccttcatctgctttttggtcttcattctcaatgctggtctcgtttggttctttccatggagggaagcaaaaccgggcagtacagagaagggcctgccattgcgaaagacccatgtgctgttgggaaggagccatgacacagtgcaggaggcagccaccagccgcagagccagggccagcaagaagactgcccagccctgggtcgaagtagtgttggccttgcggaacatgaagaacctgctgttttccgaaatgtgggacatatttctggtgcgcttgctgatggccatggcagtcatgctgtactacagtaactttgtcctggccctggaggagcgctttggggtgcggcccaaggtgacaggctacctcatcagttacagcagcatgctgggggccgtggccggccttgccctggggccaatcctacg

SEQ ID NO: 12556 - DNA, 576 bp, Homo sapiens
  source 1..576: mol_type = unassigned DNA
acagttgctggaatagtaggctcctcctatggcattttgcaactcttttctagcacattggtgggctgctggagcgatgtagtgggaagacggtcttccttgctggcatgcattctactcagtgctctgggctatctccttctcggagcagccaccaatgtgtttctgtttgtcctggctagagtcccggcagggctctactttctgatgtggttccagagaaggaacggccgcttgtaatcggacacttcaacacagcctccggtgtgggcttcatcttgggccccgtggtcggtggctatctcactgaattagaggatgggttttatctcacagccttcatctgctttttggtcttcattctcaatgctggtctcgtttggttctttccatggagggaagcaaaaccgggcagtacagagaagggcctgccattgcgaaagacccatgtgctgttgggaaggagccatgacacagtgcaggaggcagccaccagccgcagagccagggccagcaagaagactgcccagccctgggtcgaagtagtgttggccttgcggaacatgaagaacctgc

SEQ ID NO: 12557 - DNA, 548 bp, Homo sapiens
  source 1..548: mol_type = unassigned DNA
gcttccgctcggggcggggctgggctcccggggtaggtccgcggctgctgctgcgtccgacccccggccggcgcgggtatggagcttgggggtcactgggacatgaactcggccccgaggctggtctcggagaccgcagagcggaaacaggagcagaagacaggaaccgaggcggaggctgccgactccggtgccgtcggagcccgccgcttcctgctctgtctctacttggtgggcttcttggtgagtgcgagcgtgggggctgggagcaagtgctgactgtgttcgggcctggggacccaggcggttcttggagcttccggggagctcccagggagtgggaacccgcagtccgcctggatttgtttggtgtcagcatggttgtgcctttattgagccttcatgtcaagtcccttggagcaagtccaacagttgctggaatagtaggctcctcctatggcattttgcaactcttttctagcacattggtgggctgctggagcgatgtagtgggaagacggtcttccttgctggcatgcattctactc

SEQ ID NO: 12558 - DNA, 335 bp, Homo sapiens
  source 1..335: mol_type = unassigned DNA
gctgcgtccgacccccggccggcgcgggtatggagcttgggggtcactgggacatgaactcggccccgaggctggtctcggagaccgcagagcggaaacaggagcagaagacaggaaccgaggcggaggctgccgactccggtgccgtcggagcccgccgcttcctgctctgtctctacttggtgggcttcttgcatttattttgttttaggatttgtttggtgtcagcatggttgtgcctttattgagccttcatgtcaagtcccttggagcaagtccaacagttgctggaatagtaggtgagtggtcgatattgctcatttttagagcactga

SEQ ID NO: 12559 - DNA, 5062 bp, Homo sapiens
  source 1..5062: mol_type = unassigned DNA
acggggtggaagtgggggtggggggaggggatcggggccgggccggggccgcgctgcctgcgatgccgggcgcccgccgcagccgctgccgccggagcccgggatggggcgagaggctgcggcggacgccagcatctccccgccggggaccccgggggccgcggagccgccgccgccgctgctgccgccgttgctgagacccagcgggcgatgggatgaagatgagacgctacaagctctttctcatgttctgtatggccggcctgtgcctcatctccttcctgcacttcttcaagaccctgtcctatgtcaccttcccccgagaactggcctccctcagccctaacctggtgtccagctttttctggaacaatgccccggtcacgccccaggccagccccgagccaggaggccctgacctgctgcgtaccccactctactcccactcgcccctgctgcagccgctgccgcccagcaaggcggccgaggagctccaccgggtggacttggtgctgcccgaggacaccaccgagtatttcgtgcgcaccaaggccggcggcgtctgcttcaaacccggcaccaagatgctggagaggccgcccccgggacggccggaggagaagcctgagggggccaacggctcctcggcccggcggccaccccggtacctcctgagcgcccgggagcgcacggggggccgaggcgcccggcgcaagtgggtggagtgcgtgtgcctgcccggctggcacggacccagctgcggcgtgcccactgtggtgcagtactccaacctgcccaccaaggagcggctggtgcccagggaggtgccgcgccgcgtcatcaacgccatcaacgtcaaccacgagttcgacctgctggacgtgcgcttccacgagctgggcgacgtggtggacgcctttgtggtgtgcgagtccaacttcacggcttatggggagccgcggccgctcaagttccgggagatgctgaccaatggcaccttcgagtacatccgccacaaggtgctctatgtcttcctggaccacttcccgcccggcggccggcaggacggctggatcgccgacgactacctgcgcaccttcctcacccaggacggcgtctcgcggctgcgcaacctgcggcccgacgacgtcttcatcattgacgatgcggacgagatcccggcccgtgacggcgtccttttcctcaagctctacgatggctggaccgagcccttcgccttccacatgcgcaagtcgctctacggcttcttctggaagcagccgggcaccctggaggtggtgtcaggctgcacggtggacatgctgcaggcagtgtatgggctggacggcatccgcctgcgccgccgccagtactacaccatgcccaacttcagacagtatgagaaccgcaccggccacatcctggtgcagtggtcgctgggcagccccctgcacttcgccggctggcactgctcctggtgcttcacgcccgagggcatctacttcaagctcgtgtccgcccagaatggcgacttcccacgctggggtgactacgaggacaagcgggacctgaactacatccgcggcctgatccgcaccgggggctggttcgacggcacgcagcaggagtacccgcctgcagaccccagcgagcacatgtatgcgcccaagtacctgctgaagaactacgaccggttccactacctgctggacaacccctaccaggagcccaggagcacggcggcgggcgggtggcgccacaggggtcccgagggaaggccgcccgcccggggcaaactggacgaggcggaagtctagagctgcatgatctgatagggtttgtgacagggcgggggtggcggcggcccctagcgctatctccctgcctcctgccggctccttggttcttgaggggaccaggagtgggtggggagtgggggtgggggtagggtttccctactgaagcccttgtgaatcaagggtcaggcctttgagctcagaaaatatccctcctgttgggagagggcgcaggccgtgacgtctgggtggcccttatgactgccaagactgctgtggccaggaggtgccactggagtgtgcgtggtggtccctgggtagcgggggagggtaggcaggattggggaagagagcctgcaggatctcaccaggcagcctctggggggtggccaggccgggaaaaagcccaccatttggcatccctgggccttgggctccgtgtgggagaccggcctgccaggaggacccagggctctgtaagtagatgcatttgggtccaggaggaagcgtggacacctcgtagggaagagatgaaaaagccacatcctaccaagaggaggtgctgagggatgctttgcagtgtagtcagaagtgctgggccagatggagacagaactccaccccctgccgcaaaggacaggacctggctgccctgggatgctggtgcctgagtctgtctctgtgcacccctcaggctgtcgtgagccaacacaggggcctggagaaccctgaggagctttccttttggttctaaacccggcgttgacgttccttctccctttcacattgctgtcttgtggactgtgcactcagtccttgcaaggccaagagtccagttgtaggtgtggccttgagggggaagtggggaggagaagactgacatgagtcctctgcacggatccgtctctccctccccatcaccccttccttctgacacccagtcccagctgtccactgtcccaggtgcagtcactgttgtgcccttccttggggcaggctggctgggggccagaaaggggccatgaggctgtcttgggcccaaaaagggacaataaggccagttgtatgcttcctgttcctcatagcttgccttggtggggatgtctttgttggagttgattctgagctgctgtgattaggagaccctgaaatacagtggtttaagcaagatggaagcttgtttctaattagtctagattgagatggcccagagctggtagggcagctctgcgtttcttcatacgcaccttccaattctgggtacacagcggctgctccagcgcccaccctcctgtgtgcatccaagcctgggggaagcagaaatagacaagagggcacacccactttttgctaaaggcatgagccagaattggcaggctcacctctgctggcctctcattggctgggactcagtcacatggccacaagcagctgctagggaacctgggaagtgtagtcttcagcggggccgccatgtgcctggcctcaccttgggagttatcttattgatggaggagaagagaatggatatgggggaccagtagcatctctgggagagggggagggagcagcaataactcagtcgtcggatccagctctcattgtcagagtttccggaacagcttgctcctgtttccctcactgtgcagcccagggctgggggcagtgaggagcttgcagctctgtgggaaggggaaacaccccctcccctcggcccctcagacgctacccaatgatgccggtttgcagagttggcctgtggaatggctcatgtttgtgcgtgtgtgtgtgtatatttatgggcatgggtgcatgcttggtgtgtatttgtacatgtctgtattgctgtgtccctgtaaatacatgcttgtgtatggatggaagaggccaggcccaggcctggcctcttcctcgggcctgtggccacacctcctgcagctccccaaaatgactgaggcagaaagcccttggggagcctagaaagcaaagctaaaggggatgcagggtctgtctgtctgtctgtctttcagtctgaggaatgagaatcctgacctgagggctgtgcagctgagagcccactacctccccagcccctctcggccccagccgcatcatcccacctgtcccctcccccccacctccagtggggctttctccagatgtcttatggttgggggtttcctgatgggccaggagaggagggcatcttcttgcgacagcactgtctgggttaagtgcccagtgagggcatggtgtggggagctggcctcagaggagccgctggtgggcaagcgtgaagtgggctgaggggctctgagccactttgctcccatctaggggactgccccccatggaactcctttgaagtcacagcagccttcctttctgtttgctcttggggctgagaggtggctcaaacactcggggtccctatggctctgggtcaatctaggccaggctgcaccccatggacagggagtctcagggctcctgatcatgcccaggccctggcctggggcctccctccttggcagctttcccacccccacgcccctggcatcctcagttgctatgggatgcccctccagggcaccagctcagggctaagcgaaggaagataggagcagctcagagctgccaggctctgccttcctcacagacctggtggggcaggtcctgttcacagcagcaggagtgaaggcctggccatcggtggagagggcagctgtcagagggctgggggccagggcacaggattgaagagtttcacatatcatcacagcatacactgggaatttggtgggggcagaagaacccagggccactccctcaatatgaagggaaaccaagctgaatgtgaccaccggcacactgctgccatgtcccatgtccacctttctccccgggaataactggccctgagacccctagacccaaggaggcctgtccatgccaagcatccgggaagcatggctggccttatccacccatgggtcacgtcggttcccaggggcagcatgggagatctttgggggcaacagggagagtctgggtggggagacgggacttgtccaagcagaaggcaggaccctgggaaatgcataatgtaaggacatcaataatagtattattttttttgtaagggaaaatcaatatgtacattctgaaatcattttctctgtaaatggttggatttcatttcacccttaaagggatgcttaaaggagaagataatattaataataaaaacagctacaaagtctgaa

SEQ ID NO: 12560 - DNA, 569 bp, Homo sapiens
  source 1..569: mol_type = unassigned DNA
acacctgggctcagcctctagggaggaaactgctgccatagagccttgaaagccaggcagaggggactagacactgtgcctcaaggatgaagatgagacgctacaagctctttctcatgttctgtatggccggcctgtgcctcatctccttcctgcacttcttcaagaccctgtcctatgtcaccttcccccgagaactggcctccctcagccctaacctggtgtccagctttttctggaacaatgccccggtcacgccccaggccagccccgagccaggaggccctgacctgctgcgtaccccactctactcccactcgcccctgctgcagccgctgccgcccagcaaggcggccgaggagctccaccgggtggacttggtgctgcccgaggacaccaccgagtatttcgtgcgcaccaaggccggcggcgtctgcttcaaacccggcaccaagatgctggagaggccgcccccgggacggccggaggagaagcctgagggggccaacggctcctcggcccggcggccaccccggtacctcctgagcgcccgggagcgcacggggggc

SEQ ID NO: 12561 - DNA, 552 bp, Homo sapiens
  source 1..552: mol_type = unassigned DNA
gtatttggtcgtccagcgggaaacccaaatggaaggaaagaaaaaaaaaaaaaaccatgcatttatagaacctctgccaatggccaggctccatgcagaatgctttgacaccgtggctcagccaggtctcccacaggactgcaaaacagagggtgacatctttcttttagatcggagaagactgaggaccagagaagctaagtaacttgccaaagggcacacagcaaatggagtcttgctcttgtcacccaggttctggagtgcaatggcgtgatcatggctcactgcaacttccgccccctgggttcaagatgaagatgagacgctacaagctctttctcatgttctgtatggccggcctgtgcctcatctccttcctgcacttcttcaagaccctgtcctatgtcaccttcccccgagaactggcctccctcagccctaacctggtgtccagctttttctggaacaatgccccggtcacgccccaggccagccccgagccaggaggccctgacctgctgcgtaccccactctactcccactcgcccctgc

SEQ ID NO: 12562 - DNA, 25116 bp, Homo sapiens
  source 1..25116: mol_type = unassigned DNA
ggtatcaacggtttctgtacagcacagattatgacagcgtctttcttaagaagagaatgtttaaatttcatcaaatgaaacatatttttgaaatacttgataaaatgagatgcctgagaaaacgttctacagtgtcattcttgggagttcttgtcatttttctcctttttatgaacttgtacattgaagatagctatgttctggaaggagacaaacaacttataagggaaacatccacacatcaactgaattcagaacgctatgttcatactttcaaggatttatctaatttctcaggagccataaatgtcacctatcgctacctagctgccacacctttacaaagaaagcggtatcttacaattggactttcttcagtaaagcgaaaaaaaggaaactatttacttgagacaattaagtcaatttttgagcaatccagctatgaagagctgaaggaaatttcagtggtggttcacctagcagactttaattcttcctggcgtgatgccatggtccaggatattacacagaaatttgcgcaccatattattgcaggaagattaatggttatacatgctccagaggagtattacccaatcctagatggccttaaaagaaattacaatgatccagaagatagagtcaaatttcgttccaagcaaaatgtagattatgcttttctgcttaatttttgtgccaatacttcagactattatgtaatgcttgaagatgatgttcgatgttcaaaaaatttcttaactgccatcaagaaagtcattgcatccctagaaggaacttactgggtaactcttgaattctctaagcttggctacattggtaaactctatcattctcatgatctcccacgtttggcccattttttattaatgttttatcaagaaatgccttgtgattggctattgactcatttccgtggtctgttggctcagaaaaatgtgatccgttttaaaccatctctctttcagcacatgggctattattcatcatacaaagggacggagaataagctgaaggatgatgattttgaagaggagtcatttgacattcctgataacccccctgcaagtctgtacaccaacatgaatgtgtttgaaaattatgaagcaagcaaggcttacagtagtgttgatgagtacttttgggggaaaccaccttcaacaggagatgtttttgtgattgtatttgaaaatccaattataataaaaaaaattaaagtaaatactggaacagaagatcggcaaaatgatattttgcatcatggagccctagatgttggggaaaacgttatgcctagcaaacaaaggagacaatgttctacttacttaagactaggagaattcaaaaatggaaactttgaaatgtcaggtgtaaatcaaaaaattccatttgatatacattgtatgaggatatatgtcaccaaaacacaaaaggaatggctaattattaggagtattagcatttggacttcttagccaattaaatcagtatgttcagtttctgaagcagttcttcctgcttcgtcttttgctacctttgtcttttggagggaaagcaatggatgggatatgttaaaagaaacattaattacattggcagttttcatttatacattgttgacataattttactcttaatacacacttgtatttattttaacgtctgaagttgaatatcagtctatagctaatgctactttcatttatatttttaaatgttcttagttttaaaatttcaactgattgtcgaaagggtaatatgaaagattttaaatgaaaaaaatttgttggatgatgatttttgaaaaatagtcaccaactgtatatacttcctcaagaactgataattcattatatcatcagatagcttttattaagcatctgtgggaatatacagttgggtggaatgataatctggtttattttttctgtaaacttaagtttccgttgacttctgtacatctacaatgaatacctcctcatagaagtggtgtctttacataattttttgtgtaggtgacactatggaaaaagaaaaaaaagacttaaaaatatctctcccctgattatttatatgaaaggggatattgttcattgtttaaaaacatttaattgagcacctattgttgataaattttctgggggaagcagtctttttcaagtttcccttttgaaaaaaaaaaagaagagttaagctcaatattttcaggttacattgagtacccacatttaatagaataaattagggaaggcctatagtagttagctcattcgtacagacattttcagtatatgcagaaaatttttggaaattgattttatacattttgtattaaaatccatgtgattgaaattattgtgatttatcatatacctttttggaatttaaatgggtatattataaaggagaaaagtaagaaccatagaaattagttgacttttctagaatcaaagatctatttcctagcaaggccagaatgagagatctgatattctgataaccagacaatgctctttttctcgtatgatttctcctgacagatttatgctttgtgttctatttgctacatgcctgtcagataataagttataccatctggaaataggtggtacaattcctgcataaataatattatcctaaataatgtcctaaatgatgcttttttggtataagcacccaaatagtaagcaaacttgactaaacttttcctaatagggattggagagtgtgtctttacaatgtgtccgttaaagtaattcaggacaccttagtgtgtcctaaagacattggttttcagaatgtcctgagcttgtctcttcctttttgttttttaatgaacagcaaaaactaagggatttattataaagggaaatggaaggtgcttcatatatgtttaagaaactcaagtacgtgttcatatagatgactctgtgtgtgtgtgtgtgtgtgtgtgtgtgtgtgtgtgtgtgtgtgtgtgtgtgtgaaggctagacttttgctggtaagacagaatgaggaaatcttcctgctcttccttttcatactgaaacacaatccttaagatttactggtatgctgtggtgcaaacaacactaggatatttttattttattcgttctctgcaaataaatgagaaactcagataaaaaatggaaactttttatttcatttataaacagctgttgtgtattttctttgtattcagctactaaagtgttagaagaaaaacgaacctttcataagaggctaaatattaatattttgtgaggcacctaaatcttacagtcataggaaaatatgaacactgccactaaattattatctttaccttgatttagaggatacttgccagacacctaaaaatgttctattttctttatttttcttatcttttattaaccggctagttgatagtattgtgtgtatatctcagaagttacaaatggcattattttcttcactgtcaatgataaaaggtacacaattgtatgccaaagacatgtaatatcaagagctaggcagactccctgaaatgagttgtaaccccttacatattcttctgggaatggctttctaaagatcagctattggtgtctatcaatgtcttaaaaatgtttcaagaaacattgctgagggtagcagtgaagttggatgtttgctaggaaattatgaaaacaaatgtgactcagagaggtcatttcacattttatctttatatcctctctttactaaacctgtgtttggataagttggtcaatcatccaaggatcctctatgttttctttacagttgacactgggtcaattttctaaggaaaacaccttgacaaataaagcatcttcattagaggtcaggaggaaaaataactattctctttcaaaagaaaatctgaacaatttttttagcatggcccaatgttctatttcctatatttagaaactttgaataagggtctagtaatcttgtctcagaggcatagaaacaaaagtacagttattaggtttaactatactcaaactatttgctatttttaaacatttttgctgtaagtttatatatatatacatatataatacatatatacatatatataatatatatatacatatatatataattttctttgttaaaaataacaattgaaaaagactggcatgagacatgaatggctgagtcatttaattgccatacaaataaaatgctgacaggtttcaagcaaaaaatacagtatgcaccttaaataatgcctcagaattgtataatttaagctcactaaaaaccttacttagtcttaaaattctccttaggggagccttttcagcagttatggacatcaaagaaaaaagtatcttgtaaaagcacaatgaaatttagaaaatacacattttagtggcaatcacaaatgtcaatataaaagatacataaaatatgttaatgcaagaactttttcatattcattgaaaactataactttgtgctatttataaagtagatattttccaggtatgaaaatataatttggaaaccaacctgtcgtttagatctatttctttcatatagctacactatgagttgtgaacattccatttcttactgggccagtattctctgggaatttttataatgctatcatagaaaaactgttctgtataataattatataaaaaatgaaacaaacattttcaaattgtaatatatgatgtggtatggaaagtacctacatttttagatgctcaaatattggcatatttcatgtcagtatttgccaatttgtcaacaagtttatggcaaagaacatgataccaggattaacattgaaaacactacatccagtgccatctaacaattgaaggaaacagtgtgtaattctcttctttttccttgacaatacatccatcaacacagtaatggcatcatattactgagtaatagagctcacacttaaactttataatatttattatgggatctactgataaaatgatttaccgttttgtacaaattcaactgattttggggggtttcttgtaagatttaatattaattttaggataattttatcctgtttcttttgattcatgatcccaaactttctagatcttgcttctgtcattccacgtcttattatgcctcctcagctttgtgtttcaacaaattttatatgcatgccttttgtcttcatgggagacaaaacagaaggttcatacagacttgattttgacacccagttctgcattaccagcctcccaatatgaggaaatttacttaaccttcttgaaactcagtttctacatctgtgaataggaataattttacctcatatgtttttaaaggtagcaattttaccttgtagctccttgtagagctggaattgagataacataaactaggcacacaataaatatttgtttcctttttatccatgtcacgtatatgtaacaggatatgaccctggaaaacattaccagaggccttcattgtaatcaataacaattataaaatttactgccctttaaaaatgttattcagcctaccttttcatattttgtccagagaatatcatgtggaattatacagacactttcctaaaatcaatatatattcctgtcattctaatttattactctagaaaccttatcaaaaatatcaaaattgcccctagtgctctcatcacaaataataatattcatttctgttttaagaaatcttgatccatttacattgaaaaacaaagaaacataaagtcatttcctagtttctaagatgttgtttagaatctaccttaagctcagaaatgcagtcttcagaatctttttactttttttttttaatgtcaggatccggttctctggcatcttttctatcattggcaaaagttatcaatgcactgacctataaattaccttggcactgatgtttgaaataggtatcttatctgctagtctactttgagtttcattgttgagttttccattactttgaatttctttgttcagattggggttattctttttaggaagaaaaaggccataacaaaattcaatgtgattagttattgccatttattttttgtttgcttttaaactttttttttatttatcccaaacagaggatatatcttttattactttttggcatgctttgaaatgatttcattattgcatatgtgcatgtgtgtatctacatatggttaatctctcaatctgtgtgtatgtatatatacatatgtgtatgtacatatgtgtatatatgtatacatacttgaatattatgtgaatatgtgtgtatatttgtgtatatatatacatatatacatgtatgtatttgtatatgtgttgtgtaagtgtgtctgtgtgtatgagagaaagacagaaggatatgcaccatttgcattattttttagcctttacacctccacttattcttggattttcctgacacactgtcctcctggttgtgttcctcttctgaacttgcttttgctttcatgttctcactcaaatcttttatacatgacatcctttgaaaatcacagcacattagagatctttgtgcatccttttagatactttaaatttattaaaagtgtactagaggaggccatctctctcaaaacagaatttttcttttagagtttcaggtttatggtttttatttgaattctttaacattaaaagatcaaaatatgagttgcatagcattctctttctaagctataaaaatattaagataacaaggttgcactttcccaaagttctagtcccttccacctcattaatctgttcatcacatttactccaagtccagggtagaatttgcttcaataatcccaatattttctgagatgtttaatatcctatttttaacattgaaattgaaatgtatgtttgagaccatttgccagataactggatctgaatatcttttctgaaaaacatggatttgagaccaaagcagtttttgatttgactgttgtttcagctttcatttcactctgtctagacggtctcttagaagatttaccaaaaagttaaattgattatgtgagaaagtgataggtaaattgtatatgaccatagaagtacaattaaattaagaatatagcatgatcaaattttcacattatattggattaaaaagtaccctaagtagccatctccttaaagtaggtgagccaaagacataataataaaatattcaatatttttctataaaatacaaatttccatgaggcacacatacattaaatttaatataaagagaatcattactttatttaagagttgtttaaaggtgcacaacaacagtgagttaccaatattcagaaccttagtctataatttcaatgtactgtaagttactacagctttaaccacaatagctggcataacctaaatcattctgcccaaatacaggtaattatagttttgatgtataaaaattaccaaaataaatgcatatataaagcaatagaggctgagagtgttcataattgaaagctaactattgcaaaaatattttaaatatttaatttatagtgcactcgaagttctggaagagacgtaggatttgtctcttccaccctttccctcactttaccgtttattatgaaggtaccaaaagtatggcacagagatatgtggcagttccacatatctcaatcaacaaagctctaactctattagaaactagacatttaaaaagtactttttttgtaacttcatctgagtcaggtttctcattgaataataatctgtcagttttgtctatagtatgttccaattggaaaatgtttaaggtagtacatgcctcttttctccataaaataccccacatttgtttaactatttgacatagtcctattttttccatctttaataattgataaaattttccctacttttaaacatatgtatgtattttctgccacacttaaactttgttattccacgttgtaacttacttcatcaatgagtgaaagtatagttccaaaaagttagaataattatctcagatcctttatcataattgtccaattatctcagatcctttatcataattgtccatcctttaatgtaatccggttttcaatacaagtaacacttgcattcttacaactgtgcatttttggtcactaaaggaccatgtgacgatatcagtagttgtcaggagttattcactacccttagaaaataaactcggtaatgtaaactatatcccacactttaacaattaatactgttgaatgacattgaaggattgtatctttttttaataaagaagcaatatattaaaaataattaaaactcctaaagtctttttttttgttttagaaatcagtctcaattttcaaaagggcatttgatatctgctaataaaatgaacaaatagtttttctttaaatgaaaatatctataagcttagctgtgtgtagaagtacataataaataagttgtccattttgaataaaaattaaaatcctattaatgcagttgtaacttctcttcttaacatttcttaagctctaaaacaaacataattagacacattttctgttgcatgtggcatctttacccaccataatttggtaatcagtcatatcaaaatcacttacaagaaccaactatttttggaaaaacatttagaaaatttgtcacaaattgtcaagaagattttcaagacatatatatgaattgtctgtaatgtaatggttggggatattttcattaaatccataaaccaatgtatgtatgctgccctctaactttctgctgagttactgtagtcaatggtaaatatagtcaaagtagaaaagacacattcaccctgaatattcccaacaacctatctctcattcaattctgactattgacaaagtactcctttcaattattgtggtaaggaggcctttctgagcatccagatgtgtaaaaataacaacaggggaaatgttacaaacatgaggtaaaaggatgcagaggaaaagttgtacttcatgattttgcctcaagcaagttcttctttcctgtcagcattgcaaattaccatagctcgacttgcttgtattcaagcaaatcaaaacttgactccctgagagggtcaaaagacaattttggtacgtatctagtgtttttacttactagaacaaacaggtcaagtttattcttaatgaagttaaaatttcaaattaaacctgaagctctagtgttttccattttactaagtggataaacacttttctgccatgggatgaactacaatgagatgtttgaattgatttgggcaattgatttgggcaatgatgagtcatgtgtttgctacaaaagtgatacaaaatataagtgtccttcaagttaaagcaatctaaaccgatcatctttgaaaagttaacaacatattttgtaatatttgtttcctagcaaatttttcagttgtccaaaccaaggtaatgtagataaagctacatattttcactcagcgtaccaccaaataactgggtgcccaatagtgttgatctgatgcactactaaaattagttaccataaaaattattttcttttataagaagaaagtgaaatttgtttaattattttgatatcttttatccttatgaatatatatatcaatgttaattttttatgaataattaaatttattataaatgcactaatttttcaacattcttctgattttcatcagtaaattgaataaccattgttgcaatgaaatttacatattgctctcataatatgaaattttacaaggtataatttcacttaacacaaacaatagtcctcataccactttttcattttaactttaatctcattatttatgtgattaagtttgcaattttagccactcatgtgttaggagcaatagagattgacattatgtaggtaggaaaatacatttttagtaacttaagaaacaagttgtacatactatatcaacatttcacattagtgaatttattatcttgctgtataaactttaataaaaacaattatttttatttaaattatttaaggttcctctatttgacttcaaagcaaaataatatctgaattgtacaagcactgtgaatttgtaatagtctaatcacagtctaatcactaaattcaattagtactttactaaatttcttacagtatgctcaggacaaataatttattgaaatgagtatactcaggatggagttattttcatgcaaacttaaaaattacaagacatgtttagaagaattatagctggataacactaaacattcacaagttttaagttagcataaggggatttataagtaatgtgcctacgttcataatcaatttaacagttttcactaacttgacccaataatttagggtgtatttccagaccacaagataaaactaaattttgtccatttttaccagatgattcaaaatttaccatttgattcatttcttaataaaactgcctgtcaatctactagactaaataagaatataaataattcaatattatttatataaacaaaatcaatggaaaatgacaattttatctaatttaatcaatgcctgtgacttagcaaagatattcagttcaatttaacaatctttatgaattaatatttccttaggaattatgtagctaaattatattaataatccatatttattgaagggtaaaggccacagagtgagactaaattatctaggtccagagaaaaggcatctagggcaataaggaaacgaaacaaatataacaaataacttctaatttacagatcacttaatgtaagctcagccaagaacaatgcttactacataaatatgttccaagcaactatgagacactgtgtgaagatttcatgtgcatttcactgtctatttaatagattaaacaaccatataaggtaagaggtattaaaaaagctaaagagcatatgaaaaatagggttttactaacttgtccaaggtcacataactaataaatgaaagagagagcattggatttcaggtttgtgtaattcaaaatctatgccccttatcactattatacattgcctcctaactataataataatttattgaaaacccatttgtctaagatgggattttctggatgatatgactatattaaaataacattaaatagttgaaaaatgaatttaaataattagtttcttcatgtaaaacatttttttctcattttttaaacttgaacatctaaaacacttgcttctgtaattccactgaaccacaacctaatttctgttattccaaaaagaaaataaaaactcatgggctctgggtacactaaaagactccaaaaattataactttgtattaatcatataatagtctttcataacaccagccccaaacataccaaactggtagttagacagtatgtatgcaacattttttgtgtgattaactatgtttctaaatttcagctattatttcggatgttggaaaacatcagtaaaccccaaagttgtgtttattggcctatagcttacatgaactgagtgtttaatatgtatttggtactctcctaatcggtacttccattacctatgaaagtaatgattataacaagtcatcatgcaaaagaatcatcttttcaatatattgaaaatgtgtgtttcagactactgaattcttccctgtaaatctaggatagatctaggaattggcactttcaatgtattttagttaacactgatgcagattgtccattcactccttttagaaacactacattacatccttacaagtctatgaagtattaaaacagaaatgactattattattgctacttcagtgatgaagaatctcaaagtttgagttaagtgatgtatcaaaactctgaccttgttagtgaaatattaagcccagttcatctcaacattattaacctctgctcacacttgtctaaattactagtttttaagtctggctgttcattaacatctctggggaagaatttcacccattcctgagctccatgctcagagttatcataattgttctggagtttccaggcatcagcatacttttaaaattcttcctaagtgatcctaatgtgcagacagatttgacaaccacggagcaactaagactgtaccacagtaaaattccaaaacttcccatttatccagtttgaaagattatagattagaaaacatgatgacaagcgtagattattctgtgttgtttcctgccctttttaggtatttcaatactattattgttgtactgaaaaataaaagttccagtcaatttttatggttttgctgggtttatagagaacactctgcatgccttcctattgaatctgggactctcgtttttggagaactacgtaagtgatctgttttcctgagtcttgacatatgcaccttattaattagagactataaatccactttttaacacataaaatctaatgatgacatctttgtagatattgaaattcaagaatataaacagcattgccttcaacccactgctgtttgtaaactgagctgccttcctctttccacaaaattaactaaacatattcaagaaagaaggagaaaaactatcagttttccacagtggactttttttcataaatccttcaaatgtcagcatgtatgccttgtctcatttagtcatagcccatatgatccaaatctccaatttatttgtttttctttttccaagaactgggtactttaaaaatttgtcaaatttttaaatttcagatagctgaaacagaacaagtcatattgacttgctctaagtgtttaaaaggtttgaggttattgatataggcctcaatatatttccacaaatgaaataatgtatttacatagagatctaaaaagtgtacgaaacttgagatagctatttgagtcaagaaaaacaaggactgtgaatagtgtaaattatgtaaatatacacagataattcacacacacatattcacacatagttccaaggattcccctatatcaattccaactcaaaatttctcagtcatttctggctaaagagaaacatgtccatttaattaaaatcacttttaaaaaatctgatcatctattctttatgagatcaatgaatacattattttaatgctctgtcttatttaaaatatttttctacatagtgttgctagctaaaatgaggcttttttaaataaatggatacacctcaaaataataatttgagatcagtttcatcttggacttatatgattttcagattttatctgcataaaattagattttctggaaaactaatttgtattacttattttctctgtataaaccttgctgaaaatgaaaactaataagcttgaatttatgggttttatgtattttaaaacgtaatgtatagagatttcttataattatttgacagcttcaagataaccagttttttctttaaacattccactgattaatacaaaaagtaacatttttttcatgagatgaaatgaaacttgttcttaggcaaacatcacttaattaaagcaatttatagtgaatacactcaattaactgattatgaacctgcaacaccaaaagatttaccagatttgttcacaattttactgctagctgatatcaaataagaaaaagacaaatcaatgttatatcttcaggaactaataacttttttcatcctgcaagtttgtgaattcaaaaaaactattttcaaataactaagaatttttttattattatactttaagttttagggtacatgtgcacaacttgcaggtttgttacatatgtatacctgtgccatgttggtgtgctgcacccattaactcgtcatttaacattaggtatatctcctaatgctatccctcccccctcccctgaccccacaacaggcccagtgtgtgatgttccccttcctgtgtctatgtgttctcaatgttcagttcccacctatgagaacatgcagtgtttggtttttttgtcgttgcaatagtttgctgagaatgatggtttccagcttcatccatgtccctacaaaggacatgaactcatcattttttatggctgcatagtattccatggtgtatatgtgccacattttcttaatccagtctatcattgttggacatttggattggttccaagtctttgctattgtgaatagtgccgcaataaacatacgtgtgcatgtgtctttatagaagcatgatttataatcctttgggtatatacccagtaatgggatggctgggtcaaatggtatttctaaaagaactaagaatttttaaaaagattttggttatgtaattagagtgcacaatagaataaaacagccaggttttatattttcactggcaaatgataaagagacaactttgattaaatactcataatttttataaaacctccaaagtttcaaagtaggtagatgatgggtaataattaaatagagtgacagtgttatatgccaggttaaaaaaaaaagagacatgcggcttcatccacaagcttagcaaaatatgagaaagtaagaaactgtggccaaatcagataaacataaatgagaataagttgtagaaactgaccttcaagttaataattaaatcagatggtatcattttcctccatctggttattattgtttagatttttaatagtacaaaaataaatgttttatgaattattttggatgcaattacagtaaataaccataatataaaatgtctcataataggaaaataatgcctgacacttttaattacttaacatacctttttatacattttttaatgtcatttatttggcagctatttaaggagtgccctctgtatcctgggccatctctttctatccagagtcctacaagtcaccttgtatcattattaggatatagtataaaaatttgtccacttttaaatggagaaataatacagataagtaaaaaaatgatgtaataatttgagttctgtacatgactcagagacttggacagaattgacaattctaagtttttaagttaaaccaaagctgaaatttctaatcatttagaagctaggaaaagttctgtttcaaattcaattgatcacttcatgaacagtttgttcataattacttcttctctgcctttcagcgtagtcttgttcaattgttcagagtgtccttttttttttttttttttttttttgagacagagtctcactcttttgcccaggccggactgcagtggcactatctccgctcactgcaagttccacctcctggggtcacgccattctcctgcctcagcctcccgagtagctgggagtacaggcgcccgccaccacgcccggctaattttttgtatttttagtagagacggggtttcaccttgttagccaggatgctctcgatctcctgacctcgtgatcctcccgcctcggcctcacaaagtgctgggattacatgcgtgagccaccgcgccgggcccagagtgtccttattcccaagttcgtgattttcataatagtaagagaacaaaaaacaaatcttacaagcaataaattttataaatagtcttctcttaagatgcagaacaccaacatggcacatgtatacatatgtaacaaacctgcacgttatgcacatgtaccctaaaacttaaagtataataaaaataaacaaataaataaatattcaacacctcactctaattggaaaggaaatgtgcctacagaagttaaagcacattctatgagttttaatcttaggtgccaagaaggatccatgacctccacatttgacagagaatagaaagactccacggttttcatcataatccaagggaggtcagtaatagtttatttgcatttctcgagggctctctggggcctcactatcttacataaaagtgagtttaatcataggactttcagacattagcccacagatgggacatatattttgggatggagaacttttaataaatcacattacctaggtggcctctcattctacttctccatatggcagactctgtaggaaaaaaaaatgcttcctataatgtttcttctttaccacagaactgtcagaggaaacagccgagaaaaacttaaaactaagctacaatatttggcaaaaataatggtagttttcagaggagaagcaatttttctggcgtatatgtaggataagagtatcttaccttccttaaataatgttatctttaccagtaaacatgatgtatttgccttaacctagtcaatttcctttacctgaattcccttaagtttaaaatcataatttttcaagataaggttctagtcttaggaatgttgcttaagaacctgaaatagaatgatactattatttcatcctggtattaaaatctctaaaattttctacaaaactaacattctatgtgttctgtggccaatgtgataataaatccttgcataacaacagagaaaaatatcctatacatttgtcttacatttttgcaaaataaagaaaatattttggaattaaactaatttcaaaatccaagaatttctatgaaagaattttttagcagtaaccacagatgaaaagaatatcatttagtatctcttcatagtgtctttataacataatctaatcattggtgttttataatctttcataatttttcatatatttgataaatcctgatgttgggtttatttctgttgaaacaccagtaattgttttatgtcactttgacttttttctatagttttgttttctgcttgtttatctaaattatcatcatagttgtaatctgagaactaggcaaacataggtacttttgactatcactttggggtgatactatttacccaatatgattttttcccattttactcttgaagtatcctgttgcttactcttttgtgtatgcatacatttgaaacatatgacctcccaagcattctactttctcttattttacttattgtgttggctttactgtttatgtatgatttaacataaataattattttgttttctctctcccatcacccaccccatttacacgttacaacaagacttcatcagccctggggtcatgatttgaattatattatctgtgccattaaacaaccttgagcctcaataatatctgttcagattttttcaatggctattgttcattgataattacattctggggacatgccagaatgaaatctcatggtttctcagccacaaagatttgttaagaatcaaattcaaaggtatttgacttggtatttatgattcatggcaaacccaagcataatctttagcagatctttaagcttcctgagcttataagcaaactctgtgtgtgtctgtgtgtatgtgtgtgtgttcctatgtgggtaaatttttcttgatagcatctctgtgctttcatcattatcaaaaagtttcaggaccccaaaatggttaagaaacactgactatgtgctagttacatttcaagaatatatttctacataaaaatgttgtatttattctaaaggcaaaagccatggaacaatgtgtacttttaaaatatttatgaggaattaaaaattcaattattataatttttccattttaaaattttaggatgtgattttgtaatagcctccaaaaaacatttaaagcacccaagtaattaaactagtaaaagttccttataaaccagaaagcaaaactattttccaaatgggcaataaaaatattacttttgcatgtaaatagttgtttaagtgaatttattgtttatattaattaaattcttttggacaatttgccacttaaaaagatcagtgtttgaactctaggaaatacttgtttatgtaattttttttgcaagtaggtaagaaaagtatatttcattatcaaatagctaccctgcaatactaacataaacagctatttacccatttagacttaactattcagtcaattacacaacagtcttaccatgttatttaatgagtggaacaaaaataaaggtctttataacagataaaatatttcatttatataatgaaataaaatatcttgggattaataaaaataatgatttttttcatcctatgtaaaatgtagttgatagcactgatatattaataatgttatgggtgaagtttacagttcattacaagttgaatgtacttaaacaatctacatccttcactccttcattcaatcatttaattcagccattccttatttgacaaatgtgatttgtcaaatcacattactaaatgtattatacatttagtaataaccatacatatcatgttgaattgttgtgaggataaaaaagtaaacaatgttcaattattgttaatattttattttataattaattataaaattttatataattatataattatataattaattatataattttacttcattggatgttgtaaattgctctggtttagcctttagacatttgaatcaaaatggtcaaattagtctctaaattcagacattgactttgttctgcagatctcaaaacgaaagatatgttgggatatttagaccagaatgcatgtgaaaatactacatgaatgaatgtatttgacactgatcttgagatgacaatctacagtcctacaataattattctaactccatgttctctttcgtgcacactagctagagcacatctcacccactgacattggaatctatcctttcgtaagttatttttaacgtcttaggatgacttttataaattgaagatttaagagtttctaaggggactgtaggtatattctactgttgtgtttaccacatgttccattcagatacacaaaagaaatgaataaaactggacatagcacacagtctcactgctttgatgggcaatgatttttgacaatgggtaattaactcttacatcattaagttccatcgtcacagaataaccttagaatcctaataaaatcccacggcttcaaattgtatttaatagctgccaatccaagcctcctgactatgctaatctattatttagaataaatgaaaagtgtgtatcaatttgcctattataatacaaagtgggaactctcatgccaacaaggttaggccagaaaaattcaaataaattggagatgtgttttgatacattttcttccgttgctcttattgtatctgacatggaaatttccttagggtgaagtttatatagtgacaagcatatacaatattcttgaggtattaggccacagtcagaaaaagagaatataggaggaattatgtggtagaggatgataaaagattagaagttgaaactataccatatataattttatatatatacataattatcttgattataacctaaattgtaaaatctcaatattattagtaccatccccagacacattccctttgtttcttaaatttttactctccaaaaatgggaatcacagaaacagaagatgcttaaatgttcatgttaggcatttttttctgagctcataaaagattatttgatcatttaatgtgtttttctctccaataagactgtaaaaagttcagtgtttcgaggctgctaaacaatgcccatagagttgacagtctcaagaatgactggaaaatgatggagttggatgctataggtcatactttataaatctgactgaaggagaattagaatactaatgagagtcaacaacaattttcttacctgctcccaatttgtaattcttgccctggtggcacatatattacaaggagaatattgttttcaaatttatagtcagaaagtcatttaggtgactgactttgttttttaaatagtaagttgactgtcttgtttaaaaatgcatagtgccctggaaagttatgtgaatacaatgatttattttaagtaaagggtagttttataaaataaagtgccaaacatcatataaataaatatttacaggctcagtatcaatcaaatcagtggtaagagtgaattttttcaatgtatgactttcatatcaaatttttttttggtgattcagcttaataggagtttatggtatgggcccattcacgttatatccaaataaacaaaaattatctagagttgttcatgccatcatttccttcagcacagtcttcaaagtagttttctcattacccactttgaaagatatttccaaggagaggataatgcaacccattctatatgtgaataatgggtgggacacaggccaataatcatgatccaaattagtctgaaaatcaaaggagtaaggggagaaaaaaagaatgaaggattaattgatttgctgagagcatgtcacatgctaattgttgttttacatttttcatctatgtctctcatgtgattcagaccacaaatctgtgtgataagtattgttatccttattctaccaatgacgacacagtagtgaagtcataattcagacttgaaattctgtcttctctcaattttcatcccaaaattagatatcctcgatgccagttcggattctcttattcaatgagaaaatcacttccttttcggcccttgtcatctttgtctgtataacaaggggataagacaaagacgtttgatgaaaatttcttcaagttgtatcatgtttttattcttagtgggtagtcctttgtaagtctgcatacggctggctggtgacacaatgtgggcaccatagaccgaaaaataaaattactgaaaaggcgaagtatactttccaaaaattagactctaatcaatgtagtccgtgcaacaattttctttaataccgaattgcattttatatagctatttgcacagatcttcacaataaaaccataagaaaaggagaataggatattatcttcacagttctacagaggagtaaaaaaactgaccttgatctaaataagtttagaggtggattttaatcctttaataagcaaaagacatataataaaattgataaatgacaatatcaatactttatctaaaagtaatttcataaagaaacaaagccaaaattgattcagttaacataaaaaagagttaacccagaagaaaacaatgaatattgatctcgatttcagcaagcagaaaataaaaaaaaaaaaaaagcagaaaaaagtgagaaattgttaaggtgagtgaaagatgagcggcggttgctctgagaaactacaacacaacttatttattcaagtggctgggtcagatttaaagatgtgatttcaataacttttttgaatagagtgttgtacctttgtctaaagtagtaaaattcatttgaattaaagctgaatatgggttttcctcctcaaatccaattcaattccaaggtttgaaattgcaggggctcctgagaagaaatggcaaaaataaaaaagagaaagagagagaaaggggaagagaaaaggaaaaaagaaaaatctataacttgaagccctgtaaagcaaagatttaccaaactttagattttataccccctcttttttcagcatatccaaataaatttacatgatcttatgagtgtaaatcttctagtcttcatgagatttttccagcttttctgccttttagattgacatttctagttgcttaaggtttcttcttcaaagcaatgggtataaaacatgtgattattattaaacagttatggaaaataccatctttattccaccactttatcaggtagaacttgaaggtaaaataaagtttggatgctgagtctacatgtattgtattgtattgtattgtattgtattgtattgtattgtattgtattgtattgtattgtatagtggttaccagagatttaataacatagcagaagtaactgaatcgcctcctctgccctatgcacttgtattttttttatttcaaaaatgccaggaagataagtgtatgcaaaaatataaagtttgtaaaattttatacaacttaatctatttgatcattagttaagtaagcttaactaaattaaaaatgtattttattgctactttttttaactctctaaagaatacatttatgtttttgaaggagctttaatttagtaacagttaatctttttattaattttagtaaaaataatcatacccttttaataataaaaattaaactttaagtctttaaaattgctagttgtaagtgaatttgtcaaagattaattcatagttgccaacacttactgaacaggtagataaaattaactttgtttatttaacaaataacttggtgctttctagttagtttaaaaatatcaataattgtttcctcacatgtatttatgtccttccttcacagcatatagtcaaccatagagactcaatgtaaagtattatgataatttatatgtctgagaaaataagaagattgattcattgaaaagttaaatgaatttgagatacaggtatttctgactgcctagttacactgtatgaaatactttaaaaactggccaggcgtggtggctcatgcctgtaatcccggtactttgagaggccaagaactcctgaaatcaggagctcaagaccagcctgaccaacaaggtgaaactccatctctactaaaaatacaaaacattatctgagtgtggtagagcacgcctgtggtcctagctactcaggcggccgaggcaggataatcacttgaatctgggagtcggaggttttggtaagcagagattatgccactgcactccagcctggacaacagagcaagactctgtctcaaaacaaaaacaagcaaacaaacacacacacacacacacacacacacacacaaaaacacttagaaaaactgtaaacaattcagtcttgtatttggaagaatggtgacttgtaaattttgctgtacattaatgacaagtctctcactcaaataaagataacctaagtaaaataatttatgtcagatgaaaacattccaaattttcttggagaaaaagcaacaaaagccaataaataaaggtggttcccattacctatttaattatttaatatcttaaactattattaaatgcatgcaccacctgcactaccctgaccgattaaccccttagctgaaggagttcagtttgtatttttaccatatgatctgtctagattcactcttttcaggattgatagattttttttttcttttttcttttttttttttttttgctttcttattcaactctacagtaaaagaaaatctgtggttttatttgacataacagagctatcttcagccatagctagaaggaggatagtaggataaaggtcaatttttgtcttccttcacagctaacagatatatgtagcatgcttaataataactctcaaagtctgttgctcaacctcccaaaccattaatttccttctagccactgctagagttcatgcatgtcatgaaaggaaggctagagggacaatttctgtatgcatatctctggcccatgcccttcaatgagacccaaatataattaatttctgggatttttgcaataaataatatgagatgacctcattatagaatgaggggcaagatccttggccttggtctttcacaaataatatgactttatttacagatgaagaaaataaaataaaaattaaacataaactttcctcaacttcctgcttttagcccaggtagcatgttattactatttcttttataaacaactgagttctgactaacagtctttaagaggagctgctatgaggaaatatagataataacaaaataataacatatttttaaagctttgccagcagcaaagggctcgcatctacatactctcattttatgtgtccaaccaatggttccacatagccatgaaatcagctgttacaataggaagaccaccactgaacagttttgtaactcatttcagaattgactttggtatgtgcttattggtgtatttctgtgcttgtgtcaattcaacaaagcttcccaagcaaggttacttcaaacattacttgggccacggtaaaagaaaaataaaattctgttgattcagagtcaccttcaatctcatgtcataaattatgtttctctagtctttgatattgtttcacatgtgcatgattagattggttgaggatagactttgggctcatgatttattgactaattatgtggttttcccactgtagcttgggttaaatcttacaagacaggctgaaaactgaaattgttatgacatttttgttttctctacaccataccaagtaatgctgtttgattgaatcaaatattttctaaagactaaatgtaatccaaaaaatgatctgtaaatgttcccaacaggtgtcccaaaaccatattttagtaagtttttcaattggtccaacagttctataaattttaccttgaggtaactaaaatggaaacataatgaatatattatctctattgtctaaggacaaacaaaacaccgaagttattgagaatcagattcccatgttagcataaatgagtcacctagttttttcaacaaaaccaagtaataaataaatcaacactttcagttttctgccagtgtcacagatggcagccaattggtttgattaaaaatctgatgcttgcatgtttgcatagtaaaagacagggttttcaggaaaaaatcattatacttctcactgtgttccacacaatgttgaaggttatgtccaaatttgaaaaacaaatccaattaaactagctaccatacaaatatatcttttgttattgaaagagtgatttcagtcgtgatttttcattaatctagttttgtaaaaatcagacttcctgtaaaccaattgaaaacctctacattttactatatgtattcatggacttaatttcatcaaaaataccaatattctctgtgccctaacaagtgtaattgcactaaccttgtagttgatatttactgattgaaatgtatatacacaaaaattatgtaaaactgattatctagaggtttcttcattagctagcacaaatagttattgtaaacctttgtcctgtatttttttaaagtctgcaacatggtgaaccagtatgcttgatggctttaatacctgtgtctgcaatttattattcatttgaagcaacaaattcagaattgtttgaaattatgaaggctaaacagcataaatacattgtggtttcttttataaat

SEQ ID NO: 12563 - DNA, 3194 bp, Homo sapiens
  source 1..3194: mol_type = unassigned DNA
agctgaacgaattgttttctctgtctctgggtatcaacggtttctgtacagcacagattatgacagcgtctttcttaagattctgtggacctgactgacactagaaaagccgcagtagcatgtgacatggaagtttatattatcagggtgtgctcacctggttgcaaatttgagaccaaagttttactttaacacttggagctggtaaaggatgttttattcattgtgtttctgacagatggaacaagttaaggttaccttctcaatatgaggactaaagcttttagccaatatttgtggagaagacacatttaagattttcttttgcccatacatgcaatgttatggaggctgtgaccacattttaggcaagaaactgaaagaacatcaagcacctatctggatgtctccaaagcctcatctggataaaatatccaatctatttttcaatcagcctttttttttcctttttcaacctcagacaattgcttttggggtcctagagtcccttgaaagttatgatggaaataggagacctaaagttcaggtgactgaagggctgaagcaggaaggaaaaacgtctgggaggacaggtagacagaggaaagaggtctgaagaggcacatatcaaaagattcaagaaagctgaagggaagattgaaggtagtaaaaggatgaaggaggagcagaagcaatgggaaggaagagatctcagaggactcacttcgggaaaatcttcagtttcccaaagagatcctgaagtctcaaattatccttaacaaaaccatgaccacaagaaaggaagtggagtatacgatcagtgagagtttaagaagggggtttccgttgactaaaaagttaccgtgggagaaataggatcaaatagaacagagttgcctcacaaagaaccaaggaaaatatttcagctcagggattcaagaagtaaattcccactcaaagacagaaacaggaagtaagatttacaattcagccagtaccttcctaacagagaagcatgtgactataccaacttcttacaaaaagaaacaggactaactcagcctctgtatagtgtactcaggctctctcagccctcactgtgcttcaacagacttatcatttggagcactggctcaggagtcgaaatcaccaatggctcatccatcaatcaaccagaagtgaagacgaaagcttcaaagaagagaatgtttaaatttcatcaaatgaaacatatttttgaaatacttgataaaatgagatgcctgagaaaacgttctacagtgtcattcttgggagttcttgtcatttttctcctttttatgaacttgtacattgaagatagctatgttctggaaggagacaaacaacttataagggaaacatccacacatcaactgaattcagaacgctatgttcatactttcaaggatttatctaatttctcaggagccataaatgtcacctatcgctacctagctgccacacctttacaaagaaagcggtatcttacaattggactttcttcagtaaagcgaaaaaaaggaaactatttacttgagacaattaagtcaatttttgagcaatccagctatgaagagctgaaggaaatttcagtggtggttcacctagcagactttaattcttcctggcgtgatgccatggtccaggatattacacagaaatttgcgcaccatattattgcaggaagattaatggttatacatgctccagaggagtattacccaatcctagatggccttaaaagaaattacaatgatccagaagatagagtcaaatttcgttccaagcaaaatgtagattatgcttttctgcttaatttttgtgccaatacttcagactattatgtaatgcttgaagatgatgttcgatgttcaaaaaatttcttaactgccatcaagaaagtcattgcatccctagaaggaacttactgggtaactcttgaattctctaagcttggctacattggtaaactctatcattctcatgatctcccacgtttggcccattttttattaatgttttatcaagaaatgccttgtgattggctattgactcatttccgtggtctgttggctcagaaaaatgtgatccgttttaaaccatctctctttcagcacatgggctattattcatcatacaaagggacggagaataagctgaaggatgatgattttgaagaggagtcatttgacattcctgataacccccctgcaagtctgtacaccaacatgaatgtgtttgaaaattatgaagcaagcaaggcttacagtagtgttgatgagtacttttgggggaaaccaccttcaacaggagatgtttttgtgattgtatttgaaaatccaattataataaaaaaaattaaagtaaatactggaacagaagatcggcaaaatgatattttgcatcatggagccctagatgttggggaaaacgttatgcctagcaaacaaaggagacaatgttctacttacttaagactaggagaattcaaaaatggaaactttgaaatgtcaggtgtaaatcaaaaaattccatttgatatacattgtatgaggatatatgtcaccaaaacacaaaaggaatggctaattattaggagtattagcatttggacttcttagccaattaaatcagtatgttcagtttctgaagcagttcttcctgcttcgtcttttgctacctttgtcttttggagggaaagcaatggatgggatatgttaaaagaaacattaattacattggcagttttcatttatacattgttgacataattttactcttaatacacacttgtatttattttaacgtctgaagttgaatatcagtctatagctaatgctactttcatttatatttttaaatgttcttagttttaaaatttcaactgattgtcgaaagggtaatatgaaagattttaaatgaaaaaaatttgttggatgatgatttttgaaaaatagtcaccaactgtatatacttcctcaagaactgataattcattatatcatcagatagcttttattaagcatctgtgggaatatacagttgggtggaatgataatctggtttattttttctgtaaacttaagtttccgttgacttctgtacatctacaatgaatacctcctcatagaagtggtgtctttacataattttttgtgtaggtgacactatgg

SEQ ID NO: 12564 - DNA, 2582 bp, Homo sapiens
  source 1..2582: mol_type = unassigned DNA
cacaggaacaccagattgccatccctggggaacagaatgcaacccgggatctagagagctgtcacattccaagaaatatttaaattgtgctgattttcttctggagaactgagcccagggaatgaaactctccatcaagtcatggctttgcgggcaatagatcagaggatattgccagttttctaatggattattgttatcgggcaggttttctctgaagcttctcagctgctgttacattctacttggatgggaactggagatcagccagatcacttgtatgcacaaagctgctgtggatctgtctttcaaacaagagctgcagaaaacgctatagcaaggttgaagctttatccactctgactcacccagaaagcacagccctgattctgcgtgagaaaggctatctctacagaaactaaaacggtatcaacggtttctgtacagcacagattatgacagcgtctttcttaagcagatggaatcttggaacgtctcatgcttgggaaggacatggtcagatttgttgtaagaaagactgtgcagaggagtgtggcaaagggatccagaagatgcaaggtattatttagaaaagaagagaatgtttaaatttcatcaaatgaaacatatttttgaaatacttgataaaatgagatgcctgagaaaacgttctacagtgtcattcttgggagttcttgtcatttttctcctttttatgaacttgtacattgaagatagctatgttctggaaggagacaaacaacttataagggaaacatccacacatcaactgaattcagaacgctatgttcatactttcaaggatttatctaatttctcaggagccataaatgtcacctatcgctacctagctgccacacctttacaaagaaagcggtatcttacaattggactttcttcagtaaagcgaaaaaaaggaaactatttacttgagacaattaagtcaatttttgagcaatccagctatgaagagctgaaggaaatttcagtggtggttcacctagcagactttaattcttcctggcgtgatgccatggtccaggatattacacagaaatttgcgcaccatattattgcaggaagattaatggttatacatgctccagaggagtattacccaatcctagatggccttaaaagaaattacaatgatccagaagatagagtcaaatttcgttccaagcaaaatgtagattatgcttttctgcttaatttttgtgccaatacttcagactattatgtaatgcttgaagatgatgttcgatgttcaaaaaatttcttaactgccatcaagaaagtcattgcatccctagaaggaacttactgggtaactcttgaattctctaagcttggctacattggtaaactctatcattctcatgatctcccacgtttggcccattttttattaatgttttatcaagaaatgccttgtgattggctattgactcatttccgtggtctgttggctcagaaaaatgtgatccgttttaaaccatctctctttcagcacatgggctattattcatcatacaaagggacggagaataagctgaaggatgatgattttgaagaggagtcatttgacattcctgataacccccctgcaagtctgtacaccaacatgaatgtgtttgaaaattatgaagcaagcaaggcttacagtagtgttgatgagtacttttgggggaaaccaccttcaacaggagatgtttttgtgattgtatttgaaaatccaattataataaaaaaaattaaagtaaatactggaacagaagatcggcaaaatgatattttgcatcatggagccctagatgttggggaaaacgttatgcctagcaaacaaaggagacaatgttctacttacttaagactaggagaattcaaaaatggaaactttgaaatgtcaggtgtaaatcaaaaaattccatttgatatacattgtatgaggatatatgtcaccaaaacacaaaaggaatggctaattattaggagtattagcatttggacttcttagccaattaaatcagtatgttcagtttctgaagcagttcttcctgcttcgtcttttgctacctttgtcttttggagggaaagcaatggatgggatatgttaaaagaaacattaattacattggcagttttcatttatacattgttgacataattttactcttaatacacacttgtatttattttaacgtctgaagttgaatatcagtctatagctaatgctactttcatttatatttttaaatgttcttagttttaaaatttcaactgattgtcgaaagggtaatatgaaagattttaaatgaaaaaaatttgttggatgatgatttttgaaaaatagtcaccaactgtatatacttcctcaagaactgataattcattatatcatcagatagcttttattaagcatctgtgggaatatacagttgggtggaatgataatctggtttattttttctgtaaacttaagtttccgttgacttctgtacatctacaatgaatacctcctcatagaagtggtgtctttacataattttttgtgtaggtga

SEQ ID NO: 12565 - DNA, 1937 bp, Homo sapiens
  source 1..1937: mol_type = unassigned DNA
actcatgcttccaggctgcacagagcactgttggatctagctgaacgaattgttttctctgtctctgggtatcaacggtttctgtacagcacagattatgacagcgtctttcttaagatggaatcttggaacgtctcatgcttgggaaggacatggtcagatttgttgtaagaaagactgtgcagaggagtgtggcaaagggatccagaagatgcaagaagagaatgtttaaatttcatcaaatgaaacatatttttgaaatacttgataaaatgagatgcctgagaaaacgttctacagtgtcattcttgggagttcttgtcatttttctcctttttatgaacttgtacattgaagatagctatgttctggaaggagacaaacaacttataagggaaacatccacacatcaactgaattcagaacgctatgttcatactttcaaggatttatctaatttctcaggagccataaatgtcacctatcgctacctagctgccacacctttacaaagaaagcggtatcttacaattggactttcttcagtaaagcgaaaaaaaggaaactatttacttgagacaattaagtcaatttttgagcaatccagctatgaagagctgaaggaaatttcagtggtggttcacctagcagactttaattcttcctggcgtgatgccatggtccaggatattacacagaaatttgcgcaccatattattgcaggaagattaatggttatacatgctccagaggagtattacccaatcctagatggccttaaaagaaattacaatgatccagaagatagagtcaaatttcgttccaagcaaaatgtagattatgcttttctgcttaatttttgtgccaatacttcagactattatgtaatgcttgaagatgatgttcgatgttcaaaaaatttcttaactgccatcaagaaagtcattgcatccctagaaggaacttactgggtaactcttgaattctctaagcttggctacattggtaaactctatcattctcatgatctcccacgtttggcccattttttattaatgttttatcaagaaatgccttgtgattggctattgactcatttccgtggtctgttggctcagaaaaatgtgatccgttttaaaccatctctctttcagcacatgggctattattcatcatacaaagggacggagaataagctgaaggatgatgattttgaagaggagtcatttgacattcctgataacccccctgcaagtctgtacaccaacatgaatgtgtttgaaaattatgaagcaagcaaggcttacagtagtgttgatgagtacttttgggggaaaccaccttcaacaggagatgtttttgtgattgtatttgaaaatccaattataataaaaaaaattaaagtaaatactggaacagaagatcggcaaaatgatattttgcatcatggagccctagatgttggggaaaacgttatgcctagcaaacaaaggagacaatgttctacttacttaagactaggagaattcaaaaatggaaactttgaaatgtcaggtgtaaatcaaaaaattccatttgatatacattgtatgaggatatatgtcaccaaaacacaaaaggaatggctaattattaggagtattagcatttggacttcttagccaattaaatcagtatgttcagtttctgaagcagttcttcctgcttcgtcttttgctacctttgtcttttggagggaaagcaatggatgggatatgttaaaagaaacattaattacattggcagttttcatttatacattgttgacataattttactcttaatacacacttgtatttattttaacgtctgaagttgaatatcagtctatagctaatgctactttcatttatatttttaaatgttcttagttttaaaatttcaactgattgtcgaaa

SEQ ID NO: 12566 - DNA, 1423 bp, Homo sapiens
  source 1..1423: mol_type = unassigned DNA
gcccaaggatcactcatgcttccaggctgcacagagcactgttggatctagctgaacgaattgttttctctgtctctgggtatcaacggtttctgtacagcacagattatgacagcgtctttcttaagagacaagttctcactacgttgcccaggctggtgtcaagctccgggcctcaagcgatcctcccacctcagcctcccaaagcgctgaaattacagacgaagagaatgtttaaatttcatcaaatgaaacatatttttgaaatacttgataaaatgagatgcctgagaaaacgttctacagtgtcattcttgggagttcttgtcatttttctcctttttatgaacttgtacattgaagatagctatgttctggaaggagacaaacaacttataagggaaacatccacacatcaactgaattcagaacgctatgttcatactttcaaggatttatctaatttctcaggagccataaatgtcacctatcgctacctagctgccacacctttacaaagaaagcggtatcttacaattggactttcttcagtaaagcgaaaaaaaggaaactatttacttgagacaattaagtcaatttttgagcaatccagctatgaagagctgaaggaaatttcagtggtggttcacctagcagactttaattcttcctggcgtgatgccatggtccaggatattacacagaaatttgcgcaccatattattgcaggaagattaatggttatacatgctccagaggagtattacccaatcctagatggccttaaaagaaattacaatgatccagaagatagagtcaaatttcgttccaagcaaaatgtagattatgcttttctgcttaatttttgtgccaatacttcagactattatgtaatgcttgaagatgatgttcgatgttcaaaaaatttcttaactgccatcaagaaagtcattgcatccctagaaggaacttactgggtaactcttgaattctctaagcttggctacattggtaaactctatcattctcatgatctcccacgtttggcccattttttattaatgttttatcaagaaatgccttgtgattggctattgactcatttccgtggtctgttggctcagaaaaatgtgatccgttttaaaccatctctctttcagcacatgggctattattcatcatacaaagggacggagaataagctgaaggatgatgattttgaagaggagtcatttgacattcctgataacccccctgcaagtctgtacaccaacatgaatgtgtttgaaaattatgaagcaagcaaggcttacagtagtgttgatgagtacttttgggggaaaccaccttcaacaggagatgtttttgtgattgtatttgaaaatccaattataataaaaaaaattaaagtaaatactggaac

SEQ ID NO: 12567 - DNA, 550 bp, Homo sapiens
  source 1..550: mol_type = unassigned DNA
agtgccattatgatggatgtttacatctcttcattgagagccaattatctcgcttttgtgtgaggcccaaggatcactcatgcttccaggctgcacagagcactgttggatctagctgaacgaattgttttctctgtctctgggtatcaacggtttctgtacagcacagattatgacagcgtctttcttaagagaatgtttaaatttcatcaaatgaaacatatttttgaaatacttgataaaatgagatgcctgagaaaacgttctacagtgtcattcttgggagttcttgtcatttttctcctttttatgaacttgtacattgaagatagctatgttctggaaggagacaaacaacttataagggaaacatccacacatcaactgaattcagaacgctatgttcatactttcaaggatttatctaatttctcaggagccataaatgtcacctatcgctacctagctgccacacctttacaaagaaagccacatgggctattattcatcatacaaagggacggagaataagctgaaggatgatgatttt

SEQ ID NO: 12568 - DNA, 588 bp, Homo sapiens
  source 1..588: mol_type = unassigned DNA
aaattctcactcccggttgtggtctccatccggaaatggccgtctcgccgccaggcctgaaggtcaggacctgccagctgtaaaatgggataatgttcaccccaccaccctgctgtgagctcagatatgtgatactttagactgtaaagcactataacaatgaactggagatcagccagatcacttgtatgcacaaagctgctgtggatctgtctttcaaacaagagctgcagaaaacgctatagcaaggttgaagctttatccactctgactcacccagaaagcacagccctgattctgcgtgagaaaggctatctctacagaaactaaaacggtatcaacggtttctgtacagcacagattatgacagcgtctttcttaagattctgtggacctgactgacactagaaaagccgtatgttctttttgttggtggtttgtaaacagtaggtaaaattcagttttattcattgtgtttctgacagatggaacaagttaaggttaccttctcaatatgaggactaaagcttttagccaatatttgtggagaagacacatttaagattttcttttgcccatacatgcaat

SEQ ID NO: 12569 - DNA, 508 bp, Homo sapiens
  source 1..508: mol_type = unassigned DNA
atagaacagctgaggtagcgttcagtttcagcacagtgccattatgatggatgtttacatctcttcattgagagccaattatctcgcttttgtgtgaggcccaaggatcactcatgcttccaggctgcacagagcactgttggatctagctgaacgaattgttttctctgtctctgggtatcaacggtttctgtacagcacagattatgacagcgtctttcttaagatggaatcttggaacgtctcatgcttgggaaggacatggtcagatttgttgtaagaaagactgtgcagaggagtgtggcaaagggatccagaagatgcaagattctgtggacctgactgacactagaaaagccgtatgttctttttgttggtggtttgtaaacagtaggtaaaattcaggcagtagcatgtgacatggaagtttatattatcagggtgtgctcacctggttgcaaatttgagaccaaagttttactttaacacttggagctggtaaaggatg

SEQ ID NO: 12570 - DNA, 558 bp, Homo sapiens
  source 1..558: mol_type = unassigned DNA
atcttcactgctctatgcacacaggaacaccagattgccatccctggggaacagaatgcaacccgggatctagagagctgtcacattccaagaaatatttaaattgtgctgattttcttctggagaactgagcccagggaatgaaactctccatcaagtcatggctttgcgggcaatagatcagaggatattgccagttttctaatggattattgttatcgggcaggttttctctgaagcttctcagctgctgttacattctacttggatgggtcctatttctttcctccttttcctcgaataagcattcgtatgcagatgacgggggccttcaaaagaactggagatcagccagatcacttgtatgcacaaagctgctgtggatctgtctttcaaacaagagctgcagaaaacgctatagcaaggttgaagctttatccactctgactcacccagaaagcacagccctgattctgcgtgagaaaggctatctctacagaaactaaaacggtatcaacggtttctgtacagcacagattatgacagcgtctttcttaa

SEQ ID NO: 12571 - DNA, 502 bp, Homo sapiens
  source 1..502: mol_type = unassigned DNA
gtgtgaggcccaaggatcactcatgcttccaggctgcacagagcactgttggatctagctgaacgaattgttttctctgtctctgaaaacagaagcagttatgacttacatcaactctgaaaaataagaatgcatccttggaatcagaaaatacaaaccctgaaagtgaagtacaagagcttcattagtaacataatgaatgaattataacaataaatgaaaaacaaactaatatcaatgatgatgacaaaacttgctacttttcctaatagagggaaaggatagtttagagatagttgcaaagcagattaagacatgaagagtagaacatctgccaaaaaggcaagccaaagtttaaaagaacaacaaaaacaaacaaataattatttgttccttaaaaatctgctttggtgcccttgataacaaaatgtgtgatatatgtttgatagcacaggttggtcagagaaactttagtaaggtatgagaaaagaacatacacagc

SEQ ID NO: 12572 - DNA, 2159 bp, Homo sapiens
  source 1..2159: mol_type = unassigned DNA
agggtatcaacggtttctgtacagcacagattatgacagcgtctttcttaagcagatggaatcttggaacgtctcatgcttgggaaggacatggtcagatttgttgtaagaaagactgtgcagaggagtgtggcaaagggatccagaagatgcaaggtattatttagaaaagaagagaatgtttaaatttcatcaaatgaaacatatttttgaaatacttgataaaatgagatgcctgagaaaacgttctacagtgtcattcttgggagttcttgtcatttttctcctttttatgaacttgtacattgaagatagctatgttctggaaggagacaaacaacttataagggaaacatccacacatcaactgaattcagaacgctatgttcatactttcaaggatttatctaatttctcaggagccataaatgtcacctatcgctacctagctgccacacctttacaaagaaagcggtatcttacaattggactttcttcagtaaagcgaaaaaaaggaaactatttacttgagacaattaagtcaatttttgagcaatccagctatgaagagctgaaggaaatttcagtggtggttcacctagcagactttaattcttcctggcgtgatgccatggtccaggatattacacagaaatttgcgcaccatattattgcaggaagattaatggttatacatgctccagaggagtattacccaatcctagatggccttaaaagaaattacaatgatccagaagatagagtcaaatttcgttccaagcaaaatgtagattatgcttttctgcttaatttttgtgccaatacttcagactattatgtaatgcttgaagatgatgttcgatgttcaaaaaatttcttaactgccatcaagaaagtcattgcatccctagaaggaacttactgggtaactcttgaattctctaagcttggctacattggtaaactctatcattctcatgatctcccacgtttggcccattttttattaatgttttatcaagaaatgccttgtgattggctattgactcatttccgtggtctgttggctcagaaaaatgtgatccgttttaaaccatctctctttcagcacatgggctattattcatcatacaaagggacggagaataagctgaaggatgatgattttgaagaggagtcatttgacattcctgataacccccctgcaagtctgtacaccaacatgaatgtgtttgaaaattatgaagcaagcaaggcttacagtagtgttgatgagtacttttgggggaaaccaccttcaacaggagatgtttttgtgattgtatttgaaaatccaattataataaaaaaaattaaagtaaatactggaacagaagatcggcaaaatgatattttgcatcatggagccctagatgttggggaaaacgttatgcctagcaaacaaaggagacaatgttctacttacttaagactaggagaattcaaaaatggaaactttgaaatgtcaggtgtaaatcaaaaaattccatttgatatacattgtatgaggatatatgtcaccaaaacacaaaaggaatggctaattattaggagtattagcatttggacttcttagccaattaaatcagtatgttcagtttctgaagcagttcttcctgcttcgtcttttgctacctttgtcttttggagggaaagcaatggatgggatatgttaaaagaaacattaattacattggcagttttcatttatacattgttgacataattttactcttaatacacacttgtatttattttaacgtctgaagttgaatatcagtctatagctaatgctactttcatttatatttttaaatgttcttagttttaaaatttcaactgattgtcgaaagggtaatatgaaagattttaaatgaaaaaaatttgttggatgatgatttttgaaaaatagtcaccaactgtatatacttcctcaagaactgataattcattatatcatcagatagcttttattaagcatctgtgggaatatacagttgggtggaatgataatctggtttattttttctgtaaacttaagtttccgttgacttctgtacatctacaatgaatacctcctcatagaagtggtgtctttacataattttttgtgtaggtga

SEQ ID NO: 12573 - DNA, 25116 bp, Homo sapiens; identical to SEQ ID NO: 12562
  source 1..25116: mol_type = unassigned DNA

SEQ ID NO: 12574 - DNA, 3194 bp, Homo sapiens; identical to SEQ ID NO: 12563
  source 1..3194: mol_type = unassigned DNA

SEQ ID NO: 12575 - DNA, 2582 bp, Homo sapiens; identical to SEQ ID NO: 12564
  source 1..2582: mol_type = unassigned DNA

SEQ ID NO: 12576 - DNA, 2159 bp, Homo sapiens; identical to SEQ ID NO: 12572
  source 1..2159: mol_type = unassigned DNA

SEQ ID NO: 12577 - DNA, 1937 bp, Homo sapiens; identical to SEQ ID NO: 12565
  source 1..1937: mol_type = unassigned DNA

SEQ ID NO: 12578 - DNA, 1423 bp, Homo sapiens; identical to SEQ ID NO: 12566
  source 1..1423: mol_type = unassigned DNA

SEQ ID NO: 12579 - DNA, 550 bp, Homo sapiens; identical to SEQ ID NO: 12567
  source 1..550: mol_type = unassigned DNA

SEQ ID NO: 12580 - DNA, 588 bp, Homo sapiens; identical to SEQ ID NO: 12568
  source 1..588: mol_type = unassigned DNA

SEQ ID NO: 12581 - DNA, 508 bp, Homo sapiens; identical to SEQ ID NO: 12569
  source 1..508: mol_type = unassigned DNA

SEQ ID NO: 12582 - DNA, 558 bp, Homo sapiens; identical to SEQ ID NO: 12570
  source 1..558: mol_type = unassigned DNA

SEQ ID NO: 12583 - DNA, 502 bp, Homo sapiens; identical to SEQ ID NO: 12571
  source 1..502: mol_type = unassigned DNA

SEQ ID NO: 12584 - DNA, 4486 bp, Homo sapiens
  source 1..4486: mol_type = unassigned DNA
gcggggccggacgccggacaccagagcgcgggcggcggagccagcgggcgagagagcgcgcggcgggcgcgggttgccctcgtcgagagccatgggcgcggcgcggcgcggggctgaggatcggcgcggcccggaggcgctggggaccggggcgcgggcccggggccgcctttagccggcaccgagggcgcggggccggggatgagggcgcccgccgcggggagcccgtctgcgcgccgcggcaccttcccgcccagcgagcgagcccgagcaggcagacgcgcggccggcggtctgggggcgcgccgcctcccggtccccaaaatgtgaagcggggagggcggagacgcagagacggcccggccgggcgccctcgccgccctccggcagccgcgccgctccctccgctgcacgcccaggcctgagcagcgaggccaccgggccgcgcgctcccagcttcgctcggacgcggcttcggcccgcagagggttcgtggcccggacgcggcgagagctgggcccaggacggtgcgtccggcctcgcccgcggctgctcgcaccaacaagtttgaacaatgatcaccgtcaaccccgatgggaagataatggtcagaagatgcctggtcaccctgagaccctttcggctttttgtcctgggcatcggcttcttcactctctgcttcctgatgacgtctctgggaggccagttctcggcccggcgcctgggggactcgccattcaccatccgcacagaagtgatggggggccccgagtcccgcggcgtcctgcgcaagatgagcgacctgctggagctgatggtgaagcgcatggacgcactggccaggctggagaacagcagtgagctgcaccgggccggcggcgacctgcactttcccgcagacaggatgccccctggggccggcctcatggagcggatccaggctattgcccagaacgtctccgacatcgctgtgaaggtggaccagatcctgcgccacagtctgctcctgcacagcaaggtgtcagaaggccggcgggaccagtgtgaggcacccagtgaccccaagttccctgactgctcagggaaggtggagtggatgcgtgcccgctggacctctgacccctgctacgccttctttggggtggacggcaccgagtgctccttcctcatctacctcagtgaggtcgagtggttctgccccccgctgccctggaggaaccagacggctgcccagagggcacccaagcccctccccaaagtccaggcagttttccgaagcaacctgtcccaccttctggacctgatgggcagcgggaaggagtccctgatcttcatgaagaagcggaccaagaggctcacagcccagtgggcgctggctgcccagcgcctggcacagaagctgggggccacccagagggaccagaagcagatcctggtccacatcggcttcctgacggaggagtccggggacgtgttcagccctcgggtcctgaagggcgggcccctaggggagatggtgcagtgggcggacattctgactgcactctatgtcctgggccatggcctgcgggtcacagtctccctgaaggagctgcagagtaacttaggggtaccgccaggccggggaagctgcccgctcaccatgcccctgcccttcgacctcatctacaccgactaccacggcctgcagcagatgaagcggcacatgggactctccttcaagaagtaccggtgccgaatcagggtcatcgacaccttcgggacggaacctgcgtacaaccacgaggagtacgccacgctgcacggctaccggaccaactggggctactggaacctcaaccccaagcagttcatgaccatgtttcctcatacccccgacaactccttcatgggcttcgtgtccgaggagctcaacgagacggagaagcggctcatcaaaggcggcaaggccagcaacatggccgtggtgtacggcaaggaggcgagcatctggaaggggaaggagaagttcctgggcatcctgaacaaatacatggagatccatggcaccgtgtactacgagagccagcggccccccgaggtgccagcctttgtgaagaaccacggcctcttaccgcagcctgagtttcagcagctgctgcgcaaggccaaactcttcatcgggtttggcttcccctacgagggccccgcccccctggaggccatcgccaatggttgcatcttcctgcagtcccgcttcagcccgccccacagctccctcaaccacgagttcttccgaggcaagcccacctccagagaggtgttctcccagcatccctacgcggagaacttcatcggcaagccccacgtgtggacagtcgactacaacaactcagaggagtttgaagcagccatcaaggccattatgagaactcaggtagacccctacctaccctacgagtacacctgcgaggggatgctggagcggatccacgcctacatccagcaccaggacttctgcagagctccagaccctgccctaccagaggcccacgccccgcagagcccctttgtcctggcccccaatgccacccacctcgagtgggctcggaacaccagcttggctcctggggcctggccccccgcgcacgccctgcgggcctggctggccgtgcctgggagggcctgcaccgacacctgcctggaccacgggctaatctgtgagccctccttcttccccttcctgaacagccaggacgccttcctcaagctgcaggtgccctgtgacagcaccgagtcggagatgaaccacctgtacccggcgttcgcccagcctggccaggagtgctacctgcagaaggagcctctgctcttcagctgcgccggctccaacaccaagtaccgccggctctgcccctgccgcgacttccgcaagggccaggtggccttgtgccagggctgtctgtgaatccgcctctgccgccctgcctggcacccacgctggctctctcctgccgcgggagaaagcaccagcaggttctgagccctggctgcttgtcctcctcgcaacccccccaggccggagcttccttccttagccgggaagctggcagaggagagccgtgcccgggaataggaggaggcagcatgccgagcccctgggacctcccaggcaggctccggttctctcctggggactcacagaagcatcgtggccaagcaggtgtcggactgctcagagtccgcatggcccaggagcaggtggtcggaggcccctggctttgtgcaaggccggatctgggccaggtggcgaaaggggcccagtcgttcttgggcccaggatggggcctctagacttgcaagggagaggaacagggaccaggctgccccacggtccctgaagggtccaaggaggggccctccccatggccctggagagtgggcctgggtggtacctgctccaggcagggaaactgggggctcgcccttctcctgtgaggggagccaggcacacagggcccattggtgtttgggatgtggacagaggggcagggggctgggagaaggctaagccgaggggtcctgtttgtgcctccccttagtcccttccctcccgatttcccgattcccccaccctccctctacacttgaggaccacagttgggggtgtagggaccacccagaccctggttgaattgtttctctctcctgcttgttccaacccttttcactctgggcttctcccaaaacccatcctggcatgacctgcaactccaggtggtggatttgttccaaagcctcaatccctaccccctccaaggggcaggtttccagtccagcctcagagatcaggctctgggacccctgcctggggggtggccttcatgcactagccacttccgcaggtgctgactcccgcactccctggcattttttgcagacaagggcttgggatggaccctcagccccatggtacgccctgcccagtttccagttgccctgtccacttaccctaggtagccccccaccccatcagtgccgagtccttgtccctacctccagcttcctccagcctcaaaccgcctctggatctagctgtccttctccgagtggcacgcctgccccaggatgccccctttccctcccccccatgcccagagccccgcctgcctcagcgggtcaggccttcagaacactgccacccacccagttttataatcccgctccctctccaggcaaccccacccaccagcctaggcctgctcctccacccttcccgggaggcagccccgggatgctgagagttggtggaggggccaggctggacgcttcctgtgggagtcccctccagacctggctggcccctgcagccacagaaaccacgatggcaaaaaatctcattggttctcaaggactaacctgtgggggaaagcaatagagacactctttttctctcttttttttaaagatttatttcttgaaataataaatattttattgggatgtg

SEQ ID NO: 12585 - DNA, 4492 bp, Homo sapiens
  source 1..4492: mol_type = unassigned DNA
gcggggccggacgccggacaccagagcgcgggcggcggagccagcgggcgagagagcgcgcggcgggcgcgggttgccctcgtcgagagccatgggcgcggcgcggcgcggggctgaggatcggcgcggcccggaggcgctggggaccggggcgcgggcccggggccgcctttagccggcaccgagggcgcggggccggggatgagggcgcccgccgcggggagcccgtctgcgcgccgcggcaccttcccgcccagcgagcgagcccgagcaggcagacgcgcggccggcggtctgggggcgcgccgcctcccggtccccaaaatgtgaagcggggagggcggagacgcagagacggcccggccgggcgccctcgccgccctccggcagccgcgccgctccctccgctgcacgcccaggcctgagcagcgaggccaccgggccgcgcgctcccagcttcgctcggacgcggcttcggcccgcagagggttcgtggcccggacgcggcgagagctgggcccaggacggtgcgtccggcctcgcccgcggctgctcgcaccaacaagtttgaacaatgatcaccgtcaaccccgatgggaagataatggtcagaagatgcctggtcaccctgagaccctttcggctttttgtcctgggcatcggcttcttcactctctgcttcctgatgacgtctctgggaggccagttctcggcccggcgcctgggggactcgccattcaccatccgcacagaagtgatggggggccccgagtcccgcggcgtcctgcgcaagatgagcgacctgctggagctgatggtgaagcgcatggacgcactggccaggctggagaacagcagtgagctgcaccgggccggcggcgacctgcactttcccgcagacaggatgccccctggggccggcctcatggagcggatccaggctattgcccagaacgtctccgacatcgctgtgaaggtggaccagatcctgcgccacagtctgctcctgcacagcaaggtgtcagaaggccggcgggaccagtgtgaggcacccagtgaccccaagttccctgactgctcagggaaggtggagtggatgcgtgcccgctggacctctgacccctgctacgccttctttggggtggacggcaccgagtgctccttcctcatctacctcagtgaggtcgagtggttctgccccccgctgccctggaggaaccagacggctgcccagagggcacccaagcccctccccaaagtccaggcagttttccgaagcaacctgtcccaccttctggacctgatgggcagcgggaaggagtccctgatcttcatgaagaagcggaccaagaggctcacagcccagtgggcgctggctgcccagcgcctggcacagaagctgggggccacccagagggaccagaagcagatcctggtccacatcggcttcctgacggaggagtccggggacgtgttcagccctcgggtcctgaagggcgggcccctaggggagatggtgcagtgggcggacattctgactgcactctatgtcctgggccatggcctgcgggtcacagtctccctgaaggagctgcagagtaacttaggggtaccgccaggccggggaagctgcccgctcaccatgcccctgcccttcgacctcatctacaccgactaccacggcctgcagcagatgaagcggcacatgggactctccttcaagaagtaccggtgccgaatcagggtcatcgacaccttcgggacggaacctgcgtacaaccacgaggagtacgccacgctgcacggctaccggaccaactggggctactggaacctcaaccccaagcagttcatgaccatgtttcctcatacccccgacaactccttcatgggcttcgtgtccgaggagctcaacgagacggagaagcggctcatcaaaggcggcaaggccagcaacatggccgtggtgtacggcaaggaggcgagcatctggaagctccaggggaaggagaagttcctgggcatcctgaacaaatacatggagatccatggcaccgtgtactacgagagccagcggccccccgaggtgccagcctttgtgaagaaccacggcctcttaccgcagcctgagtttcagcagctgctgcgcaaggccaaactcttcatcgggtttggcttcccctacgagggccccgcccccctggaggccatcgccaatggttgcatcttcctgcagtcccgcttcagcccgccccacagctccctcaaccacgagttcttccgaggcaagcccacctccagagaggtgttctcccagcatccctacgcggagaacttcatcggcaagccccacgtgtggacagtcgactacaacaactcagaggagtttgaagcagccatcaaggccattatgagaactcaggtagacccctacctaccctacgagtacacctgcgaggggatgctggagcggatccacgcctacatccagcaccaggacttctgcagagctccagaccctgccctaccagaggcccacgccccgcagagcccctttgtcctggcccccaatgccacccacctcgagtgggctcggaacaccagcttggctcctggggcctggccccccgcgcacgccctgcgggcctggctggccgtgcctgggagggcctgcaccgacacctgcctggaccacgggctaatctgtgagccctccttcttccccttcctgaacagccaggacgccttcctcaagctgcaggtgccctgtgacagcaccgagtcggagatgaaccacctgtacccggcgttcgcccagcctggccaggagtgctacctgcagaaggagcctctgctcttcagctgcgccggctccaacaccaagtaccgccggctctgcccctgccgcgacttccgcaagggccaggtggccttgtgccagggctgtctgtgaatccgcctctgccgccctgcctggcacccacgctggctctctcctgccgcgggagaaagcaccagcaggttctgagccctggctgcttgtcctcctcgcaacccccccaggccggagcttccttccttagccgggaagctggcagaggagagccgtgcccgggaataggaggaggcagcatgccgagcccctgggacctcccaggcaggctccggttctctcctggggactcacagaagcatcgtggccaagcaggtgtcggactgctcagagtccgcatggcccaggagcaggtggtcggaggcccctggctttgtgcaaggccggatctgggccaggtggcgaaaggggcccagtcgttcttgggcccaggatggggcctctagacttgcaagggagaggaacagggaccaggctgccccacggtccctgaagggtccaaggaggggccctccccatggccctggagagtgggcctgggtggtacctgctccaggcagggaaactgggggctcgcccttctcctgtgaggggagccaggcacacagggcccattggtgtttgggatgtggacagaggggcagggggctgggagaaggctaagccgaggggtcctgtttgtgcctccccttagtcccttccctcccgatttcccgattcccccaccctccctctacacttgaggaccacagttgggggtgtagggaccacccagaccctggttgaattgtttctctctcctgcttgttccaacccttttcactctgggcttctcccaaaacccatcctggcatgacctgcaactccaggtggtggatttgttccaaagcctcaatccctaccccctccaaggggcaggtttccagtccagcctcagagatcaggctctgggacccctgcctggggggtggccttcatgcactagccacttccgcaggtgctgactcccgcactccctggcattttttgcagacaagggcttgggatggaccctcagccccatggtacgccctgcccagtttccagttgccctgtccacttaccctaggtagccccccaccccatcagtgccgagtccttgtccctacctccagcttcctccagcctcaaaccgcctctggatctagctgtccttctccgagtggcacgcctgccccaggatgccccctttccctcccccccatgcccagagccccgcctgcctcagcgggtcaggccttcagaacactgccacccacccagttttataatcccgctccctctccaggcaaccccacccaccagcctaggcctgctcctccacccttcccgggaggcagccccgggatgctgagagttggtggaggggccaggctggacgcttcctgtgggagtcccctccagacctggctggcccctgcagccacagaaaccacgatggcaaaaaatctcattggttctcaaggactaacctgtgggggaaagcaatagagacactctttttctctcttttttttaaagatttatttcttgaaataataaatattttattgggatgtg

SEQ ID NO: 12586 - DNA, 872 bp, Homo sapiens
  source 1..872: mol_type = unassigned DNA
gcgagcccgagcaggcagacgcgcggccggcggtctgggggcgcgccgcctcccggtccccaaaatgtgaagcggggagggcggagacgcagagacggcccggccgggcgccctcgccgccctccggcagccgcgccgctccctccgctgcacgcccaggcctgagcagcgaggccaccgggccgcgcgctcccagcttcgctcggacgcggcttcggcccgcagagggttcgtggcccggacgcggcgagagctgggcccaggacggtgcgtccggcctcgcccgcggctgctcgcaccaacaagtttgaacaatgatcaccgtcaaccccgatgggaagataatggtcagaagatgcctggtcaccctgagaccctttcggctttttgtcctgggcatcggcttcttcactctctgcttcctgatgacgtctctgggaggccagttctcggcccggcgcctgggggactcgccattcaccatccgcacagaagtgatggggggccccgagtcccgcggcgtcctgcgcaagatgagcgacctgctggagctgatggtgaagcgcatggacgcactggccaggctggagaacagcagtgagctgcaccgggccggcggcgacctgcactttcccgcagacaggtgaggggacgtggggaggaggcacacggagcaggggagcggtggcacctgccactccatccggggtgctgtccgtcatctccttttgtgaatctggagaagatttggaccacactgtggtacagcccagagtgcatttctaccacccaaatttaacaaccgttaacatttggtcacatttgtggcctgttttcctctttaaataaaacgtcacagatgaaaactaaaa

SEQ ID NO: 12587 - DNA, 1661 bp, Homo sapiens
  source 1..1661: mol_type = unassigned DNA
cgccctcgccgccctccggcagccgcgccgctccctccgctgcacgcccaggcctgagcagcgaggccaccgggccgcgcgctcccagcttcgctcggacgcggcttcggcccgcagagggttcgtggcccggacgcggcgagagctgggcccaggacggtgcgtccggcctcgcccgcggctgctcgcaccaacaagtttgaacaatgatcaccgtcaaccccgatgggaagataatggtcagaagatgcctggtcaccctgagaccctttcggctttttgtcctgggcatcggcttcttcactctctgcttcctgatgacgtctctgggaggccagttctcggcccggcgcctgggggactcgccattcaccatccgcacagaagtgatggggggccccgagtcccgcggcgtcctgcgcaagatgagcgacctgctggagctgatggtgaagcgcatggacgcactggccaggctggagaacagcagtgagctgcaccgggccggcggcgacctgcactttcccgcagacaggatgccccctggggccggcctcatggagcggatccaggctattgcccagaacgtctccgacatcgctgtgaaggtggaccagatcctgcgccacagtctgctcctgcacagcaaggtgtcagaaggccggcgggaccagtgtgaggcacccagtgaccccaagttccctgactgctcagggaaggtggagtggatgcgtgcccgctggacctctgacccctgctacgccttctttggggtggacggcaccgagtgctccttcctcatctacctcagtgaggtcgagtggttctgccccccgctgccctggaggaaccagacggctgcccagagggcacccaagcccctccccaaagtccaggcagttttccgaagcaacctgtcccaccttctggacctgatgggcagcgggaaggagtccctgatcttcatgaagaagcggaccaagaggctcacagcccagtgggcgctggctgcccagcgcctggcacagaagctgggggccacccagagggaccagaagcagatcctggtccacatcggcttcctgacggaggagtccggggacgtgttcagccctcgggtcctgaagggcgggcccctaggggagatggtgcagtgggcggacattctgactgcactctatgtcctgggccatggcctgcgggtcacagtctccctgaaggagctgcagaggcaaaggagactgaggagtagccaagagcaagccagatgtggagtcatgggtgcctgtgagaagatgcttctagaaggagatgtggccagcaacacattgctcattgaaaagccaagtaagaaggagactgaaaaatgtccaaagaatttggtcacatgaggctgggtggggcggctcactcctgtaatcccagcactttgggaggtcacggcgggaggattgcttgattccaggagttggagaccagcctgggcaagatagtgagacctggtctttaccaaaaacaaaaaaattagccaagtgcgcctgtggtcccagctactcaggcgactgaggaaggaggatcacttgagcctgggaagtcgaggctacagtcagccgtgatcatgctactgcactctagcttgggtgacaaagcaagactgtctc

SEQ ID NO: 12588 - DNA, 4053 bp, Homo sapiens
  source 1..4053: mol_type = unassigned DNA
gccagcatcttgtagttgagctctctttatcctatagtgggggggccctcctgggtctggagctcagcccccatcctttcattctcccttgcttccttcactcatgcactcattcgtaaaacatttgtgcagccggtacgtggtggagcgtcagggcacgatggcccttcctgccctcctgacccgcctccttcctctccgcaggctttttgtcctgggcatcggcttcttcactctctgcttcctgatgacgtctctgggaggccagttctcggcccggcgcctgggggactcgccattcaccatccgcacagaagtgatggggggccccgagtcccgcggcgtcctgcgcaagatgagcgacctgctggagctgatggtgaagcgcatggacgcactggccaggctggagaacagcagtgagctgcaccgggccggcggcgacctgcactttcccgcagacaggatgccccctggggccggcctcatggagcggatccaggctattgcccagaacgtctccgacatcgctgtgaaggtggaccagatcctgcgccacagtctgctcctgcacagcaaggtgtcagaaggccggcgggaccagtgtgaggcacccagtgaccccaagttccctgactgctcagggaaggtggagtggatgcgtgcccgctggacctctgacccctgctacgccttctttggggtggacggcaccgagtgctccttcctcatctacctcagtgaggtcgagtggttctgccccccgctgccctggaggaaccagacggctgcccagagggcacccaagcccctccccaaagtccaggcagttttccgaagcaacctgtcccaccttctggacctgatgggcagcgggaaggagtccctgatcttcatgaagaagcggaccaagaggctcacagcccagtgggcgctggctgcccagcgcctggcacagaagctgggggccacccagagggaccagaagcagatcctggtccacatcggcttcctgacggaggagtccggggacgtgttcagccctcgggtcctgaagggcgggcccctaggggagatggtgcagtgggcggacattctgactgcactctatgtcctgggccatggcctgcgggtcacagtctccctgaaggagctgcagagtaacttaggggtaccgccaggccggggaagctgcccgctcaccatgcccctgcccttcgacctcatctacaccgactaccacggcctgcagcagatgaagcggcacatgggactctccttcaagaagtaccggtgccgaatcagggtcatcgacaccttcgggacggaacctgcgtacaaccacgaggagtacgccacgctgcacggctaccggaccaactggggctactggaacctcaaccccaagcagttcatgaccatgtttcctcatacccccgacaactccttcatgggcttcgtgtccgaggagctcaacgagacggagaagcggctcatcaaaggcggcaaggccagcaacatggccgtggtgtacggcaaggaggcgagcatctggaaggggaaggagaagttcctgggcatcctgaacaaatacatggagatccatggcaccgtgtactacgagagccagcggccccccgaggtgccagcctttgtgaagaaccacggcctcttaccgcagcctgagtttcagcagctgctgcgcaaggccaaactcttcatcgggtttggcttcccctacgagggccccgcccccctggaggccatcgccaatggttgcatcttcctgcagtcccgcttcagcccgccccacagctccctcaaccacgagttcttccgaggcaagcccacctccagagaggtgttctcccagcatccctacgcggagaacttcatcggcaagccccacgtgtggacagtcgactacaacaactcagaggagtttgaagcagccatcaaggccattatgagaactcaggtagacccctacctaccctacgagtacacctgcgaggggatgctggagcggatccacgcctacatccagcaccaggacttctgcagagctccagaccctgccctaccagaggcccacgccccgcagagcccctttgtcctggcccccaatgccacccacctcgagtgggctcggaacaccagcttggctcctggggcctggccccccgcgcacgccctgcgggcctggctggccgtgcctgggagggcctgcaccgacacctgcctggaccacgggctaatctgtgagccctccttcttccccttcctgaacagccaggacgccttcctcaagctgcaggtgccctgtgacagcaccgagtcggagatgaaccacctgtacccggcgttcgcccagcctggccaggagtgctacctgcagaaggagcctctgctcttcagctgcgccggctccaacaccaagtaccgccggctctgcccctgccgcgacttccgcaagggccaggtggccttgtgccagggctgtctgtgaatccgcctctgccgccctgcctggcacccacgctggctctctcctgccgcgggagaaagcaccagcaggttctgagccctggctgcttgtcctcctcgcaacccccccaggccggagcttccttccttagccgggaagctggcagaggagagccgtgcccgggaataggaggaggcagcatgccgagcccctgggacctcccaggcaggctccggttctctcctggggactcacagaagcatcgtggccaagcaggtgtcggactgctcagagtccgcatggcccaggagcaggtggtcggaggcccctggctttgtgcaaggccggatctgggccaggtggcgaaaggggcccagtcgttcttgggcccaggatggggcctctagacttgcaagggagaggaacagggaccaggctgccccacggtccctgaagggtccaaggaggggccctccccatggccctggagagtgggcctgggtggtacctgctccaggcagggaaactgggggctcgcccttctcctgtgaggggagccaggcacacagggcccattggtgtttgggatgtggacagaggggcagggggctgggagaaggctaagccgaggggtcctgtttgtgcctccccttagtcccttccctcccgatttcccgattcccccaccctccctctacacttgaggaccacagttgggggtgtagggaccacccagaccctggttgaattgtttctctctcctgcttgttccaacccttttcactctgggcttctcccaaaacccatcctggcatgacctgcaactccaggtggtggatttgttccaaagcctcaatccctaccccctccaaggggcaggtttccagtccagcctcagagatcaggctctgggacccctgcctggggggtggccttcatgcactagccacttccgcaggtgctgactcccgcactccctggcattttttgcagacaagggcttgggatggaccctcagccccatggtacgccctgcccagtttccagttgccctgtccacttaccctaggtagccccccaccccatcagtgccgagtccttgtccctacctccagcttcctccagcctcaaaccgcctctggatctagctgtccttctccgagtggcacgcctgccccaggatgccccctttccctcccccccatgcccagagccccgcctgcctcagcgggtcaggccttcagaacactgccacccacccagttttataatcccgctccctctccaggcaaccccacccaccagcctaggcctgctcctccacccttcccgggaggcagccccgggatgctgagagttggtggaggggccaggctggacgcttcctgtgggagtcccctccagacctggctggcccctgcagccacagaaaccacgatggcaaaaaatctcattggttctcaaggactaacctgtgggggaaagcaatagagacactctttttctctcttttttttaaagatttatttcttgaaataataaatattttattgggatgtgaggtg

SEQ ID NO: 12589 - DNA, 2923 bp, Homo sapiens
  source 1..2923: mol_type = unassigned DNA
cagcccccatcctttcattctcccttgcttccttcactcatgcactcattcgtaaaacatttgtgcagccggtacgtggtggagcgtcagggcacgatggcccttcctgccctcctgacccgcctccttcctctccgcaggctttttgtcctgggcatcggcttcttcactctctgcttcctgatgacgtctctgggaggccagttctcggcccggcgcctgggggactcgccattcaccatccgcacagaagtgatggggggccccgagtcccgcggcgtcctgcgcaagatgagcgacctgctggagctgatggtgaagcgcatggacgcactggccaggctggagaacagcagtgagctgcaccgggccggcggcgacctgcactttcccgcagacaggatgccccctggggccggcctcatggagcggatccaggctattgcccagaacgtctccgacatcgctgtgaaggtggaccagatcctgcgccacagtctgctcctgcacagcaaggtgtcagaaggccggcgggaccagtgtgaggcacccagtgaccccaagttccctgactgctcagggaaggtggagtggatgcgtgcccgctggacctctgacccctgctacgccttctttggggtggacggcaccgagtgctccttcctcatctacctcagtgaggtcgagtggttctgccccccgctgccctggaggaaccagacggctgcccagagggcacccaagcccctccccaaagtccaggcagttttccgaagcaacctgtcccaccttctggacctgatgggcagcgggaaggagtccctgatcttcatgaagaagcggaccaagaggctcacagcccagtgggcgctggctgcccagcgcctggcacagaagctgggggccacccagagggaccagaagcagatcctggtccacatcggcttcctgacggaggagtccggggacgtgttcagccctcgggtcctgaagggcgggcccctaggggagatggtgcagtgggcggacattctgactgcactctatgtcctgggccatggcctgcgggtcacagtctccctgaaggagctgcagagtaacttaggggtaccgccaggccggggaagctgcccgctcaccatgcccctgcccttcgacctcatctacaccgactaccacggcctgcagcagatgaagcggcacatgggactctccttcaagaagtaccggtgccgaatcagggtcatcgacaccttcgggacggaacctgcgtacaaccacgaggagtacgccacgctgcacggctaccggaccaactggggctactggaacctcaaccccaagcagttcatgaccatgtttcgggaaggagaagttcctgggcatcctgaacaaatacatggagatccatggcaccgtgtactacgagagccagcggccccccgaggtgccagcctttgtgaagaaccacggcctcttaccgcagcctgagtttcagcagctgctgcgcaaggccaaactcttcatcgggtttggcttcccctacgagggccccgcccccctggaggccatcgccaatggttgcatcttcctgcagtcccgcttcagcccgccccacagctccctcaaccacgagttcttccgaggcaagcccacctccagagaggtgttctcccagcatccctacgcggagaacttcatcggcaagccccacgtgtggacagtcgactacaacaactcagaggagtttgaagcagccatcaaggccattatgagaactcaggtagacccctacctaccctacgagtacacctgcgaggggatgctggagcggatccacgcctacatccagcaccaggacttctgcagagctccagaccctgccctaccagaggcccacgccccgcagagcccctttgtcctggcccccaatgccacccacctcgagtgggctcggaacaccagcttggctcctggggcctggccccccgcgcacgccctgcgggcctggctggccgtgcctgggagggcctgcaccgacacctgcctggaccacgggctaatctgtgagccctccttcttccccttcctgaacagccaggacgccttcctcaagctgcaggtgccctgtgacagcaccgagtcggagatgaaccacctgtacccggcgttcgcccagcctggccaggagtgctacctgcagaaggagcctctgctcttcagctgcgccggctccaacaccaagtaccgccggctctgcccctgccgcgacttccgcaagggccaggtggccttgtgccagggctgtctgtgaatccgcctctgccgccctgcctggcacccacgctggctctctcctgccgcgggagaaagcaccagcaggttctgagccctggctgcttgtcctcctcgcaacccccccaggccggagcttccttccttagccgggaagctggcagaggagagccgtgcccgggaataggaggaggcagcatgccgagcccctgggacctcccaggcaggctccggttctctcctggggactcacagaagcatcgtggccaagcaggtgtcggactgctcagagtccgcatggcccaggagcaggtggtcggaggcccctggctttgtgcaaggccggatctgggccaggtggcgaaaggggcccagtcgttcttgggcccaggatggggcctctagacttgcaagggagaggaacagggaccaggctgccccacggtccctgaagggtccaaggaggggccctccccatggccctggagagtgggcctgggtggtacctgctccaggcagggaaactgggggctcgcccttctcctgtgaggggagccaggcacacagggcccattggtgtttgggatgtggacagaggggcagggggctgggagaaggctaagccgag

SEQ ID NO: 12590 - DNA, 629 bp, Homo sapiens
  source 1..629: mol_type = unassigned DNA
cgggttctgcatgcattctgagctcccgggcgtcctcctctggtggagtggggatgggaacgtggaagggccgtctctgcggaggacggtacatcccacctgactcaggggctcggcatagacttaactgaatgaataagtgaccggatgcctcgtcatcccctgcaggggagaaaccgaggctgtggagttggaataagcaggggcttctggcgggaggagctggtttgtacggatgctggcagggggggttgtgggcagaggaatttaaattggcagctgtggctgctgggacagggggctttgaacccttctccagggaggtggactgagcagatgtggggattctagaggaagccatggggtgtggtcatgtccttccatgtcctcctgtccatacccctggagctgggggcctggggggtccagcaggaggagatgacccagcagctccagccggatgggatgccagatggcagaggggcaccacccctcctctggccaagctgcgtcttccaggtcaccagaggcaaccttgtcccagatgaaaacctgtgtgtaaataacccggcagtaacttaggggtaccgccaggccggggaagctgcccgctcaccatgcccctgccc

SEQ ID NO: 12591 - DNA, 904 bp, Homo sapiens
  source 1..904: mol_type = unassigned DNA
cctgacagccatggaaaaccagggcccggcaccccttctgtgtctctgcacctccctgggtttgcctgtggacatctctgtgtccagagcaaggccattcaaggtgatgccaacactggcttccgctgcacccctccctgctgtcattcccgcaggccagcagttcccaggcaggatcagcacctgtcactctgtcgagactgattagggcgcacacctgtaattagacctaatgggggtaatttccaggccaggcaggctggctcctccggcaggagattcgtggcaggcggaacgtcgtcgtcgtcgttggccgtagacccctacctaccctacgagtacacctgcgaggggatgctggagcggatccacgcctacatccagcaccaggacttctgcagagctccagaccctgccctaccagaggcccacgccccgcagagcccctttgtcctggcccccaatgccacccacctcgagtgggctcggaacaccagcttggctcctggggcctggccccccgcgcacgccctgcgggcctggctggccgtgcctgggagggcctgcaccgacacctgcctggaccacgggctaatctgtgagccctccttcttccccttcctgaacagccaggacgccttcctcaagctgcaggtgccctgtgacagcaccgagtcggagatgaaccacctgtacccggcgttcgcccagcctggccaggagtgctacctgcagaaggagcctctgctcttcagctgcgccggctccaacaccaagtaccgccggctctgcccctgccgcgacttccgcaagggccaggtggccttgtgccagggctgtctgtgaatccgcctctgccgccctgcctggcacccacgctggctctctcctgccgcgggagaaa

SEQ ID NO: 12592 - DNA, 2212 bp, Homo sapiens
  source 1..2212: mol_type = unassigned DNA
tcggctccctgggcatggcacaggatgtgagagcccaccagacctccacccccaatgccgagcatggcagggcccccgacggctgggccttctcccgccccatgtgtctgcccatccctcccacaggtagacccctacctaccctacgagtacacctgcgaggggatgctggagcggatccacgcctacatccagcaccaggacttctgcagagctccagaccctgccctaccagaggcccacgccccgcagagcccctttgtcctggcccccaatgccacccacctcgagtgggctcggaacaccagcttggctcctggggcctggccccccgcgcacgccctgcgggcctggctggccgtgcctgggagggcctgcaccgacacctgcctggaccacgggctaatctgtgagccctccttcttccccttcctgaacagccaggacgccttcctcaagctgcaggtgccctgtgacagcaccgagtcggagatgaaccacctgtacccggcgttcgcccagcctggccaggagtgctacctgcagaaggagcctctgctcttcagctgcgccggctccaacaccaagtaccgccggctctgcccctgccgcgacttccgcaagggccaggtggccttgtgccagggctgtctgtgaatccgcctctgccgccctgcctggcacccacgctggctctctcctgccgcgggagaaagcaccagcaggttctgagccctggctgcttgtcctcctcgcaacccccccaggccggagcttccttccttagccgggaagctggcagaggagagccgtgcccgggaataggaggaggcagcatgccgagcccctgggacctcccaggcaggctccggttctctcctggggactcacagaagcatcgtggccaagcaggtgtcggactgctcagagtccgcatggcccaggagcaggtggtcggaggcccctggctttgtgcaaggccggatctgggccaggtggcgaaaggggcccagtcgttcttgggcccaggatggggcctctagacttgcaagggagaggaacagggaccaggctgccccacggtccctgaagggtccaaggaggggccctccccatggccctggagagtgggcctgggtggtacctgctccaggcagggaaactgggggctcgcccttctcctgtgaggggagccaggcacacagggcccattggtgtttgggatgtggacagaggggcagggggctgggagaaggctaagccgaggggtcctgtttgtgcctccccttagtcccttccctcccgatttcccgattcccccaccctccctctacacttgaggaccacagttgggggtgtagggaccacccagaccctggttgaattgtttctctctcctgcttgttccaacccttttcactctgggcttctcccaaaacccatcctggcatgacctgcaactccaggtggtggatttgttccaaagcctcaatccctaccccctccaaggggcaggtttccagtccagcctcagagatcaggctctgggacccctgcctggggggtggccttcatgcactagccacttccgcaggtgctgactcccgcactccctggcattttttgcagacaagggcttgggatggaccctcagccccatggtacgccctgcccagtttccagttgccctgtccacttaccctaggtagccccccaccccatcagtgccgagtccttgtccctacctccagcttcctccagcctcaaaccgcctctggatctagctgtccttctccgagtggcacgcctgccccaggatgccccctttccctcccccccatgcccagagccccgcctgcctcagcgggtcaggccttcagaacactgccacccacccagttttataatcccgctccctctccaggcaaccccacccaccagcctaggcctgctcctccacccttcccgggaggcagccccgggatgctgagagttggtggaggggccaggctggacgcttcctgtgggagtcccctccagacctggctggcccctgcagccacagaaaccacgatggcaaaaaatctcattggttctcaaggactaacctgtgggggaaagcaatagagacactctttttctctcttttttttaaagatttatttcttgaaataataaatattttattgggatgtgaggtgcagaagaggaa

SEQ ID NO: 12593 - DNA, 4941 bp, Homo sapiens
  source 1..4941: mol_type = unassigned DNA
gtcgccgcgaagccggtcgcgcgcagctcgtcccggccctggcccgccgcaaacgaggatccgctgcgctcggggaacgcgacagcggcgctcgtggccccggtaactgcctcccggcccctgccccagcccgccagtgccgccgtcaggggtggggagcagcactggggtcccggacacgcccggcgtgggctcccgctacccatgtgtgcgtgtgtgtgtgtgcacggtgtgtgtgcgcgcgtgtccgagtgtgcgcgcgtgtgcgcgcgcgcgcgccctccctgctccttcgcaccagcccccaaaccaacttgtccccatcaactccatctttctagtccccaccttccccggtgcagacacccggcgaagcccacccggttttcccagcggcatttccgatgacagcttcggggctacgtgtcctgtgctgtcggagacgcacaggaagcaaagtttgtgagaagccttgggggcgactttgccttgggcacccgcatttgtgcgtctgcgaggtgcctcggtgtgcgcggagctagtttcccagtttcccgggcccctcccttctccgagcccctctagcgatttgtttaggaaaagtgatgacatgaactagtagtggagaatcgcagcgccgctccccgccctggggagggaggggagccccggagagcctgccggtgggagctggaagcaggctcccggctgagcgccccagcccgaaaggcagggtctgggtgcgggaagagggctcggagctgccttcctgctgccttggggccgcccagatgagggaacagcccgatttgcctggttctgattctccaggctgtcgtggttgtggaatgcaaacgccagcacataatggaaacaggacctgaagacccttccagcatgccagaggaaagttcccccaggcggaccccgcagagcattccctaccaggacctccctcacctggtcaatgcagacggacagtacctcttctgcaggtactggaaacccacaggcacacccaaggccctcatctttgtgtcccatggagccggagagcacagtggccgctatgaagagctggctcggatgctgatggggctggacctgctggtgttcgcccacgaccatgttggccacggacagagcgaaggggagaggatggtagtgtctgacttccacgttttcgtcagggatgtgttgcagcatgtggattccatgcagaaagactaccctgggcttcctgtcttccttctgggccactccatgggaggcgccatcgccatcctcacggccgcagagaggccgggccacttcgccggcatggtactcatttcgcctctggttcttgccaatcctgaatctgcaacaactttcaaggtccttgctgcgaaagtgctcaaccttgtgctgccaaacttgtccctcgggcccatcgactccagcgtgctctctcggaataagacagaggtcgacatttataactcagaccccctgatctgccgggcagggctgaaggtgtgcttcggcatccaactgctgaatgccgtctcacgggtggagcgcgccctccccaagctgactgtgcccttcctgctgctccagggctctgccgatcgcctatgtgacagcaaaggggcctacctgctcatggagttagccaagagccaggacaagactctcaagatttatgaaggtgcctaccatgttctccacaaggagcttcctgaagtcaccaactccgtcttccatgaaataaacatgtgggtctctcaaaggacagccacggcaggaactgcgtccccaccctgaatgcattggccggtgcccggctcatggtctgggggatgcaggcaggggaagggcagagatggcttctcagatatggcttgccaaaaaaaaaaaaaaaaaaaaatcagaaattggagaaatccttagcacaattttctaaaaaataacagacatttttgttatacattagactatcagacactggacctaccttaatggttagacactttatgcaaaaaaagagaaaggtcccaggtgattttccacaaagaatgtgctaaaatgtccactgaaaacaaagccaagcctctgccctgcctctcccagctcccacaagggttccaggaattcctggtgttcccaggacaccagactgcaataactggaggcgcctccttcctgcccacccttcgctcacgccccagcgccctctctgaccagcctccgcttggtggccttcctctggccgtgtgatgaggtggttgctgtctccataggggccagctccccagggcagactcacgtgcccctctgaggctcagaaaatgcccagcccttcctcaaaatgagcagccacccatgactttgtgggctccttgttagcctgagaccaggctttgcagaggggcggggggtgaggcttagcccagaaggagaactgagcaggaaaccaaggctcttctctgtcccctgcccttcccctcctgccagggggaggctcaggttggtccccgagtgccgcctgtactcacaaaggctgcctttcctctagagtcactaattttacctgatgctatgagagaatcatattgaagatgaaatgtctaatatataatgtatattttaaagcagagactattttggtggataggtgggagggagcaaggggagtttgagggaatcagagcttgatgctactgtacagaactggacaggttgggccggcagtggtggggccagagggctctgtgctctaggagctaagccagcagcccccgagaggggacttggctgggcctttcctatgggcaaggcccagtgctcttcctgcccaccagggaccatggagcagtggcaccctatggggctatgatccctaggcctgggcctgggcctgcctatggcccagagctaccctgggagtgtcagtgctagcagcacagctacctctggtggcaggagaagagaggcccagcacagcagcaggccaggccttcctgtccaggtctgcatggagcactcggtgacccagagcagggactggaggcacccccagccctgccccaggccacagcaggacaggccgggacaggcctcacccaaggccaaggctggcatcagccaatcattcagagctgaggccctgggcctagcctgcccttctcaggtgccaataccaccccagccctgcccttggcctcactttttcccagcaataagtggggttcaccacccgcctcgggaatactttccccttctaaatgggacttgctgttacctcaggaggctccttagtgcaaatatgaccctggtcagggctttgccaccgttgaagccctgcagaaggtgcaatgtaggggttctggggccacagaggagaggccacttcccaccaggacccccaacatgaagtctaggcctcaggggctcccgcccttcttcctccagcagcgggaactgccactgctctcccaggccctgttctggaggctaaccttggttcctggagagtgtgcccctccaccctccctccagcagccctgatcacaccatgagagccaggaacgggtcaccctgctgaagatcactctgtgccctgggggaggagccaagccctcaccccacaaggggcaggtgggggcttggttgctgacccggcccaagtccccacagagcaccttctgtagctccagcttgtctccctggcttctctttgaaggagaaaaatgtaaaatatgcactgagaaagccagccccgcctgcttagtcagccccggcagcagggcagccatgggaactcaggaaaagcaggaaccctttccaaaagcccagagatgccctgggctcagatctgtaattctcccaggagctgtgatagagcaggccacacaaagtccctacgcctccctgctgcctcccccagatgcatgtggtggcatcaccattccccaaattgaatatcagcatgcggcctgaccagggactctttagatgcatgaatttatttatatgaaggctctcacagagacacacacagcacttcagtagcatttgcattcctggttaaagaatcaccaatatttaaaataaaaactttcctgaaattgggactgtcatgttatccagaagggctggtacatccgcccaccatgtccccctgctgggtcaggagccaacacaggaccctgcgtgtgagcgtgcctgacatctcacgcacggccactccagagccggtccctgtccttggaaagctgtgaagccttgcgttgagttccttctcgatactgacggctccgtgctgacattctgagctctggagtcacaccagcgcaggggcgtggaggaactgaggtttggaaggaatgccaggtctcgcacagcttggcctcgagaaggtgagaggaaggcaaaggccagggaggggacccagagaggcctggcacacaaggcccaagcaccaccgtcaacacagcccagtccatacagaaatgggtttcatgcctgaaaagctttttacagaaagatgccgcctgtagccagtgacagccgcaaccctacaggcctcagttccttgcagaggtgaggggtagagagtcagcctccctcccttccagcagcgacccagcttccctccacttccaggtggtgctgggctcaccgagggagcactggtgggtgctctgaaaacccacaggatcccacctccaggcccacctgggtcccatctcactctcttcttctttcaccaattgctaacatagaccttgttgggatcacgatggcttcacaagccagctgttgggtttgctatgtcactgtggctcagtcacatccctgcgtgtatactgtctgcggggcacatatgtatccatttagagctaaaggaatcagtgtacactacagctaatcctaataaatccgatgttttcggaa

SEQ ID NO: 12594 - DNA, 716 bp, Homo sapiens
  source 1..716: mol_type = unassigned DNA
cattacagggaggcgccatcgccatcctcacggccgcagagaggccgggccacttcgccggcatggtactcatttcgcctctggttcttgccaatcctgaatctgcaacaactttcaaggactattcgaggattttgaaacacttgatggaaaaggcatcaagaatgttaaagttttggattccacgtcctttttgggtccttgctgcgaaagtgctcaaccttgtgctgccaaacttgtccctcgggcccatcgactccagcgtgctctctcggaataagacagaggtcgacatttataactcagaccccctgatctgccgggcagggctgaaggtgtgcttcggcatccaactgctgaatgccgtctcacgggtggagcgcgccctccccaagctgactgtgcccttcctgctgctccagggctctgccgatcgcctatgtgacagcaaaggggcctacctgctcatggagttagccaagagccaggacaagactctcaagatttatgaaggtgcctaccatgttctccacaaggagcttcctgaagtcaccaactccgtcttccatgaaataaacatgtgggtctctcaaaggacagccacggcaggaactgcgtccccaccctgaatgcattggccggtgcccggctcatggtctgggggatgcaggcaggggaagggcagagatggcttctcagatatggcttgccaaaaa

SEQ ID NO: 12595 - DNA, 3999 bp, Homo sapiens
  source 1..3999: mol_type = unassigned DNA
cattttctaaagcaaatacttctcaggaagtggctctcctctttttttttttttcctacgaagctcttttcttaaaagcttactttaactgcaaaaagttccactgttcatggaggaagaaaatcaggcttgctgggtgagacgacagaatagggcttgctgtaattctctcctggaggcaggctctctctctggctctctgttcccccttccccaacctctgtgaaaccacttcaaggatggctcaagctgcgctgatccttgaggcgccaacagcctaagctgtcagcatcttctccagagcctggaagtagaggccttgtcactttttggtataaaagttttgggttaagaggtgccagcagcagaaacatatgttcaaggatgaaggtaagtctgtcttcacaaatgactgatcctgaagatggactggcacctccaggcccaggtccctgcagaatcaggtgatgggtccccaaaacacaaatggtggcacaatgagaaatctggtggtgggcttggacgaaatggtgtggatgctgggtggtctcttgctttcacctctgtggcaggcactgctgaggtgctgggtccctgggccttttcttggctctgagccatctggtcagggaatgggtaggaagctggcttacataaaacagtcatgtccctgagaaggctgtgtgggccccagcaggcaggtgggttgacctgggagcagcgcctgcaaggctggcacttgcacaccatcccgttacacagagccttcctgcggttcctgagtgtggtggggatcctcccgccacagctggcagccccatgtctcctctggctgcacacaggatcactagggaactttaaaaaggcactgatgccagggctccacttcggccaatacaatcagtctctcagggcagcactgggaggaggtgtttgtggtgtttcatggacacacacactgccagcatcagggagtagtgacagggtactgagaacagcagaatatctagaagtgagttcttcataactgtggaacacagaagtcttccctcacagtgtggcccttgcccactgctgctggaggagagcgctaaggccctggaacactcgtccttacacagccagagtctagtgaaggccacagagccacagcccactgcctttatgcactgatccactccattttctcatttttagattgttttaacctttgaaagcacagatcccaatgcagacgagctcccaattcttggagttcacagacatttgatccgtgtttgaaaataccccagtccttgtgcagagttcccagaattccaagttttcctttcccaggctcgttcttggagctggcccatgatactagctggactcttgaacattcctgacccatcacggccacccttcgaggcttccgattatgcagacacaccatgcccctgcacagtgctcaaagtcaggctgccgcatgcttctatactagacagtcaaagtcggagcccagggctcagcaaagcacctggcacagtggcggctgcagaatgagatctgcttgcctggatgccaaggctggagggcagtaagcttcggtatcctcagaggcagggggctgccacctttgcactaagaaggaattactgatttctaccatttgagaaaaggagtgttgaccacatggaactccgaataggttcatgcacatggaacaaagccctttaggagaaaagcccgttttttgctgtctgcctgatactggatggttgagaaacaatcgtggtgggcagtcacgccacacttgtgcgggcctaggacacaggaaggtttagccctggcctacagggagggtgggcaagcacagcaatcttgtcccccaaaagaacatcagtggccgctggtgccaagacccacgggaaggttagagctctgggttacatttgtggagagagacacagacagcggcagagacagagacgtagtaatccaggctgtgtggcataagaagataaagcggccccccagcccggggcccctcccatggacctcatggtaccgagcctccattttctcatctgttcagtgaggatgaagcctcatctcccagggtttttgcaaagacagggagactggccgggcgccgtggcttacgcctataatcccagcaccttgggaggccgaggcaggcggatcacaaggtcaggagtttgagaccagcctaaccaacatggtgaaaccccgtctctactaaaaatacaaaaattaggcaggcgtggtggcacgcgcctgtaatcccagctactcaggaggctgaggcaggagaatcacttgaacccaggaggcagaggttgcagtgagccgagattgcgccactgcactccagcctgggtgacagagcaagactctcaaaaaaaaaaaaaaaaagatagggaaactgtgcccaatgcaccagaaggtggttcctcggtgcctgtgagtgcccttgccctctgccaagggtactgagctacgtgccctgtgcccttgatgtacactgagaattcactgcttgccaccttccgtccaattctaatttcagcatttcacagctcacttttgaaatagcatctttcatccccaaatgtctgtgcacattgcagaaatgaaaacagcccctctctgaaggcagaagtgtgagatccgggttctctgttttcctgggaaaacaagagatccagaaggagagatgggggagggggtgggaaggtttgggcctcaatcaggctcaagttcaatgagcatgtgttaagctcctgctgtgttccctgggcttttgcacacagggtgttattcaccttccccgtggtcctctgggggagggtcaaggtcccactggcagctgaggaaacggaggctcagcgatgtggaaatcccagcccatgttcacgaggcagcagagctaggaatcaaacccagcaatccttccctctgccacacagcctcctcatcgagctggtgctatttctacttccacccgagagaaatggacgcacactttctctgtgtggctcctgtgggcccttccgcactgccctgcttcgtgctcagttgatctgtgtgattctgcacctgccgtgtattttcagtaccccagagaaatggccagagctcatcccaggcaactcttgccagtgatgcaaaattacaacccatgagcgatcatggggagggtatagagcgggcaaaattcagacgtgacttcccaccttgggcgcagcggctgcctggccagctcccccaaggtggagcagagccaggctgaatagaggctgagtcagaagggagagtccttgggcatgcaggcttaaggacgcaggcttgggagacgaacctggctgatgttcagtttgggcatcactctccttaatgtactgtaaactgtcactgcggaagagccgggtgtggatgccacttgtgctcacagcccttgttttccctccccggctaggtccttgctgcgaaagtgctcaaccttgtgctgccaaacttgtccctcgggcccatcgactccagcgtgctctctcggaataagacagaggtcgacatttataactcagaccccctgatctgccgggcagggctgaaggtgtgcttcggcatccaactgctgaatgccgtctcacgggtggagcgcgccctccccaagctgactgtgcccttcctgctgctccagggctctgccgatcgcctatgtgacagcaaaggggcctacctgctcatggagttagccaagagccaggacaagactctcaagatttatgaaggtgcctaccatgttctccacaaggagcttcctgaagtcaccaactccgtcttccatgaaataaacatgtgggtctctcaaaggacagccacggcaggaactgcgtccccaccctgaatgcattggccggtgcccggctcatggtctgggggatgcaggcaggggaagggcagagatggcttctcagatatggcttgccaaaa

SEQ ID NO: 12596 - DNA, 549 bp, Homo sapiens
  source 1..549: mol_type = unassigned DNA
ccagttggccacggacagagcgaaggggagaggatggtagtgtctgacttccacgttttcgtcagggatgtgttgcagcatgtggattccatgcagaaagactaccctgggcttcctgtcttccttctgggccactccatgggaggcgccatcgccatcctcacggccgcagagaggccgggccacttcgccggcatggtactcatttcgcctctggttcttgccaatcctgaatctgcaacaactttcaaggtccttgctgcgaaagtgctcaaccttgtgctgccaaacttgtccctcgggcccatcgactccagcgtgctctctcggaataagacagagatttatgaaggtgcctaccatgttctccacaaggagcttcctgaagtcaccaactccgtcttccatgaaataaacatgtgggtctctcaaaggacagccacggcaggaactgcgtccccaccctgaatgcattggccggtgcccggctcatggtctgggggatgcaggcaggggaagggcagagatggcttctcagatatggcttgc

SEQ ID NO: 12597 - DNA, 1414 bp, Homo sapiens
  source 1..1414: mol_type = unassigned DNA
ggatcctgacttcagctgtttttagttgcttatcacccaggctttctaaaagtttcacttcttgttaaaaaatatagtatctcacatcctagagtaatgaacgtccatttttttaaagcaatttgcttttcctcatgcaatcttctttgttttttaaagtgatacttaacaataatttcagcagaagtgaaacttgggttgccaggtgtctgtacttttattaggtttgactgaccctgagctccaaacaatggaactagcactgtttgggaacttctgtaatctcacagaggacaacagatctaactgaatgttttcaagggaaaataaaaaggtctgttccatgttaaacctgggagcttttagcgtgaaggaactgagccgaaagatggtttaacgcttgcactctaagagagccaggattctaactgaaggtgcagaccagctgccccatctctttgcagagctgaacaggagaaaatccttgtaagtgggagagatgcagactagattcagaaggatcttcccctggaaggatgcgagcaccaagagaatgccagaatttatacatttttctcctctgaaaccatacaaagggagggaatgggagaaggcggggagcgagcacgtgctggaaacccaccttttgccagttggccacggacagagcgaaggggagaggatggtagtgtctgacttccacgttttcgtcagggatgtgttgcagcatgtggattccatgcagaaagactaccctgggcttcctgtcttccttctgggccactccatgggaggcgccatcgccatcctcacggccgcagagaggccgggccacttcgccggcatggtactcatttcgcctctggttcttgccaatcctgaatctgcaacaactttcaaggtccttgctgcgaaagtgctcaaccttgtgctgccaaacttgtccctcgggcccatcgactccagcgtgctctctcggaataagacagaggtcgacatttataactcagaccccctgatctgccgggcagggctgaaggtgtgcttcggcatccaactgctgaatgccgtctcacgggtggagcgcgccctccccaagctgactgtgcccttcctgctgctccagggctctgccgatcgcctatgtgacagcaaaggggcctacctgctcatggagttagccaagagccaggacaagactctcaagatttatgaaggtgcctaccatgttctccacaaggagcttcctgaagtcaccaactccgtcttccatgaaataaacatgtgggtctctcaaaggacagccacggcaggaactgcgtccccaccctgaatgcattggccggtgcccggctcatggtctgggggatgcaggcaggggaagggcagagatggcttctcagatatggcttgc

SEQ ID NO: 12598 - DNA, 653 bp, Homo sapiens
  source 1..653: mol_type = unassigned DNA
ccagttggccacggacagagcgaaggggagaggatggtagtgtctgacttccacgttttcgtcagggatgtgttgcagcatgtggattccatgcagaaagactaccctgggcttcctgtcttccttctgggccactccatgggaggcgccatcgccatcctcacggccgcagagaggccgggccacttcgccggcatggtactcatttcgcctctggttcttgccaatcctgaatctgcaacaactttcaaggtcgacatttataactcagaccccctgatctgccgggcagggctgaaggtgtgcttcggcatccaactgctgaatgccgtctcacgggtggagcgcgccctccccaagctgactgtgcccttcctgctgctccagggctctgccgatcgcctatgtgacagcaaaggggcctacctgctcatggagttagccaagagccaggacaagactctcaagatttatgaaggtgcctaccatgttctccacaaggagcttcctgaagtcaccaactccgtcttccatgaaataaacatgtgggtctctcaaaggacagccacggcaggaactgcgtccccaccctgaatgcattggccggtgcccggctcatggtctgggggatgcaggcaggggaagggcagaga

SEQ ID NO: 12599 - DNA, 446 bp, Homo sapiens
  source 1..446: mol_type = unassigned DNA
ggtagtttcagaggagttctggaagcatcagaaatcccatgactgggccctcatctttgtgtcccatggagccggagagcacagtggccgctatgaagagctggctcggatgctgatggggctggacctgctggtgttcgcccacgaccatgttggccacggacagagcgaaggggagaggatggtagtgtctgacttccacgttttcgtcagggatgtgttgcagcatgtggattccatgcagaaagactaccctgggcttcctgtcttccttctgggccactccatgggaggcgccatcgccatcctcacggccgcagagaggccgggccacttcgccggcatggtactcatttcgcctctggttcttgccaatcctgaatctgcaacaactttcaaggtccttgctgcgaaagtgctcaaccttgtgctgccaaacttgtccc

SEQ ID NO: 12600 - DNA, 1059 bp, Homo sapiens
  source 1..1059: mol_type = unassigned DNA
gtcgccgcgaagccggtcgcgcgcagctcgtcccggccctggcccgccgcaaacgaggatccgctgcgctcggggaacgcgacagcggcgctcgtggccccggacctgaagacccttccagcatgccagaggaaagttcccccaggcggaccccgcagagcattccctaccaggacctccctcacctggtcaatgcagacggacagtacctcttctgcaggtactggaaacccacaggcacacccaaggccctcatctttgtgtcccatggagccggagagcacagtggccgctatgaagagctggctcggatgctgatggggctggacctgctggtgttcgcccacgaccatgttggccacggacagagcgaaggggagaggatggtagtgtctgacttccacgttttcgtcagggatgtgttgcagcatgtggattccatgcagaaagactaccctgggcttcctgtcttccttctgggccactccatgggaggcgccatcgccatcctcacggccgcagagaggccgggccacttcgccggcatggtactcatttcgcctctggttcttgccaatcctgaatctgcaacaactttcaaggactattcgaggattttgaaacacttgatggaaaaggcatcaagaatgttaaagttttggattccacgtcctttttgggtgagcaactcccctctgaggcttccctggtgtgctcacagctcaggatggaggttgtgggagagcaggagcagcagtcatctggtcgacctcgacaatgtgatccatctgggtgcgggacctgccatgactccttccttccccactgcttcctcgtcatgccgcctcaatggcccctgctcaaccgttctgctttccttcatgcacaatcaacccacttcctctgcttagctctttctcctcccatcctaccctttcctccttcaggagagattaggctcatgaaatcaacaaatcttaaaagagcagcagggaaaggggatctcttttgcagttgttcaaaacatcctgcccctgcatggcagctctcctctttctt

SEQ ID NO: 12601 - DNA, 556 bp, Homo sapiens
  source 1..556: mol_type = unassigned DNA
tgatccagctcaacgacctgtctgtctgcattaacagtagcctgaattatgacagtagtggctgtgctcccaaagggggttaaagtacttgagctatcccttctggaagcacagccccttttgaagacagaagatgctgactaattagcagttccagccgtgctcctcagtagccaagggaaatgcaggaaagaaatcccatcagccaatcccagaaatatcagggccctcatctttgtgtcccatggagccggagagcacagtggccgctatgaagagctggctcggatgctgatggggctggacctgctggtgttcgcccacgaccatgttggccacggacagagcgaaggggagaggatggtagtgtctgacttccacgttttcgtcagggatgtgttgcagcatgtggattccatgcagaaagactaccctgggcttcctgtcttccttctgggccactccatgggaggcgccatcgccatcctcacggccgcagagaggccgggccacttcgccggcatggtactcatttcgcctctggttcttgccaatc

SEQ ID NO: 12602 - DNA, 186 bp, Homo sapiens
  source 1..186: mol_type = unassigned DNA
agctttcaggctcctttaggactctgatctttcaatgatctgaagaaagctcatactgaaagggccctcatctttgtgtcccatggagccggagagcacagtggccgctatgaagagctggctcggatgctgatggggctggacctgctggtgttcgcccacgaccatgttggccacggacagagc

SEQ ID NO: 12603 - DNA, 410 bp, Homo sapiens
  source 1..410: mol_type = unassigned DNA
acagctaaaatagtctttaagatgaagtttcctgaaatgatttaaaataaacacagatgggaagggggaaaaactgtaatgaggcacttaaaaaataaagtgagcattttcttaagaacaaatgggatttttcagtcttggagaggtttgcaagaaatgacctgaagacccttccagcatgccagaggaaagttcccccaggcggaccccgcagagcattccctaccaggacctccctcacctggtcaatgcagacggacagtacctcttctgcaggtactggaaacccacaggcacacccaaggccctcatctttgtgtcccatggagccggagagcacagtggccgctatgaagagctggctcggatgctgatggggctggacctgctggtgttcgcccacgaccatg

SEQ ID NO: 12604 - DNA, 4642 bp, Homo sapiens
  source 1..4642: mol_type = unassigned DNA
cccaaaccaacttgtccccatcaactccatctttctagtccccaccttccccggtgcagacacccggcgaagcccacccggttttcccagcggcatttccgatgacagcttcggggctacgtgtcctgtgctgtcggagacgcacaggaagcaaagtttgtgagaagccttgggggcgactttgccttgggcacccgcatttgtgcgtctgcgaggtgcctcggtgtgcgcggagctagtttcccagtttcccgggcccctcccttctccgagcccctctagcgatttgtttaggaaaagtgatgacatgaactagtagtggagaatcgcagcgccgctccccgccctggggagggaggggagccccggagagcctgccggtgggagctggaagcaggctcccggctgagcgccccagcccgaaaggcagggtctgggtgcgggaagagggctcggagctgccttcctgctgccttggggccgcccagatgagggaacagcccgatttgcctggttctgattctccaggctgtcgtggttgtggaatgcaaacgccagcacataatggaaacaggacctgaagacccttccagcatgccagaggaaagttcccccaggcggaccccgcagagcattccctaccaggacctccctcacctggtcaatgcagacggacagtacctcttctgcaggtactggaaacccacaggcacacccaaggccctcatctttgtgtcccatggagccggagagcacagtggccgctatgaagagctggctcggatgctgatggggctggacctgctggtgttcgcccacgaccatgttggccacggacagagcgaaggggagaggatggtagtgtctgacttccacgttttcgtcagggatgtgttgcagcatgtggattccatgcagaaagactaccctgggcttcctgtcttccttctgggccactccatgggaggcgccatcgccatcctcacggccgcagagaggccgggccacttcgccggcatggtactcatttcgcctctggttcttgccaatcctgaatctgcaacaactttcaaggtccttgctgcgaaagtgctcaaccttgtgctgccaaacttgtccctcgggcccatcgactccagcgtgctctctcggaataagacagaggtcgacatttataactcagaccccctgatctgccgggcagggctgaaggtgtgcttcggcatccaactgctgaatgccgtctcacgggtggagcgcgccctccccaagctgactgtgcccttcctgctgctccagggctctgccgatcgcctatgtgacagcaaaggggcctacctgctcatggagttagccaagagccaggacaagactctcaagatttatgaaggtgcctaccatgttctccacaaggagcttcctgaagtcaccaactccgtcttccatgaaataaacatgtgggtctctcaaaggacagccacggcaggaactgcgtccccaccctgaatgcattggccggtgcccggctcatggtctgggggatgcaggcaggggaagggcagagatggcttctcagatatggcttgccaaaaaaaaaaaaaaaaaaaaatcagaaattggagaaatccttagcacaattttctaaaaaataacagacatttttgttatacattagactatcagacactggacctaccttaatggttagacactttatgcaaaaaaagagaaaggtcccaggtgattttccacaaagaatgtgctaaaatgtccactgaaaacaaagccaagcctctgccctgcctctcccagctcccacaagggttccaggaattcctggtgttcccaggacaccagactgcaataactggaggcgcctccttcctgcccacccttcgctcacgccccagcgccctctctgaccagcctccgcttggtggccttcctctggccgtgtgatgaggtggttgctgtctccataggggccagctccccagggcagactcacgtgcccctctgaggctcagaaaatgcccagcccttcctcaaaatgagcagccacccatgactttgtgggctccttgttagcctgagaccaggctttgcagaggggcggggggtgaggcttagcccagaaggagaactgagcaggaaaccaaggctcttctctgtcccctgcccttcccctcctgccagggggaggctcaggttggtccccgagtgccgcctgtactcacaaaggctgcctttcctctagagtcactaattttacctgatgctatgagagaatcatattgaagatgaaatgtctaatatataatgtatattttaaagcagagactattttggtggataggtgggagggagcaaggggagtttgagggaatcagagcttgatgctactgtacagaactggacaggttgggccggcagtggtggggccagagggctctgtgctctaggagctaagccagcagcccccgagaggggacttggctgggcctttcctatgggcaaggcccagtgctcttcctgcccaccagggaccatggagcagtggcaccctatggggctatgatccctaggcctgggcctgggcctgcctatggcccagagctaccctgggagtgtcagtgctagcagcacagctacctctggtggcaggagaagagaggcccagcacagcagcaggccaggccttcctgtccaggtctgcatggagcactcggtgacccagagcagggactggaggcacccccagccctgccccaggccacagcaggacaggccgggacaggcctcacccaaggccaaggctggcatcagccaatcattcagagctgaggccctgggcctagcctgcccttctcaggtgccaataccaccccagccctgcccttggcctcactttttcccagcaataagtggggttcaccacccgcctcgggaatactttccccttctaaatgggacttgctgttacctcaggaggctccttagtgcaaatatgaccctggtcagggctttgccaccgttgaagccctgcagaaggtgcaatgtaggggttctggggccacagaggagaggccacttcccaccaggacccccaacatgaagtctaggcctcaggggctcccgcccttcttcctccagcagcgggaactgccactgctctcccaggccctgttctggaggctaaccttggttcctggagagtgtgcccctccaccctccctccagcagccctgatcacaccatgagagccaggaacgggtcaccctgctgaagatcactctgtgccctgggggaggagccaagccctcaccccacaaggggcaggtgggggcttggttgctgacccggcccaagtccccacagagcaccttctgtagctccagcttgtctccctggcttctctttgaaggagaaaaatgtaaaatatgcactgagaaagccagccccgcctgcttagtcagccccggcagcagggcagccatgggaactcaggaaaagcaggaaccctttccaaaagcccagagatgccctgggctcagatctgtaattctcccaggagctgtgatagagcaggccacacaaagtccctacgcctccctgctgcctcccccagatgcatgtggtggcatcaccattccccaaattgaatatcagcatgcggcctgaccagggactctttagatgcatgaatttatttatatgaaggctctcacagagacacacacagcacttcagtagcatttgcattcctggttaaagaatcaccaatatttaaaataaaaactttcctgaaattgggactgtcatgttatccagaagggctggtacatccgcccaccatgtccccctgctgggtcaggagccaacacaggaccctgcgtgtgagcgtgcctgacatctcacgcacggccactccagagccggtccctgtccttggaaagctgtgaagccttgcgttgagttccttctcgatactgacggctccgtgctgacattctgagctctggagtcacaccagcgcaggggcgtggaggaactgaggtttggaaggaatgccaggtctcgcacagcttggcctcgagaaggtgagaggaaggcaaaggccagggaggggacccagagaggcctggcacacaaggcccaagcaccaccgtcaacacagcccagtccatacagaaatgggtttcatgcctgaaaagctttttacagaaagatgccgcctgtagccagtgacagccgcaaccctacaggcctcagttccttgcagaggtgaggggtagagagtcagcctccctcccttccagcagcgacccagcttccctccacttccaggtggtgctgggctcaccgagggagcactggtgggtgctctgaaaacccacaggatcccacctccaggcccacctgggtcccatctcactctcttcttctttcaccaattgctaacatagaccttgttgggatcacgatggcttcacaagccagctgttgggtttgctatgtcactgtggctcagtcacatccctgcgtgtatactgtctgcggggcacatatgtatccatttagagctaaaggaatcagtgtacactacagctaatcctaataaatccgatgttttcggaatggc

SEQ ID NO: 12605 - DNA, 4235 bp, Homo sapiens
  source 1..4235: mol_type = unassigned DNA
acctcgggccgcccccgccgccgagccggcccagggataaagtggcggcgcagacgccgcaccctgtcgccgcgaagccggtcgcgcgcagctcgtcccggccctggcccgccgcaaacgaggatccgctgcgctcggggaacgcgacagcggcgctcgtggccccggacctgaagacccttccagcatgccagaggaaagttcccccaggcggaccccgcagagcattccctaccaggacctccctcacctggtcaatgcagacggacagtacctcttctgcaggtactggaaacccacaggcacacccaaggccctcatctttgtgtcccatggagccggagagcacagtggccgctatgaagagctggctcggatgctgatggggctggacctgctggtgttcgcccacgaccatgttggccacggacagagcgaaggggagaggatggtagtgtctgacttccacgttttcgtcagggatgtgttgcagcatgtggattccatgcagaaagactaccctgggcttcctgtcttccttctgggccactccatgggaggcgccatcgccatcctcacggccgcagagaggccgggccacttcgccggcatggtactcatttcgcctctggttcttgccaatcctgaatctgcaacaactttcaaggtccttgctgcgaaagtgctcaaccttgtgctgccaaacttgtccctcgggcccatcgactccagcgtgctctctcggaataagacagaggtcgacatttataactcagaccccctgatctgccgggcagggctgaaggtgtgcttcggcatccaactgctgaatgccgtctcacgggtggagcgcgccctccccaagctgactgtgcccttcctgctgctccagggctctgccgatcgcctatgtgacagcaaaggggcctacctgctcatggagttagccaagagccaggacaagactctcaagatttatgaaggtgcctaccatgttctccacaaggagcttcctgaagtcaccaactccgtcttccatgaaataaacatgtgggtctctcaaaggacagccacggcaggaactgcgtccccaccctgaatgcattggccggtgcccggctcatggtctgggggatgcaggcaggggaagggcagagatggcttctcagatatggcttgccaaaaaaaaaaaaaaaaaaaaatcagaaattggagaaatccttagcacaattttctaaaaaataacagacatttttgttatacattagactatcagacactggacctaccttaatggttagacactttatgcaaaaaaagagaaaggtcccaggtgattttccacaaagaatgtgctaaaatgtccactgaaaacaaagccaagcctctgccctgcctctcccagctcccacaagggttccaggaattcctggtgttcccaggacaccagactgcaataactggaggcgcctccttcctgcccacccttcgctcacgccccagcgccctctctgaccagcctccgcttggtggccttcctctggccgtgtgatgaggtggttgctgtctccataggggccagctccccagggcagactcacgtgcccctctgaggctcagaaaatgcccagcccttcctcaaaatgagcagccacccatgactttgtgggctccttgttagcctgagaccaggctttgcagaggggcggggggtgaggcttagcccagaaggagaactgagcaggaaaccaaggctcttctctgtcccctgcccttcccctcctgccagggggaggctcaggttggtccccgagtgccgcctgtactcacaaaggctgcctttcctctagagtcactaattttacctgatgctatgagagaatcatattgaagatgaaatgtctaatatataatgtatattttaaagcagagactattttggtggataggtgggagggagcaaggggagtttgagggaatcagagcttgatgctactgtacagaactggacaggttgggccggcagtggtggggccagagggctctgtgctctaggagctaagccagcagcccccgagaggggacttggctgggcctttcctatgggcaaggcccagtgctcttcctgcccaccagggaccatggagcagtggcaccctatggggctatgatccctaggcctgggcctgggcctgcctatggcccagagctaccctgggagtgtcagtgctagcagcacagctacctctggtggcaggagaagagaggcccagcacagcagcaggccaggccttcctgtccaggtctgcatggagcactcggtgacccagagcagggactggaggcacccccagccctgccccaggccacagcaggacaggccgggacaggcctcacccaaggccaaggctggcatcagccaatcattcagagctgaggccctgggcctagcctgcccttctcaggtgccaataccaccccagccctgcccttggcctcactttttcccagcaataagtggggttcaccacccgcctcgggaatactttccccttctaaatgggacttgctgttacctcaggaggctccttagtgcaaatatgaccctggtcagggctttgccaccgttgaagccctgcagaaggtgcaatgtaggggttctggggccacagaggagaggccacttcccaccaggacccccaacatgaagtctaggcctcaggggctcccgcccttcttcctccagcagcgggaactgccactgctctcccaggccctgttctggaggctaaccttggttcctggagagtgtgcccctccaccctccctccagcagccctgatcacaccatgagagccaggaacgggtcaccctgctgaagatcactctgtgccctgggggaggagccaagccctcaccccacaaggggcaggtgggggcttggttgctgacccggcccaagtccccacagagcaccttctgtagctccagcttgtctccctggcttctctttgaaggagaaaaatgtaaaatatgcactgagaaagccagccccgcctgcttagtcagccccggcagcagggcagccatgggaactcaggaaaagcaggaaccctttccaaaagcccagagatgccctgggctcagatctgtaattctcccaggagctgtgatagagcaggccacacaaagtccctacgcctccctgctgcctcccccagatgcatgtggtggcatcaccattccccaaattgaatatcagcatgcggcctgaccagggactctttagatgcatgaatttatttatatgaaggctctcacagagacacacacagcacttcagtagcatttgcattcctggttaaagaatcaccaatatttaaaataaaaactttcctgaaattgggactgtcatgttatccagaagggctggtacatccgcccaccatgtccccctgctgggtcaggagccaacacaggaccctgcgtgtgagcgtgcctgacatctcacgcacggccactccagagccggtccctgtccttggaaagctgtgaagccttgcgttgagttccttctcgatactgacggctccgtgctgacattctgagctctggagtcacaccagcgcaggggcgtggaggaactgaggtttggaaggaatgccaggtctcgcacagcttggcctcgagaaggtgagaggaaggcaaaggccagggaggggacccagagaggcctggcacacaaggcccaagcaccaccgtcaacacagcccagtccatacagaaatgggtttcatgcctgaaaagctttttacagaaagatgccgcctgtagccagtgacagccgcaaccctacaggcctcagttccttgcagaggtgaggggtagagagtcagcctccctcccttccagcagcgacccagcttccctccacttccaggtggtgctgggctcaccgagggagcactggtgggtgctctgaaaacccacaggatcccacctccaggcccacctgggtcccatctcactctcttcttctttcaccaattgctaacatagaccttgttgggatcacgatggcttcacaagccagctgttgggtttgctatgtcactgtggctcagtcacatccctgcgtgtatactgtctgcggggcacatatgtatccatttagagctaaaggaatcagtgtacactacagctaatcctaataaatccgatgttttcggaatggc

SEQ ID NO: 12606 - DNA, 4552 bp, Homo sapiens
  source 1..4552: mol_type = unassigned DNA
cccaaaccaacttgtccccatcaactccatctttctagtccccaccttccccggtgcagacacccggcgaagcccacccggttttcccagcggcatttccgatgacagcttcggggctacgtgtcctgtgctgtcggagacgcacaggaagcaaagtttgtgagaagccttgggggcgactttgccttgggcacccgcatttgtgcgtctgcgaggtgcctcggtgtgcgcggagctagtttcccagtttcccgggcccctcccttctccgagcccctctagcgatttgtttaggaaaagtgatgacatgaactagtagtggagaatcgcagcgccgctccccgccctggggagggaggggagccccggagagcctgccggtgggagctggaagcaggctcccggctgagcgccccagcccgaaaggcagggtctgggtgcgggaagagggctcggagctgccttcctgctgccttggggccgcccagatgagggaacagcccgatttgcctggttctgattctccaggctgtcgtggttgtggaatgcaaacgccagcacataatggaaacaggacctgaagacccttccagcatgccagaggaaagttcccccaggcggaccccgcagagcattccctaccaggacctccctcacctggtcaatgcagacggacagtacctcttctgcaggtactggaaacccacaggcacacccaaggccctcatctttgtgtcccatggagccggagagcacagtggccgctatgaagagctggctcggatgctgatggggctggacctgctggtgttcgcccacgaccatgttggccacggacagagcgaaggggagaggatggtagtgtctgacttccacgttttcgtcagggatgtgttgcagcatgtggattccatgcagaaagactaccctgggcttcctgtcttccttctgggccactccatgggaggcgccatcgccatcctcacggccgcagagaggccgggccacttcgccggcatggtactcatttcgcctctggttcttgccaatcctgaatctgcaacaactttcaaggtcgacatttataactcagaccccctgatctgccgggcagggctgaaggtgtgcttcggcatccaactgctgaatgccgtctcacgggtggagcgcgccctccccaagctgactgtgcccttcctgctgctccagggctctgccgatcgcctatgtgacagcaaaggggcctacctgctcatggagttagccaagagccaggacaagactctcaagatttatgaaggtgcctaccatgttctccacaaggagcttcctgaagtcaccaactccgtcttccatgaaataaacatgtgggtctctcaaaggacagccacggcaggaactgcgtccccaccctgaatgcattggccggtgcccggctcatggtctgggggatgcaggcaggggaagggcagagatggcttctcagatatggcttgccaaaaaaaaaaaaaaaaaaaaatcagaaattggagaaatccttagcacaattttctaaaaaataacagacatttttgttatacattagactatcagacactggacctaccttaatggttagacactttatgcaaaaaaagagaaaggtcccaggtgattttccacaaagaatgtgctaaaatgtccactgaaaacaaagccaagcctctgccctgcctctcccagctcccacaagggttccaggaattcctggtgttcccaggacaccagactgcaataactggaggcgcctccttcctgcccacccttcgctcacgccccagcgccctctctgaccagcctccgcttggtggccttcctctggccgtgtgatgaggtggttgctgtctccataggggccagctccccagggcagactcacgtgcccctctgaggctcagaaaatgcccagcccttcctcaaaatgagcagccacccatgactttgtgggctccttgttagcctgagaccaggctttgcagaggggcggggggtgaggcttagcccagaaggagaactgagcaggaaaccaaggctcttctctgtcccctgcccttcccctcctgccagggggaggctcaggttggtccccgagtgccgcctgtactcacaaaggctgcctttcctctagagtcactaattttacctgatgctatgagagaatcatattgaagatgaaatgtctaatatataatgtatattttaaagcagagactattttggtggataggtgggagggagcaaggggagtttgagggaatcagagcttgatgctactgtacagaactggacaggttgggccggcagtggtggggccagagggctctgtgctctaggagctaagccagcagcccccgagaggggacttggctgggcctttcctatgggcaaggcccagtgctcttcctgcccaccagggaccatggagcagtggcaccctatggggctatgatccctaggcctgggcctgggcctgcctatggcccagagctaccctgggagtgtcagtgctagcagcacagctacctctggtggcaggagaagagaggcccagcacagcagcaggccaggccttcctgtccaggtctgcatggagcactcggtgacccagagcagggactggaggcacccccagccctgccccaggccacagcaggacaggccgggacaggcctcacccaaggccaaggctggcatcagccaatcattcagagctgaggccctgggcctagcctgcccttctcaggtgccaataccaccccagccctgcccttggcctcactttttcccagcaataagtggggttcaccacccgcctcgggaatactttccccttctaaatgggacttgctgttacctcaggaggctccttagtgcaaatatgaccctggtcagggctttgccaccgttgaagccctgcagaaggtgcaatgtaggggttctggggccacagaggagaggccacttcccaccaggacccccaacatgaagtctaggcctcaggggctcccgcccttcttcctccagcagcgggaactgccactgctctcccaggccctgttctggaggctaaccttggttcctggagagtgtgcccctccaccctccctccagcagccctgatcacaccatgagagccaggaacgggtcaccctgctgaagatcactctgtgccctgggggaggagccaagccctcaccccacaaggggcaggtgggggcttggttgctgacccggcccaagtccccacagagcaccttctgtagctccagcttgtctccctggcttctctttgaaggagaaaaatgtaaaatatgcactgagaaagccagccccgcctgcttagtcagccccggcagcagggcagccatgggaactcaggaaaagcaggaaccctttccaaaagcccagagatgccctgggctcagatctgtaattctcccaggagctgtgatagagcaggccacacaaagtccctacgcctccctgctgcctcccccagatgcatgtggtggcatcaccattccccaaattgaatatcagcatgcggcctgaccagggactctttagatgcatgaatttatttatatgaaggctctcacagagacacacacagcacttcagtagcatttgcattcctggttaaagaatcaccaatatttaaaataaaaactttcctgaaattgggactgtcatgttatccagaagggctggtacatccgcccaccatgtccccctgctgggtcaggagccaacacaggaccctgcgtgtgagcgtgcctgacatctcacgcacggccactccagagccggtccctgtccttggaaagctgtgaagccttgcgttgagttccttctcgatactgacggctccgtgctgacattctgagctctggagtcacaccagcgcaggggcgtggaggaactgaggtttggaaggaatgccaggtctcgcacagcttggcctcgagaaggtgagaggaaggcaaaggccagggaggggacccagagaggcctggcacacaaggcccaagcaccaccgtcaacacagcccagtccatacagaaatgggtttcatgcctgaaaagctttttacagaaagatgccgcctgtagccagtgacagccgcaaccctacaggcctcagttccttgcagaggtgaggggtagagagtcagcctccctcccttccagcagcgacccagcttccctccacttccaggtggtgctgggctcaccgagggagcactggtgggtgctctgaaaacccacaggatcccacctccaggcccacctgggtcccatctcactctcttcttctttcaccaattgctaacatagaccttgttgggatcacgatggcttcacaagccagctgttgggtttgctatgtcactgtggctcagtcacatccctgcgtgtatactgtctgcggggcacatatgtatccatttagagctaaaggaatcagtgtacactacagctaatcctaataaatccgatgttttcggaatggc

SEQ ID NO: 12607 - DNA, 1405 bp, Homo sapiens
  source 1..1405: mol_type = unassigned DNA
tctcccactggttcctcccctctcaactgctctggttcttataaaaacctcacagccttccactaacatcccgtaggagcctctctccctactgctgctacacaagaccctgagactgacctgcaggacgaaaccatgaagagcctgatccttcttgccatcctggccgccttagcggtagtaactttgtgttatgaatcacatgaaagcatggaatcttatgaacttaatcccttcattaacaggagaaatgcaaataccttcatatcccctcagcagagatggagagctaaagtccaagagaggatccgagaacgctctaagcctgtccacgagctcaatagggaagcctgtgatgactacagactttgcgaacgctacgccatggtttatggatacaatgctgcctataatcgctacttcaggaagcgccgagggaccaaatgagactgagggaagaaaaaaaatctctttttttctggaggctggcacctgattttgtatccccctgtagcagcattacagaaatacataggcttatatacaatgcttctttcctgtatattctcttgtctggctgcacccctttttcccgcccccagattgataagtaatgaaagtgcactgcagtgagggtcaaaggagagtcaacatatgtgattgttccataataaacttctggtgtgatactttcatcttgtaaatctgctttcttttgggaagatattgagatatttaaatcatggcccaccttacccaaaataggagattctgttcatctcatatctagtattaattagaaaaataactacataaaaagaaggaagctaagaaggcactcactcagccataaattctctaaaccctctctaccttggaatccgtgaatggaatctggtatgttttttgcaggattttcctattgtaaattgtggcaaatacagggctcccttcatttgcttttcatctcttatgcatcaaagtcaaaaacatttctgaatcaagataatctagaagagaaaaaaggaggaaaaggaaaagagaaagcagaagggacaaataaaagcaattggcaaaaactgtcaataatagtttatacacttaactatatcaataatcacattatatgtaaatagtctaaacaatccaattattttttacttctacttatgttatatttttacttctacatttgttaaaggttccacgctacatttttactattcttgctttaaataattttaataatttcttttaaagtttagataataagaaaatatcccgggccaggcacagtggccacacctgtaatctcagtagccatgaccataccaatgcactccagcctgtgaaacagagtgagactctgtctctacagaaaaataaaaaagaaaagaaagaaaag

SEQ ID NO: 12608 - DNA, 423 bp, Homo sapiens
  source 1..423: mol_type = unassigned DNA
aatcacatgaaagcatggaatcttatgaacttagatccgagaacgctctaagcctgtccacgagctcaatagggaagcctgtgatgactacagactttgcgaacgctacgccatggtttatggatacaatgctgcctataatcgctacttcaggaagcgccgagggaccaaatgagactgagggaagaaaaaaaatctctttttttctggaggctggcacctgattttgtatccccctgtagcagcattacagaaatacataggcttatatacaatgcttctttcctgtatattctcttgtctggctgcacccctttttcccgcccccagattgataagtaatgaaagtgcactgcagtgagggtcaaaggagagtcaacatatgtgattgttccataataaacttctggtgtgatactttca

SEQ ID NO: 12609 - DNA, 694 bp, Homo sapiens
  source 1..694: mol_type = unassigned DNA
cccgtaggagcctctctccctactgctgctacacaagaccctgagactgacctgcaggacgaaaccatgaagagcctgatccttcttgccatcctggccgccttagcggtagtaactttgtgttatggagagtggcagaaagaagaaaacttcggctttgatatcgtttcagttctctctctgaactggcatcgtgcccaggaatcacatgaaagcatggaatcttatgaacttaatcccttcattaacaggagaaatgcaaataccttcatatcccctcagcagagatggagagctaaagtccaagagaggatccgagaacgctctaagcctgtccacgagctcaatagggaagcctgtgatgactacagactttgcgaacgctacgccatggtttatggatacaatgctgcctataatcgctacttcaggaagcgccgagggaccaaatgagactgagggaagaaaaaaaatctctttttttctggaggctggcacctgattttgtatccccctgtagcagcattacagaaatacataggcttatatacaatgcttctttcctgtatattctcttgtctggctgcacccctttttcccgcccccagattgataagtaatgaaagtgcactgcagtgagggtcaaaggagagtcaacatatgtgattgttccataataaacttctggtgtgat

SEQ ID NO: 12610 - DNA, 1316 bp, Homo sapiens
  source 1..1316: mol_type = unassigned DNA
gtaggagcctctctccctactgctgctacacaagaccctgagactgacctgcaggacgaaaccatgaagagcctgatccttcttgccatcctggccgccttagcggtagtaactttgtgttatgaatcacatgaaagcatggaatcttatgaacttagtaagtgaatatttaacttctttattcaaatcccttgcattaaagaacctcttcttatttttaaataaacaagatggaaagatatataacagggagggaaaagggggcctcttttggaaaactaaagtaaatttttaaatctaatgactataaaaattgccaaaggagcaattttttaagtttgaagtagtgcaatatgggatttaagctacaggcgacatatttagaagccataaaatctcatttggaaattttaaattggcaccacgtcaactgcacagatggaaaacgaggagtaatgacaaatggtaaagcacagagctggacgccaagtcagctgggagaccacaggcgccacgttaagctgagtgctgttttggtttttttgtgtttttctttcttgtttttttttttgagacagtgtctcactctgtcgcccaggctagagtgcagtggtgtgatctcggctcgccgcaacctccacctcccaggttcaggcaattctcatgcctcagcctcctgagtagctgggattacaggcccatgacatcatgcctggctaatttttgtatttttagtagagatggggtttcaccatgttgtccaggctggtctcgaactcctggcctcaagtgatccacccaccacagcctcccaaagtgccgggattacaggcatgagccaccacacccagccagctgattgctgttgaatagctggatttataaagactgagcataggaggaaatggcacatcactctcatttttaatttattcattatttttatagtgtttaaactgttcatgtatcggcaatctagttatgcttcataaatcctcaggacagagaatttctcctcaaaaggaatttaaaatctaccaagtagaaatacagaaattaagaaaggcaaagtgatcgtccaaactcaaaaccaacaaagcctatatgacaagtctctaagacacatggattgattactgatttcatttgatcaggaagttaatgaaatctactttatactctcctttaatttttgccaatctccgtttatatgagttgcataagttaaggcactttcaaatatatttgtgtcaaggaatattcacggaaatatttccagctatgtgtcgctaaaactgcatttatttattttctgt

SEQ ID NO: 12611 - DNA, 298 bp, Homo sapiens
  source 1..298: mol_type = unassigned DNA
tcgtgacaaagcaaattgtctggtatcatgaatttggaacaccattccagaccaaaattgaaaaaatggttgacctcacccaggtaatggatgatgaagtattcatggcttttgcatcctatgcaacaattattctttcaaaaatgatgcttatgagtactgcaactgcattctatagattgacaagaaaggtttttgccaatccagaagactgtgtagcatttggcaaaggagaaaatgccaagaagtatcttcgaacagatgacagagtagaacgtgtacgcagagcccacctgaa

SEQ ID NO: 12612 - DNA, 279 bp, Homo sapiens
  source 1..279: mol_type = unassigned DNA
agtccctgcattgcgcgcgacccggcggcgggacaggcttgctgcttcctcctcctcggcctcaccagtggtgtctatgaatccctgagattggaaaaggaggtcaggtcagcacagagaaaggccttaccccaccactctcccgagaggcaccagcatttcacctgcagcctctgggctctgaaccccactttgcatgagaccacatagtgggctgagtctgcagccaccacgatgccttcaggaaatgctagaattcatctagagttccagattaac

SEQ ID NO: 12613 - DNA, 406 bp, Homo sapiens
  source 1..406: mol_type = unassigned DNA
agtccctgcattgcgcgcgacccggcggcgggacaggcttgctgcttcctcctcctcggcctcaccattccagaccaaaattgaaaaaatggttgacctcacccaggtttttgccaatccagaagactgtgtagcatttggcaaaggagaaaatgccaagaagtatcttcgaacagatgacagagtagaacgtgtacgcagagcccacctgaatgaccttgaaaatattattccatttcttggaattggcctcctgtattccttgagtggtcccgacccctctacagccatcctgcacttcagactatttgtcggagcacggatctaccacaccattgcatatttgacaccccttccccagccaaatagagctttgagtttttttgttggatatggagttactctt

SEQ ID NO: 12614 - DNA, 914 bp, Homo sapiens
  source 1..914: mol_type = unassigned DNA
cctgcattgcgcgcgacccggcggcgggacaggcttgctgcttcctcctcctcggcctcaccattccagaccaaaattgaaaaaatggttgacctcacccaggtaatggatgatgaagtattcatggcttttgcatcctatgcaacaattattctttcaaaaatgatgcttatgagtactgcaactgcattctatagattgacaagaaaggtttttgccaatccagaagactgtgtagcatttggcaaaggagaaaatgccaagaagtatcttcgaacagatgacagagtagaacgtgtacgcagagcccacctgaatgaccttgaaaatattattccatttcttggaattggcctcctgtattccttgagtggtcccgacccctctacagccatcctgcacttcagactatttgtcggagcacggatctaccacaccattgcatatttgacaccccttccccagccaaatagagctttgagtttttttgttggatatggagttactctttccatggcttacaggttgctgaaaagtaaattgtacctgtaaagaaaatcatacaactcagcatccagttggctttttaagaattctgtacttccaatttataatgaatactttcttagattttaggtaggaggggagcagaggaattatgaactggggtaaacccattttgaatattagcattgccaatatcctgtattcttgttttacatttggattagaaatttaacatagtaattcttaagtcttttgtctgatttttaaagtactttcttataaatttggatcatgttatgatttgtaacattcacacaacacctcacttttgaatctataaaagaattgcacgtatgagaaacctatatttcaatactgctgaaacagacatgaaataaagaatttaa

SEQ ID NO: 12615 - DNA, 566 bp, Homo sapiens
  source 1..566: mol_type = unassigned DNA
gcattgcgcgcgacccggcggcgggacaggcttgctgcttcctcctcctcggcctcaccattccagaccaaaattgaaaaaatggttgacctcacccaggtaatggatgatgaagtattcatggcttttgcatcctatgcaacaattattctttcaaaaatgatgcttatgagtactgcaactgcattctatagattgacaagaaaggtttttgccaatccagaagactgtgtagcatttggcaaaggagaaaatgccaagaagtatcttcgaacagatgacagagtagaacgtgtacgcaggatggagtgcaatggcatgatctcagctcaccgcaacctctgcctcccggattcaagtgattctcctgcctcagcctcttgagtagctgggattacagaaaaaatcatcagaaaaaccccgtgcagatgaagaggcttgccacttaatgtactgcacagatgtgatcatcagcggttgccgacaatgaaatatacaagtgcacacaaagtgatctggtgaacaagaggtggaatttaatcatcttctgctgacactttgcgaaa

SEQ ID NO: 12616 - DNA, 551 bp, Homo sapiens
  source 1..551: mol_type = unassigned DNA
attgcgcgcgacccggcggcgggacaggcttgctgcttcctcctcctcggcctcaccattccagaccaaaattgaaaaaatggttgacctcacccaggtaatggatgatgaagtattcatggcttttgcatcctatgcaacaattattctttcaaaaatgatgcttatgagtactgcaactgcattctatagattgacaagaaaggtaagaaatttggaggtaatattttcttacttttaagagttggaattctggagagcagttttcttaattttctttttttatttttggtaaagcccaatagcacactgttttatgctgtaagtgaagtatgccatcgtttggcacagatggatctgatgtatttatggaacagttgctttctcctagaaactagtaaatggttttttcattatggcttttacctttttatcattctgctaagcagatgagatattctggaatatcaaagttttcacggaaactttctttcattttggaattaattttgccaatgagggtttagaaaacaatcattttctagacagtt

SEQ ID NO: 12617 - DNA, 933 bp, Homo sapiens
  source 1..933: mol_type = unassigned DNA
attgcgcgcgacccggcggcgggacaggcttgctgcttcctcctcctcggcctcaccgtttttgccaatccagaagactgtgtagcatttggcaaaggagaaaatgccaagaagtatcttcgaacagatgacagagtagaacgtgtacgcagggcacaggagatcttaggcccagaaaggcagattcagaagaacctacatgtaaatgagactggagtggaaatgagaatggcaggaaatgcatggaaacagacttgtaactgtctcatggcctggtcgtccaaatcccagagtaggttagcctgactgtgctatcacagcataggagcaagacaggaaatggaactgcataaatctcctttcaagagtctgcaatcattacatccaccaacatgcccttggccagagaaagtcacagggctggcctcagaactaaagtgctgggaaatggactcaaccccctcagggagatgaaccgcaaagtcacatggcacaggggcatggatgcacagagggatgaagatttaggccacttatacagtcaatctattgcacttgtccgctttgttatgctagtatgagtttcaattcagacacatgtaaaagcattttataaactttatgacattatgcaattaaaacagcatttattctaatgtgtcataattttatcagattagtggtaatctgtgatatgctcagtatgagagcaatagttacaaactaagtaaaaaacacaatacagggtttgtgaacttggccttctccctctcatttgcaatgtgctgccttaggaagacagatgggacaaggaacaaatatttggacagccttatcgcctctataactaagttggttcccaaactgtgcccagtctgttctcttgaaattataatatgcaccctgctcccaaccaagtgtttcatcaaattt

SEQ ID NO: 12618 - DNA, 700 bp, Homo sapiens
  source 1..700: mol_type = unassigned DNA
acccggcggcgggacaggcttgctgcttcctcctcctcggcctcaccattccagaccaaaattgaaaaaatggttgacctcacccaggtaatggatgatgaagtattcatggcttttgcatcctatgcaacaattattctttcaaaaatgatgcttatgagtactgcaactgcattctatagattgacaagaaaggtttttgccaatccagaagactgtgtagcatttggcaaaggagaaaatgccaagaagtatcttcgaacagatgacagagtagaacgtgtacgcagtcattgtaaagctgttacgattagcatatttgaacggcagagccagaatggggctacaaatgaagtgaaaagtatgctttaccgtgtgcaacaattgtgaaagttaatacatacacatatggaacaattaactaaaaacttaagagcccacctgaatgaccttgaaaatattattccatttcttggaattggcctcctgtattccttgagtggtcccgacccctctacagccatcctgcacttcagactatttgtcggagcacggatctaccacaccattgcatatttgacaccccttccccagccaaatagagctttgagtttttttgttggatatggagttactctttccatggcttacaggttgctgaaaagtaaattgtacctgtaaagaaaatcatacaactcag

SEQ ID NO: 12619 - DNA, 1331 bp, Homo sapiens
  source 1..1331: mol_type = unassigned DNA
tcctcctcggcctcaccattccagaccaaaattgaaaaaatggttgacctcacccaggtaatggatgatgaagtattcatggcttttgcatcctatgcaacaattattctttcaaaaatgatgcttatgagtactgcaactgcattctatagattgacaagaaaggtttttgccaatccagaagactgtgtagcatttggcaaaggagaaaatgccaagaagtatcttcgaacagatgacagagtagaacgtgtacgcagaatcaaacaaaccctgagcatttatcttgcctcttctatataaagtttaactcggcataaccaattgctgatgaagaagaaatgtttccttgtagaagcaaaccagtgaataattgaagaaaaaatttatcttttcaacatctaatgagttaatggattcaagcaaagattatccacggctgttaacaacacaaaaagacaatcggaaattagctattactgcgggaagtacccaataccatctatgaaactgtgtggacaaaaacactgacaaaaatctccacgaatctctaattttgaatacaaatttaaagaaaatgcaaaggattaaaatagaccatgatgaagtcagaaaaattcagacagagaaaaatgctccaggaccagaaacccatttcttccgcaaaagcttccaggtagagattgactgaccgagagaacagagacatagagagaacctagagattaaaagaaacttgagcgatttgtcagcattcagttgcaacgtatggatgtgatttgaattctaatttaaaaaccaaagtagaaagtggtaaacaattggggaaatgtgaacaatgatagaatatttaatattaatgaaatatgttaaatattttcagatatgataatggcattgagtatgtaaaaaagagcctgtttttaaagaaatacctctgaaatacagatgatataatatcatctgtatattagatgatattatatatatcagtatcatcagaataaagtaaggttagcatgaattgttaattgttgacactgtgcaataggtacgtggataattactatactgttctcattccttttatttatgtttgaaatgttctaaaattaaaagttaaagcatagagtgtaaagttgagcaaattcctccaagacctaaatatagcttatcaaaacttacattaattagatgctgactgttgagctaatacttttttttaatgatgtgtgcttcagtttattgcacttttcaaatactccagttttttgtgtgcgtgtgttttttaaattttattattattaaagttttagggtacatgtgcacaa

SEQ ID NO: 12620 - DNA, 546 bp, Homo sapiens
  source 1..546: mol_type = unassigned DNA
ggcagatggaagacttgggggggtctctgccagctggaagtgcttggctccacttagcagctaaacttagcttttcaatcgatcgcttttgaaagggaattgtatttctgtccccgtgcggattccagaccaaaattgaaaaaatggttgacctcacccaggtaatggatgatgaagtattcatggcttttgcatcctatgcaacaattattctttcaaaaatgatgcttatgagtactgcaactgcattctatagattgacaagaaagagcccacctgaatgaccttgaaaatattattccatttcttggaattggcctcctgtattccttgagtggtcccgacccctctacagccatcctgcacttcagactatttgtcggagcacggatctaccacaccattgcatatttgacaccccttccccagccaaatagagctttgagtttttttgttggatatggagttactctttccatggcttacaggttgctgaaaagtaaattgtacctgtaaagaaaatcatacaactcagcatccagttgg

SEQ ID NO: 12621 - DNA, 365 bp, Homo sapiens
  source 1..365: mol_type = unassigned DNA
ggggtctctgccagctggaagtgcttggctccacttagcagctaaacttagcttttcaatcgatcgcttttgaaagggaattgtatttctgtccccgtgcggattccagaccaaaattgaaaaaatggttgacctcacccaggtaatggatgatgaagtattcatggcttttgcatcctatgcaacaattattctttcaaaaatgatgcttatgagtactgcaactgcattctatagattgacaagaaaggtttttgccaatccagaagactgtgtagcatttggcaaaggagaaaatgccaagaagtatcttcgaacagatgacagagtagaacgtgtacgcagagcccacctgaatgaccttg

SEQ ID NO: 12622 - DNA, 202 bp, Homo sapiens
  source 1..202: mol_type = unassigned DNA
gtacctgtgaaggggaagatgttaccctggagagatggttcattgactcatcagattccagaccaaaattgaaaaaatggttgacctcacccaggtaatggatgatgaagtattcatggcttttgcatcctatgcaacaattattctttcaaaaatgatgcttatgagtactgcaactgcattctatagattgacaagaaag

SEQ ID NO: 12623 - DNA, 909 bp, Homo sapiens
  source 1..909: mol_type = unassigned DNA
gaattcaagtcctaaagcctacagttttgaatactactgaaatgacaagttattccagaccaaaattgaaaaaatggttgacctcacccaggtaatggatgatgaagtattcatggcttttgcatcctatgcaacaattattctttcaaaaatgatgcttatgagtactgcaactgcattctatagattgacaagaaaggtttttgccaatccagaagactgtgtagcatttggcaaaggagaaaatgccaagaagtatcttcgaacagatgacagagtagaacgtgtacgcagagcccacctgaatgaccttgaaaatattattccatttcttggaattggcctcctgtattccttgagtggtcccgacccctctacagccatcctgcacttcagactatttgtcggagcacggatctaccacaccattgcatatttgacaccccttccccagccaaatagagctttgagtttttttgttggatatggagttactctttccatggcttacaggttgctgaaaagtaaattgtacctgtaaagaaaatcatacaactcagcatccagttggctttttaagaattctgtacttccaatttataatgaatactttcttagattttaggtaggaggggagcagaggaattatgaactggggtaaacccattttgaatattagcattgccaatatcctgtattcttgttttacatttggattagaaatttaacatagtaattcttaagtcttttgtctgatttttaaagtactttcttataaatttggatcatgttatgatttgtaacattcacacaacacctcacttttgaatctataaaagaattgcacgtatgagaaacctatatttcaatactgctgaaacagacatgaaataaagaatttaaagaatg

SEQ ID NO: 12624 - DNA, 535 bp, Homo sapiens
  source 1..535: mol_type = unassigned DNA
attccagaccaaaattgaaaaaatggttgacctcacccaggtaatggatgatgaagtattcatggcttttgcatcctatgcaacaattattctttcaaaaatgatgcttatgagtactgcaactgcattctatagattgacaagaaaggtttttgccaatccagaagactgtgtagcatttggcaaaggagaaaatgccaagaagtatcttcgaacagatgacagagtagaacgtgtacgcagggcacaggagatcttaggcccagaaaggcagattcagaagaacctacatgtaaatgagactggagtggaaatgagaatggcaggaaatgcatggaaacagacttgtaactgtctcatggcctggtcgtccaaatcccagaggatggagtgcaatggcatgatctcagctcaccgcaacctctgcctcccggattcaagtgattctcctgcctcagcctcttgagtagctgggattacaggttgctgcagaagtcaagagctaaccaagaagacaaggaatgtaacatattta

SEQ ID NO: 12625 - DNA, 655 bp, Homo sapiens
  source 1..655: mol_type = unassigned DNA
ctgcctcagcctcacaaagcgctggaattacaggtgtgagctattgctcctggccagtatttgaaataagttttttttcttggtatttggataggtttttgccaatccagaagactgtgtagcatttggcaaaggagaaaatgccaagaagtatcttcgaacagatgacagagtagaacgtgtacgcagagcccacctgaatgaccttgaaaatattattccatttcttggaattggcctcctgtattccttgagtggtcccgacccctctacagccatcctgcacttcagactatttgtcggagcacggatctaccacaccattgcatatttgacaccccttccccagccaaatagagctttgagtttttttgttggatatggagttactctttccatggcttacaggttgctgaaaagtaaattgtacctgtaaagaaaatcatacaactcagcatccagttggctttttaagaattctgtacttccaatttataatgaatactttcttagattttaggtaggaggggagcagaggaattatgaactggggtaaacccattttgaatattagcattgccaatatcctgtattcttgttttacatttggattagaaatttaacatagtaattcttaagtcttttgtctgatttt

SEQ ID NO: 12626 - DNA, 1842 bp, Homo sapiens
  source 1..1842: mol_type = unassigned DNA
tatcaaattctccatttctagcctagattctaaagcaatttctaattctgtagacttaagggaggtgacattttaaaattaagtatttttaaaaatgttgctgggcatgatggcttgcacctataaacccagtgttttgggaggctgaggctggaggactgcttgagaccaggtgttcaagaccagcctgggcaacatagcaagaccccatctctaaaaagaaaatttaaaaaattagccaggcatggtggtgaggcctgtagtcccagctactcatgatgctgagactcaggagtttgaggctgcagtgagctatgattgtaccactgcacttcagcctgagcaacagagcaagaccccctctctaaaaacaacaatagcaatgacaacaataataataaaaatgtcaagtccatagtagatgtgttttgtattcggtcttagccagagaaacccaagatgccacggtttggagcaaaactgtggctaaaacatgctttttgttttcttctagctctgttataaagaaaacatttaggaaattctctctttctctctttcacctatcctactttttgtgtgtcctttgtagttttgcaccatcattcctaacgaatttatttggcatttggaagataggttagcaaaaattttactatatttgaaaggctagttatgtattctgttatttagatataagagcatgagagtcttgatattaaattggtaaattaattattggcaacctagtggtttgggttggcaaggattctgtcaataatcatttggtagagtagcagaagcaaaggaggtgtcttaagaaaaatcaacaccaaaagggttttcttccttcgggagaaagaatttttataaaaagaatcttgaattgctaattgttatgaacctcataagaaaaaagtatttttatttacaaaaatgaaatgagttctattagatagatgtcgttttgatattctaggaactacaaaatgccttctgtgatatttaaagatacactaaaaataaaaagaaacagaaataatgagagattctaaataaaagtcaagtgggcaaggaagcaagacaatttgagagaaaaaaaataaatcttactttgaaatttaaggatccattagtgctcagatttagtttttagaagagagagaaaaaaggatacatatctagtattttgaaattagtgtctttaatagttatctttttccacagagcccacctgaatgaccttgaaaatattattccatttcttggaattggcctcctgtattccttgagtggtcccgacccctctacagccatcctgcacttcagactatttgtcggagcacggatctaccacaccattgcatatttgacaccccttccccagccaaatagagctttgagtttttttgttggatatggagttactctttccatggcttacaggttgctgaaaagtaaattgtacctgtaaagaaaatcatacaactcagcatccagttggctttttaagaattctgtacttccaatttataatgaatactttcttagattttaggtaggaggggagcagaggaattatgaactggggtaaacccattttgaatattagcattgccaatatcctgtattcttgttttacatttggattagaaatttaacatagtaattcttaagtcttttgtctgatttttaaagtactttcttataaatttggatcatgttatgatttgtaacattcacacaacacctcacttttgaatctataaaagaattgcacgtatgagaaacctatatttcaatactgctgaaacagacatgaaataaagaatttaaagaatg

SEQ ID NO: 12627 - DNA, 2152 bp, Homo sapiens
  source 1..2152: mol_type = unassigned DNA
acaactaactcagcaatggtgggcgcccctcccccagcctcgctgctgccttgcagtttgatctcggactgctgtgctagcaatgagcgagactccgtgggcatgggaccctccgagccaggtgcgagatataatctcctggtgtgccttgttttaagcccattggaaaagcacagtattagagtgggagagacctgattttccaggtgccgtctctcacccctttctttgactaggaaagggaattccctgaccccttgcacttcctgggtgaggcgatgcctcgccttgctttggctcgtgcacggtgcactgcacccactgacctgcgcctactgtctggcactccccagcgagatgaacctggtacctcagttggaaatgcagaaatcacccgttttctgcctcactcacgctgggagctgtagaccggagctgttcctattcggccatcttggcttctctctgagctaatacttttaaaatattttgcactccacagaggaaggttttatatgtaagtctgagttttgtttttctgagttgttttcagttggtccatgtgattacatttttatacatggtaaaaatttatatatttttttccaagtctttttctttttcttttcttttcttttttctttttatttttgagacggagttttgttcttgttgtccaggatggagtgcaatggcatgatctcagctcaccgcaacctctgcctcccggattcaagtgattctcctgcctcagcctcttgagtagctgggattacaggtctagtggcacttgaatctttagcacaacagggagcctctgtgcccagggttcagtggcttccaggaattcttcccagaataaacctcaacattctgcagtcttcatgggtgctggcgcaagttgcttttcaagttcttcatactctactgacctcagacttcttctcagcccgaggaaaacagcttcctcttcctcctggccattcaccaagacacaccattctcttctctccttgtccagggcgcttagcatggtcacttccaaagtttgtgcattttcaaaagaaaatgaagacatccttccatgctgttgcaaacatgccctgaggcaagaaatcacaaaggctctttggaaaacaggaataagtgactgcaggtatgacagaaagtgaaacagaataaatgaaaattaacgccccacagatgtatttatccacaaattttatcataaggtgacttgttggtagtcacataaaaagtagaaaaaaacccctctgaatcaagtattttaaagtattcctgggtatctttcctctaagtctcagattatccacacagggtccacatagttttaagaatagttggcatgcctaggcttaactctgtgggacagtaaatttttttaaaaaaaagcttttgcctgctcttggaagacaatattgtgttcaatatagtgcagtgctccacagcttgtaaaatcaactatgtggcacaaatctgaagacgtcttcaaaagatatatggcaagaaagatatgttgccggctttagtcatctttgccatttctcttatggaatttcactatagtggctggacatgtgcaacccacatcctgtctggccttaatgtgatttttctacaaaaggagaggaggacaaaagtaaaagcaaaatatgctttacaatgaaaaatgcaaccctcagccactgggataaaattacattgacagtgggggagttattttcttccttcaaagaacgatgtttgatgttccaactagactctatggtgatgaagctcataatttgggagctgaatcagattcgaatttagaaaaggggtttcagacgttgcttagcagggtgattttaggggttaacatatgaatagagattacattataactcatctgccctgtgtttgttggacacagcttatatgacctattcctgatggttgctcatagaaggatatttaaattctgttgtaattcttccttataaaatctgtgacattctaatagatagaaaatgtttaaatcttgtctagtttctgcttcgtttccttctttatgttgatttcttcctatttatctcttttgtgcatcacacatatttcactataaactcgatttttgtgggtgaaaggccac

SEQ ID NO: 12628 - DNA, 901 bp, Homo sapiens
  source 1..901: mol_type = unassigned DNA
tcgtgacaaagcaaattgtctggtatcatgaatttggaacaccattccagaccaaaattgaaaaaatggttgacctcacccaggtaatggatgatgaagtattcatggcttttgcatcctatgcaacaattattctttcaaaaatgatgcttatgagtactgcaactgcattctatagattgacaagaaaggtttttgccaatccagaagactgtgtagcatttggcaaaggagaaaatgccaagaagtatcttcgaacagatgacagagtagaacgtgtacgcagagcccacctgaatgaccttgaaaatattattccatttcttggaattggcctcctgtattccttgagtggtcccgacccctctacagccatcctgcacttcagactatttgtcggagcacggatctaccacaccattgcatatttgacaccccttccccagccaaatagagctttgagtttttttgttggatatggagttactctttccatggcttacaggttgctgaaaagtaaattgtacctgtaaagaaaatcatacaactcagcatccagttggctttttaagaattctgtacttccaatttataatgaatactttcttagattttaggtaggaggggagcagaggaattatgaactggggtaaacccattttgaatattagcattgccaatatcctgtattcttgttttacatttggattagaaatttaacatagtaattcttaagtcttttgtctgatttttaaagtactttcttataaatttggatcatgttatgatttgtaacattcacacaacacctcacttttgaatctataaaagaattgcacgtatgagaaacctatatttcaatactgctgaaacagacatgaaataaagaatttaaagaatg

SEQ ID NO: 12629 - DNA, 979 bp, Homo sapiens
  source 1..979: mol_type = unassigned DNA
ggcagatggaagacttgggggggtctctgccagctggaagtgcttggctccacttagcagctaaacttagcttttcaatcgatcgcttttgaaagggaattgtatttctgtccccgtgcggattccagaccaaaattgaaaaaatggttgacctcacccaggtaatggatgatgaagtattcatggcttttgcatcctatgcaacaattattctttcaaaaatgatgcttatgagtactgcaactgcattctatagattgacaagaaaggtttttgccaatccagaagactgtgtagcatttggcaaaggagaaaatgccaagaagtatcttcgaacagatgacagagtagaacgtgtacgcagagcccacctgaatgaccttgaaaatattattccatttcttggaattggcctcctgtattccttgagtggtcccgacccctctacagccatcctgcacttcagactatttgtcggagcacggatctaccacaccattgcatatttgacaccccttccccagccaaatagagctttgagtttttttgttggatatggagttactctttccatggcttacaggttgctgaaaagtaaattgtacctgtaaagaaaatcatacaactcagcatccagttggctttttaagaattctgtacttccaatttataatgaatactttcttagattttaggtaggaggggagcagaggaattatgaactggggtaaacccattttgaatattagcattgccaatatcctgtattcttgttttacatttggattagaaatttaacatagtaattcttaagtcttttgtctgatttttaaagtactttcttataaatttggatcatgttatgatttgtaacattcacacaacacctcacttttgaatctataaaagaattgcacgtatgagaaacctatatttcaatactgctgaaacagacatgaaataaagaatttaaagaatg

SEQ ID NO: 12630 - DNA, 962 bp, Homo sapiens
  source 1..962: mol_type = unassigned DNA
caggctggagtagacaggaaccacgagaggcagggaggactgtacaggggttgctgaccaggtggaagatgatgggagcctcagaaggtgtcgtgggacagggtcagggagagggctctatgcggccaggatctggatgcagattgttgagactgaaatttggctcagatcccttctagttgtgtctgtttatcttcagtttccttgtctataaaatggggagagattgtgtgtccccggcatcactggactgttaatagctattgcatttatagcatttatcccagaacctgaaacacagtaaatgctcagtaagtgttattatttgccccaaactgtcttagtgctttccccaagagctttgtgttgtttgtactatgaggaataatgagggtggtgtgggagtcggcctctgtgtctgcagagaggaccacaggccacaggaatagagacaggtagataggatcaaggtgacaggaacagatgttcagagcaagagatgaagacggcatcatcaacccagacaagccagttggaggcatctgtccacccatgtggttccagacacgttcatgtggccaccatgaccccgtcggcatcacaggggtaaccaagagagcagcaagttcctgggacagaggagacagaagggaatttccaggttcttcaggacgttcacaaccacactgagaagcatctttgcagataagtatttaaacttaccagcccatagcctaccagcctgccctcttctggtctgtgcaggaaagtgtagtatcctagaatgccaaagtgggaggggaaatgggtgatgtagctcattctcttttctacctctatggaagaaagaaagagcctgtccccattttgtggggtcccagaaagggtgattttcacacttcacatttggcgttagggctagtatttcacaaacattaccgtctggaacttttgaaggctga

SEQ ID NO: 12631 - DNA, 586 bp, Homo sapiens
  source 1..586: mol_type = unassigned DNA
aaaatggggagagattgtgtgtccccggcatcactggactgttaatagctattgcatttatagcatttatcccagaacctgaaacacagtaaatgctcagtaagtgttattatttgccccaaactgtcttagtgctttccccaagagctttgtgttgtttgtactatgaggaataatgagggtggtgtgggagtcggcctctgtgtctgcagagaggaccacaggccacaggaatagagacaggtagataggatcaaggtgacaggaacagatgttcagagcaagagatgaagacggcatcatcaacccagacaagccagttggaggcatctgtccacccatgtggttccagacacgttcatgtggccaccatgaccccgtcggcatcacaggggtaaccaaggtccacagaacgaggggaaagggtcactgtggatcaagccaggctcctctgagcagtccagggtctatttacagagagcagcaagttcctgggacagaggagacagaagggaatttccaggttcttcaggacgttcacaaccacactgagaagcatctttgcagataagtatttaaacttacc

SEQ ID NO: 12632 - DNA, 543 bp, Homo sapiens
  source 1..543: mol_type = unassigned DNA
agcttcaagatttagtcattcttctggcaaacatatgtggaaggcctccggggtagcacacccttcaccgtgccctggagatgctgggatgcgacaaaaaagtaggcttctcccatgatgaacctcacggatggagtttcgctcttgttgcccaggctggagtgcaatggtatgatctcgactcaccgcaacctctgcctacccggttcaagcgattctcctgcatcaccctccagagtagctggtattacagttggaggcatctgtccacccatgtggttccagacacgttcatgtggccaccatgaccccgtcggcatcacaggggtaaccaagagagcagcaagttcctgggacagaggagacagaagggaatttccaggttcttcaggacgttcacaaccacactgagaagcatctttgcagataagtatttaaacttaccagcccatagcctaccagcctgccctcttctggtctgtgcaggaaagtgtagtatcctagaatgccaaagtgggaggggaaatgggtgatgtagctcat

SEQ ID NO: 12633 - DNA, 579 bp, Homo sapiens
  source 1..579: mol_type = unassigned DNA
agtcattcttctggcaaacatatgtggaaggcctccggggtagcacacccttcaccgtgccctggagatgctgggatgcgacaaaaaagtaggcttctcccatgatgaacctcacggttggaggcatctgtccacccatgtggttccagacacgttcatgtggccaccatgaccccgtcggcatcacaggggtaaccaagagagcagcaagttcctgggacagaggagacagaagggaatttccaggttcttcaggacgttcacaaccacactgagaagcatctttgcagataagtatttaaacttaccagcccatagcctaccagcctgccctcttctggtctgtgcaggaaagtgtagtatcctagaatgccaaagtgggaggggaaatgggtgatgtagctcattctcttttctacctctatggaagaaagaaagagcctgtccccattttgtggggtcccagaaagggtgattttcacacttcacatttggcgttagggctagtatttcacaaacattaccgtctggaacttttgaaggctgagttaaatgacttcatcttgtgtacttgtagaa

SEQ ID NO: 12634 - DNA, 593 bp, Homo sapiens
  source 1..593: mol_type = unassigned DNA
attcttctggcaaacatatgtggaaggcctccggggtagcacacccttcaccgtgccctggagatgctgggatgcgacaaaaaagtaggcttctcccatgatgaacctcacgggtcctttctctggctgtgatccatgcttcttcccagggcaggattacactctttgaatttacttattcatcaagacagtgcagagtggtggaaagagaagcagctgagagttacgcagttggaggcatctgtccacccatgtggttccagacacgttcatgtggccaccatgaccccgtcggcatcacaggggtaaccaagagagcagcaagttcctgggacagaggagacagaagggaatttccaggttcttcaggacgttcacaaccacactgagaagcatctttgcagataagtatttaaacttaccagcccatagcctaccagcctgccctcttctggtctgtgcaggaaagtgtagtatcctagaatgccaaagtgggaggggaaatgggtgatgtagctcattctcttttctacctctatggaagaaagaaagagcctgtccccattttgtggggtcccagaaagggtgatttt

SEQ ID NO: 12635 - DNA, 628 bp, Homo sapiens
  source 1..628: mol_type = unassigned DNA
agcgccgcgggtggggatgcgggaggctgagcgcaccggccagctagcccctttgtgcggcgggggctgcggagtgctccctccaagaccggttgcaccccgctttcctggccaggactctgggcgcggttggaggcatctgtccacccatgtggttccagacacgttcatgtggccaccatgaccccgtcggcatcacaggggtaaccaaggtccacagaacgaggggaaagggtcactgtggatcaagccaggctcctctgagcagtccagggtctatttacagagagcagcaagttcctgggacagaggagacagaagggaatttccaggttcttcaggacgttcacaaccacactgagaagcatctttgcagataagtatttaaacttaccagcccatagcctaccagcctgccctcttctggtctgtgcaggaaagtgtagtatcctagaatgccaaagtgggaggggaaatgggtgatgtagctcattctcttttctacctctatggaagaaagaaagagcctgtccccattttgtggggtcccagaaagggtgattttcacacttcacatttggcgttagggctagtatttcacaaacattaccgtctggaacttttgaag

SEQ ID NO: 12636 - DNA, 594 bp, Homo sapiens
  source 1..594: mol_type = unassigned DNA
gcgcaccggccagctagcccctttgtgcggcgggggctgcggagtgctccctccaagaccggttgcaccccgctttcctggccaggactctgggcgcggcagctacaaagacgacgccggctgcgctcgcgggaccagagggagggaggctgcggacgagtgcggggaggagtttgagatgggaggcgcttgcaggggctcccccagttctgcgctgtgagccggggcacaaagagccctctgcactagcgccgcaggaccgcggacccgagttggaggcatctgtccacccatgtggttccagacacgttcatgtggccaccatgaccccgtcggcatcacaggggtaaccaagagagcagcaagttcctgggacagaggagacagaagggaatttccaggttcttcaggacgttcacaaccacactgagaagcatctttgcagataagtatttaaacttaccagcccatagcctaccagcctgccctcttctggtctgtgcaggaaagtgtagtatcctagaatgccaaagtgggaggggaaatgggtgatgtagctcattctcttttctacctctatggaagaaagaaaga

SEQ ID NO: 12637 - DNA, 847 bp, Homo sapiens
  source 1..847: mol_type = unassigned DNA
gcgcaccggccagctagcccctttgtgcggcgggggctgcggagtgctccctccaagaccggttgcaccccgctttcctggccaggactctgggcgcggttggaggcatctgtccacccatgtggttccagacacgttcatgtggccaccatgaccccgtcggcatcacaggggtaaccaagagagcagcaagttcctgggacagaggagacagaagggaatttccaggttcttcaggacgttcacaaccacactgagaagcatctttgcagataagtatttaaacttaccagcccatagcctaccagcctgccctcttctggtctgtgcaggaaagtgtagtatcctagaatgccaaagtgggaggggaaatgggtgatgtagctcattctcttttctacctctatggaagaaagaaagagcctgtccccattttgtggggtcccagaaagggtgattttcacacttcacatttggcgttagggctagtatttcacaaacattaccgtctggaacttttgaaggctgagttaaatgacttcatcttgtgtacttgtagaactgctattagaaggaggctggggactccctgatgatgtgaaccagcccttctcttctcagtttcagcactttgtgatcatatttataaaccttggacagggctccttggccttagagttaagtgaagagttaacactgtgactttagatgcatttttctcagtgtaagtgtctgagctcatctccagttctggactcgtgcccccactcccgggtgctgacagcaagctctgaagatatgctgagagagctccctgactctcctgactcaggtctgccagttgatg

SEQ ID NO: 12638 - DNA, 567 bp, Homo sapiens
  source 1..567: mol_type = unassigned DNA
agctagcccctttgtgcggcgggggctgcggagtgctccctccaagaccggttgcaccccgctttcctggccaggactctgggcgcggttggaggcatctgtccacccatgtggttccagacacgttcatgtggccaccatgaccccgtcggcatcacaggggtaaccaaggtgatcctccctctcttcctgtgtccactggggatggtagagaccagcttaatgctttgagatcagatccatcacgaaatccgtatgtcctgagacctcctgaatcttaagagagcagcaagttcctgggacagaggagacagaagggaatttccaggttcttcaggacgttcacaaccacactgagaagcatctttgcagataagtatttaaacttaccagcccatagcctaccagcctgccctcttctggtctgtgcaggaaagtgtagtatcctagaatgccaaagtgggaggggaaatgggtgatgtagctcattctcttttctacctctatggaagaaagaaagagcctgtccccattttgtggggtcccagaaagggtgattttcacact

SEQ ID NO: 12639 - DNA, 612 bp, Homo sapiens
  source 1..612: mol_type = unassigned DNA
gtgcggcgggggctgcggagtgctccctccaagaccggttgcaccccgctttcctggccaggactctgggcgcggttggaggcatctgtccacccatgtggttccagacacgttcatgtggccaccatgaccccgtcggcatcacaggggtaaccaagaacgaggggaaagggtcactgtggatcaagccaggctcctctgagcagtccagggtctatttacagagagcagcaagttcctgggacagaggagacagaagggaatttccaggttcttcaggacgttcacaaccacactgagaagcatctttgcagataagtatttaaacttaccagcccatagcctaccagcctgccctcttctggtctgtgcaggaaagtgtagtatcctagaatgccaaagtgggaggggaaatgggtgatgtagctcattctcttttctacctctatggaagaaagaaagagcctgtccccattttgtggggtcccagaaagggtgattttcacacttcacatttggcgttagggctagtatttcacaaacattaccgtctggaacttttgaaggctgagttaaatgacttcatcttgtgtacttgtagaactgctatta

SEQ ID NO: 12640 - DNA, 568 bp, Homo sapiens
  source 1..568: mol_type = unassigned DNA
gtgcggcgggggctgcggagtgctccctccaagaccggttgcaccccgctttcctggccaggactctgggcgcgggtccacagaacgaggggaaagggtcactgtggatcaagccaggctcctctgagcagtccagggtctatttacagagagcagcaagttcctgggacagaggagacagaagggaatttccaggttcttcaggacgttcacaaccacactgagaagcatctttgcagataagtatttaaacttaccagcccatagcctaccagcctgccctcttctggtctgtgcaggaaagtgtagtatcctagaatgccaaagtgggaggggaaatgggtgatgtagctcattctcttttctacctctatggaagaaagaaagagcctgtccccattttgtggggtcccagaaagggtgattttcacacttcacatttggcgttagggctagtatttcacaaacattaccgtctggaacttttgaaggctgagttaaatgacttcatcttgtgtacttgtagaactgctattagaaggaggctggggactccctgatgatgtga

SEQ ID NO: 12641 - DNA, 894 bp, Homo sapiens
  source 1..894: mol_type = unassigned DNA
ggcgggggctgcggagtgctccctccaagaccggttgcaccccgctttcctggccaggactctgggcgcggcagctacaaagacgacgccggctgcgctcgcgggaccagagggagggaggctgcggacgagtgcggggaggagtttgagatgggaggcgcttgcaggggctcccccagttctgcgctgtgagccggggcacaaagagccctctgcactagcgccgcaggaccgcggacccgagttggaggcatctgtccacccatgtggttccagacacgttcatgtggccaccatgaccccgtcggcatcacaggggtaaccaaggtccacagaacgaggggaaagggtcactgtggatcaagccaggctcctctgagcagtccagggtctatttacagagagcagcaagttcctgggacagaggagacagaagggaatttccaggttcttcaggacgttcacaaccacactgagaagcatctttgcagataagtatttaaacttaccagcccatagcctaccagcctgccctcttctggtctgtgcaggaaagtgtagtatcctagaatgccaaagtgggaggggaaatgggtgatgtagctcattctcttttctacctctatggaagaaagaaagagcctgtccccattttgtggggtcccagaaagggtgattttcacacttcacatttggcgttagggctagtatttcacaaacattaccgtctggaacttttgaaggctgagttaaatgacttcatcttgtgtacttgtagaactgctattagaaggaggctggggactccctgatgatgtgaaccagcccttctcttctcagtttcagcactttgtgatcatatttataaaccttggacagggctccttggcctta

SEQ ID NO: 12642 - DNA, 1041 bp, Homo sapiens
  source 1..1041: mol_type = unassigned DNA
attaaaatttcatgggcgctgcagcagctacaaagacgacgccggctgcgctcgcgggaccagagggagggaggctgcggacgagtgcggggaggagtttgagatgggaggcgcttgcaggggctcccccagttctgcgctgtgagccggggcacaaagagccctctgcactagcgccgcaggaccgcggacccgagttggaggcatctgtccacccatgtggttccagacacgttcatgtggccaccatgaccccgtcggcatcacaggggtaaccaaggtgatcctccctctcttcctgtgtccactggggatggtagagaccagcttaatgctttgagatcagatccatcacgaaatccgtatgtcctgagacctcctgaatcttaagagagcagcaagttcctgggacagaggagacagaagggaatttccaggttcttcaggacgttcacaaccacactgagaagcatctttgcagataagtatttaaacttaccagcccatagcctaccagcctgccctcttctggtctgtgcaggaaagtgtagtatcctagaatgccaaagtgggaggggaaatgggtgatgtagctcattctcttttctacctctatggaagaaagaaagagcctgtccccattttgtggggtcccagaaagggtgattttcacacttcacatttggcgttagggctagtatttcacaaacattaccgtctggaacttttgaaggctgagttaaatgacttcatcttgtgtacttgtagaactgctattagaaggaggctggggactccctgatgatgtgaaccagcccttctcttctcagtttcagcactttgtgatcatatttataaaccttggacagggctccttggccttagagttaagtgaagagttaacactgtgactttagatgcatttttctcagtgtaagtgtctgagctcatctccagttctggactcgtgcccccactcccgggtgctgacagcaagctctgaagatatgctgagagagctccctgactctcctgactcag

SEQ ID NO: 12643 - DNA, 10069 bp, Homo sapiens
  source 1..10069: mol_type = unassigned DNA
catgggcgctgcagcagctacaaagacgacgccggctgcgctcgcgggaccagagggagggaggctgcggacgagtgcggggaggagtttgagatgggaggcgcttgcaggggctcccccagttctgcgctgtgagccggggcacaaagagccctctgcactagcgccgcaggaccgcggacccgagttggaggcatctgtccacccatgtggttccagacacgttcatgtggccaccatgaccccgtcggcatcacaggggtaaccaaggtccacagaacgaggggaaagggtcactgtggatcaagccaggctcctctgagcagtccagggtctatttacagagagcagcaagttcctgggacagaggagacagaagggaatttccaggttcttcaggacgttcacaaccacactgagaagcatctttgcagataagtatttaaacttaccagcccatagcctaccagcctgccctcttctggtctgtgcaggaaagtgtagtatcctagaatgccaaagtgggaggggaaatgggtgatgtagctcattctcttttctacctctatggaagaaagaaagagcctgtccccattttgtggggtcccagaaagggtgattttcacacttcacatttggcgttagggctagtatttcacaaacattaccgtctggaacttttgaaggctgagttaaatgacttcatcttgtgtacttgtagaactgctattagaaggaggctggggactccctgatgatgtgaaccagcccttctcttctcagtttcagcactttgtgatcatatttataaaccttggacagggctccttggccttagagttaagtgaagagttaacactgtgactttagatgcatttttctcagtgtaagtgtctgagctcatctccagttctggactcgtgcccccactcccgggtgctgacagcaagctctgaagatatgctgagagagctccctgactctcctgactcaggtctgccagttgatgaagacagcacagttgttaccaaaaacaaaacctggcagatggtcctaggtcaggattagtggtcattctctggtcttctccagactggtgacacagggtggtcttaaaagagtcctagtccagcctctggctccccgaatttcctctggtgcatggggcatcaggaaagggcaggggagaaggagggggagcagaaaaataactgaggctgggcagaagggtcccttccatttcccatccattgcttcaaacaatgggtgattaccgtgcaccttgagtgaatgtcaaggcaggaagggttccagggccacccagtgtggcaggagcagagctgggatcagaattctggattcctgactctccgttcagctgctattcagctatcaccaagctgctgagtttgtcctactttctcctgggtcacattctgctgttgttgggaaacagggagtgagtgaagggaacctgggaacccttctcccctcaccttttaaggatgttctggggtggaataaagagaggtggagggtggggtgcctgggcccagcctccctggctcctggtccttctttcttcagcagggagttctggcaaggcctgggcctggggagggggcctgggtgcagttttctcctgcggtgtggttggctcttttgtcttccaggatgggcctgtggggtctgtgtggggaaggaaggagctgggagcctgggctgcctgtgtgtcggctggatgctgccaggtggctccatctgggccgcatctccaggactcctggcctggacttctctttggacctcgggtgaccttggattctggccacagtgacttagcggtcagactccggtggttttctagcccgctgggtgactccctgaagatctcatcctcttcacacctgttgggatggagcctcccatggataggaactcttcctggttgatgctcagcagatgactgatctggctctggaggacagctccaggggtatgagggaggcctggcagcccactactccctcctcacctgctcgggccctgcctgctgggccctattgtctgggtctgggggccctttcctgccccatgtgaacttgattcctcctcgcgtttctgccggtgaccagacagagcctggcctgggccaagtccccactgaccacactttccccaaggctgggtctcaaaggaccctacaggatggggacaggaacaaggatgggagtcggggaggggctgtcaggcagagggcagatgcagctcctcgggtgccgctggctggagtcctttgtctccatttgctcagtgcgtaattgtcattttgtgggggacttccttggtggggcttttccatgcttttcctctccctgatggttacaaagaggagacagtcaggatctgggaggagctggagccttccccctgtgctgttgaactctgggaggggcagccagaggggctgagagtgcaccatcctgaaaagagagggtctttaagagataagatttaggctagggaaattcactagaaagagacaggtggccctgggttttttttcctgccatccaaagggaaccagtcttacccaaaggcttaaggggtcaccttagcccagtctcaggacactcttctccaatcagatcgctgcttctagttgcactgctcctggattctgttcttggggaacagaaggtggcaggacaggccccacaatctgcaattccagctccctccagaggagacagtcccagcgtttgcaagagagcagcttgtggcctcccttaggcaagtttaaaagccagatgtcctttttcccagaatgcggagtggtgtgtactattcatcagcttgggctgccacagcaccatgccagactggatggcttaaacatcaggaatttattttctgccagttctggaggctggaaagtccagatcaaggtgttaagacttggtttctggtgaggcctctctccttggcttgcaggtggcaccttctcactatgtcctcacatggccttttctctgtggagagggacagagagcatgagcaggctctggtgtctcctcctcttcttataaagacactaatatcaccatattagggcttaaacctatgacctcatttaaccttaaccccttaaaggtcccatctccaaaaacagtcacatagcaggctactgcttcaacatatgcatttgggggaggggacaccattcagttcttaacagggtggtcaccgcaaacatggaaagtcagagccttctccccttcagaattcccgcccccacccagggatggggaggaggagcagagaggtatgggaagcagacacggagagtggcaggtaccatgctggggtggctcaggagtgcttcggaggacatatggaactggcagggctcagtgcagggaggcggaggccctgggagagccgtgtcctgagaagggcctgggctacaaccctgggcaagttacttcacctctgagcctccgatgctctgtgaaatggaaggaatgtgcttgcctgtcaggtgcagggagaattcagtgagattgtgtgcctagcacagtgcctgactcccagtaggtgctcagcaaatgctcccatccatctgggagtatagacttagggtttatctatttttttttttttttggctctctggactttaaaactcagcatcttctgaaccagaggcatttctgattagcccttccctacctattttcctagtatcactctttaatcagcttggggaggtggcagcatttcatggcctccgtagtaactcacaatgcttcctggggtatttaaattctactctctcatcagcactgagcacctactttgggccctttcccgtgctagccatttgggggaaatataggtgaagagtggctggggtttgaacctttaggatttcacagccatgctggatgggataaaaccagctcacatggagaatcagagaatgggacagtgccacaaaacagtctactgaggcacaagttctgagtgcctgggaagtggtagagagaccccagagagggctgctgcagtctggaacagcttcctagcaagctgtaccaaacagggccttgaaggatgagaaagatctggctgagatgatacccgaccctctagggaaattcttaaagtaacttctaggaaatgtcattgctccttaaaaaaaaaaaaaaaaaaaaaaaagcaggttctaattcaaattccgctgcactactgaagtagtgcaggacttatcagaacctttaaaatgctaatggcaatttcaaatactcagggacagggcataggatgaagtgttccttgacttttatggccgtagaatctttttctcatggaacatcgtttagaactgtgggagatgctaggctggggtttctatgggaaaagtacagcagtgatagaagatggcataattagggtacacttaggtgctttgtagcattggctgaaaaggaagcagaccgggtgggcgtgggggagtctcaacttggttccaggagccaggccagcttgatgcgttttttttttttctaatggtgggagggcaggccaatagttggagaaactagaggcctgacagtcggtgatggaagagatgtctactaagcacggttgtcagatcttttgcggagagatgcgggtgtgcgtgtgtctgtcagagtgtaacaggatccagccctctgggaaggggctgaccagaaccaggcagggggtttctgtctaggacaagtagggtccattttcaggggagctgaaatatttgcagggggtgctctgagacccacagccaataaatagggaagcaacatgcttttgggcagggtccatgtggttagggttgattttgatggggctggggggcttagagttagaccccctgccctggtcaggccccactccctggctggtgggggcgggaggcctctgaagctgcagctggaggggccggggcagtgttgcatggtgtgattaacctactaacccagggctcagccgggacgctgtggcgtgtgacgaggtgcctggccttctgccaaccaactaacccactaaccaggcccgagcatgccctactaaccacccccccgcagccagatcctactaactgtgcagctcatgggcctttcaaggggctgggatatgggggcagccaaggctccagaaggctctgcctatgggctgggatctttgtgcagacccacgttccaggacagagaatgcaaataagactcaccaactctgccacttcctgttgagtgagtttgagtaagtcacctcacttctctcaacctcagtttcctcagtggtagaatgcgagttctgataccttacaggttgcagtgaggattcccgtcaatataagggtctcagcacatggcagacacctaaaaaaaaaaaaagtatgaggatggaggaaggcccctcaaacctggttgaacacgtctgctgcctaggccctggcctctctgggtgttctgcacacagatccttctgcctggggcaagacacttggctttgaatccatgtcacttccccacattcttcctccgtctcagctttcttttctgtaggcagctcttttgttcgattactaacccgtctaacccctggggtgcctcaactgcaccccgatcatcccttaacaaactaacggacctgcgtgcgttcttccttttctcttagcgactcctgtgtgtgtctgctgaggtgccctgtccgctggtgctgtgctctgacttactaacccagcccctactaaccctgttttctcttcttactaaccccagccctgccgagctctgggctccccccgggggctggtccccctccttttggcaagcagatgacctggggctactggccctgtagacagatgtcccactttgctgccccatattggctgtaagatcagagtccactgggccaggtctaaggcaggggatggccctattaacaagactcagaggaggaagaggtggtcctgtggatgtgggaggctggactctgagtatgacatctctcctatgtgcagaagtctggttgccactgggagtaggtgggaccagggaaatctctgggacgtgagtgtggaggcctgttggtctagactctagactgtggagctctgagcttttgtgtcctctggaaggaagctggggaagaatcctctccattgttaagtgacggggatagaagctgtcctgcacaggaagtcacgaggggggcgtatcccacgaggaaggcaggagggggcgtgcccctcaccggaaattagcagaggggcgtgtcccacaccggaagtcagaaagcggagcctttcttacaccggaagtcaatgaagcgggtctttcctacgctaaaaaccactgagtggagtatttagtacacaggaagtcggccagagaaacatttctcatatttgaaggccggaaagagggacatttctgacaccggaagtcagtgagaggactctttcccacacaggaagtcagctagagagccgtctcccctctctggagccgagagaggccggtttcccccaccgtaagtagacgtggggccgtgaccggaagtccttgggaaagatccgtcccattcccggaagctagagggcgttagttgtcgggttgaaaaggggtgtggggaggggaagcagctttaccccgggctcggagtttgcaggagagagaagtggggagcaagaagtgaacctcaggggctcacagggttcccgcagatgctcaggccggccaggaatgcatctctggctctctgttcccacggacgtcactgcctcagccagcctcccccagagcccgccagccgctaagccggggccacacctgggggtgatttcatgcctcacctccagtaggcaccttggtttctttgggctaatctctggctcccttgcgctaactcttgctctcacccagctaatccctgcctcaccctgactgccccaggggctgaccactaacaaccaacctggccctgtctgggggttccaggctcctggcctggccctgaccggttcttaattaacctttccttcaccttgactaactcctgccttcctggtctgttcctttcagcagaaactaatggtttgtggatttttttctgactaacaacaggtctaacattcctcgttactgttaacagcttggatgtcggcatggctgggaaggggctaacacagctttgaacttggctaacacaggtttgaacttggctaacacaggtttgaacttgactaacacagggaaaagcatagctaacaattttgggcgtggtggctgctctgagtcagaacaatcagaagtcggtaaagatggtagttttctaaaggaggtgccagggctctggtgtggaccaggcctgatggagcagtggtacccaccaaggtggggtcagaagtatagccagtcttgcaaggttttggccattgggcatatcttcactcctcatagtctgcatttggtttcagttcttaaaaaaatatagccttatagctacagtagtttgcacaagtagatgcagctcttataaaccttaaaatacctgtctggtgtctacagagcatatgccattttgtatagagtcacccttccccaggccagggcctagagtcttcattttggggactttgtgttttggaagttctaggacataaagctttagatcagagtattcagaagggttataactccgtcagtcatttacatgttagtagtataaattatctgagcttcctgttctaacttttagctcttctagcataaactcttctgtgcaatttagctgcaccgaggaaacgggagtttttctggaagggacttttgatctctttagactgagggaacgtcctttgggagtagaggggcagggagcatacgcaagggattccaggtgcaggtaaaaggtggcactagttcaaggttttgctgactcagtctggtagtcagagtctgcaggagaagacagttcaaggcagggcctggaggattggatcagtttagggacaggtcaaaggctggcttacagaccttagaggcaggttgcttgggtcgttgaatgctagtctggtgctgagagcccttttctctggcaactgtggactcagagctaaccaattgtagttggcagtgggggtgaagggtgatccagaggcctgagctgcagagggcacaagagagaaaagatgtcttagaaagagctttgagaacatgccttggctgctggcagggaccttggatggggtagtctacacccggaagtgcctgcctgccatcctctagtggctgccttgctccatttcactcaaagcaggaagctcacacctcctattcctgaaactcctctttgtttaactgcaaagacttgatgctgctaaggatctactatgtgccaggcactgctctgggcgctgggacctgcacctgggctttttcgtcatggtgcttttatagcctagtgggagagttggtgaagtagatagtgattcagtgagatgggtgttatgattggtcaggggtctgtgggagcaccaaggagacagacaagattgatgtgcacctactctgtgccaggcgtgtgccaggcattggggatgtagtggtagttaaacaccatttggtcttcaggagctttaattctagtgtgttgggtgcaggggggtggaatggggacagagagacacctaatccaccctgtggtggctttctggagagggaggcatctaagctgagctgtggctgggtggagtgtgggtggggatgagttccgggcagcgagagtggtggacaccagtttctggggatcagagaggatccaaagaggttctggaaggttcatgtggaatgtagcaagagataggagacatggacatggtgccgggtctggttgccaagaagtttagattttatccttaggccttggggagcgacggatatgatctgagaaagggagttagtggatttgagttttaggctggccatttggcttttccagcccaggtggaactcagaggagtttgcaatggcctctggccacattttagacaactgagcagaactttttgaaactaggaagaccctttggtccatcttttgataaacagaatccatacatgtctaccccagttggaagtatctctgcaatgactggaaagtaaagaggaccaaggtgaaaataaaggctcggaaggggagcaatcttgaaaacatgtcatcccatggtggtgggaagtccctggagaagatcaggggaaacacagtcataggctgcaagtctataagataattccattggggagggagcccatttgtcatgcatggctgcaaggggcagatacaagtgtggagtaagcttgcaagagctgatcctggtcccagagagggaaaaatatgccttggtgggtaatgaaccttttgttcccagaggcagaaggattgggactaggccaacatagagattggcgatggttgtgagattctaagagtgtgtgtgcatcttgacaatattagaggaggctgagcccaagcaggcacattctcttcgacccctccctcattcagtctgctttggagtctactgaacatcaagcttgctatgagcaggatcttagagctgaggaattggcctcccaatccgaacaggtgttataatcctttcttaataggttgtgctgtggacccaatgtgagggctgtgctggtgtaaatggtgacatgttgagctggggggatgctttcggggtggggggactggttccattccatcaaaggccctcttgagagtctatccagggacccattgttttactttaacagaccagaaaagatgtttgttttccatgtcattacccccaggggataccgaatgtgtgggtagaaatttctctgtagattaaaaatcagatttttacatggattcaacaaaggagcgtcacttggatttttgttttcatccatgaatgtagctgcttctgtgtaaaatgccattttgctattaaaaatcaattcacgctgg

SEQ ID NO: 12644 - DNA, 10069 bp, Homo sapiens
  source 1..10069: mol_type = unassigned DNA
gagggagggaggctgcggacgagtgcggggaggagtttgagatgggaggcgcttgcaggggctcccccagttctgcgctgtgagccggggcacaaagagccctctgcactagcgccgcaggaccgcggacccgagttggaggcatctgtccacccatgtggttccagacacgttcatgtggccaccatgaccccgtcggcatcacaggggtaaccaagagagcagcaagttcctgggacagaggagacagaagggaatttccaggttcttcaggacgttcacaaccacactgagaagcatctttgcagataagtatttaaacttaccagcccatagcctaccagcctgccctcttctggtctgtgcaggaaagtgtagtatcctagaatgccaaagtgggaggggaaatgggtgatgtagctcattctcttttctacctctatggaagaaagaaagagcctgtccccattttgtggggtcccagaaagggtgattttcacacttcacatttggcgttagggctagtatttcacaaacattaccgtctggaacttttgaaggctgagttaaatgacttcatcttgtgtacttgtagaactgctattagaaggaggctggggactccctgatgatgtgaaccagcccttctcttctcagtttcagcactttgtgatcatatttataaaccttggacagggctccttggccttagagttaagtgaagagttaacactgtgactttagatgcatttttctcagtgtaagtgtctgagctcatctccagttctggactcgtgcccccactcccgggtgctgacagcaagctctgaagatatgctgagagagctccctgactctcctgactcaggtctgccagttgatgaagacagcacagttgttaccaaaaacaaaacctggcagatggtcctaggtcaggattagtggtcattctctggtcttctccagactggtgacacagggtggtcttaaaagagtcctagtccagcctctggctccccgaatttcctctggtgcatggggcatcaggaaagggcaggggagaaggagggggagcagaaaaataactgaggctgggcagaagggtcccttccatttcccatccattgcttcaaacaatgggtgattaccgtgcaccttgagtgaatgtcaaggcaggaagggttccagggccacccagtgtggcaggagcagagctgggatcagaattctggattcctgactctccgttcagctgctattcagctatcaccaagctgctgagtttgtcctactttctcctgggtcacattctgctgttgttgggaaacagggagtgagtgaagggaacctgggaacccttctcccctcaccttttaaggatgttctggggtggaataaagagaggtggagggtggggtgcctgggcccagcctccctggctcctggtccttctttcttcagcagggagttctggcaaggcctgggcctggggagggggcctgggtgcagttttctcctgcggtgtggttggctcttttgtcttccaggatgggcctgtggggtctgtgtggggaaggaaggagctgggagcctgggctgcctgtgtgtcggctggatgctgccagcaccggcatggaccaagcaacttctctgagccagatgctggggacgcagaggtgaacccagagacatgatcccatctgctcagatcttcatgtcagaacacgctttattacagtctcggcaagggggtggctccatctgggccgcatctccaggactcctggcctggacttctctttggacctcgggtgaccttggattctggccacagtgacttagcggtcagactccggtggttttctagcccgctgggtgactccctgaagatctcatcctcttcacacctgttgggatggagcctcccatggataggaactcttcctggttgatgctcagcagatgactgatctggctctggaggacagctccaggggtatgagggaggcctggcagcccactactccctcctcacctgctcgggccctgcctgctgggccctattgtctgggtctgggggccctttcctgccccatgtgaacttgattcctcctcgcgtttctgccggtgaccagacagagcctggcctgggccaagtccccactgaccacactttccccaaggctgggtctcaaaggaccctacaggatggggacaggaacaaggatgggagtcggggaggggctgtcaggcagagggcagatgcagctcctcgggtgccgctggctggagtcctttgtctccatttgctcagtgcgtaattgtcattttgtgggggacttccttggtggggcttttccatgcttttcctctccctgatggttacaaagaggagacagtcaggatctgggaggagctggagccttccccctgtgctgttgaactctgggaggggcagccagaggggctgagagtgcaccatcctgaaaagagagggtctttaagagataagatttaggctagggaaattcactagaaagagacaggtggccctgggttttttttcctgccatccaaagggaaccagtcttacccaaaggcttaaggggtcaccttagcccagtctcaggacactcttctccaatcagatcgctgcttctagttgcactgctcctggattctgttcttggggaacagaaggtggcaggacaggccccacaatctgcaattccagctccctccagaggagacagtcccagcgtttgcaagagagcagcttgtggcctcccttaggcaagtttaaaagccagatgtcctttttcccagaatgcggagtggtgtgtactattcatcagcttgggctgccacagcaccatgccagactggatggcttaaacatcaggaatttattttctgccagttctggaggctggaaagtccagatcaaggtgttaagacttggtttctggtgaggcctctctccttggcttgcaggtggcaccttctcactatgtcctcacatggccttttctctgtggagagggacagagagcatgagcaggctctggtgtctcctcctcttcttataaagacactaatatcaccatattagggcttaaacctatgacctcatttaaccttaaccccttaaaggtcccatctccaaaaacagtcacatagcaggctactgcttcaacatatgcatttgggggaggggacaccattcagttcttaacagggtggtcaccgcaaacatggaaagtcagagccttctccccttcagaattcccgcccccacccagggatggggaggaggagcagagaggtatgggaagcagacacggagagtggcaggtaccatgctggggtggctcaggagtgcttcggaggacatatggaactggcagggctcagtgcagggaggcggaggccctgggagagccgtgtcctgagaagggcctgggctacaaccctgggcaagttacttcacctctgagcctccgatgctctgtgaaatggaaggaatgtgcttgcctgtcaggtgcagggagaattcagtgagattgtgtgcctagcacagtgcctgactcccagtaggtgctcagcaaatgctcccatccatctgggagtatagacttagggtttatctatttttttttttttttggctctctggactttaaaactcagcatcttctgaaccagaggcatttctgattagcccttccctacctattttcctagtatcactctttaatcagcttggggaggtggcagcatttcatggcctccgtagtaactcacaatgcttcctggggtatttaaattctactctctcatcagcactgagcacctactttgggccctttcccgtgctagccatttgggggaaatataggtgaagagtggctggggtttgaacctttaggatttcacagccatgctggatgggataaaaccagctcacatggagaatcagagaatgggacagtgccacaaaacagtctactgaggcacaagttctgagtgcctgggaagtggtagagagaccccagagagggctgctgcagtctggaacagcttcctagcaagctgtaccaaacagggccttgaaggatgagaaagatctggctgagatgatacccgaccctctagggaaattcttaaagtaacttctaggaaatgtcattgctccttaaaaaaaaaaaaaaaaaaaaaaaagcaggttctaattcaaattccgctgcactactgaagtagtgcaggacttatcagaacctttaaaatgctaatggcaatttcaaatactcagggacagggcataggatgaagtgttccttgacttttatggccgtagaatctttttctcatggaacatcgtttagaactgtgggagatgctaggctggggtttctatgggaaaagtacagcagtgatagaagatggcataattagggtacacttaggtgctttgtagcattggctgaaaaggaagcagaccgggtgggcgtgggggagtctcaacttggttccaggagccaggccagcttgatgcgttttttttttttctaatggtgggagggcaggccaatagttggagaaactagaggcctgacagtcggtgatggaagagatgtctactaagcacggttgtcagatcttttgcggagagatgcgggtgtgcgtgtgtctgtcagagtgtaacaggatccagccctctgggaaggggctgaccagaaccaggcagggggtttctgtctaggacaagtagggtccattttcaggggagctgaaatatttgcagggggtgctctgagacccacagccaataaatagggaagcaacatgcttttgggcagggtccatgtggttagggttgattttgatggggctggggggcttagagttagaccccctgccctggtcaggccccactccctggctggtgggggcgggaggcctctgaagctgcagctggaggggccggggcagtgttgcatggtgtgattaacctactaacccagggctcagccgggacgctgtggcgtgtgacgaggtgcctggccttctgccaaccaactaacccactaaccaggcccgagcatgccctactaaccacccccccgcagccagatcctactaactgtgcagctcatgggcctttcaaggggctgggatatgggggcagccaaggctccagaaggctctgcctatgggctgggatctttgtgcagacccacgttccaggacagagaatgcaaataagactcaccaactctgccacttcctgttgagtgagtttgagtaagtcacctcacttctctcaacctcagtttcctcagtggtagaatgcgagttctgataccttacaggttgcagtgaggattcccgtcaatataagggtctcagcacatggcagacacctaaaaaaaaaaaaagtatgaggatggaggaaggcccctcaaacctggttgaacacgtctgctgcctaggccctggcctctctgggtgttctgcacacagatccttctgcctggggcaagacacttggctttgaatccatgtcacttccccacattcttcctccgtctcagctttcttttctgtaggcagctcttttgttcgattactaacccgtctaacccctggggtgcctcaactgcaccccgatcatcccttaacaaactaacggacctgcgtgcgttcttccttttctcttagcgactcctgtgtgtgtctgctgaggtgccctgtccgctggtgctgtgctctgacttactaacccagcccctactaaccctgttttctcttcttactaaccccagccctgccgagctctgggctccccccgggggctggtccccctccttttggcaagcagatgacctggggctactggccctgtagacagatgtcccactttgctgccccatattggctgtaagatcagagtccactgggccaggtctaaggcaggggatggccctattaacaagactcagaggaggaagaggtggtcctgtggatgtgggaggctggactctgagtatgacatctctcctatgtgcagaagtctggttgccactgggagtaggtgggaccagggaaatctctgggacgtgagtgtggaggcctgttggtctagactctagactgtggagctctgagcttttgtgtcctctggaaggaagctggggaagaatcctctccattgttaagtgacggggatagaagctgtcctgcacaggaagtcacgaggggggcgtatcccacgaggaaggcaggagggggcgtgcccctcaccggaaattagcagaggggcgtgtcccacaccggaagtcagaaagcggagcctttcttacaccggaagtcaatgaagcgggtctttcctacgctaaaaaccactgagtggagtatttagtacacaggaagtcggccagagaaacatttctcatatttgaaggccggaaagagggacatttctgacaccggaagtcagtgagaggactctttcccacacaggaagtcagctagagagccgtctcccctctctggagccgagagaggccggtttcccccaccgtaagtagacgtggggccgtgaccggaagtccttgggaaagatccgtcccattcccggaagctagagggcgttagttgtcgggttgaaaaggggtgtggggaggggaagcagctttaccccgggctcggagtttgcaggagagagaagtggggagcaagaagtgaacctcaggggctcacagggttcccgcagatgctcaggccggccaggaatgcatctctggctctctgttcccacggacgtcactgcctcagccagcctcccccagagcccgccagccgctaagccggggccacacctgggggtgatttcatgcctcacctccagtaggcaccttggtttctttgggctaatctctggctcccttgcgctaactcttgctctcacccagctaatccctgcctcaccctgactgccccaggggctgaccactaacaaccaacctggccctgtctgggggttccaggctcctggcctggccctgaccggttcttaattaacctttccttcaccttgactaactcctgccttcctggtctgttcctttcagcagaaactaatggtttgtggatttttttctgactaacaacaggtctaacattcctcgttactgttaacagcttggatgtcggcatggctgggaaggggctaacacagctttgaacttggctaacacaggtttgaacttggctaacacaggtttgaacttgactaacacagggaaaagcatagctaacaattttgggcgtggtggctgctctgagtcagaacaatcagaagtcggtaaagatggtagttttctaaaggaggtgccagggctctggtgtggaccaggcctgatggagcagtggtacccaccaaggtggggtcagaagtatagccagtcttgcaaggttttggccattgggcatatcttcactcctcatagtctgcatttggtttcagttcttaaaaaaatatagccttatagctacagtagtttgcacaagtagatgcagctcttataaaccttaaaatacctgtctggtgtctacagagcatatgccattttgtatagagtcacccttccccaggccagggcctagagtcttcattttggggactttgtgttttggaagttctaggacataaagctttagatcagagtattcagaagggttataactccgtcagtcatttacatgttagtagtataaattatctgagcttcctgttctaacttttagctcttctagcataaactcttctgtgcaatttagctgcaccgaggaaacgggagtttttctggaagggacttttgatctctttagactgagggaacgtcctttgggagtagaggggcagggagcatacgcaagggattccaggtgcaggtaaaaggtggcactagttcaaggttttgctgactcagtctggtagtcagagtctgcaggagaagacagttcaaggcagggcctggaggattggatcagtttagggacaggtcaaaggctggcttacagaccttagaggcaggttgcttgggtcgttgaatgctagtctggtgctgagagcccttttctctggcaactgtggactcagagctaaccaattgtagttggcagtgggggtgaagggtgatccagaggcctgagctgcagagggcacaagagagaaaagatgtcttagaaagagctttgagaacatgccttggctgctggcagggaccttggatggggtagtctacacccggaagtgcctgcctgccatcctctagtggctgccttgctccatttcactcaaagcaggaagctcacacctcctattcctgaaactcctctttgtttaactgcaaagacttgatgctgctaaggatctactatgtgccaggcactgctctgggcgctgggacctgcacctgggctttttcgtcatggtgcttttatagcctagtgggagagttggtgaagtagatagtgattcagtgagatgggtgttatgattggtcaggggtctgtgggagcaccaaggagacagacaagattgatgtgcacctactctgtgccaggcgtgtgccaggcattggggatgtagtggtagttaaacaccatttggtcttcaggagctttaattctagtgtgttgggtgcaggggggtggaatggggacagagagacacctaatccaccctgtggtggctttctggagagggaggcatctaagctgagctgtggctgggtggagtgtgggtggggatgagttccgggcagcgagagtggtggacaccagtttctggggatcagagaggatccaaagaggttctggaaggttcatgtggaatgtagcaagagataggagacatggacatggtgccgggtctggttgccaagaagtttagattttatccttaggccttggggagcgacggatatgatctgagaaagggagttagtggatttgagttttaggctggccatttggcttttccagcccaggtggaactcagaggagtttgcaatggcctctggccacattttagacaactgagcagaactttttgaaactaggaagaccctttggtccatcttttgataaacagaatccatacatgtctaccccagttggaagtatctctgcaatgactggaaagtaaagaggaccaaggtgaaaataaaggctcggaaggggagcaatcttgaaaacatgtcatcccatggtggtgggaagtccctggagaagatcaggggaaacacagtcataggctgcaagtctataagataattccattggggagggagcccatttgtcatgcatggctgcaaggggcagatacaagtgtggagtaagcttgcaagagctgatcctggtcccagagagggaaaaatatgccttggtgggtaatgaaccttttgttcccagaggcagaaggattgggactaggccaacatagagattggcgatggttgtgagattctaagagtgtgtgtgcatcttgacaatattagaggaggctgagcccaagcaggcacattctcttcgacccctccctcattcagtctgctttggagtctactgaacatcaagcttgctatgagcaggatcttagagctgaggaattggcctcccaatccgaacaggtgttataatcctttcttaataggttgtgctgtggacccaatgtgagggctgtgctggtgtaaatggtgacatgttgagctggggggatgctttcggggtggggggactggttccattccatcaaaggccctcttgagagtctatccagggacccattgttttactttaacagaccagaaaagatgtttgttttccatgtcattacccccaggggataccgaatgtgtgggtagaaatttctctgtagattaaaaatcagatttttacatggattcaacaaaggagcgtcacttggatttttgttttcatccatgaatgtagctgcttctgtgtaaaatgccattttgctattaaaaatcaattcacgctgg

SEQ ID NO: 12645 - DNA, 9943 bp, Homo sapiens
  source 1..9943: mol_type = unassigned DNA
gagggagggaggctgcggacgagtgcggggaggagtttgagatgggaggcgcttgcaggggctcccccagttctgcgctgtgagccggggcacaaagagccctctgcactagcgccgcaggaccgcggacccgagttggaggcatctgtccacccatgtggttccagacacgttcatgtggccaccatgaccccgtcggcatcacaggggtaaccaagagagcagcaagttcctgggacagaggagacagaagggaatttccaggttcttcaggacgttcacaaccacactgagaagcatctttgcagataagtatttaaacttaccagcccatagcctaccagcctgccctcttctggtctgtgcaggaaagtgtagtatcctagaatgccaaagtgggaggggaaatgggtgatgtagctcattctcttttctacctctatggaagaaagaaagagcctgtccccattttgtggggtcccagaaagggtgattttcacacttcacatttggcgttagggctagtatttcacaaacattaccgtctggaacttttgaaggctgagttaaatgacttcatcttgtgtacttgtagaactgctattagaaggaggctggggactccctgatgatgtgaaccagcccttctcttctcagtttcagcactttgtgatcatatttataaaccttggacagggctccttggccttagagttaagtgaagagttaacactgtgactttagatgcatttttctcagtgtaagtgtctgagctcatctccagttctggactcgtgcccccactcccgggtgctgacagcaagctctgaagatatgctgagagagctccctgactctcctgactcaggtctgccagttgatgaagacagcacagttgttaccaaaaacaaaacctggcagatggtcctaggtcaggattagtggtcattctctggtcttctccagactggtgacacagggtggtcttaaaagagtcctagtccagcctctggctccccgaatttcctctggtgcatggggcatcaggaaagggcaggggagaaggagggggagcagaaaaataactgaggctgggcagaagggtcccttccatttcccatccattgcttcaaacaatgggtgattaccgtgcaccttgagtgaatgtcaaggcaggaagggttccagggccacccagtgtggcaggagcagagctgggatcagaattctggattcctgactctccgttcagctgctattcagctatcaccaagctgctgagtttgtcctactttctcctgggtcacattctgctgttgttgggaaacagggagtgagtgaagggaacctgggaacccttctcccctcaccttttaaggatgttctggggtggaataaagagaggtggagggtggggtgcctgggcccagcctccctggctcctggtccttctttcttcagcagggagttctggcaaggcctgggcctggggagggggcctgggtgcagttttctcctgcggtgtggttggctcttttgtcttccaggatgggcctgtggggtctgtgtggggaaggaaggagctgggagcctgggctgcctgtgtgtcggctggatgctgccaggtggctccatctgggccgcatctccaggactcctggcctggacttctctttggacctcgggtgaccttggattctggccacagtgacttagcggtcagactccggtggttttctagcccgctgggtgactccctgaagatctcatcctcttcacacctgttgggatggagcctcccatggataggaactcttcctggttgatgctcagcagatgactgatctggctctggaggacagctccaggggtatgagggaggcctggcagcccactactccctcctcacctgctcgggccctgcctgctgggccctattgtctgggtctgggggccctttcctgccccatgtgaacttgattcctcctcgcgtttctgccggtgaccagacagagcctggcctgggccaagtccccactgaccacactttccccaaggctgggtctcaaaggaccctacaggatggggacaggaacaaggatgggagtcggggaggggctgtcaggcagagggcagatgcagctcctcgggtgccgctggctggagtcctttgtctccatttgctcagtgcgtaattgtcattttgtgggggacttccttggtggggcttttccatgcttttcctctccctgatggttacaaagaggagacagtcaggatctgggaggagctggagccttccccctgtgctgttgaactctgggaggggcagccagaggggctgagagtgcaccatcctgaaaagagagggtctttaagagataagatttaggctagggaaattcactagaaagagacaggtggccctgggttttttttcctgccatccaaagggaaccagtcttacccaaaggcttaaggggtcaccttagcccagtctcaggacactcttctccaatcagatcgctgcttctagttgcactgctcctggattctgttcttggggaacagaaggtggcaggacaggccccacaatctgcaattccagctccctccagaggagacagtcccagcgtttgcaagagagcagcttgtggcctcccttaggcaagtttaaaagccagatgtcctttttcccagaatgcggagtggtgtgtactattcatcagcttgggctgccacagcaccatgccagactggatggcttaaacatcaggaatttattttctgccagttctggaggctggaaagtccagatcaaggtgttaagacttggtttctggtgaggcctctctccttggcttgcaggtggcaccttctcactatgtcctcacatggccttttctctgtggagagggacagagagcatgagcaggctctggtgtctcctcctcttcttataaagacactaatatcaccatattagggcttaaacctatgacctcatttaaccttaaccccttaaaggtcccatctccaaaaacagtcacatagcaggctactgcttcaacatatgcatttgggggaggggacaccattcagttcttaacagggtggtcaccgcaaacatggaaagtcagagccttctccccttcagaattcccgcccccacccagggatggggaggaggagcagagaggtatgggaagcagacacggagagtggcaggtaccatgctggggtggctcaggagtgcttcggaggacatatggaactggcagggctcagtgcagggaggcggaggccctgggagagccgtgtcctgagaagggcctgggctacaaccctgggcaagttacttcacctctgagcctccgatgctctgtgaaatggaaggaatgtgcttgcctgtcaggtgcagggagaattcagtgagattgtgtgcctagcacagtgcctgactcccagtaggtgctcagcaaatgctcccatccatctgggagtatagacttagggtttatctatttttttttttttttggctctctggactttaaaactcagcatcttctgaaccagaggcatttctgattagcccttccctacctattttcctagtatcactctttaatcagcttggggaggtggcagcatttcatggcctccgtagtaactcacaatgcttcctggggtatttaaattctactctctcatcagcactgagcacctactttgggccctttcccgtgctagccatttgggggaaatataggtgaagagtggctggggtttgaacctttaggatttcacagccatgctggatgggataaaaccagctcacatggagaatcagagaatgggacagtgccacaaaacagtctactgaggcacaagttctgagtgcctgggaagtggtagagagaccccagagagggctgctgcagtctggaacagcttcctagcaagctgtaccaaacagggccttgaaggatgagaaagatctggctgagatgatacccgaccctctagggaaattcttaaagtaacttctaggaaatgtcattgctccttaaaaaaaaaaaaaaaaaaaaaaaagcaggttctaattcaaattccgctgcactactgaagtagtgcaggacttatcagaacctttaaaatgctaatggcaatttcaaatactcagggacagggcataggatgaagtgttccttgacttttatggccgtagaatctttttctcatggaacatcgtttagaactgtgggagatgctaggctggggtttctatgggaaaagtacagcagtgatagaagatggcataattagggtacacttaggtgctttgtagcattggctgaaaaggaagcagaccgggtgggcgtgggggagtctcaacttggttccaggagccaggccagcttgatgcgttttttttttttctaatggtgggagggcaggccaatagttggagaaactagaggcctgacagtcggtgatggaagagatgtctactaagcacggttgtcagatcttttgcggagagatgcgggtgtgcgtgtgtctgtcagagtgtaacaggatccagccctctgggaaggggctgaccagaaccaggcagggggtttctgtctaggacaagtagggtccattttcaggggagctgaaatatttgcagggggtgctctgagacccacagccaataaatagggaagcaacatgcttttgggcagggtccatgtggttagggttgattttgatggggctggggggcttagagttagaccccctgccctggtcaggccccactccctggctggtgggggcgggaggcctctgaagctgcagctggaggggccggggcagtgttgcatggtgtgattaacctactaacccagggctcagccgggacgctgtggcgtgtgacgaggtgcctggccttctgccaaccaactaacccactaaccaggcccgagcatgccctactaaccacccccccgcagccagatcctactaactgtgcagctcatgggcctttcaaggggctgggatatgggggcagccaaggctccagaaggctctgcctatgggctgggatctttgtgcagacccacgttccaggacagagaatgcaaataagactcaccaactctgccacttcctgttgagtgagtttgagtaagtcacctcacttctctcaacctcagtttcctcagtggtagaatgcgagttctgataccttacaggttgcagtgaggattcccgtcaatataagggtctcagcacatggcagacacctaaaaaaaaaaaaagtatgaggatggaggaaggcccctcaaacctggttgaacacgtctgctgcctaggccctggcctctctgggtgttctgcacacagatccttctgcctggggcaagacacttggctttgaatccatgtcacttccccacattcttcctccgtctcagctttcttttctgtaggcagctcttttgttcgattactaacccgtctaacccctggggtgcctcaactgcaccccgatcatcccttaacaaactaacggacctgcgtgcgttcttccttttctcttagcgactcctgtgtgtgtctgctgaggtgccctgtccgctggtgctgtgctctgacttactaacccagcccctactaaccctgttttctcttcttactaaccccagccctgccgagctctgggctccccccgggggctggtccccctccttttggcaagcagatgacctggggctactggccctgtagacagatgtcccactttgctgccccatattggctgtaagatcagagtccactgggccaggtctaaggcaggggatggccctattaacaagactcagaggaggaagaggtggtcctgtggatgtgggaggctggactctgagtatgacatctctcctatgtgcagaagtctggttgccactgggagtaggtgggaccagggaaatctctgggacgtgagtgtggaggcctgttggtctagactctagactgtggagctctgagcttttgtgtcctctggaaggaagctggggaagaatcctctccattgttaagtgacggggatagaagctgtcctgcacaggaagtcacgaggggggcgtatcccacgaggaaggcaggagggggcgtgcccctcaccggaaattagcagaggggcgtgtcccacaccggaagtcagaaagcggagcctttcttacaccggaagtcaatgaagcgggtctttcctacgctaaaaaccactgagtggagtatttagtacacaggaagtcggccagagaaacatttctcatatttgaaggccggaaagagggacatttctgacaccggaagtcagtgagaggactctttcccacacaggaagtcagctagagagccgtctcccctctctggagccgagagaggccggtttcccccaccgtaagtagacgtggggccgtgaccggaagtccttgggaaagatccgtcccattcccggaagctagagggcgttagttgtcgggttgaaaaggggtgtggggaggggaagcagctttaccccgggctcggagtttgcaggagagagaagtggggagcaagaagtgaacctcaggggctcacagggttcccgcagatgctcaggccggccaggaatgcatctctggctctctgttcccacggacgtcactgcctcagccagcctcccccagagcccgccagccgctaagccggggccacacctgggggtgatttcatgcctcacctccagtaggcaccttggtttctttgggctaatctctggctcccttgcgctaactcttgctctcacccagctaatccctgcctcaccctgactgccccaggggctgaccactaacaaccaacctggccctgtctgggggttccaggctcctggcctggccctgaccggttcttaattaacctttccttcaccttgactaactcctgccttcctggtctgttcctttcagcagaaactaatggtttgtggatttttttctgactaacaacaggtctaacattcctcgttactgttaacagcttggatgtcggcatggctgggaaggggctaacacagctttgaacttggctaacacaggtttgaacttggctaacacaggtttgaacttgactaacacagggaaaagcatagctaacaattttgggcgtggtggctgctctgagtcagaacaatcagaagtcggtaaagatggtagttttctaaaggaggtgccagggctctggtgtggaccaggcctgatggagcagtggtacccaccaaggtggggtcagaagtatagccagtcttgcaaggttttggccattgggcatatcttcactcctcatagtctgcatttggtttcagttcttaaaaaaatatagccttatagctacagtagtttgcacaagtagatgcagctcttataaaccttaaaatacctgtctggtgtctacagagcatatgccattttgtatagagtcacccttccccaggccagggcctagagtcttcattttggggactttgtgttttggaagttctaggacataaagctttagatcagagtattcagaagggttataactccgtcagtcatttacatgttagtagtataaattatctgagcttcctgttctaacttttagctcttctagcataaactcttctgtgcaatttagctgcaccgaggaaacgggagtttttctggaagggacttttgatctctttagactgagggaacgtcctttgggagtagaggggcagggagcatacgcaagggattccaggtgcaggtaaaaggtggcactagttcaaggttttgctgactcagtctggtagtcagagtctgcaggagaagacagttcaaggcagggcctggaggattggatcagtttagggacaggtcaaaggctggcttacagaccttagaggcaggttgcttgggtcgttgaatgctagtctggtgctgagagcccttttctctggcaactgtggactcagagctaaccaattgtagttggcagtgggggtgaagggtgatccagaggcctgagctgcagagggcacaagagagaaaagatgtcttagaaagagctttgagaacatgccttggctgctggcagggaccttggatggggtagtctacacccggaagtgcctgcctgccatcctctagtggctgccttgctccatttcactcaaagcaggaagctcacacctcctattcctgaaactcctctttgtttaactgcaaagacttgatgctgctaaggatctactatgtgccaggcactgctctgggcgctgggacctgcacctgggctttttcgtcatggtgcttttatagcctagtgggagagttggtgaagtagatagtgattcagtgagatgggtgttatgattggtcaggggtctgtgggagcaccaaggagacagacaagattgatgtgcacctactctgtgccaggcgtgtgccaggcattggggatgtagtggtagttaaacaccatttggtcttcaggagctttaattctagtgtgttgggtgcaggggggtggaatggggacagagagacacctaatccaccctgtggtggctttctggagagggaggcatctaagctgagctgtggctgggtggagtgtgggtggggatgagttccgggcagcgagagtggtggacaccagtttctggggatcagagaggatccaaagaggttctggaaggttcatgtggaatgtagcaagagataggagacatggacatggtgccgggtctggttgccaagaagtttagattttatccttaggccttggggagcgacggatatgatctgagaaagggagttagtggatttgagttttaggctggccatttggcttttccagcccaggtggaactcagaggagtttgcaatggcctctggccacattttagacaactgagcagaactttttgaaactaggaagaccctttggtccatcttttgataaacagaatccatacatgtctaccccagttggaagtatctctgcaatgactggaaagtaaagaggaccaaggtgaaaataaaggctcggaaggggagcaatcttgaaaacatgtcatcccatggtggtgggaagtccctggagaagatcaggggaaacacagtcataggctgcaagtctataagataattccattggggagggagcccatttgtcatgcatggctgcaaggggcagatacaagtgtggagtaagcttgcaagagctgatcctggtcccagagagggaaaaatatgccttggtgggtaatgaaccttttgttcccagaggcagaaggattgggactaggccaacatagagattggcgatggttgtgagattctaagagtgtgtgtgcatcttgacaatattagaggaggctgagcccaagcaggcacattctcttcgacccctccctcattcagtctgctttggagtctactgaacatcaagcttgctatgagcaggatcttagagctgaggaattggcctcccaatccgaacaggtgttataatcctttcttaataggttgtgctgtggacccaatgtgagggctgtgctggtgtaaatggtgacatgttgagctggggggatgctttcggggtggggggactggttccattccatcaaaggccctcttgagagtctatccagggacccattgttttactttaacagaccagaaaagatgtttgttttccatgtcattacccccaggggataccgaatgtgtgggtagaaatttctctgtagattaaaaatcagatttttacatggattcaacaaaggagcgtcacttggatttttgttttcatccatgaatgtagctgcttctgtgtaaaatgccattttgctattaaaaatcaattcacgctgg

SEQ ID NO: 12646 - DNA, 10143 bp, Homo sapiens
  source 1..10143: mol_type = unassigned DNA
gagggagggaggctgcggacgagtgcggggaggagtttgagatgggaggcgcttgcaggggctcccccagttctgcgctgtgagccggggcacaaagagccctctgcactagcgccgcaggaccgcggacccgagttggaggcatctgtccacccatgtggttccagacacgttcatgtggccaccatgaccccgtcggcatcacaggggtaaccaaggtccacagaacgaggggaaagggtcactgtggatcaagccaggctcctctgagcagtccagggtctatttacagagagcagcaagttcctgggacagaggagacagaagggaatttccaggttcttcaggacgttcacaaccacactgagaagcatctttgcagataagtatttaaacttaccagcccatagcctaccagcctgccctcttctggtctgtgcaggaaagtgtagtatcctagaatgccaaagtgggaggggaaatgggtgatgtagctcattctcttttctacctctatggaagaaagaaagagcctgtccccattttgtggggtcccagaaagggtgattttcacacttcacatttggcgttagggctagtatttcacaaacattaccgtctggaacttttgaaggctgagttaaatgacttcatcttgtgtacttgtagaactgctattagaaggaggctggggactccctgatgatgtgaaccagcccttctcttctcagtttcagcactttgtgatcatatttataaaccttggacagggctccttggccttagagttaagtgaagagttaacactgtgactttagatgcatttttctcagtgtaagtgtctgagctcatctccagttctggactcgtgcccccactcccgggtgctgacagcaagctctgaagatatgctgagagagctccctgactctcctgactcaggtctgccagttgatgaagacagcacagttgttaccaaaaacaaaacctggcagatggtcctaggtcaggattagtggtcattctctggtcttctccagactggtgacacagggtggtcttaaaagagtcctagtccagcctctggctccccgaatttcctctggtgcatggggcatcaggaaagggcaggggagaaggagggggagcagaaaaataactgaggctgggcagaagggtcccttccatttcccatccattgcttcaaacaatgggtgattaccgtgcaccttgagtgaatgtcaaggcaggaagggttccagggccacccagtgtggcaggagcagagctgggatcagaattctggattcctgactctccgttcagctgctattcagctatcaccaagctgctgagtttgtcctactttctcctgggtcacattctgctgttgttgggaaacagggagtgagtgaagggaacctgggaacccttctcccctcaccttttaaggatgttctggggtggaataaagagaggtggagggtggggtgcctgggcccagcctccctggctcctggtccttctttcttcagcagggagttctggcaaggcctgggcctggggagggggcctgggtgcagttttctcctgcggtgtggttggctcttttgtcttccaggatgggcctgtggggtctgtgtggggaaggaaggagctgggagcctgggctgcctgtgtgtcggctggatgctgccagcaccggcatggaccaagcaacttctctgagccagatgctggggacgcagaggtgaacccagagacatgatcccatctgctcagatcttcatgtcagaacacgctttattacagtctcggcaagggggtggctccatctgggccgcatctccaggactcctggcctggacttctctttggacctcgggtgaccttggattctggccacagtgacttagcggtcagactccggtggttttctagcccgctgggtgactccctgaagatctcatcctcttcacacctgttgggatggagcctcccatggataggaactcttcctggttgatgctcagcagatgactgatctggctctggaggacagctccaggggtatgagggaggcctggcagcccactactccctcctcacctgctcgggccctgcctgctgggccctattgtctgggtctgggggccctttcctgccccatgtgaacttgattcctcctcgcgtttctgccggtgaccagacagagcctggcctgggccaagtccccactgaccacactttccccaaggctgggtctcaaaggaccctacaggatggggacaggaacaaggatgggagtcggggaggggctgtcaggcagagggcagatgcagctcctcgggtgccgctggctggagtcctttgtctccatttgctcagtgcgtaattgtcattttgtgggggacttccttggtggggcttttccatgcttttcctctccctgatggttacaaagaggagacagtcaggatctgggaggagctggagccttccccctgtgctgttgaactctgggaggggcagccagaggggctgagagtgcaccatcctgaaaagagagggtctttaagagataagatttaggctagggaaattcactagaaagagacaggtggccctgggttttttttcctgccatccaaagggaaccagtcttacccaaaggcttaaggggtcaccttagcccagtctcaggacactcttctccaatcagatcgctgcttctagttgcactgctcctggattctgttcttggggaacagaaggtggcaggacaggccccacaatctgcaattccagctccctccagaggagacagtcccagcgtttgcaagagagcagcttgtggcctcccttaggcaagtttaaaagccagatgtcctttttcccagaatgcggagtggtgtgtactattcatcagcttgggctgccacagcaccatgccagactggatggcttaaacatcaggaatttattttctgccagttctggaggctggaaagtccagatcaaggtgttaagacttggtttctggtgaggcctctctccttggcttgcaggtggcaccttctcactatgtcctcacatggccttttctctgtggagagggacagagagcatgagcaggctctggtgtctcctcctcttcttataaagacactaatatcaccatattagggcttaaacctatgacctcatttaaccttaaccccttaaaggtcccatctccaaaaacagtcacatagcaggctactgcttcaacatatgcatttgggggaggggacaccattcagttcttaacagggtggtcaccgcaaacatggaaagtcagagccttctccccttcagaattcccgcccccacccagggatggggaggaggagcagagaggtatgggaagcagacacggagagtggcaggtaccatgctggggtggctcaggagtgcttcggaggacatatggaactggcagggctcagtgcagggaggcggaggccctgggagagccgtgtcctgagaagggcctgggctacaaccctgggcaagttacttcacctctgagcctccgatgctctgtgaaatggaaggaatgtgcttgcctgtcaggtgcagggagaattcagtgagattgtgtgcctagcacagtgcctgactcccagtaggtgctcagcaaatgctcccatccatctgggagtatagacttagggtttatctatttttttttttttttggctctctggactttaaaactcagcatcttctgaaccagaggcatttctgattagcccttccctacctattttcctagtatcactctttaatcagcttggggaggtggcagcatttcatggcctccgtagtaactcacaatgcttcctggggtatttaaattctactctctcatcagcactgagcacctactttgggccctttcccgtgctagccatttgggggaaatataggtgaagagtggctggggtttgaacctttaggatttcacagccatgctggatgggataaaaccagctcacatggagaatcagagaatgggacagtgccacaaaacagtctactgaggcacaagttctgagtgcctgggaagtggtagagagaccccagagagggctgctgcagtctggaacagcttcctagcaagctgtaccaaacagggccttgaaggatgagaaagatctggctgagatgatacccgaccctctagggaaattcttaaagtaacttctaggaaatgtcattgctccttaaaaaaaaaaaaaaaaaaaaaaaagcaggttctaattcaaattccgctgcactactgaagtagtgcaggacttatcagaacctttaaaatgctaatggcaatttcaaatactcagggacagggcataggatgaagtgttccttgacttttatggccgtagaatctttttctcatggaacatcgtttagaactgtgggagatgctaggctggggtttctatgggaaaagtacagcagtgatagaagatggcataattagggtacacttaggtgctttgtagcattggctgaaaaggaagcagaccgggtgggcgtgggggagtctcaacttggttccaggagccaggccagcttgatgcgttttttttttttctaatggtgggagggcaggccaatagttggagaaactagaggcctgacagtcggtgatggaagagatgtctactaagcacggttgtcagatcttttgcggagagatgcgggtgtgcgtgtgtctgtcagagtgtaacaggatccagccctctgggaaggggctgaccagaaccaggcagggggtttctgtctaggacaagtagggtccattttcaggggagctgaaatatttgcagggggtgctctgagacccacagccaataaatagggaagcaacatgcttttgggcagggtccatgtggttagggttgattttgatggggctggggggcttagagttagaccccctgccctggtcaggccccactccctggctggtgggggcgggaggcctctgaagctgcagctggaggggccggggcagtgttgcatggtgtgattaacctactaacccagggctcagccgggacgctgtggcgtgtgacgaggtgcctggccttctgccaaccaactaacccactaaccaggcccgagcatgccctactaaccacccccccgcagccagatcctactaactgtgcagctcatgggcctttcaaggggctgggatatgggggcagccaaggctccagaaggctctgcctatgggctgggatctttgtgcagacccacgttccaggacagagaatgcaaataagactcaccaactctgccacttcctgttgagtgagtttgagtaagtcacctcacttctctcaacctcagtttcctcagtggtagaatgcgagttctgataccttacaggttgcagtgaggattcccgtcaatataagggtctcagcacatggcagacacctaaaaaaaaaaaaagtatgaggatggaggaaggcccctcaaacctggttgaacacgtctgctgcctaggccctggcctctctgggtgttctgcacacagatccttctgcctggggcaagacacttggctttgaatccatgtcacttccccacattcttcctccgtctcagctttcttttctgtaggcagctcttttgttcgattactaacccgtctaacccctggggtgcctcaactgcaccccgatcatcccttaacaaactaacggacctgcgtgcgttcttccttttctcttagcgactcctgtgtgtgtctgctgaggtgccctgtccgctggtgctgtgctctgacttactaacccagcccctactaaccctgttttctcttcttactaaccccagccctgccgagctctgggctccccccgggggctggtccccctccttttggcaagcagatgacctggggctactggccctgtagacagatgtcccactttgctgccccatattggctgtaagatcagagtccactgggccaggtctaaggcaggggatggccctattaacaagactcagaggaggaagaggtggtcctgtggatgtgggaggctggactctgagtatgacatctctcctatgtgcagaagtctggttgccactgggagtaggtgggaccagggaaatctctgggacgtgagtgtggaggcctgttggtctagactctagactgtggagctctgagcttttgtgtcctctggaaggaagctggggaagaatcctctccattgttaagtgacggggatagaagctgtcctgcacaggaagtcacgaggggggcgtatcccacgaggaaggcaggagggggcgtgcccctcaccggaaattagcagaggggcgtgtcccacaccggaagtcagaaagcggagcctttcttacaccggaagtcaatgaagcgggtctttcctacgctaaaaaccactgagtggagtatttagtacacaggaagtcggccagagaaacatttctcatatttgaaggccggaaagagggacatttctgacaccggaagtcagtgagaggactctttcccacacaggaagtcagctagagagccgtctcccctctctggagccgagagaggccggtttcccccaccgtaagtagacgtggggccgtgaccggaagtccttgggaaagatccgtcccattcccggaagctagagggcgttagttgtcgggttgaaaaggggtgtggggaggggaagcagctttaccccgggctcggagtttgcaggagagagaagtggggagcaagaagtgaacctcaggggctcacagggttcccgcagatgctcaggccggccaggaatgcatctctggctctctgttcccacggacgtcactgcctcagccagcctcccccagagcccgccagccgctaagccggggccacacctgggggtgatttcatgcctcacctccagtaggcaccttggtttctttgggctaatctctggctcccttgcgctaactcttgctctcacccagctaatccctgcctcaccctgactgccccaggggctgaccactaacaaccaacctggccctgtctgggggttccaggctcctggcctggccctgaccggttcttaattaacctttccttcaccttgactaactcctgccttcctggtctgttcctttcagcagaaactaatggtttgtggatttttttctgactaacaacaggtctaacattcctcgttactgttaacagcttggatgtcggcatggctgggaaggggctaacacagctttgaacttggctaacacaggtttgaacttggctaacacaggtttgaacttgactaacacagggaaaagcatagctaacaattttgggcgtggtggctgctctgagtcagaacaatcagaagtcggtaaagatggtagttttctaaaggaggtgccagggctctggtgtggaccaggcctgatggagcagtggtacccaccaaggtggggtcagaagtatagccagtcttgcaaggttttggccattgggcatatcttcactcctcatagtctgcatttggtttcagttcttaaaaaaatatagccttatagctacagtagtttgcacaagtagatgcagctcttataaaccttaaaatacctgtctggtgtctacagagcatatgccattttgtatagagtcacccttccccaggccagggcctagagtcttcattttggggactttgtgttttggaagttctaggacataaagctttagatcagagtattcagaagggttataactccgtcagtcatttacatgttagtagtataaattatctgagcttcctgttctaacttttagctcttctagcataaactcttctgtgcaatttagctgcaccgaggaaacgggagtttttctggaagggacttttgatctctttagactgagggaacgtcctttgggagtagaggggcagggagcatacgcaagggattccaggtgcaggtaaaaggtggcactagttcaaggttttgctgactcagtctggtagtcagagtctgcaggagaagacagttcaaggcagggcctggaggattggatcagtttagggacaggtcaaaggctggcttacagaccttagaggcaggttgcttgggtcgttgaatgctagtctggtgctgagagcccttttctctggcaactgtggactcagagctaaccaattgtagttggcagtgggggtgaagggtgatccagaggcctgagctgcagagggcacaagagagaaaagatgtcttagaaagagctttgagaacatgccttggctgctggcagggaccttggatggggtagtctacacccggaagtgcctgcctgccatcctctagtggctgccttgctccatttcactcaaagcaggaagctcacacctcctattcctgaaactcctctttgtttaactgcaaagacttgatgctgctaaggatctactatgtgccaggcactgctctgggcgctgggacctgcacctgggctttttcgtcatggtgcttttatagcctagtgggagagttggtgaagtagatagtgattcagtgagatgggtgttatgattggtcaggggtctgtgggagcaccaaggagacagacaagattgatgtgcacctactctgtgccaggcgtgtgccaggcattggggatgtagtggtagttaaacaccatttggtcttcaggagctttaattctagtgtgttgggtgcaggggggtggaatggggacagagagacacctaatccaccctgtggtggctttctggagagggaggcatctaagctgagctgtggctgggtggagtgtgggtggggatgagttccgggcagcgagagtggtggacaccagtttctggggatcagagaggatccaaagaggttctggaaggttcatgtggaatgtagcaagagataggagacatggacatggtgccgggtctggttgccaagaagtttagattttatccttaggccttggggagcgacggatatgatctgagaaagggagttagtggatttgagttttaggctggccatttggcttttccagcccaggtggaactcagaggagtttgcaatggcctctggccacattttagacaactgagcagaactttttgaaactaggaagaccctttggtccatcttttgataaacagaatccatacatgtctaccccagttggaagtatctctgcaatgactggaaagtaaagaggaccaaggtgaaaataaaggctcggaaggggagcaatcttgaaaacatgtcatcccatggtggtgggaagtccctggagaagatcaggggaaacacagtcataggctgcaagtctataagataattccattggggagggagcccatttgtcatgcatggctgcaaggggcagatacaagtgtggagtaagcttgcaagagctgatcctggtcccagagagggaaaaatatgccttggtgggtaatgaaccttttgttcccagaggcagaaggattgggactaggccaacatagagattggcgatggttgtgagattctaagagtgtgtgtgcatcttgacaatattagaggaggctgagcccaagcaggcacattctcttcgacccctccctcattcagtctgctttggagtctactgaacatcaagcttgctatgagcaggatcttagagctgaggaattggcctcccaatccgaacaggtgttataatcctttcttaataggttgtgctgtggacccaatgtgagggctgtgctggtgtaaatggtgacatgttgagctggggggatgctttcggggtggggggactggttccattccatcaaaggccctcttgagagtctatccagggacccattgttttactttaacagaccagaaaagatgtttgttttccatgtcattacccccaggggataccgaatgtgtgggtagaaatttctctgtagattaaaaatcagatttttacatggattcaacaaaggagcgtcacttggatttttgttttcatccatgaatgtagctgcttctgtgtaaaatgccattttgctattaaaaatcaattcacgctgg

SEQ ID NO: 12647 - DNA, 590 bp, Homo sapiens
  source 1..590: mol_type = unassigned DNA
agttctgcgctgtgagccggggcacaaagagccctctgcactagcgccgcaggaccgcggacccgaggtcctttctctggctgtgatccatgcttcttcccagggcaggattacactctttgaatttacttattcatcaagacagtgcagagtggtggaaagagaagcagctgagagttacgcagttggaggcatctgtccacccatgtggttccagacacgttcatgtggccaccatgaccccgtcggcatcacaggggtaaccaagagagcagcaagttcctgggacagaggagacagaagggaatttccaggttcttcaggacgttcacaaccacactgagaagcatctttgcagataagtatttaaacttaccagcccatagcctaccagcctgccctcttctggtctgtgcaggaaagtgtagtatcctagaatgccaaagtgggaggggaaatgggtgatgtagctcattctcttttctacctctatggaagaaagaaagagcctgtccccattttgtggggtcccagaaagggtgattttcacacttcacatttggcgttagggctagtatttcacaaacatt

SEQ ID NO: 12648 - DNA, 574 bp, Homo sapiens
  source 1..574: mol_type = unassigned DNA
gttctgcgctgtgagccggggcacaaagagccctctgcactagcgccgcaggaccgcggacccgagagagcagcaagttcctgggacagaggagacagaagggaatttccaggttcttcaggacgttcacaaccacactgagaagcatctttgcagataagtatttaaacttaccagcccatagcctaccagcctgccctcttctggtctgtgcaggaaagtgtagtatcctagaatgccaaagtgggaggggaaatgggtgatgtagctcattctcttttctacctctatggaagaaagaaagagcctgtccccattttgtggggtcccagaaagggtgattttcacacttcacatttggcgttagggctagtatttcacaaacattaccgtctggaacttttgaaggctgagttaaatgacttcatcttgtgtacttgtagaactgctattagaaggaggctggggactccctgatgatgtgaaccagcccttctcttctcagtttcagcactttgtgatcatatttataaaccttggacagggctccttggccttagagttaagtgaagag

SEQ ID NO: 12649 - DNA, 507 bp, Homo sapiens
  source 1..507: mol_type = unassigned DNA
acaaagagccctctgcactagcgccgcaggaccgcggacccgagatgtccggcgtcaaatttggctccaaaaggatggagagggctggtaggtaacccaccctcgttgaaaacaacagtgacatcagtttatggagaggttactctacgcagggacgtgcttggtgctttgcaagcgttatcacaacagtcccacgaggtgttggaggcatctgtccacccatgtggttccagacacgttcatgtggccaccatgaccccgtcggcatcacaggggtaaccaaggtccacagaacgaggggaaagggtcactgtggatcaagccaggctcctctgagcagtccagggtctatttacagagagcagcaagttcctgggacagaggagacagaagggaatttccaggttcttcaggacgttcacaaccacactgagaagcatctttgcagataagtatttaaacttaccagcccatagcctaccagcctgccctcttctggtctgtgca

SEQ ID NO: 12650 - DNA, 572 bp, Homo sapiens
  source 1..572: mol_type = unassigned DNA
aagagccctctgcactagcgccgcaggaccgcggacccgagttggaggcatctgtccacccatgtggttccagacacgttcatgtggccaccatgaccccgtcggcatcacaggggtaaccaaggtgatcctccctctcttcctgtgtccactggggatggtagagaccagcttaatgctttgagatcagatccatcacgaaatccgtatgtcctgagacctcctgaatcttaaggtccacagaacgaggggaaagggtcactgtggatcaagccaggctcctctgagcagtccagggtctatttacagagagcagcaagttcctgggacagaggagacagaagggaatttccaggttcttcaggacgttcacaaccacactgagaagcatctttgcagataagtatttaaacttaccagcccatagcctaccagcctgccctcttctggtctgtgcaggaaagtgtagtatcctagaatgccaaagtgggaggggaaatgggtgatgtagctcattctcttttctacctctatggaagaaagaaagagcctgtccccattttgtggggtcc

SEQ ID NO: 12651 - DNA, 589 bp, Homo sapiens
  source 1..589: mol_type = unassigned DNA
accaagactaatgaaggtccggccctccccagtgtaggaggcaggtaaatgatcacactgtgacaaatgctcaaacggggatgtgcttgcaaaggctagagacagcacgggaggaaggagcagtccattctgctgagagtgtgagtaccgagaaagcatggcactgggcttgaaggatgaggagttcgccagacacagaggatgaggagagcagcacgtgtgacgtttctccagatacttcatgctgttcacctgtgtcctcgccgcaccactgccgcacacgactcctgaaccatgggggaaaacgaggatgagaagcaggcccaggcggggcaggtttttgagaactttgtccaggcatccacgtgcaaaggtaccctccaggccttcaacattctcacacgacacctggacctagaccctctggaccacagaaacttttattccaagctcaagtccaaggtgaccacctggaaagccaaagccctgtggtacaaattggataagcgtggttcccacaaagagtataagcgagggaagtcgtgcacgaacaccaagtgtctcatagttgggggaggaccctgtggct

SEQ ID NO: 12652 - DNA, 546 bp, Homo sapiens
  source 1..546: mol_type = unassigned DNA
aatgaaggtccggccctccccagtgtaggaggcaggtaaatgatcacactgtgacaaatgctcaaacggggatgtgcttgcaaaggctagagacagcacgggaggaaggagcagtccattctgctgagagtgtagctcagttccaagaacacttattgatgcttacaccgggccaagccctgtgatgggccctgggttccagaggtgtgacgtttctccagatacttcatgctgttcacctgtgtcctcgccgcaccactgccgcacacgactcctgaaccatgggggaaaacgaggatgagaagcaggcccaggcggggcaggtttttgagaactttgtccaggcatccacgtgcaaaggtaccctccaggccttcaacattctcacacgacacctggacctagaccctctggaccacagaaacttttattccaagctcaagtccaaggtgaccacctggaaagccaaagccctgtggtacaaattggataagcgtggttcccacaaagagtataagcgagggaagtcgtgcacgaacaccaagg

SEQ ID NO: 12653 - DNA, 421 bp, Homo sapiens
  source 1..421: mol_type = unassigned DNA
cagtccattctgctgagagtgtgagtaccgagaaagcatggcactgggcttgaaggatgaggagttcgccagacacagaggatgaggagagcagcactgtagtaaacttccagccacctgaatgaaattcacctaatttaacaaactgcacgagaagcaaagcaactcccggagcatacacagcaaacaacgttctaagaattttacatatattgacttatggaagcctgacaacatcactgtgatgtaagtgctattgttatttacattttatggatgaggacaaggaggcactgaacagcaaagtatttgccctggatcaccaggatttgggcaaaggtatgctctgagacctttttccccgccttatgcccattacaaggtaccttgaatgaaaaaatacacaagaacattgcatgga

SEQ ID NO: 12654 - DNA, 3906 bp, Homo sapiens
  source 1..3906: mol_type = unassigned DNA
ctcggctggctaagcctgcgccgggccgcctcgctcgctcccagctctgtcagtggcccgcggggcccgatcgctgcgcccgcggccagggccgaggcaggcctgacccggggccgggcagcccgcgcgactttcggaacatggcaacccgtgtgtgtctcatcccagaaagagaagactttaaccactgtgatgcctgagaatccagtgagtgtgacgtttctccagatacttcatgctgttcacctgtgtcctcgccgcaccactgccgcacacgactcctgaaccatgggggaaaacgaggatgagaagcaggcccaggcggggcaggtttttgagaactttgtccaggcatccacgtgcaaaggtaccctccaggccttcaacattctcacacgacacctggacctagaccctctggaccacagaaacttttattccaagctcaagtccaaggtgaccacctggaaagccaaagccctgtggtacaaattggataagcgtggttcccacaaagagtataagcgagggaagtcgtgcacgaacaccaagtgtctcatagttgggggaggaccctgtggcttgcgcactgccattgaacttgcctacctgggagccaaagtggtcgtggtggagaagagggactccttctcccggaacaacgtgctacacctctggcctttcaccatccatgaccttcgtggcctgggagccaagaagttctatgggaagttctgtgctggctccatcgaccatatcagtattcgccaactacagctcatcctattcaaggtggccctgatgctgggagttgaaatccatgtgaatgtggagttcgtgaaggttctagagcctcctgaagatcaagaaaatcaaaaaattggctggcgggcagaatttctccctacagaccattctctgtcggagtttgagtttgacgtcatcattggtgccgatggccgcaggaacaccctggaagggttcagaagaaaagaattccgtgggaagctggcgattgccatcaccgccaacttcataaacagaaacagcacagcggaagccaaggtggaagagattagtggtgtggctttcatcttcaatcagaaattttttcaggaccttaaagaagaaacaggcatagatcttgagaacattgtttactacaaggactgcacccactattttgtaatgacagccaagaagcagagcctgctcgacaaaggtgtcatcattaacgactacatcgacacagagatgctgctgtgtgcggagaacgtgaaccaagacaacctgctatcctatgcccgggaagctgcagactttgccaccaactaccagctgccatccttagactttgccatgaaccactatgggcagcctgatgtggccatgtttgactttacctgcatgtatgcctcagagaacgcggccctggtgcgggagcggcaggcgcaccagctgctcgtggcccttgtgggtgacagcttgcttgagccattttggcccatgggtacaggctgtgcccgtggcttcctggcagcctttgacacggcatggatggtgaagagctggaaccagggcacccctcccctggagctgctggctgaaagggaaagtctctaccggctgttacctcagacaaccccggagaacatcaacaagaactttgagcagtacacgttggacccagggacacggtacccaaacctcaactcacactgtgtcaggccccatcaggtgaagcatttgtatatcactaaggagctggagcactaccctctcgagagactgggctcggtgaggagatctgtcaacctctccaggaaggagtcagatatccggcccagcaagctcctgacctggtgccagcagcagacagagggctaccagcatgtcaacgtcaccgacctgaccacatcctggcgcagtgggttggccctgtgtgccatcatccaccgcttccggcctgagctcatcaactttgactctttgaatgaagatgatgctgtggagaacaaccagctcgcatttgatgtggccgagcgagagtttgggatccctccagtgaccacgggcaaagagatggcatctgcccaggagcctgacaagctcagcatggtcatgtacctctccaagttctacgagctcttccggggcaccccactgaggcccgtggattcttggcgcaaaaactatggagaaaatgctgacctcagcttggccaaatcatccatttctaataactatctcaacctcacatttccaaggaagaggactccacgggtggatggtcaaaccggagagaatgacatgaacaaacggagacggaagggcttcaccaacctggacgagccttcaaacttttccagccgtagcttgggctccaatcaagagtgtgggagcagtaaggaaggtggaaatcagaacaaagtcaagtccatggcgaatcagctgctggccaagtttgaggagagcactcggaacccctcactcatgaagcaggaacgccgtgtctcagggataggtaagccggtcctgtgctcttcctccggccctcctgttcactcttgctgccccaagccggaggaggccacacccagcccatcacctcctctgaaaaggcagttcccctctgtggtcgtgacggggcacgtgctcagagagctcaagcaagtgtctgctggcagtgagtgcctgagcagaccttggagagccagagccaagtctgacctacagctgggtgggacagaaaatttcgctaccctgccttctacccgcccgagggcgcaggctctttccggggtgctgtggcggctgcagcaagtggaggaaaagattctccagaagagggctcagaacttggccaacagggaatttcacacaaagaacattaaggagaaggcggctcaccttgcctccatgtttggacacggggatttcccgcagaataaactactctctaaaggcctgtctcatactcatcctccatctcctccctctcgccttccgtctcctgatccagctgcttcttcctctccatcaactgttgactctgcttctcctgccagaaaggaaaagaagtcaccttcagggttccattttcatcccagccatttgagaacagtgcatcctcagctgacggtagggaaagtgtccagcggaataggggctgcagctgaagtcctggtcaatctgtacatgaatgatcacagacctaaggcccaggccacctctccagacctggaatctatgcgaaagtcatttccccttaacctgggaggcagcgacacgtgttacttctgtaagaaacgtgtgtacgtgatggaacggctgagcgccgagggccacttcttccaccgggagtgtttccgctgcagcatctgtgccaccaccttgcgcctggccgcctacacctttgactgcgatgaaggcaaattttactgcaagcctcacttcattcactgtaaaaccaatagcaaacaacggaagagacgggcagagttgaagcaacaaagagaggaggaggcaacatggcaagagcaggaagcccctcggagagacactcccaccgaaagttcttgcgcagtggccgccattggcaccctggaaggcagccccccagttcatttcagccttccagtgctacacccacttcttggctgacacacttctgctctaagagtctccctccctttatagaatgtcaaccaaagagtgccctcctcccctctcagcctcctctttagctagcctccccatctcatcacaacgcatgtctgtgacctttggtaatcatttacagtgccacacggaaccctgtattttgcacacagcaaaacaaacaatgtttagctttatttatggtatttgatgctgtaaatggaaataaatattgttctttataaa

SEQ ID NO: 12655 - DNA, 1089 bp, Homo sapiens
  source 1..1089: mol_type = unassigned DNA
cctgcgccgggccgcctcgctcgctcccagctctgtcagtggcccgcggggcccgatcgctgcgcccgcggccagggccgaggcaggcctgacccggggccgggcagcccgcgcgactttcggaacatggcaacccgtgtgtgtctcatcccagaaagagaagactttaaccactgtgatgcctgagaatccagtgtgacgtttctccagatacttcatgctgttcacctgtgtcctcgccgcaccactgccgcacacgactcctgaaccatgggggaaaacgaggatgagaagcaggcccaggcggggcaggtttttgagaactttgtccaggcatccacgtgcaaaggtaccctccaggccttcaacattctcacacgacacctggacctagaccctctggaccacagaaacttttattccaagctcaagtccaaggtgaccacctggaaagccaaagccctgtggtacaaattggataagcgtggttcccacaaagagtataagcgagggaagtcgtgcacgaacaccaagtgtctcatagttgggggaggaccctgtggcttgcgcactgccattgaacttgcctacctgggagccaaagtggtcgtggtggagaagagggactccttctcccggaacaacgtgctacacctctggcctttcaccatccatgaccttcgtggcctgggagccaagaagttctatgggaagttctgtgctggctccatcgaccatatcagtattcgccaactacagctcatcctattcaaggtggccctgatgctgggagttgaaatccatgtgaatgtggagttcgtgaaggttctagagcctcctgaagatcaagaaaatcaaagtacagtataattttctttttctgcctagaaagcagatactacaaaatagaaattccacttgctgcttccaaagggtgtttctgtaggagttattcttactgggagctggttggcataatgccactgaagggtattttactgttttttttttaccattgctatgactttaggtttgctgtttggctccaaggggatttatgattaagccattaaacctgtaatttggtta

SEQ ID NO: 12656 - DNA, 473 bp, Homo sapiens
  source 1..473: mol_type = unassigned DNA
gaacaaactttctttgcaggattgggtcaaccatggggtctgatttggagatgcttcccttctctgtcagctgctcatgtctcaaatgaagagccttttgtgatgaccatgtatggaatagtgtctgaagtaccactgcactgtacctgtctttgcgtctaaacatcactaccatcatcacgggacaaaccgcccatctcagtggtgtctggcagtgagctgaacatggcaacccgtgtgtgtctcatcccagaaagagaagactttaaccactgtgatgcctgagaatccaagacagagtctcactgcgttgcccaggctggtcttgaactcttggactcaagcaatcctcccaccttggcctcccaaagagcaggaattacaggtgtgacgtttctccagatacttcatgctgttcacctgtgtcctcgccgcaccactgccgcacacgactcctgaaccatgggggaaaa

SEQ ID NO: 12657 - DNA, 516 bp, Homo sapiens
  source 1..516: mol_type = unassigned DNA
aatgatgctgattctctcctctgcacagcctcacaatcacctgaatatccccttcaagtgcatcctgccctgggtttcctgtgtgcacattgagtttccttctctagttgaagagagagtttgcagaggctggcaaacctggagctggactgaatggcctggacaggtggagcaggtgtgacgtttctccagatacttcatgctgttcacctgtgtcctcgccgcaccactgccgcacacgactcctgaaccatgggggaaaacgaggatgagaagcaggcccaggcggggcaggtttttgagaactttgtccaggcatccacgtgcaaaggtaccctccaggccttcaacattctcacacgacacctggacctagaccctctggaccacagaaacttttattccaagctcaagtccaaggtgaccacctggaaagccaaagccctgtggtacaaattggataagcgtggttcccacaaagagtataagcgagggaagtcgtgcacgaacaccaag

SEQ ID NO: 12658 - DNA, 3358 bp, Homo sapiens
  source 1..3358: mol_type = unassigned DNA
aggaacatggcaacccgtgtgtgtctcatcccagaaagagaagactttaaccactgtgatgcctgagaatccagtgagtgtgacgtttctccagatacttcatgctgttcacctgtgtcctcgccgcaccactgccgcacacgactcctgaaccatgggggaaaacgaggatgagaagcaggcccaggcggggcaggtttttgagaactttgtccaggcatccacgtgcaaaggtaccctccaggccttcaacattctcacacgacacctggacctagaccctctggaccacagaaacttttattccaagctcaagtccaaggtgaccacctggaaagccaaagccctgtggtacaaattggataagcgtggttcccacaaagagtataagcgagggaagtcgtgcacgaacaccaagtgtctcatagttgggggaggaccctgtggcttgcgcactgccattgaacttgcctacctgggagccaaagtggtcgtggtggagaagagggactccttctcccggaacaacgtgctacacctctggcctttcaccatccatgaccttcgtggcctgggagccaagaagttctatgggaagttctgtgctggctccatcgaccatatcagtattcgccaactacagctcatcctattcaaggtggccctgatgctgggagttgaaatccatgtgaatgtggagttcgtgaaggttctagagcctcctgaagatcaagaaaatcaaaaaattggctggcgggcagaatttctccctacagaccattctctgtcggagtttgagtttgacgtcatcattggtgccgatggccgcaggaacaccctggaagggttcagaagaaaagaattccgtgggaagctggcgattgccatcaccgccaacttcataaacagaaacagcacagcggaagccaaggtggaagagattagtggtgtggctttcatcttcaatcagaaattttttcaggaccttaaagaagaaacaggcatagatcttgagaacattgtttactacaaggactgcacccactattttgtaatgacagccaagaagcagagcctgctcgacaaaggtgtcatcattaacgactacatcgacacagagatgctgctgtgtgcggagaacgtgaaccaagacaacctgctatcctatgcccgggaagctgcagactttgccaccaactaccagctgccatccttagactttgccatgaaccactatgggcagcctgatgtggccatgtttgactttacctgcatgtatgcctcagagaacgcggccctggtgcgggagcggcaggcgcaccagctgctcgtggcccttgtgggtgacagcttgcttgagccattttggcccatgggtacaggctgtgcccgtggcttcctggcagcctttgacacggcatggatggtgaagagctggaaccagggcacccctcccctggagctgctggctgaaagggaaagtctctaccggctgttacctcagacaaccccggagaacatcaacaagaactttgagcagtacacgttggacccagggacacggtacccaaacctcaactcacactgtgtcaggccccatcaggtgaagcatttgtatatcactaaggagctggagcactaccctctcgagagactgggctcggtgaggagatctgtcaacctctccaggaaggagtcagatatccggcccagcaagctcctgacctggtgccagcagcagacagagggctaccagcatgtcaacgtcaccgacctgaccacatcctggcgcagtgggttggccctgtgtgccatcatccaccgcttccggcctgagctcatcaactttgactctttgaatgaagatgatgctgtggagaacaaccagctcgcatttgatgtggccgagcgagagtttgggatccctccagtgaccacgggcaaagagatggcatctgcccaggagcctgacaagctcagcatggtcatgtacctctccaagttctacgagctcttccggggcaccccactgaggcccgtggattcttggcgcaaaaactatggagaaaatgctgacctcagcttggccaaatcatccatttctaataactatctcaacctcacatttccaaggaagaggactccacgggtggatggtcaaaccggagagaatgacatgaacaaacggagacggaagggcttcaccaacctggacgagccttcaaacttttccagccgtagcttgggctccaatcaagagtgtgggagcagtaaggaaggtggaaatcagaacaaagtcaagtccatggcgaatcagctgctggccaagtttgaggagagcactcggaacccctcactcatgaagcaggaaaagaagtcaccttcagggttccattttcatcccagccatttgagaacagtgcatcctcagctgacggtagggaaagtgtccagcggaataggggctgcagctgaagtcctggtcaatctgtacatgaatgatcacagacctaaggcccaggccacctctccagacctggaatctatgcgaaagtcatttccccttaacctgggaggcagcgacacgtgttacttctgtaagaaacgtgtgtacgtgatggaacggctgagcgccgagggccacttcttccaccgggagtgtttccgctgcagcatctgtgccaccaccttgcgcctggccgcctacacctttgactgcgatgaaggcaaattttactgcaagcctcacttcattcactgtaaaaccaatagcaaacaacggaagagacgggcagagttgaagcaacaaagagaggaggaggcaacatggcaagagcaggaagcccctcggagagacactcccaccgaaagttcttgcgcagtggccgccattggcaccctggaaggcagccccccagttcatttcagccttccagtgctacacccacttcttggctgacacacttctgctctaaggtgactggttttcttgccaattttcaaagagtggtactaacccccaacccgctttccgcaccccgtcctctccgccagcagtactggttgcactaactgtgagtgtcttgcatactgatggactcatttggtggcatggttggctaacagcatggcggggggtgttcagcttgagacccatgcctgtgttcatttcccatggagctggcagcctggtctaccccaagtgcatgccccgcctctcctctctcccttgggtctgcctgcgtgcatgcttctccagttgcgtctgcgaagctacctactttcttgggagggtcgaccttgatcatgaaacaataccatgagggggcctctgtcacctttgaaaagaacacttttt

SEQ ID NO: 12659 - DNA, 573 bp, Homo sapiens
  source 1..573: mol_type = unassigned DNA
ggtagatggtgtgcttccagctgataccaggagcagaagttttgagaagagactgtttgtcatgtggatagtggaaagccctgctctctggtaacgaatgaagaaaggctttaaagctgggtgtctacggagaggtgtgacgtttctccagatacttcatgctgttcacctgtgtcctcgccgcaccactgccgcacacgactcctgaaccatgggggaaaacgaggatgagaagcaggcccaggcggggcaggtttttgagaactttgtccaggcatccacgtgcaaaggtaccctccaggccttcaacattctcacacgacacctggacctagaccctctggaccacagaaacttttattccaagctcaagtccaaggtgaccacctggaaagccaaagccctgtggtacaaattggataagcgtggttcccacaaagagtataagcgagggaagtcgtgcacgaacaccaagtgtctcatagttgggggaggaccctgtggcttgcgcactgccattgaacttgcctacctgggagccaaagtggtcgtggtggagaagagggactcctt

SEQ ID NO: 12660 - DNA, 566 bp, Homo sapiens
  source 1..566: mol_type = unassigned DNA
agatggtgtgcttccagctgataccaggagcagaagttttgagaagagactgtttgtcatgtggatagtggaaagccctgctctctggtgtgacgtttctccagatacttcatgctgttcacctgtgtcctcgccgcaccactgccgcacacgactcctgaaccatgggggaaaacgaggatgagaagcaggcccaggcggggcaggtttttgagaactttgtccaggcatccacgtgcaaaggtaccctccaggccttcaacattctcacacgacacctggacctagaccctctggaccacagaaacttttattccaagctcaagtccaaggtgaccacctggaaagccaaagccctgtggtacaaattggataagcgtggttcccacaaagagtataagcgagggaagtcgtgcacgaacaccaagtgtctcatagttgggggaggaccctgtggcttgcgcactgccattgaacttgcctacctgggagccaaagtggtcgtggtggagaagagggactccttctcccggaacaacgtgctacacctctggcctttcaccatc

SEQ ID NO: 12661 - DNA, 593 bp, Homo sapiens
  source 1..593: mol_type = unassigned DNA
ataggggaagagattacctgcaatgccacatcgacaggccaaaaggcacaattctgtatctgttataaatatttatgtttagtattgaacactaaatagtgtggttaatatttgaatgtcttaaagaaattgcatttttacttctcagcacccatcccccaccctaacctcatcgtccaaagctgacctctgcctccccctactttcacaggtgtgacgtttctccagatacttcatgctgttcacctgtgtcctcgccgcaccactgccgcacacgactcctgaaccatgggggaaaacgaggatgagaagcaggcccaggcggggcaggtttttgagaactttgtccaggcatccacgtgcaaaggtaccctccaggccttcaacattctcacacgacacctggacctagaccctctggaccacagaaacttttattccaagctcaagtccaaggtgaccacctggaaagccaaagccctgtggtacaaattggataagcgtggttcccacaaagagtataagcgagggaagtcgtgcacgaacaccaagtgtctcatagttgggggaggaccctgtggcttgcgcactgc

SEQ ID NO: 12662 - DNA, 2868 bp, Homo sapiens
  source 1..2868: mol_type = unassigned DNA
atgggggaaaacgaggatgagaagcaggcccaggcggggcaggtttttgagaactttgtccaggcatccacgtgcaaaggtaccctccaggccttcaacattctcacacgacacctggacctagaccctctggaccacagaaacttttattccaagctcaagtccaaggtgaccacctggaaagccaaagccctgtggtacaaattggataagcgtggttcccacaaagagtataagcgagggaagtcgtgcacgaacaccaagtgtctcatagttgggggaggaccctgtggcttgcgcactgccattgaacttgcctacctgggagccaaagtggtcgtggtggagaagagggactccttctcccggaacaacgtgctacacctctggcctttcaccatccatgaccttcgtggcctgggagccaagaagttctatgggaagttctgtgctggctccatcgaccatatcagtattcgccaactacagctcatcctattcaaggtggccctgatgctgggagttgaaatccatgtgaatgtggagttcgtgaaggttctagagcctcctgaagatcaagaaaatcaaaaaattggctggcgggcagaatttctccctacagaccattctctgtcggagtttgagtttgacgtcatcattggtgccgatggccgcaggaacaccctggaagggttcagaagaaaagaattccgtgggaagctggcgattgccatcaccgccaacttcataaacagaaacagcacagcggaagccaaggtggaagagattagtggtgtggctttcatcttcaatcagaaattttttcaggaccttaaagaagaaacaggcatagatcttgagaacattgtttactacaaggactgcacccactattttgtaatgacagccaagaagcagagcctgctcgacaaaggtgtcatcattaacgactacatcgacacagagatgctgctgtgtgcggagaacgtgaaccaagacaacctgctatcctatgcccgggaagctgcagactttgccaccaactaccagctgccatccttagactttgccatgaaccactatgggcagcctgatgtggccatgtttgactttacctgcatgtatgcctcagagaacgcggccctggtgcgggagcggcaggcgcaccagctgctcgtggcccttgtgggtgacagcttgcttgagccattttggcccatgggtacaggctgtgcccgtggcttcctggcagcctttgacacggcatggatggtgaagagctggaaccagggcacccctcccctggagctgctggctgaaagggaaagtctctaccggctgttacctcagacaaccccggagaacatcaacaagaactttgagcagtacacgttggacccagggacacggtacccaaacctcaactcacactgtgtcaggccccatcaggtgaagcatttgtatatcactaaggagctggagcactaccctctcgagagactgggctcggtgaggagatctgtcaacctctccaggaaggagtcagatatccggcccagcaagctcctgacctggtgccagcagcagacagagggctaccagcatgtcaacgtcaccgacctgaccacatcctggcgcagtgggttggccctgtgtgccatcatccaccgcttccggcctgagctcatcaactttgactctttgaatgaagatgatgctgtggagaacaaccagctcgcatttgatgtggccgagcgagagtttgggatccctccagtgaccacgggcaaagagatggcatctgcccaggagcctgacaagctcagcatggtcatgtacctctccaagttctacgagctcttccggggcaccccactgaggcccgtggattcttggcgcaaaaactatggagaaaatgctgacctcagcttggccaaatcatccatttctaataactatctcaacctcacatttccaaggaagaggactccacgggtggatggtcaaaccggagagaatgacatgaacaaacggagacggaagggcttcaccaacctggacgagccttcaaacttttccagccgtagcttgggctccaatcaagagtgtgggagcagtaaggaaggtggaaatcagaacaaagtcaagtccatggcgaatcagctgctggccaagtttgaggagagcactcggaacccctcactcatgaagcaggaatctatgcgaaagtcatttccccttaacctgggaggcagcgacacgtgttacttctgtaagaaacgtgtgtacgtgatggaacggctgagcgccgagggccacttcttccaccgggagtgtttccgctgcagcatctgtgccaccaccttgcgcctggccgcctacacctttgactgcgatgaaggcaaattttactgcaagcctcacttcattcactgtaaaaccaatagcaaacaacggaagagacgggcagagttgaagcaacaaagagaggaggaggcaacatggcaagagcaggaagcccctcggagagacactcccaccgaaagttcttgcgcagtggccgccattggcaccctggaaggcagccccccaggtatctccacctccttctttaggaaggtgctgggctggcccctcaggctgccgagggacctgtgtaactggatgcagggactcctgcaagctgctggcctccatatcagggacaatgcttacaactactgctacatgtacgagctcctgagcctggggctgccactcctctgggcgttctctgaggtcctggcagccatgtacagggaatctgagggctccctcgagagcatctgcaactgggtgctcaggtgcttcccagtcaagctccgctga

SEQ ID NO: 12663 - DNA, 581 bp, Homo sapiens
  source 1..581: mol_type = unassigned DNA
agacatgaaacgatgtgagctacgagtgagtgacatgatctgacttgaggaggactgctctggttgctgtatggggacagactgcaaagtgacaagggtggaagctgggagaccagataggagccctgatatcagttcaaaggagagatggccatgacttggataaggaggcagcgtgtgagccggtgaaaattgattggattctatatctgttctgaagatagtaaacaagatttattggtggattggttgtgagagatgcacaggcaacaacaaagatgggactgtgttgacctgttcactccatactttcagatctcaagtgaggtgttcgactctgctgctggcaggggtacaggggtggccctcacaccctgacttcggggaacctatgtgttaaatggggagatgccatgagacccaaccgctacccagagaggtacaagccctgaggattgtgcttagaacttctaaactaggcagcagtgtgaacgaacttctgaggccaaaaggcagaatgtctgcgaataaaactgtccctgaaaatccagaccctgcagctactggttacagttggtcat

SEQ ID NO: 12664 - DNA, 588 bp, Homo sapiens
  source 1..588: mol_type = unassigned DNA
agacatgaaacgatgtgagctacgagtgagtgacatgatctgacttgaggaggactgctctggttgctgtatggggacagactgcaaagtgacaagggtggaagctgggagaccagataggagccctgatatcagttcaaaggagagatggccatgacttggataaggaggcagcgtgtgagccggtgaaaattgattggattctatatctgttctgaagatagtaaacaagatttattggtggattggttgtgagtgtctcatagttgggggaggaccctgtggcttgcgcactgccattgaacttgcctacctgggagccaaagtggtcgtggtggagaagagggactccttctcccggaacaacgtgctacacctctggcctttcaccatccatgaccttcgtggcctgggagccaagaagttctatgggaagttctgtgctggctccatcgaccatatcagtattcgccaactacagctcatcctattcaaggtggccctgatgctgggagttgaaatccatgtgaatgtggagttcgtgaaggttctagagcctcctgaagatcaagaaaatcaaagtacagt

SEQ ID NO: 12665 - DNA, 6307 bp, Homo sapiens
  source 1..6307: mol_type = unassigned DNA
agacagatgtgggtccatgttctagctttgctctgtgtcgccttgagcaagtcatttaactttgttaagcctcaatttctcatctacagaatgagaataataacgattccaaagggccactgtaagagttagatgagaaaacacagagctcttggtgcataatcccgctcagtaatgatcattgttggtatactgctgtgctcaaaggtcactgagcggcagtgattatgtagcattctgcatataggtggtgttcaggtattgctgtgacagttcctctctccttcctgcctgacaggtattcgccaactacagctcatcctattcaaggtggccctgatgctgggagttgaaatccatgtgaatgtggagttcgtgaaggttctagagcctcctgaagatcaagaaaatcaaaaaattggctggcgggcagaatttctccctacagaccattctctgtcggagtttgagtttgacgtcatcattggtgccgatggccgcaggaacaccctggaagggttcagaagaaaagaattccgtgggaagctggcgattgccatcaccgccaacttcataaacagaaacagcacagcggaagccaaggtggaagagattagtggtgtggctttcatcttcaatcagaaattttttcaggaccttaaagaagaaacaggcatagatcttgagaacattgtttactacaaggactgcacccactattttgtaatgacagccaagaagcagagcctgctcgacaaaggtgtcatcattaacgactacatcgacacagagatgctgctgtgtgcggagaacgtgaaccaagacaacctgctatcctatgcccgggaagctgcagactttgccaccaactaccagctgccatccttagactttgccatgaaccactatgggcagcctgatgtggccatgtttgactttacctgcatgtatgcctcagagaacgcggccctggtgcgggagcggcaggcgcaccagctgctcgtggcccttgtgggtgacagcttgcttgagccattttggcccatgggtacaggctgtgcccgtggcttcctggcagcctttgacacggcatggatggtgaagagctggaaccagggcacccctcccctggagctgctggctgaaagggaaagtctctaccggctgttacctcagacaaccccggagaacatcaacaagaactttgagcagtacacgttggacccagggacacggtacccaaacctcaactcacactgtgtcaggccccatcaggtgaagcatttgtatatcactaaggagctggagcactaccctctcgagagactgggctcggtgaggagatctgtcaacctctccaggaaggagtcagatatccggcccagcaagctcctgacctggtgccagcagcagacagagggctaccagcatgtcaacgtcaccgacctgaccacatcctggcgcagtgggttggccctgtgtgccatcatccaccgcttccggcctgagctcatcaactttgactctttgaatgaagatgatgctgtggagaacaaccagctcgcatttgatgtggccgagcgagagtttgggatccctccagtgaccacgggcaaagagatggcatctgcccaggagcctgacaagctcagcatggtcatgtacctctccaagttctacgagctcttccggggcaccccactgaggcccgtggattcttggcgcaaaaactatggagaaaatgctgacctcagcttggccaaatcatccatttctaataactatctcaacctcacatttccaaggaagaggactccacgggtggatggtcaaaccggagagaatgacatgaacaaacggagacggaagggcttcaccaacctggacgagccttcaaacttttccagccgtagcttgggctccaatcaagagtgtgggagcagtaaggaaggtggaaatcagaacaaagtcaagtccatggcgaatcagctgctggccaagtttgaggagagcactcggaacccctcactcatgaagcaggaatctatgcgaaagtcatttccccttaacctgggaggcagcgacacgtgttacttctgtaagaaacgtgtgtacgtgatggaacggctgagcgccgagggccacttcttccaccgggagtgtttccgctgcagcatctgtgccaccaccttgcgcctggccgcctacacctttgactgcgatgaaggcaaattttactgcaagcctcacttcattcactgtaaaaccaatagcaaacaacggaagagacgggcagagttgaagcaacaaagagaggaggaggcaacatggcaagagcaggaagcccctcggagagacactcccaccgaaagttcttgcgcagtggccgccattggcaccctggaaggcagccccccaggtatctccacctccttctttaggaaggtgctgggctggcccctcaggctgccgagggacctgtgtaactggatgcagggactcctgcaagctgctggcctccatatcagggacaatgcttacaactactgctacatgtacgagctcctgagcctggggctgccactcctctgggcgttctctgaggtcctggcagccatgtacagggaatctgagggctccctcgagagcatctgcaactgggtgctcaggtgcttcccagtcaagctccgctgacatggctggctgccccaaagtgccttcacatttccagggaggcttcagatggcagtgcgtttgcagtttgctcaggctctggccaggaagcctagcattctctaagcaattagctcaaagccaaagaatttcacatgggccacctccgcctggccttatcagggtgaacatctactcacggtgctagggccagggatgatatgaaggatcttttctatagctttgtgagccatacttctgggtttacatttcaatttttttaattttaattagcccagagaaagcatttttttctatgagtgtcaatttttctaaacatgggtttgaagcttataaccagttttataaaccccttgaacactgcagtgagttatcaaagccactgcctgcaaagtggatgatttaagattttacacgcatgaaaatgagtgtgccatctcctgaccagtgccttttgacttaggtacccagatgccacttgtcagcagcaggatactttttacaacacgaaagcataattattttagaagaagagagtagaagggcagaatagaattcaacttacagaagcacggagcagtgtgtggttggctgttatctgtccccctgggaggaggactgttttgctcccttgttttgatgttaaacagtagcttaaaggctttcccccccataccaactcacagccaaatgacaaagaaccgtggggtttcaacagattctacaaacatgcattttcccttcccactaatgggcactgcagggaaagcccattggcatttgaccatggagctgatgcagtgccaaagatgagctctttcaactgatggcattttagcccctgtggctcccagcggatcccccagcccgggctgcaggctgagccaaggctgtgcagggtccatattggtcaggccaagtggagtggaagactctgtccacttatgtggtgtcctttgggactgagggggtttgttagcacatcaggctattgctgggaagcgtggcctgcccagtgagcattgcctgtggacatcctgactgcttagctgctccgctgccacacatatgtggtcaaaacagaaaccaatttcacactgccctgggaaaggaatgggtctgacctccaggggaagctctaccatatcttgactggcagggaaggctgggagtggaagctatttatggactgatccaaaggacatatgcatgagtaagggtaaaaatgagcatgcaggtccacctgtgttcttactctgggtatctagaagagtcctcagctctccctactccacgctgcctagacatacacagctgcagggtctggctgaacaatcaaggggccgccagagaaaggccatctacggtgcgcagtgtatctggagttgctgggcccaagatagctctgtggagttatcactagagatgcctctggattaactaagaggtgtgcctgggtgtgggtgaggagtcagaacctttgagagctttgagatgacagtttctatggggcgggaagaaggaggtgcatttctacaaacacttccctgaaatccttgggaaaaacagaggcatggccgtggccaactctgtgggaactggcgcctctgtccttgttggcactgttctcagtccgatgacttgcattgtgttttctccaatttttgctgggattttaatgttcagcatggtgggaggaacccttgattccttttgtttgagtatagaaagtaaatttttgaggtcatgatgtgaacggccatgttattgtgattatcttcagctcaggataggctgagatgctttgtggagtgttccatgaagcccgagtcggaatctctgactgtcgtgtacagccataaggagactggtttgaattactgtggcgagacagggcgtgcctgtcagaaatctgagatgtttgtacgctctgagatgttgaacctttctggtgggcagcaccgacacccaggggtggacccccgaggatgaatgcctctaggcctccgcaacatattcaagaatgaatgggagacgctagagtaaaatgggggcagagaggatatcagggagcaagatgcaaactgtgtgcatccactctcgtaaacaagtagctggtcacaaccagaaaggttcatctctcctaagcaaacagcgactctttcagaggaagtttccctctttcaatcgtggccttattttcaactccggtgccttctcgtgatgttaatcatttccttttttccccacactaagctctcttttctatctttctctctctttccaatcttacgccatggccatcagttcatttcagccttccagtgctacacccacttcttggctgacacacttctgctctaaggtgactggttttcttgccaattttcaaagagtggtactaacccccaacccgctttccgcaccccgtcctctccgccagcagtactggttgcactaactgtgagtgtcttgcatactgatggactcatttggtggcatggttggctaacagcatggcggggggtgttcagcttgagacccatgcctgtgttcatttcccatggagctggcagcctggtctaccccaagtgcatgccccgcctctcctctctcccttgggtctgcctgcgtgcatgcttctccagttgcgtctgcgaagctacctactttcttgggagggtcgaccttgatcatgaaacaataccatgagggggcctctgtcacctttgaaaagaacactttttgagcagcctcaaaaagctcatacataccagcgccttcttaaattggctctaatgtaaagattgttaatgtcatttatcaaaaccataggtgattatttggagggatttaaaaaacttaattactctcaggcctcatcccaagcttgacacatgctctgtaggttgaacacataatcacaaatattctagcaaatgctgccttggttgcagcctgcactgtagacccaagggttttgctgtggctcttcttatctcccttggctcataaagccccagatgatgccagagcttcaattagagccatcatcatcccaggcagggatatctttgagaaatgactcagttcagccccaggcccctgtgactctgcttaaagcacacatttctgctgactcttgtacctggggcagcaggataatcaccaacacactcttaacgagaaacaacacaccaagcaccgtggagctgtcctaggcaacactcgcggtctcaggctgcggtgggcgtctgtcctgcatgtggcccagaccaccctgacccccgggcctgcctgcctggccctgcatgctgcacgctcactgtatttgtgcagatcctggccagtacaaagtcgttgctcttgtcttatcttctcttacagagtctccctccctttatagaatgtcaaccaaagagtgccctcctcccctctcagcctcctctttagctagcctccccatctcatcacaacgcatgtctgtgacctttggtaatcatttacagtgccacacggaaccctgtattttgcacacagcaaaacaaacaatgtttagctttatttatggtatttgatgctgtaaatggaaataaatattgttctttataaa

SEQ ID NO: 12666 - DNA, 331 bp, Homo sapiens
  source 1..331: mol_type = unassigned DNA
ggttcagaagaaaagaattccgtgggaagctggcgattgccatcaccgccaacttcataaacagaaacagcacagcggaagccaaggtggaagagattagtggtgtggctttcatcttcaatcagaaattttttcaggaccttaaagaagaaacaggcatagatcttgagaacattgtttactacaaggactgcacccactattttgtaatgacagccaagaagcagagcctgctcgacaaaggtgtcatcattaacgtacgtacctcttggctgcgatttcccgacttcgcgacctgggctggtgacatcagcaggtgtgaaggcagatg

SEQ ID NO: 12667 - DNA, 752 bp, Homo sapiens
  source 1..752: mol_type = unassigned DNA
aggaactctgctggaagagaacatgcttcctctcccctcctgccacactcctgaccaggcccccaagcagcagtcctcagggagctgcacccgtgccagtggccccctgccctggccccttgccttggggccgctcgtcctggtccccagccatggtggcaatgagaagggagcgccagggcagaccgtgtgagattcctgcagagcctcactgcctgcgctctccttcttgcagagtcagatatccggcccagcaagctcctgacctggtgccagcagcagacagagggctaccagcatgtcaacgtcaccgacctgaccacatcctggcgcagtgggttggccctgtgtgccatcatccaccgcttccggcctgagctcatcaactttgactctttgaatgaagatgatgctgtggagaacaaccagctcgcatttgatgtggccgagcgagagtttgggatccctccagtgaccacgggcaaagagatggcatctgcccaggagcctgacaagctcagcatggtcatgtacctctccaagttctacgagctcttccggggcaccccactgaggcccgtggattcttggcgcaaaaactatggagaaaatgctgacctcagcttggccaaatcatccatttctaataactatctcaacctcacatttccaaggaagaggactccacgggtaagttttggcctggtttcggttttatttcccattgcacatggacggggtatgaggaacgg

SEQ ID NO: 12668 - DNA, 452 bp, Homo sapiens
  source 1..452: mol_type = unassigned DNA
tcaagcaattctcctgcctcagtctcctgagtagctgggattacaggtgcccaccaccacacccggctaatttttgtatttttagtagagatagagttttgccatgttggccagcctggtctcgaactgagctcaagtgatctgcccgcctctgcctcccaaactgctgggattatagcaactttgactctttgaatgaagatgatgctgtggagaacaaccagctcgcatttgatgtggccgagcgagagtttgggatccctccagtgaccacgggcaaagagatggcatctgcccaggagcctgacaagctcagcatggtcatgtacctctccaagttctacgagctcttccggggcaccccactgaggcccgtggattcttggcgcaaaaactatggagaaaatgctgacctcagcttggccaaatcatccatttctaataactatctc

SEQ ID NO: 12669 - DNA, 538 bp, Homo sapiens
  source 1..538: mol_type = unassigned DNA
gaacaaccagctcgcatttgatgtggccgagcgagagtttgggatccctccagtgaccacgggcaaagagatggcatctgcccaggagcctgacaagctcagcatggtcatgtacctctccaagttctacgagctcttccggggcaccccactgaggcccgtggattcttggcgcaaaaactatggagaaaatgctgacctcagcttggccaaatcatccatttctaataactatctcaacctcacatttccaaggaagaggactccacgggtggatggtcaaaccggagagaatgacatgaacaaacggagacggaagggcttcaccaacctggacgagccttcaaacttttccagccgtagcttgggctccaatcaagagtgtgggagcagtaaggaaggtggaaatcagaacaaagtcaagtccatggcgaatcagctgctggccaagtttgaggagagcactcggaacccctcactcatgaagcagaataaactactctctaaaggcctgtctcatactcatcctccatctcct

SEQ ID NO: 12670 - DNA, 575 bp, Homo sapiens
  source 1..575: mol_type = unassigned DNA
ttgggctccaatcaagagtgtgggagcagtaaggaaggtggaaatcagaacaaagtcaagtccatggcgaatcagctgctggccaagtttgaggagagcactcggaacccctcactcatgaagcaggaatctatgcgaaagtcatttccccttaacctgggaggcagcgacacgtgttacttctgtaagaaacgtgtgtacgtgatggaacggctgagcgccgagggccacttcttccaccgggagtgtttccgctgcagcatctgtgccaccaccttgcgcctggccgcctacacctttgactgcgatgaaggtaaccccaggggccagggcagcactgggctctggccttggcctcaggtgtgaccttggctcgggttcctgtccctctggtggctctaggacacccaaacatacccaaaaggaagtatgatgtcatcaggaaagctgctcagggagactgggagctcctgctagaaggggaggctgcctgtggtcccagggaaggggtagcatcagcactgtggtacggcataccaggtcctggtgggcacctgtgtgcccagggctctatg

SEQ ID NO: 12671 - DNA, 459 bp, Homo sapiens
  source 1..459: mol_type = unassigned DNA
gggaaggaagcttaattttccctctttcccagttcccctctgtggtcgtgacggggcacgtgctcagagagctcaagcaagtgtctgctggcagtgagtgcctgagcagaccttggagagccagagccaagtctgacctacagctgggtgggacagaaaatttcgctaccctgccttctacccgcccgagggcgcaggctctttccggggtgctgtggcggctgcagcaagtggaggaaaagattctccagaagagggctcagaacttggccaacagggaatttcacacaaagaacattaaggagaaggcggctcaccttgcctccatgtttggacacggggatttcccgcagagcatgaagagctctttatttttcaagccaccaaataatacaagctggcatctagaaaagacccaaatgcgaagattcaaaataaataaatacatcatgagaaagg

SEQ ID NO: 12672 - DNA, 536 bp, Homo sapiens
  source 1..536: mol_type = unassigned DNA
acagctgggtgggacagaaaatttcgctaccctgccttctacccgcccgagggcgcaggctctttccggggtgctgtggcggctgcagcaagtggaggaaaagattctccaggaatctatgcgaaagtcatttccccttaacctgggaggcagcgacacgtgttacttctgtaagaaacgtgtgtacgtgatggaacggctgagcgccgagggccacttcttccaccgggagtgtttccgctgcagcatctgtgccaccaccttgcgcctggccgcctacacctttgactgcgatgaaggcaaattttactgcaagcctcacttcattcactgtaaaaccaatagcaaacaacggaagagacgggcagagttgaagcaacaaagagaggaggaggcaacatggcaagagcaggaagcccctcggagagacactcccaccgaaagttcttgcgcagtggccgccattggcaccctggaaggcagccccccaggtatctccacctccttctttaggaaggtgctgggctggcccctca

SEQ ID NO: 12673 - DNA, 557 bp, Homo sapiens
  source 1..557: mol_type = unassigned DNA
aagatactgaatgatgaggccaaccacatgctgcaactggggctctgcttccccatgggataaagtcaagccaacaagaatggctttgccttagaattaggaagtagagcctcctccaagccaggtacttatttggaaatttgctgaaaagaagagcatgtgctcaagaggaaatgaaagagttgataatgagatcctacaggaaaagaagtcaccttcagggttccattttcatcccagccatttgagaacagtgcatcctcagctgacggtagggaaagtgtccagcggaataggggctgcagctgaagtcctggtcaatctgtacatgaatgatcacagacctaaggcccaggccacctctccagacctggaatctatgcgaaagtcatttccccttaacctgggaggcagcgacacgtgttacttctgtaagaaacgtgtgtacgtgatggaacggctgagcgccgagggccacttcttccaccgggagtgtttccgctgcagcatctgtgccaccaccttgcgcctggccgcctacacctttgactgcgatg

SEQ ID NO: 12674 - DNA, 566 bp, Homo sapiens
  source 1..566: mol_type = unassigned DNA
gaggaagagatgggccagctcggtgcagtgtgaggaacgctctgatatctaggcggggaccatcattctgcgtggggtcacaggatcacttggaaaatgcctctttgtagaggtctagccatcgtctgcagcctctggcatgggtgcgtgtgacaacagctgcgtcgccgtgtttctatctagattggctctggggagaggaggcagggagctcgtcctgtgtgggccatgccactcttgtgcagaggaaagtgatttaagacaagagagaagtcccagaacatggaaatgcaaagctgcacaaacggccgtgctttgttttaatttttgtggctgacggtagggaaagtgtccagcggaataggggctgcagctgaagtcctggtcaatctgtacatgaatgatcacagacctaaggcccaggccacctctccagacctggaatctatgcgaaagtcatttccccttaacctgggaggcagcgacacgtgttacttctgtaagaaacgtgtgtacgtgatggaacggctgagcgccgagggccacttcttccaccgggagtgttt

SEQ ID NO: 12675 - DNA, 3982 bp, Homo sapiens
  source 1..3982: mol_type = unassigned DNA
ttgggcttcctaatcagaaagggagcaaggagctcctgggctttgtttgcaccagtctgccaggcactcctttccctgctcagccctatttagtgcctgtgctttcgctggaagccagtgagttagccttaggccctgaggatgggcactgctaccaggaataggggagctgtggtgagcccgtcatctgctttgcagttccctggactccctgctttatgtttgaggctttctcttatcagtttagatgtgacctcccaagggcagtcttgggttttgatggaagtcatcatttcacccacacacaagttactgttatttggtgtggtgatggatatcaacccctgcccagaggccctgcagcctccattgctgctctctctggccacatctcccagaggctgggttcagaagctggggaggacctagagcttccctcactctacgatcctgggatcaggagcagtgtttctagaatctcatgctatgtgtatttacctcccacaagaagagactgcagcgataccagggtgggcttccagagcaggcttccagagctgggggtgaggggtgaaggggagagcaagctggggtttgcagaagggggtatgtataattgtgccatgctctttgggctgtcagcttccaccccttccccagctctttgacaccttggtgggggtccaggcatttgtaggtaccctcaggagcacaggcacccacaacctgtcactgggccatgcaccccagggcccaggcagagctgccacctcgctgtctccaagccgaccttgcctggcgctagctctggagcctgctgcagtccccatcctgtcctacctgcccagtgtgcgcccattccacatactgctcttgttggcagggtgggctgtggtcctgctgggagggacctgggagcttcaaggcaggctagggcaggctgaatctagaggagggaagggagggaggaagcaaggtataagaaaaaaactgcttctctctactctcacaccactcacctctggtcaccaaataaagtggggatgtttctccccaccaacaaaatctataaatggaaaggttttccctgagttctacgagcgatccttgcaaattagttaaacccgaggagggaaacacggttactggtttattatacaggatcttatcaaggatagggaggaacagccaggtgaggagaggcacagggcagggcatgtgggaaagggtgggcacctctctgccgtctctggggcactgcccttcaggggcctctgcatggtccaccctccagaagctccaaaccctaaccttttcggtttctatggaggcttcgttatgaagggcatgatcgattacatcactggctgttggtgattaactcaaccttcagcctctccgcccttgtaggtcagtgtgtgggactgaaagttccaaccctttaatcacagggttggttcccctggcaaccagccccatcctgaagctatccaggagctcaagagtcacctcgttccagcaaaggatgctcctatcacccaggaaatcccaggggctttaggatctctgcatcagatgctgctgtcactcagaaaggtacaaaggtcttaggagctctgcctcaggaaccagggggcagagtccaaatatgtatttccgaccatatcacaatatcacacaaggtagtcctggcccagagcctgccaagtgccaggcaataggacacacattctctcgtgcagtccttcccacaaactcgggagacaggtataactctccccattttactaaatgaggaactgagctcagaagttctgtgctttacgccaagtctcagcactggcccatggtggagctgggcccatacccttcccctggtcttcctggtccctgagcagctgcctgcagccctccggggacaaggggtctctggaagagggtggccgcagtctggcagtctacctttctgtctgagggggcttggttcctgattttcttctcctctttgcttggcttgtctaactcgcaggtttttggggcttttgggtaatgattgggtctgagtaccacgtttaccccatgcccctgctgagtgaagctgtgaatgccccagggctggggggcaggagaccagagtacagtctggaatcttgaatttatttgctaagcggcctcagatagaccgttcccttctctgggattcatgtacatatctgtgcaatgagaggctcaggaactttggaaggccttgcaccccacggtgaatgtaacagtcccatggcccacccaggactaaaaggcttttggtttttaatcttttttttcctcgaatttttttattgtgttaaaacatacatgacgtaaaatttaccaccttaacttttttttttttttttttttttttgagacagtgttttactcttgttgctcaggctggagtacaatggtacgatctcagctcactgcaacctctgcctcccaggttcaagtgattctccagcctcagcctcccaagtagctgagattacaggcatgcaccaccatgcctggctaattttgtgtttttagtagagacgtggtttctctatgttggtcaggctggtcttgaactccggacctcaggtgatccacccatctcggcctcccaaagtactgggattacaggcgtgagccaccacacccggccagccttaaccattttttaagggtacggtttagtggtattaaatacatccttcgtgtgcaaccctcaccatcctcccactccagaactcttagttgttgtaaaactggaactctgtacccactaaacaacagcaaccactgttctactgcctgtctctacgattttgactactctaggtaccacatataagtggaatcctagagtacttgtgtttttgcggccacagggttttatttattttcttttctccacctccagaatccccgcgttctgctcctggctggttttgcttctcctgggtcgtggggtgctatttgcatgtgggtgaggagccctctccccatccatcctgcttgtgttttcctcctgggtgctaactggcctctacctttgtctctgtctcctctgcctctgctcttggttagctgacggtagggaaagtgtccagcggaataggggctgcagctgaagtcctggtcaatctgtacatgaatgatcacagacctaaggcccaggccacctctccagacctggaatctatgcgaaagtcatttccccttaacctgggaggcagcgacacgtgttacttctgtaagaaacgtgtgtacgtgatggaacggctgagcgccgagggccacttcttccaccgggagtgtttccgctgcagcatctgtgccaccaccttgcgcctggccgcctacacctttgactgcgatgaaggcaaattttactgcaagcctcacttcattcactgtaaaaccaatagcaaacaacggaagagacgggcagagttgaagcaacaaagagaggaggaggcaacatggcaagagcaggaagcccctcggagagacactcccaccgaaagttcttgcgcagtggccgccattggcaccctggaaggcagccccccagttcatttcagccttccagtgctacacccacttcttggctgacacacttctgctctaaggtgactggttttcttgccaattttcaaagagtggtactaacccccaacccgctttccgcaccccgtcctctccgccagcagtactggttgcactaactagtctccctccctttatagaatgtcaaccaaagagtgccctcctcccctctcagcctcctctttagctagcctccccatctcatcacaacgcatgtctgtgacctttggtaatcatttacagtgccacacggaaccctgtattttgcacacagcaaaacaaacaatgtttagctttatttatggtatttgatgctgtaaatggaaataaatattgttctttataaagc

SEQ ID NO: 12676 - DNA, 5233 bp, Homo sapiens
  source 1..5233: mol_type = unassigned DNA
ctcaggagcacaggcacccacaacctgtcactgggccatgcaccccagggcccaggcagagctgccacctcgctgtctccaagccgaccttgcctggcgctagctctggagcctgctgcagtccccatcctgtcctacctgcccagtgtgcgcccattccacatactgctcttgttggcagggtgggctgtggtcctgctgggagggacctgggagcttcaaggcaggctagggcaggctgaatctagaggagggaagggagggaggaagcaaggtataagaaaaaaactgcttctctctactctcacaccactcacctctggtcaccaaataaagtggggatgtttctccccaccaacaaaatctataaatggaaaggttttccctgagttctacgagcgatccttgcaaattagttaaacccgaggagggaaacacggttactggtttattatacaggatcttatcaaggatagggaggaacagccaggtgaggagaggcacagggcagggcatgtgggaaagggtgggcacctctctgccgtctctggggcactgcccttcaggggcctctgcatggtccaccctccagaagctccaaaccctaaccttttcggtttctatggaggcttcgttatgaagggcatgatcgattacatcactggctgttggtgattaactcaaccttcagcctctccgcccttgtaggtcagtgtgtgggactgaaagttccaaccctttaatcacagggttggttcccctggcaaccagccccatcctgaagctatccaggagctcaagagtcacctcgttccagcaaaggatgctcctatcacccaggaaatcccaggggctttaggatctctgcatcagatgctgctgtcactcagaaaggtacaaaggtcttaggagctctgcctcaggaaccagggggcagagtccaaatatgtatttccgaccatatcacaatatcacacaaggtagtcctggcccagagcctgccaagtgccaggcaataggacacacattctctcgtgcagtccttcccacaaactcgggagacaggtataactctccccattttactaaatgaggaactgagctcagaagttctgtgctttacgccaagtctcagcactggcccatggtggagctgggcccatacccttcccctggtcttcctggtccctgagcagctgcctgcagccctccggggacaaggggtctctggaagagggtggccgcagtctggcagtctacctttctgtctgagggggcttggttcctgattttcttctcctctttgcttggcttgtctaactcgcaggtttttggggcttttgggtaatgattgggtctgagtaccacgtttaccccatgcccctgctgagtgaagctgtgaatgccccagggctggggggcaggagaccagagtacagtctggaatcttgaatttatttgctaagcggcctcagatagaccgttcccttctctgggattcatgtacatatctgtgcaatgagaggctcaggaactttggaaggccttgcaccccacggtgaatgtaacagtcccatggcccacccaggactaaaaggcttttggtttttaatcttttttttcctcgaatttttttattgtgttaaaacatacatgacgtaaaatttaccaccttaacttttttttttttttttttttttttgagacagtgttttactcttgttgctcaggctggagtacaatggtacgatctcagctcactgcaacctctgcctcccaggttcaagtgattctccagcctcagcctcccaagtagctgagattacaggcatgcaccaccatgcctggctaattttgtgtttttagtagagacgtggtttctctatgttggtcaggctggtcttgaactccggacctcaggtgatccacccatctcggcctcccaaagtactgggattacaggcgtgagccaccacacccggccagccttaaccattttttaagggtacggtttagtggtattaaatacatccttcgtgtgcaaccctcaccatcctcccactccagaactcttagttgttgtaaaactggaactctgtacccactaaacaacagcaaccactgttctactgcctgtctctacgattttgactactctaggtaccacatataagtggaatcctagagtacttgtgtttttgcggccacagggttttatttattttcttttctccacctccagaatccccgcgttctgctcctggctggttttgcttctcctgggtcgtggggtgctatttgcatgtgggtgaggagccctctccccatccatcctgcttgtgttttcctcctgggtgctaactggcctctacctttgtctctgtctcctctgcctctgctcttggttagctgacggtagggaaagtgtccagcggaataggggctgcagctgaagtcctggtcaatctgtacatgaatgatcacagacctaaggcccaggccacctctccagacctggtaaggacatgcacccccagccttcacccacagacactggctctggcatcccagggcgggcacatgggatgtcgagaggatgccctggccctcccgaggctcctcttctcttggaacaagagggggctgagaatgagctgaatcagggcagaagttaaaaggagcctgcttttccttaaagacagatctcactcaggtcccctgtggtctttttgaaaatagagatcttcctgctctctgtggctttggagaacggcctggtagaaaggcccaggtgaggccgtgagcataattgaatggccctcactttcagtgtttagtgtccaacctgaacagactctgtgcattggattgagaaaaaggtcatggggaaaatagccctttgatttgaattctccctttctctaaactgggctgctcgctgccatcaccaggaattttagttgaccattctttctgtttccttttggcccattgccctggaatcgcccaggggtactgctgccctggcccgtgccctcccaattcacaactaggactataactgaccagatttgatgccacaagctttcctcacccaacctgtgccactgcaggggaacaggacacctaaaacatcctcagcgggccagtttcaggacctttgtccagaaccaggtgacacttaatcccaaggacagatcctggaaagaatatcctggggtggacagggttgtgagtaaagcccactccgtcagaccaggatcactcccaccccaaaaccagagcagccaacctcggggagagcccctcccgggcccaccttgttgtctcgggcctgtctgggagtacagttaacagaagcccctgcagggttggggtctgggttgggggtgtatcttcctacccctccctctttgctgcagtggcagtagcaggaagcagaagcccacgaggtccccagcattcagtgtggaatttctaaaagccttggcctggcatttgaaggctcgggataagccataatacacccactcttctctcccgatccccaggaatctatgcgaaagtcatttccccttaacctgggaggcagcgacacgtgttacttctgtaagaaacgtgtgtacgtgatggaacggctgagcgccgagggccacttcttccaccgggagtgtttccgctgcagcatctgtgccaccaccttgcgcctggccgcctacacctttgactgcgatgaaggcaaattttactgcaagcctcacttcattcactgtaaaaccaatagcaaacaacggaagagacgggcagagttgaagcaacaaagagaggaggaggcaacatggcaagagcaggaagcccctcggagagacactcccaccgaaagttcttgcgcagtggccgccattggcaccctggaaggcagccccccagttcatttcagccttccagtgctacacccacttcttggctgacacacttctgctctaaggtgactggttttcttgccaattttcaaagagtggtactaacccccaacccgctttccgcaccccgtcctctccgccagcagtactggttgcactaactgtgagtgtcttgcatactgatggactcatttggtggcatggttggctaacagcatggcggggggtgttcagcttgagacccatgcctgtgttcatttcccatggagctggcagcctggtctaccccaagtgcatgccccgcctctcctctctcccttgggtctgcctgcgtgcatgcttctccagttgcgtctgcgaagctacctactttcttgggagggtcgaccttgatcatgaaacaataccatgagggggcctctgtcacctttgaaaagaacactttttgagcagcctcaaaaagctcatacataccagcgccttcttaaattggctctaatgtaaagattgttaatgtcatttatcaaaaccataggtgattatttggagggatttaaaaaacttaattactctcaggcctcatcccaagcttgacacatgctctgtaggttgaacacataatcacaaatattctagcaaatgctgccttggttgcagcctgcactgtagacccaagggttttgctgtggctcttcttatctcccttggctcataaagccccagatgatgccagagcttcaattagagccatcatcatcccaggcagggatatctttgagaaatgactcagttcagccccaggcccctgtgactctgcttaaagcacacatttctgctgactcttgtacctggggcagcaggataatcaccaacacactcttaacgagaaacaacacaccaagcaccgtggagctgtcctaggcaacactcgcggtctcaggctgcggtgggcgtctgtcctgcatgtggcccagaccaccctgacccccgggcctgcctgcctggccctgcatgctgcacgctcactgtatttgtgcagatcctggccagtacaaagtcgttgctcttgtcttatcttctcttacagagtctccctccctttatagaatgtcaaccaaagagtgccctcctcccctctcagcctcctctttagctagcctccccatctcatcacaacgcatgtctgtgacctttggtaatcatttacagtgccacacggaaccctgtattttgcacacagcaaaacaaacaatgtttagctttatttatggtatttgatgctgtaaatggaaataaatattgttctttat

SEQ ID NO: 12677 - DNA, 435 bp, Homo sapiens
  source 1..435: mol_type = unassigned DNA
tgtaagaaacgtgtgtacgtgatggaacggctgagcgccgagggccacttcttccaccgggagtgtttccgctgcagcatctgtgccaccaccttgcgcctggccgcctacacctttgactgcgatgaaggcaaattttactgcaagcctcacttcattcactgtaaaaccaatagcaaacaacggaagagacgggcagagttgaagcaacaaagagaggaggaggcaacatggcaagagcaggaagcccctcggagagacactcccaccgaaagttcttgcgcagtggccgccattggcaccctggaaggcagccccccaggtacccagatgccacttgtcagcagcaggatactttttacaacacgaaagcataattattttagaagaagagagtagaagggcagaatagaattcaacttacagaagcacgga

SEQ ID NO: 12678 - DNA, 489 bp, Homo sapiens
  source 1..489: mol_type = unassigned DNA
tggttgcagggtctggcgagttcagtttgtattggctgttggctttgttgaagtagtcctctggaagacttacagacaaatgccctcatttccatctctttctcaggaggaggcaacatggcaagagcaggaagcccctcggagagacactcccaccgaaagttcttgcgcagtggccgccattggcaccctggaaggcagccccccagttcatttcagccttccagtgctacacccacttcttggctgacacacttctgctctaagagtctccctccctttatagaatgtcaaccaaagagtgccctcctcccctctcagcctcctctttagctagcctccccatctcatcacaacgcatgtctgtgacctttggtaatcatttacagtgccacacggaaccctgtattttgcacacagcaaaacaaacaatgtttagctttatttatggtatttgatgctgtaaatggaaataaatattgttcttta

SEQ ID NO: 12679 - DNA, 6625 bp, Homo sapiens
  source 1..6625: mol_type = unassigned DNA
gtgtgacgtttctccagatacttcatgctgttcacctgtgtcctcgccgcaccactgccgcacacgactcctgaaccatgggggaaaacgaggatgagaagcaggcccaggcggggcaggtttttgagaactttgtccaggcatccacgtgcaaaggtaccctccaggccttcaacattctcacacgacacctggacctagaccctctggaccacagaaacttttattccaagctcaagtccaaggtgaccacctggaaagccaaagccctgtggtacaaattggataagcgtggttcccacaaagagtataagcgagggaagtcgtgcacgaacaccaagtgtctcatagttgggggaggaccctgtggcttgcgcactgccattgaacttgcctacctgggagccaaagtggtcgtggtggagaagagggactccttctcccggaacaacgtgctacacctctggcctttcaccatccatgaccttcgtggcctgggagccaagaagttctatgggaagttctgtgctggctccatcgaccatatcagtattcgccaactacagctcatcctattcaaggtggccctgatgctgggagttgaaatccatgtgaatgtggagttcgtgaaggttctagagcctcctgaagatcaagaaaatcaaaaaattggctggcgggcagaatttctccctacagaccattctctgtcggagtttgagtttgacgtcatcattggtgccgatggccgcaggaacaccctggaagggttcagaagaaaagaattccgtgggaagctggcgattgccatcaccgccaacttcataaacagaaacagcacagcggaagccaaggtggaagagattagtggtgtggctttcatcttcaatcagaaattttttcaggaccttaaagaagaaacaggcatagatcttgagaacattgtttactacaaggactgcacccactattttgtaatgacagccaagaagcagagcctgctcgacaaaggtgtcatcattaacgactacatcgacacagagatgctgctgtgtgcggagaacgtgaaccaagacaacctgctatcctatgcccgggaagctgcagactttgccaccaactaccagctgccatccttagactttgccatgaaccactatgggcagcctgatgtggccatgtttgactttacctgcatgtatgcctcagagaacgcggccctggtgcgggagcggcaggcgcaccagctgctcgtggcccttgtgggtgacagcttgcttgagccattttggcccatgggtacaggctgtgcccgtggcttcctggcagcctttgacacggcatggatggtgaagagctggaaccagggcacccctcccctggagctgctggctgaaagggaaagtctctaccggctgttacctcagacaaccccggagaacatcaacaagaactttgagcagtacacgttggacccagggacacggtacccaaacctcaactcacactgtgtcaggccccatcaggtgaagcatttgtatatcactaaggagctggagcactaccctctcgagagactgggctcggtgaggagatctgtcaacctctccaggaaggagtcagatatccggcccagcaagctcctgacctggtgccagcagcagacagagggctaccagcatgtcaacgtcaccgacctgaccacatcctggcgcagtgggttggccctgtgtgccatcatccaccgcttccggcctgagctcatcaactttgactctttgaatgaagatgatgctgtggagaacaaccagctcgcatttgatgtggccgagcgagagtttgggatccctccagtgaccacgggcaaagagatggcatctgcccaggagcctgacaagctcagcatggtcatgtacctctccaagttctacgagctcttccggggcaccccactgaggcccgtggattcttggcgcaaaaactatggagaaaatgctgacctcagcttggccaaatcatccatttctaataactatctcaacctcacatttccaaggaagaggactccacgggtggatggtcaaaccggagagaatgacatgaacaaacggagacggaagggcttcaccaacctggacgagccttcaaacttttccagccgtagcttgggctccaatcaagagtgtgggagcagtaaggaaggtggaaatcagaacaaagtcaagtccatggcgaatcagctgctggccaagtttgaggagagcactcggaacccctcactcatgaagcaggaaaagaagtcaccttcagggttccattttcatcccagccatttgagaacagtgcatcctcaggaatctatgcgaaagtcatttccccttaacctgggaggcagcgacacgtgttacttctgtaagaaacgtgtgtacgtgatggaacggctgagcgccgagggccacttcttccaccgggagtgtttccgctgcagcatctgtgccaccaccttgcgcctggccgcctacacctttgactgcgatgaaggcaaattttactgcaagcctcacttcattcactgtaaaaccaatagcaaacaacggaagagacgggcagagttgaagcaacaaagagaggaggaggcaacatggcaagagcaggaagcccctcggagagacactcccaccgaaagttcttgcgcagtggccgccattggcaccctggaaggcagccccccaggtatctccacctccttctttaggaaggtgctgggctggcccctcaggctgccgagggacctgtgtaactggatgcagggactcctgcaagctgctggcctccatatcagggacaatgcttacaactactgctacatgtacgagctcctgagcctggggctgccactcctctgggcgttctctgaggtcctggcagccatgtacagggaatctgagggctccctcgagagcatctgcaactgggtgctcaggtgcttcccagtcaagctccgctgacatggctggctgccccaaagtgccttcacatttccagggaggcttcagatggcagtgcgtttgcagtttgctcaggctctggccaggaagcctagcattctctaagcaattagctcaaagccaaagaatttcacatgggccacctccgcctggccttatcagggtgaacatctactcacggtgctagggccagggatgatatgaaggatcttttctatagctttgtgagccatacttctgggtttacatttcaatttttttaattttaattagcccagagaaagcatttttttctatgagtgtcaatttttctaaacatgggtttgaagcttataaccagttttataaaccccttgaacactgcagtgagttatcaaagccactgcctgcaaagtggatgatttaagattttacacgcatgaaaatgagtgtgccatctcctgaccagtgccttttgacttaggtacccagatgccacttgtcagcagcaggatactttttacaacacgaaagcataattattttagaagaagagagtagaagggcagaatagaattcaacttacagaagcacggagcagtgtgtggttggctgttatctgtccccctgggaggaggactgttttgctcccttgttttgatgttaaacagtagcttaaaggctttcccccccataccaactcacagccaaatgacaaagaaccgtggggtttcaacagattctacaaacatgcattttcccttcccactaatgggcactgcagggaaagcccattggcatttgaccatggagctgatgcagtgccaaagatgagctctttcaactgatggcattttagcccctgtggctcccagcggatcccccagcccgggctgcaggctgagccaaggctgtgcagggtccatattggtcaggccaagtggagtggaagactctgtccacttatgtggtgtcctttgggactgagggggtttgttagcacatcaggctattgctgggaagcgtggcctgcccagtgagcattgcctgtggacatcctgactgcttagctgctccgctgccacacatatgtggtcaaaacagaaaccaatttcacactgccctgggaaaggaatgggtctgacctccaggggaagctctaccatatcttgactggcagggaaggctgggagtggaagctatttatggactgatccaaaggacatatgcatgagtaagggtaaaaatgagcatgcaggtccacctgtgttcttactctgggtatctagaagagtcctcagctctccctactccacgctgcctagacatacacagctgcagggtctggctgaacaatcaaggggccgccagagaaaggccatctacggtgcgcagtgtatctggagttgctgggcccaagatagctctgtggagttatcactagagatgcctctggattaactaagaggtgtgcctgggtgtgggtgaggagtcagaacctttgagagctttgagatgacagtttctatggggcgggaagaaggaggtgcatttctacaaacacttccctgaaatccttgggaaaaacagaggcatggccgtggccaactctgtgggaactggcgcctctgtccttgttggcactgttctcagtccgatgacttgcattgtgttttctccaatttttgctgggattttaatgttcagcatggtgggaggaacccttgattccttttgtttgagtatagaaagtaaatttttgaggtcatgatgtgaacggccatgttattgtgattatcttcagctcaggataggctgagatgctttgtggagtgttccatgaagcccgagtcggaatctctgactgtcgtgtacagccataaggagactggtttgaattactgtggcgagacagggcgtgcctgtcagaaatctgagatgtttgtacgctctgagatgttgaacctttctggtgggcagcaccgacacccaggggtggacccccgaggatgaatgcctctaggcctccgcaacatattcaagaatgaatgggagacgctagagtaaaatgggggcagagaggatatcagggagcaagatgcaaactgtgtgcatccactctcgtaaacaagtagctggtcacaaccagaaaggttcatctctcctaagcaaacagcgactctttcagaggaagtttccctctttcaatcgtggccttattttcaactccggtgccttctcgtgatgttaatcatttccttttttccccacactaagctctcttttctatctttctctctctttccaatcttacgccatggccatcagttcatttcagccttccagtgctacacccacttcttggctgacacacttctgctctaaggtgactggttttcttgccaattttcaaagagtggtactaacccccaacccgctttccgcaccccgtcctctccgccagcagtactggttgcactaactgtgagtgtcttgcatactgatggactcatttggtggcatggttggctaacagcatggcggggggtgttcagcttgagacccatgcctgtgttcatttcccatggagctggcagcctggtctaccccaagtgcatgccccgcctctcctctctcccttgggtctgcctgcgtgcatgcttctccagttgcgtctgcgaagctacctactttcttgggagggtcgaccttgatcatgaaacaataccatgagggggcctctgtcacctttgaaaagaacactttttgagcagcctcaaaaagctcatacataccagcgccttcttaaattggctctaatgtaaagattgttaatgtcatttatcaaaaccataggtgattatttggagggatttaaaaaacttaattactctcaggcctcatcccaagcttgacacatgctctgtaggttgaacacataatcacaaatattctagcaaatgctgccttggttgcagcctgcactgtagacccaagggttttgctgtggctcttcttatctcccttggctcataaagccccagatgatgccagagcttcaattagagccatcatcatcccaggcagggatatctttgagaaatgactcagttcagccccaggcccctgtgactctgcttaaagcacacatttctgctgactcttgtacctggggcagcaggataatcaccaacacactcttaacgagaaacaacacaccaagcaccgtggagctgtcctaggcaacactcgcggtctcaggctgcggtgggcgtctgtcctgcatgtggcccagaccaccctgacccccgggcctgcctgcctggccctgcatgctgcacgctcactgtatttgtgcagatcctggccagtacaaagtcgttgctcttgtcttatcttctcttacagagtctccctccctttatagaatgtcaaccaaagagtgccctcctcccctctcagcctcctctttagctagcctccccatctcatcacaacgcatgtctgtgacctttggtaatcatttacagtgccacacggaaccctgtattttgcacacagcaaaacaaacaatgtttagctttatttatggtatttgatgctgtaaatggaaataaatattgttctttataaagctc

SEQ ID NO: 12680 - DNA, 3711 bp, Homo sapiens
  source 1..3711: mol_type = unassigned DNA
gaacatggcaacccgtgtgtgtctcatcccagaaagagaagactttaaccactgtgatgcctgagaatccagtgagtgtgacgtttctccagatacttcatgctgttcacctgtgtcctcgccgcaccactgccgcacacgactcctgaaccatgggggaaaacgaggatgagaagcaggcccaggcggggcaggtttttgagaactttgtccaggcatccacgtgcaaaggtaccctccaggccttcaacattctcacacgacacctggacctagaccctctggaccacagaaacttttattccaagctcaagtccaaggtgaccacctggaaagccaaagccctgtggtacaaattggataagcgtggttcccacaaagagtataagcgagggaagtcgtgcacgaacaccaagtgtctcatagttgggggaggaccctgtggcttgcgcactgccattgaacttgcctacctgggagccaaagtggtcgtggtggagaagagggactccttctcccggaacaacgtgctacacctctggcctttcaccatccatgaccttcgtggcctgggagccaagaagttctatgggaagttctgtgctggctccatcgaccatatcagtattcgccaactacagctcatcctattcaaggtggccctgatgctgggagttgaaatccatgtgaatgtggagttcgtgaaggttctagagcctcctgaagatcaagaaaatcaaaaaattggctggcgggcagaatttctccctacagaccattctctgtcggagtttgagtttgacgtcatcattggtgccgatggccgcaggaacaccctggaagggttcagaagaaaagaattccgtgggaagctggcgattgccatcaccgccaacttcataaacagaaacagcacagcggaagccaaggtggaagagattagtggtgtggctttcatcttcaatcagaaattttttcaggaccttaaagaagaaacaggcatagatcttgagaacattgtttactacaaggactgcacccactattttgtaatgacagccaagaagcagagcctgctcgacaaaggtgtcatcattaacgactacatcgacacagagatgctgctgtgtgcggagaacgtgaaccaagacaacctgctatcctatgcccgggaagctgcagactttgccaccaactaccagctgccatccttagactttgccatgaaccactatgggcagcctgatgtggccatgtttgactttacctgcatgtatgcctcagagaacgcggccctggtgcgggagcggcaggcgcaccagctgctcgtggcccttgtgggtgacagcttgcttgagccattttggcccatgggtacaggctgtgcccgtggcttcctggcagcctttgacacggcatggatggtgaagagctggaaccagggcacccctcccctggagctgctggctgaaagggaaagtctctaccggctgttacctcagacaaccccggagaacatcaacaagaactttgagcagtacacgttggacccagggacacggtacccaaacctcaactcacactgtgtcaggccccatcaggtgaagcatttgtatatcactaaggagctggagcactaccctctcgagagactgggctcggtgaggagatctgtcaacctctccaggaaggagtcagatatccggcccagcaagctcctgacctggtgccagcagcagacagagggctaccagcatgtcaacgtcaccgacctgaccacatcctggcgcagtgggttggccctgtgtgccatcatccaccgcttccggcctgagctcatcaactttgactctttgaatgaagatgatgctgtggagaacaaccagctcgcatttgatgtggccgagcgagagtttgggatccctccagtgaccacgggcaaagagatggcatctgcccaggagcctgacaagctcagcatggtcatgtacctctccaagttctacgagctcttccggggcaccccactgaggcccgtggattcttggcgcaaaaactatggagaaaatgctgacctcagcttggccaaatcatccatttctaataactatctcaacctcacatttccaaggaagaggactccacgggtggatggtcaaaccggagagaatgacatgaacaaacggagacggaagggcttcaccaacctggacgagccttcaaacttttccagccgtagcttgggctccaatcaagagtgtgggagcagtaaggaaggtggaaatcagaacaaagtcaagtccatggcgaatcagctgctggccaagtttgaggagagcactcggaacccctcactcatgaagcaggaacgccgtgtctcagggataggtaagccggtcctgtgctcttcctccggccctcctgttcactcttgctgccccaagccggaggaggccacacccagcccatcacctcctctgaaaaggcagttcccctctgtggtcgtgacggggcacgtgctcagagagctcaagcaagtgtctgctggcagtgagtgcctgagcagaccttggagagccagagccaagtctgacctacagctgggtgggacagaaaatttcgctaccctgccttctacccgcccgagggcgcaggctctttccggggtgctgtggcggctgcagcaagtggaggaaaagattctccagaagagggctcagaacttggccaacagggaatttcacacaaagaacattaaggagaaggcggctcaccttgcctccatgtttggacacggggatttcccgcagaataaactactctctaaaggcctgtctcatactcatcctccatctcctccctctcgccttccgtctcctgatccagctgcttcttcctctccatcaactgttgactctgcttctcctgccagaaagctgacggtagggaaagtgtccagcggaataggggctgcagctgaagtcctggtcaatctgtacatgaatgatcacagacctaaggcccaggccacctctccagacctggaatctatgcgaaagtcatttccccttaacctgggaggcagcgacacgtgttacttctgtaagaaacgtgtgtacgtgatggaacggctgagcgccgagggccacttcttccaccgggagtgtttccgctgcagcatctgtgccaccaccttgcgcctggccgcctacacctttgactgcgatgaaggcaaattttactgcaagcctcacttcattcactgtaaaaccaatagcaaacaacggaagagacgggcagagttgaagcaacaaagagaggaggaggcaacatggcaagagcaggaagcccctcggagagacactcccaccgaaagttcttgcgcagtggccgccattggcaccctggaaggcagccccccagttcatttcagccttccagtgctacacccacttcttggctgacacacttctgctctaagagtctccctccctttatagaatgtcaaccaaagagtgccctcctcccctctcagcctcctctttagctagcctccccatctcatcacaacgcatgtctgtgacctttggtaatcatttacagtgccacacggaaccctgtattttgcacacagcaaaacaaacaatgtttagctttatttatggtatttgatgctgtaaatggaaataaatattgttctttataaagctc

SEQ ID NO: 12681 - DNA, 3774 bp, Homo sapiens
  source 1..3774: mol_type = unassigned DNA
gaacatggcaacccgtgtgtgtctcatcccagaaagagaagactttaaccactgtgatgcctgagaatccagtgagtgtgacgtttctccagatacttcatgctgttcacctgtgtcctcgccgcaccactgccgcacacgactcctgaaccatgggggaaaacgaggatgagaagcaggcccaggcggggcaggtttttgagaactttgtccaggcatccacgtgcaaaggtaccctccaggccttcaacattctcacacgacacctggacctagaccctctggaccacagaaacttttattccaagctcaagtccaaggtgaccacctggaaagccaaagccctgtggtacaaattggataagcgtggttcccacaaagagtataagcgagggaagtcgtgcacgaacaccaagtgtctcatagttgggggaggaccctgtggcttgcgcactgccattgaacttgcctacctgggagccaaagtggtcgtggtggagaagagggactccttctcccggaacaacgtgctacacctctggcctttcaccatccatgaccttcgtggcctgggagccaagaagttctatgggaagttctgtgctggctccatcgaccatatcagtattcgccaactacagctcatcctattcaaggtggccctgatgctgggagttgaaatccatgtgaatgtggagttcgtgaaggttctagagcctcctgaagatcaagaaaatcaaaaaattggctggcgggcagaatttctccctacagaccattctctgtcggagtttgagtttgacgtcatcattggtgccgatggccgcaggaacaccctggaagggttcagaagaaaagaattccgtgggaagctggcgattgccatcaccgccaacttcataaacagaaacagcacagcggaagccaaggtggaagagattagtggtgtggctttcatcttcaatcagaaattttttcaggaccttaaagaagaaacaggcatagatcttgagaacattgtttactacaaggactgcacccactattttgtaatgacagccaagaagcagagcctgctcgacaaaggtgtcatcattaacgactacatcgacacagagatgctgctgtgtgcggagaacgtgaaccaagacaacctgctatcctatgcccgggaagctgcagactttgccaccaactaccagctgccatccttagactttgccatgaaccactatgggcagcctgatgtggccatgtttgactttacctgcatgtatgcctcagagaacgcggccctggtgcgggagcggcaggcgcaccagctgctcgtggcccttgtgggtgacagcttgcttgagccattttggcccatgggtacaggctgtgcccgtggcttcctggcagcctttgacacggcatggatggtgaagagctggaaccagggcacccctcccctggagctgctggctgaaagggaaagtctctaccggctgttacctcagacaaccccggagaacatcaacaagaactttgagcagtacacgttggacccagggacacggtacccaaacctcaactcacactgtgtcaggccccatcaggtgaagcatttgtatatcactaaggagctggagcactaccctctcgagagactgggctcggtgaggagatctgtcaacctctccaggaaggagtcagatatccggcccagcaagctcctgacctggtgccagcagcagacagagggctaccagcatgtcaacgtcaccgacctgaccacatcctggcgcagtgggttggccctgtgtgccatcatccaccgcttccggcctgagctcatcaactttgactctttgaatgaagatgatgctgtggagaacaaccagctcgcatttgatgtggccgagcgagagtttgggatccctccagtgaccacgggcaaagagatggcatctgcccaggagcctgacaagctcagcatggtcatgtacctctccaagttctacgagctcttccggggcaccccactgaggcccgtggattcttggcgcaaaaactatggagaaaatgctgacctcagcttggccaaatcatccatttctaataactatctcaacctcacatttccaaggaagaggactccacgggtggatggtcaaaccggagagaatgacatgaacaaacggagacggaagggcttcaccaacctggacgagccttcaaacttttccagccgtagcttgggctccaatcaagagtgtgggagcagtaaggaaggtggaaatcagaacaaagtcaagtccatggcgaatcagctgctggccaagtttgaggagagcactcggaacccctcactcatgaagcaggaacgccgtgtctcagggataggtaagccggtcctgtgctcttcctccggccctcctgttcactcttgctgccccaagccggaggaggccacacccagcccatcacctcctctgaaaaggcagttcccctctgtggtcgtgacggggcacgtgctcagagagctcaagcaagtgtctgctggcagtgagtgcctgagcagaccttggagagccagagccaagtctgacctacagctgggtgggacagaaaatttcgctaccctgccttctacccgcccgagggcgcaggctctttccggggtgctgtggcggctgcagcaagtggaggaaaagattctccagaagagggctcagaacttggccaacagggaatttcacacaaagaacattaaggagaaggcggctcaccttgcctccatgtttggacacggggatttcccgcagaataaactactctctaaaggcctgtctcatactcatcctccatctcctccctctcgccttccgtctcctgatccagctgcttcttcctctccatcaactgttgactctgcttctcctgccagaaaggaaaagaagtcaccttcagggttccattttcatcccagccatttgagaacagtgcatcctcagctgacggtagggaaagtgtccagcggaataggggctgcagctgaagtcctggtcaatctgtacatgaatgatcacagacctaaggcccaggccacctctccagacctggaatctatgcgaaagtcatttccccttaacctgggaggcagcgacacgtgttacttctgtaagaaacgtgtgtacgtgatggaacggctgagcgccgagggccacttcttccaccgggagtgtttccgctgcagcatctgtgccaccaccttgcgcctggccgcctacacctttgactgcgatgaaggcaaattttactgcaagcctcacttcattcactgtaaaaccaatagcaaacaacggaagagacgggcagagttgaagcaacaaagagaggaggaggcaacatggcaagagcaggaagcccctcggagagacactcccaccgaaagttcttgcgcagtggccgccattggcaccctggaaggcagccccccagttcatttcagccttccagtgctacacccacttcttggctgacacacttctgctctaagagtctccctccctttatagaatgtcaaccaaagagtgccctcctcccctctcagcctcctctttagctagcctccccatctcatcacaacgcatgtctgtgacctttggtaatcatttacagtgccacacggaaccctgtattttgcacacagcaaaacaaacaatgtttagctttatttatggtatttgatgctgtaaatggaaataaatattgttctttataaagctc

SEQ ID NO: 12682 - DNA, 482 bp, Homo sapiens
  source 1..482: mol_type = unassigned DNA
gacctcagtgaggatcagccctggggaggaagcagctggacaggatgtgctggctgtgcgtgtcctggtcaccagcgaagacagcagctctgacacagagtctgactatggtggcagcgagggctcccacacagaaccctgtgaagagaaaccctggcggccaggatccccgcatctaccgcacacgtccctaggggaggccctgagcagggcagtctctccacagtgccctgaggagcccagagctgtgcacgcagctctgcaacgggccaatagcttccagtctccaaccccaagcaaataccagaactggaggagagaattctggtggagtgagtcactagctctctgggggtgggaggctggggctgggcagaagatctctggttaattctcaggggcagccgttctcattccttacatggtatctctctggcatggcctcctggttgtcagaggcaagaaataaaatataagcttga

SEQ ID NO: 12683 - DNA, 343 bp, Homo sapiens
  source 1..343: mol_type = unassigned DNA
gtctgactatggtggcagcgagggctcccacacagaaccctgtgaagagaaaccctggcggccaggatccccgcatctaccgcacacgtccctaggggaggccctgagcagggcagtctctccacagtgccctgaggagcccagagctgtgcacgctctgcaacgggccaatagcttccagtctccaaccccaagcaaataccagaactggaggagagaattctggtggagtttgacgccagtgaacaaaagaactatgtcacctcctaaggacccttctccttctcttcctcttccttcatcgtcttcccattcatcttccccaccatcttcttcttcaacc

SEQ ID NO: 12684 - DNA, 3044 bp, Homo sapiens
  source 1..3044: mol_type = unassigned DNA
aagtttggtagagtgtgttgtggggacagcagtatggtgtgagggaaggagagagttcagtctattataatcattagtctattgacttgtggtaattgagctataggagataaattcctacttactctacacatttaatggactcttcctcccaccccatcttccctgtccctttctttttccacagcagctctgcaacgggccaatagcttccagtctccaaccccaagcaaataccagaactggaggagagaattctggtggagtttgacgccagtgaacaaaagaactatgtcacctcctaaggacccttctccttctcttcctcttccttcatcgtcttcccattcatcttccccaccatcttcttcttcaaccagtgtttctgggaatgctccagatggttcctccccgcctcagatgacagcttctgagcccctctcgcaagtctcgagaggtcatccaagtcctcccaccccaaactttcggaggcgagccgtagcccaaggagcacccagggaaattcccctgtatctgcctcatcacccaaagccagagtgggcagagtactgcctggtgagccctggtgaagatggcctctcagaccctgcagagatgacttctgatgagtgccagccagcagaggcccctcttggggacatcggaagcaaccacagagacccacaccccatctgggggaaggacaggagctggacagggcaagagctatctcccttggctggagaagaccgggaaaaagggagtactggagccaggaaggaagaagagggagggccagtgctggtaaaggagaagttgggcctgaagaagttagtcctcactcaggagcagaagaccatgttgttggattggaatgactccatccctgagagtgtgcacctcaaagctggggagcgaatttcccagaaaagtgctgagaatggtagaggaggccgtgtgctaaaaccagtccgccccctgctgctccctagggcagcaggagagcccctgccaacccagagaggggcccaggagaagatggggacccctgcggaacaagctcaaggggagcgaaacgtgcctccacccaagtccccactgcggctcatagccaatgccatccgaaggtctctagagcccctcctttccaactctgaaggcgggaagaaggcctgggccaagcaagaatccaaaactttgcccgcacaggcctgcactcgctcattcagccttcggaaaaccaattccaataaagacggggaccagcattcccctgggagaaaccagtcctcagcctttagccctcctgaccctgccctccgcacccacagtttgcccaatcggccatccaaggtctttcctgcacttaggtccccaccctgcagcaagattgaagatgtccccacactcctcgagaaagtgagtttgcaagagaacttcccagatgcttctaagcctccaaagaaaagaatctcacttttttcctccctcagactcaaagacaaatcttttgagagtttcctccaagaatccagacaaagaaaggacatcagggacctctttggcagccccaagaggaaggtgctgcctgaagatagtgcgcaggccctggagaagctgctgcagcctttcaaaagcacctccctgcgccaggcagctcctcctcctcctcctcctcctcctcctcctcctcctcctcctacagcgggaggtgcagactccaagaactttcccctcagagcacaggtaacagaggcttcctcttctgcctcttcaacctcctcctcctctgcagatgaagaatttgatccccagctttccttgcagttaaaggagaagaagacacttagaagaagaaagaagctagaaaaagcaatgaagcagttggttaagcaagaagaattgaaaagactctataaggctcaggccatccagaggcagctggaggaggtggaggagcggcagagggcttctgagatccagggtgtgaggctggagaaggcgttgcgaggagaagcagattcaggcacacaggatgaagcacagcttttgcaggaatggtttaagctggttctggagaagaataaattaatgcgatatgagtcggagctcctaatcatggcccaggaactggaattagaagatcatcaaagcagactggagcagaaactgagagagaaaatgctcaaggaggagagccagaaagatgagaaggatctaaacgaagagcaagaagtattcaccgagctgatgcaagtgattgagcaaagggacaaactcgtcgattccttagaggaacaacgcatcagagaaaaagccgaggaccagcactttgaaagcttcgtattctccagaggctgtcagctgagcaggacttgaggaggcccgtagtccctctccctggctgcacgttgggaccggatcaggccaagtgcaccacacaccctcatgggtctttctgcaggatttatcatccctggaacttgttataccttactgcattttttaaaattaaaattctcttgcacgcatggcagcttcccaaggttcttccagagattcaaatgaagaaaacccaaagactctttggcaattggcagtcaacttcagccaggctctcagactggaggtgttgttggcagatgaccagcattgttttccctagaaagtgacacaaagacttgactttcctgctacttttatcattttccttcccaattcattgagttacatactttaagatttttgagaagctgccttttcattaatatatccatatttgccttttttgtatggatgaccagtttccaaatgtcagaaagaagcagccgcagtttaaagattaggttaatatttaaattgtgtttccagagaaagaggagaaaccttgagattactgattacataaagcaaataactcatatagcaggtgttaattcaatccagggtgaatttaatttaccaggtgcatttataagccttaatataatatacataagcaatgagagcttaatagaacatttgagccttaattttattttaag

SEQ ID NO: 12685 - DNA, 6044 bp, Homo sapiens
  source 1..6044: mol_type = unassigned DNA
gaccgattttcctgttgtgtttcactgttgacgcactcacagacacacaggaccgctccagcactgcctgccacccaccgtctggtctcggtggcctgtctatcatttcgtgggtccccatcctctgcctacggcgatgtttcttcaaaaagaactagtgtgcagtccattgatagctgatcagcttccttgggttttgctgatgacacaagagagctttgcctgaagatggaaacactggagtcagaactgacctgccctatttgtctggagctctttgaggaccctcttctactgccctgcgcacacagcctctgcttcaactgcgcccaccgcatcctagtatcacactgtgccaccaacgagtctgtggagtccatcaccgccttccagtgccccacctgccggcatgtcatcaccctcagccagcgaggtctagacgggctcaagcgcaacgtcaccctacagaacatcatcgacaggttccagaaagcatcagtgagcgggcccaactctcccagcgagacccgtcgggagcgggcctttgacgccaacaccatgacctccgccgagaaggtcctctgccagttttgtgaccaggatcctgcccaggacgctgtgaagacctgtgtcacttgtgaagtatcctactgtgacgagtgcctgaaagccactcacccgaataagaagccctttacaggccatcgtctgattgagccaattccggactctcacatccgggggctgatgtgcttggagcatgaggatgagaaggtgaatatgtactgtgtgaccgatgaccagttaatctgtgccttgtgtaaactggttgggcggcaccgcgatcatcaggtggcagctttgagtgagcgctatgacaaattgaagcaaaacttagagagtaacctcaccaaccttattaagaggaacacagaactggagacccttttggctaaactcatccaaacctgtcaacatgttgaagtcaatgcatcacgtcaagaagccaaattgacagaggagtgtgatcttctcattgagatcattcagcaaagacgacagattattggaaccaagatcaaagaagggaaggtgatgaggcttcgcaaactggctcagcagattgcaaactgcaaacagtgcattgagcggtcagcatcactcatctcccaagcggaacactctctgaaggagaatgatcatgcgcgtttcctacagactgctaagaatatcaccgagagagtctccatggcaactgcatcctcccaggttctaattcctgaaatcaacctcaatgacacatttgacacctttgccttagatttttcccgagagaagaaactgctagaatgtctggattaccttacagctcccaaccctcccacaattagagaagagctctgcacagcttcatatgacaccatcactgtgcattggacctccgatgatgagttcagcgtggtctcctacgagctccagtacaccatattcaccggacaagccaacgtcgttagtctgtgtaattcggctgatagctggatgatagtacccaacatcaagcagaaccactacacggtgcacggtctgcagagcggcaccaagtacatcttcatggtcaaggccatcaaccaggcgggcagccgcagcagtgagcctgggaagttgaagacaaacagccaaccatttaaactggatcccaaatctgctcatcgaaaactgaaggtgtcccatgataacttgacagtagaacgtgatgagtcatcatccaagaagagtcacacacctgaacgcttcaccagccaggggagctatggagtagctggaaatgtgtttattgatagtggccggcattattgggaagtggtcataagtggaagcacatggtatgccattggtcttgcttacaaatcagccccgaagcatgaatggattgggaagaactctgcttcctgggcgctctgccgctgcaacaataactgggtggtgagacacaatagcaaggaaatccccattgagcctgccccccacctccggcgcgtgggcatcctgctggactatgataacggctctatcgccttttatgatgctttgaactccatccacctctacaccttcgacgtcgcatttgcgcagcctgtttgccccaccttcaccgtgtggaacaagtgtctgacgattatcactgggctccctatcccagaccatttggactgcacagagcagctgccgtgagcgtctggccacatggagctgctttctggggaacagtaaggttcaggccactatttaggggactgagaaagcacaggcttcatgagtgtaatgaaatctcaccagaagtgtcccgaaatcggctcagatagggctcaaaacaagagattcctctccttttactgtgtcttgtattaagtacgggctttaataatttctttaatttttttgtatttagaggaaaatctatagattatttataagagaaacataatcaggattacaacttttaggaattacttggttttgcacattaagaggcccataagtttatcagctatttacaaccttcatttcatcacaatctgtgggcttacaaaaaaacaaaaacttttgtagttttgtatgttactcatcttcttacctgatatcccatgatgatcccatggtaggtcttctcacctcgatggtgcataacaggatgtgtttgaacctagtaggggaggaaacaggctttcttactctggtttaatttgaagtgttttaattgtgatgtcaaaaagttgtatcagatcaactaaaatggagagcaagacagagaatgaaaagagttgattttggacctcggaccttgccgtggctaaatctttaccttctcatagctgatgggataatgttggaaagaaaggttctgaatcctttggccacattttgccctgcttctctcagggttaagggttctggaagaacattaagaatgagattgcaattgaaaatagtcattttgaatcctattgattattcaaaaattcaggctgatttgtcttttatcagaggtaggattctgttttatagtatagaatctactttatccttccttttaatagttcctttagacctgtgaaatttcttcactacatttaatagttctcctatttcccgctcccccatatcaattttccttttgtctccggggctgagtaaataaacatgttctgtcacaaatagcagcaccactttggattgattttgctctccaggacatcagcacatggccctgatcagcactaccacatccaaacataagtcactgaaaaacacttaatatttatgagttggtaatgacaagggacattgtataaagtactatttgctagattcatgcctcaaaagttattataaacagacctttattaaacacatcttgaaagatgtagaagtccctctatagtctagtatagtttacaatagagttgtaagaccaaaaaaaaaaaaaaaaaattcaaactcgttattcaggaacctgcttataaaatgtcagctgggattctttgcatgccaatctgatgcgttggaatggtccatgaattaaggctttcttgagcagttcttggcccagaactctggcattggttctagtttgatgaagggcatgacctctataaatggtttcaattgctaaaatatttacctgggatactgggtcagccattttgactgagcagactagtggatttagacattgtttttagttattttgtttttaaccaaatcaaccaactgcctccctgaaataagtcaatgaactcattgtttcagcatcacgtggccaaaggtcatgtgattgcaaatctggatttcaagggaggccaagccagcttcctgggtccttccatcctcttccctagcagacactctcctttttcttaacagatagattctatatatttactatattatttatacccagatgaatattttgatagatacctaagacaatttcacatctaaaagatggacgcctcaatggaaaaaaaacaatctttctctggaaaccttataggtttttctttttattacaatataaaagcaatgtgtgtttgccttctctgagtaaactgaaagggttgtctcagtaatttttacatacattttgggtaactggataatggatattttaatgcactttgtacactaacaggttctaaataaaagggtctaaaactcagcttctgagtttttaaaatcacggtctccaggtaccaataaatgctacagtttgccttatgatgttaacataaaacacttagtagaaggacaatatttccatgaaaataatgtttttcaatattaagaagttactactcaaattttcacagtaagccatttagggtatgtttggctatttttataaggacatgagagattatgtcataattttgttgtggaagtctcactcttggctaacttaaaagcattgtggatagtagcagttactagttccaggttgtcatatttacaggaaaatatgtatatggtgaaaggccaccgtgtttaattactataatgatgtagaaaagattcccgtgtgaattttttttttgaaagtctaaaaaatgtatgctgtaaaaatttgctgcagtgtaattttgcattctctttaaactgattgaggtcacagtattttattatttggggtcctcaccacaggaaacactgcgatacaggggcaaaagagatggcagtgccaattaaattaatacaacaaaatcaatgcagcaccaaccaagactgccaggtctggtgtcatgggtatgcccagagcccaggagttcagaagggccctaagcctgatttaatgctctgctgttgatgtcttgaaattcttaacaatttttgaacaaggggcctgcgttttcacttcgcactgggccttgcaaattacatagcgagtgctcataaaagaactcagaaacgtggtacctctcttcctggtggatacaaataaagaaatctggatccaaagttgaaagttgctggcgatatcattcaagtaggactctaaatagtggattaagatgagggtgggcctgggtgaagattctttccagctttaaaagaaagtgacttcaaaaactgactgcaaatattgacgatggtttctgctggaggaaaagaaacagcttgaatacagacaggcttttttattacggtactgatatattgaccttaaacttgctgaggaactgaactaacgtcctccagtgaccgtggaattccatctcagctccaggaacatgcagatacctgcaaagagacacgcatatatgctggcatacatgtgcatttggtgttgggaagttgaccatctggtctatcttaataaaatggtaaaaagcacaccaagacaatgatgggggcaggaggatgtttttgaaaacagcgcttctcaaccagtgctcgattttgccccccaggagacatttggcaatgcaatggcaacttttggttgtcgcagccggggaagggaagctaccagcatctagtgcgtagaggtcatggacgccgttaaacatcctacagtgcaagcgcagcccccgaccacgaagagttgtcttgctcaaatatcaacagtgctgcagtgtagaaacttgatcgttggttttcttttaatgcaaaactctcataaaaacctttcacttttcctgtcattgattatatgcttgatacacccaaaaagaaaaggggaggggcaccaattcacctacactccagtggctccatcacctttaaaaatatttataaaatagttccaaaaatctgatatctgaaaagcaatccaagcctgtgtaaatgggaatcactgataagtatcatcatctgtatcagcttggcttggacatgaaaaattgattctctttatgtcactccttgcacctggacaaattcaatccccggtacttaagtcacactgccaagccctcggccctgactattgtcttgattgctgttcctttctggttcaaaataaaatcatttttgtggcaccaaga

SEQ ID NO: 12686 - DNA, 6195 bp, Homo sapiens
  source 1..6195: mol_type = unassigned DNA
ccctttcttctttatctcggtgtctgaggagttttgtctgcggcttgtcttgctacatttcttggttccctgaccaggaagcgaggtgattaacagacggttgaggcagctccttaggtggctttagcctgccctgtggaacatccctgcgggggactccaaccagccggagcgacgcggatcctgagagcgctcccgggtaggcatttgcccaggtgggacgcctcgccagagccgtgtgtggcaggcccccgtggaggatcaacgcagtggctgaacactgggaaggaactggcacttggagtccagacatctaaaacttgatagctgatcagcttccttgggttttgctgatgacacaagagagctttgcctgaagatggaaacactggagtcagaactgacctgccctatttgtctggagctctttgaggaccctcttctactgccctgcgcacacagcctctgcttcaactgcgcccaccgcatcctagtatcacactgtgccaccaacgagtctgtggagtccatcaccgccttccagtgccccacctgccggcatgtcatcaccctcagccagcgaggtctagacgggctcaagcgcaacgtcaccctacagaacatcatcgacaggttccagaaagcatcagtgagcgggcccaactctcccagcgagacccgtcgggagcgggcctttgacgccaacaccatgacctccgccgagaaggtcctctgccagttttgtgaccaggatcctgcccaggacgctgtgaagacctgtgtcacttgtgaagtatcctactgtgacgagtgcctgaaagccactcacccgaataagaagccctttacaggccatcgtctgattgagccaattccggactctcacatccgggggctgatgtgcttggagcatgaggatgagaaggtgaatatgtactgtgtgaccgatgaccagttaatctgtgccttgtgtaaactggttgggcggcaccgcgatcatcaggtggcagctttgagtgagcgctatgacaaattgaagcaaaacttagagagtaacctcaccaaccttattaagaggaacacagaactggagacccttttggctaaactcatccaaacctgtcaacatgttgaagtcaatgcatcacgtcaagaagccaaattgacagaggagtgtgatcttctcattgagatcattcagcaaagacgacagattattggaaccaagatcaaagaagggaaggtgatgaggcttcgcaaactggctcagcagattgcaaactgcaaacagtgcattgagcggtcagcatcactcatctcccaagcggaacactctctgaaggagaatgatcatgcgcgtttcctacagactgctaagaatatcaccgagagagtctccatggcaactgcatcctcccaggttctaattcctgaaatcaacctcaatgacacatttgacacctttgccttagatttttcccgagagaagaaactgctagaatgtctggattaccttacagctcccaaccctcccacaattagagaagagctctgcacagcttcatatgacaccatcactgtgcattggacctccgatgatgagttcagcgtggtctcctacgagctccagtacaccatattcaccggacaagccaacgtcgttagtctgtgtaattcggctgatagctggatgatagtacccaacatcaagcagaaccactacacggtgcacggtctgcagagcggcaccaagtacatcttcatggtcaaggccatcaaccaggcgggcagccgcagcagtgagcctgggaagttgaagacaaacagccaaccatttaaactggatcccaaatctgctcatcgaaaactgaaggtgtcccatgataacttgacagtagaacgtgatgagtcatcatccaagaagagtcacacacctgaacgcttcaccagccaggggagctatggagtagctggaaatgtgtttattgatagtggccggcattattgggaagtggtcataagtggaagcacatggtatgccattggtcttgcttacaaatcagccccgaagcatgaatggattgggaagaactctgcttcctgggcgctctgccgctgcaacaataactgggtggtgagacacaatagcaaggaaatccccattgagcctgccccccacctccggcgcgtgggcatcctgctggactatgataacggctctatcgccttttatgatgctttgaactccatccacctctacaccttcgacgtcgcatttgcgcagcctgtttgccccaccttcaccgtgtggaacaagtgtctgacgattatcactgggctccctatcccagaccatttggactgcacagagcagctgccgtgagcgtctggccacatggagctgctttctggggaacagtaaggttcaggccactatttaggggactgagaaagcacaggcttcatgagtgtaatgaaatctcaccagaagtgtcccgaaatcggctcagatagggctcaaaacaagagattcctctccttttactgtgtcttgtattaagtacgggctttaataatttctttaatttttttgtatttagaggaaaatctatagattatttataagagaaacataatcaggattacaacttttaggaattacttggttttgcacattaagaggcccataagtttatcagctatttacaaccttcatttcatcacaatctgtgggcttacaaaaaaacaaaaacttttgtagttttgtatgttactcatcttcttacctgatatcccatgatgatcccatggtaggtcttctcacctcgatggtgcataacaggatgtgtttgaacctagtaggggaggaaacaggctttcttactctggtttaatttgaagtgttttaattgtgatgtcaaaaagttgtatcagatcaactaaaatggagagcaagacagagaatgaaaagagttgattttggacctcggaccttgccgtggctaaatctttaccttctcatagctgatgggataatgttggaaagaaaggttctgaatcctttggccacattttgccctgcttctctcagggttaagggttctggaagaacattaagaatgagattgcaattgaaaatagtcattttgaatcctattgattattcaaaaattcaggctgatttgtcttttatcagaggtaggattctgttttatagtatagaatctactttatccttccttttaatagttcctttagacctgtgaaatttcttcactacatttaatagttctcctatttcccgctcccccatatcaattttccttttgtctccggggctgagtaaataaacatgttctgtcacaaatagcagcaccactttggattgattttgctctccaggacatcagcacatggccctgatcagcactaccacatccaaacataagtcactgaaaaacacttaatatttatgagttggtaatgacaagggacattgtataaagtactatttgctagattcatgcctcaaaagttattataaacagacctttattaaacacatcttgaaagatgtagaagtccctctatagtctagtatagtttacaatagagttgtaagaccaaaaaaaaaaaaaaaaaattcaaactcgttattcaggaacctgcttataaaatgtcagctgggattctttgcatgccaatctgatgcgttggaatggtccatgaattaaggctttcttgagcagttcttggcccagaactctggcattggttctagtttgatgaagggcatgacctctataaatggtttcaattgctaaaatatttacctgggatactgggtcagccattttgactgagcagactagtggatttagacattgtttttagttattttgtttttaaccaaatcaaccaactgcctccctgaaataagtcaatgaactcattgtttcagcatcacgtggccaaaggtcatgtgattgcaaatctggatttcaagggaggccaagccagcttcctgggtccttccatcctcttccctagcagacactctcctttttcttaacagatagattctatatatttactatattatttatacccagatgaatattttgatagatacctaagacaatttcacatctaaaagatggacgcctcaatggaaaaaaaacaatctttctctggaaaccttataggtttttctttttattacaatataaaagcaatgtgtgtttgccttctctgagtaaactgaaagggttgtctcagtaatttttacatacattttgggtaactggataatggatattttaatgcactttgtacactaacaggttctaaataaaagggtctaaaactcagcttctgagtttttaaaatcacggtctccaggtaccaataaatgctacagtttgccttatgatgttaacataaaacacttagtagaaggacaatatttccatgaaaataatgtttttcaatattaagaagttactactcaaattttcacagtaagccatttagggtatgtttggctatttttataaggacatgagagattatgtcataattttgttgtggaagtctcactcttggctaacttaaaagcattgtggatagtagcagttactagttccaggttgtcatatttacaggaaaatatgtatatggtgaaaggccaccgtgtttaattactataatgatgtagaaaagattcccgtgtgaattttttttttgaaagtctaaaaaatgtatgctgtaaaaatttgctgcagtgtaattttgcattctctttaaactgattgaggtcacagtattttattatttggggtcctcaccacaggaaacactgcgatacaggggcaaaagagatggcagtgccaattaaattaatacaacaaaatcaatgcagcaccaaccaagactgccaggtctggtgtcatgggtatgcccagagcccaggagttcagaagggccctaagcctgatttaatgctctgctgttgatgtcttgaaattcttaacaatttttgaacaaggggcctgcgttttcacttcgcactgggccttgcaaattacatagcgagtgctcataaaagaactcagaaacgtggtacctctcttcctggtggatacaaataaagaaatctggatccaaagttgaaagttgctggcgatatcattcaagtaggactctaaatagtggattaagatgagggtgggcctgggtgaagattctttccagctttaaaagaaagtgacttcaaaaactgactgcaaatattgacgatggtttctgctggaggaaaagaaacagcttgaatacagacaggcttttttattacggtactgatatattgaccttaaacttgctgaggaactgaactaacgtcctccagtgaccgtggaattccatctcagctccaggaacatgcagatacctgcaaagagacacgcatatatgctggcatacatgtgcatttggtgttgggaagttgaccatctggtctatcttaataaaatggtaaaaagcacaccaagacaatgatgggggcaggaggatgtttttgaaaacagcgcttctcaaccagtgctcgattttgccccccaggagacatttggcaatgcaatggcaacttttggttgtcgcagccggggaagggaagctaccagcatctagtgcgtagaggtcatggacgccgttaaacatcctacagtgcaagcgcagcccccgaccacgaagagttgtcttgctcaaatatcaacagtgctgcagtgtagaaacttgatcgttggttttcttttaatgcaaaactctcataaaaacctttcacttttcctgtcattgattatatgcttgatacacccaaaaagaaaaggggaggggcaccaattcacctacactccagtggctccatcacctttaaaaatatttataaaatagttccaaaaatctgatatctgaaaagcaatccaagcctgtgtaaatgggaatcactgataagtatcatcatctgtatcagcttggcttggacatgaaaaattgattctctttatgtcactccttgcacctggacaaattcaatccccggtacttaagtcacactgccaagccctcggccctgactattgtcttgattgctgttcctttctggttcaaaataaaatcatttttgtggcaccaaga

SEQ ID NO: 12687 - DNA, 6092 bp, Homo sapiens
  source 1..6092: mol_type = unassigned DNA
cccagcctgcttgaaggacctacaggtttgtctcttccagatcagaactgaggaacaaaaacccccatcctgggaaaaatggggaagctgatttcgccgggttgcttttgtcttgcgggctcctgtcgggttcggtgtttccgctctgaagactgcgacgcgggctccgatgcagctcgctccctgccggatgggtcatgggattctaaacatgaggcagatagctgatcagcttccttgggttttgctgatgacacaagagagctttgcctgaagatggaaacactggagtcagaactgacctgccctatttgtctggagctctttgaggaccctcttctactgccctgcgcacacagcctctgcttcaactgcgcccaccgcatcctagtatcacactgtgccaccaacgagtctgtggagtccatcaccgccttccagtgccccacctgccggcatgtcatcaccctcagccagcgaggtctagacgggctcaagcgcaacgtcaccctacagaacatcatcgacaggttccagaaagcatcagtgagcgggcccaactctcccagcgagacccgtcgggagcgggcctttgacgccaacaccatgacctccgccgagaaggtcctctgccagttttgtgaccaggatcctgcccaggacgctgtgaagacctgtgtcacttgtgaagtatcctactgtgacgagtgcctgaaagccactcacccgaataagaagccctttacaggccatcgtctgattgagccaattccggactctcacatccgggggctgatgtgcttggagcatgaggatgagaaggtgaatatgtactgtgtgaccgatgaccagttaatctgtgccttgtgtaaactggttgggcggcaccgcgatcatcaggtggcagctttgagtgagcgctatgacaaattgaagcaaaacttagagagtaacctcaccaaccttattaagaggaacacagaactggagacccttttggctaaactcatccaaacctgtcaacatgttgaagtcaatgcatcacgtcaagaagccaaattgacagaggagtgtgatcttctcattgagatcattcagcaaagacgacagattattggaaccaagatcaaagaagggaaggtgatgaggcttcgcaaactggctcagcagattgcaaactgcaaacagtgcattgagcggtcagcatcactcatctcccaagcggaacactctctgaaggagaatgatcatgcgcgtttcctacagactgctaagaatatcaccgagagagtctccatggcaactgcatcctcccaggttctaattcctgaaatcaacctcaatgacacatttgacacctttgccttagatttttcccgagagaagaaactgctagaatgtctggattaccttacagctcccaaccctcccacaattagagaagagctctgcacagcttcatatgacaccatcactgtgcattggacctccgatgatgagttcagcgtggtctcctacgagctccagtacaccatattcaccggacaagccaacgtcgttagtctgtgtaattcggctgatagctggatgatagtacccaacatcaagcagaaccactacacggtgcacggtctgcagagcggcaccaagtacatcttcatggtcaaggccatcaaccaggcgggcagccgcagcagtgagcctgggaagttgaagacaaacagccaaccatttaaactggatcccaaatctgctcatcgaaaactgaaggtgtcccatgataacttgacagtagaacgtgatgagtcatcatccaagaagagtcacacacctgaacgcttcaccagccaggggagctatggagtagctggaaatgtgtttattgatagtggccggcattattgggaagtggtcataagtggaagcacatggtatgccattggtcttgcttacaaatcagccccgaagcatgaatggattgggaagaactctgcttcctgggcgctctgccgctgcaacaataactgggtggtgagacacaatagcaaggaaatccccattgagcctgccccccacctccggcgcgtgggcatcctgctggactatgataacggctctatcgccttttatgatgctttgaactccatccacctctacaccttcgacgtcgcatttgcgcagcctgtttgccccaccttcaccgtgtggaacaagtgtctgacgattatcactgggctccctatcccagaccatttggactgcacagagcagctgccgtgagcgtctggccacatggagctgctttctggggaacagtaaggttcaggccactatttaggggactgagaaagcacaggcttcatgagtgtaatgaaatctcaccagaagtgtcccgaaatcggctcagatagggctcaaaacaagagattcctctccttttactgtgtcttgtattaagtacgggctttaataatttctttaatttttttgtatttagaggaaaatctatagattatttataagagaaacataatcaggattacaacttttaggaattacttggttttgcacattaagaggcccataagtttatcagctatttacaaccttcatttcatcacaatctgtgggcttacaaaaaaacaaaaacttttgtagttttgtatgttactcatcttcttacctgatatcccatgatgatcccatggtaggtcttctcacctcgatggtgcataacaggatgtgtttgaacctagtaggggaggaaacaggctttcttactctggtttaatttgaagtgttttaattgtgatgtcaaaaagttgtatcagatcaactaaaatggagagcaagacagagaatgaaaagagttgattttggacctcggaccttgccgtggctaaatctttaccttctcatagctgatgggataatgttggaaagaaaggttctgaatcctttggccacattttgccctgcttctctcagggttaagggttctggaagaacattaagaatgagattgcaattgaaaatagtcattttgaatcctattgattattcaaaaattcaggctgatttgtcttttatcagaggtaggattctgttttatagtatagaatctactttatccttccttttaatagttcctttagacctgtgaaatttcttcactacatttaatagttctcctatttcccgctcccccatatcaattttccttttgtctccggggctgagtaaataaacatgttctgtcacaaatagcagcaccactttggattgattttgctctccaggacatcagcacatggccctgatcagcactaccacatccaaacataagtcactgaaaaacacttaatatttatgagttggtaatgacaagggacattgtataaagtactatttgctagattcatgcctcaaaagttattataaacagacctttattaaacacatcttgaaagatgtagaagtccctctatagtctagtatagtttacaatagagttgtaagaccaaaaaaaaaaaaaaaaaattcaaactcgttattcaggaacctgcttataaaatgtcagctgggattctttgcatgccaatctgatgcgttggaatggtccatgaattaaggctttcttgagcagttcttggcccagaactctggcattggttctagtttgatgaagggcatgacctctataaatggtttcaattgctaaaatatttacctgggatactgggtcagccattttgactgagcagactagtggatttagacattgtttttagttattttgtttttaaccaaatcaaccaactgcctccctgaaataagtcaatgaactcattgtttcagcatcacgtggccaaaggtcatgtgattgcaaatctggatttcaagggaggccaagccagcttcctgggtccttccatcctcttccctagcagacactctcctttttcttaacagatagattctatatatttactatattatttatacccagatgaatattttgatagatacctaagacaatttcacatctaaaagatggacgcctcaatggaaaaaaaacaatctttctctggaaaccttataggtttttctttttattacaatataaaagcaatgtgtgtttgccttctctgagtaaactgaaagggttgtctcagtaatttttacatacattttgggtaactggataatggatattttaatgcactttgtacactaacaggttctaaataaaagggtctaaaactcagcttctgagtttttaaaatcacggtctccaggtaccaataaatgctacagtttgccttatgatgttaacataaaacacttagtagaaggacaatatttccatgaaaataatgtttttcaatattaagaagttactactcaaattttcacagtaagccatttagggtatgtttggctatttttataaggacatgagagattatgtcataattttgttgtggaagtctcactcttggctaacttaaaagcattgtggatagtagcagttactagttccaggttgtcatatttacaggaaaatatgtatatggtgaaaggccaccgtgtttaattactataatgatgtagaaaagattcccgtgtgaattttttttttgaaagtctaaaaaatgtatgctgtaaaaatttgctgcagtgtaattttgcattctctttaaactgattgaggtcacagtattttattatttggggtcctcaccacaggaaacactgcgatacaggggcaaaagagatggcagtgccaattaaattaatacaacaaaatcaatgcagcaccaaccaagactgccaggtctggtgtcatgggtatgcccagagcccaggagttcagaagggccctaagcctgatttaatgctctgctgttgatgtcttgaaattcttaacaatttttgaacaaggggcctgcgttttcacttcgcactgggccttgcaaattacatagcgagtgctcataaaagaactcagaaacgtggtacctctcttcctggtggatacaaataaagaaatctggatccaaagttgaaagttgctggcgatatcattcaagtaggactctaaatagtggattaagatgagggtgggcctgggtgaagattctttccagctttaaaagaaagtgacttcaaaaactgactgcaaatattgacgatggtttctgctggaggaaaagaaacagcttgaatacagacaggcttttttattacggtactgatatattgaccttaaacttgctgaggaactgaactaacgtcctccagtgaccgtggaattccatctcagctccaggaacatgcagatacctgcaaagagacacgcatatatgctggcatacatgtgcatttggtgttgggaagttgaccatctggtctatcttaataaaatggtaaaaagcacaccaagacaatgatgggggcaggaggatgtttttgaaaacagcgcttctcaaccagtgctcgattttgccccccaggagacatttggcaatgcaatggcaacttttggttgtcgcagccggggaagggaagctaccagcatctagtgcgtagaggtcatggacgccgttaaacatcctacagtgcaagcgcagcccccgaccacgaagagttgtcttgctcaaatatcaacagtgctgcagtgtagaaacttgatcgttggttttcttttaatgcaaaactctcataaaaacctttcacttttcctgtcattgattatatgcttgatacacccaaaaagaaaaggggaggggcaccaattcacctacactccagtggctccatcacctttaaaaatatttataaaatagttccaaaaatctgatatctgaaaagcaatccaagcctgtgtaaatgggaatcactgataagtatcatcatctgtatcagcttggcttggacatgaaaaattgattctctttatgtcactccttgcacctggacaaattcaatccccggtacttaagtcacactgccaagccctcggccctgactattgtcttgattgctgttcctttctggttcaaaataaaatcatttttgtggcaccaaga

SEQ ID NO: 12688 - DNA, 5973 bp, Homo sapiens
  source 1..5973: mol_type = unassigned DNA
acttgccccagcccagcctgcttgaaggacctacaggtttgtctcttccagatcagaactgaggaacaaaaacccccatcctgggaaaaatggggaagctgatagctgatcagcttccttgggttttgctgatgacacaagagagctttgcctgaagatggaaacactggagtcagaactgacctgccctatttgtctggagctctttgaggaccctcttctactgccctgcgcacacagcctctgcttcaactgcgcccaccgcatcctagtatcacactgtgccaccaacgagtctgtggagtccatcaccgccttccagtgccccacctgccggcatgtcatcaccctcagccagcgaggtctagacgggctcaagcgcaacgtcaccctacagaacatcatcgacaggttccagaaagcatcagtgagcgggcccaactctcccagcgagacccgtcgggagcgggcctttgacgccaacaccatgacctccgccgagaaggtcctctgccagttttgtgaccaggatcctgcccaggacgctgtgaagacctgtgtcacttgtgaagtatcctactgtgacgagtgcctgaaagccactcacccgaataagaagccctttacaggccatcgtctgattgagccaattccggactctcacatccgggggctgatgtgcttggagcatgaggatgagaaggtgaatatgtactgtgtgaccgatgaccagttaatctgtgccttgtgtaaactggttgggcggcaccgcgatcatcaggtggcagctttgagtgagcgctatgacaaattgaagcaaaacttagagagtaacctcaccaaccttattaagaggaacacagaactggagacccttttggctaaactcatccaaacctgtcaacatgttgaagtcaatgcatcacgtcaagaagccaaattgacagaggagtgtgatcttctcattgagatcattcagcaaagacgacagattattggaaccaagatcaaagaagggaaggtgatgaggcttcgcaaactggctcagcagattgcaaactgcaaacagtgcattgagcggtcagcatcactcatctcccaagcggaacactctctgaaggagaatgatcatgcgcgtttcctacagactgctaagaatatcaccgagagagtctccatggcaactgcatcctcccaggttctaattcctgaaatcaacctcaatgacacatttgacacctttgccttagatttttcccgagagaagaaactgctagaatgtctggattaccttacagctcccaaccctcccacaattagagaagagctctgcacagcttcatatgacaccatcactgtgcattggacctccgatgatgagttcagcgtggtctcctacgagctccagtacaccatattcaccggacaagccaacgtcgttagtctgtgtaattcggctgatagctggatgatagtacccaacatcaagcagaaccactacacggtgcacggtctgcagagcggcaccaagtacatcttcatggtcaaggccatcaaccaggcgggcagccgcagcagtgagcctgggaagttgaagacaaacagccaaccatttaaactggatcccaaatctgctcatcgaaaactgaaggtgtcccatgataacttgacagtagaacgtgatgagtcatcatccaagaagagtcacacacctgaacgcttcaccagccaggggagctatggagtagctggaaatgtgtttattgatagtggccggcattattgggaagtggtcataagtggaagcacatggtatgccattggtcttgcttacaaatcagccccgaagcatgaatggattgggaagaactctgcttcctgggcgctctgccgctgcaacaataactgggtggtgagacacaatagcaaggaaatccccattgagcctgccccccacctccggcgcgtgggcatcctgctggactatgataacggctctatcgccttttatgatgctttgaactccatccacctctacaccttcgacgtcgcatttgcgcagcctgtttgccccaccttcaccgtgtggaacaagtgtctgacgattatcactgggctccctatcccagaccatttggactgcacagagcagctgccgtgagcgtctggccacatggagctgctttctggggaacagtaaggttcaggccactatttaggggactgagaaagcacaggcttcatgagtgtaatgaaatctcaccagaagtgtcccgaaatcggctcagatagggctcaaaacaagagattcctctccttttactgtgtcttgtattaagtacgggctttaataatttctttaatttttttgtatttagaggaaaatctatagattatttataagagaaacataatcaggattacaacttttaggaattacttggttttgcacattaagaggcccataagtttatcagctatttacaaccttcatttcatcacaatctgtgggcttacaaaaaaacaaaaacttttgtagttttgtatgttactcatcttcttacctgatatcccatgatgatcccatggtaggtcttctcacctcgatggtgcataacaggatgtgtttgaacctagtaggggaggaaacaggctttcttactctggtttaatttgaagtgttttaattgtgatgtcaaaaagttgtatcagatcaactaaaatggagagcaagacagagaatgaaaagagttgattttggacctcggaccttgccgtggctaaatctttaccttctcatagctgatgggataatgttggaaagaaaggttctgaatcctttggccacattttgccctgcttctctcagggttaagggttctggaagaacattaagaatgagattgcaattgaaaatagtcattttgaatcctattgattattcaaaaattcaggctgatttgtcttttatcagaggtaggattctgttttatagtatagaatctactttatccttccttttaatagttcctttagacctgtgaaatttcttcactacatttaatagttctcctatttcccgctcccccatatcaattttccttttgtctccggggctgagtaaataaacatgttctgtcacaaatagcagcaccactttggattgattttgctctccaggacatcagcacatggccctgatcagcactaccacatccaaacataagtcactgaaaaacacttaatatttatgagttggtaatgacaagggacattgtataaagtactatttgctagattcatgcctcaaaagttattataaacagacctttattaaacacatcttgaaagatgtagaagtccctctatagtctagtatagtttacaatagagttgtaagaccaaaaaaaaaaaaaaaaaattcaaactcgttattcaggaacctgcttataaaatgtcagctgggattctttgcatgccaatctgatgcgttggaatggtccatgaattaaggctttcttgagcagttcttggcccagaactctggcattggttctagtttgatgaagggcatgacctctataaatggtttcaattgctaaaatatttacctgggatactgggtcagccattttgactgagcagactagtggatttagacattgtttttagttattttgtttttaaccaaatcaaccaactgcctccctgaaataagtcaatgaactcattgtttcagcatcacgtggccaaaggtcatgtgattgcaaatctggatttcaagggaggccaagccagcttcctgggtccttccatcctcttccctagcagacactctcctttttcttaacagatagattctatatatttactatattatttatacccagatgaatattttgatagatacctaagacaatttcacatctaaaagatggacgcctcaatggaaaaaaaacaatctttctctggaaaccttataggtttttctttttattacaatataaaagcaatgtgtgtttgccttctctgagtaaactgaaagggttgtctcagtaatttttacatacattttgggtaactggataatggatattttaatgcactttgtacactaacaggttctaaataaaagggtctaaaactcagcttctgagtttttaaaatcacggtctccaggtaccaataaatgctacagtttgccttatgatgttaacataaaacacttagtagaaggacaatatttccatgaaaataatgtttttcaatattaagaagttactactcaaattttcacagtaagccatttagggtatgtttggctatttttataaggacatgagagattatgtcataattttgttgtggaagtctcactcttggctaacttaaaagcattgtggatagtagcagttactagttccaggttgtcatatttacaggaaaatatgtatatggtgaaaggccaccgtgtttaattactataatgatgtagaaaagattcccgtgtgaattttttttttgaaagtctaaaaaatgtatgctgtaaaaatttgctgcagtgtaattttgcattctctttaaactgattgaggtcacagtattttattatttggggtcctcaccacaggaaacactgcgatacaggggcaaaagagatggcagtgccaattaaattaatacaacaaaatcaatgcagcaccaaccaagactgccaggtctggtgtcatgggtatgcccagagcccaggagttcagaagggccctaagcctgatttaatgctctgctgttgatgtcttgaaattcttaacaatttttgaacaaggggcctgcgttttcacttcgcactgggccttgcaaattacatagcgagtgctcataaaagaactcagaaacgtggtacctctcttcctggtggatacaaataaagaaatctggatccaaagttgaaagttgctggcgatatcattcaagtaggactctaaatagtggattaagatgagggtgggcctgggtgaagattctttccagctttaaaagaaagtgacttcaaaaactgactgcaaatattgacgatggtttctgctggaggaaaagaaacagcttgaatacagacaggcttttttattacggtactgatatattgaccttaaacttgctgaggaactgaactaacgtcctccagtgaccgtggaattccatctcagctccaggaacatgcagatacctgcaaagagacacgcatatatgctggcatacatgtgcatttggtgttgggaagttgaccatctggtctatcttaataaaatggtaaaaagcacaccaagacaatgatgggggcaggaggatgtttttgaaaacagcgcttctcaaccagtgctcgattttgccccccaggagacatttggcaatgcaatggcaacttttggttgtcgcagccggggaagggaagctaccagcatctagtgcgtagaggtcatggacgccgttaaacatcctacagtgcaagcgcagcccccgaccacgaagagttgtcttgctcaaatatcaacagtgctgcagtgtagaaacttgatcgttggttttcttttaatgcaaaactctcataaaaacctttcacttttcctgtcattgattatatgcttgatacacccaaaaagaaaaggggaggggcaccaattcacctacactccagtggctccatcacctttaaaaatatttataaaatagttccaaaaatctgatatctgaaaagcaatccaagcctgtgtaaatgggaatcactgataagtatcatcatctgtatcagcttggcttggacatgaaaaattgattctctttatgtcactccttgcacctggacaaattcaatccccggtacttaagtcacactgccaagccctcggccctgactattgtcttgattgctgttcctttctggttcaaaataaaatcatttttgtggcaccaaga

SEQ ID NO: 12689 - DNA, 3352 bp, Homo sapiens
  source 1..3352: mol_type = unassigned DNA
atttcgccgggttgcttttgtcttgcgggctcctgtcgggttcggtgtttccgctctgaagactgcgacgcgggctccgatgcagctcgctccctgccggatgggtcatgggattctaaacatgaggcagatagctgatcagcttccttgggttttgctgatgacacaagagagctttgcctgaagatggaaacactggagtcagaactgacctgccctatttgtctggagctctttgaggaccctcttctactgccctgcgcacacagcctctgcttcaactgcgcccaccgcatcctagtatcacactgtgccaccaacgagtctgtggagtccatcaccgccttccagtgccccacctgccggcatgtcatcaccctcagccagcgaggtctagacgggctcaagcgcaacgtcaccctacagaacatcatcgacaggttccagaaagcatcagtgagcgggcccaactctcccagcgagacccgtcgggagcgggcctttgacgccaacaccatgacctccgccgagaaggtcctctgccagttttgtgaccaggatcctgcccaggacgctgtgaagacctgtgtcacttgtgaagtatcctactgtgacgagtgcctgaaagccactcacccgaataagaagccctttacaggccatcgtctgattgagccaattccggactctcacatccgggggctgatgtgcttggagcatgaggatgagaaggtgaatatgtactgtgtgaccgatgaccagttaatctgtgccttgtgtaaactggttgggcggcaccgcgatcatcaggtggcagctttgagtgagcgctatgacaaattgaagcaaaacttagagagtaacctcaccaaccttattaagaggaacacagaactggagacccttttggctaaactcatccaaacctgtcaacatgttgaagtcaatgcatcacgtcaagaagccaaattgacagaggagtgtgatcttctcattgagatcattcagcaaagacgacagattattggaaccaagatcaaagaagggaaggtgatgaggcttcgcaaactggctcagcagattgcaaactgcaaacagtgcattgagcggtcagcatcactcatctcccaagcggaacactctctgaaggagaatgatcatgcgcgtttcctacagactgctaagaatatcaccgagagagtctccatggcaactgcatcctcccaggttctaattcctgaaatcaacctcaatgacacatttgacacctttgccttagatttttcccgagagaagaaactgctagaatgtctggattaccttacagctcccaaccctcccacaattagagaagagctctgcacagcttcatatgacaccatcactgtgcattggacctccgatgatgagttcagcgtggtctcctacgagctccagtacaccatattcaccggacaagccaacgtcgttagtctgtgtaattcggctgatagctggatgatagtacccaacatcaagcagaaccactacacggtgcacggtctgcagagcggcaccaagtacatcttcatggtcaaggccatcaaccaggcgggcagccgcagcagtgagcctgggaagttgaagacaaacagccaaccatttaaactggatcccaaatctgctcatcgaaaactgaaggtgtcccatgataacttgacagtagaacgtgatgagtcatcatccaagaagagtcacacacctgaacgcttcaccagccaggggagctatggagtagctggaaatgtgtttattgatagtggccggcattattgggaagtggtcataagtggaagcacatggtgagacacaatagcaaggaaatccccattgagcctgccccccacctccggcgcgtgggcatcctgctggactatgataacggctctatcgccttttatgatgctttgaactccatccacctctacaccttcgacgtcgcatttgcgcagcctgtttgccccaccttcaccgtgtggaacaagtgtctgacgattatcactgggctccctatcccagaccatttggactgcacagagcagctgccgtgagcgtctggccacatggagctgctttctggggaacagtaaggttcaggccactatttaggggactgagaaagcacaggcttcatgagtgtaatgaaatctcaccagaagtgtcccgaaatcggctcagatagggctcaaaacaagagattcctctccttttactgtgtcttgtattaagtacgggctttaataatttctttaatttttttgtatttagaggaaaatctatagattatttataagagaaacataatcaggattacaacttttaggaattacttggttttgcacattaagaggcccataagtttatcagctatttacaaccttcatttcatcacaatctgtgggcttacaaaaaaacaaaaacttttgtagttttgtatgttactcatcttcttacctgatatcccatgatgatcccatggtaggtcttctcacctcgatggtgcataacaggatgtgtttgaacctagtaggggaggaaacaggctttcttactctggtttaatttgaagtgttttaattgtgatgtcaaaaagttgtatcagatcaactaaaatggagagcaagacagagaatgaaaagagttgattttggacctcggaccttgccgtggctaaatctttaccttctcatagctgatgggataatgttggaaagaaaggttctgaatcctttggccacattttgccctgcttctctcagggttaagggttctggaagaacattaagaatgagattgcaattgaaaatagtcattttgaatcctattgattattcaaaaattcaggctgatttgtcttttatcagaggtaggattctgttttatagtatagaatctactttatccttccttttaatagttcctttagacctgtgaaatttcttcactacatttaatagttctcctatttcccgctcccccatatcaattttccttttgtctccggggctgagtaaataaacatgttctgtcacaaatagcagcaccactttggattgattttgctctccaggacatcagcacatggccctgatcagcactaccacatccaaacataagtcactgaaaaacacttaatatttatgagttggtaatgacaagggacattgtataaagtactatttgctagattcatgcctcaaaagttattataaacagacctttattaaacacatcttgaaagatgtagaagtccctctatagtctagtatagtttacaatagagttgtaagaccaaaaaaaaaaaaaaaaaatt

SEQ ID NO: 12690 - DNA, 858 bp, Homo sapiens
  source 1..858: mol_type = unassigned DNA
ggagcacctgcaaagttatttgggcctggatatacagggcagggagaattttggaggcaaaaatgcaatctgccacatctacgttagtgaagtcagtttttcgtacatgactaccaagacaaagcacttcacttaccaactctattcaaataaatggaaattattcaacctaaaattatgcaaacattgctccccttgtgccaaagaactgcaccatgtctgattggctttgcaggtctgtgtaattcggctgatagctggatgatagtacccaacatcaagcagaaccactacacggtgcacggtctgcagagcggcaccaagtacatcttcatggtcaaggccatcaaccaggcgggcagccgcagcagtgagcctgggaagttgaagacaaacagccaaccatttaaactggatcccaaatctgctcatcgaaaactgaaggtgtcccatgataacttgacagtagaacgtgatgagtcatcatccaagaagagtcacacacctgaacgcttcaccagccaggggagctatggagtagctggaaatgtgtttattgatagtggccggcattattgggaagtggtcataagtggaagcacatggtatgccattggtcttgcttacaaatcagccccgaagcatgaatggattgggaagaactctgcttcctgggcgctctgccgctgcaacaataactgggtggtgagacacaatagcaaggaaatccccattgagcctgccccccacctccggcgcgtgggcatcctgctggactatgataacggctctatcgccttttatgatgctttgaactccatccacctctacaccttcgacgtcgcatttgcgcagcct

SEQ ID NO: 12691 - DNA, 1729 bp, Homo sapiens
  source 1..1729: mol_type = unassigned DNA
ctgaagtgttagtatgtagtggagctggtggtgtgaagctgattcattttgtttcaaagccccaaatggcatgctgccgaacacaggcacaagcacagcagcgtctccttagaaataatgactccaaggcaaacagccctcattgcaaaatgtagaagactgccatctgcttgtctccactgtggtttattcgtttcagggttttaaatgacgtaataaaaagatagctgatcagcttccttgggttttgctgatgacacaagagagctttgcctgaagatggaaacactggagtcagaactgacctgccctatttgtctggagctctttgaggaccctcttctactgccctgcgcacacagcctctgcttcaactgcgcccaccgcatcctagtatcacactgtgccaccaacgagtctgtggagtccatcaccgccttccagtgccccacctgccggcatgtcatcaccctcagccagcgaggtctagacgggctcaagcgcaacgtcaccctacagaacatcatcgacaggttccagaaagcatcagtgagcgggcccaactctcccagcgagacccgtcgggagcgggcctttgacgccaacaccatgacctccgccgagaaggtcctctgccagttttgtgaccaggatcctgcccaggacgctgtgaagacctgtgtcacttgtgaagtatcctactgtgacgagtgcctgaaagccactcacccgaataagaagccctttacaggccatcgtctgattgagccaattccggactctcacatccgggggctgatgtgcttggagcatgaggatgagaaggtgaatatgtactgtgtgaccgatgaccagttaatctgtgccttgtgtaaactggttgggcggcaccgcgatcatcaggtggcagctttgagtgagcgctatgacaaattgaagcaaaacttagagagtaacctcaccaaccttattaagaggaacacagaactggagacccttttggctaaactcatccaaacctgtcaacatgttgaagtcaatgcatcacgtcaagaagccaaattgacagaggagtgtgatcttctcattgagatcattcagcaaagacgacagattattggaaccaagatcaaagaagggaaggtgatgaggcttcgcaaactggctcagcagattgcaaactgcaaacagtgcattgagcggtcagcatcactcatctcccaagcggaacactctctgaaggagaatgatcatgcgcgtttcctacagactgctaagaatatcaccgagagagtctccatggcaactgcatcctcccaggttctaattcctgaaatcaacctcaatgacacatttgacacctttgccttagatttttcccgagagaagaaactgctagaatgtctggattaccttacagctcccaaccctcccacaattagagaagagctctgcacagcttcatatgacaccatcactgtgcattggacctccgatgatgagttcagcgtggtctcctacgagctccagtacaccatattcaccggacaagccaacgtcgttagtctgtgtaattcggctgatagctggatgatagtacccaacatcaagcagaaccactacacggtgcacggtctgcagagcggcaccaagtacatcttcatggtcaaggccatcaaccaggcgggcagccgcagcagtgagcctgggaagttgaagacaaacagcc

SEQ ID NO: 12692 - DNA, 945 bp, Homo sapiens
  source 1..945: mol_type = unassigned DNA
gagaactgatttgaaataagagccaggcggtcctcgcttccctgcgaccgacttttcataggctgggggagaaaaggttgagaaacttgacattgtctcgagcagagtgcgtgtagcaacagatcaaagaaaaagaggacgaaaacgtgctctttgctgcccgtagatttcgccgggttgcttttgtcttgcgggctcctgtcgggttcggtgtttccgctctgaagactgcgacgcgggctccgatgcagctcgctccctgccggatgggtcatgggattctaaacatgaggcagatagctgatcagcttccttgggttttgctgatgacacaagagagctttgcctgaagatggaaacactggagtcagaactgacctgccctatttgtctggagctctttgaggaccctcttctactgccctgcgcacacagcctctgcttcaactgcgcccaccgcatcctagtatcacactgtgccaccaacgagtctgtggagtccatcaccgccttccagtgccccacctgccggcatgtcatcaccctcagccagcgaggtctagacgggctcaagcgcaacgtcaccctacagaacatcatcgacaggttccagaaagcatcagtgagcgggcccaactctcccagcgagacccgtcgggagcgggcctttgacgccaacaccatgacctccgccgagaaggtcctctgccagttttgtgaccaggatcctgcccaggacgctgtgaagacctgtgtcacttgtgaagtatcctactgtgacgagtgcctgaaagccactcacccgaataagaagccctttacaggccatcgtctgattgagccaattccggactctcacatccgggggctgatgtgcttggagcatgaggatgagaaggtgaatatgtactgtgtgaccgatgaccagttaatctgtgccttgtg

SEQ ID NO: 12693 - DNA, 6393 bp, Homo sapiens
  source 1..6393: mol_type = unassigned DNA
gattctatgcagggtcactatgaaagaggcagcctgccccagtttgggtattctgaagtgttagtatgtagtggagctggtggtgtgaagctgattcattttgtttcaaagccccaaatggcatgctgccgaacacaggcacaagcacagcagcgtctccttagaaataatgactccaaggcaaacagccctcattgcaaaatgtagaagactgccatctgcttgtctccactgtggtttattcgtttcagggttttaaatgacgtaataaaaagatagctgatcagcttccttgggttttgctgatgacacaagagagctttgcctgaagatggaaacactggagtcagaactgacctgccctatttgtctggagctctttgaggaccctcttctactgccctgcgcacacagcctctgcttcaactgcgcccaccgcatcctagtatcacactgtgccaccaacgagtctgtggagtccatcaccgccttccagtgccccacctgccggcatgtcatcaccctcagccagcgaggtctagacgggctcaagcgcaacgtcaccctacagaacatcatcgacaggttccagaaagcatcagtgagcgggcccaactctcccagcgagacccgtcgggagcgggcctttgacgccaacaccatgacctccgccgagaaggtcctctgccagttttgtgaccaggatcctgcccaggacgctgtgaagacctgtgtcacttgtgaagtatcctactgtgacgagtgcctgaaagccactcacccgaataagaagccctttacaggccatcgtctgattgagccaattccggactctcacatccgggggctgatgtgcttggagcatgaggatgagaaggtgaatatgtactgtgtgaccgatgaccagttaatctgtgccttgtgtaaactggttgggcggcaccgcgatcatcaggtggcagctttgagtgagcgctatgacaaattgaagcaaaacttagagagtaacctcaccaaccttattaagaggaacacagaactggagacccttttggctaaactcatccaaacctgtcaacatgttgaagtcaatgcatcacgtcaagaagccaaattgacagaggagtgtgatcttctcattgagatcattcagcaaagacgacagattattggaaccaagatcaaagaagggaaggtgatgaggcttcgcaaactggctcagcagattgcaaactgcaaacagtgcattgagcggtcagcatcactcatctcccaagcggaacactctctgaaggagaatgatcatgcgcgtttcctacagactgctaagaatatcaccgagagagtctccatggcaactgcatcctcccaggttctaattcctgaaatcaacctcaatgacacatttgacacctttgccttagatttttcccgagagaagaaactgctagaatgtctggattaccttacagctcccaaccctcccacaattagagaagagctctgcacagcttcatatgacaccatcactgtgcattggacctccgatgatgagttcagcgtggtctcctacgagctccagtacaccatattcaccggacaagccaacgtcgttagtctgtgtaattcggctgatagctggatgatagtacccaacatcaagcagaaccactacacggtgcacggtctgcagagcggcaccaagtacatcttcatggtcaaggccatcaaccaggcgggcagccgcagcagtgagcctgggaagttgaagacaaacagccaaccatttaaactggatcccaaatctgctcatcgaaaactgaaggtgtcccatgataacttgacagtagaacgtgatgagtcatcatccaagaagagtcacacacctgaacgcttcaccagccaggggagctatggagtagctggaaatgtgtttattgatagtggccggcattattgggaagtggtcataagtggaagcacatggtatgccattggtcttgcttacaaatcagccccgaagcatgaatggattgggaagaactctgcttcctgggcgctctgccgctgcaacaataactgggtggtgagacacaatagcaaggaaatccccattgagcctgccccccacctccggcgcgtgggcatcctgctggactatgataacggctctatcgccttttatgatgctttgaactccatccacctctacaccttcgacgtcgcatttgcgcagcctgtttgccccaccttcaccgtgtggaacaagtgtctgacgattatcactgggctccctatcccagaccatttggactgcacagagcagctgccgtgagcgtctggccacatggagctgctttctggggaacagtaaggttcaggccactatttaggggactgagaaagcacaggcttcatgagtgtaatgaaatctcaccagaagtgtcccgaaatcggctcagatagggctcaaaacaagagattcctctccttttactgtgtcttgtattaagtacgggctttaataatttctttaatttttttgtatttagaggaaaatctatagattatttataagagaaacataatcaggattacaacttttaggaattacttggttttgcacattaagaggcccataagtttatcagctatttacaaccttcatttcatcacaatctgtgggcttacaaaaaaacaaaaacttttgtagttttgtatgttactcatcttcttacctgatatcccatgatgatcccatggtaggtcttctcacctcgatggtgcataacaggatgtgtttgaacctagtaggggaggaaacaggctttcttactctggtttaatttgaagtgttttaattgtgatgtcaaaaagttgtatcagatcaactaaaatggagagcaagacagagaatgaaaagagttgattttggacctcggaccttgccgtggctaaatctttaccttctcatagctgatgggataatgttggaaagaaaggttctgaatcctttggccacattttgccctgcttctctcagggttaagggttctggaagaacattaagaatgagattgcaattgaaaatagtcattttgaatcctattgattattcaaaaattcaggctgatttgtcttttatcagaggtaggattctgttttatagtatagaatctactttatccttccttttaatagttcctttagacctgtgaaatttcttcactacatttaatagttctcctatttcccgctcccccatatcaattttccttttgtctccggggctgagtaaataaacatgttctgtcacaaatagcagcaccactttggattgattttgctctccaggacatcagcacatggccctgatcagcactaccacatccaaacataagtcactgaaaaacacttaatatttatgagttggtaatgacaagggacattgtataaagtactatttgctagattcatgcctcaaaagttattataaacagacctttattaaacacatcttgaaagatgtagaagtccctctatagtctagtatagtttacaatagagttgtaagaccaaaaaaaaaaaaaaaaaattcaaactcgttattcaggaacctgcttataaaatgtcagctgggattctttgcatgccaatctgatgcgttggaatggtccatgaattaaggctttcttgagcagttcttggcccagaactctggcattggttctagtttgatgaagggcatgacctctataaatggtttcaattgctaaaatatttacctgggatactgggtcagccattttgactgagcagactagtggatttagacattgtttttagttattttgtttttaaccaaatcaaccaactgcctccctgaaataagtcaatgaactcattgtttcagcatcacgtggccaaaggtcatgtgattgcaaatctggatttcaagggaggccaagccagcttcctgggtccttccatcctcttccctagcagacactctcctttttcttaacagatagattctatatatttactatattatttatacccagatgaatattttgatagatacctaagacaatttcacatctaaaagatggacgcctcaatggaaaaaaaacaatctttctctggaaaccttataggtttttctttttattacaatataaaagcaatgtgtgtttgccttctctgagtaaactgaaagggttgtctcagtaatttttacatacattttgggtaactggataatggatattttaatgcactttgtacactaacaggttctaaataaaagggtctaaaactcagcttctgagtttttaaaatcacggtctccaggtaccaataaatgctacagtttgccttatgatgttaacataaaacacttagtagaaggacaatatttccatgaaaataatgtttttcaatattaagaagttactactcaaattttcacagtaagccatttagggtatgtttggctatttttataaggacatgagagattatgtcataattttgttgtggaagtctcactcttggctaacttaaaagcattgtggatagtagcagttactagttccaggttgtcatatttacaggaaaatatgtatatggtgaaaggccaccgtgtttaattactataatgatgtagaaaagattcccgtgtgaattttttttttgaaagtctaaaaaatgtatgctgtaaaaatttgctgcagtgtaattttgcattctctttaaactgattgaggtcacagtattttattatttggggtcctcaccacaggaaacactgcgatacaggggcaaaagagatggcagtgccaattaaattaatacaacaaaatcaatgcagcaccaaccaagactgccaggtctggtgtcatgggtatgcccagagcccaggagttcagaagggccctaagcctgatttaatgctctgctgttgatgtcttgaaattcttaacaatttttgaacaaggggcctgcgttttcacttcgcactgggccttgcaaattacatagcgagtgctcataaaagaactcagaaacgtggtacctctcttcctggtggatacaaataaagaaatctggatccaaagttgaaagttgctggcgatatcattcaagtaggactctaaatagtggattaagatgagggtgggcctgggtgaagattctttccagctttaaaagaaagtgacttcaaaaactgactgcaaatattgacgatggtttctgctggaggaaaagaaacagcttgaatacagacaggcttttttattacggtactgatatattgaccttaaacttgctgaggaactgaactaacgtcctccagtgaccgtggaattccatctcagctccaggaacatgcagatacctgcaaagagacacgcatatatgctggcatacatgtgcatttggtgttgggaagttgaccatctggtctatcttaataaaatggtaaaaagcacaccaagacaatgatgggggcaggaggatgtttttgaaaacagcgcttctcaaccagtgctcgattttgccccccaggagacatttggcaatgcaatggcaacttttggttgtcgcagccggggaagggaagctaccagcatctagtgcgtagaggtcatggacgccgttaaacatcctacagtgcaagcgcagcccccgaccacgaagagttgtcttgctcaaatatcaacagtgctgcagtgtagaaacttgatcgttggttttcttttaatgcaaaactctcataaaaacctttcacttttcctgtcattgattatatgcttgatacacccaaaaagaaaaggggaggggcaccaattcacctacactccagtggctccatcacctttaaaaatatttataaaatagttccaaaaatctgatatctgaaaagcaatccaagcctgtgtaaatgggaatcactgataagtatcatcatctgtatcagcttggcttggacatgaaaaattgattctctttatgtcactccttgcacctggacaaattcaatccccggtacttaagtcacactgccaagccctcggccctgactattgtcttgattgctgttcctttctggttcaaaataaaatcatttttgtggcaccaagaccctctgtctctgcctgtctctgttgccttttcatcattttgtgtttttgcagttatgatgttgacaaatatttattcaacatctaccatttattcatactactttatgacatataattcattttcttttactgtctctcatccactatttgcctttccctattcaaaatacaattcttttgcaacactcaaaatattctccagggaatttttaaaacacaataaaagaaagcctatatagaagtg

SEQ ID NO: 12694 - DNA, 1839 bp, Homo sapiens
  source 1..1839: mol_type = unassigned DNA
atagctgatcagcttccttgggttttgctgatgacacaagagagctttgcctgaagatggaaacactggagtcagaactgacctgccctatttgtctggagctctttgaggaccctcttctactgccctgcgcacacagcctctgcttcaactgcgcccaccgcatcctagtatcacactgtgccaccaacgagtctgtggagtccatcaccgccttccagtgccccacctgccggcatgtcatcaccctcagccagcgaggtctagacgggctcaagcgcaacgtcaccctacagaacatcatcgacaggttccagaaagcatcagtgagcgggcccaactctcccagcgagacccgtcgggagcgggcctttgacgccaacaccatgacctccgccgagaaggtcctctgccagttttgtgaccaggatcctgcccaggacgctgtgaagacctgtgtcacttgtgaagtatcctactgtgacgagtgcctgaaagccactcacccgaataagaagccctttacaggccatcgtctgattgagccaattccggactctcacatccgggggctgatgtgcttggagcatgaggatgagaagcaaaacttagagagtaacctcaccaaccttattaagaggaacacagaactggagacccttttggctaaactcatccaaacctgtcaacatgttgaactggaatgttctgtactgtttcccagagttgcccaatggggttaatctccagttgcccaaggtggtcttggtaagtcacactttactggcttcgtagttgtccctgtttcacttcctacccagtactggtgttttctggcaacaatttgaccatccattcttgtctcatatccttcttggggaggatacaactgccaaccatgtctaaaatgaaatgatagcacaagtctctttttctagtcatggctatagctcacatgttcaatttctctaaactcaagtctctttcattgtgtttgaataaacgtacatgtgaatcactggacatcaaagatatttaaaaatcaatctactcacttctcctgatattctagaatgacaacaacagggcaagatatttcatagatatcacttgtgggtgcgtcatgaaggcagaacaaagcttaacattttccagttgtacctcccagttaagttctatcagtgacgtaatcacgtgtatttcactcactgtacggaataccaaagagcagaaacccaatgttcattttccagaactttgcagaagcagatggcttctatacctgagtaactgaaacccaaaaaggggtccaactcagtatttttccagtacatcacttttcaggaatcatggcacaacaactaaaaggaatgtcacttaatgagaaataacatgtaagattgaaagtgattaaggtaaagtcatagagtagaggtttcctctttccattagaaataacttcccttcccttaaacacgtcacctccatctttcctggcactccattaatggtcatctgctaaaagttattgtttaccctctgaccacaacatcaaatgccaaacacatttgttgaaaattatttaatagaaatcgctacttttcagaaactttatgaaaaagacgtgatagagacaaacacccatggcaggttaagtagatttcttttcattcagtgtgcccagcccaaacggaagggtgtgaagcatttgttttataaagtgtgtaattaataagagaaaggaagggaggagtttattgtttttcaatgaattatgagcaaccccttccattctgcttcttcattttggaactgcttctaacaaagttaccattaaac

SEQ ID NO: 12695 - DNA, 1926 bp, Homo sapiens
  source 1..1926: mol_type = unassigned DNA
atagctgatcagcttccttgggttttgctgatgacacaagagagctttgcctgaagatggaaacactggagtcagaactgacctgccctatttgtctggagctctttgaggaccctcttctactgccctgcgcacacagcctctgcttcaactgcgcccaccgcatcctagtatcacactgtgccaccaacgagtctgtggagtccatcaccgccttccagtgccccacctgccggcatgtcatcaccctcagccagcgaggtctagacgggctcaagcgcaacgtcaccctacagaacatcatcgacaggttccagaaagcatcagtgagcgggcccaactctcccagcgagacccgtcgggagcgggcctttgacgccaacaccatgacctccgccgagaaggtcctctgccagttttgtgaccaggatcctgcccaggacgctgtgaagacctgtgtcacttgtgaagtatcctactgtgacgagtgcctgaaagccactcacccgaataagaagccctttacaggccatcgtctgattgagccaattccggactctcacatccgggggctgatgtgcttggagcatgaggatgagaaggtgaatatgtactgtgtgaccgatgaccagttaatctgtgccttgtgtaaactggttgggcggcaccgcgatcatcaggtggcagctttgagtgagcgctatgacaaattgaagcaaaacttagagagtaacctcaccaaccttattaagaggaacacagaactggagacccttttggctaaactcatccaaacctgtcaacatgttgaaactgtaaaggatcagaaagtcattggcagagagaagcagcagtattaccctaggaataggagaaagtgggtcagcaactccctacaggcaagactgatggggagaagatgcatttcaagacgcgaaagaaaactgactctagatgtagagaaggtcaatgcatcacgtcaagaagccaaattgacagaggagtgtgatcttctcattgagatcattcagcaaagacgacagattattggaaccaagatcaaagaagggaaggtgatgaggcttcgcaaactggctcagcagattgcaaactgcaaacagtgcattgagcggtcagcatcactcatctcccaagcggaacactctctgaaggagaatgatcatgcgcgtttcctacagactgctaagaatatcaccgagagagtctccatggcaactgcatcctcccaggttctaattcctgaaatcaacctcaatgacacatttgacacctttgccttagatttttcccgagagaagaaactgctagaatgtctggattaccttacagctcccaaccctcccacaattagagaagagctctgcacagcttcatatgacaccatcactgtgcattggacctccgatgatgagttcagcgtggtctcctacgagctccagtacaccatattcaccggacaagccaacgtcgttagtgagtatctcatggcctatttatttctgtctttggtggctttcttcagattgattgcattcctgaatttaaacttcaaaggaagacaaggaaggaaagaacacacaatatttattgacttgtctttcttgaacaaaaaagtgatagcactcacttgtactacattagtaaaaacagctggctaaatattgatgaaaattaatgacctctagcaaaccacatggatgttaagggaaagaagccagaaacaaatatatagagagaaacaaatatatagagagatacatagagagagaaacaaatatatatatatagtattaatccacatataggttcataacttaaagatcaaaataaactattttgcttaaagaaacattcataggtgttaaaactataaaccctgggcaacctggtgaaaccccatctcta

SEQ ID NO: 12696 - DNA, 6463 bp, Homo sapiens
  source 1..6463: mol_type = unassigned DNA
gattggcgaagctcctccgcggcccaagccagccacctacaacgtctctgagaactgatttgaaataagagccaggcggtcctcgcttccctgcgaccgacttttcataggctgggggagaaaaggttgagaaacttgacattgtctcgagcagagtgcgtgtagcaacagatcaaagaaaaagaggacgaaaacgtgctctttgctgcccgtagatttcgccgggttgcttttgtcttgcgggctcctgtcgggttcggtgtttccgctctgaagactgcgacgcgggctccgatgcagctcgctccctgccggatgggtcatgggattctaaacatgaggcagatagctgatcagcttccttgggttttgctgatgacacaagagagctttgcctgaagatggaaacactggagtcagaactgacctgccctatttgtctggagctctttgaggaccctcttctactgccctgcgcacacagcctctgcttcaactgcgcccaccgcatcctagtatcacactgtgccaccaacgagtctgtggagtccatcaccgccttccagtgccccacctgccggcatgtcatcaccctcagccagcgaggtctagacgggctcaagcgcaacgtcaccctacagaacatcatcgacaggttccagaaagcatcagtgagcgggcccaactctcccagcgagacccgtcgggagcgggcctttgacgccaacaccatgacctccgccgagaaggtcctctgccagttttgtgaccaggatcctgcccaggacgctgtgaagacctgtgtcacttgtgaagtatcctactgtgacgagtgcctgaaagccactcacccgaataagaagccctttacaggccatcgtctgattgagccaattccggactctcacatccgggggctgatgtgcttggagcatgaggatgagaaggtgaatatgtactgtgtgaccgatgaccagttaatctgtgccttgtgtaaactggttgggcggcaccgcgatcatcaggtggcagctttgagtgagcgctatgacaaattgaagcaaaacttagagagtaacctcaccaaccttattaagaggaacacagaactggagacccttttggctaaactcatccaaacctgtcaacatgttgaagtcaatgcatcacgtcaagaagccaaattgacagaggagtgtgatcttctcattgagatcattcagcaaagacgacagattattggaaccaagatcaaagaagggaaggtgatgaggcttcgcaaactggctcagcagattgcaaactgcaaacagtgcattgagcggtcagcatcactcatctcccaagcggaacactctctgaaggagaatgatcatgcgcgtttcctacagactgctaagaatatcaccgagagagtctccatggcaactgcatcctcccaggttctaattcctgaaatcaacctcaatgacacatttgacacctttgccttagatttttcccgagagaagaaactgctagaatgtctggattaccttacagctcccaaccctcccacaattagagaagagctctgcacagcttcatatgacaccatcactgtgcattggacctccgatgatgagttcagcgtggtctcctacgagctccagtacaccatattcaccggacaagccaacgtcgttagtctgtgtaattcggctgatagctggatgatagtacccaacatcaagcagaaccactacacggtgcacggtctgcagagcggcaccaagtacatcttcatggtcaaggccatcaaccaggcgggcagccgcagcagtgagcctgggaagttgaagacaaacagccaaccatttaaactggatcccaaatctgctcatcgaaaactgaaggtgtcccatgataacttgacagtagaacgtgatgagtcatcatccaagaagagtcacacacctgaacgcttcaccagccaggggagctatggagtagctggaaatgtgtttattgatagtggccggcattattgggaagtggtcataagtggaagcacatggtatgccattggtcttgcttacaaatcagccccgaagcatgaatggattgggaagaactctgcttcctgggcgctctgccgctgcaacaataactgggtggtgagacacaatagcaaggaaatccccattgagcctgccccccacctccggcgcgtgggcatcctgctggactatgataacggctctatcgccttttatgatgctttgaactccatccacctctacaccttcgacgtcgcatttgcgcagcctgtttgccccaccttcaccgtgtggaacaagtgtctgacgattatcactgggctccctatcccagaccatttggactgcacagagcagctgccgtgagcgtctggccacatggagctgctttctggggaacagtaaggttcaggccactatttaggggactgagaaagcacaggcttcatgagtgtaatgaaatctcaccagaagtgtcccgaaatcggctcagatagggctcaaaacaagagattcctctccttttactgtgtcttgtattaagtacgggctttaataatttctttaatttttttgtatttagaggaaaatctatagattatttataagagaaacataatcaggattacaacttttaggaattacttggttttgcacattaagaggcccataagtttatcagctatttacaaccttcatttcatcacaatctgtgggcttacaaaaaaacaaaaacttttgtagttttgtatgttactcatcttcttacctgatatcccatgatgatcccatggtaggtcttctcacctcgatggtgcataacaggatgtgtttgaacctagtaggggaggaaacaggctttcttactctggtttaatttgaagtgttttaattgtgatgtcaaaaagttgtatcagatcaactaaaatggagagcaagacagagaatgaaaagagttgattttggacctcggaccttgccgtggctaaatctttaccttctcatagctgatgggataatgttggaaagaaaggttctgaatcctttggccacattttgccctgcttctctcagggttaagggttctggaagaacattaagaatgagattgcaattgaaaatagtcattttgaatcctattgattattcaaaaattcaggctgatttgtcttttatcagaggtaggattctgttttatagtatagaatctactttatccttccttttaatagttcctttagacctgtgaaatttcttcactacatttaatagttctcctatttcccgctcccccatatcaattttccttttgtctccggggctgagtaaataaacatgttctgtcacaaatagcagcaccactttggattgattttgctctccaggacatcagcacatggccctgatcagcactaccacatccaaacataagtcactgaaaaacacttaatatttatgagttggtaatgacaagggacattgtataaagtactatttgctagattcatgcctcaaaagttattataaacagacctttattaaacacatcttgaaagatgtagaagtccctctatagtctagtatagtttacaatagagttgtaagaccaaaaaaaaaaaaaaaaaattcaaactcgttattcaggaacctgcttataaaatgtcagctgggattctttgcatgccaatctgatgcgttggaatggtccatgaattaaggctttcttgagcagttcttggcccagaactctggcattggttctagtttgatgaagggcatgacctctataaatggtttcaattgctaaaatatttacctgggatactgggtcagccattttgactgagcagactagtggatttagacattgtttttagttattttgtttttaaccaaatcaaccaactgcctccctgaaataagtcaatgaactcattgtttcagcatcacgtggccaaaggtcatgtgattgcaaatctggatttcaagggaggccaagccagcttcctgggtccttccatcctcttccctagcagacactctcctttttcttaacagatagattctatatatttactatattatttatacccagatgaatattttgatagatacctaagacaatttcacatctaaaagatggacgcctcaatggaaaaaaaacaatctttctctggaaaccttataggtttttctttttattacaatataaaagcaatgtgtgtttgccttctctgagtaaactgaaagggttgtctcagtaatttttacatacattttgggtaactggataatggatattttaatgcactttgtacactaacaggttctaaataaaagggtctaaaactcagcttctgagtttttaaaatcacggtctccaggtaccaataaatgctacagtttgccttatgatgttaacataaaacacttagtagaaggacaatatttccatgaaaataatgtttttcaatattaagaagttactactcaaattttcacagtaagccatttagggtatgtttggctatttttataaggacatgagagattatgtcataattttgttgtggaagtctcactcttggctaacttaaaagcattgtggatagtagcagttactagttccaggttgtcatatttacaggaaaatatgtatatggtgaaaggccaccgtgtttaattactataatgatgtagaaaagattcccgtgtgaattttttttttgaaagtctaaaaaatgtatgctgtaaaaatttgctgcagtgtaattttgcattctctttaaactgattgaggtcacagtattttattatttggggtcctcaccacaggaaacactgcgatacaggggcaaaagagatggcagtgccaattaaattaatacaacaaaatcaatgcagcaccaaccaagactgccaggtctggtgtcatgggtatgcccagagcccaggagttcagaagggccctaagcctgatttaatgctctgctgttgatgtcttgaaattcttaacaatttttgaacaaggggcctgcgttttcacttcgcactgggccttgcaaattacatagcgagtgctcataaaagaactcagaaacgtggtacctctcttcctggtggatacaaataaagaaatctggatccaaagttgaaagttgctggcgatatcattcaagtaggactctaaatagtggattaagatgagggtgggcctgggtgaagattctttccagctttaaaagaaagtgacttcaaaaactgactgcaaatattgacgatggtttctgctggaggaaaagaaacagcttgaatacagacaggcttttttattacggtactgatatattgaccttaaacttgctgaggaactgaactaacgtcctccagtgaccgtggaattccatctcagctccaggaacatgcagatacctgcaaagagacacgcatatatgctggcatacatgtgcatttggtgttgggaagttgaccatctggtctatcttaataaaatggtaaaaagcacaccaagacaatgatgggggcaggaggatgtttttgaaaacagcgcttctcaaccagtgctcgattttgccccccaggagacatttggcaatgcaatggcaacttttggttgtcgcagccggggaagggaagctaccagcatctagtgcgtagaggtcatggacgccgttaaacatcctacagtgcaagcgcagcccccgaccacgaagagttgtcttgctcaaatatcaacagtgctgcagtgtagaaacttgatcgttggttttcttttaatgcaaaactctcataaaaacctttcacttttcctgtcattgattatatgcttgatacacccaaaaagaaaaggggaggggcaccaattcacctacactccagtggctccatcacctttaaaaatatttataaaatagttccaaaaatctgatatctgaaaagcaatccaagcctgtgtaaatgggaatcactgataagtatcatcatctgtatcagcttggcttggacatgaaaaattgattctctttatgtcactccttgcacctggacaaattcaatccccggtacttaagtcacactgccaagccctcggccctgactattgtcttgattgctgttcctttctggttcaaaataaaatcatttttgtggcaccaagaccctctgtctctgcctgtctctgttgccttttcatcattttgtgtttttgcagttatgatgttgacaaatatttattcaacatctaccatttattcatactactttatgacatataattcattttcttttactgtctctcatccactatttgcctttccctattcaaaatacaattcttttgcaacactcaaaatattctccagggaatttttaaaacacaataaaagaaagcctatatagaagtg

SEQ ID NO: 12697 - DNA, 758 bp, Homo sapiens
  source 1..758: mol_type = unassigned DNA
cttcaagatgacagggcgctggagaaaaggctgctggaatcagctggtgaaagcccagcctccgtggttcttaatgcctcaggaggactattttcactaaagatggaaacactggagtctgaattgacctgtccaatctgcctagagttgtttgaagacccccttctgctcccttgtgctcacagcctctgcttcagctgtgcccatcgcattttggtatcaagctgcagctctggtgaatccattgaacccattactgctttccagtgtcctacctgcaggtatgttatctcgctgaaccaccggggcctggatggcctcaagaggaatgtgactctgcagaacattattgatcgcttccagaaggcttcagtcagtgggcccaattcccctagtgagagccgccgggaaaggacttacaggcccaccactgccatgtctagcgagcgaattgcttgccaattctgtgagcaggacccgccaagggatgcagtaaaaacatgcatcacctgtgaggtctcctactgtgaccgttgcctgcgggccacgcaccccaacaagaaacctttcaccagccaccgcctggtggaaccagtgccagacacacatcttcgagggatcacctgcctggaccatgagaatgagaaagtgaacatgtactgtgtatctgatgaccaattgatctgtgccttatgcaaactggtgggtcgtcaccgagaccatcaggtcgcatccctgaatgatcgatttgagaaact

SEQ ID NO: 12698 - DNA, 2876 bp, Homo sapiens
  source 1..2876: mol_type = unassigned DNA
gagaagacatgtaaacgtgcctccagaggaagggctgggggagctgggagtggcgggggcggcggaaggtgagcctgggaaggtggccgagcaccccttcttcttgggcccttcccagtgctcccttggggtgtcagccccagccccgtttgcccccactccgcctcccttttggaagggattgccttttttttcctctgcggcggcggaaatgacagtgtggtgctgccgtggtgtcatggtgctgcccctggactgaggggcgaaaactcttaagtttagctcgggaggcccagctgcggtagcatcgcggccgccgtgctgtcccctgcggggcgcgcgggctggcggatcccggctgctgcgcggcgtcggcgacggtagcggcagcggcggcgaaggcgggcggcggcctacagtggtagcggcggcggcggcgaccggggcccgggagctcgcgccggagcccgagccaacccgctgcggaggcagacgagagcccagcgccctcgagcgagcggaggagatggctggcacctgggaacgctatgggtgaaagcccagcctccgtggttcttaatgcctcaggaggactattttcactaaagatggaaacactggagtctgaattgacctgtccaatctgcctagagttgtttgaagacccccttctgctcccttgtgctcacagcctctgcttcagctgtgcccatcgcattttggtatcaagctgcagctctggtgaatccattgaacccattactgctttccagtgtcctacctgcaggtatgttatctcgctgaaccaccggggcctggatggcctcaagaggaatgtgactctgcagaacattattgatcgcttccagaaggcttcagtcagtgggcccaattcccctagtgagagccgccgggaaaggacttacaggcccaccactgccatgtctagcgagcgaattgcttgccaattctgtgagcaggacccgccaagggatgcagtaaaaacatgcatcacctgtgaggtctcctactgtgaccgttgcctgcgggccacgcaccccaacaagaaacctttcaccagccaccgcctggtggaaccagtgccagacacacatcttcgagggatcacctgcctggaccatgagaatgagaaagtgaacatgtactgtgtatctgatgaccaattgatctgtgccttatgcaaactggtgggtcgtcaccgagaccatcaggtcgcatccctgaatgatcgatttgagaaactcaagcaaactctggagatgaacctcaccaacctggttaagcgcaacagcgaactagaaaatcaaatggccaaactaatacagatctgccagcaggttgaggtgaatactgctatgcatgaggcaaaacttatggaagaatgtgacgagttggtagagatcatccagcagaggaagcaaatgatcgctgtcaaaatcaaagagacaaaggttatgaaactgagaaagttggcacagcaggttgctaattgccgccagtgtcttgaacggtcaacagtcctcatcaaccaagctgagcatatcctgaaagaaaatgaccaggcacggtttctacagtctgcaaaaaatattgctgagagggtcgctatggcaactgcatcttctcaagttctgattccagacatcaattttaatgatgcctttgaaaactttgctttagatttttccagagaaaagaaactgctagaggggttagattatttaacagccccaaacccaccatctatccgagaagaactctgtactgcctcccatgacaccattacagtccactggatctcggatgatgagttcagcatcagctcctatgagcttcagtacaccatattcactggccaggctaacttcatcagtaagtcatggtgtagttggggcctgtggccagagataaggaaatgtaaggaagcagtaagctgctcaagattggccggggcgccacgaggcctgtataattcagtagacagctggatgattgttcccaacattaaacagaaccattacacagtgcatggactccagagcgggactcgctacatcttcatcgttaaagccataaaccaagccggcagccggaacagtgaacctacccgactaaaaacaaacagccaaccctttaaattggatcccaaaatgactcacaagaagttgaagatctccaatgatggattgcagatggagaaggatgaaagctctctaaagaagagccacaccccagagaggtttagtggcacagggtgctatggggcagcaggaaatatattcattgacagtggctgccactattgggaggtggtcatgggttcctcaacatggtatgcaattggcattgcctacaaatcagctccaaagaatgaatggattggcaagaatgcctcctcatgggtcttctctcgctgcaatagtaacttcgtggtgagacacaacaacaaggaaatgctggtggatgtgcccccacacctgaagcgtctgggtgtcctcctggattatgacaacaatatgctgtctttctatgacccagctaactctctccatcttcatacttttgatgtgaccttcattcttccagtttgtccaacatttacaatctggaacaaatccctaatgatcctgtctggcttgcctgccccagattttattgattaccctgagcggcaggaatgcaactgcaggcctcaagaatccccttatgtttctgggatgaaaacctgtcattaagtttcaggagagtatataattcactggctctctagttcagcagttcttcccctcctacacctaagttagcgttcaatatacgagacacaaaataaagtttgtttgaagcatccaaaataa

SEQ ID NO: 12699 - DNA, 2251 bp, Homo sapiens
  source 1..2251: mol_type = unassigned DNA
acctgggaacgctatgggtgaaagcccagcctccgtggttcttaatgcctcaggaggactattttcactaaagatggaaacactggagtctgaattgacctgtccaatctgcctagagttgtttgaagacccccttctgctcccttgtgctcacagcctctgcttcagctgtgcccatcgcattttggtatcaagctgcagctctggtgaatccattgaacccattactgctttccagtgtcctacctgcaggtatgttatctcgctgaaccaccggggcctggatggcctcaagaggaatgtgactctgcagaacattattgatcgcttccagaaggcttcagtcagtgggcccaattcccctagtgagagccgccgggaaaggacttacaggcccaccactgccatgtctagcgagcgaattgcttgccaattctgtgagcaggacccgccaagggatgcagtaaaaacatgcatcacctgtgaggtctcctactgtgaccgttgcctgcgggccacgcaccccaacaagaaacctttcaccagccaccgcctggtggaaccagtgccagacacacatcttcgagggatcacctgcctggaccatgagaatgagaaagtgaacatgtactgtgtatctgatgaccaattgatctgtgccttatgcaaactggtgggtcgtcaccgagaccatcaggtcgcatccctgaatgatcgatttgagaaactcaagcaaactctggagatgaacctcaccaacctggttaagcgcaacagcgaactagaaaatcaaatggccaaactaatacagatctgccagcaggttgaggtgaatactgctatgcatgaggcaaaacttatggaagaatgtgacgagttggtagagatcatccagcagaggaagcaaatgatcgctgtcaaaatcaaagagacaaaggttatgaaactgagaaagttggcacagcaggttgctaattgccgccagtgtcttgaacggtcaacagtcctcatcaaccaagctgagcatatcctgaaagaaaatgaccaggcacggtttctacagtctgcaaaaaatattgctgagagggtcgctatggcaactgcatcttctcaagttctgattccagacatcaattttaatgatgcctttgaaaactttgctttagatttttccagagaaaagaaactgctagaggggttagattatttaacagccccaaacccaccatctatccgagaagaactctgtactgcctcccatgacaccattacagtccactggatctcggatgatgagttcagcatcagctcctatgagcttcagtacaccatattcactggccaggctaacttcatcagcctgtataattcagtagacagctggatgattgttcccaacattaaacagaaccattacacagtgcatggactccagagcgggactcgctacatcttcatcgttaaagccataaaccaagccggcagccggaacagtgaacctacccgactaaaaacaaacagccaaccctttaaattggatcccaaaatgactcacaagaagttgaagatctccaatgatggattgcagatggagaaggatgaaagctctctaaagaagagccacaccccagagaggtttagtggcacagggtgctatggggcagcaggaaatatattcattgacagtggctgccactattgggaggtggtcatgggttcctcaacatggtatgcaattggcattgcctacaaatcagctccaaagaatgaatggattggcaagaatgcctcctcatgggtcttctctcgctgcaatagtaacttcgtggtgagacacaacaacaaggaaatgctggtggatgtgcccccacacctgaagcgtctgggtgtcctcctggattatgacaacaatatgctgtctttctatgacccagctaactctctccatcttcatacttttgatgtgaccttcattcttccagtttgtccaacatttacaatctggaacaaatccctaatgatcctgtctggcttgcctgccccagattttattgattaccctgagcggcaggaatgcaactgcaggcctcaagaatccccttatgtttctgggatgaaaacctgtcattaagtttcaggagagtatataattcactggctctctagttcagcagttcttcccctcctacacctaagttagcgttcaatatacgagacacaaaataaagtttgtttgaagcatccaaaataa

SEQ ID NO: 12700 - DNA, 689 bp, Homo sapiens
  source 1..689: mol_type = unassigned DNA
acagccccaaacccaccatctatccgagaagaactctgtactgcctcccatgacaccattacagtccactggatctcggatgatgagttcagcatcagctcctatgagcttcagtacaccatattcactggccaggctaacttcatcagcctgtataattcagtagacagctggatgattgttcccaacattaaacagaaccattacacagtgcatggactccagagcgggactcgctacatcttcatcgttaaagccataaaccaagccggcagccggaacagtgaacctacccgactaaaaacaaacagccaaccctttaaattggatcccaaaatgactcacaagaagttgaagatctccaatgatggattgcagatggagaaggatgaaagctctctaaagaagagccacaccccagagaggtttagtggcacagggtgctatggggcagcaggaaatatattcattgacagtggctgccactattgggaggtggtcatgggttcctcaacatggtgagtggatcccattttccttttcttttctgtcctctgtcattaggttcctaggagattcaattctatagcacaaccataataccaataagtcaaggttaaaaggtatgtgatgaaaaccactcctagaaaaatttgccagctttttaataaaataatggaaaatatact

SEQ ID NO: 12701 - DNA, 1163 bp, Homo sapiens
  source 1..1163: mol_type = unassigned DNA
gataaaggctgagggccgcgcgcttggcccagaccggcccggccagcgcgcattcggccccggacgaaggtactcgcagcacttggagcgcagaaccggccgcgcccgatcctccgagcggcggcgacggctgttgctaagggaggggacgcgcgaggaagcgcgacccgggcggcagacggcacccagcgccaccagccgagcggcgccccctccccaggacccttaaccgcgccgcgtcccggtcgcgcccgccgccctttgaaggagaagcaagtgccgtccccacccccggaaggcgcccccaggagccggagcgacctcggagcgccactcggattttggatttcggtctcgcattccgcggccgggactttctcgaggaggacgcgcgctgctccgcgcccccgagtgcccggaggacccggcatccggggagcctctcgcccctgtcccggaggcgcggcgaggattggcggcgcccgccgcccccagccccccagcgcgcgccggggatggagccgcagcccggcggcgcccggagctgccggcgcggggcccccggcggcgcctgcgagctgggcccggcggccgaggcggcgcccatgagcctcgccatccacagcaccacgggcacccgctacgacctggccgtgccgcccgacgagacggtggaggggctgcgcaagcggttgtcccagcgcctcaaagtgcccaaggagcgcctggctcttctccacaaagacacccggctcagttcggggaagctgcaggagttcggcgtgggtgatggcagcaagctgaccttggtacccaccgtggaagcgggcctcatgtctcaggcctcaaggccggaacagtccgtgatgcaagctctcgagagtctcacggagacgcaggtcagtgacttcctgtcgggccgttcgccactgacactggccttgcgtgtgggcgaccacatgatgttcgtgcagctgcagctcgcggcccagcacgctccactgcaacaccgccatgtgctggccgctgcggccgccgccgctgctgcgcggggggaccccagcatagcctcccccgtgtcctcgccctgccggccggtgtccagtgccgcccgagtccccccggtgcccaccagcccgtcccctgcatctccctcgcccatc

SEQ ID NO: 12702 - DNA, 3243 bp, Homo sapiens
  source 1..3243: mol_type = unassigned DNA
agatcctccgagcggcggcgacggctgttgctaagggaggggacgcgcgaggaagcgcgacccgggcggcagacggcacccagcgccaccagccgagcggcgccccctccccaggacccttaaccgcgccgcgtcccggtcgcgcccgccgccctttgaaggagaagcaagtgccgtccccacccccggaaggcgcccccaggagccggagcgacctcggagcgccactcggattttggatttcggtctcgcattccgcggccgggactttctcgaggaggacgcgcgctgctccgcgcccccgagtgcccggaggacccggcatccggggagcctctcgcccctgtcccggaggcgcggcgaggattggcggcgcccgccgcccccagccccccagcgcgcgccggggatggagccgcagcccggcggcgcccggagctgccggcgcggggcccccggcggcgcctgcgagctgggcccggcggccgaggcggcgcccatgagcctcgccatccacagcaccacgggcacccgctacgacctggccgtgccgcccgacgagacggtggaggggctgcgcaagcggttgtcccagcgcctcaaagtgcccaaggagcgcctggctcttctccacaaagacacccggctcagttcggggaagctgcaggagttcggcgtgggtgatggcagcaagctgaccttggtacccaccgtggaagcgggcctcatgtctcaggcctcaaggccggaacagtccgtgatgcaagctctcgagagtctcacggagacgcaggtcagtgacttcctgtcgggccgttcgccactgacactggccttgcgtgtgggcgaccacatgatgttcgtgcagctgcagctcgcggcccagcacgctccactgcaacaccgccatgtgctggccgctgcggccgccgccgctgctgcgcggggggaccccagcatagcctcccccgtgtcctcgccctgccggccggtgtccagtgccgcccgagtccccccggtgcccaccagcccgtcccctgcatctccctcgcccatcacagccggctccttccggtcccacgcagcctccaccacctgcccggagcagatggactgctcccccacggccagcagcagtgccagtcctggtgccagcaccacgtctaccccaggggccagccctgccccccgctcccgaaaacccggcgccgtcatcgagagctttgtgaatcacgccccgggggtcttctcagggaccttctctggcacgctacaccccaactgccaagacagcagcgggcggccgcggcgtgacatcggcaccatcctgcagatcctgaacgacctcctgagcgccacccggcactaccagggcatgcccccttcgctggcccagctccgctgccacgcccagtgctccccggcctcaccggcccccgacctggcccccagaactacctcctgcgagaagctcacggctgccccctcagcctccctgctgcagggccagagccagatccgcatgtgcaagcccccgggggaccggcttcggcagacagaaaaccgcgccacgcgctgcaaggtggaacggctgcagctgcttctgcagcagaaacggctccgtagaaaggcccggcgggacgcgcggggtccgtaccactggtcacccagccgcaaggccggccgcagcgacagcagtagcagcgggggcggcggcagccccagcgaggcctccggcttgggcctcgacttcgaggactccgtgtggaagccagaagtcaaccctgacatcaagtcagagttcgtggtggcttaggatcttcggatcggccaccctcgcccctcgcaccccagcccagggcggcggggactccgagagccccggagagaacgtggcccagccctggagggcaggcggccactcccccagccagaagtctttttttcttttcttcttttttattatttttttctttttttaaaaagttctgaccgtggtttcctggactcttcatgggctttgcttcctacctccttcacccttcactcctgccctcctcttcctcctcctcctcctcctccgtctgtctcctttcacctctgcgccaggtcggtcctccctgccaaccttccccagctccaatatgtagcagtctctctggatggcggagagtgaaggagacggagaaacgcgccccatcccttccgccgcctcctttcccccccgaccctattcaggttttaagtcaaaaatgtcgatatgtcattatgcactttacagatgaggggaggggccgcagtgcgcagaacccaccccaccccccagtgcagacttcggggtctccaccccaggccagcagcgcccactgggctacagcaagccaacaggtcacagaagccaacgaggggactgtttctcttccactcctatcctcttttcttgatcttttttttgcattttccttcatttctttaacaaggagagcaaagctgttttagcagaggctggggctgaggtccccatggggtttgggtgcaggggcatggcaccctttcctgtcgggaagggagaggggaactacccccccagcctgccctccgccccgccccagccggcggactgtgctgtttcctccgcccccactcccgtgttttctgacctcctgcctgagtttggggtatttatagactattaattttctgactgagccaatagtggttggggaactcttgaaaaaggggagagaatggctgggtgctggggagttcccccctccgagccctccttcccggcccaacctgagggatgtggatttgggactgtctgggggcccctcctgcagcgaggatgggagggggtgctgagctgtgaatcccctgggcagggggcgacaactccgtgtagcattaacccccgtggcggggtccgctgctggtctaatttggaccccctgcctctcagtgcccctgccctaggggtgtctgtctccagaggggagggacaaatcccctactggggccatttcaatggggtagtttttggatttttttccccactcactttttattttttaatgataatggagatgtctggacccttcctcaccccacctgtcggtcttgtcctggctctgcctgtcccccaccgttgttctcgtaggtgaaccccaggtcctcaactccccccctttatgtgttgaaagttaatggtttcagatgtgaacatcacgtgttataactgta

SEQ ID NO: 12703 - DNA, 523 bp, Homo sapiens
  source 1..523: mol_type = unassigned DNA
atagagcacactggggcccagaggaggagaaagtgcctggttggggtgcagagggggtgccagagtccagggcgggggttccactggagggaaggggtccgaatcgccaggatggggctcccagcaccagacggagacctctctgcacgcgcttagggccctggatctggaagccgggaaggggtgggggtgggaacttatccgtctctccccacacaagcacagccctcccccgcggcctctgcttccgcgtccctgtgtcgtctccgcggagtctcatgctcttccttcctccccccagccggctcagttcggggaagctgcaggagttcggcgtgggtgatggcagcaagctgaccttggtacccaccgtggaagcgggcctcatgtctcaggcctcaaggccggaacagtccgtgatgcaagctctcgagagtctcacggagacgcaggtcagtgacttcctgtcgggccgttcgccactgacactggccttgcgtgtgggcgaccacatgatgttcgt

SEQ ID NO: 12704 - DNA, 416 bp, Homo sapiens
  source 1..416: mol_type = unassigned DNA
ccggctcagttcggggaagctgcaggagttcggcgtgggtgatggcagcaagctgaccttggtacccaccgtggaagcgggcctcatgtctcaggcctcaaggccggaacagtccgtgatgcaagctctcgagagtctcacggagacgcagcccccagcggcgcccgggccgggccgggctggcggaggaggcttccggaaatacagattcattttatttaagcgtccgtggcaccgacagggaccccagagcccagagaggggcggcgagaggccccaggtcagtgacttcctgtcgggccgttcgccactgacactggccttgcgtgtgggcgaccacatgatgttcgtgcagctgcagctcgcggcccagcacgctccactgcaacaccgccatgtgctggccgctgcggccg

SEQ ID NO: 12705 - DNA, 536 bp, Homo sapiens
  source 1..536: mol_type = unassigned DNA
taggacagaagaattcgtgcaggaattccacccacttgctggccctggtgacttagctgggagggggcctgaggtggagcccctcccgtatccacaggcagagaggatctaggggcccatgagggtgggggaaaggcaaagtgaaggttgtttgaggtcagtgactgccagctgggccccgccccctctggcctcagtttccccttgcaagaccgacctagttggccagggaggggcaggcccccgtctgacccgcctctgtccccacagcccccagcggcgcccgggccgggccgggctggcggaggaggcttccggaaatacagattcattttatttaagcgtccgtggcaccgacagggaccccagagcccagagaggggcggcgagaggccccaggtcagtgacttcctgtcgggccgttcgccactgacactggccttgcgtgtgggcgaccacatgatgttcgtgcagctgcagctcgcggcccagcacgctccactgcaacaccgccatgtgctggccgctgcggccgc

SEQ ID NO: 12706 - DNA, 3790 bp, Homo sapiens
  source 1..3790: mol_type = unassigned DNA
gataaaggctgagggccgcgcgcttggcccagaccggcccggccagcgcgcattcggccccggacgaaggtactcgcagcacttggagcgcagaaccggccgcgcccgatcctccgagcggcggcgacggctgttgctaagggaggggacgcgcgaggaagcgcgacccgggcggcagacggcacccagcgccaccagccgagcggcgccccctccccaggacccttaaccgcgccgcgtcccggtcgcgcccgccgccctttgaaggagaagcaagtgccgtccccacccccggaaggcgcccccaggagccggagcgacctcggagcgccactcggattttggatttcggtctcgcattccgcggccgggactttctcgaggaggacgcgcgctgctccgcgcccccgagtgcccggaggacccggcatccggggagcctctcgcccctgtcccggaggcgcggcgaggattggcggcgcccgccgcccccagccccccagcgcgcgccggggatggagccgcagcccggcggcgcccggagctgccggcgcggggcccccggcggcgcctgcgagctgggcccggcggccgaggcggcgcccatgagcctcgccatccacagcaccacgggcacccgctacgacctggccgtgccgcccgacgagacggtggaggggctgcgcaagcggttgtcccagcgcctcaaagtgcccaaggagcgcctggctcttctccacaaagacacccggctcagttcggggaagctgcaggagttcggcgtgggtgatggcagcaagctgaccttggtacccaccgtggaagcgggcctcatgtctcaggcctcaaggccggaacagtccgtgatgcaagctctcgagagtctcacggagacgcaggtcagtgacttcctgtcgggccgttcgccactgacactggccttgcgtgtgggcgaccacatgatgttcgtgcagctgcagctcgcggcccagcacgctccactgcaacaccgccatgtgctggccgctgcggccgccgccgctgctgcgcggggggaccccagcatagcctcccccgtgtcctcgccctgccggccggtgtccagtgccgcccgagtccccccggtgcccaccagcccgtcccctgcatctccctcgcccatcacagccggctccttccggtcccacgcagcctccaccacctgcccggagcagatggactgctcccccacggccagcagcagtgccagtcctggtgccagcaccacgtctaccccaggggccagccctgccccccgctcccgaaaacccggcgccgtcatcgagagctttgtgaatcacgccccgggggtcttctcagggaccttctctggcacgctacaccccaactgccaagacagcagcgggcggccgcggcgtgacatcggcaccatcctgcagatcctgaacgacctcctgagcgccacccggcactaccagggcatgcccccttcgctggcccagctccgctgccacgcccagtgctccccggcctcaccggcccccgacctggcccccagaactacctcctgcgagaagctcacggctgccccctcagcctccctgctgcagggccagagccagatccgcatgtgcaagcccccgggggaccggcttcggcagacagaaaaccgcgccacgcgctgcaaggtggaacggctgcagctgcttctgcagcagaaacggctccgtagaaaggcccggcgggacgcgcggggtccgtaccactggtcacccagccgcaaggccggccgcagcgacagcagtagcagcgggggcggcggcagccccagcgaggcctccggcttgggcctcgacttcgaggactccgtgtggaagccagaagtcaaccctgacatcaagtcagagttcgtggtggcttaggatcttcggatcggccaccctcgcccctcgcaccccagcccagggcggcggggactccgagagccccggagagaacgtggcccagccctggagggcaggcggccactcccccagccagaagtctttttttcttttcttcttttttattatttttttctttttttaaaaagttctgaccgtggtttcctggactcttcatgggctttgcttcctacctccttcacccttcactcctgccctcctcttcctcctcctcctcctcctccgtctgtctcctttcacctctgcgccaggtcggtcctccctgccaaccttccccagctccaatatgtagcagtctctctggatggcggagagtgaaggagacggagaaacgcgccccatcccttccgccgcctcctttcccccccgaccctattcaggttttaagtcaaaaatgtcgatatgtcattatgcactttacagatgaggggaggggccgcagtgcgcagaacccaccccaccccccagtgcagacttcggggtctccaccccaggccagcagcgcccactgggctacagcaagccaacaggtcacagaagccaacgaggggactgtttctcttccactcctatcctcttttcttgatcttttttttgcattttccttcatttctttaacaaggagagcaaagctgttttagcagaggctggggctgaggtccccatggggtttgggtgcaggggcatggcaccctttcctgtcgggaagggagaggggaactacccccccagcctgccctccgccccgccccagccggcggactgtgctgtttcctccgcccccactcccgtgttttctgacctcctgcctgagtttggggtatttatagactattaattttctgactgagccaatagtggttggggaactcttgaaaaaggggagagaatggctgggtgctggggagttcccccctccgagccctccttcccggcccaacctgagggatgtggatttgggactgtctgggggcccctcctgcagcgaggatgggagggggtgctgagctgtgaatcccctgggcagggggcgacaactccgtgtagcattaacccccgtggcggggtccgctgctggtctaatttggaccccctgcctctcagtgcccctgccctaggggtgtctgtctccagaggggagggacaaatcccctactggggccatttcaatggggtagtttttggatttttttccccactcactttttattttttaatgataatggagatgtctggacccttcctcaccccacctgtcggtcttgtcctggctctgcctgtcccccaccgttgttctcgtaggtgaaccccaggtcctcaactccccccctttatgtgttgaaagttaatggtttcagatgtgaacatcacgtgttataactgtagcgctgtaaatttttttgtgggagggtgggcagggaggggtcccagagggtagagctcaaggattttgggttttgttttgttttcatttttccaaaaaaaaaagaaaaaaaaatagaaaaaaaaggagtaaaaggggcgggtttgttttttgaagaactgtcttggatacctatttaaatgtgtgttctgttttgttttttaacgatttttaaataacgtctgtgcctccactggttgagggtggaacctccaggcaggaaccggctcgccaccctctgcccggtaagggctgcccaagaaagcattacccgccctcggggggtcgggctgtgggggtcccggcacctggcgtgagtttcatgtatgaaaacataaaattgaaaaaaaaaaaaaaacctacacgagcaccgtgatttcaagtaataaacagaaaatgaaac

SEQ ID NO: 12707 - DNA, 82 bp, Homo sapiens
  source 1..82: mol_type = unassigned DNA
tgagccctcggaggactccatttgttttgatgatggattcttatgctccatcatcgtctcaaatgagtcttcagagggttct

SEQ ID NO: 12708 - DNA, 745 bp, Homo sapiens
  source 1..745: mol_type = unassigned DNA
agacgcgcgtccccggccgcggcgccgaagccggctgggggaccgcctggtcccgggccagagctgggaggcggtgttccgtgagccgcctggtctggggtgcggggggcgggaagcggccccttcgtgtgcgcttgggcgaggccgggcggcgcttctgtcctcctactcggacccgcaggtttctggtcctcataccgtgtggttgagtgaaatcaaaacttccacgatagcaatgctgattggacaaagaatgtgttgtggacacaaaaccaaactctggaggacagaggattcattccaagggtctgcttgtattcaatgactggtctacgtgggggtgtgaagtccccttactccacctgtgaagagtcttcccagtttcagaccaccctcccagcctcctgttattggctaaggccattttgtgactacactgcaggtagagatggattcctggaaatacctcctcaaggccagtgtagagccctcaatcacccactgcccccagcttctccttctcccatctcctgcaccaagcaggtctccaggtgttccagctgctgatgacgtaaagtgtggagttggtccaggaaggtcatgttccatgcagcagaggagcgctttgtgtgagaagttgaagacctgctgtaacacatcatagaggaaagacatagcctgggccttctgcaactggctgacttccaccttctcctgggggaatctgaagtcacttctgtccttt

SEQ ID NO: 12709 - DNA, 95 bp, Homo sapiens
  source 1..95: mol_type = unassigned DNA
ggtctctgtgttgggcgtctgtctgcccgcatgcctgcctctctgttgctctgaaggaggcaggggctgggcctgcagctgcctgggcagagcgg

SEQ ID NO: 12710 - DNA, 77 bp, Homo sapiens
  source 1..77: mol_type = unassigned DNA
agtctagttactaggcagtgtagttagctgattgctaatagtaccaatcactaaccacacggccaggtaaaaagatt

SEQ ID NO: 12711 - DNA, 88 bp, Homo sapiens
  source 1..88: mol_type = unassigned DNA
atgttattgctgctgctgtcacatttacatgaaaataaaatgtaaattattttatttctatcaaataaggactagtctgcagtgatat

SEQ ID NO: 12712 - DNA, 88 bp, Homo sapiens
  source 1..88: mol_type = unassigned DNA
tgttaaatcaggaattttaaacaattcctagacaatatgtataatgttcataagtcattcctagaaattgttcataatgcctgtaaca

SEQ ID NO: 12713 - DNA, 651 bp, Homo sapiens
  source 1..651: mol_type = unassigned DNA
ccgatgccgtatcctgccgcccgttttacccgcgggaaagccgaggcccggtgctgtattctgccgcccattttacccgcggggaagctgaggcccagtgctgtttaatatcttactcatgttcacttgatgagaaagtgacagatctgagacaaacccagttctagaggttatgacaccagccatggaagagcagagaggccaatgaggtggggaggttggaaacaaaaggccttctccaccccagcttgaccaacccaaaagctggaaggcaaggaagacctagatcgacagaaaagaaatgagtcaacgatggtgcagaaagggaccagcttgacgaagcttctgcttttgtgactgtctcctaatgcagaaaccagagcacctcagaagatcaaggcttccaaattctcctgggggaacagacgtcagccattcagcacaaaggaaacttccttctctgtatgtcagaggaagacataattgtgccatttccttcttgaagaagtttacaaacatttgcaagttgtcaaaaataattagtctaaaattgtttcataaaccgtggaatgaaacaggacgtgccttgttgagatcaaagggcttctgttaccttcttgtaaactcaaatgaaattcttttgaaagtaaa

SEQ ID NO: 12714 - DNA, 471 bp, Homo sapiens
  source 1..471: mol_type = unassigned DNA
cgcccgttttacccgcgggaaagccgaggcccggtgctgtattctgccgcccattttacccgcggggaagctgaggcccagtgctgtttaatatcttactcatgttcacttgatgagaaagtgacagatctgagacaaacccagaaagggaccagcttgacgaagcttctgcttttgtgactgtctcctaatgaaaccagagcacctcagaagatcaaggcttccaaattctcctgggggaacagacgtcagccattcagcacaaaggaaacttccttctctgtatgtcagaggaagacataattgtgccatttccttcttgaagaagtttacaaacatttgcaagttgtcaaaaataattagtctaaaattgtttcataaaccgtggaatgaaacaggacgtgccttgttgagatcaaagggcttctgttaccttcttgtaaactcaaatgaaattcttttgaaagtaaa

SEQ ID NO: 12715 - DNA, 858 bp, Homo sapiens
  source 1..858: mol_type = unassigned DNA
tttacccgcgggaaagccgaggcccggtgctgtattctgccgcccattttacccgcggggaagctgaggcccagtgctgtttaatatcttactcatgttcacttgatgagaaagtgacagatctgagacaaacccagttctagaggttatgacaccagccatggaagagcagagaggccaatgaggtggggaggttggaaacaaaaggccttctccaccccagcttgaccaacccaaaagctggaaggcaaggaagacctagacagaatttaagagacaccagaggatggcacatttatactgagcttgcagtttcctaaacatgaagaagatgaacggctctcagttaagcagcacgggtcagataggagcttgaaattgaatatttgagctgacacgggagagacatacttttgagattccaaatacgatttctgtggagaaaacaaaaaaggactctgtttttaattcaaaagggagaagtgaaattctacctcacttttttaaaagaagagcctggaattggcctatccgtctttttccccgttggatcacagagcagaaaggaaggtgggcgtttgtgttctgggtgttgtccacgctggacgtgccagcatctcccactgagccagatgttccagggctaaggccagtttcatttgaaggcacagccttactatatcatattaatctgatgccaagtttttggatgttatgagcaaccacctcatttattttttgtggttgtttaaccacaatgagtaagtcatgccgtgagggcccagagactgtgtcactgttgtgatgatagagtgcagggcccttcaaagggaggtctgtgggccagcagcacccaag

SEQ ID NO: 12716 - DNA, 534 bp, Homo sapiens
  source 1..534: mol_type = unassigned DNA
cggtgctgtattctgccgcccattttacccgcggggaagctgaggcccagtgctgtttaatatcttactcatgttcacttgatgagaaagtgacagatctgagacaaacccagatcgacagaaaagaaatgagtcaacgatggtgcaggtgatctgtgcagtgctgtgcaggggatgggtcaaagctgtgatgctggcatgcaactaactcaccattaaagggaccagcttgacgaagcttctgcttttgtgactgtctcctaatgggagaagtgaaattctacctcacttttttaaaagaagagcctggaattggcctatccgtctttttccccgttggatcacagagcagaaaggaagctaagacctctagtacagtgttcaatggaactggtgagaaaagacgtccttgctgtgttcctgatatgaagaggaaagcagtccttctccattaaatgctgacaacatgagcctcccgtggtcggaacgggcttgtgaaggcggtgctggggtgcaccagggcagcagctacag

SEQ ID NO: 12717 - DNA, 415 bp, Homo sapiens
  source 1..415: mol_type = unassigned DNA
tatcttactcatgttcacttgatgagaaagtgacagatctgagacaaacccagatcgacagaaaagaaatgagtcaacgatggtgcagaaagggaccagcttgacgaagcttctgcttttgtgactgtctcctaatgaaaccagagcacctcagaagatcaaggcttccaaattctcctgggggaacagacgtcagccattcagcacaaaggaaacttccttctctgtatgtcagaggaagacataattgtgccatttccttcttgaagaagtttacaaacatttgcaagttgtcaaaaataattagtctaaaattgtttcataaaccgtggaatgaaacaggacgtgccttgttgagatcaaagggcttctgttaccttcttgtaaactcaaatgaaattcttttgaaagtaaa

SEQ ID NO: 12718 - DNA, 445 bp, Homo sapiens
  source 1..445: mol_type = unassigned DNA
aatgaggtggggaggttggaaacaaaaggccttctccaccccagcttgaccaacccaaaagctggaaggcaaggaagacctagatcgacagaaaagaaatgagtcaacgatggtgcagaaagggaccagcttgacgaagcttctgcttttgtgactgtctcctaatgaaaccagagcacctcagaagatcaaggcttccaaattctcctgggggaacagacgtcagccattcagcacaaaggaaacttccttctctgtatgtcagaggaagacataattgtgccatttccttcttgaagaagtttacaaacatttgcaagttgtcaaaaataattagtctaaaattgtttcataaaccgtggaatgaaacaggacgtgccttgttgagatcaaagggcttctgttaccttcttgtaaactcaaatgaaattcttttgaaagtaaa

SEQ ID NO: 12719 - DNA, 373 bp, Homo sapiens
  source 1..373: mol_type = unassigned DNA
agaagagcctggaattggcctatccgtctttttccccgttggatcacagagcagaaaggaagctaagacctctagtacagtgttcaatggaactggtgagaaaagacgtccttgctgtgttcctgatatgaagaggaaagcagtccttctccattaaatgctgacaacatgagcctcccgtggtcggaacgggcttgtgaaggcggtgctggggtgcaccagggcagcagctacagggtcaagcctgagacacctgaagccctggacttggaatctgaagctgtcatcagccagtacacctatgaacctgtggaagacctgaagtacctgtttaaaagacagccaaaagataagtaaatacttcccaaatttc

SEQ ID NO: 12720 - DNA, 2043 bp, Homo sapiens
  source 1..2043: mol_type = unassigned DNA
agatgctcccaggctctcccgcagtttaaagacttaactcagcggctttcagggcctgtggttgagggactccgaaagaactgttgctggtggaccggttcagggtcttgacttcgccacacaaaagaacttgagagcacgtccaaagtaaagctaagacctctagtacagtgttcaatggaactggtgagaaaagacgtccttgctgtgttcctgatatgaagaggaaagcagtccttctccattaagtaaaatgctgacaacatgagcctcccgtggtcggaacgggcttgtgaaggcggtgctggggtgcaccagggcagcagctacagaatgcaccagctggagtcgacattaaagggccccatttcccatttgctgcagaagatgtttaattggaagtctctccctgtccttttaccctctggtgctgggcaccaatgagaagctcatctggccccgggatcctggcaggacactgggagcactatttccatgggcagcagggttgttcctggagacatcactgacccaggacacctagcacaatggcactcgatgtgaaagtggcttcgtacaaatctgccactcaagcctaaataagtgcattccagaagagccgcagcccctctaacagctcctgaggtgagggaaaccctagggatgggaagttggagcagaaagagatggtggcctgaagtcaactgcagtgaaaatctctccccatcagcaagttttgcaaagctatggccacagggacacatgactggggcccctcctagtcttggaaggagcccccatggaaatgagggcctcacagtgaatccacctctgatcctacttcacctgcagtcaaatgagaagagatttcaatcagctaaagacaccctatcccctctccccgacccctgcgaccccaggagctcctgccttgtcactgtgtccccaaacgaaccgcatctgaatcaagcccctttctctccctagtggtcaacatctgggctgtgatgggcagctcccactcttgccttagaatatgactggagaggtgacttctcatcacatggagaatatgttcaccccatggtgctttccacccaagctgaccatggcttgactttttggtgtagttgctagctctgtgccatccttggcaatgtgaccctggagcagctgtccccagtgtgcatttgggggatttcatgtaattatgaataggatgcaaattttatagccccagtgaagggaaacacccctggcgaggcttcccggggccagagagaggactccactgagggagatggtggcagggccattctttgtgtcctgcttttttttttttttttttttttaacatcctctttatgtcctgagagccatgtgcagatgaggaaaaatgacatgcaatgcatttttgcctgccacaatgactttgcaatcataacaagcaaaatgttctaaacagtaagtgaatcgaggaagatatactgccaagtcaggaagaaaaaatccacctgttcagtgatttcaggaactgctgaagaaaatcaccagtgagtatcagtttctgcaagagaatctaatgcaggctttgcttctcatcggaatcccccagctggtgtcttggttgactgagagtctgggggagagggcagagaatggatttattctctgctaggtttttaacagtcaagaagggctgtggtcctaaggggcactggtcaaaccttagtgtgcatcagaattatctggataaggctaggcacagtggctcacgcctgtaatcacagcactttgggaggctgaggcgcgtggatcacctgaggtcagaagttcaagaccagcctggctcttttagtagagaaaccctatgtctattaaaaagtacaaaatttagccaggtgtggtggtgagtgcctgtaatcccagctacttgggaggctgaggcaggacagtcacttgaatctaggaggcagaggttgcagtgaactgagatcgtgccattgtgctccagcctgggcaacaagagtgaaactctatctc

SEQ ID NO: 12721 - DNA, 499 bp, Homo sapiens
  source 1..499: mol_type = unassigned DNA
aggcggtgctggggtgcaccagggcagcagctacaggccctgctgaaagggttgacaatgaagactctcaggccaccgtaactcatggagaagccctgagcatctggcccgcttaatgcaccagctggagtcgacattaaagggccccatttcccatttgctgcagaagatgtttaattggaagtctctccctgtccttttaccctctggtgctgggcaccaatgagaagctcatctggccccgggatcctggcaggacactgggagcactatttccatgggcagcagggttgttcctggagacatcactgacccaggacacctagcacaatggcactcgatgtgaaagtggcttcgtacaaatctgccactcaagcctaaataagtgcattccagaagagccgcagcccctctaacagctcctgagagatgacagaagagacatccaggagtagatttcaatgcacagcagcagctgagagaagccagctgtgaaaaa

SEQ ID NO: 12722 - DNA, 825 bp, Homo sapiens
  source 1..825: mol_type = unassigned DNA
ggcggtgctggggtgcaccagggcagcagctacaggccctgctgaaagggttgacaatgaagactctcaggccaccgtaactcatggagaagccctgagcatctggcccgcttggtaaattctgctatgtctcctccagccctgaccaaacttcaaatatgaggaaaataaacattgtcatatatcaaccggccagttcccagcaattcctgcctgcgtgcccatgcaaggggaggtctggtgctgcctcctgtagtaactacctgtggagccagctgaactcattttcccctgaacttcagaaagtgccagaatcaccccagagcacttgagtacttgccctgtgaagacagcaaggaaatgggagaggatttgaaggatttgcttaagagcggctttgaagtcctccaacagggtgagagagccagctcagcacagacccagcctagagaaggagcatttttctagtgggctcatctttaatttgcaactatggcacaaaggaaggagcagctgtggagaccagggcattggtgaaatgaaagcatattgtttccctccatcttccccaccctggggaggccagggtttctccaaggcagacactctctaagtgaaatctatggaattttggaaacaagataaaagacatactcgactgcaatgcacatactcaccgtggagcccggcacgcagggtaaagactcgctgggtttgcattgcacattctcactgaggagcccggcacgcagggttcagactcgctggttttgggttggtggacttcattttctttcacgctgctgcttgcccagtgggtgtaga

SEQ ID NO: 12723 - DNA, 805 bp, Homo sapiens
  source 1..805: mol_type = unassigned DNA
ggggtgcaccagggcagcagctacagggctctcctcccaagcacccaacgagcaagatgggtctgaggatacctgtgagaagtaattcaacacatctttcacacatgggccaatttgctggtctaagttaaattggagtgacaaggacagctgcttaaagaagacgaggtttcaccgtgttagacaggatggtttcgatctcctgacctcgtgatctgcgtgcctcgacctcccaaagtgctgggattacaggcttgagccgccacgtccggcctcagaccatttttctagagatgcaagctacagatgacagagccgaggtcgtctcctccaggtcccagagctgctatgtggctgagctgcagttcagagccagggtgactcagcttgcaagcctgtgctcctcacctccgtggcatgcttctcccaggctggcactgaatcaccggaaggactccttaagacatggataggggatccaccccagaggtcctgaatcagcaagtctggggaggagactgagaattgacttttctatcaagttccccagtgatgctgatgctgctggtgtgcgtaccacgttctggaacctccgctccctgctctagggccttctgggtggagccctagagctgagctcccagctgtgggcatggcaggcactgaagagtgttgctttagggtaatgtgttaacagtctaagaaggtgcgtggtgagtaggctgaccatttctctctcttattgaacaaaatattgctaagccctggattttctcagctgtaaatcactgaaatctgaataaaa

SEQ ID NO: 12724 - DNA, 89 bp, Homo sapiens
  source 1..89: mol_type = unassigned DNA
atgcatcgggatagtccgagtaacgtcggggcattccggataggccgagaaagtgttgtgggaagaaagttagatttacgccgatgaat

SEQ ID NO: 12725 - DNA, 710 bp, Homo sapiens
  source 1..710: mol_type = unassigned DNA
acctgcatctgccaacaagactggaagcaggtgaggcacacagagggggaggcccgcagctgcgtgggaggaggggtggtctgagggacgtgggatgccgggaatgaggctggtttgcaggttggcgcatggacattttcccagaaagggacagagacggcgaagtttgacggtctggaaagcagagaccagcagggctgactgcttgggagcaccaaatatccggacagcgcctctcgggaggtccgagaagagaaccgcgatctgtttcagcaccggggctcaggacagttcccagcgggctccgtttcgtctccagaaccctggacagctcctccagcttggaatgcactccctccacctccaaccagagctccccacaactgaccctgccttcttctgcaagctccatttcatcaagggaaacgatccttattgcctcaccatttcccacgtgaagtctgtattgacattctcatagacctgggatattgtgtctgcagcacatagtccaattattttcatgttatctactgacaggtctatttgtctccctgttacactgtgagctccgtgagggcagaaacaatgttagtattttcactgctgtgtccccagcgcctggtccggggcccggcacacagcaggcatataataagcatgtgttgaatcaataaaggcatcaaagaataaaccaatacatcaatcaa

SEQ ID NO: 12726 - DNA, 879 bp, Homo sapiens
  source 1..879: mol_type = unassigned DNA
acctgcatctgccaacaagactggaagcaggtgaggcacacagagggggaggcccgcagctgcgtgggaggaggggtggtctgagggacgtgggatgccgggaatgaggctggtttgcaggttggcgcatggacattttcccagaaagggacagagacggcgaagtttgacggtctggaaagcagagaccagcagggctgactgcttgggagcaccaaatatccggacagcgcctctcgggaggtccgagaagagaaccgcgatctgtttcagcaccggggctcaggacagttcccagcgggctccgtttcgtctccagaaccctggacagctcctccagcctcccaaagtgctaggattacaggcgtgagtcactgcgcctggcccaagtccggaattttcaacaggacatgggtgttactgtgcccatgtgacatttggggaacccaaggccctgagaaaggcagaaaaataacccacgcagggactctcagcccacaagtgaagctcttggaatgcactccctccacctccaaccagagctccccacaactgaccctgccttcttctgcaagctccatttcatcaagggaaacgatccttattgcctcaccatttcccacgtgaagtctgtattgacattctcatagacctgggatattgtgtctgcagcacatagtccaattattttcatgttatctactgacaggtctatttgtctccctgttacactgtgagctccgtgagggcagaaacaatgttagtattttcactgctgtgtccccagcgcctggtccggggcccggcacacagcaggcatataataagcatgtgttgaatcaataaaggcatcaaagaataaaccaatacatcaatcaa

SEQ ID NO: 12727 - DNA, 725 bp, Homo sapiens
  source 1..725: mol_type = unassigned DNA
cctgcatctgccaacaagactggaagcaggtgaggcacacagagggggaggcccgcagctgcgtgggaggaggggtggtctgagggacgtgggatgccgggaatgaggctggtttgcaggttggcgcatggacattttcccagaaagggacagagacggcgaagtttgacggtctggaaagcagagaccagcagggctgactgcttgggagcaccaaatatccggacagcgcctctcgggaggtccgagaagagaaccgcgatctgtttcagcaccggggctcaggacagttcccagcgggctccgtttcgtctccagaaccctggacagctcctccagcctcagggcttttgcctctgctgttcctgcagcttggaatgcactccctccacctccaaccagagctccccacaactgaccctgccttcttctgcaagctccatttcatcaagggaaacgatccttattgcctcaccatttcccacgtgaagtctgtattgacattctcatagacctgggatattgtgtctgcagcacatagtccaattattttcatgttatctactgacaggtctatttgtctccctgttacactgtgagctccgtgagggcagaaacaatgttagtattttcactgctgtgtccccagcgcctggtccggggcccggcacacagcaggcatataataagcatgtgttgaatcaataaaggcatcaaagaataaa

SEQ ID NO: 12728 - DNA, 560 bp, Homo sapiens
  source 1..560: mol_type = unassigned DNA
ctgcatctgccaacaagactggaagcagaaagggacagagacggcgaagtttgacggtctggaaagcagagaccagcagggctgactgcttgggagcaccaaatatccggacagcgcctctcgggaggtccgagaagagaaccgcgatctgtttcagcaccggggctcaggacagttcccagcgggctccgtttcgtctccagaaccctggacagctcctccagcttggaatgcactccctccacctccaaccagagctccccacaactgaccctgccttcttctgcaagctccatttcatcaagggaaacgatccttattgcctcaccatttcccacgtgaagtctgtattgacattctcatagacctgggatattgtgtctgcagcacatagtccaattattttcatgttatctactgacaggtctatttgtctccctgttacactgtgagctccgtgagggcagaaacaatgttagtattttcactgctgtgtccccagcgcctggtccggggcccggcacacagcaggcatataataagcatgtgttgaatcaata

SEQ ID NO: 12729 - DNA, 587 bp, Homo sapiens
  source 1..587: mol_type = unassigned DNA
caggtgaggcacacagagggggaggcccgcagctgcgtgggaggaggggtggtctgagggacgtgggatgccgggaatgaggctggtttgcaggttggcgcatggacattttcccagaaagggacagagacggcgaagtttgacggtctggaaagcagagaccagcagggctgactgcttgggaggaggagaatgctatttatttcagcaccaaatatccggacagcgcctctcgggaggtccgagaagagaaccgcgatctgtttcagcaccggggctcaggacagttcccagcgggctccgtttcgtctccagaaccctggacagctcctccagcttggaatgcactccctccacctccaaccagagctccccacaactgaccctgccttcttctgcaagctccatttcatcaagggaaacgatccttattgcctcaccatttcccacgtgaagtctgtattgacattctcatagacctgggatattgtgtctgcagcacatagtccaattattttcatgttatctactgacaggtctatttgtctccctgttacactgtgagctccgtgagggcagaaacaatg

SEQ ID NO: 12730 - DNA, 481 bp, Homo sapiens
  source 1..481: mol_type = unassigned DNA
gggaggcccgcagctgcgtgggaggaggggtggtctgagggacgtgggatgccgggaatgaggctggtttgcaggttggcgcatggacattttcccagaaagggacagagacggcgaagtttgacggtctggaaagcagagaccagcagggctgactgcttgggagcaccaaatatccggacagcgcctctcgggaggtccgagaagagaaccgcgatctgtttcagcaccggggctcaggacagttcccagcgggctccgtttcgtctccagaaccctggacagctcctccagagacggggtttcaccatgttggccaggctggtctcaaactcttgacctcttcatccgtccacctcagcctcccaaagtgctaggattacaggcgtgagtcactgcgcctggcccaagtccggaattttcaacaggacatgggtgttactgtgcccatgtgacatttggggaacccaaggccctgaga

SEQ ID NO: 12731 - DNA, 450 bp, Homo sapiens
  source 1..450: mol_type = unassigned DNA
cagaaagggacagagacggcgaagtttgacggtctggaaagcagagaccagcagggctgactgcttgggagcacgagggacagctctccaccgaccgaaggaggagaatgctatttatttcagcaccaaatatccggacagcgcctctcgggaggtccgagaagagaaccgcgatctgtttcagcaccggggctcaggacagttcccagcgggctccgtttcgtctccagaaccctggacagctcctccagcttggaatgcactccctccacctccaaccagagctccccacaactgaccctgccttcttctgcaagctccatttcatcaagggaaacgatccttattgcctcaccatttcccacgtgaagtctgtattgacattctcatagacctgggatattgtgtctgcagcacatagtccaattattttcatgttatctactgaca

SEQ ID NO: 12732 - DNA, 865 bp, Homo sapiens
  source 1..865: mol_type = unassigned DNA
cagaaagggacagagacggcgaagtttgacggtctggaaagcagagaccagcagggctgactgcttgggagcgcctctcgggaggtccgagaagagaaccgcgatctgtttcagcaccggggctcaggacagttcccagcgggctccgtttcgtctccagaaccctggacagctcctccagtagagacggggtttcaccatgttggccaggctggtctcaaactcttgacctcttcatccgtccacctcagcctcccaaagtgctaggattacaggcgtgagtcactgcgcctggcccaagtccggaattttcaacaggacatgggtgttactgtgcccatgtgacatttggggaacccaaggccctgagaaaggcagaaaaataacccacgcagggactctcagcccacaagtgaagctatcagaccctgcttctctccaggagaaccgggaatggaaaacagggaggcagcacagaggcaggaaactcaggtgtcatagcttggctcagcttggaatgcactccctccacctccaaccagagctccccacaactgaccctgccttcttctgcaagctccatttcatcaagggaaacgatccttattgcctcaccatttcccacgtgaagtctgtattgacattctcatagacctgggatattgtgtctgcagcacatagtccaattattttcatgttatctactgacaggtctatttgtctccctgttacactgtgagctccgtgagggcagaaacaatgttagtattttcactgctgtgtccccagcgcctggtccggggcccggcacacagcaggcatataataagcatgtgttgaatcaataaaggcatcaaagaataaa

SEQ ID NO: 12733 - DNA, 614 bp, Homo sapiens
  source 1..614: mol_type = unassigned DNA
cctcagcctcccaaagtgctaggattacaggcgtgagtcactgcgcctggcccaagtccggaattttcaacaggacatgggtgttactgtgcccatgtgacatttggggaacccaaggccctgagaaaggcagaaaaataacccacgcagggactctcagcccacaagtgaagctgagaaccgggaatggaaaacagggaggcagcacagaggcaggaaactcaggtgtcatagcttggctcagcttggaatgcactccctccacctccaaccagagctccccacaactgaccctgccttcttctgcaagctccatttcatcaagggaaacgatccttattgcctcaccatttcccacgtgaagtctgtattgacattctcatagacctgggatattgtgtctgcagcacatagtccaattattttcatgttatctactgacaggtctatttgtctccctgttacactgtgagctccgtgagggcagaaacaatgttagtattttcactgctgtgtccccagcgcctggtccggggcccggcacacagcaggcatataataagcatgtgttgaatcaataaaggcatcaaagaataaaccaatacatcaatcaa

SEQ ID NO: 12734 - DNA, 529 bp, Homo sapiens
  source 1..529: mol_type = unassigned DNA
gacatttggggaacccaaggccctgagaaaggcagaaaaataacccacgcagggactctcagcccacaagtgaagctgagaaccgggaatggaaaacagggaggcagcacagaggcaggaaactcaggtgtcatagcttggctcagcctcagggcttttgcctctgctgttcctgcagcttggaatgcactccctccacctccaaccagagctccccacaactgaccctgccttcttctgcaagctccatttcatcaagggaaacgatccttattgcctcaccatttcccacgtgaagtctgtattgacattctcatagacctgggatattgtgtctgcagcacatagtccaattattttcatgttatctactgacaggtctatttgtctccctgttacactgtgagctccgtgagggcagaaacaatgttagtattttcactgctgtgtccccagcgcctggtccggggcccggcacacagcaggcatataataagcatgtgttgaatcaataaaggcatcaaagaat

SEQ ID NO: 12735 - DNA, 4778 bp, Homo sapiens
  source 1..4778: mol_type = unassigned DNA
ggagaaacacacacgggcgggcggaggggacccggggcgagtcatcaagggcgcgtggttcggcgtgccaggcgcgctgctctgcctgctctcttggcttctgtctcccttcgaccgatcgccccctatcctgaagctttccaatgtcatcttggagccccaaagtttcctggggcctccgcgttgtgcgtcccagaaccccttgcctgcccctgagggaaacgcggagccataggcagcgggacgtcgggagccagcccaggggaggccagattcagcatttggacagcggctctggggcgcagtcggcccagcgagtttgccggtgaacagcctcgggcacatggcgggtaggagggccgcagggctgctctgggtcttgaagaagcaggacccagcctagagggcatccccagctccgaatgggacacgttttcccgagataaaagatcccttctgagctcacacgggagccccgggaccatccaatccagcgtggatatccccagcctaaccaacacctgtgctggggggaaagataagacgccccctttcagccaggaggtggacgaccctcatgccctcagctctccattcttcccaaagcagctcggatccctaagtctggagctgccagcgaggcttccaacccgctgcttgccatcacctcccaggtcgttggtggctccgattactcccctgctggtgcctccctccttggcgcgcttcccacctgcgatcggcgccctcttcgcagtcacgaactcgccagcagctagcagcactgactagtaggagggcccgccggaggagagccgcgcggcccacagaagcggaacgcgcgtcgagagcgccctgtccgctcgccccagacagatgcccggttattcattaccgcgaggcctagaggaaagagtggctgccgtcttcctgcccacagcccgccggaccctccgtcgcggctgcccggtccccggagccgcagccgccgagcccggctgtgcgtgtcgtggctgctggggagaaagaggcttccggacatgctctggagtcagaagacagcgaaaagagaagcagaagccccggtggcaagagtctgaaggaaggatgactgtagcctgtggattgtactgcagtaggaaactgtcctagcaaggctccactttgccccagcttcaagctggaaaggaggagaacatgaaacattgcttgaagacaatggccgagacagcaggtcccaccctgcacagccaccagcatctctcccctcagccctgtctcctcttctgcagttgggatctgcacatttaagcctgaaattgtcctgtgaagtgaagtatgatcggacagcctcttttcagcttttatgacaatggagacagaggaattgtggctcttgccaaggtcacaggattggaatacagagccaagccaccccaggacatgcaagagcctcagaagggaaaaaagcccagcaggaagggagaacaagtagcctctgtcctgaagttgtaacagccaggggccaggatggaggaggaggaccccataatctgcccatctgggacttggcaggggacctgggaaaatgtaccccaacccatcccttaagggcctttgtctttggcccattggcctagcatctacttcttcaccgtgtctgttcttgtcacacctagtcaggtctgtttgggtctgaggtgcatggaacattctgggtaggcctccagcaaacggaagctcttcaccgtgtttccagcctgggaccaagggcagcatactggcaaagttgccaaagcaagggactccagcctcttaggagttaatgactccctctccccagctgtcctccccttggtgctcctcttcctccctcctcctgctcacagcaggcagggcctagacccgggagccatgctgctgtgctgttgccaggggagcacggaggcagatctgagctatgcagggaaaaggcccagcctgtcaaagtgtctgagatgaaccgccgccgtccctgtgcagctgggctcagacgtgtctcagctcttgttctgtgcctgagaatggcgaaacccagtgaggttcaagggcaaactcgctattcattagtcaggggttcttgacgtcccgtctctcccagggatgagttcccccctcctctttctccccctcctatgacacattcctgggtgcctttggtgaggactgcacaccctcctcctgcctagccccctctccaaaggcccctgaataaactccccccaaggagaccaggcagggcagagacaatggctgcaggaaatcattcaggcgggacatgctggcctgccctccacccagtccccctgtgggccccactcccttctgattcagggcacccttgggcccccagcctatacaggcctggacaggaagaaaccactgggaaccaccctaaggacaacatgctagtccagtgccattcttcgctggctctgtgggtgcctttgtggcctgtaccgactggctggctaattttgtggtttctgtaccatcacatgcctattttaagacactctccagcactgtcggttagggagtgtaaattttgcaatattttctgaaatgtggcaatatcaaaatgtaaaaggcacacatacttggtcacaaacaaatggcactatttactctgtgggcatatttgtaaaagttgccaaagaattatatacaaggatgttcatcagagcatttcttttgaagagtaaagaaatggacatgaacctgtggtccgttcatacggtggaatacctatgcagctgtaaaaatcagtgtggtagatctccgtatatgagttgatgtggaaggttggccagttcacatgataaggtgaatagaataagttacagaacaggctgtagagtatgatcttatttgtagatgtttaaaactgagtcataagtatgcttatatacagatcgtttctggaagtatgtactggaagtctacctctggggagtggggatgggggagtgcactcttctatactgttatattttcttttcatgctcctaaggtacttttattggaagatgtaaagcggttcaatgtaataggcttaacttctgtcaactaagttggcgtgggtgctttaagagggtggtagtgatgttgctggagaaagtatcccacagtcactggtggcttcagccacgggccattttggggcctaataatcacatatcatcatggttgctagtgttaatcgaaaacctactaagtgccaggcttactgtctctgggtcttgcttacgtggatgtcatttttccagttgcaccaaatcgaaagaggttaattggtttgttggagttcctttgtaggtgaagggcagagccaggagcttggctagggacaggggaggtgagtgggggatggtggataggtcttggctcccagtttccttctgggcagacattgcccctctgccctgaggacctgcttgtttgggggaagaggcctttagaggcaccagggtcatgccaggtgttggacatggtgaactgggaagtgctcccatctggccacagcgcagaagtatcaccgtgctgggggatggggaacagggctgtgaatgggcctatttgcataagcagcatgtgtctggagagaaagacatcacagagcagaagagtgcgggtgcccaggagtgcacttgccacccctacttcatccctgaaagagtaaatggcctggaaggtgtctctgagaggtaatgccgcacaccaccctccctgggggcagggtcaggctacacctgccttaggtcgggggctgcagcagcctgagagctctcagtagggcctcagtagcctgggagggagcaggggcagggggcagggaaagaggcgtaatggggctgtccagaggggcctgggaaacctggtccctgaggcctgggcacagctacaatcacttcaaattggctgtggggccagtggactgggaaggaaaaaagcaataagagtgaccaagtgcagaaggctgtcaggtcccaggtcacatgccttagtgcagtgactcctcatcattttatggggtgtgggtgtcgttggtacacccattttacagatgaggacaccgaggcccagaaaagttaagttacatgtcctaagtcacacagcttgtaagtgccagaactgagatcaaaaccaagtctctttgactttaaagtctgtactctgaccccaaagagatcctgtttggccacttataggaggtccctaaagctgcagactccccttgccggcacccacatatagagacattaacccttcccctgcagggtcacctcaaatagtcttttagctgggcttctcctgcaattccacctaatgccatcccctgggttttgcccaaacctgaactgggcagtggggtgagaggaggggtttacagggttacagagcctcatacagataggagcccatggctgctggtcatctgcattcctgcaggattggctgttccttggggtccttggcaggaaaatgaggattgctccgaggcctgctccagtacttcccagaggctggcctggtgtggggctctgggaaggctgaggctggagaagcgtaagtaggagggcagagatggcactcaggtagcttgaatcaccaggacccttccaagccccacaggttctgagggagtactagggccagctctgggagaggtctcttcctatgctgtgaaccccctgcctttcttgcagcctacaacgaataaattttctttgcaaagg

SEQ ID NO: 12736 - DNA, 571 bp, Homo sapiens
  source 1..571: mol_type = unassigned DNA
gtgcccgcccgagaaggcggcgctgggagccgctcagagcccagagaagcggcgcgcggccaggagcccccgctccgccactgccgtgcctgcctcccgcagctgtctgccatgcgctcgccggggcaggggcgcccggagggcggctagagctgggcctgagcccgggaacgcgcctgatcaggggtggcggagccgcggtccccacagccgccccacccgcgccgctgcctcgctggggcccgggcccccttcccggtccttactcccctgctggtgcctccctccttggcgcgcttcccacctgcgatcggcgccctcttcgcagtcacgaactcgccagcagctagcagcactgactagtaggagggcccgccggaggagagccgcgcggcccacagaagcggaacgcgcgtcgagagcgccctgtccgctcgccccagacagatgcccggttattcattaccgcgaggcctagaggaaagagtggctgccgtcttcctgcccacagcccgccggaccctccgtcgcggctgcccggtccccggagccgcagccgccgagcccggct

SEQ ID NO: 12737 - DNA, 957 bp, Homo sapiens
  source 1..957: mol_type = unassigned DNA
aaggcggcgctgggagccgctcagagcccagagaagcggcgcgcggccaggagcccccgctccgccactgccgtgcctgcctcccgcagctgtctgccatgcgctcgccggggcaggggcgcccggagggcggctagagctgggcctgagcccgggaacgcgcctgatcaggggtggcggagccgcggtccccacagccgccccacccgcgccgctgcctcgctggggcccgggcccccttcccgttactcccctgctggtgcctccctccttggcgcgcttcccacctgcgatcggcgccctcttcgcagtcacgaactcgccagcagctagcagcactgactagtaggagggcccgccggaggagaggacatgctctggagtcagaagacagcgaaaagagaagcagaagccccggtggcaagagtctgaagcaggaaggatgactgtagcctgtggattgtactgcagtaggaaactgtcctagcaaggctccactttgccccagcttcaagctggaaaggaggagaacatgaaacattgcttgaagacaatggccgagacagcaggtcccaccctgcacagccaccagcatctctcccctcagccctgtctcctcttctgcagttgggatctgcacatttaagcctgaaattgtcctgtgaagtgaagtatgatcggacagcctcttttcagcttttatgacaatggagacagaggaattgtggctcttgccaaggtcacaggattggaatacagagccaagccaccccaggacatgcaagagcctcagaagggaaaaaagcccagcaggaagggagaacaagtagcctctgtcctgaagttgtaacagccaggggccaggatggaggaggaggaccccataatctgcccatctgggacttggcaggggacctgggaaaatgtaccccaacccatcccttaagggcctttgtc

SEQ ID NO: 12738 - DNA, 576 bp, Homo sapiens
  source 1..576: mol_type = unassigned DNA
agtgcgtgggggtcccggccccacacagtgctagggtccctctcgagtttctcatctgccttcaggtcactttccaccctgatgccttggcttgtcctgaagctcagggcccctgtagcttgggaaacctcccaagctccccagcgagtggctgtagaccaaggaagggaccctgcccggcttcagggaagaaaggaagaaagttactcccctgctggtgcctccctccttggcgcgcttcccacctgcgatcggcgccctcttcgcagtcacgaactcgccagcagctagcagcactgactagtaggagggcccgccggaggagagccgcgcggcccacagaagcggaacgcgcgtcgagagcgccctgtccgctcgccccagacagatgcccggttattcattaccgcgaggcctagaggaaagagtggctgccgtcttcctgcccacagcccgccggaccctccgtcgcggctgcccggtccccggagccgcagccgccgagcccggctgtgcgtgtcgtggctgctggggagaaagaggcttccggacatgctctggagtcagaagacagcg

SEQ ID NO: 12739 - DNA, 606 bp, Homo sapiens
  source 1..606: mol_type = unassigned DNA
cctgctggtgcctccctccttggcgcgcttcccacctgcgatcggcgccctcttcgcagtcacgaactcgccagcagctagcagcactgactagtaggagggcccgccggaggagaggacatgctctggagtcagaagacagcgaaaagagaagcagaagccccggtggcaagagtctgaagctggaaaggaggagaacatgaaacattgcttgaagacaatggccgagacagcaggtcccaccctgcacagccaccagcatctctcccctcagccctgtctcctcttctgcagttgggatctgcacatttaagcctgaaattgtcctgtgaagtgaagtatgatcggacagcctcttttcagcttttatgacaatggagacagaggaattgtggctcttgccaaggtcacaggattggaatacagagccaagccaccccaggacatgcaagagcctcagaagggaaaaaagcccagcaggaagggagaacaagtagcctctgtcctgaagttgtaacagccaggggccaggatggaggaggaggaccccataatctgcccatctgggacttggcaggggacctgggaaaatgtaccccaacccat

SEQ ID NO: 12740 - DNA, 551 bp, Homo sapiens
  source 1..551: mol_type = unassigned DNA
cttcgcagtcacgaactcgccagcagctagcagcactgactagtaggagggcccgccggaggagaggaagccccagagagattggtgagggtgatttcccaggaagacgcagtgtgctctgacttctgtgacagtgagcaacgggaccagtggatgtccagatgctggcaatgagacatgctctggagtcagaagacagcgaaaagagaagcagaagccccggtggcaagagtctgaaggaaggatgactgtagcctgtggattgtactgcagtaggaaactgtcctagcaaggctccactttgccccagcttcaagctggaaaggaggagaacatgaaacattgcttgaagacaatggccgagacagcaggtcccaccctgcacagccaccagcatctctcccctcagccctgtctcctcttctgcagttgggatctgcacatttaagcctgaaattgtcctgtgaagtgaagtatgatcggacagcctcttttcagcttttatgacaatggagacagaggaattgtggctcttgccaaggtcacaggat

SEQ ID NO: 12741 - DNA, 1877 bp, Homo sapiens
  source 1..1877: mol_type = unassigned DNA
tcgccagcagctagcagcactgactagtaggagggcccgccggaggagagccgcgcggcccacagaagcggaacgcgcgtcgagagcgccctgtccgctcgccccagacagatgcccggttattcattaccgcgaggcctagaggaaagagtggctgccgtcttcctgcccacagcccgccggaccctccgtcgcggctgcccggtccccggagccgcagccgccgagcccggctgtgcgtgtcgtggctgctggggagaaagaggcttccggaagccccagagagattggtgagggtgatttcccaggaagacgcagtgtgctctgacttctgtgacagtgagcaacgggaccagtggatgtccagatgctggcaatgagacatgctctggagtcagaagacagcgaaaagagaagcagaagccccggtggcaagagtctgaagcaggaaggatgactgtagcctgtggattgtactgcagtaggaaactgtcctagcaaggctccactttgccccagcttcaagctggaaaggaggagaacatgaaacattgcttgaagacaatggccgagacagcaggtcccaccctgcacagccaccagcatctctcccctcagccctgtctcctcttctgcagttgggatctgcacatttaagcctgaaattgtcctgtgaagtgaagtatgatcggacagcctcttttcagcttttatgacaatggagacagaggaattgtggctcttgccaaggtcacaggattggaatacagagccaagccaccccaggacatgcaagagcctcagaagggaaaaaagcccagcaggaagggagaacaagtagcctctgtcctgaagttgtaacagccaggggccaggatggaggaggaggaccccataatctgcccatctgggacttggcaggggacctgggaaaatgtaccccaacccatcccttaagggcctttgtctttggcccattggcctagcatctacttcttcaccgtgtctgttcttgtcacacctagtcaggtctgtttgggtctgaggtgcatggaacattctgggtaggcctccagcaaacggaagctcttcaccgtgtttccagcctgggaccaagggcagcatactggcaaagttgccaaagcaagggactccagcctcttaggagttaatgactccctctccccagctgtcctccccttggtgctcctcttcctccctcctcctgctcacagcaggcagggcctagacccgggagccatgctgctgtgctgttgccaggggagcacggaggcagatctgagctatgcagggaaaaggcccagcctgtcaaagtgtctgagatgaaccgccgccgtccctgtgcagctgggctcagacgtgtctcagctcttgttctgtgcctgagaatggcgaaacccagtgaggttcaagggcaaactcgctattcattagtcaggggttcttgacgtcccgtctctcccagggatgagttcccccctcctctttctccccctcctatgacacattcctgggtgcctttggtgaggactgcacaccctcctcctgcctagccccctctccaaaggcccctgaataaactccccccaaggagaccaggcagggcagagacaatggctgcaggaaatcattcaggcgggacatgctggcctgccctccacccagtccccctgtgggccccactcccttctgattcagggcacccttgggcccccagcctatacaggcctggacaggaagaaaccactgggaaccaccctaaggacaacatgctagtccagtgccattcttcgctggctctgtgggtgcctttgtggcctgtaccgactggctggctaattttgtggtttctgtac

SEQ ID NO: 12742 - DNA, 561 bp, Homo sapiens
  source 1..561: mol_type = unassigned DNA
agcactgactagtaggagggcccgccggaggagaggacatgctctggagtcagaagacagcgaaaagagaagcagaagccccggtggcaagagtctgaagcaggaaggatgactgtagcctgtggattgtactgcagtaggaaactgtcctagcaaggctccactttgccccagcttcaagctggaaaggaggagaacatgaaacattgcttgaagacaatggccgagacagcaggtcccaccctgcacagccaccagcatctctcccctcagccctgtctcctcttctgcagttgggatctgcacatttaagcctgaaattgtcctgtgaagtgaagtatgatcggacagcctcttttcagcttttatgacaatggagacagaggaattgtggctcttgccaaggtcacaggattggaatacagagccaagccaccccaggacatgcaagagcctcagaagggaaaaaagcccagcaggaagggagaacaagtagcctctgtcctgaagttgtaacagccaggggccaggatggaggaggaggaccccataatctgccca

SEQ ID NO: 12743 - DNA, 786 bp, Homo sapiens
  source 1..786: mol_type = unassigned DNA
ctgggagtggcgcggctgcttcccgcccgcgcaggatcaggccggcccccgcgggcctggagctggatccagagctagggaaactggaaaaacaggcacaaactcggaagccgcggtacggcaagagcctaagcaaagaatcctttccaagattcacacctcgtctacaccagggcaccgcctgggcctacggccttccgaacccgaagcgcccgcagcccagagctggcatcaggccatcaggccgggaaggtcgtcgcaggccccagagtgcgggcgcggggggcgcgcgcccacaggacgcccggggttgggtaggcaggagagaagggcgccagcaggcccgcggctgtttcccctcggtccgcacagcgggcccgggaggccattttgagagcgcgaagaggggcggcaagatggctgcgtgggcacccggaaggtcgccgcgccaagggcccgctgagcccctcctcccattcgtccagccgcgcggcccacagaagcggaacgcgcgtcgagagcgccctgtccgctcgccccagacagatgcccggttattcattaccgcgaggcctagaggaaagagtggctgccgtcttcctgcccacagcccgccggaccctccgtcgcggctgcccggtccccggagccgcagccgccgagcccggctgtgcgtgtcgtggctgctggggagaaagaggcttccggacatgctctggagtcagaagacagcgaaaagagaagcagaagccccggtggcaagagtctgaagcaggaaggatgact

SEQ ID NO: 12744 - DNA, 569 bp, Homo sapiens
  source 1..569: mol_type = unassigned DNA
ttaccgcgaggcctagaggaaagagtggctgccgtcttcctgcccacagcccgccggaccctccgtcgcggctgcccggtccccggagccgcagccgccgagcccggctgtgcgtgtcgtggctgctggggagaaagaggcttccggacatgctctggagtcagaagacagcgaaaagagaagcagaagccccggtggcaagagtctgaagggagaaaataacccagtttgggaaggacatttaaaaggggaaaatattaggaaggatgactgtagcctgtggattgtactgcagtaggaaactgtcctagcaaggctccactttgccccagcttcaagctggaaaggaggagaacatgaaacattgcttgaagacaatggccgagacagcaggtcccaccctgcacagccaccagcatctctcccctcagccctgtctcctcttctgcagttgggatctgcacatttaagcctgaaattgtcctgtgaagtgaagtatgatcggacagcctcttttcagcttttatgacaatggagacagaggaattgtggctcttgccaaggtcaca

SEQ ID NO: 12745 - DNA, 779 bp, Homo sapiens
  source 1..779: mol_type = unassigned DNA
gcacgacttgttcttgccttctaaagcagagaggagcttttgtgggtagttcctacagggatacatggtagaaaattcaccaaacccagtgctggagtgtttctcttcctcagaagaaatcagatgctgttcagagcacgaaggctagaattttaccctggttctcatgctaccttgcacccaggttggatcctgagtacagtttttggcaggaagccccagagagattggtgagggtgatttcccaggaagacgcagtgtgctctgacttctgtgacagtgagcaacgggaccagtggatgtccagatgctggcaatgagacatgctctggagtcagaagacagcgaaaagagaagcagaagccccggtggcaagagtctgaaggaaggatgactgtagcctgtggattgtactgcagtaggaaactgtcctagcaaggctccactttgccccagcttcaaggtatatcgtctcaaaatgcaggggacttcagatgagttttgagcaccctttcttttattataaaaaaaattccagacagttcagccaatactgactaagggctgagaccagttccatgcttttctgtctccagaggaatttgcttccatctggatgcctgaaacgctggaaaggaggagaacatgaaacattgcttgaagacaatggccgagacagcaggtcccaccctgcacagccaccagcatctctcccctcagccctgtctcctcttctgcagttgggatctgcacatttaagcctgaaattgtcctgtgaa

SEQ ID NO: 12746 - DNA, 2718 bp, Homo sapiens
  source 1..2718: mol_type = unassigned DNA
atcaagcgatcctcccacctgggcctcccaaagtgttgagattacagcatgagccaccacacccagactaaaaggcagtttgattttacaaatcaaaatagcagtaatctatggagatttacttgtgagattggtaggaaacatcttaaatgtaatcaaacaataacttacatcttgatgaattcacgtgtaggtttctcttcctcagaagaaatcagatgctgttcagagcacgaaggctagaattttaccctggttctcatgctaccttgcacccaggttggatcctgagtacagtttttggcaggtgggcctgcatataagttagcaatgggggatacccagctgcctctcttcatacagctgaggttttggggagtcattcttatagcccctgggttgggcctagtcctgcaaatgaattcaccagccctaaagcccaaattgcagcctctgtcattcaccttccaggagtggaaagggcagtaagtttcatcttattattattgctattttggtggttttgttgaggttggtgtgtgtatgttagtaagataaagctctcagaaattacatagcatttgtcaaggatataagagggactgtgccacatctggctgtatagaaggtggttccatatctttaaatagagccccaggtccttagccaccagaaaggttttcaggggaagtgtgcaccctcagcagctgctgctggtgggcaggatgggcacgcatggaacaggctttcctctgtggccaggtgagaagcaggtggtgagacacagagcagtgctgggctctgcttctgaagcctccaacctttccttccctaggaagccccagagagattggtgagggtgatttcccaggaagacgcagtgtgctctgacttctgtgacagtgagcaacgggaccagtggatgtccagatgctggcaatgagtaggccttccctacgctgggtggcgtccacaccctccggcttccattgcctgggtctcctggaggtggtttgctggatgaataccgcatgcacagaggctggccttgggtttgaatatggcagccagtggacagcatgtgcttcagttatgagactgcccaggagatgcttcttccaaggcagagcacgtgcagagtccagtgctggagaggccgggtgcgcagttgacccatttccagttctgttttccctctcatgttcctctgtccccatctaggacatgctctggagtcagaagacagcgaaaagagaagcagaagccccggtggcaagagtctgaagcaggaaggatgactgtagcctgtggattgtactgcagtaggaaactgtcctagcaaggctccactttgccccagcttcaagctggaaaggaggagaacatgaaacattgcttgaagacaatggccgagacagcaggtcccaccctgcacagccaccagcatctctcccctcagccctgtctcctcttctgcagttgggatctgcacatttaagcctgaaattgtcctgtgaagtgaagtatgatcggacagcctcttttcagcttttatgacaatggagacagaggaattgtggctcttgccaaggtcacaggattggaatacagagccaagccaccccaggacatgcaagagcctcagaagggaaaaaagcccagcaggaagggagaacaagtagcctctgtcctgaagttgtaacagccaggggccaggatggaggaggaggaccccataatctgcccatctgggacttggcaggggacctgggaaaatgtaccccaacccatcccttaagggcctttgtctttggcccattggcctagcatctacttcttcaccgtgtctgttcttgtcacacctagtcaggtctgtttgggtctgaggtgcatggaacattctgggtaggcctccagcaaacggaagctcttcaccgtgtttccagcctgggaccaagggcagcatactggcaaagttgccaaagcaagggactccagcctcttaggagttaatgactccctctccccagctgtcctccccttggtgctcctcttcctccctcctcctgctcacagcaggcagggcctagacccgggagccatgctgctgtgctgttgccaggggagcacggaggcagatctgagctatgcagggaaaaggcccagcctgtcaaagtgtctgagatgaaccgccgccgtccctgtgcagctgggctcagacgtgtctcagctcttgttctgtgcctgagaatggcgaaacccagtgaggttcaagggcaaactcgctattcattagtcaggggttcttgacgtcccgtctctcccagggatgagttcccccctcctctttctccccctcctatgacacattcctgggtgcctttggtgaggactgcacaccctcctcctgcctagccccctctccaaaggcccctgaataaactccccccaaggagaccaggcagggcagagacaatggctgcaggaaatcattcaggcgggacatgctggcctgccctccacccagtccccctgtgggccccactcccttctgattcagggcacccttgggcccccagcctatacaggcctggacaggaagaaaccactgggaaccaccctaaggacaacatgctagtccagtgccattcttcgctggctctgtgggtgcctttgtggcctgtaccgactggctggctaattttgtggtttctgtac

SEQ ID NO: 12747 - DNA, 3846 bp, Homo sapiens
  source 1..3846: mol_type = unassigned DNA
gactcggcgggcccggggctccccggcagcggctcctctgctaggggttaacagcagcccccgcggccgggcgggcgcggacgcttcctctccacccgcccgggaacgtggataccgcgcccgcaggatgttcgccggctgggaccggcagtcaggaaacatgagaaggcctcgctattcctgttcccgggcggcgcgcgccgggctgggtaaataaagccgagacgacggcggtggcggtggtgagcgcgctggagcccgcgtggagaacatgcggcggggatgggagtgcgcctagtctcgaggcgggagagccagccgccctgcagccggccgtcggccccgcagccacagccgagccccgctgcggagctcccggcggcccagccccgaggctctgcggccgcgccgcgcgtccctaccaaccgacaccatgaacaccatcgtcttcaacaagctcagcggtgcggtgctgtttgaggacggaggcgcctcggagcgggagcggggtggccggccctacagcggtgtcctggacagtcctcacgcccgccccgaggtgggcattcccgacggcccgcccctcaaggacaacctcggcctgagacaccggaggaccggcgcccggcagaatggcgggaaggtgaggcacaagcggcaggccctgcaagacatggcgcgacccctcaagcagtggctttacaagcaccgtgacaacccgtaccccaccaagaccgagaagatactcttggccctcggctcgcagatgacgctagtgcaggtgtcaaattggtttgctaatgcaagacgtcggcttaagaataccgttcgacagccagatttaagctgggctttgagaataaagttatacaacaagtatgttcaaggcaatgctgaacggcttagcgtaagcagtgatgactcatgttctgaagatggagaaaatcctccaagaacccacatgaacgaagggggctataataccccagttcaccatcctgtgattaaaagtgagaattcggtcatcaaagcgggagtgaggccagagtcacgggccagtgaggactacgtggcaccccccaaatacaagagcagcttgttgaaccgttaccttaatgactctttgagacatgtcatggccacgaacactaccatgatgggaaaaacaaggcaaagaaaccactcgggatcttttagctccaatgaatttgaggaagaattagtgtctccatcgtcatcagaaactgaaggcaactttgtctatcgcacagacactctggaaaacggatccaataagggtgaaagcgcagctaacagaaaaggaccaagcaaggatgacacgtattggaaggagatcaacgcagctatggccttaacaaatcttgcacagggaaaggacaaactgcagggaactaccagctgcatcatccagaagtcgtcccatatagcagaagtaaagactgtcaaagtgccgctggtgcagcagttttaagagcttgttgcttttcagatccaatggatgttctttccggtgttttcatcaaccctcatcctaagagccgaagcagggatgaaaatgactctctcccaaacctcttcttatttttaattatcccaaatatatcatttagttgcttctataaaagacatataaattataaaaaactcattttaatcaaaaatattaacttattttatgttactcaaactatgcataaaacatctgcattaccattacagtaagtgccttgcttcccgacaataagctccaacgtgggcatagttgaacaagctatgcctcaaaatgccaacgccatatgcttattagcctgtgtgcatcattccagacgggcctaatcattccaggactgaaaccagaatcgctgaaagcccttgaaatacattcaataattcatatgttaaaacttggatatctgttcagcccaaatgaaatcttccttttaaaaaacgtctacattattgaaaattgttcaatgtgcttttcagagtgacggtgagaattttatgcatgtatcttgcctgcatatttgatatgttacaaacttccaaaattcaaggtgcagcgatccacagaacgttgtacatttaagaagtgattccttcaagctaatttaaaatttcattgaacacatggtgaccaggaaaactttttttcaagcactgttggaaagcaccacaaagccctttagaattaatctggatttgtttctcaagttctgctgaagtttaaaaaaaaactttattatacaaataactcaaaattttcctgtgtaaaactaaacctgtagttttaaaacataatcctgtttgcattagagctcactgtctttttgtgatggaaactgtgttcgtatggaatgactaaaaatcttttatttggtttgtttcaaattacaattgctgatggacaatttgtattgcagcgagaacaacagaatgaaagaaatgtatctctgtgcggctatacatatacatacataaaattgatttttaaatttaaaacatatggaaaacaaaacattgaacagtttgaattttgccaagttggacattaaagtaaaaatgaagtgaaatcatgcattgaaagaaaacattttgtttctaaattagtctaccattgagtgagaataatcaatatcaagaaagaagactatctttctcaactaaacaataatattccaatcagcttgggaagacctgaaacttgaataagcagtggaaatgccaaatataacagagggtatgtgctacagagaagtaaaaagggtttgactttttatgatgggattttttttttctgggtatgtaatctattttttttttaaactggaaagcatttttgtcagtgtgaatgagggtcaatagtgcagccagtggtgacatttttctttattttgcaaaatgcttttaaaaccaaaggctgctctagttgatggacagtatcagtcttgatctaaattgtaggacactttttcatgtaacataacatttggggattgggtttatttagtgtaatgaagataatttgatataaaaatattttgtgtatatatatatatttttactttgttttctaaattgctgtttgcagtaacagtaagcgcaaagcaaaatatataagttatgactgtatgatcagatgaagtatgagttcttttggtttgcatccttaaatagttagagatctctgataaaaactttggaatctttgcaaaacaatacaaaaatgccaaaatgtgagcatgtcaatgaaaactaaagacaaatacttcactctttttcatactattataagttattctggtattaaatatgttaataaaagtgtttttgttttgacatatttcagttaaatgaatgaatgctggttgtattttatttgaatgagtcatgattcatgtttgccatctttttaaaaaaatcagcaaatttcttctatgttataaattatagatgacaaggcaatataggacaactattcacatgattttttttaataccaaaggttggaagattttataattaacatgtcaagaagactttatagtaagcacatccttggtaatatctccaattgcaatgactttttaatttattttttcttttgctgctttaacattttctggatattaaaatccccccagtcctttaaaagaatcttgaacaatgctgagccggcagctgaaaatctaactcataatttatgttgtagagaaatagaattacctctattctttgttttgccatatgtaatcattttaataaaattaataactgccaggagttcttgacagatttaaaataaaagttaatttctagacctcg

SEQ ID NO: 12748 - DNA, 1002 bp, Homo sapiens
  source 1..1002: mol_type = unassigned DNA
ctgagcactctcagccagtaagtaacgagatgcaccttcctctcctagaagccgagccccgctgcggagctcccggcggcccagccccgaggctctgcggccgcgccgcgcgtccctaccaaccgacaccatgaacaccatcgtcttcaacaagctcagcggtgcggtgctgtttgaggacggaggcgcctcggagcgggagcggggtggccggccctacagcggtgtcctggacagtcctcacgcccgccccgaggtgggcattcccgacggcccgcccctcaaggacaacctcggcctgagacaccggaggaccggcgcccggcagaatggcgggaaggtgaggcacaagcggcaggccctgcaagacatggcgcgacccctcaagcagtggctttacaagcaccgtgacaacccgtaccccaccaagaccgagaagatactcttggccctcggctcgcagatgacgctagtgcaggtgtcaaattggtttgctaatgcaagacgtcggcttaagaataccgttcgacagccagatttaagctgggctttgagaataaagttatacaacaagtatgttcaaggcaatgctgaacggcttagcgtaagcagtgatgactcatgttctgaagatggagaaaatcctccaagaacccacatgaacgaagggggctataataccccagttcaccatcctgtgattaaaagtgagaattcggtcatcaaagcgggagtgaggccagagtcacgggccagtgaggactacgtggcaccccccaaatacaagagcagcttgttgaaccgttaccttaatgactctttgagacatgtcatggccacgaacactaccatgatgggaaaaacaaggcaaagaaaccactcgggatcttttagctccaatgaatttgaggaagaattagtgtctccatcgtcatcagaaactgaaggcaactttgtctatcgcacagtggaaaacttaggttctttgagtgaggactcctg

SEQ ID NO: 12749 - DNA, 431 bp, Homo sapiens
  source 1..431: mol_type = unassigned DNA
aaggtctggtggagaggcgctcgggtagcggccaaggctggcccaagggtctgcgcggagcttgggagcccacctggccgcgcctcctttgctttaaaattattcgccggcgttgggggagggggacacttctgcagggagtgacctccccggccacagtctggagtgaatcgggaagccgagccccgctgcggagctcccggcggcccagccccgaggctctgcggccgcgccgcgcgtccctaccaaccgacaccatgaacaccatcgtcttcaacaagctcagcggtgcggtgctgtttgaggacggaggcgcctcggagcgggagcggggtggccggccctacagcggtgtcctggacagtcctcacgcccgccccgaggtgggcattcccgacggcccgcccctcaaggacaacctcggcctgaga

SEQ ID NO: 12750 - DNA, 3638 bp, Homo sapiens
  source 1..3638: mol_type = unassigned DNA
aaataaagccgagacgacggcggtggcggtggtgagcgcgctggagcccgcgtggagaacatgcggcggggatgggagtgcgcctagtctcgaggcgggagagccagccgccctgcagccggccgtcggccccgcagccacagaagccgagccccgctgcggagctcccggcggcccagccccgaggctctgcggccgcgccgcgcgtccctaccaaccgacaccatgaacaccatcgtcttcaacaagctcagcggtgcggtgctgtttgaggacggaggcgcctcggagcgggagcggggtggccggccctacagcggtgtcctggacagtcctcacgcccgccccgaggtgggcattcccgacggcccgcccctcaaggacaacctcggcctgagacaccggaggaccggcgcccggcagaatggcgggaaggtgaggcacaagcggcaggccctgcaagacatggcgcgacccctcaagcagtggctttacaagcaccgtgacaacccgtaccccaccaagaccgagaagatactcttggccctcggctcgcagatgacgctagtgcaggtgtcaaattggtttgctaatgcaagacgtcggcttaagaataccgttcgacagccagatttaagctgggctttgagaataaagttatacaacaagtatgttcaaggcaatgctgaacggcttagcgtaagcagtgatgactcatgttctgaagatggagaaaatcctccaagaacccacatgaacgaagggggctataataccccagttcaccatcctgtgattaaaagtgagaattcggtcatcaaagcgggagtgaggccagagtcacgggccagtgaggactacgtggcaccccccaaatacaagagcagcttgttgaaccgttaccttaatgactctttgagacatgtcatggccacgaacactaccatgatgggaaaaacaaggcaaagaaaccactcgggatcttttagctccaatgaatttgaggaagaattagtgtctccatcgtcatcagaaactgaaggcaactttgtctatcgcacagacactctggaaaacggatccaataagggtgaaagcgcagctaacagaaaaggaccaagcaaggatgacacgtattggaaggagatcaacgcagctatggccttaacaaatcttgcacagggaaaggacaaactgcagggaactaccagctgcatcatccagaagtcgtcccatatagcagaagtaaagactgtcaaagtgccgctggtgcagcagttttaagagcttgttgcttttcagatccaatggatgttctttccggtgttttcatcaaccctcatcctaagagccgaagcagggatgaaaatgactctctcccaaacctcttcttatttttaattatcccaaatatatcatttagttgcttctataaaagacatataaattataaaaaactcattttaatcaaaaatattaacttattttatgttactcaaactatgcataaaacatctgcattaccattacagtaagtgccttgcttcccgacaataagctccaacgtgggcatagttgaacaagctatgcctcaaaatgccaacgccatatgcttattagcctgtgtgcatcattccagacgggcctaatcattccaggactgaaaccagaatcgctgaaagcccttgaaatacattcaataattcatatgttaaaacttggatatctgttcagcccaaatgaaatcttccttttaaaaaacgtctacattattgaaaattgttcaatgtgcttttcagagtgacggtgagaattttatgcatgtatcttgcctgcatatttgatatgttacaaacttccaaaattcaaggtgcagcgatccacagaacgttgtacatttaagaagtgattccttcaagctaatttaaaatttcattgaacacatggtgaccaggaaaactttttttcaagcactgttggaaagcaccacaaagccctttagaattaatctggatttgtttctcaagttctgctgaagtttaaaaaaaaactttattatacaaataactcaaaattttcctgtgtaaaactaaacctgtagttttaaaacataatcctgtttgcattagagctcactgtctttttgtgatggaaactgtgttcgtatggaatgactaaaaatcttttatttggtttgtttcaaattacaattgctgatggacaatttgtattgcagcgagaacaacagaatgaaagaaatgtatctctgtgcggctatacatatacatacataaaattgatttttaaatttaaaacatatggaaaacaaaacattgaacagtttgaattttgccaagttggacattaaagtaaaaatgaagtgaaatcatgcattgaaagaaaacattttgtttctaaattagtctaccattgagtgagaataatcaatatcaagaaagaagactatctttctcaactaaacaataatattccaatcagcttgggaagacctgaaacttgaataagcagtggaaatgccaaatataacagagggtatgtgctacagagaagtaaaaagggtttgactttttatgatgggattttttttttctgggtatgtaatctattttttttttaaactggaaagcatttttgtcagtgtgaatgagggtcaatagtgcagccagtggtgacatttttctttattttgcaaaatgcttttaaaaccaaaggctgctctagttgatggacagtatcagtcttgatctaaattgtaggacactttttcatgtaacataacatttggggattgggtttatttagtgtaatgaagataatttgatataaaaatattttgtgtatatatatatatttttactttgttttctaaattgctgtttgcagtaacagtaagcgcaaagcaaaatatataagttatgactgtatgatcagatgaagtatgagttcttttggtttgcatccttaaatagttagagatctctgataaaaactttggaatctttgcaaaacaatacaaaaatgccaaaatgtgagcatgtcaatgaaaactaaagacaaatacttcactctttttcatactattataagttattctggtattaaatatgttaataaaagtgtttttgttttgacatatttcagttaaatgaatgaatgctggttgtattttatttgaatgagtcatgattcatgtttgccatctttttaaaaaaatcagcaaatttcttctatgttataaattatagatgacaaggcaatataggacaactattcacatgattttttttaataccaaaggttggaagattttataattaacatgtcaagaagactttatagtaagcacatccttggtaatatctccaattgcaatgactttttaatttattttttcttttgctgctttaacattttctggatattaaaatccccccagtcctttaaaagaatcttgaacaatgctgagccggcagctgaaaatctaactcataatttatgttgtagagaaatagaattacctctattctttgttttgccatatgtaatcattttaataaaattaataactgccaggagttcttgacagatttaaaataaaagttaatttctagacctcg

SEQ ID NO: 12751 - DNA, 3601 bp, Homo sapiens
  source 1..3601: mol_type = unassigned DNA
gtaagtgctcagacattaagccgttgagtagaggcatgttttgcaatctctcgtttagctaccaattggagcagtttaacgtgcttgagtccccggcgtgatgtgttcatggacgaagttgccgatggatgttgtcaggtgttgcacctggagggcccagatggatcaatgaggcatttaaagtgtagaatctcaccctgaacccagactattcagataaagaactggtgacacgtggctgtacattcagcacagctgtggtgtccccaagtgccatgacccaggagccattcagagaggagctggcctatgaccggatgcccacgctggagcggggccggcaagaccccgccagctatgccccagacgcgaagccgagcgacctgcagctgtcgaagagactgcccccctgcttcagccacaagacgtgggtcttctctgtgctgatggggagctgcctcctggtgacctcggggttttcgctgtacctggggaacgtgttcccggctgagatggattacttgcgctgtgctgcaggctcttgcatcccctcggcaattgtgagcttcaccgtctccaggaggaacgccaatgtgattcccaactttcagatattgtttgtttccacgtttgctgtgaccactacgtgtttaatttggtttggatgcaaactagtcctgaacccatcagcaataaacatcaacttcaacctcatcctgctgctcctgctggagctgctcatggcggccacggtgatcatcgctgcacggtccagcgaggaggactgcaagaaaaagaagggctccatgtctgacagcgccaacattctggacgaagtgccatttcctgctcgggtcctgaaatcttactcagtcgtcgaggtaatcgcaggcatctctgccgtcctcggggggatcattgccctgaacgtggatgactcagtttcaggcccacacctctcagtgacgttcttttggatcctagtggcctgctttccaagtgccattgccagtcatgtggcagcagagtgtcccagcaagtgtctggtggaggtcctgattgccataagcagcctcacgtctccgctgctgttcacagcctctggatatctgtcattcagcatcatgagaatcgtggagatgtttaaggattacccgccagccataaaaccatcctacgatgtgctgctgctgctgctgctgctagtgctcctgctgcaggccggcctcaacacgggcaccgccatccagtgcgtgcgcttcaaggtcagtgcaaggctgcagggtgcatcctgggacacccagaacggcccgcaggagcgcctggctggggaggtggccaggagccccctgaaggagttcgacaaggagaaagcctggagagccgtcgtggtgcaaatggcccagtgacccccagacgcggaaaccgggtggcagcgcccagcctggccccaagcatggaaacgcacaacccctaatcgccctgagctactgcttctaacacctcttttcccttgtgtgagggcaaaccaggctgcaggtggggttttcacttcctagggtagtttaattttaaaataggccaatgttggctagtctgtgcctcagtgagatcagtcagctccgagtggctcccgtgtcgtaacagcaggagcatggccgcaacttcccaggccgaggaagggcccccggctcggcctcttgagagccccacccctgaactggccccagctcctcttcctgcctctctcatggcttgggctggagtgggctctctggacctgaccagactgtgggtccctgcgtctcctgcccactctgaccgggcttcctccctccacgcttagggtctgtcccgggtactcagtcagcccagtgggatcttacccacttccctgcaaggtgcacctgccccaggctcaggctgcccagcggctcttcctggacagtgagagcagggctgggcgcctctgtcctggcccgggagccgcaggggcccctcctccagagcctgggcgcaagcgacacaggctgccgctgctctcccaggtgaaatccacaccagtccacgccgggtcgcctgccctgtctccctacttagacccagtcattctagagggatccaccgccacactggccggcccacgtcctgggtgctgtcatgcccagcttggagtgccacgtggccgctgcccacgtcccgggcactgtcatgcccagcttggagtgccacatggccgctgcccacgtcccgggcactgtcatgcccagcttggagtgccacgtggccgctgctgtgacaggcagtgttcttgggggtggggctgcatccaaggctttgtaaaccggctggaccacgtctccctggccccagtgaccgggggaagctgagcccctccctcctgtgtttgctcccattactcaaaatgcaggacagatcaggtcagagcccaggaattctcacaggttcacccagcgccctctacctcctagcaagtactttgtcttgatcctcactgagaaggccccagggcagcggtcttctccatctccgctgttttggggtcttagggtacagcccaggcggtcactgcccacctgccaggctgcagggacagttgggtgtgagaataacactggctttgggtagtgccatggccaggagtgggtttccctgcgtctcctcgtcccgagggcgcctgggtcctcccagctgacggcagtaaatccacagtgagttggggcgactgtgaaactggaatgctgttactttgataattactttccagcaggtgttttccttcacaatggttttgtttctttccttctgatctgagaagacatgaacgttttctcttcaccgccgtggggtgtattgactggtcccccatgggctgctggaaaggcccggagatgcatctgtggcctggggccatcaagatcaaagaaccaggaggcctgggagatgcagctggatggggcggcctgcagaccctgccagggggtttgaggaccctcccaggtttcccactgcggaacaggagtgactctggctgccaagataccttcatggtgttcatgacaagtggaatcattattttcaaccattgaagggggatgcaggcaagacaccttcccagctgctcctagaggggacaagccaggccctctctgcagtcctcggcagctccggaaggacacagtcaggggccgggcaaacactttggccacagccccaaacaagcgccaccgtgggagaggagaggctgctgtcactggtaccggatgcagaccccaccctgtctgcaggccacccccacctccctgcagctttgaggctggcggggtctgctcctgggaatggggtgggagccacagggacgacccggggcgggctgatgtcttcttgggggcagaccagagagctcaagtttcagagtcagaattaggcacttggagcgtttttgctggcttgcactttcttattttcttattttagagcgcttaaaaaatccggaaaaatggggtttaaaagaactgtctctttcagtctacatttttgtttaatacgcttgagcaataaacgctgacttgcagacgtg

SEQ ID NO: 12752 - DNA, 3933 bp, Homo sapiens
  source 1..3933: mol_type = unassigned DNA
aaagggggcagcaggaccgggcccaccagccatccgggctgcccacgcaaaccacagggccgaatccggagccgcccaaggccacacagctaagccgagtgcgtgaatgcttatgtgaccgtgtgaaggaggttcccaccgtgtggctgtgggggatggaaaaaggctacttggaaagatgtagaagaccttcgagtaaacagttacgtttcagaaacagagcctgctcagaatgtgtacttggtgggattctattcttagggacgcttctttcttctgagagacccgagctctgtggcgagtggcacaggcagggccccttcctttcctagttgggttctgacagctccgaggcagtggtttacacaaccaacacgaaacatttctacgatccacccgattcctcccctcattgatattcaggaagcagctctccttcccctgccttcagctcaagtttgctgagcttttgtttcatttgtgaatacttcttgctggaagtccctcacccagagaccagtgctcccaacggcagagcagcgggggagataaagaactggtgacacgtggctgtacattcagcacagctgtggtgtccccaagtgccatgacccaggagccattcagagaggagctggcctatgaccggatgcccacgctggagcggggccggcaagaccccgccagctatgccccagacgcgaagccgagcgacctgcagctgtcgaagagactgcccccctgcttcagccacaagacgtgggtcttctctgtgctgatggggagctgcctcctggtgacctcggggttttcgctgtacctggggaacgtgttcccggctgagatggattacttgcgctgtgctgcaggctcttgcatcccctcggcaattgtgagcttcaccgtctccaggaggaacgccaatgtgattcccaactttcagatattgtttgtttccacgtttgctgtgaccactacgtgtttaatttggtttggatgcaaactagtcctgaacccatcagcaataaacatcaacttcaacctcatcctgctgctcctgctggagctgctcatggcggccacggtgatcatcgctgcacggtccagcgaggaggactgcaagaaaaagaagggctccatgtctgacagcgccaacattctggacgaagtgccatttcctgctcgggtcctgaaatcttactcagtcgtcgaggtaatcgcaggcatctctgccgtcctcggggggatcattgccctgaacgtggatgactcagtttcaggcccacacctctcagtgacgttcttttggatcctagtggcctgctttccaagtgccattgccagtcatgtggcagcagagtgtcccagcaagtgtctggtggaggtcctgattgccataagcagcctcacgtctccgctgctgttcacagcctctggatatctgtcattcagcatcatgagaatcgtggagatgtttaaggattacccgccagccataaaaccatcctacgatgtgctgctgctgctgctgctgctagtgctcctgctgcaggccggcctcaacacgggcaccgccatccagtgcgtgcgcttcaaggtcagtgcaaggctgcagggtgcatcctgggacacccagaacggcccgcaggagcgcctggctggggaggtggccaggagccccctgaaggagttcgacaaggagaaagcctggagagccgtcgtggtgcaaatggcccagtgacccccagacgcggaaaccgggtggcagcgcccagcctggccccaagcatggaaacgcacaacccctaatcgccctgagctactgcttctaacacctcttttcccttgtgtgagggcaaaccaggctgcaggtggggttttcacttcctagggtagtttaattttaaaataggccaatgttggctagtctgtgcctcagtgagatcagtcagctccgagtggctcccgtgtcgtaacagcaggagcatggccgcaacttcccaggccgaggaagggcccccggctcggcctcttgagagccccacccctgaactggccccagctcctcttcctgcctctctcatggcttgggctggagtgggctctctggacctgaccagactgtgggtccctgcgtctcctgcccactctgaccgggcttcctccctccacgcttagggtctgtcccgggtactcagtcagcccagtgggatcttacccacttccctgcaaggtgcacctgccccaggctcaggctgcccagcggctcttcctggacagtgagagcagggctgggcgcctctgtcctggcccgggagccgcaggggcccctcctccagagcctgggcgcaagcgacacaggctgccgctgctctcccaggtgaaatccacaccagtccacgccgggtcgcctgccctgtctccctacttagacccagtcattctagagggatccaccgccacactggccggcccacgtcctgggtgctgtcatgcccagcttggagtgccacgtggccgctgcccacgtcccgggcactgtcatgcccagcttggagtgccacatggccgctgcccacgtcccgggcactgtcatgcccagcttggagtgccacgtggccgctgctgtgacaggcagtgttcttgggggtggggctgcatccaaggctttgtaaaccggctggaccacgtctccctggccccagtgaccgggggaagctgagcccctccctcctgtgtttgctcccattactcaaaatgcaggacagatcaggtcagagcccaggaattctcacaggttcacccagcgccctctacctcctagcaagtactttgtcttgatcctcactgagaaggccccagggcagcggtcttctccatctccgctgttttggggtcttagggtacagcccaggcggtcactgcccacctgccaggctgcagggacagttgggtgtgagaataacactggctttgggtagtgccatggccaggagtgggtttccctgcgtctcctcgtcccgagggcgcctgggtcctcccagctgacggcagtaaatccacagtgagttggggcgactgtgaaactggaatgctgttactttgataattactttccagcaggtgttttccttcacaatggttttgtttctttccttctgatctgagaagacatgaacgttttctcttcaccgccgtggggtgtattgactggtcccccatgggctgctggaaaggcccggagatgcatctgtggcctggggccatcaagatcaaagaaccaggaggcctgggagatgcagctggatggggcggcctgcagaccctgccagggggtttgaggaccctcccaggtttcccactgcggaacaggagtgactctggctgccaagataccttcatggtgttcatgacaagtggaatcattattttcaaccattgaagggggatgcaggcaagacaccttcccagctgctcctagaggggacaagccaggccctctctgcagtcctcggcagctccggaaggacacagtcaggggccgggcaaacactttggccacagccccaaacaagcgccaccgtgggagaggagaggctgctgtcactggtaccggatgcagaccccaccctgtctgcaggccacccccacctccctgcagctttgaggctggcggggtctgctcctgggaatggggtgggagccacagggacgacccggggcgggctgatgtcttcttgggggcagaccagagagctcaagtttcagagtcagaattaggcacttggagcgtttttgctggcttgcactttcttattttcttattttagagcgcttaaaaaatccggaaaaatggggtttaaaagaactgtctctttcagtctacatttttgtttaatacgcttgagcaataaacgctgacttgcagacgtg

SEQ ID NO: 12753 - DNA, 613 bp, Homo sapiens
  source 1..613: mol_type = unassigned DNA
gctactgagacagagaactcacatgggtgcccacccaagcgggtctgtgacagagagaatgacgcctgcagtgctttccaagtgccattgccagtcatgtggcagcagagtgtcccagcaagtgtctggtggaggtcctgattgccataagcagcctcacgtctccgctgctgttcacagcctctggatatctgtcattcagcatcatgagaatcgtggagatgtttaaggattacccgccagccataaaaccatcctacgatgtgctgctgctgctgctgctgctagtgctcctgctgcaggccggcctcaacacgggcaccgccatccagtgcgtgcgcttcaaggtcagtgcaaggctgcagggtgcatcctgggacacccagaacggcccgcaggagcgcctggctggggaggtggccaggagccccctgaaggagttcgacaaggagaaagcctggagagccgtcgtggtgcaaatggcccagtgacccccagacgcggaaaccgggtggcagcgcccagcctggccccaagcatggaaacgcacaacccctaatcgccctgagctactgcttctaacacctcttttcccttgtgtgagggcaaacca

SEQ ID NO: 12754 - DNA, 758 bp, Homo sapiens
  source 1..758: mol_type = unassigned DNA
agtgctcccaacggcagagcagcgggggagataaagaactggtgacacgtggctgtacattcagcacagctgtggtgtccccaagtgccatgacccaggagccattcagagaggagctggcctatgaccggatgcccacgctggagcggggccggcaagaccccgccagctatgccccagacgcgaagccgagcgacctgcagctgtcgaagagactgcccccctgcttcagccacaagacgtgggtcttctctgtgctgatggggtgcatcccctcggcaattgtgagcttcaccgtctccaggaggaacgccaatgtgattcccaactttcagatattgtttgtttccacgtttgctgtgaccactacgtgtttaatttggtttggatgcaaactagtcctgaacccatcagcaataaacatcaacttcaacctcatcctgctgctcctgctggagctgctcatggcggccacggtgatcatcgctgcacggtccagcgaggaggactgcaagaaaaagaagggctccatgtctgacagcgccaacattctggacgaagtgccatttcctgctcgggtcctgaaatcttactcagtcgtcgaggtaatcgcaggcatctctgccgtcctcggggggatcattgccctgaacgtggatgactcagtttcaggcccacacctctcagtgacgttcttttggatcctagtggcctgctttccaagtgccattgccagtcatgtggcagcagagtgtccc

SEQ ID NO: 12755 - DNA, 236 bp, Homo sapiens
  source 1..236: mol_type = unassigned DNA
gagcaccgccgcctgccacactgtgagacagggaagggagtctgagggtcttggttttctgccctcaccactgtcaggtcgtcgaggtaatcgcaggcatctctgccgtcctcggggggatcattgccctgaacgtggatgactcagtttcaggcccacacctctcagtgacgttcttttggatcctagtggcctgctttccaagtgccattgccagtcatgtggcagcagagtgt

SEQ ID NO: 12756 - DNA, 4075 bp, Homo sapiens
  source 1..4075: mol_type = unassigned DNA
aacagccttgagatgagatcacacaaacactcaaatgtagcttctaggggaggggagaacccaggaggctgggctttctcttctcttctcaccactggaagggaggagtaaccagaaggagcggaagctaaaacacgctgtccagagaggggagctgtggtcagtgggacgtcagtgagtcagtcatagggtttgtcctgatggtggtggtggcaggtggtaagggttggggaaaaatgaagaattagaggaaacccccaacaccagcaggcaggctgtactgtgactggactctccctcaacatcccccactctgctcaaagctgagggacagaggtggatagtgctgggagggaagagaagagagggggaggagaaggagagagggaaaggggcagtggagagaacaaggccatttctgtttcttttccagggacctgaccagagctgggtggagggaaagcgtgtgtgtgggacttggcatgaaatgaccaatgatgacgagaagtgaccaggaaattccattccctaggacattagggtctctgaaacttgagggtggggtcagagtgtgaagaagacaggtcagggtgaatgtgatggtagcgcagggcagtgggggatgggaacaaagccagaaaaggaagtaagagccactggcggccactcttctttaaagcagccagaagagagtgggttgaggaaaaatgaagtcctgagctggtcagcccaggcggaagagccacccgaatccaaccccacagtgaatagggaaggggctgagaaaacaacaggagggatgaggattagacctcataaggccacgtcctgagagccaagtggtgctcagaactcgacctctctgagttccaaatggcaagagtgaaatatggaaccgggaaagccaccccccgcccccaccaagatcatactaggacttgagggtctcagagctgttgggaggtgagcagaagggatgggaaagaggtgccagggaggaaggatgtacaggctagttctctggtcctgttcgggccccaaaccggttctcccggtcccaccgcctctggccctaaggcctccaacccgcggcctgacaagccctcacatgaagcagctggagagaaagaaagaatcgagagaatggcatgggcaattctggctagaagcccggggcagcagctggtccctgtgtggagaccccgagacatggagggctgctgagggactctggagaagcggtgtggactccatatttcagccaagtgacaggcccaacaccaaccttcccttccccaggaaaggtcttctgggggcttaagaggaaagagggctaggccctaagcctcccctccccaaatatattcaatcacacagattccgtatctgtctccccccactacacaactctacctagaagttctctgctgttctcaacccttaaccggactgggacctctctgggaatctttcggaccctctccctcccacctcccccaacattccagttccttcttttccttctactcttcagcggcctcagcctgcgcaccccaggagcgtggatgactacggccaccccgggcgcgcacccctttcccaccaccccagcatctctgcagcccaggacacccgcctcccccacaccccgcatccggtgtgtctccgcctggcccggccggcgcggcaggcgggccaggggaccaactgcacggcctcacctgctcttctccaccatccagacgttcagctacagctggtgggggtgagggactctgctccgtggccgccagtgtgggcttcccgggctagctctgcggcgaggtgggggagccgagtacgagccggcagaggtggggccggctgagggcggaagcggcggcgacgcgattacgaaacccgtccggctcggagcccggcgcactgctcccctctggactgcggaggcactgcactgcgcgggacgtgggagggtgcctctgcagcccctcaaggccgccgcccctgcggggagaactggagaatgcggacacctagatgaggccctggcacccaagctggggcccccggaatctcacgttccctttactcgccaggcatttcggggcaaaacgaagcggagccccccaaacccccagacctaaccaagttcagagattcgcagaagcacgccccccaccccaaatttattgtgctctacccaaaatggaataggactaggtttatttacccattgtgagggtagagaggcgagtctggaggagcagggattgggagaaggggtggaaaaatactctgattcttaaaaatactttgtaacctaaagtccttaaattgtggaagaaaggaatactcctcctttccattgtagtctagagttaagatttcaaatccataaattagaggacctaaaattagagggcaattaactgctcattcattgggcccccagtcagcacgggggtgctggaagagatcgggaataatagcgcagaccaatgagcctagggagatgctttcatcgtctctccttccctcaagtgttctggaacctatcatttgaattagccgagtcaggcaggagggggcggggaatccttccgcccttcttaggaggggctgcattgcagggggagagtgaactgacagactcagtcactgaagagggaaaaggagtgagaagacaaagccgtcaaagccccaacagctttgtatttctccagcccggcgcagaccccggagctcccgaggcactccctccatctttggaacacgccagtaattgattgataacaggaagctatgagggaccctgtgagtagccagtacagttcctttcttttctggaggatgcccatcccagaactggatctgtcggagctggaaggcctgggtctgtcagatacagccacctacaaggtcaaagacagcagcgttggcaaaatgatcgggcaagcaactgcagcagaccaggagaaaaaccctgaaggtgatggcctccttgagtacagcaccttcaacttctggagagctcccattgccagcatccactccttcgaactggacttgctctaaggccaagacttctctctcccatcaccttgccctcattgtcttccctctcaagccccttcctttccactcctttcccattttaatcttgttctctccctactgtgttggtggtgctgatgaatctgccagagttgagttctatgtatttatttatctatctgtctactccatttctctcaaaagccctcaagtcacaaagtaaatggttcaagcaatggagtactgggtcacagggattcctcctttcccccccaaatattaactccagaaactaggcctgactggggacacctgagagtagtatagtagtgcaaaatggaagactgatttttgactctattataatcagcttcagagattccttaaaccttcctaatttcctgctccagggcagtaaacacaaatatttcttcaaggggtgatgaaaacctcggaagttttaatttgaggttatctgctacgaaacagtatttctaaaaggctaaagtgataagtctcttgcttttttttgatcctgctcttatattcttttttttcctcagagaaatcaggagggtagttagaggtataaaacaggaggaaatattatggaaaatgaaaatagggaaaataattgaatcattttagaagtagctaatttcttttctcaaaagagtgtcccttcttcacacctactcactttacaactttgctcctaactgtgggttgaaaactctagctaaagaaagttatcaaatcttaacatgcattcctactattatgatagtttttaaggtttcaattcaatcttctgaacggcataagtcctattttagccttacctcctgcatttgcaatacgtaatactgatcagtgggcacagttcttcagctacattgagaccctgaaatgaacaattatattctgactcgacatcttgtccccaatccttccaaaaatattgatggtgatttgtgctaccatttactcgtttatttaataaagacattcaatcccagga

SEQ ID NO: 12757 - DNA, 13038 bp, Homo sapiens
  source 1..13038: mol_type = unassigned DNA
gcagctgttgtggggcaccatgcgaggcttcgggccaggcttgacggccaggcgtctcctcccgctgcggttgcccccgcggccgcccgggccccggctggcgagcgggcaggcggccggcgccctggagcgggccatggacgagctgctgcgccgcgcggtgccgccgacgccggcctacgagctgcgcgagaagacaccggcgcccgccgagggtcagtgcgcggacttcgtgagcttctacggtgggctggccgagacggcccagcgggccgaactgctgggccgcctggcgcggggcttcggcgtggaccacggccaggtggcggagcagagcgccggcgtgctccatctgcgccagcagcagcgggaggcggcggtgctgctgcaggccgaggaccggctgcgctacgcgctggtgccgcgctatcgcggcctcttccaccacatcagcaagctggacggcggcgtgcgcttcctggtgcagctgcgggccgacctgctggaggcgcaggccctcaagctggtggaggggccggacgtccgggaaatgaatggggtgctgaaaggaatgctctcagaatggttttcctccgggttcctgaacctagaacgggttacctggcattcaccgtgtgaagtgcttcagaaaatcagtgaggctgaggctgtgcatcctgtaaaaaactggatggacatgaagcgccgcgttgggccctacagaaggtgttacttcttttctcactgttcgacccctggggagcccctggtcgttttgcacgtggcactgactggtgacatctccagcaacatccaggcaatcgtgaaggaacatcctccatcagaaacagaagagaagaacaaaatcactgctgcgatcttttattccatcagcttgacccagcagggactccaaggggtggagctgggaacattcctcataaagcgagtcgtcaaggagttgcagagagagtttcctcaccttggggtgttttcaagtctgtcacctatacctggtttcaccaaatggcttctggggcttctgaactcgcaaacgaaggagcatgggaggaatgaactctttacagattcggaatgtaaggaaatctcggagatcacaggtggccccattaacgagaccctcaagctcctcctcagcagcagcgagtgggtgcagtcggagaagctggtgcgggcgctgcagactccgctgatgaggctgtgcgcctggtacctgtatggagagaagcaccgcggctacgcgctgaaccccgtggccaacttccacctgcagaacggggcggtgctgtggcgcatcaactggatggcggatgtgagcctcagaggcatcaccggctcctgcggcctgatggccaactaccgctacttcctggaggagacgggccccaacagcacctcctacctcggctccaagatcatcaaagcctctgagcaggtcctcagcctagtggcccagtttcaaaagaacagcaagctctgacagtaaacctctcctaaagcacagggccccggctaagaaaacgatcattttcaggaggggccgggagttatgtatctgaagcagctttccaagcaaagccaaagttgactgtgttcttgtcccgcagccggtccacactgtgaggccaggcctcaacttccctcaccctgggcgtgacatgcacccagtgcaagacggttgtgggtgcgggtgcacacaaatgagtgggttgctgtgctgtctccggaagattctgtcgttgcccttggcctggctccctgcccggggctggtgctgtggtacctacatcttcaggaagctgtgcagcctctgccattgccatcccagggggatctggcatcctcctaaggaccggggcgcgtggcccagataagaataggtgttcctttgtgctcataaaacagaatgcggcgatggttgctttagccgtttctcaccatgcaatgcagagggacaaagggctgtgctacacttcccagttacattctgaagctcataaatgtatgagaaggtttgtgattttgcacaaggtgtgtgtagtaagttaaattgttgaacacaaaaatgttgctgcttgaggcataagttggataataggctttaaatgatcagggattcaggttcataatgaacttcacagtaaagaacacgtttgttctgtaaagcattgaacatctgattgtgtagtggtggtcgtctttaagattagagacctgggaaggctggaatcagccagccagcctacggggagtttgggatgaaggagcctggggtgtgttggatgagaacaaaggtgaaggaaggggcagtcattgtgcttgtgggaggaaggcagttgtgtttgtgtgtgtatgtgtgtatcagtgcacatctgtgtgcatgtgcacgagcgtctctgtgtggatcagtgcacgtctgtgcgtgtgcacgagcgtctgtggatcagtgcacgtctgtgtgcgtgtgcacgagcgtctctgtgtgtatcagtgcatgtctgtgtacgtgtgcacgagcatctctggatcagtgcacgtctgtgtgcatgtgcccgagcgtctctgtgtggatcagtgcacgtctgtgtgcgtgtgcacgagcgtctctgtgtggatcagtgcacgtctgtgtgcgtgtgcacgagcatctctgtgtgtgtcagtgcacgtctgtgtgcgtgtgcacgagcgtctctgtgtgtatcagtgcacgtctgtgtgcgtgtgcccgagcgtctctgtgtggatcagtgcacgtctgtgtgcatgtgcacgagcgttctatgtggatcagtgcacgcctgtgtgcgtgtgcacgagcgtctctgtgtgtcagtgcacgtctgtgtgcgtgtgcccgagcgtctctgtgtggatcagtgcacgtctgtgtgcgtgtgcacgagcgtctctgtgtggatcagtgcacgtctgtgtgcgtgtgcacgagcgttctatgtggatcagtgcacgcctgtgtgcgtgtgcacgagcgtctctgtgtgtcagtgcacgtctgtgtgcgtgtgcacaagcgtctctgtgtggatcagtgcacgtctgtgtgcgtgtgcacgagcgtctctgtggatcagtgcacgtctgtgtgcgtgtgcacgagcgttctatgtggatcagtgcacgcctgtgtgcgtgtgcacgagcgtctctgtgtgtgtcagtgcacgtctgtgtgtgcacgagcgtctctgtgtggatcagtgcacgtctgtgtgcgtgtgcccgagcgtctctgtgtggatcagtgcacgtctgtgtgcgtgtgcacaagcatctgtgtgtgtcagtgcacgtctgtgtgcgtgtgcacgagcgtctctggatcagtgcacgtctgtgcatgtgcacacgtgcatgtgcatgtgcttacacgtctttgtgtgtctgtgtgcgtgtgtccgcagttgccctgtcctcgctgtcctcggtttggcagacaggtccctcaccttccttgcctttcatctcctgtgaccctcgccaggccccttctctgtcttctgcgtacggcgtgttgcttcgtgacagacggtgtgatcgcgggagctgtctcatgcctcttgttctccgggctgattctgaaagagtggcttgcaggccaatcaatgcaatcctggcaacctgcccgcccttcttgcgggcagagttctttaccgtaagcgtccccagaccctcaggcctgcggaaacctgctgggccttaccgtctttgcttagcttttggcctagaccttaaagaccagcagtcttctgtgctttatcctgctgcctccagagtgccatggacagatcacccattctcgatcactccggcagcctttcggatccggtggcgcccttcctggctgtgtccttcacctgtgctgtctggttctctcctgtgtggacaggggatgataggaattcccgctgcacaggccgctgggaggacgggctcaggtgacatctgccgaggctttggctcaccagaggagtttgtagatgtcagtcatccccaagtcactaggaactagcacgcctgaggtaggtctcggaatagtgttcaaatccattttactattgcggccaaggagccctccctccagcaaggcggctcatcacatcacgttactctttaggtcaaatgtaaccctcccggttttatttatcactcaggcagagtttcttaaccttttgtgagttacagatcactgaaattctggtgaaagccaggtaggcctcgccgcaggagaacacatacatggtgcacagaacacacacagtgcacagaacacagtgcacaggagaacactcacagtgcacaggagaacacgcacacggtgcacaggagaacacgcacacatgttgcacaggagaattcacacacagtgcacaggagaacacacagtgcacaggagaacacatggtgcacaggagaacacgcacacacggtgcacaggagaacacacacagtgcacaggagaacacgcacagtgcacaggagaacacagagtgcacaggagaacacatggtgcacaggagaacacgcacacacggtgcacagaacacacacagtgcacaggagaacacgcacagtgcacaggagaacacggtgcaccggagaacatgcacacatggtgcacaggagaacacagtgcacaggagaatacagactgcacagaacacacgcacagtgcacaggagaaaacgcacacacagtgcacagaacacagtgcacaggagaacacgcacacagtgcacagagaaccacacagtgcacaggagaatacgcacacacagtgcacagaacacagacacagtacacaggagaacacgcacacacagtgcacagaacacagccagtgcacaggagaacactgcacaggagaaccacactgcacaggagaatatgcataaacagttcacaggagaacacgcacacacagtgcatagagcacagacacagtgcacaggagaaccacacaatgtacaggagaatacgcacacacagtgcacaggagaacatacacgcagtacacagacacagtgcaccggagaacacagtgcacaggagaacacgcacacacagtgcacagaacacagacacagtgcacaggagaacacacagtgcacaggagaacacagtgcacaggagaatacacacggtgcacaggagaattcacacacaatgcacaggagaacacagtgcacaggagaacacacacacacactgcacaggagaccatgcacagtgcacaggagaatacacatggtgcacagcagaattcacacagtgcacaggagaacacacacagtgcacagaattcatgcacacagtgcacaggagaacacacacagtgcacaggagaacacagtgcacaggagaacacacactgcacagaacaaatgcacagcacacaggagaacatgcacacacagtgcacaggagaacacagtgcacaggagaacacacagtgcacaggagagaacacacagtgcacagaacacacagggcacaggagaacacacagtgcacaggagaacactgcacagaacacacggtgatcagaacacacagtgcacaggagaacacacagtgcacagaacacacggggcacaggagaacacacgatgcacggaacacggtgatcagaacacggttcacaggagaacacacagtgcacagaacacacggggcacaggagaacacacagtgcacagaacacacagtgcacagaacacacggtgcacaggagaacacatggtgcacaggagaacacacggtgtacagaacacacggtgcacaggagaacacgcagtgcacaggagaacatgcaatgcacgggagaacacagtgcagagaacacacacgcactgcacagaacatgcagtggtgcacaggagaacagtacacaacaacacattccatgcacaggagaacacacgcaattcacaggacacaacagaacacacgcagtgcacaggacacaacagaacacacgtgcacaggagaacacagtacacacacagcgcactggagaacacgcacagtgcacaggagaacagagtgcacagaacacagtccacaggacagcacacggtacacagcagaacacccgcagtgcacaggagaacctagtgcacagaacacacaccctgtgcacagttttgttttgttttgcttttgcaattccagggagctccctggcctcccacagccattcatagagcccattctgtttgcgataaaaacagatctcctccagctcacgtgaggctaggcacgggttcctcaaaacctttttgggcagctagcagctttgactagcagctcatctcaccaggctgaggtcgctgcctgtgaacagttgacagacctaaagccagccagaatgttctgtgtcagagagccctgtccaatgggcagagctgggagacacgcaggaagacccccagcccatgcccgttctcaggcctgaggttcattctcgttctctccctcttccctttccccttcctccctcctgccctcgaatctgcaaggtctctccgggtggctgtgttctgccagggcctcccaggctccaagatcactgccttcagggagcccaggaagagctgcacatccgctgcctctgtgtggcaggcgtgtccgagactgcaactcctagttcccacctttcacacctcatctctctaacctcttatggaaaatttcaaacatatgtaaaagcagggagaaattgcataacgaacctacagacctatcacccagcttccacagtcatcagtggttttctgtttttatcaaactttatctttgtacttcttacagtgcttcacatttagcaggtcctcaatgaacattagatggatggatggaaggaaggaagatggatggatggatggatggatggatggatggatggatggatgacagatggatggtggagggttaatggaaggaaggaagatggatgggtggaaggaagatgggtggatggatggtggagggtggatagaaggaagatgggtatatgaatagatggctgggtgggtggaaggaaggaagatggttggatggatggaagatggatggatggatggatggagggtagagttttaatggaaggaagatggatggacgaatagatggaaggaagatgggtggatggaaggaagatggatggatggaatgatggatgggtggtagagggtggatggaaggaagatggatgaatagatgggtgggtgggtggatgtttggatggatggtggagggcagagtgttaatggaaggaagatgaatggatagatggagggtagagtgtagatggaaggaaaggaaaggaggatggatggatggatggatggatagatggatggaggagggtggatggaaggaaggaggatggatggatggatgggtgggtgggtgggtggatggatggcgcagggtatatggaaggaagatggatgaatgatggaagatggatggatgggggacagatgaattgatggcggaggatgttaggatgggtggatggatgtattaacatcccttctccatgcctcagtccccatcataaggagaaagagcctgtcgtccctctatgatactgcactgaaccaatattcccctcacttcatgggtgttacaaacctcttatcatctgtttacgtctcactcttactgtagaacctctagaaaggcaggtggcttccagctcctcgcttttcctgagggatgatctgaccacccattcttacacatgtcatctttcccacagtggcagtgcagaggagacaaaagcagaacaaaagcagacagcggccaggtctgagggtgataggctactcactgggtcctagtgttctgaactacaccctacaggaaagtgctactcagtgcccaggtgacatcgtcacaaggggaacacagtggctaagagggcaggggctcagtctcacagacctggtttccatcccacttgctctcaggaaccctgggcaacaactgtgaccacagtgtcttcctctggaaagtgcccagcagtgttgggctcaccgtagctgcacaataaattgtcatgagtgctttccactgtgtcccaggttcaaggctgaagtcacaaccccacccctgccacagagcctgcccccccgagtgttccccatctcagtctgaggcccgacctgtgcttccggagcccgcgtcccgtcccatctcaggagctactctgctccattccccccgtatccgagacctaagttccggctctccttatctcttggagccctgtcatctgtggatcagatgctccccagctccctccatcccacccacagggtttcacaagaggcccagccatgcaccctgctggggttcagacttgaggggtgccactggagttggggtgcacctgctctcacctgttcatgggctcctttttcttctgaaatgcagcgtgaggcaccatggagggagctgtagactttggctccggccagtgcccagttcaaatgctggccccaccacttccagctgggtggcccagggcaagccacctacccttgctttgcctcagtttcctcatctttaagtggcagtaaccatagtaccgaccccacagcctgctgagaggctcaaaggagacgatgtatataaagcagttaactgatgcctgccctgggaagcagagcagtccctgtcatgatgggcgtttctacatctggacctgggcgccaccatcctgctcacctgaatgcgggttctgggatctttcagtccttatttggatatttgaatatttgttggttttctggcttctcacaatttctaagaggtgactaagtggatcattcgttcccgggagaggtgggaatggctcctgtggacacggcattgcacaggggcttgaggggacctcctgacccctgatggctgagcacccttgtcatactcctcagggagagcccaggccaccggctagctccagactggctctgcagggcctcagaatctgaactccctgtggtcactctgaggcctctctgtctctctgtgtctttctctttctaccctctccatccctccttccctctgagggcttgaccttcactgacctccagggcaagaacaaccaagagttgctcccaagagggcttccctcctcctcgttctgtgtggcctcagaagtgagggaatctcagtgctctgtgcaggcatgtgcttattctgagctctgtttgaaattaaacatgaggtgtactaaagatttaaatcgagcaaacacctctgtgatttccaattggattctgaggcgcttacagaaatatgaagtccattttgatctactcttagaaacaaaagctgcccatgatttcaccacagaaagtctgcctcatttgcagtttagcggactcacagaggtgaccctagatctctgtctcgcctttgtttggtttatttccacattgcatttgcgtttcccgcctggctagttcttgatcattgaggaaggcagagagaaacgagattctctgctctgggccaggcattctctgtacacgttcctggttccagcctgcctccttccctagaggatcaccgtgtccagccctgaagctggagcgagtgttcctcacttagagatgaggcgatgaggcggcgagctgggagagggctgagcagctggtgagggcagagttgggactcaaacccaggcccgaccaccacccagctctccttccaccgcactggtccacctcctgaccgtacgtggggagacccacgcaaaggcccagagaggagaaggccagcagtgggcagaacagagtgggccgcaggttttggcaagcctggaggggaataggtcagaaaggtagcccggctgggctgagagactgaggacagggggtgttagggtgctgacattctggcaagggggcgggggtctgtggaagacaaccccaggctggggtggcttctctcaaacccgggcatgcacagtgctggccgtatcggtccgagccctcggctgccagggagagaagctgagctcccaccaaagcataaaatccaggccagcgaggggcagccagaccacgggaagacaggaggaacccggacctggctctcgtgcaggaagcaggcagtgcacagctccgccgccacagagacagcctcctctcatgaccccagactcagcccgggccgtggtgggaacgatggttggcccggtttggagatgggggatctggccctgtggtgagtgcacccagagcaggtgtctctccggagcagttgagtagaacagctggcgtcacctcttcatgttgacgaggggagatgagtggcccaggcagttcctagagcgggggagatggagtgggccgtatcccacccagcaggagcgcttgcttctgaagctcccgtgcgtctgtgacagaggcttgaacccccggcttgttctctcacgtctgttgccgtaaatctgtctccatcgcctggcacataggagaggcttggcaaatatttttggttcactgaagaaaggcagccctcactcctgctgctcagacagcaccccctgaacgtgagttactgcctccttgagcactttcgcaggagagaagaccagagagctgccttcaaagatgccagagccatgtttatttaagcggcgctgctccagagagaactggccatttgcagtctccaccccagtgtggctcacgatgccacctctccttgccagctctcaccgaggcccccggtgacctcctagggggtacatccagccaggttccccctcagcaatggccaggggccaccgtgggccacactgcacttcccaaatgctcccggcactggcacagatgcacaccctcttggccatccccacctgtgctccgccactcttagtcagccattcctctcggcttccgggagtcccctccttctctaaggatctcacccccatccgtgtctctgctgtctcctaactaccgatagcaagggcactagtgcccctgtttgccggggacaggccctgtctggggccctggtgtggcatcattgttaacagagcttcttttcactctgaagtgttcagttaggacagtcacttgcacagtcccctcactggtgacacagacaccccatacctgtgtgtttcccctgcatagctcagcagcagctcaggctcagcacggccaaggctgaatgcagatgccctccctccaaaacctggcctcctccagctgttccttcctggcgaggccacctccaactgtgtaacacagaagcctgggtgccatccctggggctcccctcacccccacctcccacccgtccccgggcccctggacagaccactggccttgttctcttcatttccctggcccaggttacaaagtctccttcctgattatgtgcattaactaacctcgcaggtgctctgcccacctgcctacgccagactcttccagatccttctccaccccagcaggcagagttgtcattgtgaaatgcaaatcaggttccatctctcctctcctttcctacctcccaccatccccgtcaccctccctgtcacacacagccccctccgtggcctctcaagcctgctgtggcctgaccctcccctctgcttttccaggccctcctggcactgtcctccctcagtctgggactccctgtcctccctccttcctgcgtggcacatgctcctccctcttcttgaaacgctctcccctccctgcctcccaggcaatgcccactctgcctccaaagttcatccatcgtcctctcctcaggaagatttccctggtggcttgactaggtcacagtccccctttatttgccgtcttctcactggggcctctccttcctggtagcttctaaacaaggcagtttcatgtgtgtatctccactagactagacgctctctgagggcagggaccctgcttcgcttctggcccgaggtggctgcagggtctgcaagatcatcagggccccctccaatgtgacacttgcagaggggacccctggcctggggccacgctggttacttgggtacactccttgcccagggttccacagccccttaaaggcagggtctttctggccacgcctggccctggtctggcctccccaaggagccctgccgctgggggtgctgtgtgggaacagagcacaggccctccctcccagagcccacgagatctcactttctccaagcccagctccccaaggactcagaccccagttgccctgcactgaacgctggcttgccctagctcactcggaccccaccctgcactgggaaggagggtccctgtccccgtttgacgggtgacgacactgaggcccagagagctgaaggggctggccgaggggacgggcttgggcgcttccattctcacactgctgccgtgacacctaatccatccggggaagttccctttaaacccaaaaggggacggtgaagccacacgcggccgcccttctcaggagcccacttccacctctcgcaggctagacagcgttccccaagtccccccttgagctgggtgggctgcccagctgtgaacacaaggacacctccgatttcgtcctgtgaatgttgatattagtggtcccttccttcaggggctgtggggatctcaaaagataaggcaggtctggagtcctgcgcggtacctgccgcatggcaggctctttacggacagcgcagggacgcactttgatgctgaaaatgagtctctgggacagatggatcccagtctgggtcctcgcaagcgctgtgcaccccgtcgccgcgagatggcggtgttgcgcccctccagcctcctctgctctgcgcttgggcgctgaatgttaaaattcctaacaggtgaatcgcttgaatccgggaggcggaggttgcagttggccgagatggcgccactcactccagcctggcgacagagcgagactacgtctcaaaaaaaaataaaaataaaaaaataaaat

SEQ ID NO: 12758 - DNA, 4489 bp, Homo sapiens
  source 1..4489: mol_type = unassigned DNA
atgaaaaagtcaaacaaaggtatatttcctaaaagaaaattatataggactgcttatagcctcttgagaaatttgaaaaacctagggttcagagaaaaggaggaaaaacaattcagtggtgggaaacgtcagtcctttaggagaagctgaaggaactggagctgtttggtctcaaggatccgtgtgttatcgctgagtgttggccggagagtttatggagcaagtttttgtttgcacaaaggcctaaaagagacagaaaggggcatacattgctcttcaacaaagtttgcatgaaaatttcaagaaacgatgcagtgctgaggacccccaggcacgcggtggagtcgcctcctccagagagttttcaaaacagagcagcttttaggctctgtagcctgaaccccagctggggagccgaggtctcttccagctccttcagtgctctgagaattgtcttctcgtcccagcaacaggcttgcctcgtgggctgcagagcggccaggccacccttagaaccatcgttggtgttttccaggcaatcgtgaaggaacatcctccatcagaaacagaagagaagaacaaaatcactgctgcgatcttttattccatcagcttgacccagcagggactccaaggggtggagctgggaacattcctcataaagcgagtcgtcaaggagttgcaggtaagcgacacgcagggagccccggtcacgcttggcttccgtgtggtcaggtcagcgaacctcgtggggtgtcaggtgccatgagggacacagatgaagacaggagctaaagggaggggcagggggtagaaaaggtgccagagaccccttggcaactcctaggagccatgagtctcccagagagatgagaatgatgctgagagaggcctccaacccagctgcccagttgactgcaagacgcagttgtattctgaggtcatcaactctctctagggtgacctcgttctgacctggtcaggacactctggatttcacgtgtcatcctggtgtaagtgtcactctgaaatgtcccagccagatggcacagctggtagtcatcctgccacgcctgtcctccccctgcccctgcccacactctcagggcctctgacacctgatgtgctgttagcttgggccttctcatggcctgtgagggagtgctgaggtgagaccagacagctcgaaggtaaatgcatcggcttttaatctaactctcctctctttgctgccctgtgaaaaacatattaaccatcctacatcagaaatgttgatgttcactccaggcctaggctttcaaaaaccaccagcctcatcagggacttggataaattccaatgagtagaatctaataattaggtgcggtagctagatgtttgctaatgactggctctgagcagggtgttcactgtgttgggggctgcacatggctgcagcagaggccttcctttgaggacgacagtgtggagtggggacgtttacatgctcctagtaaattcataatcaatttctaattgaagccctcaggattcagctgggcgtgggcttcattaccacgccgccatgtttcccccgggtaacaatgagccgtagctcattcccacagtttcctcattcctctgtcttcactgagggtggtgattagcagggcggggtggggaaatgtatcagggtaaggaaggcaggaagaggaggagcagatcccgggattcgggggagttgggccttagcccagcagctgtcctgagggtgtcgcttaactgcccctgggcggccagcctagaagtcctcaaagggagtctggaagggaacaaatggcccctctgcgtggaggcgctcgtcagggtttacaaaagcaaaacacagctgggcgcagtggctcacgcctgtaatcccagccgaggcaggcagatcacctggggtcaggagttcgagactagcctggcgaacgtggtgaaaccccgtctctactaaaaatataaaaattaggcatggtggtgcatgcctgtagtcccagctactcgggaggccgaggcaggagaatcacttgaacctaggaggcggagattgcagtgagccaagactgcaccattgcgctccagcctgggagagacagtctcaaaaaaaaaaaaaaaaaaacagtggttcggggtgggggaaaaaccccgggagctaccacgaatgcccaacgagaggaacatggtgaggaaaatcataataggctgctttttttatattactctgtggttaaaatcttctgtttttgaattttaaatgataatgagaaaatgctcacgatataaattcatattgcaaaatataaagtaagtgtctcacccatgcaaaaatcgcatcaagaaacaccaggagtttatctgagcagactgtcgagagtggttttctcaatgtagtggagtgtgatggttttattttcttctgtcattaattttttcaaaaaatatctatagtgagcatgtgttacatttataatcagaaagtagcagattgtttgaaatgatcatgagatctctatctagttgggacaataacgattgaaccgtgtcatgtgatatggagagatacccgcagcgtccccctcctcgccctctaccccgttctgcacccgccgtggtgtggccgggcagctagtcgctcactcaccagtccctggccactcgtgtgccgagcagcagagcagcttccggggcctcacaggtggccatgggaggagcatggtgtacgggaaagacaaggcctgcagtgagtagctgcagtgcaccgagccccactccccactggccagctgtctggttttaggcaagtcccccaacactctagtctcggttttgccgacatgagaagggatggtggggacagagacgccctgccttggggagtcaggatgcctccagggtctggcacacatcaggttcctgataaatatttcctgctgggtgtggcggcgcgagcctgtggtcccagctactcagcaggctgaggcaggaggatggcttggacccaggagatggaggctgcagtgagccatgatgacaccactgcactccagctagggcaatagagcaagaccctgactctaagaggaaaaaaagaaaagctgcttgaaagaagataaacaacatgtatcagatgtcactctgaccgctacacagcagcatgtgagccgtaggttaagaggtgctcctctgttggtaacgtacctgctgaatttgtgttttctccgccttcctttccaccccaaccatgctttacagagagagtttcctcaccttggggtgttttcaagtctgtcacctatacctggtttcaccaaatggcttctggggcttctgaactcgcaaacgaaggagcatgggaggaatgaactctttacagattcggaatgtaaggaaatctcggagatcacaggtggccccattaacgagaccctcaagctcctcctcagcagcagcgagtgggtgcagtcggagaagctggtgcgggcgctgcagactccgctgatgaggctgtgcgcctggtacctgtatggagagaagcaccgcggctacgcgctgaaccccgtggccaacttccacctgcagaacggggcggtgctgtggcgcatcaactggatggcggatgtgagcctcagaggcatcaccggctcctgcggcctgatggccaactaccgctacttcctggaggagacgggccccaacagcacctcctacctcggctccaagatcatcaaagcctctgagcaggtcctcagcctagtggcccagtttcaaaagaacagcaagctctgacagtaaacctctcctaaagcacagggccccggctaagaaaacgatcattttcaggaggggccgggagttatgtatctgaagcagctttccaagcaaagccaaagttgactgtgttcttgtcccgcagccggtccacactgtgaggccaggcctcaacttccctcaccctgggcgtgacatgcacccagtgcaagacggttgtgggtgcgggtgcacacaaatgagtgggttgctgtgctgtctccggaagattctgtcgttgcccttggcctggctccctgcccggggctggtgctgtggtacctacatcttcaggaagctgtgcagcctctgccattgccatcccagggggatctggcatcctcctaaggaccggggcgcgtggcccagataagaataggtgttcctttgtgctcataaaacagaatgcggcgatggttgctttagccgtttctcaccatgcaatgcagagggacaaagggctgtgctacacttcccagttacattctgaagctcataaatgtatgagaaggtttgtgattttgcacaaggtgtgtgtagtaagttaaattgttgaacacaaaaatgttgctgcttgaggcataagttggataataggctttaaatgatcagggattcaggttcataatgaacttcacagtaaagaacacgtttgttctgt

SEQ ID NO: 12759 - DNA, 2372 bp, Homo sapiens
  source 1..2372: mol_type = unassigned DNA
ctccgggcgcctccagctccggctcgggctccggctccggctccgggcgccgaccaggtccccttggcccccgccgcgcgccctccaacctgctgctgccgccgccgcgccccccaggctctgccagctacccgcgctctgagcccggggccagattcccatggaagcgccgcgatgttcgccccccggctgctggatttccagaagacgaaatacgcgaggttcatgaaccaccgagtccctgcccacaagaggtaccagcccacagagtatgaacatgcggccaactgtgccacccatgctttctggatcatccccagcatcctgggcagctccaacctctacttcctgtcggacgatgactgggagaccatctctgcctggatctacggcctcggcctctgcggcctcttcgtggtgtccactgtgtttcacaccatctcctggaagaagagccacctcaggatggtggaacactgtctacacatgttcgaccggatggtcatctatttcttcatagcggcttcctacgcaccctggctgaaccttcgggagctgggcccctgggcctcccacatgcgctggctggtctggattatggcttccgtgggcaccatctatgtcttcttcttccatgagcggtacaagcttgtggagcttctctgctacgtcgtaatgggcttcttccccgccctggtcatcctctccatggcggggaaactgaggcctggcatgacttgtctaaagaggcagtaggccagcccaacaccgagggcatctgggagctggtgaccggaggggtcttctactgcctgggcatggtcttcttcaagagtgacgggaggatcccctttgcccacgccatctggcatctctttgtagcatttggtgctggtacccactactatgccatctggaggtacctctatctgcccagcaccctgcagaccaaggtgtccaaatgaggtgacccagacttgagaggtcgtttgggctttaggagtggagcacgtttctgtgaacgttaacccagagcacagcgccaaggcctgtcttccctttattgggtagagttcttgatggctccaaggtgacttctggtgacagccagatcatccctcgagtccccagcgagaaagaaagcatttagccattcttacagaggagaaattaaccctgtaatgtgtttctattttagatgagtgtttcctaatacaagcaacattaacatcttcagaaaaggaagcaggcatggtcctggaaaattggggaatgacgggccaatctgtgtttcctaaggtcctgaagaatctggcaaagagtcctgtgggttgtttatacctgggtggccagggcctccctctctgttaccaaagtccaggctggcgaattgtctctggttcagggaaaggggacagcccagcttgaagatgagggatggtgaatggctgtgaccatggcagacatcaccaatcaagtgcagcacatgggtgatgtcagaattcttcccagcacagtgttctgggcagccagtaccaatcaatttggcactcatgatgggacctctttgcccttcctgtctggtgtgctctgaaatgggataatggccagagtagctgaaaatctccaaatgggcatttgcatgcctatctcctcatctccccctcccttttgggaaactcctggagtaggcagtttgggggcggtagagggaaactgaggcgcacacccatgcagcccctgatgttctgttccaccgtagttgattctcagtagagttgggaatgaggatgctgttacttggccatttcttcccatctccaaaaatccagagacattacgagagctattcattcataagatggggcaaacagcccccaggcacttgctccctgctccatacttaaggtttgtgatgccaacatttggattctctcttggtgccaatcagtggctgttagaggctactcaggtgtaccccaaacagaaggcacatggatctggggcgactgttccaggtcctcccaacctctgaagtgctcagtagcccaacaacaaggctgctgggggcctgttcttcagcccccgtcagggcggggccagcctctctgtccaatgctgcctggacatttactggggaggtgagtagcaggcccagctccaggatctgaattggaatctcagattctctggataaagaatctgtctcaagtcaggaggtcctcattctgcgactcccaaccagggtggagtgggcacagacaggatgccttatgcttatctctagcacattccagggggttccagggttcctgcacctggaatccagtgtgtccaagccagtattaaattatctcaacacattccacaga

SEQ ID NO: 12760 - DNA, 2415 bp, Homo sapiens
  source 1..2415: mol_type = unassigned DNA
ctcgggatttggcgtcggcggctccgggcgcctccagctccggctcgggctccggctccggctccgggcgccgaccaggtccccttggcccccgccgcgcgccctccaacctgctgctgccgccgccgcgccccccaggctctgccagctacccgcgctctgagcccggggccagattcccatggaagcgccgcgatgttcgccccccggctgctggatttccagaagacgaaatacgcgaggttcatgaaccaccgagtccctgcccacaagaggtaccagcccacagagtatgaacatgcggccaactgtgccacccatgctttctggatcatccccagcatcctgggcagctccaacctctacttcctgtcggacgatgactgggagaccatctctgcctggatctacggcctcggcctctgcggcctcttcgtggtgtccactgtgtttcacaccatctcctggaagaagagccacctcaggatggtggaacactgtctacacatgttcgaccggatggtcatctatttcttcatagcggcttcctacgcaccctggctgaaccttcgggagctgggcccctgggcctcccacatgcgctggctggtctggattatggcttccgtgggcaccatctatgtcttcttcttccatgagcgaacagggagctgtgtgcagtttcttcgtggggaggcatgtcctaaggccggcacggcttgtcttcctgccaggtacaagcttgtggagcttctctgctacgtcgtaatgggcttcttccccgccctggtcatcctctccatgcccaacaccgagggcatctgggagctggtgaccggaggggtcttctactgcctgggcatggtcttcttcaagagtgacgggaggatcccctttgcccacgccatctggcatctctttgtagcatttggtgctggtacccactactatgccatctggaggtacctctatctgcccagcaccctgcagaccaaggtgtccaaatgaggtgacccagacttgagaggtcgtttgggctttaggagtggagcacgtttctgtgaacgttaacccagagcacagcgccaaggcctgtcttccctttattgggtagagttcttgatggctccaaggtgacttctggtgacagccagatcatccctcgagtccccagcgagaaagaaagcatttagccattcttacagaggagaaattaaccctgtaatgtgtttctattttagatgagtgtttcctaatacaagcaacattaacatcttcagaaaaggaagcaggcatggtcctggaaaattggggaatgacgggccaatctgtgtttcctaaggtcctgaagaatctggcaaagagtcctgtgggttgtttatacctgggtggccagggcctccctctctgttaccaaagtccaggctggcgaattgtctctggttcagggaaaggggacagcccagcttgaagatgagggatggtgaatggctgtgaccatggcagacatcaccaatcaagtgcagcacatgggtgatgtcagaattcttcccagcacagtgttctgggcagccagtaccaatcaatttggcactcatgatgggacctctttgcccttcctgtctggtgtgctctgaaatgggataatggccagagtagctgaaaatctccaaatgggcatttgcatgcctatctcctcatctccccctcccttttgggaaactcctggagtaggcagtttgggggcggtagagggaaactgaggcgcacacccatgcagcccctgatgttctgttccaccgtagttgattctcagtagagttgggaatgaggatgctgttacttggccatttcttcccatctccaaaaatccagagacattacgagagctattcattcataagatggggcaaacagcccccaggcacttgctccctgctccatacttaaggtttgtgatgccaacatttggattctctcttggtgccaatcagtggctgttagaggctactcaggtgtaccccaaacagaaggcacatggatctggggcgactgttccaggtcctcccaacctctgaagtgctcagtagcccaacaacaaggctgctgggggcctgttcttcagcccccgtcagggcggggccagcctctctgtccaatgctgcctggacatttactggggaggtgagtagcaggcccagctccaggatctgaattggaatctcagattctctggataaagaatctgtctcaagtcaggaggtcctcattctgcgactcccaaccagggtggagtgggcacagacaggatgccttatgcttatctctagcacattccagggggttccagggttcctgcacctggaatccagtgtgtccaagccagtattaaattatctcaacacattccacaga

SEQ ID NO: 12761 - DNA, 2335 bp, Homo sapiens
  source 1..2335: mol_type = unassigned DNA
gctcgggatttggcgtcggcggctccgggcgcctccagctccggctcgggctccggctccggctccgggcgccgaccaggtccccttggcccccgccgcgcgccctccaacctgctgctgccgccgccgcgccccccaggctctgccagctacccgcgctctgagcccggggccagattcccatggaagcgccgcgatgttcgccccccggctgctggatttccagaagacgaaatacgcgaggttcatgaaccaccgagtccctgcccacaagaggtaccagcccacagagtatgaacatgcggccaactgtgccacccatgctttctggatcatccccagcatcctgggcagctccaacctctacttcctgtcggacgatgactgggagaccatctctgcctggatctacggcctcggcctctgcggcctcttcgtggtgtccactgtgtttcacaccatctcctggaagaagagccacctcaggatggtggaacactgtctacacatgttcgaccggatggtcatctatttcttcatagcggcttcctacgcaccctggctgaaccttcgggagctgggcccctgggcctcccacatgcgctggctggtctggattatggcttccgtgggcaccatctatgtcttcttcttccatgagcggtacaagcttgtggagcttctctgctacgtcgtaatgggcttcttccccgccctggtcatcctctccatgcccaacaccgagggcatctgggagctggtgaccggaggggtcttctactgcctgggcatggtcttcttcaagagtgacgggaggatcccctttgcccacgccatctggcatctctttgtagcatttggtgctggtacccactactatgccatctggaggtacctctatctgcccagcaccctgcagaccaaggtgtccaaatgaggtgacccagacttgagaggtcgtttgggctttaggagtggagcacgtttctgtgaacgttaacccagagcacagcgccaaggcctgtcttccctttattgggtagagttcttgatggctccaaggtgacttctggtgacagccagatcatccctcgagtccccagcgagaaagaaagcatttagccattcttacagaggagaaattaaccctgtaatgtgtttctattttagatgagtgtttcctaatacaagcaacattaacatcttcagaaaaggaagcaggcatggtcctggaaaattggggaatgacgggccaatctgtgtttcctaaggtcctgaagaatctggcaaagagtcctgtgggttgtttatacctgggtggccagggcctccctctctgttaccaaagtccaggctggcgaattgtctctggttcagggaaaggggacagcccagcttgaagatgagggatggtgaatggctgtgaccatggcagacatcaccaatcaagtgcagcacatgggtgatgtcagaattcttcccagcacagtgttctgggcagccagtaccaatcaatttggcactcatgatgggacctctttgcccttcctgtctggtgtgctctgaaatgggataatggccagagtagctgaaaatctccaaatgggcatttgcatgcctatctcctcatctccccctcccttttgggaaactcctggagtaggcagtttgggggcggtagagggaaactgaggcgcacacccatgcagcccctgatgttctgttccaccgtagttgattctcagtagagttgggaatgaggatgctgttacttggccatttcttcccatctccaaaaatccagagacattacgagagctattcattcataagatggggcaaacagcccccaggcacttgctccctgctccatacttaaggtttgtgatgccaacatttggattctctcttggtgccaatcagtggctgttagaggctactcaggtgtaccccaaacagaaggcacatggatctggggcgactgttccaggtcctcccaacctctgaagtgctcagtagcccaacaacaaggctgctgggggcctgttcttcagcccccgtcagggcggggccagcctctctgtccaatgctgcctggacatttactggggaggtgagtagcaggcccagctccaggatctgaattggaatctcagattctctggataaagaatctgtctcaagtcaggaggtcctcattctgcgactcccaaccagggtggagtgggcacagacaggatgccttatgcttatctctagcacattccagggggttccagggttcctgcacctggaatccagtgtgtccaagccagtattaaattatctcaacaca

SEQ ID NO: 12762 - DNA, 778 bp, Homo sapiens
  source 1..778: mol_type = unassigned DNA
gctcgggatttggcgtcggcggctccgggcgcctccagctccggctcgggctccggctccggctccgggcgccgaccaggtccccttggcccccgccgcgcgccctccaacctgctgctgccgccgccgcgccccccaggctctgccagctacccgcgctctgagcccggggccagattcccatggaagcgccgcgatgttcgccccccggctgctggatttccagaagacgaaatacgcgaggttcatgaaccaccgagtccctgcccacaagaggtaccagcccacagagtatgaacatgcggccaactgtgccacccatgctttctggatcatccccagcatcctgggcagctccaacctctacttcctgtcggacgatgactgggagaccatctctgcctggatctacggcctcggcctctgcggcctcttcgtggtgtccactgtgtttcacaccatctcctggaagaagagccacctcaggatggtggaacactgtctacacatgttcgaccggatggtcatctatttcttcatagcggcttcctacgcaccctggctgaaccttcgggagctgggcccctgggcctcccacatgcgctggctggtctggattatggcttccgtgggcaccatctatgtcttcttcttccatgagcggtacaagcttgtggagcttctctgctacgtcgtaatgggcttcttccccgccctggtcatcctctccatggcggggaaactgaggcctggcatgacttgtctaaagaggcagtag

SEQ ID NO: 12763 - DNA, 412 bp, Homo sapiens
  source 1..412: mol_type = unassigned DNA
aaaaaccggaaaagaggagaagagcaaacaggcactttgaggaacaatcccctttaactccaagccgacagcggtctaggaattcaagttcagtgcctaccgaagacaaaggcgccccgagggagtggcggtgcgaccccagggcgtgggcccggccgcggagcccacactgcccggctgacccggtggtctcggaccatgtctcccgccccaagacccccccgttgtctcctgctccccctgctcacgctcggcaccgcgctcgcctccctcggctcggcccaaagcagcagcttcagccccgaatccttggaagaactttacaactggggcgaactcccccttccccgattcccttgggctctgctctcagctctggaaccgcctgataaacatttggactccgctcaaa

SEQ ID NO: 12764 - DNA, 582 bp, Homo sapiens
  source 1..582: mol_type = unassigned DNA
atgcgcgagagtttgttgtttcttcgacttcccagctctccagcgctctcccgccggcgcgccctccgatgggcgcttcggcctccccgggtggcccaggccttcagcggacgagtctgcggccaggcctggctacagcaatatggctacctgcctcccggggacctacgtacccacacacagcgctcaccccagtcactctcagcggccatcgctgccatgcagaagttttacggcttgcaagtaacaggcaaagctgatgcagacaccatgaaggccatgaggcgcccccgatgtggtgttccagacaagtttggggctgagatcaaggccaatgttcgaaggaagcgctacgccatccagggtctcaaatggcaacataatgaaatcactttctgcatccagaattacacccccaaggtgggcgagtatgccacatacgaggccattcgcaaggcgttccgcgtgtgggagagtgccacaccactgcgcttccgcgaggtgccctatgcctacatccgtgagggccatgagaagcaggccgacatcatgatcttctttgccgagggcttccatggcgac

SEQ ID NO: 12765 - DNA, 575 bp, Homo sapiens
  source 1..575: mol_type = unassigned DNA
ctgatgcagacaccatgaaggccatgaggcgcccccgatgtggtgttccagacaagtttggggctgagatcaaggccaatgttcgaaggaagcgctacgccatccagggtctcaaatggcaacataatgaaatcactttctggtgagtccaacaggcaagcaacctttctcacatctggttattatttcctacccattgtgcttatgcagggactcagagaccccctgccccactcccctcagttcctgggaagcatccgtgggagtggggaggaaaatggctctcatccttgagagaggtgtagccatcaagggtgcaccccagtgccagagagccagagcctgaggatcccttgttcttgagacagaggcgttgcgcatgaggtagcaggaagagctgggtcaggcagaggtggctgggccgcgcagtcagacctgggagagtgcagggaaggagaatgttgcccctctttatcctaacacaccccatcctctccccacgtggctggacctcagcatccagaattacacccccaaggtgggcgagtatgccacatacgaggccattcgcaagg

SEQ ID NO: 12766 - DNA, 3732 bp, Homo sapiens
  source 1..3732: mol_type = unassigned DNA
accagaggagagagcgagagagggaaccagaccccagttcgccgactaagcagaagaaagatcaaaaaccggaaaagaggagaagagcaaacaggcactttgaggaacaatcccctttaactccaagccgacagcggtctaggaattcaagttcagtgcctaccgaagacaaaggcgccccgagggagtggcggtgcgaccccagggcgtgggcccggccgcggagcccacactgcccggctgacccggtggtctcggaccatgtctcccgccccaagacccccccgttgtctcctgctccccctgctcacgctcggcaccgcgctcgcctccctcggctcggcccaaagcagcagcttcagccccgaagcctggctacagcaatatggctacctgcctcccggggacctacgtacccacacacagcgctcaccccagtcactctcagcggccatcgctgccatgcagaagttttacggcttgcaagtaacaggcaaagctgatgcagacaccatgaaggccatgaggcgcccccgatgtggtgttccagacaagtttggggctgagatcaaggccaatgttcgaaggaagcgctacgccatccagggtctcaaatggcaacataatgaaatcactttctgcatccagaattacacccccaaggtgggcgagtatgccacatacgaggccattcgcaaggcgttccgcgtgtgggagagtgccacaccactgcgcttccgcgaggtgccctatgcctacatccgtgagggccatgagaagcaggccgacatcatgatcttctttgccgagggcttccatggcgacagcacgcccttcgatggtgagggcggcttcctggcccatgcctacttcccaggccccaacattggaggagacacccactttgactctgccgagccttggactgtcaggaatgaggatctgaatggaaatgacatcttcctggtggctgtgcacgagctgggccatgccctggggctcgagcattccagtgacccctcggccatcatggcacccttttaccagtggatggacacggagaattttgtgctgcccgatgatgaccgccggggcatccagcaactttatgggggtgagtcagggttccccaccaagatgccccctcaacccaggactacctcccggccttctgttcctgataaacccaaaaaccccacctatgggcccaacatctgtgacgggaactttgacaccgtggccatgctccgaggggagatgtttgtcttcaaggagcgctggttctggcgggtgaggaataaccaagtgatggatggatacccaatgcccattggccagttctggcggggcctgcctgcgtccatcaacactgcctacgagaggaaggatggcaaattcgtcttcttcaaaggagacaagcattgggtgtttgatgaggcgtccctggaacctggctaccccaagcacattaaggagctgggccgagggctgcctaccgacaagattgatgctgctctcttctggatgcccaatggaaagacctacttcttccgtggaaacaagtactaccgtttcaacgaagagctcagggcagtggatagcgagtaccccaagaacatcaaagtctgggaagggatccctgagtctcccagagggtcattcatgggcagcgatgaagtcttcacttacttctacaaggggaacaaatactggaaattcaacaaccagaagctgaaggtagaaccgggctaccccaagtcagccctgagggactggatgggctgcccatcgggaggccggccggatgaggggactgaggaggagacggaggtgatcatcattgaggtggacgaggagggcggcggggcggtgagcgcggctgccgtggtgctgcccgtgctgctgctgctcctggtgctggcggtgggccttgcagtcttcttcttcagacgccatgggacccccaggcgactgctctactgccagcgttccctgctggacaaggtctgacgcccaccgccggcccgcccactcctaccacaaggactttgcctctgaaggccagtggcagcaggtggtggtgggtgggctgttcccatcgtcccgagccccctccccgcagcctccttgcttctctctgtcccctggctggcctccttcaccctgaccgcctccctccctcctgccccggcattgcatcttccctagataggtcccctgagggctgagtgggagggcggccctttccagcctctgcccctcaggggaaccctgtagctttgtgtctgtccagccccatctgaatgtgttgggggctctgcacttgaaggcaggaccctcagacctcgctggtaaaggtcaaatggggtcatctgctccttttccatcccctgacataccttaacctctgaactctgacctcaggaggctctgggcactccagccctgaaagccccaggtgtacccaattggcagcctctcactactctttctggctaaaaggaatctaatcttgttgagggtagagaccctgagacagtgtgagggggtggggactgccaagccaccctaagaccttgggaggaaaactcagagagggtcttcgttgctcagtcagtcaagttcctcggagatctgcctctgcctcacctaccccagggaacttccaaggaaggagcctgagccactggggactaagtgggcagaagaaacccttggcagccctgtgcctctcgaatgttagccttggatggggctttcacagttagaagagctgaaaccaggggtgcagctgtcaggtagggtggggccggtgggagaggcccgggtcagagccctgggggtgagcctgaaggccacagagaaagaaccttgcccaaactcaggcagctggggctgaggcccaaaggcagaacagccagagggggcaggaggggaccaaaaaggaaaatgaggacgtgcagcagcattggaaggctggggccgggcaggccaggccaagccaagcagggggccacagggtgggctgtggagctctcaggaagggccctgaggaaggcacacttgctcctgttggtccctgtccttgctgcccaggcagcgtggaggggaagggtagggcagccagagaaaggagcagagaaggcacacaaacgaggaatgaggggcttcacgagaggccacagggcctggctggccacgctgtcccggcctgctcaccatctcagtgaggggcaggagctggggctcgcttaggctgggtccacgcttccctggtgccagcacccctcaagcctgtctcaccagtggcctgccctctcgctcccccacccagcccacccattgaagtctccttgggccaccaaaggtggtggccatggtaccggggacttgggagagtgagacccagtggagggagcaagaggagagggatgtcgggggggtggggcacggggtaggggaaatggggtgaacggtgctggcagttcggctagatttctgtcttgtttgtttttttgttttgtttaatgtatatttttattataattattatatatgaattccattcaaatcgttcctttttgttaacaaggggcatggggaggggtgggggtgggggggcagaggcgtctgaccccaggaacctgcagggcggggctgggtcggtgccctctaaggacaattttgaccttgttcaacctttccacaaagaataaattgtgtttcacattc

SEQ ID NO: 12767 - DNA, 560 bp, Homo sapiens
  source 1..560: mol_type = unassigned DNA
agaggagagagcgagagagggaaccagaccccagttcgccgactaagcagaagaaagatcaaaaaccggaaaagaggagaagagcaaacaggcactttgaggaacaatcccctttaactccaagccgacagcggtctaggaattcaagttcagtgcctaccgaagacaaaggcgccccgagggagtggcggtgcgaccccagggcgtgggcccggccgcggagcccacactgcccggctgacccggtggtctcggaccatgtctcccgccccaagacccccccgttgtctcctgctccccctgctcacgctcggcaccgcgctcgcctccctcggctcggcccaaagcagcagcttcagccccgaagcctggctacagcaatatggctacctgcctcccggggacctacgtacccacacacagcgctcaccccagtcactctcagcggccatcgctgccatgcagaagttttacggcttgcaagtaacaggcaaagctgatgcagacaccatgaagtaagtgctagaccctggcaggagttctgcctagcatccactgac

SEQ ID NO: 12768 - DNA, 1740 bp, Homo sapiens
  source 1..1740: mol_type = unassigned DNA
gagggaaccagaccccagttcgccgactaagcagaagaaagatcaaaaaccggaaaagaggagaagagcaaacaggcactttgaggaacaatcccctttaactccaagccgacagcggtctaggaattcaagttcagtgcctaccgaagacaaaggcgccccgagggagtggcggtgcgaccccagggcgtgggcccggccgcggagcccacactgcccggctgacccggtggtctcggaccatgtctcccgccccaagacccccccgttgtctcctgctccccctgctcacgctcggcaccgcgctcgcctccctcggctcggcccaaagcagcagcttcagccccgaagcctggctacagcaatatggctacctgcctcccggggacctacgtacccacacacagcgctcaccccagtcactctcagcggccatcgctgccatgcagaagttttacggcttgcaagtaacaggcaaagctgatgcagacaccatgaaggccatgaggcgcccccgatgtggtgttccagacaagtttggggctgagatcaaggccaatgttcgaaggaagcgctacgccatccagggtctcaaatggcaacataatgaaatcactttctgcatccagaattacacccccaaggtgggcgagtatgccacatacgaggccattcgcaaggcgttccgcgtgtgggagagtgccacaccactgcgcttccgcgaggtgccctatgcctacatccgtgagggccatgagaagcaggccgacatcatgatcttctttgccgagggcttccatggcgacagcacgcccttcgatggtgagggcggcttcctggcccatgcctacttcccaggccccaacattggaggagacacccactttgactctgccgagccttggactgtcaggaatgaggatctgaatggaaatgacatcttcctggtggctgtgcacgagctgggccatgccctggggctcgagcattccagtgacccctcggccatcatggcacccttttaccagtggatggacacggagaattttgtgctgcccgatgatgaccgccggggcatccagcaactttatgggggtgagtcagggttccccaccaagatgccccctcaacccaggactacctcccggccttctgttcctgataaacccaaaaaccccacctatgggcccaacatctgtgacgggaactttgacaccgtggccatgctccgaggggagatgtttgtcttcaaggagcgctggttctggcgggtgaggaataaccaagtgatggatggatacccaatgcccattggccagttctggcggggcctgcctgcgtccatcaacactgcctacgagaggaaggatggcaaattcgtcttcttcaaaggagacaagcattgggtgtttgatgaggcgtccctggaacctggctaccccaagcacattaaggagctgggccgagggctgcctaccgacaagattgatgctgctctcttctggatgcccaatggaaagacctacttcttccgtggaaacaagtactaccgtttcaacgaagagctcagggcagtggatagcgagtaccccaagaacatcaaagtctgggaagggatccctgagtctcccagagggtcattcatgggcagcgatgaagatgttatccagtgggagttttgcaaaacacagctggagccagtggaggagcctggggaggggggactgccagagagaagag

SEQ ID NO: 12769 - DNA, 4250 bp, Homo sapiens
  source 1..4250: mol_type = unassigned DNA
cgcggggtgggctggagaggtttcctgccgtctgggaagcgtaaacggaccgcccacctgtcgggcctcggccgcccgcacctgcttgtgagaagcctgcggctggggcaccgcccccggtccccgcccgggtccgcgcattgggagcacactggccctttaagagcgcggcggccgcggcgcgcggggaggagggctgggagcgcccggagccgcgctgaactcgccggggacgtcgggcgcccgctccttggctggctcgcttgctctctcgctcgctctctcgggtcggctccctgcgcctcctcccgggactgcttggggacccgggcccggtcgggcgcggcggcgagcagaatccccgtgcaggaggcgcgcgctccgggcagcgcccggccccgggcatggacagagggagctgggcgcgcagggagcgccgcgggaccgggcggccggagcgctgagccagacaaaggctccggagttgcgcttgctctcgggagccgggccccaggcgctgggcgccgaggctgcggaacctcgccgggggcagctccggtcggccccctttcccgccggctggttccgagctcccggacctgccctgcccgcttctcctcgggcttgggaatttgccgaggcgacctaggcggctccggcggggaccgggagcccgaggtccgcggcgcgcctgccgggccaggagccagggagcgtcgcaagtttccaaggcgcgtgcgaggatccggcgtgcagtgttccgagctgggctgggcgccgagagcatgggcagcgacccgagcgcgcccggacggccgggctggacgggcagcctcctcggcgaccgggaggaggcggcgcggccgcgactgctgccgctgctcctggtgcttctgggctgcctgggccttggcgtagcggccgaagacgcggaggtccatgccgagaactggctgcggctttatggctacctgcctcagcccagccgccatatgtccaccatgcgttccgcccagatcttggcctcggcccttgcagagatgcagcgcttctacgggatcccagtcaccggtgtgctcgacgaagagaccaaggagtggatgaagcggccccgctgtggggtgccagaccagttcggggtacgagtgaaagccaacctgcggcggcgtcggaagcgctacgccctcaccgggaggaagtggaacaaccaccatctgacctttagcatccagaactacacggagaagttgggctggtaccactcgatggaggcggtgcgcagggccttccgcgtgtgggagcaggccacgcccctggtcttccaggaggtgccctatgaggacatccggctgcggcgacagaaggaggccgacatcatggtactctttgcctctggcttccacggcgacagctcgccgtttgatggcaccggtggctttctggcccacgcctatttccctggccccggcctaggcggggacacccattttgacgcagatgagccctggaccttctccagcactgacctgcatggaaacaacctcttcctggtggcagtgcatgagctgggccacgcgctggggctggagcactccagcaaccccaatgccatcatggcgccgttctaccagtggaaggacgttgacaacttcaagctgcccgaggacgatctccgtggcatccagcagctctacggtaccccagacggtcagccacagcctacccagcctctccccactgtgacgccacggcggccaggccggcctgaccaccggccgccccggcctccccagccaccacccccaggtgggaagccagagcggcccccaaagccgggccccccagtccagccccgagccacagagcggcccgaccagtatggccccaacatctgcgacggggactttgacacagtggccatgcttcgcggggagatgttcgtgttcaagggccgctggttctggcgagtccggcacaaccgcgtcctggacaactatcccatgcccatcgggcacttctggcgtggtctgcccggtgacatcagtgctgcctacgagcgccaagacggtcgttttgtctttttcaaaggtgaccgctactggctctttcgagaagcgaacctggagcccggctacccacagccgctgaccagctatggcctgggcatcccctatgaccgcattgacacggccatctggtgggagcccacaggccacaccttcttcttccaagaggacaggtactggcgcttcaacgaggagacacagcgtggagaccctgggtaccccaagcccatcagtgtctggcaggggatccctgcctcccctaaaggggccttcctgagcaatgacgcagcctacacctacttctacaagggcaccaaatactggaaattcgacaatgagcgcctgcggatggagcccggctaccccaagtccatcctgcgggacttcatgggctgccaggagcacgtggagccaggcccccgatggcccgacgtggcccggccgcccttcaacccccacgggggtgcagagcccggggcggacagcgcagagggcgacgtgggggatggggatggggactttggggccggggtcaacaaggacgggggcagccgcgtggtggtgcagatggaggaggtggcacggacggtgaacgtggtgatggtgctggtgccactgctgctgctgctctgcgtcctgggcctcacctacgcgctggtgcagatgcagcgcaagggtgcgccacgtgtcctgctttactgcaagcgctcgctgcaggagtgggtctgaccacccagcgctcctgctaacggtgctcagggggcgcctgtggttctgagatggctcccaggggctccctccgcccccaggtaggggcccctctcagccctcacacaccctgtctgccccgccctcattatttatgtccaggtgtttgttttgttttgtttttggcaccttacttgaccatttgtttctgtttccccgactggggcagggtgtttagaattttctaaatgtagttctgctccagacagggaattaggcccccatcatcctctggcttggccacagccaggggagcagaggggcagaggcccacattggaagagcagcacctcctcagcctgaaccccagggctgtaactgccaggctctctttgcccagttggagactgtctggcccccctggtcccctccttcccaagtgagtctctctgggccttaggaagagccttccacccaggggcagccccaggccaaaggggacctggaagggaggtgggccgtggcccttgagtccccattgaggcttggttccttcccaatccagtggacttcgcagtccacttctgacagcctcagtgaccctggctccttgtgccagagaacccagcccacccccggcagcagcccccagctcccacctccccttgggcccacacctccttccctctctggagaaagggccctgggcctgcctcaccacggaccaaagggagtctgccagggcccctctccccagggaagcagcagcctcgcccctggcagagatgcctccctgagctagaaccctctgttccttccctgtgcctcctccctccctctccgactcacaccactagcctcaggggtctgagctccagctcctttgggcttcagctgccagtgtcctgagccccagggagagggggctggtgggtgcctaggcctgggcagtggatggccgtgaatgggtgcccacagtgtcaggcactgggcatgaggggttcctcccctccagctccctgtgcccccagggtcctgggaggagagacactggtggggataggccagccgcgcatcagactgtgaaccccacgaaggagcccattgtggcctaagaggctgccctcctgtgctcagccctgaggacagatgcctccttcctcttttccttcccaaagcaagcaagaggccgtggctgctgtgggaaatggtactgtacagctggctctacttccccatggccctgagcgagtggagtctgccacccaggatccccaaggcacttgagggggaaggattctgctggcctctgcgagtggtttcttgtgcactggcaccaagtgcgggtccggcagcttctgccccctgcagaaccggagagccagctaaggggtggggctgcgggggttccgtgtccacccccatacatttatttctgtaaataatgtgcactgaataaattgtacagccggcaaa

SEQ ID NO: 12770 - DNA, 349 bp, Homo sapiens
  source 1..349: mol_type = unassigned DNA
ccagcactgacctgcatggaaacaacctcttcctggtggcagtgcatgagctgggccacgcgctggggctggagcactccagcaaccccaatgccatcatggcgccgttctaccagtggaaggacgttgacaacttcaagctgcccgaggacgatctccgtggcatccagcagctctacggtgcgtgggctgtgaccagcgggctctgcatgccgctctcaagtccctggccaatgaggagtaggcattgctgccatccccattttgtagatgaggaacccaaggctcagtgaggattagtgacttgcccacatcatttggggaataaatggtggtactggaaatgaaa

SEQ ID NO: 12771 - DNA, 11558 bp, Homo sapiens
  source 1..11558: mol_type = unassigned DNA
tctttgagccggaaccgccggtgaacttaggcgccacgttcccggtgactgaccccggaggatggtgaacaggaactactgctgaccctgtcttcgccgctgcctctcgggggctgccgagcgcggggcccctgtctcctccccttgcccggctgtgggtgaacctgcaggctccttacccacccggaggacttttttttgaaaggaaacgagggagggagggagagggagagagggagaaaacgaaggggagctcgtccatccattgaagcacagttcactatgatcttactcacattcagcactggaagacggttggatttcgtgcatcattcgggggtgtttttcttgcaaaccttgctttggattttatgtgctacagtctgcggaacggagcagtatttcaatgtggaggtttggttacaaaagtacggctaccttccaccgactgaccccagaatgtcagtgctgcgctctgcagagaccatgcagtctgccctagctgccatgcagcagttctatggcattaacatgacaggaaaagtggacagaaacacaattgactggatgaagaagccccgatgcggtgtacctgaccagacaagaggtagctccaaatttcatattcgtcgaaagcgatatgcattgacaggacagaaatggcagcacaagcacatcacttacagtataaagaacgtaactccaaaagtaggagaccctgagactcgtaaagctattcgccgtgcctttgatgtgtggcagaatgtaactcctctgacatttgaagaagttccctacagtgaattagaaaatggcaaacgtgatgtggatataaccattatttttgcatctggtttccatggggacagctctccctttgatggagagggaggatttttggcacatgcctacttccctggaccaggaattggaggagatacccattttgactcagatgagccatggacactaggaaatcctaatcatgatggaaatgacttatttcttgtagcagtccatgaactgggacatgctctgggattggagcattccaatgaccccactgccatcatggctccattttaccagtacatggaaacagacaacttcaaactacctaatgatgatttacagggcatccagaagatatatggtccacctgacaagattcctccacctacaagacctctaccgacagtgcccccacaccgctctattcctccggctgacccaaggaaaaatgacaggccaaaacctcctcggcctccaaccggcagaccctcctatcccggagccaaacccaacatctgtgatgggaactttaacactctagctattcttcgtcgtgagatgtttgttttcaaggaccagtggttttggcgagtgagaaacaacagggtgatggatggatacccaatgcaaattacttacttctggcggggcttgcctcctagtatcgatgcagtttatgaaaatagcgacgggaattttgtgttctttaaaggtaacaaatattgggtgttcaaggatacaactcttcaacctggttaccctcatgacttgataacccttggaagtggaattccccctcatggtattgattcagccatttggtgggaggacgtcgggaaaacctatttcttcaagggagacagatattggagatatagtgaagaaatgaaaacaatggaccctggctatcccaagccaatcacagtctggaaagggatccctgaatctcctcagggagcatttgtacacaaagaaaatggctttacgtatttctacaaaggaaaggagtattggaaattcaacaaccagatactcaaggtagaacctggatatccaagatccatcctcaaggattttatgggctgtgatggaccaacagacagagttaaagaaggacacagcccaccagatgatgtagacattgtcatcaaactggacaacacagccagcactgtgaaagccatagctattgtcattccctgcatcttggccttatgcctccttgtattggtttacactgtgttccagttcaagaggaaaggaacaccccgccacatactgtactgtaaacgctctatgcaagagtgggtgtgatgtagggttttttcttctttctttcttttgcaggagtttgtggtaacttgagattcaagacaagagctgttatgctgtttcctagctaggagcaggcttgtggcagcctgattcggggctgacctttcaaacccagagggttgctggtcctgcacatgagtggaaatacactcatggggaagcttccatgatgcacagtatctgctgttcttcagtcctttgtctttctttgtcattcagttctaggcctttcctctgcacgctcaatgcccagtaaaatttcaggattaactaaagaagaggagaaaaagaagaaaagattcttcttaaaagtttctaatgttattttccttctgaagtctgagcccatttctggggggagaaaaaaaaagcaaatcagaaaacccacggtttttctttttttctttttttctttttttctttttttgctttaaaacaaagggaaaaaagagtttaaacaaaaaacccacaattgaacttccaggaaagtgtgaagacccaaaacagctttgtctccaaagaagatagctctctgactgctttggatagtctcctacgcaccattttgtcaggtgggagatttggaatacacatgcaggacgttagactgttgggacagccattttccaacaaccaaggggccaaaatatctgcaatatagtaacagccttaataatacatccatttttcgttttatacagctgttctcagctatgtcctcagtgtttcatcgcatttatattcatagctattttcaaacacgaccttttaattgtttttgaagtatttctaaaccccttctttccaccttactcctccatcattgtgataatcttcccaagttgtattaggccattgccccaggccttccatgggtctgtcaggaatattcgttacaaagcagagcaagaagcagtatgtctctgaagtggattacagtggcagttattttacaaggatttgtgacactagtaacatacccgtgtaaccctttgagaactatcagaccagctttcagagtcttaggattgtcggtcttgcgatctgataaattatagaactgggcaatggtaaaaacagtcacaagttcaagaagttcaggtttttaaaacagatatcctataatgtcatataatttttaaatgatttacaagactacataaatgtgtttataacaaacagaaatgatgttacttgccaaaatttttctggcaaataaaaaaggtattttattaagattctcataaatctgaaattttatttgaaaaactgataatagcctaagtcttcttttcttttttttaggcatactgaatttctgttttaaaatccattgcatgaaaattcaatttgccttggtatatgcagttagcattgccattttaaaaatgaattaaaacggtgactctgaagttgcatgaatatcctccagtgcattacctattgcatgtccaccatagttctcaaagggttagtgtggcttctggcatttagccgtccatttgatcactgacagagccaagagaccaccaaagcatttcattgttgagtgtaatttgtcctaacagcagtattgtcattttcatgtgacctgcagagcaggtttgtatcaatatttttttcctagagaaaagtcagcaactgacagacctctttattgatttttaggagctgcttcttgcagtgaaaggctttacagccactgggctgtgaacttattagagatggtcagaatgaatgcaccccatgagtcagacattggctttgtgtgaaagccagctttgaggggattagcttttgaaacaatgaacagcttgccttgaacttgattattgatctattgactgtcattaacaacaacttaaacattgtcttctgtgaaaattttccttgaagagtcctgttctatgtctttgccctttgacctttaacttgcaaactggcacaaactgaaggaaatctggtgttgcttctccattggattagttgttctctaaaacctagtaagcatgagctgtttccttagagtggagagagtggtgatggcagatctgcagatggacactttgctctttacatgcacactctgaaaatgccctataggtagaagtgaattttaatttcattttaatataatttcaagtctaaattcatcattttagtacaaattacaaaaactataggaaaaaaaaaacctcaaatacttgaatggccagtgtggcttttatataaagcaggaattttatactagtaaaaatttcttactcatttgctaatacacatttccagatgatttttaatgagtgtaggtatacattcttatttggaaatggatagtttggctgccttgaatttatatttatactcaacgtagcatgaaaattagaatgccttttggttaaactacatgtttatgatttggttggggaaaatattttataattgtgggtggcatgctgcaaagccttgcagattgttatttcttacaacctgagcgtatatagtatgagcctaagaaaaaagaagagtaagaaaagaagaatggctttacagtaaaatatcatacaatgcagacaatattttaagaggatattggagattatgtacgcaagggccaagaaagcaagaaatgagaaccagagtcagccctgtagctttacttcagtgcttccattctagatgatgctgatattataaagagttagtcactgctgctaagcatggaggactatatacataagctcgtttatacagtgtttgcttgtgggagggtttaatccttttagggccttgatgtcaagaaaaaaataactggaaactatattttgctaaagatagaaatgaggaactgtgtcattttgggacatgtgcaaatcattgaggaactccatcaccctgcattgaaaattgatttttttttcctctaaaatgagaaagaaactgaataagcaatctgttgcctctttactcattcatcacaatatcctgattcgtcataaggctatcagtatataagggctagaaaataatcatagcattaagaaggaaggagtctatcattatgcttgaattctggcaaatgtcatgaataagggttgggtcatatttactttaatatgagacaagatttatgtgataagcaaaggcatataaggctgctcttttgaacagaacatttcagttatcaggctgtactattacaagagataagaagacaataaggacaatgtaatcacaaacagtgggattccatttgtttattgtacaccagctactttgtgggtatggttcctgactcctcttctacatgaggtttgggaaaaaagtctcaaaccaaatggaacagtgaaagggaaagtaattcatctagcacataagaatagtgattcaaaaccaatgcagaataaatttccatgggtcaataacataaggtgtcagttcagtgttactagagatatgcaaggcataaaatattttcatcaccccatcactaataacatgaaaagctcagacataggatttcccaaattgaaatgaaaacacattcatgcctgcaaaaataattctccttctgcttcatttctcattactttatctaatataaacacaaatgtaaacaaggtaatggtcttcatgtaaaatgaccatatagttaagaattttagtaaaatattgttgttctgtgtattattaaacaaatgcaatgaagtattaaaatagctgatcagtttgaatttcctgtaaagcagtaattccgcatcagaattgtagataaggttgtgaatttattgactcatttcagaacagtgtctgttgacatggcagtcagagcaggtgaatacagatgctctttctgattgcaaaggttatagagctaaattagacagcattatgtgatactagcaaagacaacttctgttataaatcagagggcaaggcttttctgaatcgatgtgataaattactaagtaatgattaccaaaaataattactaagtaataaaagatacagactggtttactgaaataagcaagtgttacatttaataattacctataatctttttttgttaacacataagcaagtgttacctttaataattacctataatctttttttgttaacacataatttggccatttcatatactgtgtacctattttcattccctctctgtgggtcattaaaaaacacaatgtggtggataagaacattgtccaaacttcactgctagttccaatacatagatgatggtgtgtaaactggattgtaggggtagtcatatttgcaagttctacatgttatgctaatatatctagtatggtacacatacacgcccacactttgtggatcttacagtggaataaatagtgtgtccatattaactaaactcaaagtgctatctgaagaggaatggatgttataagcagacagacagactgagttaaactgagtcatgaaaaaatatatattttaaagtttttggaatcatttccagaaactaataaagggaattatttactggtagtattgagtctgtgagattgtagtatatactgaaacaatcttctggatggtggtaaggtcttttttagcaaacacagtaaagagcttatttcatttctgatgctttcaagggcatattccaaagtatcacagatgtcaaatagaatatgctatataaaccaaaaatgtgcatttcagatgacctattacagcaatctcagccaatatgtaatatcacaaaatgtgtcaagtcaatcatataagaggatctaatcattcggctgtatttcatgtaccttcatgttgttgatatattgtgaccacaggaaataggtgccagagcatatgcagttaagttacaggctccacgttgcctaggagggaatcataactacatcagaaaatttttaacagttatatcttaaaaattagaattttatgtaataaataaagcggcaaccaggaatagcaacgcaacaaatatgaaagctaattattatatttagctttcatatttatataatatgatggaaatggaggaggaaaaatgagtcttttgttaaatataaagacaaactataacactccttgataatacaactggaaattttactttagcaagcataaaatagtggaggaaaaaaatccaacttcaagctctttgcactagtgatgattatgtgatatatcaatgtaatatttagccagtggtcattagatgttactgtgcttaaacacatctgatactcatgcattgccttacaggctaaaaatgtaagaggtaggtgttcagtaacctcaagttggaaagatatataatgttagaatcccctgagacaagccatttccctgaaatagaaatttacctcaatactcatgtaatctaagacacttggcgtagtagcaaagaagttgccttcatgttctagtctcatctaattgtgacctttgtctttcatgtacttctgaaatcattttccactttttccactggtgtgattttgaaacaattctgaaatatttcaggtaagattaataacatccaattacaaatatatgtttcaatattttatacgtatgtctactttgaaagttaaaccaatagtatagaaagcctaagaatgaacactgattggacatactcacagaaattaagggaaaaacacatattgtaaaattcctgtcaatgtttgagtagaatacagaagtacatagcagtcttcaatttttaaacacaattatgggcttataactggacgtgacatgcatcatttattagaacaatattatttatttatactaagtaaggatataagatcacagaagcttagtgttataacggagacttcacagacattcataactaatgttttctaaggcaaataagggcataaaccagaactcatggtcagtgcagagtaagtataaaaagttatgtatgaaagacatttatttatagagatttctgaggattctatgccttttcaacttaaagatgagtgtgtcttagaatttgttttatgcatcattggactggggatgatattcaaatgtgcactcagcgtgtcctcacattaaagggcacattgaacagtataggaaaatacatcataaactagaatgttgtacagattcatataactttcccatgtgctctgctgtagagctgaatttatatgcccttaaaaagggataagaatcaattaaatataaatacggaaatatacttatgttaggtcacttagcttcagagcaagatgtcattaacctttatttcacagagaaaaactggaagaaaagaatggtgaacaagaataaaatgataaactttttggcttatagagatgtttcttgggaattttttccacttgtttttatacatgaaaaaaatatcagtcacaatacagacatttctgtagtatttggtctgtgggtaaactggatcccaggcagaatactttttgacacaggcctttttatacatgctttatatatgatgaagctttggtgagatgtgactgcatggtaggatgcattttcctaggataggatatggtgctgcttgtacttgccaccttttatatgaatgtatgtcgctacattggcctgtcttgccaagacatggttgaatgaagcctggtgtgagctgtctatttgaaaagtcactaggatgcatgtttcatttgccgttacataatgccaatttgaacctgtttcctctatatattaacaatccaattgttaagataaaatatactttgcttgaatgaatgattttggtagtaatatgagcgttatccttaaatcaatgttacaatttttgctattactgaaataccgtcacagaggccacattattggctgtctataccattgcctgagtaaaattaggtttttaggtctttttggcatttacttcttttacagctgatgtggaatcaattattcctttatatgttcataagtacaaaatttcactatcttaattacttccaaacaaacaatttccaagcaagggtatgtgtgcctggtttttctgctcctccaattctaagatcgttatttgtttgccttctgtttctcacccaaaaatacagatggttgggaaagatacatcttattgagttgtcctatgcagtctctgtctatatttgcatttctttctattcctatcttgccttttttttttttttttacacagatttggttttcccttccctttgtgaaaaccagaattgagcagcattgtacatcagagatggtacccaggaaatgtctttgttcctcagtatttttcgtcaaaacttccatgcaaagacagtcccagcaaagttgacatacatcccaacctctctcattggcttttctaactttttatagagctattcccctgagaaaagtgaaatgctgagtatgatgggtattgcctgttgataggatagctaaggaaatttgcttttggagaatgtatcttaaataattatacaggaaagtagtcacagtatagtgttctgtttaaggtacatcatgggtacataaatgcctaaaaccttcatcctttggtctatttctctgtaagtgtaaattacatatatattagaaagagagatagaatcaaagaattaggggtgttacagaggcagctttttgctgccttggttttgactgtatcagcatttctattgcagacctctattttcaggggttttagagactcgaccataaaaatttgtttcaggcttaaaagttttgaaagatttttttaggtatctgattttaaacaaatagatcttgtttttatattataggagggaaataaatggagtttactagttcaattttgcgctaatataacttttaataaacttaactttttaaacaaaaacataaaatctaattagttcatagttggttgatgcttttttaaaagaatcaattattgaccttgagaaacttgcctgcttcatcagtatagtaacctatctttaagatattttaaaacgtgtatacctttattaacattatcttgattccagcggtggatcagtatgataatgcagatttatgacatccatataagctatctggtaatatagatttaggaatatatagtatatatgatacatatatatatatatatttactagatagattaaggagaaaaagctcccataaacttagtttgtcaaataaataccatatatttaaaaaatgcacagacatttatcattcagagtcagaatgagattcaagtaattgcaaagggaagttgtctcttgggtaaacaatacacattttatagcttcttgtgaaactaattttttcctttctatattgtggttatgggaaagtaaaagaattaaaattaatacagactttatttaaataacattaaactgtgaagcagagagaaacgccaggaaattaaatatttaggccattatcttgtggttgtctgacaatacttcacctttcttttaattccccatgatgttttcaattatggagagagtattaaaatctagatttaagtttctgcattgttctcattacactcaacactatttcattaagttcttgataatatgtagtcttctgtgtgcaaggaaagaaataaataacacatttatttgctgaatgagttttaaggtgtgcaagttgtagtgatgtttttcccacacaggattctatacacttataccatcttaaatctggcattttttttttcagatagcttctactgacaaacacaaagcttgtttgtgtgcaaatataaggctaaataaatggtgctaaagtgtattatgactgtcagataaaatcaggcaaaattttgtggtgcttaaattaattttttcattgattttattgatcagtgcattgaacagtgtttattattcacaagttgtcttttattagtaaatcaaggcctcatagcacattgttaaataaagtggttgactagtctatgtaacagctcaccaagctactatctcttttaactccttataatgttgcgtcattaaaggtcaaggggtcatgctattaatctcattgctatagaccattaacatgactgaacttttccacaaagtacttatgtttacaatgctataaccctttgactgctgcggcaacctttaaccacacaaatgtcacaagctagaatcatcagcatggttcttgccatggcaatcaaagagttaagggctgtgcagtgatttgttttgtatttattaatttatatttattttgtttccattcaaggaggggattaggggtggggcagtttttgtctgctgtaagtgtcttaacctagggaagggttaaatggctttttatactattgcatcttctgtatttaccatcaattcattgtgttgtaattaaaagaaactgtcaataaataagagaacagaaaaatg

SEQ ID NO: 12772 - DNA, 1512 bp, Homo sapiens
  source 1..1512: mol_type = unassigned DNA
atgatcttactcacattcagcactggaagacggttggatttcgtgcatcattcgggggtgtttttcttgcaaaccttgctttggattttatgtgctacagtctgcggaacggagcagtatttcaatgtggaggtttggttacaaaagtacggctaccttccaccgactgaccccagaatgtcagtgctgcgctctgcagagaccatgcagtctgccctagctgccatgcagcagttctatggcattaacatgacaggaaaagtggacagaaacacaattgactggatgaagaagccccgatgcggtgtacctgaccagacaagaggtagctccaaatttcatattcgtcgaaagcgatatgcattgacaggacagaaatggcagcacaagcacatcacttacagtataaagaacgtaactccaaaagtaggagaccctgagactcgtaaagctattcgccgtgcctttgatgtgtggcagaatgtaactcctctgacatttgaagaagttccctacagtgaattagaaaatggcaaacgtgatgtggatataaccattatttttgcatctggtttccatggggacagctctccctttgatggagagggaggatttttggcacatgcctacttccctggaccaggaattggaggagatacccattttgactcagatgagccatggacactaggaaatcctaatcatgatggaaatgacttatttcttgtagcagtccatgaactgggacatgctctgggattggagcattccaatgaccccactgccatcatggctccattttaccagtacatggaaacagacaacttcaaactacctaatgatgatttacagggcatccagaagatatatggtccacctgacaagattcctccacctacaagacctctaccgacagtgcccccacaccgctctattcctccggctgacccaaggaaaaatgacaggccaaaacctcctcggcctccaaccggcagaccctcctatcccggagccaaacccaacatctgtgatgggaactttaacactctagctattcttcgtcgtgagatgtttgttttcaaggaccagtggttttggcgagtgagaaacaacagggtgatggatggatacccaatgcaaattacttacttctggcggggcttgcctcctagtatcgatgcagtttatgaaaatagcgacgggaattttgtgttctttaaagtgaagggagacactctatctataatccaagatggttggctctacaaataccattggaaatggattctagaacaaaggcagtcagtgcctgtgctctcaagacaaactgaaaagcacaagacctatgaagaattatcttccatcacatactaacaaagaacaatcaggaattgaaaatttaaaataaaaggccatttacaattgcattcgtaaacaccaaataccgagggatcaatctgcaaaaaaatgtgcatgacctctacattgaaaacaacaaaacactactaaatg

SEQ ID NO: 12773 - DNA, 551 bp, Homo sapiens
  source 1..551: mol_type = unassigned DNA
aagaaagaatggagccgcccaagttcctgggtgcctgcctcggggatgcgggatgggagatactgtcgaagagctgtgctcaaaccagggcccttgtcgcgggctggatacctccgcactggaagacggttggatttcgtgcatcattcgggggtgtttttcttgcaaaccttgctttggattttatgtgctacagtctgcggaacggagcagtatttcaatgtggaggtttggttacaaaagtacggctaccttccaccgactgaccccagaatgtcagtgctgcgctctgcagagaccatgcagtctgccctagctgccatgcagcagttctatggcattaacatgacaggaaaagtggacagaaacacaattgactggatgaagaagccccgatgcggtgtacctgaccagacaagaggtagctccaaatttcatattcgtcgaaagcgatatgcattgacaggacagaaatggcagcacaagcacatcacttacagtataaagaacgtaactccaaaagtaggagaccctgagactcgtaaagctat

SEQ ID NO: 12774 - DNA, 605 bp, Homo sapiens
  source 1..605: mol_type = unassigned DNA
gagggagaaaacgaaggggagctcgtccatccattgaagcacagttcactatgatcttactcacattcagcactggaagacggttggatttcgtgcatcattcgggggtgtttttcttgcaaaccttgctttggattttatgtgctacagtctgcggaacggagcagtatttcaatgtggaggtttggttacaaaagtacggctaccttccaccgactgaccccagaatgtcagtgctgcgctctgcagagaccatgcagtctgccctagctgccatgcagcagttctatggcattaacatgacaggaaaagtggacagaaacacaattgactggatgaagaagccccgatgcggtgtacctgaccagacaagaggtagctccaaatttcatattcgtcgaaagcgatatgcattgacaggacagaaatggcagcacaagcacatcacttacaggtataagaactcacgattaatctccccttttccccatatttcattactatttgttttgacacatagtttagtatcttctgcacgttgactacatgttaatatatagggatataatgttaacataagagatttaaaattgctattgagagga

SEQ ID NO: 12775 - DNA, 3235 bp, Homo sapiens
  source 1..3235: mol_type = unassigned DNA
acatccgagatgaacccagcccttggtgttcaaaatcactttaaggggaagtagagctttttctttcatgtacctggaccagtagttcacttactctgaaagtcaagaggccccatggactgcccagcccagctgctgtggaatgtggcagagaaagagggtgagagggcctggatgactcccatgctgggagtattatgcaaacgtgggagaaaaaaacatgcttcctctcctggcctacaggagcgcttgaaagcctgctcatctgcaagccctagggctggactctacatcacagcagtggatactccatctccattgagaacccgatgactggtcactgcccagccccaccctcgacccaaccaggatgaagaatgggcaagccagatagctacagtaatcgacagacagacaaacaagagcatcgtatgacccaggggccaacaagtcccaccccagtgacaccatctcacttttgcagagctcttgctcgcaaagtgcagctaggagaacccaggcctcctgatgacaaatgctccttctttctgccccccacgtgccaagagcgaggagggaagatagctgctggctcactgtgtggtcgtggcaatacctgaacaccttctatggctgccccaaggagagctgcaacctgtttgtgctgaaggacacactaaagaagatgcagaagttctttggactgccccagacaggtgatcttgaccagaataccatcgagaccatgcggaagccacgctgcggcaacccagatgtggccaactacaacttcttccctcgcaagcccaagtgggacaagaaccagatcacatacaggatcattggctacacacctgatctggacccagagacagtggatgatgcctttgctcgtgccttccaagtctggagcgatgtgaccccactgcggttttctcgaatccatgatggagaggcagacatcatgatcaactttggccgctgggagcatggcgatggatacccctttgacggtaaggacggactcctggctcatgccttcgccccaggcactggtgttgggggagactcccattttgatgacgatgagctatggaccttgggagaaggccaagtggtccgtgtgaagtatgggaacgccgatggggagtactgcaagttccccttcttgttcaatggcaaggagtacaacagctgcactgataccggccgcagcgatggcttcctctggtgctccaccacctacaactttgagaaggatggcaagtacggcttctgtccccatgaagccctgttcaccatgggcggcaacgctgaaggacagccctgcaagtttccattccgcttccagggcacatcctatgacagctgcaccactgagggccgcacggatggctaccgctggtgcggcaccactgaggactacgaccgcgacaagaagtatggcttctgccctgagaccgccatgtccactgttggtgggaactcagaaggtgccccctgtgtcttccccttcactttcctgggcaacaaatatgagagctgcaccagcgccggccgcagtgacggaaagatgtggtgtgcgaccacagccaactacgatgatgaccgcaagtggggcttctgccctgaccaagggtacagcctgttcctcgtggcagcccacgagtttggccacgccatggggctggagcactcccaagaccctggggccctgatggcacccatttacacctacaccaagaacttccgtctgtcccaggatgacatcaagggcattcaggagctctatggggcctctcctgacattgaccttggcaccggccccacccccacgctgggccctgtcactcctgagatctgcaaacaggacattgtatttgatggcatcgctcagatccgtggtgagatcttcttcttcaaggaccggttcatttggcggactgtgacgccacgtgacaagcccatggggcccctgctggtggccacattctggcctgagctcccggaaaagattgatgcggtatacgaggccccacaggaggagaaggctgtgttctttgcagggaatgaatactggatctactcagccagcaccctggagcgagggtaccccaagccactgaccagcctgggactgccccctgatgtccagcgagtggatgccgcctttaactggagcaaaaacaagaagacatacatctttgctggagacaaattctggagatacaatgaggtgaagaagaaaatggatcctggcttccccaagctcatcgcagatgcctggaatgccatccccgataacctggatgccgtcgtggacctgcagggcggcggtcacagctacttcttcaagggtgcctattacctgaagctggagaaccaaagtctgaagagcgtgaagtttggaagcatcaaatccgactggctaggctgctgagctggccctggctcccacaggcccttcctctccactgccttcgatacaccgggcctggagaactagagaaggacccggaggggcctggcagccgtgccttcagctctacagctaatcagcattctcactcctacctggtaatttaagattccagagagtggctcctcccggtgcccaagaatagatgctgactgtactcctcccaggcgccccttccccctccaatcccaccaaccctcagagccacccctaaagagatactttgatattttcaacgcagccctgctttgggctgccctggtgctgccacacttcaggctcttctcctttcacaaccttctgtggctcacagaacccttggagccaatggagactgtctcaagagggcactggtggcccgacagcctggcacagggcagtgggacagggcatggccaggtggccactccagacccctggcttttcactgctggctgccttagaacctttcttacattagcagtttgctttgtatgcactttgtttttttctttgggtcttgttttttttttccacttagaaattgcatttcctgacagaaggactcaggttgtctgaagtcactgcacagtgcatctcagcccacatagtgatggttcccctgttcactctacttagcatgtccctaccgagtctcttctccactggatggaggaaaaccaagccgtggcttcccgctcagccctccctgcccctcccttcaaccattccccatgggaaatgtcaacaagtatgaataaagacacctactgagtg

SEQ ID NO: 12776 - DNA, 566 bp, Homo sapiens
  source 1..566: mol_type = unassigned DNA
gtgcagggtgtcctagccaagccggcgtccctcctagtagtaccgctgctctctaacctcaggacgtcaagggcctagagcgacagatgtttcccagcagggggttctgaggctgtgcgcccagatcgcgagagagcaatacctgaacaccttctatggctgccccaaggagagctgcaacctgtttgtgctgaaggacacactaaagaagatgcagaagttctttggactgccccagacaggtgatcttgaccagaataccatcgagaccatgcggaagccacgctgcggcaacccagatgtggccaactacaacttcttccctcgcaagcccaagtgggacaagaaccagatcacatacaggatcattggctacacacctgatctggacccagagacagtggatgatgcctttgctcgtgccttccaagtctggagcgatgtgaccccactgcggttttctcgaatccatgatggagaggcagacatcatgatcaactttggccgctgggagcatggcgatggatacccctttgacggtaaggacggactcctggctcatgcct

SEQ ID NO: 12777 - DNA, 3741 bp, Homo sapiens
  source 1..3741: mol_type = unassigned DNA
tggggtgacgaggtcgtgcactgagggtggacgtagaggccaggagtagcaggcggccggggaaaagaggtggagaaaggaaaaaagaggagaaaagtggaggagggcgagtaggggggtggggcagagaggggcgggcccgagtgcgccccccgcccccagccccgctctgccagctccctcccagcccagccggctacatctggcggctgccctcccttgtttccgctgcatccagacttcctcaggcggtggctggaggctgcgcatctggggctttaaacatacaaagggattgccaggacctgcggcggcggcggcggcggcgggggctggggcgcgggggccggaccatgagccgctgagccgggcaaaccccaggccaccgagccagcggaccctcggagcgcagccctgcgccgcggagcaggctccaaccaggcggcgaggcggccacacgcaccgagccagcgacccccgggcgacgcgcggggccagggagcgctacgatggaggcgctaatggcccggggcgcgctcacgggtcccctgagggcgctctgtctcctgggctgcctgctgagccacgccgccgccgcgccgtcgcccatcatcaagttccccggcgatgtcgcccccaaaacggacaaagagttggcagtgcaatacctgaacaccttctatggctgccccaaggagagctgcaacctgtttgtgctgaaggacacactaaagaagatgcagaagttctttggactgccccagacaggtgatcttgaccagaataccatcgagaccatgcggaagccacgctgcggcaacccagatgtggccaactacaacttcttccctcgcaagcccaagtgggacaagaaccagatcacatacaggatcattggctacacacctgatctggacccagagacagtggatgatgcctttgctcgtgccttccaagtctggagcgatgtgaccccactgcggttttctcgaatccatgatggagaggcagacatcatgatcaactttggccgctgggagcatggcgatggatacccctttgacggtaaggacggactcctggctcatgccttcgccccaggcactggtgttgggggagactcccattttgatgacgatgagctatggaccttgggagaaggccaagtggtccgtgtgaagtatgggaacgccgatggggagtactgcaagttccccttcttgttcaatggcaaggagtacaacagctgcactgataccggccgcagcgatggcttcctctggtgctccaccacctacaactttgagaaggatggcaagtacggcttctgtccccatgaagccctgttcaccatgggcggcaacgctgaaggacagccctgcaagtttccattccgcttccagggcacatcctatgacagctgcaccactgagggccgcacggatggctaccgctggtgcggcaccactgaggactacgaccgcgacaagaagtatggcttctgccctgagaccgccatgtccactgttggtgggaactcagaaggtgccccctgtgtcttccccttcactttcctgggcaacaaatatgagagctgcaccagcgccggccgcagtgacggaaagatgtggtgtgcgaccacagccaactacgatgatgaccgcaagtggggcttctgccctgaccaagggtacagcctgttcctcgtggcagcccacgagtttggccacgccatggggctggagcactcccaagaccctggggccctgatggcacccatttacacctacaccaagaacttccgtctgtcccaggatgacatcaagggcattcaggagctctatggggcctctcctgacattgaccttggcaccggccccacccccacgctgggccctgtcactcctgagatctgcaaacaggacattgtatttgatggcatcgctcagatccgtggtgagatcttcttcttcaaggaccggttcatttggcggactgtgacgccacgtgacaagcccatggggcccctgctggtggccacattctggcctgagctcccggaaaagattgatgcggtatacgaggccccacaggaggagaaggctgtgttctttgcagggaatgaatactggatctactcagccagcaccctggagcgagggtaccccaagccactgaccagcctgggactgccccctgatgtccagcgagtggatgccgcctttaactggagcaaaaacaagaagacatacatctttgctggagacaaattctggagatacaatgaggtgaagaagaaaatggatcctggcttccccaagctcatcgcagatgcctggaatgccatccccgataacctggatgccgtcgtggacctgcagggcggcggtcacagctacttcttcaagggtgcctattacctgaagctggagaaccaaagtctgaagagcgtgaagtttggaagcatcaaatccgactggctaggctgctgagctggccctggctcccacaggcccttcctctccactgccttcgatacaccgggcctggagaactagagaaggacccggaggggcctggcagccgtgccttcagctctacagctaatcagcattctcactcctacctggtaatttaagattccagagagtggctcctcccggtgcccaagaatagatgctgactgtactcctcccaggcgccccttccccctccaatcccaccaaccctcagagccacccctaaagagatactttgatattttcaacgcagccctgctttgggctgccctggtgctgccacacttcaggctcttctcctttcacaaccttctgtggctcacagaacccttggagccaatggagactgtctcaagagggcactggtggcccgacagcctggcacagggcagtgggacagggcatggccaggtggccactccagacccctggcttttcactgctggctgccttagaacctttcttacattagcagtttgctttgtatgcactttgtttttttctttgggtcttgttttttttttccacttagaaattgcatttcctgacagaaggactcaggttgtctgaagtcactgcacagtgcatctcagcccacatagtgatggttcccctgttcactctacttagcatgtccctaccgagtctcttctccactggatggaggaaaaccaagccgtggcttcccgctcagccctccctgcccctcccttcaaccattccccatgggaaatgtcaacaagtatgaataaagacacctactgagtggccgtgtttgccatctgttttagcagagcctagacaagggccacagacccagccagaagcggaaacttaaaaagtccgaatctctgctccctgcagggcacaggtgatggtgtctgctggaaaggtcagagcttccaaagtaaacagcaagagaacctcagggagagtaagctctagtccctctgtcctgtagaaagagccctgaagaatcagcaattttgttgctttattgtggcatctgttcgaggtttgcttcctctttaagtctgtttcttcattagcaatcatatcagttttaatgctactactaacaatgaacagtaacaataatatccccctcaattaatagagtgctttctatgtgcaaggcacttttcacgtgtcacctattttaacctttccaaccacataaataaaaaaggccattattagttgaatcttattgatgaagaga

SEQ ID NO: 12778 - DNA, 736 bp, Homo sapiens
  source 1..736: mol_type = unassigned DNA
tgtaaacaacttttggacacatctgggcagttgctaagggctcttgccaagcgtctagcaatacctgaacaccttctatggctgccccaaggagagctgcaacctgtttgtgctgaaggacacactaaagaagatgcagaagttctttggactgccccagacaggtgatcttgaccagaataccatcgagaccatgcggaagccacgctgcggcaacccagatgtggccaactacaacttcttccctcgcaagcccaagtgggacaagaaccagatcacatacaggatcattggctacacacctgatctggacccagagacagtggatgatgcctttgctcgtgccttccaagtctggagcgatgtgaccccactgcggttttctcgaatccatgatggagaggcagacatcatgatcaactttggccgctgggagcatggcgatggatacccctttgacggtaaggacggactcctggctcatgccttcgccccaggcactggtgttgggggagactcccattttgatgacgatgagctatggaccttgggagaaggccaagtggtccgtgtgaagtatgggaacgccgatggggagtactgcaagttccccttcttgttcaatggcaaggagtacaacagctgcactgataccggccgcagcgatggcttcctctggtgctccaccacctacaactttgagaaggatggcaagtacggcttctgtccccatgaa

SEQ ID NO: 12779 - DNA, 1978 bp, Homo sapiens
  source 1..1978: mol_type = unassigned DNA
agatgttgtcttgtgagcgtgcgcgcgcctggctggaggggcactgagcctggccgcagtgttgccaatacctgaacaccttctatggctgccccaaggagagctgcaacctgtttgtgctgaaggacacactaaagaagatgcagaagttctttggactgccccagacaggtgatcttgaccagaataccatcgagaccatgcggaagccacgctgcggcaacccagatgtggccaactacaacttcttccctcgcaagcccaagtgggacaagaaccagatcacatacaggatcattggctacacacctgatctggacccagagacagtggatgatgcctttgctcgtgccttccaagtctggagcgatgtgaccccactgcggttttctcgaatccatgatggagaggcagacatcatgatcaactttggccgctgggagcatggcgatggatacccctttgacggtaaggacggactcctggctcatgccttcgccccaggcactggtgttgggggagactcccattttgatgacgatgagctatggaccttgggagaaggccaagtggtccgtgtgaagtatgggaacgccgatggggagtactgcaagttccccttcttgttcaatggcaaggagtacaacagctgcactgataccggccgcagcgatggcttcctctggtgctccaccacctacaactttgagaaggatggcaagtacggcttctgtccccatgaagccctgttcaccatgggcggcaacgctgaaggacagccctgcaagtttccattccgcttccagggcacatcctatgacagctgcaccactgagggccgcacggatggctaccgctggtgcggcaccactgaggactacgaccgcgacaagaagtatggcttctgccctgagaccgccatgtccactgttggtgggaactcagaaggtgccccctgtgtcttccccttcactttcctgggcaacaaatatgagagctgcaccagcgccggccgcagtgacggaaagatgtggtgtgcgaccacagccaactacgatgatgaccgcaagtggggcttctgccctgaccaagggtacagcctgttcctcgtggcagcccacgagtttggccacgccatggggctggagcactcccaagaccctggggccctgatggcacccatttacacctacaccaagaacttccgtctgtcccaggatgacatcaagggcattcaggagctctatggggcctctcctgacattgaccttggcaccggccccacccccacgctgggccctgtcactcctgagatctgcaaacaggacattgtatttgatggcatcgctcagatccgtggtgagatcttcttcttcaaggaccggttcatttggcggactgtgacgccacgtgacaagcccatggggcccctgctggtggccacattctggcctgagctcccggaaaagattgatgcggtatacgaggccccacaggaggagaaggctgtgttctttgcagggaatgaatactggatctactcagccagcaccctggagcgagggtaccccaagccactgaccagcctgggactgccccctgatgtccagcgagtggatgccgcctttaactggagcaaaaacaagaagacatacatctttgctggagacaaattctggagatacaatgaggtgaagaagaaaatggatcctggcttccccaagctcatcgcagatgcctggaatgccatccccgataacctggatgccgtcgtggacctgcagggcggcggtcacagctacttcttcaagggtgcctattacctgaagctggagaaccaaagtctgaagagcgtgaagtttggaagcatcaaatccgactggctaggctgctgagctggccctggctcccacaggcccttcctctccactgccttcgatacaccgggcctggagaactagagaaggacccggagggg

SEQ ID NO: 12780 - DNA, 2469 bp, Homo sapiens
  source 1..2469: mol_type = unassigned DNA
aatgcatgcctgccctcctgggaatgaagcacagcaggtctcagcctcatcttacccagccccccactcaagatggaggtgcctggtttgaacacctctgacaaatggaagtctgtgttgtccagaggcaatgcagtgggggcttaagaagataactctggacttagaccgcttggcttcaaatcaaagagtgcatgaaccaaccagctggcctagtgatgatgttaggcaagtgacttctcagtttcttcatctgcaaactgggaaatttcctatctcagggttaaaagagaggtaatcttaggtgcttacctagcacatgcaatacctgaacaccttctatggctgccccaaggagagctgcaacctgtttgtgctgaaggacacactaaagaagatgcagaagttctttggactgccccagacaggtgatcttgaccagaataccatcgagaccatgcggaagccacgctgcggcaacccagatgtggccaactacaacttcttccctcgcaagcccaagtgggacaagaaccagatcacatacaggatcattggctacacacctgatctggacccagagacagtggatgatgcctttgctcgtgccttccaagtctggagcgatgtgaccccactgcggttttctcgaatccatgatggagaggcagacatcatgatcaactttggccgctgggagcatggcgatggatacccctttgacggtaaggacggactcctggctcatgccttcgccccaggcactggtgttgggggagactcccattttgatgacgatgagctatggaccttgggagaaggccaagtggtccgtgtgaagtatgggaacgccgatggggagtactgcaagttccccttcttgttcaatggcaaggagtacaacagctgcactgataccggccgcagcgatggcttcctctggtgctccaccacctacaactttgagaaggatggcaagtacggcttctgtccccatgaagccctgttcaccatgggcggcaacgctgaaggacagccctgcaagtttccattccgcttccagggcacatcctatgacagctgcaccactgagggccgcacggatggctaccgctggtgcggcaccactgaggactacgaccgcgacaagaagtatggcttctgccctgagaccgccatgtccactgttggtgggaactcagaaggtgccccctgtgtcttccccttcactttcctgggcaacaaatatgagagctgcaccagcgccggccgcagtgacggaaagatgtggtgtgcgaccacagccaactacgatgatgaccgcaagtggggcttctgccctgaccaagggtacagcctgttcctcgtggcagcccacgagtttggccacgccatggggctggagcactcccaagaccctggggccctgatggcacccatttacacctacaccaagaacttccgtctgtcccaggatgacatcaagggcattcaggagctctatggggcctctcctgacattgaccttggcaccggccccacccccacgctgggccctgtcactcctgagatctgcaaacaggacattgtatttgatggcatcgctcagatccgtggtgagatcttcttcttcaaggaccggttcatttggcggactgtgacgccacgtgacaagcccatggggcccctgctggtggccacattctggcctgagctcccggaaaagattgatgcggtatacgaggccccacaggaggagaaggctgtgttctttgcagggaatgaatactggatctactcagccagcaccctggagcgagggtaccccaagccactgaccagcctgggactgccccctgatgtccagcgagtggatgccgcctttaactggagcaaaaacaagaagacatacatctttgctggagacaaattctggagatacaatgaggtgaagaagaaaatggatcctggcttccccaagctcatcgcagatgcctggaatgccatccccgataacctggatgccgtcgtggacctgcagggcggcggtcacagctacttcttcaagggtgcctattacctgaagctggagaaccaaagtctgaagagcgtgaagtttggaagcatcaaatccgactggctaggctgctgagctggccctggctcccacaggcccttcctctccactgccttcgatacaccgggcctggagaactagagaaggacccggaggggcctggcagccgtgccttcagctctacagctaatcagcattctcactcctacctggtaatttaagattccagagagtggctcctcccggtgcccaagaatagatgctgactgtactcctcccaggcgccccttccccctccaatcccaccaaccctcagagccacccctaaagagatactttgatattttcaacgcagccctgctttgggctgccctggtgctgccacacttcag

SEQ ID NO: 12781 - DNA, 755 bp, Homo sapiens
  source 1..755: mol_type = unassigned DNA
ggcaccactgaggactacgaccgcgacaagaagtatggcttctgccctgagaccgggtacagcctgttcctcgtggcagcccacgagtttggccacgccatggggctggagcactcccaagaccctggggccctgatggcacccatttacacctacaccaagaacttccgtctgtcccaggatgacatcaagggcattcaggagctctatggggcctctcctgacattgaccttggcaccggccccacccccacgctgggccctgtcactcctgagatctgcaaacaggacattgtatttgatggcatcgctcagatccgtggtgagatcttcttcttcaaggaccggttcatttggcggactgtgacgccacgtgacaagcccatggggcccctgctggtggccacattctggcctgagctcccggaaaagattgatgcggtatacgaggccccacaggaggagaaggctgtgttctttgcagggaatgaatactggatctactcagccagcaccctggagcgagggtaccccaagccactgaccagcctgggactgccccctgatgtccagcgagtggatgccgcctttaactggagcaaaaacaagaagacatacatctttgctggagacaaattctggagatacaatgaggtgaagaagaaaatggatcctggcttccccaagctcatcgcagatgcctggaatgccatccccgataacctggatgccgtcgtggacctgcagggcggcgg

SEQ ID NO: 12782 - DNA, 443 bp, Homo sapiens
  source 1..443: mol_type = unassigned DNA
agctggagaaccaaagtctgaagagcgtgaagtttggaagcatcaaatccgactggctaggctgctgagctggccctggctcccacaggcccttcctctccactgccttcgatacaccgggcctggagaactagagaaggacccggaggggcctggcagccgtgccttcagctctacagctaatcagcattctcactcctacctgaaattgcatttcctgacagaaggactcaggttgtctgaagtcactgcacagtgcatctcagcccacatagtgatggttcccctgttcactctacttagcatgtccctaccgagtctcttctccactggatggaggaaaaccaagccgtggcttcccgctcagccctccctgcccctcccttcaaccattccccatgggaaatgtcaacaagtatgaataaagacacctactgagtggc

SEQ ID NO: 12783 - DNA, 4414 bp, Homo sapiens
  source 1..4414: mol_type = unassigned DNA
gcgcggaggcgggggcgcgctggcggccgaggcggcggcggcggcggcgaaggcaggcgggccgggcgcgggccccgccgccgggatgccgaggagccggggcggccgcgccgcgccggggccgccgccgccgccgccgccgccgggccaggccccgcgctggagccgctggcgggtccctgggcggctgctgctgctgctgctgcccgcgctctgctgcctcccgggcgccgcgcgggcggcggcggcggcggcgggggcagggaaccgggcagcggtggcggtggcggtggcgcgggcggacgaggcggaggcgcccttcgccgggcagaactggttaaagtcctatggctatctgcttccctatgactcacgggcatctgcgctgcactcagcgaaggccttgcagtcggcagtctccactatgcagcagttttacgggatcccggtcaccggtgtgttggatcagacaacgatcgagtggatgaagaaaccccgatgtggtgtccctgatcacccccacttaagccgtaggcggagaaacaagcgctatgccctgactggacagaagtggaggcaaaaacacatcacctacagcattcacaactataccccaaaagtgggtgagctagacacgcggaaagctattcgccaggctttcgatgtgtggcagaaggtgaccccactgacctttgaagaggtgccataccatgagatcaaaagtgaccggaaggaggcagacatcatgatcttttttgcttctggtttccatggcgacagctccccatttgatggagaagggggattcctggcccatgcctacttccctggcccagggattggaggagacacccactttgactccgatgagccatggacgctaggaaatgccaaccatgacgggaacgacctcttcctggtggctgtgcatgagctgggccacgcgctgggactggagcactccagcgaccccagcgccatcatggcgcccttctaccagtacatggagacgcacaacttcaagctgccccaggacgatctccagggcatccagaagatctatggacccccagccgagcctctggagcccacaaggccactccctacactccccgtccgcaggatccactcaccatcggagaggaaacacgagcgccagcccaggccccctcggccgcccctcggggaccggccatccacaccaggcaccaaacccaacatctgtgacggcaacttcaacacagtggccctcttccggggcgagatgtttgtctttaaggatcgctggttctggcgtctgcgcaataaccgagtgcaggagggctaccccatgcagatcgagcagttctggaagggcctgcctgcccgcatcgacgcagcctatgaaagggccgatgggagatttgtcttcttcaaaggtgacaagtattgggtgtttaaggaggtgacggtggagcctgggtacccccacagcctgggggagctgggcagctgtttgccccgtgaaggcattgacacagctctgcgctgggaacctgtgggcaagacctactttttcaaaggcgagcggtactggcgctacagcgaggagcggcgggccacggaccctggctaccctaagcccatcaccgtgtggaagggcatcccacaggctccccaaggagccttcatcagcaaggaaggatattacacctatttctacaagggccgggactactggaagtttgacaaccagaaactgagcgtggagccaggctacccgcgcaacatcctgcgtgactggatgggctgcaaccagaaggaggtggagcggcggaaggagcggcggctgccccaggacgacgtggacatcatggtgaccatcaacgatgtgccgggctccgtgaacgccgtggccgtggtcatcccctgcatcctgtccctctgcatcctggtgctggtctacaccatcttccagttcaagaacaagacaggccctcagcctgtcacctactataagcggccagtccaggaatgggtgtgagcagcccagagccctctctatccacttggtctggccagccaggcccttcctcaccagggtctgaggggcagctctggccagtgctcaccagggccagcagggccctaggctggggtcgtacagctgaagtggtgggtgcattggcctaggctgagcgtggggcagggaattatgggggctgtgccccagggtgggtgtctggcacccagctgccagccttctgtcctgggcaaactactccctacttaagggaataggccaggctccatccggaggcagggaccatgccaggaggagcccctgtggtcacggcatcctgtggtgtccatgaggtaccacagctccactcctggctggaacccagcaccctctgtgggaagccagcactagctctcatcccccatccgggagataccaccagtcctggtccccttttgccaacacctgctggtcagatgtccccctacccccaccccactgtcctccaaggctacaggacccctgcttctgacacagtgagcaacaagcctgggtttccctgctggcagacggcagatccctcaggaaacctgctccacttgtcagggtctcttcggagacccaggatttagggtcacatgctgcaggcagggctgtggcccagctgggtctgacaaggacccagctgtcacatcgtgaatatttaaatgtcctgtcactactgtcccattttgcaaaggctgcttgaggctttaggtgaactagaggtgactgtcttggtgatgaggccagcatagcggccctcccccaggcgacaaggaccaaggtgctgctaaggccactctagcgcccagacaccccagtagctgagctctgctcctatggctacagagctggggcagaagctgaccccatttctggaggaagatccgagtttgtgaccgtcctccactcccctctattgtcactgtccccagctttgctccagtctgtcacttgcagcctggagctcagcctcaccagttaggtgaggcagagatggctgcagggccaacactggcagagcctgggagtccttcggaaggggaccagggcgtctgaagtgctcagtgcccccactactctgaggccgactccagctactctgaggccgactcaatctctcggctggaagcagtgttttcccagagcttggcccttgctgacctcgctcactgggcccatcttcccacactgctcttagaaggacacccctaccggtagcagccccaagctgagggggctccctttttgaccttcactggcccgcccttcactgtctccagcaggagttcctagggcttggcctgccttgctccacagtacggcggaggcagccctgcttgtcactgaggagccctagacaaggccaatgggttcatcaatgcccactggctctctgccaaagccaaaaaggtgtcaggcagtctccagcgtgctggccgggtctcggatgccacccctgctcactgagcctgcatgggccttgcccccgaccctgtggtctctgggattggggtcggcttaccctgtagcacagacagggactcctgctgccctgggagctgtctcaagcaaaatctcttgtcccagaggtgcccatgtgggtccgctgtgtcccctgtcatcatccttgttttttctcattttggccaagggcaggctccctgggacaggcagggaacaactgcggagatattagtgattcataggtttgtacagtgttttatactttgcaaagcactttattagctcacacctgtccactcacatgaaactcgtgttaggccctgggaggccgacggtaactctcaccgtgccctcagatgaagcacagagaggttgttacttgcccgggccatccagtgggctggctgggtcttgtgtccccatctgtggacccctctagggtctgagatgagatgagaagtgtctcctgtatccacctcttcctggcctcccttcccccacttcctggtccctgtccactcctcaggttggtgctctcacttcttgaaagctctaggcacccccgcctcccgccaggctccccattggctcctggcaggccagctgagaatgaacaggagatggaggcaggcagcccaggctgcagaggtgagggatgtggggccaggcccagagggctcagcctagaggcttccaatctcagattctcctgcctgtggtcatctgtttgtccatcaccccaggacagggcagacagaggggcaaagcactgggggccccagagcctagcttcccctcagcctgggggacatcacagcatttcagtgtcagtcacattttaaactgatcagcctttgtataatgttttttaaatcatttctaaataaaacagaaatacagagt

SEQ ID NO: 12784 - DNA, 539 bp, Homo sapiens
  source 1..539: mol_type = unassigned DNA
gcagctggaacacaggagggctgtggaaaaacttattgaagagcgtcgccaacaattccttgcagacaaacaacgtgaactagaagagtggcagttgcagcaaaggcggcaaggatttattaatgcaattattgaagaagaaaggctaaaacttcttaaagagcatgctacaaacttactaggctatctccctaaaggagtatttaaaaaagaggatgatattgatctgcttggtgaagagttcaggaaagtatatcaacaaaggagtgaaatttgtgaagagaaatgatatcatcaaaattggggacatggatgaaattggaaatcatcattctcagcaaactatcgcaagaacaaaaaaccaaacaccgcatattctcactcataggtgggaattgaataatgagaacacatggacacaggaaggggaacatcacactctggagactggatttttttaaaaagcaaagtcaactagatgctgctaatgagaagacacaaaggagttacaaataaaagaatggaaaaagacaagacaa

SEQ ID NO: 12785 - DNA, 2023 bp, Homo sapiens
  source 1..2023: mol_type = unassigned DNA
acttttggtcgagcggagggcgcgcagctccaccgttgccaagacgccgcgtaaacacccgagcgcgcgcagccaggtgcgctccttggggctgctggctgctgcgtttgcggcgggaggtggtggccgcggtcccacgagagggggtatttttcgtcagccaagatgggttccaaaaggagaaatttgagctgtagtgaaaggcatcagaaattagtagatgaaaactactgcaaaaaattacatgtccaagctctaaaaaacgtcaacagtcaaatcaggaatcaaatggtgcagaatgaaaatgataaccgtgttcagcgcaagcaatttctcagattattacaaaatgaacaatttgagttggatatggaagaggccattcaaaaggcagaagaaaacaagagattgaaagaactccagctcaaacaagaagaaaaactggctatggaattggcaaaactgaaacatgaaagtctaaaggacgaaaagatgaggcaacaagtaagagaaaacagcattgagcttagagaattggagaagaaattaaaagcagcttacatgaataaagaaagggcagctcagattgctgaaaaggatgccattaaatatgaacaaatgaaacgtgatgctgaaatagccaaaaccatgatggaagaacacaagagaataataaaggaagagaatgctgcagaagacaaacgaaacaaagcgaaagcacagtactatcttgacttagagaaacaacttgaagaacaagaaaaaaaaaagcaggaagcttatgagcagctgctaaaagagaaactcatgattgatgaaattgttaggaagatctatgaagaagatcagttggaaaaacaacaaaagttagaaaaaatgaatgcaatgcgaaggtatatagaagagtttcagaaagagcaggctctctggagaaaaaagaaacgtgaggagatggaagaagaaaacagaaaaatcatagagtttgctaacatgcagcagcaaagagaagaagatcggatggcaaaagttcaagaaaatgaggagaaaaggctacagcttcagaatgcgttgacacagaaattagaagaaatgctgcggcaacgtgaagatttggaacaagtgcgacaagaattataccaggaagaacaagctgaaatatataagagcaagctaaaagaagaagcagaaaagaaattgagaaagcaaaaagagatgaagcaagattttgaagaacaaatggccttgaaggaattagtgctacaggctgcaaaagaggaagaggagaactttagaaaaactatgctagctaaatttgctgaggatgatcgaatagaattaatgaatgctcagaaacaaagaatgaagcagctggaacacaggagggctgtggaaaaacttattgaagagcgtcgccaacaattccttgcagacaaacaacgtgaactagaagagtggcagttgcagcaaaggcggcaaggatttattaatgcaattattgaagaagaaaggctaaaacttcttaaagagcatgctacaaacttactaggctatctccctaaaggagtatttaaaaaagaggatgatattgatctgcttggtgaagagttcaggaaagtatatcaacaaaggagtgaaatttgtgaagagaaatgatatcatcaaaattgggtaaagcatagattttttgcatgttaccactagatgtcagcataacttttgttttacagttcagtggcattaggtatccattgtctgtttggattttgtaaatcatcactgaatttcataacttgtaaacaattatcagatacaaattaattttaatcaagctgttatttttgtactgataatttcaaaatccgatttctacaacactacagagcactgtttgcatccccatcctcaagacagtatatttaccttgactaatacagaactctaccccaaagtgaactgccttctgtctgtgtttacgaactttacttacttgatttagccagggaaataaatatttggaattttc

SEQ ID NO: 12786 - DNA, 584 bp, Homo sapiens
  source 1..584: mol_type = unassigned DNA
aaacacccgagcgcgcgcagccaggtgcgctccttggggctgctggctgctgcgtttgcggcgggaggtggtggccgcggtcccacgagagggggtatttttcgtcagccaagatgggttccaaaaggagaaatttgagctgtagtgaaaggcatcagaaattagtagatgaaaactactgcaaaaaattacatgtccaagctctaaaaaacgtcaacagtcaaatcaggaatcaaatggtgcagaatgaaaatgataaccgtgttcagcgcaagcaatttctcagattattacaaaatgaacaatttgagttggatatggaagaggccattcaaaaggtaagttttactattcattgttactttttttttcattttgcaccttggaaacgatgaaagtcagctgttaatgctggaaatgagtagataaacaacagcagcaggtaagtgatgcctgattgtgcctcagctcggtgtaatcgtaaagacctgggtttctggagccggcctgtctttgaatcctactactgctataccttagctacggacccttgagtaagttgcttttacttttttttttttttg

SEQ ID NO: 12787 - DNA, 567 bp, Homo sapiens
  source 1..567: mol_type = unassigned DNA
gtggtttggtagggtgagctggtgtgtggtgtggttggacctggcatggaacttaactggagtttatgtggaatgaaccttgagggccttttgtttaaactttgtgtggcctttttgtagtctttgtgtagcttttgtttttaagtggatcttcgctgaggactcatcaaaaacaccttgtgtaatgaaaaacccagatctataacctctccctatatattctgcatgcattgaagtaggctcaaaccctcagggacctggtatagacgcagaatctgtttcacacaacaactgctatttgaaggaaaaaaaaaaaaagaagcaaatgataccaagacaagctcataacagagatccaatcagcagatgtgtacggatgaaaatacagtgagatgagtcagaaaccggccaaggagggtcccagactctccaaaaaccagaagtactccgaacacttcagcatacactgctgcccgccgttcaccttcctcaattccaagaaggagatagtggatcggaaatacagcatctgtaagagcggctgcttctaccagaagaaagaggagg

SEQ ID NO: 12788 - DNA, 561 bp, Homo sapiens
  source 1..561: mol_type = unassigned DNA
aaaaacaccttgtgtaatgaaaaacccagatctataacctctccctatatattctgcatgcattgaagtaggctcaaaccctcagggacctggtatagacgcagaatctgtttcacacaacaactgctatttgaaggaaaaaaaaaaaaagaagcaaatgataccaagacaagctcataacagagatccaatcagcagatgtgtacggatgaaaatacagcttgaaggcaggtccacgcctcctcctggaagccttcccttgactgactcctcgctgagttcacagtgagatgagtcagaaaccggccaaggagggtcccagactctccaaaaaccagaagtactccgaacacttcagcatacactgctgcccgccgttcaccttcctcaattccaagaaggagatagtggatcggaaatacagcatctgtaagagcggctgcttctaccagaagaaagaggaggactggatctgctgcgcctgccagaagaccagattgaaaaggaagatcaggccaaccccaaagaagaagtgaccaaggaggagtttaaactgaatga

SEQ ID NO: 12789 - DNA, 940 bp, Homo sapiens
  source 1..940: mol_type = unassigned DNA
aaaaacaccttgtgtaatgaaaaacccagatctataacctctccctatatattctgcatgcattgaagtaggctcaaaccctcagggacctggtatagacgcagaatctgtttcacacaacaactgctatttgaaggaaaaaaaaaaaaagaagcaaatgataccaagacaagctcataacagagatccaatcagcagatgtgtacggatgaaaatacagtgagatgagtcagaaaccggccaaggagggtcccagactctccaaaaaccagaagtactccgaacacttcagcatacactgctgcccgccgttcaccttcctcaattccaagaaggagatagtggatcggaaatacagcatctgtaagagcggctgcttctaccagaagaaagaggaggactggatctgctgcgcctgccagaagaccagaaccagccgccgtgccaagtcccctcagaggcccaagcaacagccagctgcgccccccgcggtggtcagagcgccagccaagccacggtcccctccgaggtctgagcgtcagccacggtcccctccgaggtctgagcgtcagccacggtcccctccgaggtctgagcgtcagccacggtcccctccgaggtctgagcgtcagccacgtccccgcccagaggtccgaccaccgccagccaagcagcgtccccctcagaagtccaagcaacagccgcgcagcagccccctcagagggccaggcgccagccgtggggggtcccccgtcaaagcttctaggttctggtaacaccatctcttcccttttgttccccagccctaagattgaaaaggaagatcaggccaaccccaaagaagaagtgaccaaggaggagtttaaactgaatgaacaacctcggctcctggactcattgcttcacaacccatctacccctggatgaagttatctggctt

SEQ ID NO: 12790 - DNA, 577 bp, Homo sapiens
  source 1..577: mol_type = unassigned DNA
aaaaacaccttgtgtaatgaaaaacccagatctataacctctccctatatattctgcatgcattgaagtaggctcaaaccctcagggacctggtatagacgcagaatctgtttcacacaacaactgctatttgaagcttgaaggcaggtccacgcctcctcctggaagccttcccttgactgactcctcgctgagttcacagtgagatgagtcagaaaccggccaaggagggtcccagactctccaaaaaccagaagtactccgaacacttcagcatacactgctgcccgccgttcaccttcctcaattccaagaaggagatagtggatcggaaatacagcatctgtaagagcggctgcttctaccagaagaaagaggaggactggatctgctgcgcctgccagaagaccagattgaaaaggaagatcaggccaaccccaaagaagaagtgaccaaggaggagtttaaactgaatgaacaacctcggctcctggactcattgcttcacaacccatctacccctggatgaagttatctggcttcaaatattatgcaggggcaaacacctgctgatgtg

SEQ ID NO: 12791 - DNA, 566 bp, Homo sapiens
  source 1..566: mol_type = unassigned DNA
aaaaacaccttgtgtaatgaaaaacccagatctataacctctccctatatattctgcatgcattgaagtaggctcaaaccctcagggacctggtatagacgcagaatctgtttcacacaacaactgctatttgaagtgagatgagtcagaaaccggccaaggagggtcccagactctccaaaaaccagaagtactccgaacacttcagcatacactgctgcccgccgttcaccttcctcaattccaagaaggagatagtggatcggaaatacagcatctgtaagagcggctgcttctaccagaagaaagaggaggactggatctgctgcgcctgccagaagaccagattgaaaaggaagatcaggccaaccccaaagaagaagtgaccaaggaggagtttaaactgaatgaacaacctcggctcctggactcattgcttcacaacccatctacccctggatgaagttatctggcttcaaatattatgcaggggcaaacacctgctgatgtggcaactgctgatgctcatggtccccatggcatgggggcctcagggcagcctgcct

SEQ ID NO: 12792 - DNA, 3051 bp, Homo sapiens
  source 1..3051: mol_type = unassigned DNA
aaaaacaccttgtgtaatgaaaaacccagatctataacctctccctatatattctgcatgcattgaagtaggctcaaaccctcagggacctggtatagacgcagaatctgtttcacacaacaactgctatttgaaggaaaaaaaaaaaaagaagcaaatgataccaagacaagctcataacagagatccaatcagcagatgtgtacggatgaaaatacagtgagatgagtcagaaaccggccaaggagggtcccagactctccaaaaaccagaagtactccgaacacttcagcatacactgctgcccgccgttcaccttcctcaattccaagaaggagatagtggatcggaaatacagcatctgtaagagcggctgcttctaccagaagaaagaggaggactggatctgctgcgcctgccagaagaccagattgaaaaggaagatcaggccaaccccaaagaagaagtgaccaaggaggagtttaaactgaatgaacaacctcggctcctggactcattgcttcacaacccatctacccctggatgaagttatctggcttcaaatattatgcaggggcaaacacctgctgatgtggcaactgctgatgctcatggtccccatggcatgggggcctcagggcagcctgcctggaggtgagcagggctatctctgtgtgttgtactccagtcagggggttccagcagcacccgcaggctctagagctcaatgcacagttctttttgtttcacctgcagtcctttcttctccaggatatgcacaggcctccagggtctttcatggctcagggtcagggtggctcaagtgccaacccacatgttgtcctccaaatattcccttctatccctggcatgctgttgctgagctcaacttttaatttttgactttctcctttgtaattaatctctatctgggtttctctctttctctgtgccatttggtttccttaattagttccctgtgccagcccatagtcagagccataattggctctggggaagatccaagttattttctgagtaagatattaggcttccatatgatccagagatgcaaagaaatccctagagagtgtaggagttgtctaaatccatgtgtcagatgtagccaacgaattatgtcagaagcagagagaaaaggcctgaaaagcagctctctcccactcctcaggcccttgtctccaaccttacatgaggctttttgaacatctcctcctggcccagctggggtgagagcaagtcctcgaaggcactgcctttgagccttgctcagcccatctgaactatcccaactctagaattgactgctttcgaattgtgtgaccttgggaatgttatctggcttcaaccacaatgccctacccccagctcctctcccaaatgatcctagatacagggctgcttccccccgaccctaccccacctcgggacacaggctcatggcctcatggcacttcaccaccagaagtggtgctcagagttcctatttccacatctaaccccctaattcctgggaaagtctgaggcctggtccccccagtgctttccctggctggcctctccacattttcatctgatggtggagtgagatcaggaaaaataggacaggagctttgccttgggggagaagagagttaagtgtggaaaggggtgagttataggaggttaagcagtccaagatttctctctctgtgtaggaggccatttcctgatgtgaggggtctgaacccaattatgatgggacagggttgggcattgacttcccatctcttctctctgtttttctcccactatctgtagcccaaaactcttatggaggactttgatctttagtataggctattggtcagggccataggaactaaccccgatcctcactccaccaggatctaccacatcccctacacacaaacacatgctgtggggagggagttttcccctgggtcaagttgaggatccttagatcaccttgtgctcctgtggactggtgtgtgcgtgtgtgtgtgtgtgtgtgtgtgtgtgtgtgtgtgtgtgtgtgtgtgtgtatgttgggaaacttagctttcagagaatgtctatgggctctcattttctctctcacacaaaaatactcgggacttctccaagtccctgaggagcctgaccactgaagctgatcatgagatgactgtatgctgacacacccccttcaggggcctggccttgacttagggctgcactgtatcctcagcaacggccttgcaggagccccttttggactgctttccctattcagcccagagttggggtggtgggagaagaggggttggagtgaatccatctctattcaaattccagctgggattactctaggagtcttcctggcttgttttgggcccaaacttagctacattgtttattggctcccaaagtcgggattgaagagtgaaaagatgcaggcaatgaatccttctgcacactcctccccaacctttccagcgcttttctacttaggaggccagtggaagggaggagaggccatgccctagcccacaggggacaaggttcattgttcttccaggcttggttcactctgcttttgattcagaagctctttccctacccagcaagactacactttcttgccttctttctattttttctttttgtgcgtataaatggtatgttgtgatatattctcagtgcttgtgcccaccttggaactctgttcttgctcttcattccgcatgtgatactctggtccaagatcttggccaggtgccttctgctcaaatatcgtctcagaggtgcttcccttgaaaactcggtgctgtttccatagttactctatttgatcactctaagtttggttgtcttcatagcacttgtcaccctctggaactattctattcatttatttacttgtttaatgcttggctcttttcccctcctaacgtaaactccatgattgccaacacctgtttacttactacagttccccctccccccacattcctgacactagtaagaaccaataaacacttgttgacggaa

SEQ ID NO: 12793 - DNA, 571 bp, Homo sapiens
  source 1..571: mol_type = unassigned DNA
aaaccctcagggacctggtatagacgcagaatctgtttcacacaacaactgctatttgaaggaaaaaaaaaaaaagaagcaaatgataccaagacaagctcataacagagatccaatcagcagatgtgtacggatgaaaatacagcttgaaggcaggtccacgcctcctcctggaagccttcccttgactgactcctcgctgagttcacaggtatcagtcattcccaagccctcatctttggccagatgaaatgcctctgcccatgaagtttcaccttgttctctagcccaacatattgccctctcttctgtggacttttcatgccattgcaccagcacattctcatgttgcagagcatgctggccttgtatgacactcactgatgtctgtggacattcctctacctacaagtgagatgagtcagaaaccggccaaggagggtcccagactctccaaaaaccagaagtactccgaacacttcagcatacactgctgcccgccgttcaccttcctcaattccaagaaggagatagtggatcggaaatacagcatctgtaagagcggctgctt

SEQ ID NO: 12794 - DNA, 830 bp, Homo sapiens
  source 1..830: mol_type = unassigned DNA
aaaccctcagggacctggtatagacgcagaatctgtttcacacaacaactgctatttgaagcttgaaggcaggtccacgcctcctcctggaagccttcccttgactgactcctcgctgagttcacagtgagatgagtcagaaaccggccaaggagggtcccagactctccaaaaaccagaagtactccgaacacttcagcatacactgctgcccgccgttcaccttcctcaattccaagaaggagatagtggatcggaaatacagcatctgtaagagcggctgcttctaccagaagaaagaggaggactggatctgctgcgcctgccagaagaccagaaccagccgccgtgccaagtcccctcagaggcccaagcaacagccagctgcgccccccgcggtggtcagagcgccagccaagccacggtcccctccgaggtctgagcgtcagccacggtcccctccgaggtctgagcgtcagccacggtcccctccgaggtctgagcgtcagccacggtcccctccgaggtctgagcgtcagccacgtccccgcccagaggtccgaccaccgccagccaagcagcgtccccctcagaagtccaagcaacagccgcgcagcagccccctcagagggccaggcgccagccgtggggggtcccccgtcaaagcttctaggttctggtaacaccatctcttcccttttgttccccagccctaaggttagtagttgcttcctgtgtttactaacaccgggctgtctccatggccctcttcagccttattacccaacctgtgtaatcagctccctccattaaatcccctctgtttgaaa

SEQ ID NO: 12795 - DNA, 3388 bp, Homo sapiens
  source 1..3388: mol_type = unassigned DNA
aaaccctcagggacctggtatagacgcagaatctgtttcacacaacaactgctatttgaaggaaaaaaaaaaaaagaagcaaatgataccaagacaagctcataacagagatccaatcagcagatgtgtacggatgaaaatacagtgagatgagtcagaaaccggccaaggagggtcccagactctccaaaaaccagaagtactccgaacacttcagcatacactgctgcccgccgttcaccttcctcaattccaagaaggagatagtggatcggaaatacagcatctgtaagagcggctgcttctaccagaagaaagaggaggactggatctgctgcgcctgccagaagaccagctcctgccagcgtcgcttaagcagcagaggagagccctggctcccgcctccagcttcttttggccctctcagaaccagccgccgtgccaagtcccctcagaggcccaagcaacagccagctgcgccccccgcggtggtcagagcgccagccaagccacggtcccctccgaggtctgagcgtcagccacggtcccctccgaggtctgagcgtcagccacggtcccctccgaggtctgagcgtcagccacggtcccctccgaggtctgagcgtcagccacgtccccgcccagaggtccgaccaccgccagccaagcagcgtccccctcagaagtccaagcaacagccgcgcagcagccccctcagagggccaggcgccagccgtggggggtcccccgtcaaagcttctaggttctgattgaaaaggaagatcaggccaaccccaaagaagaagtgaccaaggaggagtttaaactgaatgaacaacctcggctcctggactcattgcttcacaacccatctacccctggatgaagttatctggcttcaaatattatgcaggggcaaacacctgctgatgtggcaactgctgatgctcatggtccccatggcatgggggcctcagggcagcctgcctggaggtgagcagggctatctctgtgtgttgtactccagtcagggggttccagcagcacccgcaggctctagagctcaatgcacagttctttttgtttcacctgcagtcctttcttctccaggatatgcacaggcctccagggtctttcatggctcagggtcagggtggctcaagtgccaacccacatgttgtcctccaaatattcccttctatccctggcatgctgttgctgagctcaacttttaatttttgactttctcctttgtaattaatctctatctgggtttctctctttctctgtgccatttggtttccttaattagttccctgtgccagcccatagtcagagccataattggctctggggaagatccaagttattttctgagtaagatattaggcttccatatgatccagagatgcaaagaaatccctagagagtgtaggagttgtctaaatccatgtgtcagatgtagccaacgaattatgtcagaagcagagagaaaaggcctgaaaagcagctctctcccactcctcaggcccttgtctccaaccttacatgaggctttttgaacatctcctcctggcccagctggggtgagagcaagtcctcgaaggcactgcctttgagccttgctcagcccatctgaactatcccaactctagaattgactgctttcgaattgtgtgaccttgggaatgttatctggcttcaaccacaatgccctacccccagctcctctcccaaatgatcctagatacagggctgcttccccccgaccctaccccacctcgggacacaggctcatggcctcatggcacttcaccaccagaagtggtgctcagagttcctatttccacatctaaccccctaattcctgggaaagtctgaggcctggtccccccagtgctttccctggctggcctctccacattttcatctgatggtggagtgagatcaggaaaaataggacaggagctttgccttgggggagaagagagttaagtgtggaaaggggtgagttataggaggttaagcagtccaagatttctctctctgtgtaggaggccatttcctgatgtgaggggtctgaacccaattatgatgggacagggttgggcattgacttcccatctcttctctctgtttttctcccactatctgtagcccaaaactcttatggaggactttgatctttagtataggctattggtcagggccataggaactaaccccgatcctcactccaccaggatctaccacatcccctacacacaaacacatgctgtggggagggagttttcccctgggtcaagttgaggatccttagatcaccttgtgctcctgtggactggtgtgtgcgtgtgtgtgtgtgtgtgtgtgtgtgtgtgtgtgtgtgtgtgtgtgtgtgtatgttgggaaacttagctttcagagaatgtctatgggctctcattttctctctcacacaaaaatactcgggacttctccaagtccctgaggagcctgaccactgaagctgatcatgagatgactgtatgctgacacacccccttcaggggcctggccttgacttagggctgcactgtatcctcagcaacggccttgcaggagccccttttggactgctttccctattcagcccagagttggggtggtgggagaagaggggttggagtgaatccatctctattcaaattccagctgggattactctaggagtcttcctggcttgttttgggcccaaacttagctacattgtttattggctcccaaagtcgggattgaagagtgaaaagatgcaggcaatgaatccttctgcacactcctccccaacctttccagcgcttttctacttaggaggccagtggaagggaggagaggccatgccctagcccacaggggacaaggttcattgttcttccaggcttggttcactctgcttttgattcagaagctctttccctacccagcaagactacactttcttgccttctttctattttttctttttgtgcgtataaatggtatgttgtgatatattctcagtgcttgtgcccaccttggaactctgttcttgctcttcattccgcatgtgatactctggtccaagatcttggccaggtgccttctgctcaaatatcgtctcagaggtgcttcccttgaaaactcggtgctgtttccatagttactctatttgatcactctaagtttggttgtcttcatagcacttgtcaccctctggaactattctattcatttatttacttgtttaatgcttggctcttttcccctcctaacgtaaactccatgattgccaacacctgtttacttactacagttccccctccccccacattcctgacactagtaagaaccaataaacacttgttgacgg

SEQ ID NO: 12796 - DNA, 5675 bp, Homo sapiens
  source 1..5675: mol_type = unassigned DNA
cgcagaatctgtttcacacaacaactgctatttgaaggaaaaaaaaaaaaagaagcaaatgataccaagacaagctcataacagagatccaatcagcagatgtgtacggatgaaaatacagtgagatgagtcagaaaccggccaaggagggtcccagactctccaaaaaccagaagtactccgaacacttcagcatacactgctgcccgccgttcaccttcctcaattccaagaaggagatagtggatcggaaatacagcatctgtaagagcggctgcttctaccagaagaaagaggaggactggatctgctgcgcctgccagaagaccagattgaaaaggaagatcaggccaaccccaaagaagaagtgaccaaggaggagtttaaactgaatgaacaacctcggctcctggactcattgcttcacaacccatctacccctggatgaagttatctggcttcaaatattatgcaggggcaaacacctgctgatgtggcaactgctgatgctcatggtccccatggcatgggggcctcagggcagcctgcctggagtactttgaagatgtcatcccattgtcttctgacctctataattgccactgagagatctgctgtcagtctgcttatccttccacggactcaagtttcttcaatctgaagatacatgtctttctccagggacatgtggaaaaaaaaaagatgttatacaaccatcaaagtggcaaaaataaaaaaaatcaagtattggcaaagatgtggggaaaattctcataagctactgatgagaatttataaattattatgacacctttgggttgcaatctggggatactggcaaagcagaaaattgtacaacctgtgatcaagcaataataattttaggcacccatcctagagaaaacttgaattcatagaaaaagtaggtacacgtaaatctgttcaaggaatcattgtttggcattgaaaataggagagagatcatgagaaattaccaaaatgtccaccaatagaatgagtgaatcacctgtggtatatttataaataaaaatattaaatagaaggtaaaacaaatcagacatacacacattagatagataaatttagaggacaaaataaggaacatgaaaagcaaatagtagatggcaaatgtaatataatatactatgcataaattttaacaacacacaatattatattgcatattgcccaataagcagaagccataaggtctcacacttttcttataatgcaatagaataaaaatgacaacaaagtaaaagggtatcccaaaaataaaactatccttttggaaaaaaaaagatttaaaataattcctggtttgaagaaataacaaattaaaagctatatataaacggttaacaatattaggtggacatatttgtttgaagagataggtgaaagatagttgaaaagcctgggggtatattcaaggttatatgtcttagaaaacaaaaatacttgtttgggttcagttttggatctgggcttgttcttgtggcttctgatgatttctgacttggggaaaaatggggaagagttgaaatacgtccttccacccaaacctttgtttagtaataggtaggaaaatgaagaagaaaatagaatgttgcagaatgtggagggatgtaaaatggacagtactagggtagaggggaagtcagattagaggaaagaaagagcatcaggaacagtcttgtgctaggagctggtgtggccaagcacagtcggatgcccaaagatccaacaaggccatggctctgtgtccttgagtgggcacaaccattcctagccaagtttaagaggcaagtaaaaatataggggcaatgtcagatgaagtcttgttcagggtatggggctaggatgagagagaatgccacagagtatgaaggaagagtgatagatccagatgagatacagctcagagtgccacgcccccagaaagaggaatcaggcaagtactgtcccaaggcagctggagggtgagggctgagtgccctggcttcctcacttggggagaccatgggtctctgtagaaattccaatataaaggcagggaaatttgactgcatggagtcttcaggtagaaatgtttctcttgcctaaattcaggtgctaaataaacaacaaaatggtaacctctactatgaagtgtttccaatgatgggatatctgaggccattacattcctgggaataacatggtgaggtgcagggtggtggtggtggtgaaacatacgacagaccactgtaagtgagaacaaattactggcccagcccaacccacaccaaataagaaatttaatatccctttggcctgttttagattttggcaaagccaggcccatagtgcttgctgggctctctcttccacatcatccagaagacacacatttgctatggaatgattgtggaggtgagagtatagtgcatattaattcatgcaaaaagttagatattagcccagaaatgttagtaacaagaaactactgaattctctgtttgtctgttgtggaaataaaaccttctggggatgaatcaaaactatctgacaattacttgaaatgggtgaatagctaaatgtaatgtgccttggatattataactaaaaggtgctataatccagttatattttttatcttttaaggattggttctgaggagcactaccagtaaatattgcaaaaattacataaagctccaaaagctactctgtgtaaacttcttgagtgggaattctcaaccataatatctggaatatgactgataattctggatgttaactgattttatgttctgatgttttgactggttttgggaaaaattttgggaaaaaagagttttcctcgtaaatacccaacaactgggtctctgggtaaaaaggcctaatttatagagattgctaatttccatggtgtaaatatttccacaatgcagattccttccttccttttttttttttttttttttgagatggagtttcactcttgttacccagactggagtgcaaaggtgcgaccttggctcactgcaatcttcacctcccgggttcaagccattctcctgcctcagcctcccaagtagctgggattacaggtgcccacgaccatgcctggctaattttgtatttttagtagagatagggattcaccatgttggccaggctggtctcaacctctggacctcaggtgatccacccgcctcggcctcctaaagtgctggagattacaggcatgagccaccacgcccggaccatgatgcagatttcaagctatgaacatgattctctggagtttaccatttgtcttttaattggcaaatttgatgcagaattgggaagagaagcacacaattgactctcgtcagctggcacaagctggtgccagtgcaccactgtatatatccatggccctctgtgaagctagagtttactactaaaatttgtgctccataaatatacaaaggcactagtaagagaaaaaatataaagagaatataaactaaattcaaattagggagctcaaatggagaaaattgacagataatatttttgaaactttgaaaagtagtatttgtctagattcaccttttattaccttttcctttttttcttttccttttttttttttttttgagacggagtttctctcttgttacccaggctggagtgcaatggcacgcaatctcagctcattgcaacctcggctcactgtaaccttcaccttccgtgttcaaatgattctcctgcctcagccttccgagtagctgggattacaggcacccaccaccatgcccagctaattctttgtatttttagtggagatggggtttcaccatgttggccaggctggtcttgaacccctgacctcaggtgatccacccacctgggcctcccaaagtgctgggattacaggcatgagccaccgcgcccggcctgttattatcttttattaagcaaacagcgtatctatgtatcatactgagtgttctgagctgttagtttctttggtgttcatctagatggaagctggggcttccttcctttcagatattggtgctaacatgaagctgaccaaagaattgatgggatctgcacactgtaaagccggtttcaggatggctgagctgacggtcaagaaagaagagaagatatgagccgcctgcattttggggtggtggcagtgaaatttagacttgtgatttggtatgacaatatatggctttttgtgattgttaacattaatgaaaacaagaaaaattagttgctcaaaagttgaaaaatggattcataaactttttattagagtaaggcaaaagaacatattaaaatagaggtaaattagaaatgtcaataagaacccatggacattttttataaggagactttatctgttctgtccctacagtgatttatgctcttggatatttttgctgtcatcctgacaaattctagttggaatatggaacaagcttatttgtagacctagtgcctgtggcttctaaagcaattttctgaaaagagaaaccactgcctgttggaagaatagttgattccatacctcaagctagggaaaaaaaatcagaattagtctgtgaattctagatgttgagagaaagcagggtttcattagggcatcggagagtcacaagtccataggatgcaaaaaggaagatgaaataaaattgcctgaaaaacgcacctgaatttctggcattgtttactgaaaaggctgtgtattgatgaaccccaattatgtgaggtctacatttaagagtttataatcaacagtttgaaaatgcagggtgttgtttctttctataaggagacaaaacagtcagaagggagtgtcacaggacattatcacaaaatcaaagttctccatgaaatgtggttcatttgctagaaaataatgcaagcctattggagagaatcagggcttctagtgatgctagggatgaccttaagcattgtttgtaaatcacactttttcctagtctttcagcagcagctgcacagagtaggcctgcttcttcccatgaaagccacactgagttttatcaactagtagtgtgtgggcactattgcaagttatgttgtgttgtttatggccatttatccaacagtgctttcctctgtgcggggctctgcagcctcgttctatgttatttttattaccacgtgtctgtgcgcctcaggtggcaaagcagaatcagcttctctaccctcagcagggctcactatgactcactataagggaagaaaatcttacagatgtcagaaaatgttaggtaagtggacagtgataaacacaaaacagcaagtggtcagtatcaaagagaaaaacagtatgttggtgaaggagaagtatcaaagctagttaaaaaagtaacaggagaaatgtaaagggacaatactccacaaaaatttagattgtaactgagcttcttctcctaaagagatttaaaaataaagtataggaaatacatgaagaaacaaagtaaaatgccaaggtgtaagtttgaccatgaatatctagggaaaaacatacttgcactaaaacaaccaaatatgcaaaaatcaagtggaaaaacaggtcaaaataatgccagttgatgtctgtaagaactaaatgtataataaaatgagcaaaaaaaa

SEQ ID NO: 12797 - DNA, 1340 bp, Homo sapiens
  source 1..1340: mol_type = unassigned DNA
cagtgagatgagtcagaaaccggccaaggagggtcccagactctccaaaaaccagaagtactccgaacacttcagcatacactgctgcccgccgttcaccttcctcaattccaagaaggagatagtggatcggaaatacagcatctgtaagagcggctgcttctaccagaagaaagaggaggactggatctgctgcgcctgccagaagaccagaaccagccgccgtgccaagtcccctcagaggcccaagcaacagccagctgcgccccccgcggtggtcagagcgccagccaagccacggtcccctccgaggtctgagcgtcagccacggtcccctccgaggtctgagcgtcagccacggtcccctccgaggtctgagcgtcagccacggtcccctccgaggtctgagcgtcagccacgtccccgcccagaggtccgaccaccgccagccaagcagcgtccccctcagaagtccaagcaacagccgcgcagcagccccctcagagggccaggcgccagccgtggggggtcccccgtcaaagcttctaggttctggtaacaccatctcttcccttttgttccccagccctaagattgaaaaggaagatcaggccaaccccaaagaagaagtgaccaaggaggagtttaaactgaatgaacaacctcggctcctggactcattgcttcacaacccatctacccctggatgaagttatctggcttcaaatattatgcaggggcaaacacctgctgatgtggcaactgctgatgctcatggtccccatggcatgggggcctcagggcagcctgcctggagtactttgaagatgtcatcccattgtcttctgacctctataattgccactgagagatctgctgtcagtctgcttatccttccacggactcaagtttcttcaatctgaagatacatgtctttctccagggacatgtggaaaaaaaaaagatgttatacaaccatcaaagtggcaaaaataaaaaaaatcaagtattggcaaagatgtggggaaaattctcataagctactgatgagaatttataaattattatgacacctttgggttgcaatctggggatactggcaaagcagaaaattgtacaacctgtgatcaagcaataataattttaggcacccatcctagagaaaacttgaattcatagaaaaagtaggtacacgtaaatctgttcaaggaatcattgtttggcattgaaaataggagagagatcatgagaaattaccaaaatgtccaccaatagaatgagtgaatcacctgtggtatatttataaataaaaatattaaatagaaggtaaaacaaatcag

SEQ ID NO: 12798 - DNA, 911 bp, Homo sapiens
  source 1..911: mol_type = unassigned DNA
tgagatgagtcagaaaccggccaaggagggtcccagactctccaaaaaccagaagtactccgaacacttcagcatacactgctgcccgccgttcaccttcctcaattccaagaaggagatagtggatcggaaatacagcatctgtaagagcggctgcttctaccagaagaaagaggaggactggatctgctgcgcctgccagaagaccagaaccagccgccgtgccaagtcccctcagaggcccaagcaacagccagctgcgccccccgcggtggtcagagcgccagccaagccacggtcccctccgaggtctgagcgtcagccacggtcccctccgaggtctgagcgtcagccacggtcccctccgaggtctgagcgtcagccacggtcccctccgaggtctgagcgtcagccacgtccccgcccagaggtccgaccaccgccagccaagcagcgtccccctcagaagtccaagcaacagccgcgcagcagccccctcagagggccaggcgccagccgtggggggtcccccgtcaaagcttctaggttctgattgaaaaggaagatcaggccaaccccaaagaagaagtgaccaaggaggagtttaaactgaatgaacaacctcggctcctggactcattgcttcacaacccatctacccctggatgaagttatctggcttcaaatattatgcaggggcaaacacctgctgatgtggcaactgctgatgctcatggtccccatggcatgggggcctcagggcagcctgcctggagtactttgaagatgtcatcccattgtcttctgacctctataattgccactgagagatctgctgtcagtctgcttatccttccacggactcaagtttcttcaatctgaagatacatgtctttctccagggacatgtg

SEQ ID NO: 12799 - DNA, 545 bp, Homo sapiens
  source 1..545: mol_type = unassigned DNA
gcggctgcttctaccagaagaaagaggaggactggatctgctgcgcctgccagaagaccagattgaaaaggaagatcaggccaaccccaaagaagaagtgaccaaggaggagtttaaactgaatgaacaacctcggctcctggactcattgcttcacaacccatctacccctggatgaagttatctggcttcaaatattatgcaggggcaaacacctgctgatgtggcaactgctgatgctcatggtccccatggcatgggggcctcagggcagcctgcctggagtttactaccatcaagttcagtgctttgactttgatcaactgactgggtttatccaaagtacagtactttgaagatgtcatcccattgtcttctgacctctataattgccactgagagatctgctgtcagtctgcttatccttccacggactcaagtttcttcaatctgaagatacatgtctttctccagggacatgtggaaaaaaaaaagatgttatacaaccatcaaagtggcaaaaataaaaaaaatcaagtattggc

SEQ ID NO: 12800 - DNA, 2142 bp, Homo sapiens
  source 1..2142: mol_type = unassigned DNA
agcccttttgtgtgagtgcctggcaagggtgacgtggggctgtttctgcgggcacagctgcagcaattaccggagtggaggcagggcccaggcagcactgccctccaagatcttcccttgggcttttcagcagtaaggggacatgcaccccaagggcctccacttggcctgaccttgctgcgggggctctctgtccccaggaacagtagagatggcaagcttatcgagaccctctctgcccagctgcctctgctccttcctcctcctcctcctcctccaagtgtcttccagctatgcagggcagttcagagtgataggaccaagacaccctatccgggctctggtcggggatgaagtggaattgccatgtcgcatatctcctgggaagaacgctacaggcatggaggtggggtggtaccgcccccccttctctagggtggttcatctctacagaaatggcaaggaccaagatggagaccaggcacctgaatatcggggccggacagagctgctgaaagatgctattggtgagggaaaggtgactctcaggatccggaatgtaaggttctcagatgaaggaggtttcacctgcttcttccgagatcattcttaccaagaggaggcagcaatggaattgaaagtagaagatcctttctactgggtgagccctggagtgctggttctcctcgcggtgctgcctgtgctcctcctgcagatcactgttggcctcgtcttcctctgcctgcagtacagactgagaggaaaacttcgagcagagatagagaatctccaccggacttttgatccccactttctgagggtgccctgctggaagataaccctgtttgtaattgtgccggttcttggacccttggttgccttgatcatctgctacaactggctacatcgaagactagcagggcaattccttgaagagctacgaaatcccttctgagtgatgtcacatcttggcaggggtggaggagagcctggttgcccagggatttgtccttggggacatctcatccatcaagttgcacactcactggcatctttgctatggggacattccaatttgcactttcaggaacactctgaattccaagtagaattgatttcccttcttctgtcatctaccttttctcttcattttcccatttttattacccttctttccatttctctctccagtcttccacctggaagccctctctggctaaggacaggcaggtgcccctctctccatcagaggacacctgtactggagagcaacacaggatggtctctgccatgaactggaggccaggaatctcctcactgaaaattacagtatggtaactttgcaaatggtggttgtttcttccaagactccagccctgattgcgcaaaactgaaaggcatgtgaagggaaggaagaggaagagtgcaaaacattgaagagagagctgagtgagctgaagagtgaggatatgagtagccccaacccaaacctggagatggggagaaacctacagaatactagccagagctcctccttgtcttggcagcctactagggacctggggaagcaaaaacgaaagctgggcaacatgcctgctttagaatgttttccttctacttacacatcttccacaggtctcagaatctttccttcctctcatccttttctcctatcttcatatctatcagagtatccactgtttattcaacaactactacttgatggtcagacacaaacaaacaagctaggtgctaattaataaagatacgagttttggccgggtgcggtggctcacgcctgtaatcccagcactttgggaggccgaggcgggcgaatcacgaggtcaggagttcaagaccagcctggccaacatggtgaaaccccatctctactaaaaatacaaacaattaactgagcatagtggtgggcacctataataccagctactccggaggctgaggcaggagaatcgcttgaacccaggaggcagaggttgcagtgagctgagatcgcgccactgcactctagccggagtgacagagtaagactctgtctcaaaaataaataaataaataaataaataaataaataaataaataaataaaaaataataatacaagttttcataagcacacttctaa

SEQ ID NO: 12801 - DNA, 2499 bp, Homo sapiens
  source 1..2499: mol_type = unassigned DNA
agcactgccctccaagatcttcccttgggcttttcagcagtaaggggacatgcaccccaagggcctccacttggcctgaccttgctgcgggggctctctgtccccaggaacagtagagatggcaagcttatcgagaccctctctgcccagctgcctctgctccttcctcctcctcctcctcctccaagtgtcttccagctatgcagggcagttcagagtgataggaccaagacaccctatccgggctctggtcggggatgaagtggaattgccatgtcgcatatctcctgggaagaacgctacaggcatggaggtggggtggtaccgcccccccttctctagggtggttcatctctacagaaatggcaaggaccaagatggagaccaggcacctgaatatcggggccggacagagctgctgaaagatgctattggtgagggaaaggtgactctcaggatccggaatgtaaggttctcagatgaaggaggtttcacctgcttcttccgagatcattcttaccaagaggaggcagcaatggaattgaaagtagaagatcctttctactgggtgagccctggagtgctggttctcctcgcggtgctgcctgtgctcctcctgcagatcactgttggcctcgtcttcctctgcctgcagtacagactgagaggaaaacttcgagcagagatagagaatctccaccggacttttgatccccactttctgagggtgccctgctggaagataaccctgtttgtaattgtgccggttcttggacccttggttgccttgatcatctgctacaactggctacatcgaagactagcagggcaattccttgaagagctacgtaagttctcttctctctgttataagcagagaataaaaagccaggaaagggagacagaagcaacaagaggaagaggcgggctattgagggatcacattcccagaggaaaggaggagctggagagcctgggtggagggaagactcctcctgggaggtagagggcaaagaagccagctgttagagacacatttacaggtggcagagaagctggaggcactcctatctgccacctgatccattcctccttcactgcccctaagcaggaatccaaccctagctggtctcattgcccattccacagcaactgcccagtgcctcacctctcagatcaaccattgaggcaggaatggagacaagatgaccccaagggcttttcttctccctagttcaatggttttatgatacaaactactgacatacgtttttcaagttattttctccttcttctaggaaatcccttctgagtgatgtcacatcttggcaggggtggaggagagcctggttgcccagggatttgtccttggggacatctcatccatcaagttgcacactcactggcatctttgctatggggacattccaatttgcactttcaggaacactctgaattccaagtagaattgatttcccttcttctgtcatctaccttttctcttcattttcccatttttattacccttctttccatttctctctccagtcttccacctggaagccctctctggctaaggacaggcaggtgcccctctctccatcagaggacacctgtactggagagcaacacaggatggtctctgccatgaactggaggccaggaatctcctcactgaaaattacagtatggtaactttgcaaatggtggttgtttcttccaagactccagccctgattgcgcaaaactgaaaggcatgtgaagggaaggaagaggaagagtgcaaaacattgaagagagagctgagtgagctgaagagtgaggatatgagtagccccaacccaaacctggagatggggagaaacctacagaatactagccagagctcctccttgtcttggcagcctactagggacctggggaagcaaaaacgaaagctgggcaacatgcctgctttagaatgttttccttctacttacacatcttccacaggtctcagaatctttccttcctctcatccttttctcctatcttcatatctatcagagtatccactgtttattcaacaactactacttgatggtcagacacaaacaaacaagctaggtgctaattaataaagatacgagttttggccgggtgcggtggctcacgcctgtaatcccagcactttgggaggccgaggcgggcgaatcacgaggtcaggagttcaagaccagcctggccaacatggtgaaaccccatctctactaaaaatacaaacaattaactgagcatagtggtgggcacctataataccagctactccggaggctgaggcaggagaatcgcttgaacccaggaggcagaggttgcagtgagctgagatcgcgccactgcactctagccggagtgacagagtaagactctgtctcaaaaataaataaataaataaataaataaataaataaataaataaataaaaaataataatacaagttttcataagcacacttctaa

SEQ ID NO: 12802 - DNA, 1726 bp, Homo sapiens
  source 1..1726: mol_type = unassigned DNA
ggcagttcagagtgataggaccaagacaccctatccgggctctggtcggggatgaagtggaattgccatgtcgcatatctcctgggaagaacgctacaggcatggaggtggggtggtaccgcccccccttctctagggtggttcatctctacagaaatggcaaggaccaagatggagaccaggcacctgaatatcggggccggacagagctgctgaaagatgctattggtgagggaaaggtgactctcaggatccggaatgtaaggttctcagatgaaggaggtttcacctgcttcttccgagatcattcttaccaagaggaggcagcaatggaattgaaagtagaagatcctttctactgggtgagccctggagtgctggttctcctcgcggtgctgcctgtgctcctcctgcagatcactgttggcctcgtcttcctctgcctgcagtacagactgagaggaaaacttcgagcagagatagagaatctccaccggacttttgggcaattccttgaagagctacgaaatcccttctgagtgatgtcacatcttggcaggggtggaggagagcctggttgcccagggatttgtccttggggacatctcatccatcaagttgcacactcactggcatctttgctatggggacattccaatttgcactttcaggaacactctgaattccaagtagaattgatttcccttcttctgtcatctaccttttctcttcattttcccatttttattacccttctttccatttctctctccagtcttccacctggaagccctctctggctaaggacaggcaggtgcccctctctccatcagaggacacctgtactggagagcaacacaggatggtctctgccatgaactggaggccaggaatctcctcactgaaaattacagtatggtaactttgcaaatggtggttgtttcttccaagactccagccctgattgcgcaaaactgaaaggcatgtgaagggaaggaagaggaagagtgcaaaacattgaagagagagctgagtgagctgaagagtgaggatatgagtagccccaacccaaacctggagatggggagaaacctacagaatactagccagagctcctccttgtcttggcagcctactagggacctggggaagcaaaaacgaaagctgggcaacatgcctgctttagaatgttttccttctacttacacatcttccacaggtctcagaatctttccttcctctcatccttttctcctatcttcatatctatcagagtatccactgtttattcaacaactactacttgatggtcagacacaaacaaacaagctaggtgctaattaataaagatacgagttttggccgggtgcggtggctcacgcctgtaatcccagcactttgggaggccgaggcgggcgaatcacgaggtcaggagttcaagaccagcctggccaacatggtgaaaccccatctctactaaaaatacaaacaattaactgagcatagtggtgggcacctataataccagctactccggaggctgaggcaggagaatcgcttgaacccaggaggcagaggttgcagtgagctgagatcgcgccactgcactctagccggagtgacagagtaagactctgtctcaaaaataaataaataaataaataaataaataaataaataaataaataaaaaataataatacaagttttcataagcacacttctaa

SEQ ID NO: 12803 - DNA, 1681 bp, Homo sapiens
  source 1..1681: mol_type = unassigned DNA
atggcaagcttatcgagaccctctctgcccagctgcctctgctccttcctcctcctcctcctcctccaagtgtcttccagctatgcagggcagttcagagtgataggaccaagacaccctatccgggctctggtcggggatgaagtggaattgccatgtcgcatatctcctgggaagaacgctacaggcatggaggtggggtggtaccgcccccccttctctagggtggttcatctctacagaaatggcaaggaccaagatggagaccaggcacctgaatatcggggccggacagagctgctgaaagatgctattggtgagggaaaggtgactctcaggatccggaatgtaaggttctcagatgaaggaggtttcacctgcttcttccgagatcattcttaccaagaggaggcagcaatggaattgaaagtagaagatcctttctactgggtgagccctggagtgctggttctcctcgcggtgctgcctgtgctcctcctgcagatcactgttggcctcgtcttcctctgcctgcagtacagactgagaggaaaacttcgagcagagatagagaatctccaccggacttttgatccccactttctgagggtgccctgctggaagataaccctgtttgtaattgtgccggttcttggacccttggttgccttgatcatctgctacaactggctacatcgaagactagcagggcaattccttgaagagctactcttccacctggaagccctctctggctaaggacaggcaggtgcccctctctccatcagaggacacctgtactggagagcaacacaggatggtctctgccatgaactggaggccaggaatctcctcactgaaaattacagtatggtaactttgcaaatggtggttgtttcttccaagactccagccctgattgcgcaaaactgaaaggcatgtgaagggaaggaagaggaagagtgcaaaacattgaagagagagctgagtgagctgaagagtgaggatatgagtagccccaacccaaacctggagatggggagaaacctacagaatactagccagagctcctccttgtcttggcagcctactagggacctggggaagcaaaaacgaaagctgggcaacatgcctgctttagaatgttttccttctacttacacatcttccacaggtctcagaatctttccttcctctcatccttttctcctatcttcatatctatcagagtatccactgtttattcaacaactactacttgatggtcagacacaaacaaacaagctaggtgctaattaataaagatacgagttttggccgggtgcggtggctcacgcctgtaatcccagcactttgggaggccgaggcgggcgaatcacgaggtcaggagttcaagaccagcctggccaacatggtgaaaccccatctctactaaaaatacaaacaattaactgagcatagtggtgggcacctataataccagctactccggaggctgaggcaggagaatcgcttgaacccaggaggcagaggttgcagtgagctgagatcgcgccactgcactctagccggagtgacagagtaagactctgtctcaaaaataaataaataaataaataaataaataaataaataaataaataaaaaataataatacaagttttcataagcacacttctaa

SEQ ID NO: 12804 - DNA, 1612 bp, Homo sapiens
  source 1..1612: mol_type = unassigned DNA
atggcaagcttatcgagaccctctctgcccagctgcctctgctccttcctcctcctcctcctcctccaagtgtcttccagctatgcagggcagttcagagtgataggaccaagacaccctatccgggctctggtcggggatgaagtggaattgccatgtcgcatatctcctgggaagaacgctacaggcatggaggtggggtggtaccgcccccccttctctagggtggttcatctctacagaaatggcaaggaccaagatggagaccaggcacctgaatatcggggccggacagagctgctgaaagatgctattggtgagggaaaggtgactctcaggatccggaatgtaaggttctcagatgaaggaggtttcacctgcttcttccgagatcattcttaccaagaggaggcagcaatggaattgaaagtagaagatcctttctactgggtgagccctggagtgctggttctcctcgcggtgctgcctgtgctcctcctgcagatcactgttggcctcgtcttcctctgcctgcagtacagactgagaggaaaacttcgagcagagatagagaatctccaccggacttttgagtcctttggtgttctaggaccccaggttaaggaaccaaaaaagacagggcaattccttgaagagctactcttccacctggaagccctctctggctaaggacaggcaggtgcccctctctccatcagaggacacctgtactggagagcaacacaggatggtctctgccatgaactggaggccaggaatctcctcactgaaaattacagtatggtaactttgcaaatggtggttgtttcttccaagactccagccctgattgcgcaaaactgaaaggcatgtgaagggaaggaagaggaagagtgcaaaacattgaagagagagctgagtgagctgaagagtgaggatatgagtagccccaacccaaacctggagatggggagaaacctacagaatactagccagagctcctccttgtcttggcagcctactagggacctggggaagcaaaaacgaaagctgggcaacatgcctgctttagaatgttttccttctacttacacatcttccacaggtctcagaatctttccttcctctcatccttttctcctatcttcatatctatcagagtatccactgtttattcaacaactactacttgatggtcagacacaaacaaacaagctaggtgctaattaataaagatacgagttttggccgggtgcggtggctcacgcctgtaatcccagcactttgggaggccgaggcgggcgaatcacgaggtcaggagttcaagaccagcctggccaacatggtgaaaccccatctctactaaaaatacaaacaattaactgagcatagtggtgggcacctataataccagctactccggaggctgaggcaggagaatcgcttgaacccaggaggcagaggttgcagtgagctgagatcgcgccactgcactctagccggagtgacagagtaagactctgtctcaaaaataaataaataaataaataaataaataaataaataaataaataaaaaataataatacaagttttcataagcacacttctaa

SEQ ID NO: 12805 - DNA, 1564 bp, Homo sapiens
  source 1..1564: mol_type = unassigned DNA
atggcaagcttatcgagaccctctctgcccagctgcctctgctccttcctcctcctcctcctcctccaagtgtcttccagctatgcagggcagttcagagtgataggaccaagacaccctatccgggctctggtcggggatgaagtggaattgccatgtcgcatatctcctgggaagaacgctacaggcatggaggtggggtggtaccgcccccccttctctagggtggttcatctctacagaaatggcaaggaccaagatggagaccaggcacctgaatatcggggccggacagagctgctgaaagatgctattggtgagggaaaggtgactctcaggatccggaatgtaaggttctcagatgaaggaggtttcacctgcttcttccgagatcattcttaccaagaggaggcagcaatggaattgaaagtagaagatcctttctactgggtgagccctggagtgctggttctcctcgcggtgctgcctgtgctcctcctgcagatcactgttggcctcgtcttcctctgcctgcagtacagactgagaggaaaacttcgagcagagatagagaatctccaccggacttttgggcaattccttgaagagctactcttccacctggaagccctctctggctaaggacaggcaggtgcccctctctccatcagaggacacctgtactggagagcaacacaggatggtctctgccatgaactggaggccaggaatctcctcactgaaaattacagtatggtaactttgcaaatggtggttgtttcttccaagactccagccctgattgcgcaaaactgaaaggcatgtgaagggaaggaagaggaagagtgcaaaacattgaagagagagctgagtgagctgaagagtgaggatatgagtagccccaacccaaacctggagatggggagaaacctacagaatactagccagagctcctccttgtcttggcagcctactagggacctggggaagcaaaaacgaaagctgggcaacatgcctgctttagaatgttttccttctacttacacatcttccacaggtctcagaatctttccttcctctcatccttttctcctatcttcatatctatcagagtatccactgtttattcaacaactactacttgatggtcagacacaaacaaacaagctaggtgctaattaataaagatacgagttttggccgggtgcggtggctcacgcctgtaatcccagcactttgggaggccgaggcgggcgaatcacgaggtcaggagttcaagaccagcctggccaacatggtgaaaccccatctctactaaaaatacaaacaattaactgagcatagtggtgggcacctataataccagctactccggaggctgaggcaggagaatcgcttgaacccaggaggcagaggttgcagtgagctgagatcgcgccactgcactctagccggagtgacagagtaagactctgtctcaaaaataaataaataaataaataaataaataaataaataaataaataaaaaataataatacaagttttcataagcacacttctaa

SEQ ID NO: 12806 - DNA, 1537 bp, Homo sapiens
  source 1..1537: mol_type = unassigned DNA
agcttatcgagaccctctctgcccagctgcctctgctccttcctcctcctcctcctcctccaagtgtcttccagctatgcagggcagttcagagtgataggaccaagacaccctatccgggctctggtcggggatgaagtggaattgccatgtcgcatatctcctgggaagaacgctacaggcatggaggtggggtggtaccgcccccccttctctagggtggttcatctctacagaaatggcaaggaccaagatggagaccaggcacctgaatatcggggccggacagagctgctgaaagatgctattggtgagggaaaggtgactctcaggatccggaatgtaaggttctcagatgaaggaggtttcacctgcttcttccgagatcattcttaccaagaggaggcagcaatggaattgaaagtagaagatcctttctactgggtgagccctggagtgctggttctcctcgcggtgctgcctgtgctcctcctgcagatcactgttggcctcgtcttcctctgcctgcagtacagactgagaggaaaacttcgagcagagatagagaatctccaccggacttttgtcttccacctggaagccctctctggctaaggacaggcaggtgcccctctctccatcagaggacacctgtactggagagcaacacaggatggtctctgccatgaactggaggccaggaatctcctcactgaaaattacagtatggtaactttgcaaatggtggttgtttcttccaagactccagccctgattgcgcaaaactgaaaggcatgtgaagggaaggaagaggaagagtgcaaaacattgaagagagagctgagtgagctgaagagtgaggatatgagtagccccaacccaaacctggagatggggagaaacctacagaatactagccagagctcctccttgtcttggcagcctactagggacctggggaagcaaaaacgaaagctgggcaacatgcctgctttagaatgttttccttctacttacacatcttccacaggtctcagaatctttccttcctctcatccttttctcctatcttcatatctatcagagtatccactgtttattcaacaactactacttgatggtcagacacaaacaaacaagctaggtgctaattaataaagatacgagttttggccgggtgcggtggctcacgcctgtaatcccagcactttgggaggccgaggcgggcgaatcacgaggtcaggagttcaagaccagcctggccaacatggtgaaaccccatctctactaaaaatacaaacaattaactgagcatagtggtgggcacctataataccagctactccggaggctgaggcaggagaatcgcttgaacccaggaggcagaggttgcagtgagctgagatcgcgccactgcactctagccggagtgacagagtaagactctgtctcaaaaataaataaataaataaataaataaataaataaataaataaataaaaaataataatacaagttttcataagcacacttctaa

SEQ ID NO: 12807 - DNA, 1981 bp, Homo sapiens
  source 1..1981: mol_type = unassigned DNA
ggcagttcagagtgataggaccaagacaccctatccgggctctggtcggggatgaagtggaattgccatgtcgcatatctcctgggaagaacgctacaggcatggaggtggggtggtaccgcccccccttctctagggtggttcatctctacagaaatggcaaggaccaagatggagaccaggcacctgaatatcggggccggacagagctgctgaaagatgctattggtgagggaaaggtgactctcaggatccggaatgtaaggttctcagatgaaggaggtttcacctgcttcttccgagatcattcttaccaagaggaggcagcaatggaattgaaagtagaagtgtctcactctgtcacccaggattggttgcagtggcacgatcatggctcattgcagcctccacctcccaggctcaagtgatcctcctgactcagcctcttgaatagctgagaccacaggcttgtgtcaccatgcccagatcctttctactgggtgagccctggagtgctggttctcctcgcggtgctgcctgtgctcctcctgcagatcactgttggcctcgtcttcctctgcctgcagtacagactgagaggaaaacttcgagcagagatagagaatctccaccggacttttgatccccactttctgagggtgccctgctggaagataaccctgtttgtaattgtgccggttcttggacccttggttgccttgatcatctgctacaactggctacatcgaagactagcagggcaattccttgaagagctacgaaatcccttctgagtgatgtcacatcttggcaggggtggaggagagcctggttgcccagggatttgtccttggggacatctcatccatcaagttgcacactcactggcatctttgctatggggacattccaatttgcactttcaggaacactctgaattccaagtagaattgatttcccttcttctgtcatctaccttttctcttcattttcccatttttattacccttctttccatttctctctccagtcttccacctggaagccctctctggctaaggacaggcaggtgcccctctctccatcagaggacacctgtactggagagcaacacaggatggtctctgccatgaactggaggccaggaatctcctcactgaaaattacagtatggtaactttgcaaatggtggttgtttcttccaagactccagccctgattgcgcaaaactgaaaggcatgtgaagggaaggaagaggaagagtgcaaaacattgaagagagagctgagtgagctgaagagtgaggatatgagtagccccaacccaaacctggagatggggagaaacctacagaatactagccagagctcctccttgtcttggcagcctactagggacctggggaagcaaaaacgaaagctgggcaacatgcctgctttagaatgttttccttctacttacacatcttccacaggtctcagaatctttccttcctctcatccttttctcctatcttcatatctatcagagtatccactgtttattcaacaactactacttgatggtcagacacaaacaaacaagctaggtgctaattaataaagatacgagttttggccgggtgcggtggctcacgcctgtaatcccagcactttgggaggccgaggcgggcgaatcacgaggtcaggagttcaagaccagcctggccaacatggtgaaaccccatctctactaaaaatacaaacaattaactgagcatagtggtgggcacctataataccagctactccggaggctgaggcaggagaatcgcttgaacccaggaggcagaggttgcagtgagctgagatcgcgccactgcactctagccggagtgacagagtaagactctgtctcaaaaataaataaataaataaataaataaataaataaataaataaataaaaaataataatacaagttttcataagcacacttctaa

SEQ ID NO: 12808 - DNA, 1731 bp, Homo sapiens
  source 1..1731: mol_type = unassigned DNA
ggcagttcagagtgataggaccaagacaccctatccgggctctggtcggggatgaagtggaattgccatgtcgcatatctcctgggaagaacgctacaggcatggaggtggggtggtaccgcccccccttctctagggtggttcatctctacagaaatggcaaggaccaagatggagaccaggcacctgaatatcggggccggacagagctgctgaaagatgctattggtgagggaaaggtgactctcaggatccggaatgtaaggttctcagatgaaggaggtttcacctgcttcttccgagatcattcttaccaagaggaggcagcaatggaattgaaagtagaagtgtctcactctgtcacccaggattggttgcagtggcacgatcatggctcattgcagcctccacctcccaggctcaagtgatcctcctgactcagcctcttgaatagctgagaccacaggcttgtgtcaccatgcccagatcctttctactgggtgagccctggagtgctggttctcctcgcggtgctgcctgtgctcctcctgcagatcactgttggcctcgtcttcctctgcctgcagtacagactgagaggaaaacttcgagcagagatagagaatctccaccggacttttgatccccactttctgagggtgccctgctggaagataaccctgtttgtaattgtgccggttcttggacccttggttgccttgatcatctgctacaactggctacatcgaagactagcagggcaattccttgaagagctactcttccacctggaagccctctctggctaaggacaggcaggtgcccctctctccatcagaggacacctgtactggagagcaacacaggatggtctctgccatgaactggaggccaggaatctcctcactgaaaattacagtatggtaactttgcaaatggtggttgtttcttccaagactccagccctgattgcgcaaaactgaaaggcatgtgaagggaaggaagaggaagagtgcaaaacattgaagagagagctgagtgagctgaagagtgaggatatgagtagccccaacccaaacctggagatggggagaaacctacagaatactagccagagctcctccttgtcttggcagcctactagggacctggggaagcaaaaacgaaagctgggcaacatgcctgctttagaatgttttccttctacttacacatcttccacaggtctcagaatctttccttcctctcatccttttctcctatcttcatatctatcagagtatccactgtttattcaacaactactacttgatggtcagacacaaacaaacaagctaggtgctaattaataaagatacgagttttggccgggtgcggtggctcacgcctgtaatcccagcactttgggaggccgaggcgggcgaatcacgaggtcaggagttcaagaccagcctggccaacatggtgaaaccccatctctactaaaaatacaaacaattaactgagcatagtggtgggcacctataataccagctactccggaggctgaggcaggagaatcgcttgaacccaggaggcagaggttgcagtgagctgagatcgcgccactgcactctagccggagtgacagagtaagactctgtctcaaaaataaataaataaataaataaataaataaataaataaataaataaaaaataataatacaagttttcataagcacacttctaa

SEQ ID NO: 12809 - DNA, 1583 bp, Homo sapiens
  source 1..1583: mol_type = unassigned DNA
atggcaagcttatcgagaccctctctgcccagctgcctctgctccttcctcctcctcctcctcctccaagtgtcttccagctatgcagatcctttctactgggtgagccctggagtgctggttctcctcgcggtgctgcctgtgctcctcctgcagatcactgttggcctcgtcttcctctgcctgcagtacagactgagaggaaaacttcgagcagagatagagaatctccaccggacttttgatccccactttctgagggtgccctgctggaagataaccctgtttgtaattgtgccggttcttggacccttggttgccttgatcatctgctacaactggctacatcgaagactagcagggcaattccttgaagagctacgaaatcccttctgagtgatgtcacatcttggcaggggtggaggagagcctggttgcccagggatttgtccttggggacatctcatccatcaagttgcacactcactggcatctttgctatggggacattccaatttgcactttcaggaacactctgaattccaagtagaattgatttcccttcttctgtcatctaccttttctcttcattttcccatttttattacccttctttccatttctctctccagtcttccacctggaagccctctctggctaaggacaggcaggtgcccctctctccatcagaggacacctgtactggagagcaacacaggatggtctctgccatgaactggaggccaggaatctcctcactgaaaattacagtatggtaactttgcaaatggtggttgtttcttccaagactccagccctgattgcgcaaaactgaaaggcatgtgaagggaaggaagaggaagagtgcaaaacattgaagagagagctgagtgagctgaagagtgaggatatgagtagccccaacccaaacctggagatggggagaaacctacagaatactagccagagctcctccttgtcttggcagcctactagggacctggggaagcaaaaacgaaagctgggcaacatgcctgctttagaatgttttccttctacttacacatcttccacaggtctcagaatctttccttcctctcatccttttctcctatcttcatatctatcagagtatccactgtttattcaacaactactacttgatggtcagacacaaacaaacaagctaggtgctaattaataaagatacgagttttggccgggtgcggtggctcacgcctgtaatcccagcactttgggaggccgaggcgggcgaatcacgaggtcaggagttcaagaccagcctggccaacatggtgaaaccccatctctactaaaaatacaaacaattaactgagcatagtggtgggcacctataataccagctactccggaggctgaggcaggagaatcgcttgaacccaggaggcagaggttgcagtgagctgagatcgcgccactgcactctagccggagtgacagagtaagactctgtctcaaaaataaataaataaataaataaataaataaataaataaataaataaaaaataataatacaagttttcataagcacacttctaa

SEQ ID NO: 12810 - DNA, 1862 bp, Homo sapiens
  source 1..1862: mol_type = unassigned DNA
atggcaagcttatcgagaccctctctgcccagctgcctctgctccttcctcctcctcctcctcctccaagtgtcttccagctatgcagggcagttcagagtgataggaccaagacaccctatccgggctctggtcggggatgaagtggaattgccatgtcgcatatctcctgggaagaacgctacaggcatggaggtggggtggtaccgcccccccttctctagggtggttcatctctacagaaatggcaaggaccaagatggagaccaggcacctgaatatcggggccggacagagctgctgaaagatgctattggtgagggaaaggtgactctcaggatccggaatgtaaggttctcagatgaaggaggtttcacctgcttcttccgagatcattcttaccaagaggaggcagcaatggaattgaaagtagaagatcctttctactgggtgagccctggagtgctggttctcctcgcggtgctgcctgtgctcctcctgcagatcactgttggcctcgtcttcctctgcctgcagtacagactgagaggaaaacttcgagcagagatagagaatctccaccggacttttgagtcctttggtgttctaggaccccaggttaaggaaccaaaaaagacagggcaattccttgaagagctacgaaatcccttctgagtgatgtcacatcttggcaggggtggaggagagcctggttgcccagggatttgtccttggggacatctcatccatcaagttgcacactcactggcatctttgctatggggacattccaatttgcactttcaggaacactctgaattccaagtagaattgatttcccttcttctgtcatctaccttttctcttcattttcccatttttattacccttctttccatttctctctccagtcttccacctggaagccctctctggctaaggacaggcaggtgcccctctctccatcagaggacacctgtactggagagcaacacaggatggtctctgccatgaactggaggccaggaatctcctcactgaaaattacagtatggtaactttgcaaatggtggttgtttcttccaagactccagccctgattgcgcaaaactgaaaggcatgtgaagggaaggaagaggaagagtgcaaaacattgaagagagagctgagtgagctgaagagtgaggatatgagtagccccaacccaaacctggagatggggagaaacctacagaatactagccagagctcctccttgtcttggcagcctactagggacctggggaagcaaaaacgaaagctgggcaacatgcctgctttagaatgttttccttctacttacacatcttccacaggtctcagaatctttccttcctctcatccttttctcctatcttcatatctatcagagtatccactgtttattcaacaactactacttgatggtcagacacaaacaaacaagctaggtgctaattaataaagatacgagttttggccgggtgcggtggctcacgcctgtaatcccagcactttgggaggccgaggcgggcgaatcacgaggtcaggagttcaagaccagcctggccaacatggtgaaaccccatctctactaaaaatacaaacaattaactgagcatagtggtgggcacctataataccagctactccggaggctgaggcaggagaatcgcttgaacccaggaggcagaggttgcagtgagctgagatcgcgccactgcactctagccggagtgacagagtaagactctgtctcaaaaataaataaataaataaataaataaataaataaataaataaataaaaaataataatacaagttttcataagcacacttctaa

SEQ ID NO: 12811 - DNA, 702 bp, Homo sapiens
  source 1..702: mol_type = unassigned DNA
gggcacagctgcagcaattaccggagtggaggcagggcccaggcagcactgccctccaagatcttcccttgggcttttcagcagtaaggggacatgcaccccaagggcctccacttggcctgaccttgctgcgggggctctctgtccccaggaacagtagagatggcaagcttatcgagaccctctctgcccagctgcctctgctccttcctcctcctcctcctcctccaagtgtcttccagctatgcagttcagagtgataggaccaagacaccctatccgggctctggtcggggatgaagtggaattgccatgtcgcatatctcctgggaagaacgctacaggcatggaggtggggtggtaccgcccccccttctctagggtggttcatctctacagaaatggcaaggaccaagatggagaccaggcacctgaatatcggggccggacagagctgctgaaagatgctattggtgagggaaaggtgactctcaggatccggaatgtaaggttctcagatgaaggaggtttcacctgcttcttccgagatcattcttaccaagaggaggcagcaatggaattgaaagtagaagatcctttctactgggtgagccctggagtgctggttctcctcgcggtgctgcctgtgctcctcctgcagatcactgttggcctcgtcttcctctgcctgcagtacagact

SEQ ID NO: 12812 - DNA, 774 bp, Homo sapiens
  source 1..774: mol_type = unassigned DNA
agtaaggggacatgcaccccaagggcctccacttggcctgaccttgctgcgggggctctctgtccccaggaacagtagagatggcaagcttatcgagaccctctctgcccagctgcctctgctccttcctcctcctcctcctcctccaagtgtcttccagctatgcagggcagttcagagtgataggaccaagacaccctatccgggctctggtcggggatgaagtggaattgccatgtcgcatatctcctgggaagaacgctacaggcatggaggtggggtggtaccgcccccccttctctagggtggttcatctctacagaaatggcaaggaccaagatggagaccaggcacctgaatatcggggccggacagagctgctgaaagatgctattggtgagggaaaggtgactctcaggatccggaatgtaaggttctcagatgaaggaggtttcacctgcttcttccgagatcattcttaccaagaggaggcagcaatggaattgaaagtagaaggtgagtagtgccatataatattaggtattaactgttgggtggccaagaacaattattctctcaactgagatgagatccctcaacccaaacatctcagtcctgggaatgatttccataaaaatgtacacatcaataaacagaaactcatgcttagggatgtctgttgcatcattattcagagtagcaaggaaattgggatcaaaatcaatgcctttgagtaggtaagtgacagaatgaacaatggtagccatactgtga

SEQ ID NO: 12813 - DNA, 2041 bp, Homo sapiens
  source 1..2041: mol_type = unassigned DNA
gtcatcccctcagtctgtagcccttttgtgtgagtgcctggcaagggtgacgtggggctgtttctgcgggcacagctgcagcaattaccggagtggaggcagggcccaggcagcactgccctccaagatcttcccttgggcttttcagcagtaaggggacatgcaccccaagggcctccacttggcctgaccttgctgcgggggctctctgtccccaggaacagtagagatggcaagcttatcgagaccctctctgcccagctgcctctgctccttcctcctcctcctcctcctccaagtgtcttccagctatgcagggcagttcagagtgataggaccaagacaccctatccgggctctggtcggggatgaagtggaattgccatgtcgcatatctcctgggaagaacgctacaggcatggaggtggggtggtaccgcccccccttctctagggtggttcatctctacagaaatggcaaggaccaagatggagaccaggcacctgaatatcggggccggacagagctgctgaaagatgctattggtgagggaaaggtgactctcaggatccggaatgtaaggttctcagatgaaggaggtttcacctgcttcttccgagatcattcttaccaagaggaggcagcaatggaattgaaagtagaagatcctttctactgggtgagccctggagtgctggttctcctcgcggtgctgcctgtgctcctcctgcagatcactgttggcctcgtcttcctctgcctgcagtacagactgagaggaaaacttcgagcagagatagagaatctccaccggacttttgggcaattccttgaagagctacgaaatcccttctgagtgatgtcacatcttggcaggggtggaggagagcctggttgcccagggatttgtccttggggacatctcatccatcaagttgcacactcactggcatctttgctatggggacattccaatttgcactttcaggaacactctgaattccaagtagaattgatttcccttcttctgtcatctaccttttctcttcattttcccatttttattacccttctttccatttctctctccagtcttccacctggaagccctctctggctaaggacaggcaggtgcccctctctccatcagaggacacctgtactggagagcaacacaggatggtctctgccatgaactggaggccaggaatctcctcactgaaaattacagtatggtaactttgcaaatggtggttgtttcttccaagactccagccctgattgcgcaaaactgaaaggcatgtgaagggaaggaagaggaagagtgcaaaacattgaagagagagctgagtgagctgaagagtgaggatatgagtagccccaacccaaacctggagatggggagaaacctacagaatactagccagagctcctccttgtcttggcagcctactagggacctggggaagcaaaaacgaaagctgggcaacatgcctgctttagaatgttttccttctacttacacatcttccacaggtctcagaatctttccttcctctcatccttttctcctatcttcatatctatcagagtatccactgtttattcaacaactactacttgatggtcagacacaaacaaacaagctaggtgctaattaataaagatacgagttttggccgggtgcggtggctcacgcctgtaatcccagcactttgggaggccgaggcgggcgaatcacgaggtcaggagttcaagaccagcctggccaacatggtgaaaccccatctctactaaaaatacaaacaattaactgagcatagtggtgggcacctataataccagctactccggaggctgaggcaggagaatcgcttgaacccaggaggcagaggttgcagtgagctgagatcgcgccactgcactctagccggagtgacagagtaagactctgtctcaaaaataaataaataaataaataaataaataaataaataaataaataaaaaataataatacaagttttcataagcacacttct

SEQ ID NO: 12814 - DNA, 2160 bp, Homo sapiens
  source 1..2160: mol_type = unassigned DNA
gtcatcccctcagtctgtagcccttttgtgtgagtgcctggcaagggtgacgtggggctgtttctgcgggcacagctgcagcaattaccggagtggaggcagggcccaggcagcactgccctccaagatcttcccttgggcttttcagcagtaaggggacatgcaccccaagggcctccacttggcctgaccttgctgcgggggctctctgtccccaggaacagtagagatggcaagcttatcaagaccctctctgcccagctgcctctgctccttcctcctcctcctcctcctccaagtgtcttccagctatgcagggcagttcagagtgataggaccaagacaccctatccgggctctggtcggggatgaagtggaattgccatgtcgcatatctcctgggaagaacgctacaggcatggaggtggggtggtaccgcccccccttctctagggtggttcatctctacagaaatggcaaggaccaagatggagaccaggcacctgaatatcggggccggacagagctgctgaaagatgctattggtgagggaaaggtgactctcaggatccggaatgtaaggttctcagatgaaggaggtttcacctgcttcttccgagatcattcttaccaagaggaggcagcaatggaattgaaagtagaagatcctttctactgggtgagccctggagtgctggttctcctcgcggtgctgcctgtgctcctcctgcagatcactgttggcctcatcttcctctgcctgcagtacagactgagaggaaaacttcgagcagagatagagaatctccaccggacttttgatccccactttctgagggtgccctgctggaagataaccctgtttgtaattgtgccggttcttggacccttggttgccttgatcatctgctacaactggctacatcgaagactagcagggcaattccttgaagagctacgaaatcccttctgagtgatgtcacatcttggcaggggtggaggagagcctggttgcccagggatttgtccttggggacatctcatccatcaagttgcacactcactggcatctttgctatggggacattccaatttgcactttcaggaacactctgaattccaagtagaattgatttcccttcttctgtcatctaccttttctcttcattttcccatttttattacccttctttccatttctctctccagtcttccacctggaagccctctctggctaaggacaggcaggtgcccctctctccatcagaggacacctgtactggagagcaacacaggatggtctctgccatgaactggaggccaggaatctcctcactgaaaattacagtatggtaactttgcaaatggtggttgtttcttccaagactccagccctgattgcgcaaaactgaaaggcatgtgaagggaaggaagaggaagagtgcaaaacattgaagagagagctgagtgagctgaagagtgaggatatgagtagccccaacccaaacctggagatggggagaaacctacagaatactagccagagctcctccttgtcttggcagcctactagggacctggggaagcaaaaacgaaagctgggcaacatgcctgctttagaatgttttccttctacttacacatcttccacaggtctcagaatctttccttcctctcatccttttctcctatcttcatatctatcagagtatccactgtttattcaacaactactacttgatggtcagacacaaacaaacaagctaggtgctaattaataaagatacgagttttggccgggtgcggtggctcacgcctgtaatcccagcactttgggaggccgaggcgggcgaatcacgaggtcaggagttcaagaccagcctggccaacatggtgaaaccccatctctactaaaaatacaaacaattaactgagcatagtggtgggcacctataataccagctactccggaggctgaggcaggagaatcgcttgaacccaggaggcagaggttgcagtgagctgagatcgtgccactgcactctagccggagtgacagagtaagactctgtctcaaaaataaataaataaataaataaataaataaataaataaataaataaaaaataataatacaagttttcataagcacacttctaa

SEQ ID NO: 12815 - DNA, 748 bp, Homo sapiens
  source 1..748: mol_type = unassigned DNA
ccttttgtgtgagtgcctggcaagggtgacgtggggctgtttctgcgggcacagctgcagcaattaccggagtggaggcagggcccaggcagcactgccctccaagatcttcccttgggcttttcagcagtaaggggacatgcaccccaagggcctccacttggcctgaccttgctgcgggggctctctgtccccaggaacagtagagatggcaagcttatcaagaccctctctgcccagctgcctctgctccttcctcctcctcctcctcctccaagtgtcttccagctatgcagttcagagtgataggaccaagacaccctatccgggctctggtcggggatgaagtggaattgccatgtcgcatatctcctgggaagaacgctacaggcatggaggtggggtggtaccgcccccccttctctagggtggttcatctctacagaaatggcaaggaccaagatggagaccaggcacctgaatatcggggccggacagagctgctgaaagatgctattggtgagggaaaggtgactctcaggatccggaatgtaaggttctcagatgaaggaggtttcacctgcttcttccgagatcattcttaccaagaggaggcagcaatggaattgaaagtagaagatcctttctactgggtgagccctggagtgctggttctcctcgcggtgctgcctgtgctcctcctgcagatcactgttggcctcatcttcctctgcctgcagtacagact

SEQ ID NO: 12816 - DNA, 1529 bp, Homo sapiens
  source 1..1529: mol_type = unassigned DNA
cttttgtgtgagtgcctggcaagggtgacgtggggctgtttctgcgggcacagctgcagcaattaccggagtggaggcagggcccaggcagcactgccctccaagatcttcccttgggcttttcagcagtaaggggacatgcaccccaagggcctccacttggcctgaccttgctgcgggggctctctgtccccaggaacagtagagatggcaagcttatcaagaccctctctgcccagctgcctctgctccttcctcctcctcctcctcctccaagtgtcttccagctatgcagatcctttctactgggtgagccctggagtgctggttctcctcgcggtgctgcctgtgctcctcctgcagatcactgttggcctcatcttcctctgcctgcagtacagactgagaggaaaacttcgagcagagatagagaatctccaccggacttttgatccccactttctgagggtgccctgctggaagataaccctgtttgtaattgtgccggttcttggacccttggttgccttgatcatctgctacaactggctacatcgaagactagcagggcaattccttgaagagctacgaaatcccttctgagtgatgtcacatcttggcaggggtggaggagagcctggttgcccagggatttgtccttggggacatctcatccatcaagttgcacactcactggcatctttgctatggggacattccaatttgcactttcaggaacactctgaattccaagtagaattgatttcccttcttctgtcatctaccttttctcttcattttcccatttttattacccttctttccatttctctctccagtcttccacctggaagccctctctggctaaggacaggcaggtgcccctctctccatcagaggacacctgtactggagagcaacacaggatggtctctgccatgaactggaggccaggaatctcctcactgaaaattacagtatggtaactttgcaaatggtggttgtttcttccaagactccagccctgattgcgcaaaactgaaaggcatgtgaagggaaggaagaggaagagtgcaaaacattgaagagagagctgagtgagctgaagagtgaggatatgagtagccccaacccaaacctggagatggggagaaacctacagaatactagccagagctcctccttgtcttggcagcctactagggacctggggaagcaaaaacgaaagctgggcaacatgcctgctttagaatgttttccttctacttacacatcttccacaggtctcagaatctttccttcctctcatccttttctcctatcttcatatctatcagagtatccactgtttattcaacaactactacttgatggtcagacacaaacaaacaagctaggtgctaattaataaagatacgagttttggccgggtgcggtggctcacgcctgtaatcccagcactttgggaggccgaggcgggcgaatcacgaggtcaggagttcaagaccagcctggccaacatggtgaaa

SEQ ID NO: 12817 - DNA, 2499 bp, Homo sapiens
  source 1..2499: mol_type = unassigned DNA
agcactgccctccaagatcttcccttgggcttttcagcagtaaggggacatgcaccccaagggcctccacttggcctgaccttgctgcgggggctctctgtccccaggaacagtagagatggcaagcttatcaagaccctctctgcccagctgcctctgctccttcctcctcctcctcctcctccaagtgtcttccagctatgcagggcagttcagagtgataggaccaagacaccctatccgggctctggtcggggatgaagtggaattgccatgtcgcatatctcctgggaagaacgctacaggcatggaggtggggtggtaccgcccccccttctctagggtggttcatctctacagaaatggcaaggaccaagatggagaccaggcacctgaatatcggggccggacagagctgctgaaagatgctattggtgagggaaaggtgactctcaggatccggaatgtaaggttctcagatgaaggaggtttcacctgcttcttccgagatcattcttaccaagaggaggcagcaatggaattgaaagtagaagatcctttctactgggtgagccctggagtgctggttctcctcgcggtgctgcctgtgctcctcctgcagatcactgttggcctcatcttcctctgcctgcagtacagactgagaggaaaacttcgagcagagatagagaatctccaccggacttttgatccccactttctgagggtgccctgctggaagataaccctgtttgtaattgtgccggttcttggacccttggttgccttgatcatctgctacaactggctacatcgaagactagcagggcaattccttgaagagctacgtaagttctcttctctctgttataagcagagaataaaaagccaggaaagggagacagaagcaacaagaggaagaggcgggctattgagggatcacattcccagaggaaaggaggagctggagagcctgggtggagggaagactcctcctgggaggtagagggcaaagaagccagctgttagagacacatttacaggtggcagagaagctggaggcactcctatctgccacctgatccattcctccttcactgcccctaagcaggaatccaaccctagctggtctcattgcccattccacagcaactgcccagtgcctcacctctcagatcaaccattgaggcaggaatggagacaagatgaccccaagggcttttcttctccctagttcaatggttttatgatacaaactactgacatacgtttttcaagttattttctccttcttctaggaaatcccttctgagtgatgtcacatcttggcaggggtggaggagagcctggttgcccagggatttgtccttggggacatctcatccatcaagttgcacactcactggcatctttgctatggggacattccaatttgcactttcaggaacactctgaattccaagtagaattgatttcccttcttctgtcatctaccttttctcttcattttcccatttttattacccttctttccatttctctctccagtcttccacctggaagccctctctggctaaggacaggcaggtgcccctctctccatcagaggacacctgtactggagagcaacacaggatggtctctgccatgaactggaggccaggaatctcctcactgaaaattacagtatggtaactttgcaaatggtggttgtttcttccaagactccagccctgattgcgcaaaactgaaaggcatgtgaagggaaggaagaggaagagtgcaaaacattgaagagagagctgagtgagctgaagagtgaggatatgagtagccccaacccaaacctggagatggggagaaacctacagaatactagccagagctcctccttgtcttggcagcctactagggacctggggaagcaaaaacgaaagctgggcaacatgcctgctttagaatgttttccttctacttacacatcttccacaggtctcagaatctttccttcctctcatccttttctcctatcttcatatctatcagagtatccactgtttattcaacaactactacttgatggtcagacacaaacaaacaagctaggtgctaattaataaagatacgagttttggccgggtgcggtggctcacgcctgtaatcccagcactttgggaggccgaggcgggcgaatcacgaggtcaggagttcaagaccagcctggccaacatggtgaaaccccatctctactaaaaatacaaacaattaactgagcatagtggtgggcacctataataccagctactccggaggctgaggcaggagaatcgcttgaacccaggaggcagaggttgcagtgagctgagatcgtgccactgcactctagccggagtgacagagtaagactctgtctcaaaaataaataaataaataaataaataaataaataaataaataaataaaaaataataatacaagttttcataagcacacttctaa

SEQ ID NO: 12818 - DNA, 774 bp, Homo sapiens
  source 1..774: mol_type = unassigned DNA
agtaaggggacatgcaccccaagggcctccacttggcctgaccttgctgcgggggctctctgtccccaggaacagtagagatggcaagcttatcaagaccctctctgcccagctgcctctgctccttcctcctcctcctcctcctccaagtgtcttccagctatgcagggcagttcagagtgataggaccaagacaccctatccgggctctggtcggggatgaagtggaattgccatgtcgcatatctcctgggaagaacgctacaggcatggaggtggggtggtaccgcccccccttctctagggtggttcatctctacagaaatggcaaggaccaagatggagaccaggcacctgaatatcggggccggacagagctgctgaaagatgctattggtgagggaaaggtgactctcaggatccggaatgtaaggttctcagatgaaggaggtttcacctgcttcttccgagatcattcttaccaagaggaggcagcaatggaattgaaagtagaaggtgagtagtgccatataatattaggtattaactgttgggtggccaagaacaattattctctcaactgagatgagatccctcaacccaaacatctcagtcctgggaatgatttccataaaaatgtacacatcaataaacagaaactcatgcttagggatgtctgttgcatcattattcagagtagcaaggaaattgggatcaaaatcaatgcctttgagtaggtaagtgacagaatgaacaatggtagccatactgtga

SEQ ID NO: 12819 - DNA, 675 bp, Homo sapiens
  source 1..675: mol_type = unassigned DNA
atggcaagcttatcaagaccctctctgcccagctgcctctgctccttcctcctcctcctcctcctccaagtgtcttccagctatgcagggcagttcagagtgataggaccaagacaccctatccgggctctggtcggggatgaagtggaattgccatgtcgcatatctcctgggaagaacgctacaggcatggaggtggggtggtaccgcccccccttctctagggtggttcatctctacagaaatggcaaggaccaagatggagaccaggcacctgaatatcggggccggacagagctgctgaaagatgctattggtgagggaaaggtgactctcaggatccggaatgtaaggttctcagatgaaggaggtttcacctgcttcttccgagatcattcttaccaagaggaggcagcaatggaattgaaagtagaagatcctttctactgggtgagccctggagtgctggttctcctcgcggtgctgcctgtgctcctcctgcagatcactgttggcctcatcttcctctgcctgcagtacagactgagaggaaaacttcgagcagagatagagaatctccaccggacttttgagtcctttggtgttctaggaccccaggttaaggaaccaaaaaagacagggcaattccttgaagagctacgaaatcccttctga

SEQ ID NO: 12820 - DNA, 279 bp, Homo sapiens
  source 1..279: mol_type = unassigned DNA
atggcaagcttatcaagaccctctctgcccagctgcctctgctccttcctcctcctcctcctcctccaagtgtcttccagctatgcagatcctttctactgggtgagccctggagtgctggttctcctcgcggtgctgcctgtgctcctcctgcagatcactgttggcctcatcttcctctgcctgcagtacagactgagaggaaaacttcgagcagagatagagaatctccaccggacttttgggcaattccttgaagagctacgaaatcccttctga

SEQ ID NO: 12821 - DNA, 327 bp, Homo sapiens
  source 1..327: mol_type = unassigned DNA
atggcaagcttatcaagaccctctctgcccagctgcctctgctccttcctcctcctcctcctcctccaagtgtcttccagctatgcagatcctttctactgggtgagccctggagtgctggttctcctcgcggtgctgcctgtgctcctcctgcagatcactgttggcctcatcttcctctgcctgcagtacagactgagaggaaaacttcgagcagagatagagaatctccaccggacttttgagtcctttggtgttctaggaccccaggttaaggaaccaaaaaagacagggcaattccttgaagagctacgaaatcccttctga

SEQ ID NO: 12822 - DNA, 630 bp, Homo sapiens
  source 1..630: mol_type = unassigned DNA
atggcaagcttatcaagaccctctctgcccagctgcctctgctccttcctcctcctcctcctcctccaagtgtcttccagctatgcagggcagttcagagtgataggaccaagacaccctatccgggctctggtcggggatgaagtggaattgccatgtcgcatatctcctgggaagaacgctacaggcatggaggtggggtggtaccgcccccccttctctagggtggttcatctctacagaaatggcaaggaccaagatggagaccaggcacctgaatatcggggccggacagagctgctgaaagatgctattggtgagggaaaggtgactctcaggatccggaatgtaaggttctcagatgaaggaggtttcacctgcttcttccgagatcattcttaccaagaggaggcagcaatggaattgaaagtagaaggaaaacttcgagcagagatagagaatctccaccggacttttgatccccactttctgagggtgccctgctggaagataaccctgtttgtaattgtgccggttcttggacccttggttgccttgatcatctgctacaactggctacatcgaagactagcagggcaattccttgaagagctacgaaatcccttctga

SEQ ID NO: 12823 - DNA, 889 bp, Homo sapiens
  source 1..889: mol_type = unassigned DNA
atggcaagcttatcaagaccctctctgcccagctgcctctgctccttcctcctcctcctcctcctccaagtgtcttccagctatgcagggcagttcagagtgataggaccaagacaccctatccgggctctggtcggggatgaagtggaattgccatgtcgcatatctcctgggaagaacgctacaggcatggaggtggggtggtaccgcccccccttctctagggtggttcatctctacagaaatggcaaggaccaagatggagaccaggcacctgaatatcggggccggacagagctgctgaaagatgctattggtgagggaaaggtgactctcaggatccggaatgtaaggttctcagatgaaggaggtttcacctgcttcttccgagatcattcttaccaagaggaggcagcaatggaattgaaagtagaagatcctttctactgggtgagccctggagtgctggttctcctcgcggtgctgcctgtgctcctcctgcagatcactgttggcctcatcttcctctgcctgcagtacagactgagaggaaaacttcgagcagagatagagaatctccaccggacttttgtcttccacctggaagccctctctggctaaggacaggcaggtgcccctctctccatcagaggacacctgtactggagagcaacacaggatggtctctgccatgaactggaggccaggaatctcctcactgaaaattacagtatggtaactttgcaaatggtggttgtttcttccaagactccagccctgattgcgcaaaactgaaaggcatgtgaagggaaggaagaggaagagtgcaaaacattgaagagagagctgagtgagctgaagagtgaggatatgagtagccccaacccaa

SEQ ID NO: 12824 - DNA, 1027 bp, Homo sapiens
  source 1..1027: mol_type = unassigned DNA
atggcaagcttatcaagaccctctctgcccagctgcctctgctccttcctcctcctcctcctcctccaagtgtcttccagctatgcagggcagttcagagtgataggaccaagacaccctatccgggctctggtcggggatgaagtggaattgccatgtcgcatatctcctgggaagaacgctacaggcatggaggtggggtggtaccgcccccccttctctagggtggttcatctctacagaaatggcaaggaccaagatggagaccaggcacctgaatatcggggccggacagagctgctgaaagatgctattggtgagggaaaggtgactctcaggatccggaatgtaaggttctcagatgaaggaggtttcacctgcttcttccgagatcattcttaccaagaggaggcagcaatggaattgaaagtagaagatcctttctactgggtgagccctggagtgctggttctcctcgcggtgctgcctgtgctcctcctgcagatcactgttggcctcatcttcctctgcctgcagtacagactgagaggaaaacttcgagcagagatagagaatctccaccggacttttgatccccactttctgagggtgccctgctggaagataaccctgtttgtaattgtgccggttcttggacccttggttgccttgatcatctgctacaactggctacatcgaagactagcagggcaattccttgaagagctactcttccacctggaagccctctctggctaaggacaggcaggtgcccctctctccatcagaggacacctgtactggagagcaacacaggatggtctctgccatgaactggaggccaggaatctcctcactgaaaattacagtatggtaactttgcaaatggtggttgtttcttccaagactccagccctgattgcgcaaaactgaaaggcatgtgaagggaaggaagaggaagagtgcaaaacattgaagagagagctgagtgagctgaagagtgaggatatgagtagccccaacccaa

SEQ ID NO: 12825 - DNA, 910 bp, Homo sapiens
  source 1..910: mol_type = unassigned DNA
atggcaagcttatcaagaccctctctgcccagctgcctctgctccttcctcctcctcctcctcctccaagtgtcttccagctatgcagggcagttcagagtgataggaccaagacaccctatccgggctctggtcggggatgaagtggaattgccatgtcgcatatctcctgggaagaacgctacaggcatggaggtggggtggtaccgcccccccttctctagggtggttcatctctacagaaatggcaaggaccaagatggagaccaggcacctgaatatcggggccggacagagctgctgaaagatgctattggtgagggaaaggtgactctcaggatccggaatgtaaggttctcagatgaaggaggtttcacctgcttcttccgagatcattcttaccaagaggaggcagcaatggaattgaaagtagaagatcctttctactgggtgagccctggagtgctggttctcctcgcggtgctgcctgtgctcctcctgcagatcactgttggcctcatcttcctctgcctgcagtacagactgagaggaaaacttcgagcagagatagagaatctccaccggacttttgggcaattccttgaagagctactcttccacctggaagccctctctggctaaggacaggcaggtgcccctctctccatcagaggacacctgtactggagagcaacacaggatggtctctgccatgaactggaggccaggaatctcctcactgaaaattacagtatggtaactttgcaaatggtggttgtttcttccaagactccagccctgattgcgcaaaactgaaaggcatgtgaagggaaggaagaggaagagtgcaaaacattgaagagagagctgagtgagctgaagagtgaggatatgagtagccccaacccaa

SEQ ID NO: 12826 - DNA, 958 bp, Homo sapiens
  source 1..958: mol_type = unassigned DNA
atggcaagcttatcaagaccctctctgcccagctgcctctgctccttcctcctcctcctcctcctccaagtgtcttccagctatgcagggcagttcagagtgataggaccaagacaccctatccgggctctggtcggggatgaagtggaattgccatgtcgcatatctcctgggaagaacgctacaggcatggaggtggggtggtaccgcccccccttctctagggtggttcatctctacagaaatggcaaggaccaagatggagaccaggcacctgaatatcggggccggacagagctgctgaaagatgctattggtgagggaaaggtgactctcaggatccggaatgtaaggttctcagatgaaggaggtttcacctgcttcttccgagatcattcttaccaagaggaggcagcaatggaattgaaagtagaagatcctttctactgggtgagccctggagtgctggttctcctcgcggtgctgcctgtgctcctcctgcagatcactgttggcctcatcttcctctgcctgcagtacagactgagaggaaaacttcgagcagagatagagaatctccaccggacttttgagtcctttggtgttctaggaccccaggttaaggaaccaaaaaagacagggcaattccttgaagagctactcttccacctggaagccctctctggctaaggacaggcaggtgcccctctctccatcagaggacacctgtactggagagcaacacaggatggtctctgccatgaactggaggccaggaatctcctcactgaaaattacagtatggtaactttgcaaatggtggttgtttcttccaagactccagccctgattgcgcaaaactgaaaggcatgtgaagggaaggaagaggaagagtgcaaaacattgaagagagagctgagtgagctgaagagtgaggatatgagtagccccaacccaa

SEQ ID NO: 12827 - DNA, 1814 bp, Homo sapiens
  source 1..1814: mol_type = unassigned DNA
atggcaagcttatcaagaccctctctgcccagctgcctctgctccttcctcctcctcctcctcctccaagtgtcttccagctatgcagggcagttcagagtgataggaccaagacaccctatccgggctctggtcggggatgaagtggaattgccatgtcgcatatctcctgggaagaacgctacaggcatggaggtggggtggtaccgcccccccttctctagggtggttcatctctacagaaatggcaaggaccaagatggagaccaggcacctgaatatcggggccggacagagctgctgaaagatgctattggtgagggaaaggtgactctcaggatccggaatgtaaggttctcagatgaaggaggtttcacctgcttcttccgagatcattcttaccaagaggaggcagcaatggaattgaaagtagaagatcctttctactgggtgagccctggagtgctggttctcctcgcggtgctgcctgtgctcctcctgcagatcactgttggcctcatcttcctctgcctgcagtacagactgagaggaaaacttcgagcagagatagagaatctccaccggacttttgggcaattccttgaagagctacgaaatcccttctgagtgatgtcacatcttggcaggggtggaggagagcctggttgcccagggatttgtccttggggacatctcatccatcaagttgcacactcactggcatctttgctatggggacattccaatttgcactttcaggaacactctgaattccaagtagaattgatttcccttcttctgtcatctaccttttctcttcattttcccatttttattacccttctttccatttctctctccagtcttccacctggaagccctctctggctaaggacaggcaggtgcccctctctccatcagaggacacctgtactggagagcaacacaggatggtctctgccatgaactggaggccaggaatctcctcactgaaaattacagtatggtaactttgcaaatggtggttgtttcttccaagactccagccctgattgcgcaaaactgaaaggcatgtgaagggaaggaagaggaagagtgcaaaacattgaagagagagctgagtgagctgaagagtgaggatatgagtagccccaacccaaacctggagatggggagaaacctacagaatactagccagagctcctccttgtcttggcagcctactagggacctggggaagcaaaaacgaaagctgggcaacatgcctgctttagaatgttttccttctacttacacatcttccacaggtctcagaatctttccttcctctcatccttttctcctatcttcatatctatcagagtatccactgtttattcaacaactactacttgatggtcagacacaaacaaacaagctaggtgctaattaataaagatacgagttttggccgggtgcggtggctcacgcctgtaatcccagcactttgggaggccgaggcgggcgaatcacgaggtcaggagttcaagaccagcctggccaacatggtgaaaccccatctctactaaaaatacaaacaattaactgagcatagtggtgggcacctataataccagctactccggaggctgaggcaggagaatcgcttgaacccaggaggcagaggttgcagtgagctgagatcgtgccactgcactctagccggagtgacagagtaagactctgtctcaaaaataaataaataaataaataaataaataaataaataaataaataaaaaataataatacaagttttcataagcacacttctaa

SEQ ID NO: 12828 - DNA, 456 bp, Homo sapiens
  source 1..456: mol_type = unassigned DNA
agcttatcaagaccctctctgcccagctgcctctgctccttcctcctcctcctcctcctccaagtgtcttccagctatgcagggcagttcagagtgataggaccaagacaccctatccgggctctggtcggggatgaagtggaattgccatgtcgcatatctcctgggaagaacgctacaggcatggaggtggggtggtaccgcccccccttctctagggtggttcatctctacagaaatggcaaggaccaagatggagaccaggcacctgaatatcggggccggacagagctgctgaaagatgctattggtgagggaaaggtgactctcaggatccggaatgtaaggttctcagatgaaggaggtttcacctgcttcttccgagatcattcttaccaagaggaggcagcaatggaattgaaagtagaagctcccttaaagcagagatcaagatga

SEQ ID NO: 12829 - DNA, 516 bp, Homo sapiens
  source 1..516: mol_type = unassigned DNA
agcttatcaagaccctctctgcccagctgcctctgctccttcctcctcctcctcctcctccaagtgtcttccagctatgcagggcagttcagagtgataggaccaagacaccctatccgggctctggtcggggatgaagtggaattgccatgtcgcatatctcctgggaagaacgctacaggcatggaggtggggtggtaccgcccccccttctctagggtggttcatctctacagaaatggcaaggaccaagatggagaccaggcacctgaatatcggggccggacagagctgctgaaagatgctattggtgagggaaaggtgactctcaggatccggaatgtaaggttctcagatgaaggaggtttcacctgcttcttccgagatcattcttaccaagaggaggcagcaatggaattgaaagtagaaggattggttgcagtggcacgatcatggctcattgcagcctccacctcccaggctcaagtgatcctcctgactcagcctcttgaatag

SEQ ID NO: 12830 - DNA, 1077 bp, Homo sapiens
  source 1..1077: mol_type = unassigned DNA
ggcagttcagagtgataggaccaagacaccctatccgggctctggtcggggatgaagtggaattgccatgtcgcatatctcctgggaagaacgctacaggcatggaggtggggtggtaccgcccccccttctctagggtggttcatctctacagaaatggcaaggaccaagatggagaccaggcacctgaatatcggggccggacagagctgctgaaagatgctattggtgagggaaaggtgactctcaggatccggaatgtaaggttctcagatgaaggaggtttcacctgcttcttccgagatcattcttaccaagaggaggcagcaatggaattgaaagtagaagtgtctcactctgtcacccaggattggttgcagtggcacgatcatggctcattgcagcctccacctcccaggctcaagtgatcctcctgactcagcctcttgaatagctgagaccacaggcttgtgtcaccatgcccagatcctttctactgggtgagccctggagtgctggttctcctcgcggtgctgcctgtgctcctcctgcagatcactgttggcctcatcttcctctgcctgcagtacagactgagaggaaaacttcgagcagagatagagaatctccaccggacttttgatccccactttctgagggtgccctgctggaagataaccctgtttgtaattgtgccggttcttggacccttggttgccttgatcatctgctacaactggctacatcgaagactagcagggcaattccttgaagagctactcttccacctggaagccctctctggctaaggacaggcaggtgcccctctctccatcagaggacacctgtactggagagcaacacaggatggtctctgccatgaactggaggccaggaatctcctcactgaaaattacagtatggtaactttgcaaatggtggttgtttcttccaagactccagccctgattgcgcaaaactgaaaggcatgtgaagggaaggaagaggaagagtgcaaaacattgaagagagagctgagtgagctgaagagtgaggatatgagtagccccaacccaa

SEQ ID NO: 12831 - DNA, 1981 bp, Homo sapiens
  source 1..1981: mol_type = unassigned DNA
ggcagttcagagtgataggaccaagacaccctatccgggctctggtcggggatgaagtggaattgccatgtcgcatatctcctgggaagaacgctacaggcatggaggtggggtggtaccgcccccccttctctagggtggttcatctctacagaaatggcaaggaccaagatggagaccaggcacctgaatatcggggccggacagagctgctgaaagatgctattggtgagggaaaggtgactctcaggatccggaatgtaaggttctcagatgaaggaggtttcacctgcttcttccgagatcattcttaccaagaggaggcagcaatggaattgaaagtagaagtgtctcactctgtcacccaggattggttgcagtggcacgatcatggctcattgcagcctccacctcccaggctcaagtgatcctcctgactcagcctcttgaatagctgagaccacaggcttgtgtcaccatgcccagatcctttctactgggtgagccctggagtgctggttctcctcgcggtgctgcctgtgctcctcctgcagatcactgttggcctcatcttcctctgcctgcagtacagactgagaggaaaacttcgagcagagatagagaatctccaccggacttttgatccccactttctgagggtgccctgctggaagataaccctgtttgtaattgtgccggttcttggacccttggttgccttgatcatctgctacaactggctacatcgaagactagcagggcaattccttgaagagctacgaaatcccttctgagtgatgtcacatcttggcaggggtggaggagagcctggttgcccagggatttgtccttggggacatctcatccatcaagttgcacactcactggcatctttgctatggggacattccaatttgcactttcaggaacactctgaattccaagtagaattgatttcccttcttctgtcatctaccttttctcttcattttcccatttttattacccttctttccatttctctctccagtcttccacctggaagccctctctggctaaggacaggcaggtgcccctctctccatcagaggacacctgtactggagagcaacacaggatggtctctgccatgaactggaggccaggaatctcctcactgaaaattacagtatggtaactttgcaaatggtggttgtttcttccaagactccagccctgattgcgcaaaactgaaaggcatgtgaagggaaggaagaggaagagtgcaaaacattgaagagagagctgagtgagctgaagagtgaggatatgagtagccccaacccaaacctggagatggggagaaacctacagaatactagccagagctcctccttgtcttggcagcctactagggacctggggaagcaaaaacgaaagctgggcaacatgcctgctttagaatgttttccttctacttacacatcttccacaggtctcagaatctttccttcctctcatccttttctcctatcttcatatctatcagagtatccactgtttattcaacaactactacttgatggtcagacacaaacaaacaagctaggtgctaattaataaagatacgagttttggccgggtgcggtggctcacgcctgtaatcccagcactttgggaggccgaggcgggcgaatcacgaggtcaggagttcaagaccagcctggccaacatggtgaaaccccatctctactaaaaatacaaacaattaactgagcatagtggtgggcacctataataccagctactccggaggctgaggcaggagaatcgcttgaacccaggaggcagaggttgcagtgagctgagatcgtgccactgcactctagccggagtgacagagtaagactctgtctcaaaaataaataaataaataaataaataaataaataaataaataaataaaaaataataatacaagttttcataagcacacttctaa

SEQ ID NO: 12832 - DNA, 522 bp, Homo sapiens
  source 1..522: mol_type = unassigned DNA
taaggaggcagtacttttctcatccaagttcatggactttctgaattttgtccccagagtcctttggtgttctaggaccccaggttaaggaaccaaaaaagacaggtgggtggggcatgagggggaacacatgttaaccctgtttgttctggtgaacaattcagatccccactttctgagggtgccctgctggaagataaccctgtttgtaattgtgccggttcttggacccttggttgccttgatcatctgctacaactggctacatcgaagactagcagggcaattccttgaagagctacgtaagttctcttctctctgttataagcagagaataaaaagccaggaaagggagacagaagcaacaagaggaagaggcgggctattgagggatcacattcccagaggaaaggaggagctggagagcctgggtggagggaagactcctcctgggaggtagagggcaaagaagccagctgttagagacacatttacaggtggcagagaagctggaggcactcc

SEQ ID NO: 12833 - DNA, 2146 bp, Homo sapiens
  source 1..2146: mol_type = unassigned DNA
agcccttttgtgtgagtgcctggcaagggtgacgtggggctgtttctgcgggcacagctgcagcaattaccggagtggaggcagggcccaggcagcactgccctccaagatcttcccttgggcttttcagcagtaaggggacatgcaccccaagggcctccacttggcctgaccttgctgcgggggctctctgtccccaggaacagtagagatggcaagcttatcgagaccctctctgcccagctgcctctgctccttcctcctcctcctcctcctccaagtgtcttccagctatgcagggcagttcagagtgataggaccaagacaccctatccgggctctggtcggggatgaagtggaattgccatgtcgcatatctcctgggaagaacgctacaggcatggaggtggggtggtaccgcccccccttctctagggtggttcatctctacagaaatggcaaggaccaagatggagaccaggcacctgaatatcggggccggacagagctgctgaaagatgctattggtgagggaaaggtgactctcaggatccggaatgtaaggttctcagatgaaggaggtttcacctgcttcttccgagatcattcttaccaagaggaggcagcaatggaattgaaagtagaagatcctttctactgggtgagccctggagtgctggttctcctcgcggtgctgcctgtgctcctcctgcagatcactgttggcctcgtcttcctctgcctgcagtacagactgagaggaaaacttcgagcagagatagagaatctccaccggacttttgatccccactttctgagggtgccctgctggaagataaccctgtttgtaattgtgccggttcttggacccttggttgccttgatcatctgctacaactggctacatcgaagactagcagggcaattccttgaagagctacgaaatcccttctgagtgatgtcacatcttggcaggggtggaggagagcctggttgcccagggatttgtccttggggacatctcatccatcaagttgcacactcactggcatctttgctatggggacattccaatttgcactttcaggaacactctgaattccaagtagaattgatttcccttcttctgtcatctaccttttctcttcattttcccatttttattacccttctttccatttctctctccagtcttccacctggaagccctctctggctaaggacaggcaggtgcccctctctccatcagaggacacctgtactggagagcaacacaggatggtctctgccatgaactggaggccaggaatctcctcactgaaaattacagtatggtaactttgcaaatggtggttgtttcttccaagactccagccctgattgcgcaaaactgaaaggcatgtgaagggaaggaagaggaagagtgcaaaacattgaagagagagctgagtgagctgaagagtgaggatatgagtagccccaacccaaacctggagatggggagaaacctacagaatactagccagagctcctccttgtcttggcagcctactagggacctggggaagcaaaaacgaaagctgggcaacatgcctgctttagaatgttttccttctacttacacatcttccacaggtctcagaatctttccttcctctcatccttttctcctatcttcatatctatcagagtatccactgtttattcaacaactactacttgatggtcagacacaaacaaacaagctaggtgctaattaataaagatatgagttttggccgggtgcggtggctcacgcctgtaatcccagcactttgggaggccgaggcgggcgaatcacgaggtcaggagttcgagaccagcctggccaacatggtgaaaccccatctctactaaaaatacaaacaattaactgagcatagtggtgggcacctataataccagctactccggaggctgaggcaggagaatcgcttgaacccaggaggcagaggttgcagtgagctgagatcgcgccactgcactctagccagagtgacagagtaagactctgtctcaaaaataaataaataaataaataaataaataaataaataaataaataaataaaaaataataatacaagttttcataagcacacttctaa

SEQ ID NO: 12834 - DNA, 702 bp, Homo sapiens; identical to SEQ ID NO: 12811
  source 1..702: mol_type = unassigned DNA

SEQ ID NO: 12835 - DNA, 2503 bp, Homo sapiens
  source 1..2503: mol_type = unassigned DNA
agcactgccctccaagatcttcccttgggcttttcagcagtaaggggacatgcaccccaagggcctccacttggcctgaccttgctgcgggggctctctgtccccaggaacagtagagatggcaagcttatcgagaccctctctgcccagctgcctctgctccttcctcctcctcctcctcctccaagtgtcttccagctatgcagggcagttcagagtgataggaccaagacaccctatccgggctctggtcggggatgaagtggaattgccatgtcgcatatctcctgggaagaacgctacaggcatggaggtggggtggtaccgcccccccttctctagggtggttcatctctacagaaatggcaaggaccaagatggagaccaggcacctgaatatcggggccggacagagctgctgaaagatgctattggtgagggaaaggtgactctcaggatccggaatgtaaggttctcagatgaaggaggtttcacctgcttcttccgagatcattcttaccaagaggaggcagcaatggaattgaaagtagaagatcctttctactgggtgagccctggagtgctggttctcctcgcggtgctgcctgtgctcctcctgcagatcactgttggcctcgtcttcctctgcctgcagtacagactgagaggaaaacttcgagcagagatagagaatctccaccggacttttgatccccactttctgagggtgccctgctggaagataaccctgtttgtaattgtgccggttcttggacccttggttgccttgatcatctgctacaactggctacatcgaagactagcagggcaattccttgaagagctacgtaagttctcttctctctgttataagcagagaataaaaagccaggaaagggagacagaagcaacaagaggaagaggcgggctattgagggatcacattcccagaggaaaggaggagctggagagcctgggtggagggaagactcctcctgggaggtagagggcaaagaagccagctgttagagacacatttacaggtggcagagaagctggaggcactcctatctgccacctgatccattcctccttcactgcccctaagcaggaatccaaccctagctggtctcattgcccattccacagcaactgcccagtgcctcacctctcagatcaaccattgaggcaggaatggagacaagatgaccccaagggcttttcttctccctagttcaatggttttatgatacaaactactgacatacgtttttcaagttattttctccttcttctaggaaatcccttctgagtgatgtcacatcttggcaggggtggaggagagcctggttgcccagggatttgtccttggggacatctcatccatcaagttgcacactcactggcatctttgctatggggacattccaatttgcactttcaggaacactctgaattccaagtagaattgatttcccttcttctgtcatctaccttttctcttcattttcccatttttattacccttctttccatttctctctccagtcttccacctggaagccctctctggctaaggacaggcaggtgcccctctctccatcagaggacacctgtactggagagcaacacaggatggtctctgccatgaactggaggccaggaatctcctcactgaaaattacagtatggtaactttgcaaatggtggttgtttcttccaagactccagccctgattgcgcaaaactgaaaggcatgtgaagggaaggaagaggaagagtgcaaaacattgaagagagagctgagtgagctgaagagtgaggatatgagtagccccaacccaaacctggagatggggagaaacctacagaatactagccagagctcctccttgtcttggcagcctactagggacctggggaagcaaaaacgaaagctgggcaacatgcctgctttagaatgttttccttctacttacacatcttccacaggtctcagaatctttccttcctctcatccttttctcctatcttcatatctatcagagtatccactgtttattcaacaactactacttgatggtcagacacaaacaaacaagctaggtgctaattaataaagatatgagttttggccgggtgcggtggctcacgcctgtaatcccagcactttgggaggccgaggcgggcgaatcacgaggtcaggagttcgagaccagcctggccaacatggtgaaaccccatctctactaaaaatacaaacaattaactgagcatagtggtgggcacctataataccagctactccggaggctgaggcaggagaatcgcttgaacccaggaggcagaggttgcagtgagctgagatcgcgccactgcactctagccagagtgacagagtaagactctgtctcaaaaataaataaataaataaataaataaataaataaataaataaataaataaaaaataataatacaagttttcataagcacacttctaa

SEQ ID NO: 12836 - DNA, 774 bp, Homo sapiens; identical to SEQ ID NO: 12812
  source 1..774: mol_type = unassigned DNA

SEQ ID NO: 12837 - DNA, 1587 bp, Homo sapiens
  source 1..1587: mol_type = unassigned DNA
atggcaagcttatcgagaccctctctgcccagctgcctctgctccttcctcctcctcctcctcctccaagtgtcttccagctatgcagatcctttctactgggtgagccctggagtgctggttctcctcgcggtgctgcctgtgctcctcctgcagatcactgttggcctcgtcttcctctgcctgcagtacagactgagaggaaaacttcgagcagagatagagaatctccaccggacttttgatccccactttctgagggtgccctgctggaagataaccctgtttgtaattgtgccggttcttggacccttggttgccttgatcatctgctacaactggctacatcgaagactagcagggcaattccttgaagagctacgaaatcccttctgagtgatgtcacatcttggcaggggtggaggagagcctggttgcccagggatttgtccttggggacatctcatccatcaagttgcacactcactggcatctttgctatggggacattccaatttgcactttcaggaacactctgaattccaagtagaattgatttcccttcttctgtcatctaccttttctcttcattttcccatttttattacccttctttccatttctctctccagtcttccacctggaagccctctctggctaaggacaggcaggtgcccctctctccatcagaggacacctgtactggagagcaacacaggatggtctctgccatgaactggaggccaggaatctcctcactgaaaattacagtatggtaactttgcaaatggtggttgtttcttccaagactccagccctgattgcgcaaaactgaaaggcatgtgaagggaaggaagaggaagagtgcaaaacattgaagagagagctgagtgagctgaagagtgaggatatgagtagccccaacccaaacctggagatggggagaaacctacagaatactagccagagctcctccttgtcttggcagcctactagggacctggggaagcaaaaacgaaagctgggcaacatgcctgctttagaatgttttccttctacttacacatcttccacaggtctcagaatctttccttcctctcatccttttctcctatcttcatatctatcagagtatccactgtttattcaacaactactacttgatggtcagacacaaacaaacaagctaggtgctaattaataaagatatgagttttggccgggtgcggtggctcacgcctgtaatcccagcactttgggaggccgaggcgggcgaatcacgaggtcaggagttcgagaccagcctggccaacatggtgaaaccccatctctactaaaaatacaaacaattaactgagcatagtggtgggcacctataataccagctactccggaggctgaggcaggagaatcgcttgaacccaggaggcagaggttgcagtgagctgagatcgcgccactgcactctagccagagtgacagagtaagactctgtctcaaaaataaataaataaataaataaataaataaataaataaataaataaataaaaaataataatacaagttttcataagcacacttctaa

SEQ ID NO: 12838 - DNA, 1685 bp, Homo sapiens
  source 1..1685: mol_type = unassigned DNA
atggcaagcttatcgagaccctctctgcccagctgcctctgctccttcctcctcctcctcctcctccaagtgtcttccagctatgcagggcagttcagagtgataggaccaagacaccctatccgggctctggtcggggatgaagtggaattgccatgtcgcatatctcctgggaagaacgctacaggcatggaggtggggtggtaccgcccccccttctctagggtggttcatctctacagaaatggcaaggaccaagatggagaccaggcacctgaatatcggggccggacagagctgctgaaagatgctattggtgagggaaaggtgactctcaggatccggaatgtaaggttctcagatgaaggaggtttcacctgcttcttccgagatcattcttaccaagaggaggcagcaatggaattgaaagtagaagatcctttctactgggtgagccctggagtgctggttctcctcgcggtgctgcctgtgctcctcctgcagatcactgttggcctcgtcttcctctgcctgcagtacagactgagaggaaaacttcgagcagagatagagaatctccaccggacttttgatccccactttctgagggtgccctgctggaagataaccctgtttgtaattgtgccggttcttggacccttggttgccttgatcatctgctacaactggctacatcgaagactagcagggcaattccttgaagagctactcttccacctggaagccctctctggctaaggacaggcaggtgcccctctctccatcagaggacacctgtactggagagcaacacaggatggtctctgccatgaactggaggccaggaatctcctcactgaaaattacagtatggtaactttgcaaatggtggttgtttcttccaagactccagccctgattgcgcaaaactgaaaggcatgtgaagggaaggaagaggaagagtgcaaaacattgaagagagagctgagtgagctgaagagtgaggatatgagtagccccaacccaaacctggagatggggagaaacctacagaatactagccagagctcctccttgtcttggcagcctactagggacctggggaagcaaaaacgaaagctgggcaacatgcctgctttagaatgttttccttctacttacacatcttccacaggtctcagaatctttccttcctctcatccttttctcctatcttcatatctatcagagtatccactgtttattcaacaactactacttgatggtcagacacaaacaaacaagctaggtgctaattaataaagatatgagttttggccgggtgcggtggctcacgcctgtaatcccagcactttgggaggccgaggcgggcgaatcacgaggtcaggagttcgagaccagcctggccaacatggtgaaaccccatctctactaaaaatacaaacaattaactgagcatagtggtgggcacctataataccagctactccggaggctgaggcaggagaatcgcttgaacccaggaggcagaggttgcagtgagctgagatcgcgccactgcactctagccagagtgacagagtaagactctgtctcaaaaataaataaataaataaataaataaataaataaataaataaataaataaaaaataataatacaagttttcataagcacacttctaa

SEQ ID NO: 12839 - DNA, 1568 bp, Homo sapiens
  source 1..1568: mol_type = unassigned DNA
atggcaagcttatcgagaccctctctgcccagctgcctctgctccttcctcctcctcctcctcctccaagtgtcttccagctatgcagggcagttcagagtgataggaccaagacaccctatccgggctctggtcggggatgaagtggaattgccatgtcgcatatctcctgggaagaacgctacaggcatggaggtggggtggtaccgcccccccttctctagggtggttcatctctacagaaatggcaaggaccaagatggagaccaggcacctgaatatcggggccggacagagctgctgaaagatgctattggtgagggaaaggtgactctcaggatccggaatgtaaggttctcagatgaaggaggtttcacctgcttcttccgagatcattcttaccaagaggaggcagcaatggaattgaaagtagaagatcctttctactgggtgagccctggagtgctggttctcctcgcggtgctgcctgtgctcctcctgcagatcactgttggcctcgtcttcctctgcctgcagtacagactgagaggaaaacttcgagcagagatagagaatctccaccggacttttgggcaattccttgaagagctactcttccacctggaagccctctctggctaaggacaggcaggtgcccctctctccatcagaggacacctgtactggagagcaacacaggatggtctctgccatgaactggaggccaggaatctcctcactgaaaattacagtatggtaactttgcaaatggtggttgtttcttccaagactccagccctgattgcgcaaaactgaaaggcatgtgaagggaaggaagaggaagagtgcaaaacattgaagagagagctgagtgagctgaagagtgaggatatgagtagccccaacccaaacctggagatggggagaaacctacagaatactagccagagctcctccttgtcttggcagcctactagggacctggggaagcaaaaacgaaagctgggcaacatgcctgctttagaatgttttccttctacttacacatcttccacaggtctcagaatctttccttcctctcatccttttctcctatcttcatatctatcagagtatccactgtttattcaacaactactacttgatggtcagacacaaacaaacaagctaggtgctaattaataaagatatgagttttggccgggtgcggtggctcacgcctgtaatcccagcactttgggaggccgaggcgggcgaatcacgaggtcaggagttcgagaccagcctggccaacatggtgaaaccccatctctactaaaaatacaaacaattaactgagcatagtggtgggcacctataataccagctactccggaggctgaggcaggagaatcgcttgaacccaggaggcagaggttgcagtgagctgagatcgcgccactgcactctagccagagtgacagagtaagactctgtctcaaaaataaataaataaataaataaataaataaataaataaataaataaataaaaaataataatacaagttttcataagcacacttctaa

SEQ ID NO: 12840 - DNA, 1616 bp, Homo sapiens
  source 1..1616: mol_type = unassigned DNA
atggcaagcttatcgagaccctctctgcccagctgcctctgctccttcctcctcctcctcctcctccaagtgtcttccagctatgcagggcagttcagagtgataggaccaagacaccctatccgggctctggtcggggatgaagtggaattgccatgtcgcatatctcctgggaagaacgctacaggcatggaggtggggtggtaccgcccccccttctctagggtggttcatctctacagaaatggcaaggaccaagatggagaccaggcacctgaatatcggggccggacagagctgctgaaagatgctattggtgagggaaaggtgactctcaggatccggaatgtaaggttctcagatgaaggaggtttcacctgcttcttccgagatcattcttaccaagaggaggcagcaatggaattgaaagtagaagatcctttctactgggtgagccctggagtgctggttctcctcgcggtgctgcctgtgctcctcctgcagatcactgttggcctcgtcttcctctgcctgcagtacagactgagaggaaaacttcgagcagagatagagaatctccaccggacttttgagtcctttggtgttctaggaccccaggttaaggaaccaaaaaagacagggcaattccttgaagagctactcttccacctggaagccctctctggctaaggacaggcaggtgcccctctctccatcagaggacacctgtactggagagcaacacaggatggtctctgccatgaactggaggccaggaatctcctcactgaaaattacagtatggtaactttgcaaatggtggttgtttcttccaagactccagccctgattgcgcaaaactgaaaggcatgtgaagggaaggaagaggaagagtgcaaaacattgaagagagagctgagtgagctgaagagtgaggatatgagtagccccaacccaaacctggagatggggagaaacctacagaatactagccagagctcctccttgtcttggcagcctactagggacctggggaagcaaaaacgaaagctgggcaacatgcctgctttagaatgttttccttctacttacacatcttccacaggtctcagaatctttccttcctctcatccttttctcctatcttcatatctatcagagtatccactgtttattcaacaactactacttgatggtcagacacaaacaaacaagctaggtgctaattaataaagatatgagttttggccgggtgcggtggctcacgcctgtaatcccagcactttgggaggccgaggcgggcgaatcacgaggtcaggagttcgagaccagcctggccaacatggtgaaaccccatctctactaaaaatacaaacaattaactgagcatagtggtgggcacctataataccagctactccggaggctgaggcaggagaatcgcttgaacccaggaggcagaggttgcagtgagctgagatcgcgccactgcactctagccagagtgacagagtaagactctgtctcaaaaataaataaataaataaataaataaataaataaataaataaataaataaaaaataataatacaagttttcataagcacacttctaa

SEQ ID NO: 12841 - DNA, 1866 bp, Homo sapiens
  source 1..1866: mol_type = unassigned DNA
atggcaagcttatcgagaccctctctgcccagctgcctctgctccttcctcctcctcctcctcctccaagtgtcttccagctatgcagggcagttcagagtgataggaccaagacaccctatccgggctctggtcggggatgaagtggaattgccatgtcgcatatctcctgggaagaacgctacaggcatggaggtggggtggtaccgcccccccttctctagggtggttcatctctacagaaatggcaaggaccaagatggagaccaggcacctgaatatcggggccggacagagctgctgaaagatgctattggtgagggaaaggtgactctcaggatccggaatgtaaggttctcagatgaaggaggtttcacctgcttcttccgagatcattcttaccaagaggaggcagcaatggaattgaaagtagaagatcctttctactgggtgagccctggagtgctggttctcctcgcggtgctgcctgtgctcctcctgcagatcactgttggcctcgtcttcctctgcctgcagtacagactgagaggaaaacttcgagcagagatagagaatctccaccggacttttgagtcctttggtgttctaggaccccaggttaaggaaccaaaaaagacagggcaattccttgaagagctacgaaatcccttctgagtgatgtcacatcttggcaggggtggaggagagcctggttgcccagggatttgtccttggggacatctcatccatcaagttgcacactcactggcatctttgctatggggacattccaatttgcactttcaggaacactctgaattccaagtagaattgatttcccttcttctgtcatctaccttttctcttcattttcccatttttattacccttctttccatttctctctccagtcttccacctggaagccctctctggctaaggacaggcaggtgcccctctctccatcagaggacacctgtactggagagcaacacaggatggtctctgccatgaactggaggccaggaatctcctcactgaaaattacagtatggtaactttgcaaatggtggttgtttcttccaagactccagccctgattgcgcaaaactgaaaggcatgtgaagggaaggaagaggaagagtgcaaaacattgaagagagagctgagtgagctgaagagtgaggatatgagtagccccaacccaaacctggagatggggagaaacctacagaatactagccagagctcctccttgtcttggcagcctactagggacctggggaagcaaaaacgaaagctgggcaacatgcctgctttagaatgttttccttctacttacacatcttccacaggtctcagaatctttccttcctctcatccttttctcctatcttcatatctatcagagtatccactgtttattcaacaactactacttgatggtcagacacaaacaaacaagctaggtgctaattaataaagatatgagttttggccgggtgcggtggctcacgcctgtaatcccagcactttgggaggccgaggcgggcgaatcacgaggtcaggagttcgagaccagcctggccaacatggtgaaaccccatctctactaaaaatacaaacaattaactgagcatagtggtgggcacctataataccagctactccggaggctgaggcaggagaatcgcttgaacccaggaggcagaggttgcagtgagctgagatcgcgccactgcactctagccagagtgacagagtaagactctgtctcaaaaataaataaataaataaataaataaataaataaataaataaataaataaaaaataataatacaagttttcataagcacacttctaa

SEQ ID NO: 12842 - DNA, 1541 bp, Homo sapiens
  source 1..1541: mol_type = unassigned DNA
agcttatcgagaccctctctgcccagctgcctctgctccttcctcctcctcctcctcctccaagtgtcttccagctatgcagggcagttcagagtgataggaccaagacaccctatccgggctctggtcggggatgaagtggaattgccatgtcgcatatctcctgggaagaacgctacaggcatggaggtggggtggtaccgcccccccttctctagggtggttcatctctacagaaatggcaaggaccaagatggagaccaggcacctgaatatcggggccggacagagctgctgaaagatgctattggtgagggaaaggtgactctcaggatccggaatgtaaggttctcagatgaaggaggtttcacctgcttcttccgagatcattcttaccaagaggaggcagcaatggaattgaaagtagaagatcctttctactgggtgagccctggagtgctggttctcctcgcggtgctgcctgtgctcctcctgcagatcactgttggcctcgtcttcctctgcctgcagtacagactgagaggaaaacttcgagcagagatagagaatctccaccggacttttgtcttccacctggaagccctctctggctaaggacaggcaggtgcccctctctccatcagaggacacctgtactggagagcaacacaggatggtctctgccatgaactggaggccaggaatctcctcactgaaaattacagtatggtaactttgcaaatggtggttgtttcttccaagactccagccctgattgcgcaaaactgaaaggcatgtgaagggaaggaagaggaagagtgcaaaacattgaagagagagctgagtgagctgaagagtgaggatatgagtagccccaacccaaacctggagatggggagaaacctacagaatactagccagagctcctccttgtcttggcagcctactagggacctggggaagcaaaaacgaaagctgggcaacatgcctgctttagaatgttttccttctacttacacatcttccacaggtctcagaatctttccttcctctcatccttttctcctatcttcatatctatcagagtatccactgtttattcaacaactactacttgatggtcagacacaaacaaacaagctaggtgctaattaataaagatatgagttttggccgggtgcggtggctcacgcctgtaatcccagcactttgggaggccgaggcgggcgaatcacgaggtcaggagttcgagaccagcctggccaacatggtgaaaccccatctctactaaaaatacaaacaattaactgagcatagtggtgggcacctataataccagctactccggaggctgaggcaggagaatcgcttgaacccaggaggcagaggttgcagtgagctgagatcgcgccactgcactctagccagagtgacagagtaagactctgtctcaaaaataaataaataaataaataaataaataaataaataaataaataaataaaaaataataatacaagttttcataagcacacttctaa

SEQ ID NO: 12843 - DNA, 1730 bp, Homo sapiens
  source 1..1730: mol_type = unassigned DNA
ggcagttcagagtgataggaccaagacaccctatccgggctctggtcggggatgaagtggaattgccatgtcgcatatctcctgggaagaacgctacaggcatggaggtggggtggtaccgcccccccttctctagggtggttcatctctacagaaatggcaaggaccaagatggagaccaggcacctgaatatcggggccggacagagctgctgaaagatgctattggtgagggaaaggtgactctcaggatccggaatgtaaggttctcagatgaaggaggtttcacctgcttcttccgagatcattcttaccaagaggaggcagcaatggaattgaaagtagaagatcctttctactgggtgagccctggagtgctggttctcctcgcggtgctgcctgtgctcctcctgcagatcactgttggcctcgtcttcctctgcctgcagtacagactgagaggaaaacttcgagcagagatagagaatctccaccggacttttgggcaattccttgaagagctacgaaatcccttctgagtgatgtcacatcttggcaggggtggaggagagcctggttgcccagggatttgtccttggggacatctcatccatcaagttgcacactcactggcatctttgctatggggacattccaatttgcactttcaggaacactctgaattccaagtagaattgatttcccttcttctgtcatctaccttttctcttcattttcccatttttattacccttctttccatttctctctccagtcttccacctggaagccctctctggctaaggacaggcaggtgcccctctctccatcagaggacacctgtactggagagcaacacaggatggtctctgccatgaactggaggccaggaatctcctcactgaaaattacagtatggtaactttgcaaatggtggttgtttcttccaagactccagccctgattgcgcaaaactgaaaggcatgtgaagggaaggaagaggaagagtgcaaaacattgaagagagagctgagtgagctgaagagtgaggatatgagtagccccaacccaaacctggagatggggagaaacctacagaatactagccagagctcctccttgtcttggcagcctactagggacctggggaagcaaaaacgaaagctgggcaacatgcctgctttagaatgttttccttctacttacacatcttccacaggtctcagaatctttccttcctctcatccttttctcctatcttcatatctatcagagtatccactgtttattcaacaactactacttgatggtcagacacaaacaaacaagctaggtgctaattaataaagatatgagttttggccgggtgcggtggctcacgcctgtaatcccagcactttgggaggccgaggcgggcgaatcacgaggtcaggagttcgagaccagcctggccaacatggtgaaaccccatctctactaaaaatacaaacaattaactgagcatagtggtgggcacctataataccagctactccggaggctgaggcaggagaatcgcttgaacccaggaggcagaggttgcagtgagctgagatcgcgccactgcactctagccagagtgacagagtaagactctgtctcaaaaataaataaataaataaataaataaataaataaataaataaataaataaaaaataataatacaagttttcataagcacacttctaa

SEQ ID NO: 12844 - DNA, 1735 bp, Homo sapiens
  source 1..1735: mol_type = unassigned DNA
ggcagttcagagtgataggaccaagacaccctatccgggctctggtcggggatgaagtggaattgccatgtcgcatatctcctgggaagaacgctacaggcatggaggtggggtggtaccgcccccccttctctagggtggttcatctctacagaaatggcaaggaccaagatggagaccaggcacctgaatatcggggccggacagagctgctgaaagatgctattggtgagggaaaggtgactctcaggatccggaatgtaaggttctcagatgaaggaggtttcacctgcttcttccgagatcattcttaccaagaggaggcagcaatggaattgaaagtagaagtgtctcactctgtcacccaggattggttgcagtggcacgatcatggctcattgcagcctccacctcccaggctcaagtgatcctcctgactcagcctcttgaatagctgagaccacaggcttgtgtcaccatgcccagatcctttctactgggtgagccctggagtgctggttctcctcgcggtgctgcctgtgctcctcctgcagatcactgttggcctcgtcttcctctgcctgcagtacagactgagaggaaaacttcgagcagagatagagaatctccaccggacttttgatccccactttctgagggtgccctgctggaagataaccctgtttgtaattgtgccggttcttggacccttggttgccttgatcatctgctacaactggctacatcgaagactagcagggcaattccttgaagagctactcttccacctggaagccctctctggctaaggacaggcaggtgcccctctctccatcagaggacacctgtactggagagcaacacaggatggtctctgccatgaactggaggccaggaatctcctcactgaaaattacagtatggtaactttgcaaatggtggttgtttcttccaagactccagccctgattgcgcaaaactgaaaggcatgtgaagggaaggaagaggaagagtgcaaaacattgaagagagagctgagtgagctgaagagtgaggatatgagtagccccaacccaaacctggagatggggagaaacctacagaatactagccagagctcctccttgtcttggcagcctactagggacctggggaagcaaaaacgaaagctgggcaacatgcctgctttagaatgttttccttctacttacacatcttccacaggtctcagaatctttccttcctctcatccttttctcctatcttcatatctatcagagtatccactgtttattcaacaactactacttgatggtcagacacaaacaaacaagctaggtgctaattaataaagatatgagttttggccgggtgcggtggctcacgcctgtaatcccagcactttgggaggccgaggcgggcgaatcacgaggtcaggagttcgagaccagcctggccaacatggtgaaaccccatctctactaaaaatacaaacaattaactgagcatagtggtgggcacctataataccagctactccggaggctgaggcaggagaatcgcttgaacccaggaggcagaggttgcagtgagctgagatcgcgccactgcactctagccagagtgacagagtaagactctgtctcaaaaataaataaataaataaataaataaataaataaataaataaataaataaaaaataataatacaagttttcataagcacacttctaa

SEQ ID NO: 12845 - DNA, 1985 bp, Homo sapiens
  source 1..1985: mol_type = unassigned DNA
ggcagttcagagtgataggaccaagacaccctatccgggctctggtcggggatgaagtggaattgccatgtcgcatatctcctgggaagaacgctacaggcatggaggtggggtggtaccgcccccccttctctagggtggttcatctctacagaaatggcaaggaccaagatggagaccaggcacctgaatatcggggccggacagagctgctgaaagatgctattggtgagggaaaggtgactctcaggatccggaatgtaaggttctcagatgaaggaggtttcacctgcttcttccgagatcattcttaccaagaggaggcagcaatggaattgaaagtagaagtgtctcactctgtcacccaggattggttgcagtggcacgatcatggctcattgcagcctccacctcccaggctcaagtgatcctcctgactcagcctcttgaatagctgagaccacaggcttgtgtcaccatgcccagatcctttctactgggtgagccctggagtgctggttctcctcgcggtgctgcctgtgctcctcctgcagatcactgttggcctcgtcttcctctgcctgcagtacagactgagaggaaaacttcgagcagagatagagaatctccaccggacttttgatccccactttctgagggtgccctgctggaagataaccctgtttgtaattgtgccggttcttggacccttggttgccttgatcatctgctacaactggctacatcgaagactagcagggcaattccttgaagagctacgaaatcccttctgagtgatgtcacatcttggcaggggtggaggagagcctggttgcccagggatttgtccttggggacatctcatccatcaagttgcacactcactggcatctttgctatggggacattccaatttgcactttcaggaacactctgaattccaagtagaattgatttcccttcttctgtcatctaccttttctcttcattttcccatttttattacccttctttccatttctctctccagtcttccacctggaagccctctctggctaaggacaggcaggtgcccctctctccatcagaggacacctgtactggagagcaacacaggatggtctctgccatgaactggaggccaggaatctcctcactgaaaattacagtatggtaactttgcaaatggtggttgtttcttccaagactccagccctgattgcgcaaaactgaaaggcatgtgaagggaaggaagaggaagagtgcaaaacattgaagagagagctgagtgagctgaagagtgaggatatgagtagccccaacccaaacctggagatggggagaaacctacagaatactagccagagctcctccttgtcttggcagcctactagggacctggggaagcaaaaacgaaagctgggcaacatgcctgctttagaatgttttccttctacttacacatcttccacaggtctcagaatctttccttcctctcatccttttctcctatcttcatatctatcagagtatccactgtttattcaacaactactacttgatggtcagacacaaacaaacaagctaggtgctaattaataaagatatgagttttggccgggtgcggtggctcacgcctgtaatcccagcactttgggaggccgaggcgggcgaatcacgaggtcaggagttcgagaccagcctggccaacatggtgaaaccccatctctactaaaaatacaaacaattaactgagcatagtggtgggcacctataataccagctactccggaggctgaggcaggagaatcgcttgaacccaggaggcagaggttgcagtgagctgagatcgcgccactgcactctagccagagtgacagagtaagactctgtctcaaaaataaataaataaataaataaataaataaataaataaataaataaataaaaaataataatacaagttttcataagcacacttctaa

SEQ ID NO: 12846 - DNA, 2045 bp, Homo sapiens
  source 1..2045: mol_type = unassigned DNA
gtcatcccctcagtctgtagcccttttgtgtgagtgcctggcaagggtgacgtggggctgtttctgcgggcacagctgcagcaattaccggagtggaggcagggcccaggcagcactgccctccaagatcttcccttgggcttttcagcagtaaggggacatgcaccccaagggcctccacttggcctgaccttgctgcgggggctctctgtccccaggaacagtagagatggcaagcttatcgagaccctctctgcccagctgcctctgctccttcctcctcctcctcctcctccaagtgtcttccagctatgcagggcagttcagagtgataggaccaagacaccctatccgggctctggtcggggatgaagtggaattgccatgtcgcatatctcctgggaagaacgctacaggcatggaggtggggtggtaccgcccccccttctctagggtggttcatctctacagaaatggcaaggaccaagatggagaccaggcacctgaatatcggggccggacagagctgctgaaagatgctattggtgagggaaaggtgactctcaggatccggaatgtaaggttctcagatgaaggaggtttcacctgcttcttccgagatcattcttaccaagaggaggcagcaatggaattgaaagtagaagatcctttctactgggtgagccctggagtgctggttctcctcgcggtgctgcctgtgctcctcctgcagatcactgttggcctcgtcttcctctgcctgcagtacagactgagaggaaaacttcgagcagagatagagaatctccaccggacttttgggcaattccttgaagagctacgaaatcccttctgagtgatgtcacatcttggcaggggtggaggagagcctggttgcccagggatttgtccttggggacatctcatccatcaagttgcacactcactggcatctttgctatggggacattccaatttgcactttcaggaacactctgaattccaagtagaattgatttcccttcttctgtcatctaccttttctcttcattttcccatttttattacccttctttccatttctctctccagtcttccacctggaagccctctctggctaaggacaggcaggtgcccctctctccatcagaggacacctgtactggagagcaacacaggatggtctctgccatgaactggaggccaggaatctcctcactgaaaattacagtatggtaactttgcaaatggtggttgtttcttccaagactccagccctgattgcgcaaaactgaaaggcatgtgaagggaaggaagaggaagagtgcaaaacattgaagagagagctgagtgagctgaagagtgaggatatgagtagccccaacccaaacctggagatggggagaaacctacagaatactagccagagctcctccttgtcttggcagcctactagggacctggggaagcaaaaacgaaagctgggcaacatgcctgctttagaatgttttccttctacttacacatcttccacaggtctcagaatctttccttcctctcatccttttctcctatcttcatatctatcagagtatccactgtttattcaacaactactacttgatggtcagacacaaacaaacaagctaggtgctaattaataaagatatgagttttggccgggtgcggtggctcacgcctgtaatcccagcactttgggaggccgaggcgggcgaatcacgaggtcaggagttcgagaccagcctggccaacatggtgaaaccccatctctactaaaaatacaaacaattaactgagcatagtggtgggcacctataataccagctactccggaggctgaggcaggagaatcgcttgaacccaggaggcagaggttgcagtgagctgagatcgcgccactgcactctagccagagtgacagagtaagactctgtctcaaaaataaataaataaataaataaataaataaataaataaataaataaataaaaaataataatacaagttttcataagcacacttct

SEQ ID NO: 12847 - DNA, 1587 bp, Homo sapiens
  source 1..1587: mol_type = unassigned DNA
atggcaagcttatcgagaccctctctgcccagctgcctctgctccttcctcctcctcctcctcctccaagtgtcttccagctatgcagatcctttctactgggtgagccctggagtgctggttctcctcgcggtgctgcctgtgctcctcctgcagatcactgttggcctcgtcttcctctgcctgcagtacagactgagaggaaaacttcgagcagagatagagaatctccaccggacttttgatccccactttctgagggtgccctgctggaagataaccctgtttgtaattgtgccggttcttggacccttggttgccttgatcatctgctacaactggctacatcgaagactagcagggcaattccttgaagagctacgaaatcccttctgagtgatgtcacatcttggcaggggtggaggagagcctggttgcccagggatttgtccttggggacatctcatccatcaagttgcacactcactggcatctttgctatggggacattccaatttgcactttcaggaacactctgaattccaagtagaattgatttcccttcttctgtcatctaccttttctcttcattttcccatttttattacccttctttccatttctctctccagtcttccacctggaagccctctctggctaaggacaggcaggtgcccctctctccatcagaggacacctgtactggagagcaacacaggatggtctctgccatgaactggaggccaggaatctcctcactgaaaattacagtatggtaactttgcaaatggtggttgtttcttccaagactccagccctgattgcgcaaaactgaaaggcatgtgaagggaaggaagaggaagagtgcaaaacattgaagagagagctgagtgagctgaagagtgaggatatgagtagccccaacccaaacctggagatggggagaaacctacagaatactagccagagctcctccttgtcttggcagcctactagggacctggggaagcaaaaacgaaagctgggcaacatgcctgctttagaatgttttccttctacttacacatcttccacaggtctcagaatctttccttcctctcatccttttctcctatcttcatatctatcagagtatccactgtttattcaacaactactacttgatggtcagacacaaacaaacaagctaggtgctaattaataaagatacgagttttggccgggtgcggtggctcacgcctgtaatcccagcactttgggaggccgaggcgggcgaatcacgaggtcaggagttcaagaccagcctggccaacatggtgaaaccccatctctactaaaaatacaaacaattaactgagcatagtggtgggcacctataataccagctactccggaggctgaggcaggagaatcgcttgaacccaggaggcagaggttgcagtgagctgagatcgcgccactgcactctagccggagtgacagagtaagactctgtctcaaaaataaataaataaataaataaataaataaataaataaataaataaataaaaaataataatacaagttttcataagcacacttctaa

SEQ ID NO: 12848 - DNA, 1541 bp, Homo sapiens
  source 1..1541: mol_type = unassigned DNA
agcttatcgagaccctctctgcccagctgcctctgctccttcctcctcctcctcctcctccaagtgtcttccagctatgcagggcagttcagagtgataggaccaagacaccctatccgggctctggtcggggatgaagtggaattgccatgtcgcatatctcctgggaagaacgctacaggcatggaggtggggtggtaccgcccccccttctctagggtggttcatctctacagaaatggcaaggaccaagatggagaccaggcacctgaatatcggggccggacagagctgctgaaagatgctattggtgagggaaaggtgactctcaggatccggaatgtaaggttctcagatgaaggaggtttcacctgcttcttccgagatcattcttaccaagaggaggcagcaatggaattgaaagtagaagatcctttctactgggtgagccctggagtgctggttctcctcgcggtgctgcctgtgctcctcctgcagatcactgttggcctcgtcttcctctgcctgcagtacagactgagaggaaaacttcgagcagagatagagaatctccaccggacttttgtcttccacctggaagccctctctggctaaggacaggcaggtgcccctctctccatcagaggacacctgtactggagagcaacacaggatggtctctgccatgaactggaggccaggaatctcctcactgaaaattacagtatggtaactttgcaaatggtggttgtttcttccaagactccagccctgattgcgcaaaactgaaaggcatgtgaagggaaggaagaggaagagtgcaaaacattgaagagagagctgagtgagctgaagagtgaggatatgagtagccccaacccaaacctggagatggggagaaacctacagaatactagccagagctcctccttgtcttggcagcctactagggacctggggaagcaaaaacgaaagctgggcaacatgcctgctttagaatgttttccttctacttacacatcttccacaggtctcagaatctttccttcctctcatccttttctcctatcttcatatctatcagagtatccactgtttattcaacaactactacttgatggtcagacacaaacaaacaagctaggtgctaattaataaagatacgagttttggccgggtgcggtggctcacgcctgtaatcccagcactttgggaggccgaggcgggcgaatcacgaggtcaggagttcaagaccagcctggccaacatggtgaaaccccatctctactaaaaatacaaacaattaactgagcatagtggtgggcacctataataccagctactccggaggctgaggcaggagaatcgcttgaacccaggaggcagaggttgcagtgagctgagatcgcgccactgcactctagccggagtgacagagtaagactctgtctcaaaaataaataaataaataaataaataaataaataaataaataaataaataaaaaataataatacaagttttcataagcacacttctaa

SEQ ID NO: 12849 - DNA, 1685 bp, Homo sapiens
  source 1..1685: mol_type = unassigned DNA
atggcaagcttatcgagaccctctctgcccagctgcctctgctccttcctcctcctcctcctcctccaagtgtcttccagctatgcagggcagttcagagtgataggaccaagacaccctatccgggctctggtcggggatgaagtggaattgccatgtcgcatatctcctgggaagaacgctacaggcatggaggtggggtggtaccgcccccccttctctagggtggttcatctctacagaaatggcaaggaccaagatggagaccaggcacctgaatatcggggccggacagagctgctgaaagatgctattggtgagggaaaggtgactctcaggatccggaatgtaaggttctcagatgaaggaggtttcacctgcttcttccgagatcattcttaccaagaggaggcagcaatggaattgaaagtagaagatcctttctactgggtgagccctggagtgctggttctcctcgcggtgctgcctgtgctcctcctgcagatcactgttggcctcgtcttcctctgcctgcagtacagactgagaggaaaacttcgagcagagatagagaatctccaccggacttttgatccccactttctgagggtgccctgctggaagataaccctgtttgtaattgtgccggttcttggacccttggttgccttgatcatctgctacaactggctacatcgaagactagcagggcaattccttgaagagctactcttccacctggaagccctctctggctaaggacaggcaggtgcccctctctccatcagaggacacctgtactggagagcaacacaggatggtctctgccatgaactggaggccaggaatctcctcactgaaaattacagtatggtaactttgcaaatggtggttgtttcttccaagactccagccctgattgcgcaaaactgaaaggcatgtgaagggaaggaagaggaagagtgcaaaacattgaagagagagctgagtgagctgaagagtgaggatatgagtagccccaacccaaacctggagatggggagaaacctacagaatactagccagagctcctccttgtcttggcagcctactagggacctggggaagcaaaaacgaaagctgggcaacatgcctgctttagaatgttttccttctacttacacatcttccacaggtctcagaatctttccttcctctcatccttttctcctatcttcatatctatcagagtatccactgtttattcaacaactactacttgatggtcagacacaaacaaacaagctaggtgctaattaataaagatacgagttttggccgggtgcggtggctcacgcctgtaatcccagcactttgggaggccgaggcgggcgaatcacgaggtcaggagttcaagaccagcctggccaacatggtgaaaccccatctctactaaaaatacaaacaattaactgagcatagtggtgggcacctataataccagctactccggaggctgaggcaggagaatcgcttgaacccaggaggcagaggttgcagtgagctgagatcgcgccactgcactctagccggagtgacagagtaagactctgtctcaaaaataaataaataaataaataaataaataaataaataaataaataaataaaaaataataatacaagttttcataagcacacttctaa

SEQ ID NO: 12850 - DNA, 1730 bp, Homo sapiens
  source 1..1730: mol_type = unassigned DNA
ggcagttcagagtgataggaccaagacaccctatccgggctctggtcggggatgaagtggaattgccatgtcgcatatctcctgggaagaacgctacaggcatggaggtggggtggtaccgcccccccttctctagggtggttcatctctacagaaatggcaaggaccaagatggagaccaggcacctgaatatcggggccggacagagctgctgaaagatgctattggtgagggaaaggtgactctcaggatccggaatgtaaggttctcagatgaaggaggtttcacctgcttcttccgagatcattcttaccaagaggaggcagcaatggaattgaaagtagaagatcctttctactgggtgagccctggagtgctggttctcctcgcggtgctgcctgtgctcctcctgcagatcactgttggcctcgtcttcctctgcctgcagtacagactgagaggaaaacttcgagcagagatagagaatctccaccggacttttgggcaattccttgaagagctacgaaatcccttctgagtgatgtcacatcttggcaggggtggaggagagcctggttgcccagggatttgtccttggggacatctcatccatcaagttgcacactcactggcatctttgctatggggacattccaatttgcactttcaggaacactctgaattccaagtagaattgatttcccttcttctgtcatctaccttttctcttcattttcccatttttattacccttctttccatttctctctccagtcttccacctggaagccctctctggctaaggacaggcaggtgcccctctctccatcagaggacacctgtactggagagcaacacaggatggtctctgccatgaactggaggccaggaatctcctcactgaaaattacagtatggtaactttgcaaatggtggttgtttcttccaagactccagccctgattgcgcaaaactgaaaggcatgtgaagggaaggaagaggaagagtgcaaaacattgaagagagagctgagtgagctgaagagtgaggatatgagtagccccaacccaaacctggagatggggagaaacctacagaatactagccagagctcctccttgtcttggcagcctactagggacctggggaagcaaaaacgaaagctgggcaacatgcctgctttagaatgttttccttctacttacacatcttccacaggtctcagaatctttccttcctctcatccttttctcctatcttcatatctatcagagtatccactgtttattcaacaactactacttgatggtcagacacaaacaaacaagctaggtgctaattaataaagatacgagttttggccgggtgcggtggctcacgcctgtaatcccagcactttgggaggccgaggcgggcgaatcacgaggtcaggagttcaagaccagcctggccaacatggtgaaaccccatctctactaaaaatacaaacaattaactgagcatagtggtgggcacctataataccagctactccggaggctgaggcaggagaatcgcttgaacccaggaggcagaggttgcagtgagctgagatcgcgccactgcactctagccggagtgacagagtaagactctgtctcaaaaataaataaataaataaataaataaataaataaataaataaataaataaaaaataataatacaagttttcataagcacacttctaa

SEQ ID NO: 12851 - DNA, 1568 bp, Homo sapiens
  source 1..1568: mol_type = unassigned DNA
atggcaagcttatcgagaccctctctgcccagctgcctctgctccttcctcctcctcctcctcctccaagtgtcttccagctatgcagggcagttcagagtgataggaccaagacaccctatccgggctctggtcggggatgaagtggaattgccatgtcgcatatctcctgggaagaacgctacaggcatggaggtggggtggtaccgcccccccttctctagggtggttcatctctacagaaatggcaaggaccaagatggagaccaggcacctgaatatcggggccggacagagctgctgaaagatgctattggtgagggaaaggtgactctcaggatccggaatgtaaggttctcagatgaaggaggtttcacctgcttcttccgagatcattcttaccaagaggaggcagcaatggaattgaaagtagaagatcctttctactgggtgagccctggagtgctggttctcctcgcggtgctgcctgtgctcctcctgcagatcactgttggcctcgtcttcctctgcctgcagtacagactgagaggaaaacttcgagcagagatagagaatctccaccggacttttgggcaattccttgaagagctactcttccacctggaagccctctctggctaaggacaggcaggtgcccctctctccatcagaggacacctgtactggagagcaacacaggatggtctctgccatgaactggaggccaggaatctcctcactgaaaattacagtatggtaactttgcaaatggtggttgtttcttccaagactccagccctgattgcgcaaaactgaaaggcatgtgaagggaaggaagaggaagagtgcaaaacattgaagagagagctgagtgagctgaagagtgaggatatgagtagccccaacccaaacctggagatggggagaaacctacagaatactagccagagctcctccttgtcttggcagcctactagggacctggggaagcaaaaacgaaagctgggcaacatgcctgctttagaatgttttccttctacttacacatcttccacaggtctcagaatctttccttcctctcatccttttctcctatcttcatatctatcagagtatccactgtttattcaacaactactacttgatggtcagacacaaacaaacaagctaggtgctaattaataaagatacgagttttggccgggtgcggtggctcacgcctgtaatcccagcactttgggaggccgaggcgggcgaatcacgaggtcaggagttcaagaccagcctggccaacatggtgaaaccccatctctactaaaaatacaaacaattaactgagcatagtggtgggcacctataataccagctactccggaggctgaggcaggagaatcgcttgaacccaggaggcagaggttgcagtgagctgagatcgcgccactgcactctagccggagtgacagagtaagactctgtctcaaaaataaataaataaataaataaataaataaataaataaataaataaataaaaaataataatacaagttttcataagcacacttctaa

SEQ ID NO: 12852 - DNA, 1616 bp, Homo sapiens
  source 1..1616: mol_type = unassigned DNA
atggcaagcttatcgagaccctctctgcccagctgcctctgctccttcctcctcctcctcctcctccaagtgtcttccagctatgcagggcagttcagagtgataggaccaagacaccctatccgggctctggtcggggatgaagtggaattgccatgtcgcatatctcctgggaagaacgctacaggcatggaggtggggtggtaccgcccccccttctctagggtggttcatctctacagaaatggcaaggaccaagatggagaccaggcacctgaatatcggggccggacagagctgctgaaagatgctattggtgagggaaaggtgactctcaggatccggaatgtaaggttctcagatgaaggaggtttcacctgcttcttccgagatcattcttaccaagaggaggcagcaatggaattgaaagtagaagatcctttctactgggtgagccctggagtgctggttctcctcgcggtgctgcctgtgctcctcctgcagatcactgttggcctcgtcttcctctgcctgcagtacagactgagaggaaaacttcgagcagagatagagaatctccaccggacttttgagtcctttggtgttctaggaccccaggttaaggaaccaaaaaagacagggcaattccttgaagagctactcttccacctggaagccctctctggctaaggacaggcaggtgcccctctctccatcagaggacacctgtactggagagcaacacaggatggtctctgccatgaactggaggccaggaatctcctcactgaaaattacagtatggtaactttgcaaatggtggttgtttcttccaagactccagccctgattgcgcaaaactgaaaggcatgtgaagggaaggaagaggaagagtgcaaaacattgaagagagagctgagtgagctgaagagtgaggatatgagtagccccaacccaaacctggagatggggagaaacctacagaatactagccagagctcctccttgtcttggcagcctactagggacctggggaagcaaaaacgaaagctgggcaacatgcctgctttagaatgttttccttctacttacacatcttccacaggtctcagaatctttccttcctctcatccttttctcctatcttcatatctatcagagtatccactgtttattcaacaactactacttgatggtcagacacaaacaaacaagctaggtgctaattaataaagatacgagttttggccgggtgcggtggctcacgcctgtaatcccagcactttgggaggccgaggcgggcgaatcacgaggtcaggagttcaagaccagcctggccaacatggtgaaaccccatctctactaaaaatacaaacaattaactgagcatagtggtgggcacctataataccagctactccggaggctgaggcaggagaatcgcttgaacccaggaggcagaggttgcagtgagctgagatcgcgccactgcactctagccggagtgacagagtaagactctgtctcaaaaataaataaataaataaataaataaataaataaataaataaataaataaaaaataataatacaagttttcataagcacacttctaa

SEQ ID NO: 12853 - DNA, 2146 bp, Homo sapiens
  source 1..2146: mol_type = unassigned DNA
agcccttttgtgtgagtgcctggcaagggtgacgtggggctgtttctgcgggcacagctgcagcaattaccggagtggaggcagggcccaggcagcactgccctccaagatcttcccttgggcttttcagcagtaaggggacatgcaccccaagggcctccacttggcctgaccttgctgcgggggctctctgtccccaggaacagtagagatggcaagcttatcgagaccctctctgcccagctgcctctgctccttcctcctcctcctcctcctccaagtgtcttccagctatgcagggcagttcagagtgataggaccaagacaccctatccgggctctggtcggggatgaagtggaattgccatgtcgcatatctcctgggaagaacgctacaggcatggaggtggggtggtaccgcccccccttctctagggtggttcatctctacagaaatggcaaggaccaagatggagaccaggcacctgaatatcggggccggacagagctgctgaaagatgctattggtgagggaaaggtgactctcaggatccggaatgtaaggttctcagatgaaggaggtttcacctgcttcttccgagatcattcttaccaagaggaggcagcaatggaattgaaagtagaagatcctttctactgggtgagccctggagtgctggttctcctcgcggtgctgcctgtgctcctcctgcagatcactgttggcctcgtcttcctctgcctgcagtacagactgagaggaaaacttcgagcagagatagagaatctccaccggacttttgatccccactttctgagggtgccctgctggaagataaccctgtttgtaattgtgccggttcttggacccttggttgccttgatcatctgctacaactggctacatcgaagactagcagggcaattccttgaagagctacgaaatcccttctgagtgatgtcacatcttggcaggggtggaggagagcctggttgcccagggatttgtccttggggacatctcatccatcaagttgcacactcactggcatctttgctatggggacattccaatttgcactttcaggaacactctgaattccaagtagaattgatttcccttcttctgtcatctaccttttctcttcattttcccatttttattacccttctttccatttctctctccagtcttccacctggaagccctctctggctaaggacaggcaggtgcccctctctccatcagaggacacctgtactggagagcaacacaggatggtctctgccatgaactggaggccaggaatctcctcactgaaaattacagtatggtaactttgcaaatggtggttgtttcttccaagactccagccctgattgcgcaaaactgaaaggcatgtgaagggaaggaagaggaagagtgcaaaacattgaagagagagctgagtgagctgaagagtgaggatatgagtagccccaacccaaacctggagatggggagaaacctacagaatactagccagagctcctccttgtcttggcagcctactagggacctggggaagcaaaaacgaaagctgggcaacatgcctgctttagaatgttttccttctacttacacatcttccacaggtctcagaatctttccttcctctcatccttttctcctatcttcatatctatcagagtatccactgtttattcaacaactactacttgatggtcagacacaaacaaacaagctaggtgctaattaataaagatacgagttttggccgggtgcggtggctcacgcctgtaatcccagcactttgggaggccgaggcgggcgaatcacgaggtcaggagttcaagaccagcctggccaacatggtgaaaccccatctctactaaaaatacaaacaattaactgagcatagtggtgggcacctataataccagctactccggaggctgaggcaggagaatcgcttgaacccaggaggcagaggttgcagtgagctgagatcgcgccactgcactctagccggagtgacagagtaagactctgtctcaaaaataaataaataaataaataaataaataaataaataaataaataaataaaaaataataatacaagttttcataagcacacttctaa

SEQ ID NO: 12854 - DNA, 1866 bp, Homo sapiens
  source 1..1866: mol_type = unassigned DNA
atggcaagcttatcgagaccctctctgcccagctgcctctgctccttcctcctcctcctcctcctccaagtgtcttccagctatgcagggcagttcagagtgataggaccaagacaccctatccgggctctggtcggggatgaagtggaattgccatgtcgcatatctcctgggaagaacgctacaggcatggaggtggggtggtaccgcccccccttctctagggtggttcatctctacagaaatggcaaggaccaagatggagaccaggcacctgaatatcggggccggacagagctgctgaaagatgctattggtgagggaaaggtgactctcaggatccggaatgtaaggttctcagatgaaggaggtttcacctgcttcttccgagatcattcttaccaagaggaggcagcaatggaattgaaagtagaagatcctttctactgggtgagccctggagtgctggttctcctcgcggtgctgcctgtgctcctcctgcagatcactgttggcctcgtcttcctctgcctgcagtacagactgagaggaaaacttcgagcagagatagagaatctccaccggacttttgagtcctttggtgttctaggaccccaggttaaggaaccaaaaaagacagggcaattccttgaagagctacgaaatcccttctgagtgatgtcacatcttggcaggggtggaggagagcctggttgcccagggatttgtccttggggacatctcatccatcaagttgcacactcactggcatctttgctatggggacattccaatttgcactttcaggaacactctgaattccaagtagaattgatttcccttcttctgtcatctaccttttctcttcattttcccatttttattacccttctttccatttctctctccagtcttccacctggaagccctctctggctaaggacaggcaggtgcccctctctccatcagaggacacctgtactggagagcaacacaggatggtctctgccatgaactggaggccaggaatctcctcactgaaaattacagtatggtaactttgcaaatggtggttgtttcttccaagactccagccctgattgcgcaaaactgaaaggcatgtgaagggaaggaagaggaagagtgcaaaacattgaagagagagctgagtgagctgaagagtgaggatatgagtagccccaacccaaacctggagatggggagaaacctacagaatactagccagagctcctccttgtcttggcagcctactagggacctggggaagcaaaaacgaaagctgggcaacatgcctgctttagaatgttttccttctacttacacatcttccacaggtctcagaatctttccttcctctcatccttttctcctatcttcatatctatcagagtatccactgtttattcaacaactactacttgatggtcagacacaaacaaacaagctaggtgctaattaataaagatacgagttttggccgggtgcggtggctcacgcctgtaatcccagcactttgggaggccgaggcgggcgaatcacgaggtcaggagttcaagaccagcctggccaacatggtgaaaccccatctctactaaaaatacaaacaattaactgagcatagtggtgggcacctataataccagctactccggaggctgaggcaggagaatcgcttgaacccaggaggcagaggttgcagtgagctgagatcgcgccactgcactctagccggagtgacagagtaagactctgtctcaaaaataaataaataaataaataaataaataaataaataaataaataaataaaaaataataatacaagttttcataagcacacttctaa

SEQ ID NO: 12855 - DNA, 2503 bp, Homo sapiens
  source 1..2503: mol_type = unassigned DNA
agcactgccctccaagatcttcccttgggcttttcagcagtaaggggacatgcaccccaagggcctccacttggcctgaccttgctgcgggggctctctgtccccaggaacagtagagatggcaagcttatcgagaccctctctgcccagctgcctctgctccttcctcctcctcctcctcctccaagtgtcttccagctatgcagggcagttcagagtgataggaccaagacaccctatccgggctctggtcggggatgaagtggaattgccatgtcgcatatctcctgggaagaacgctacaggcatggaggtggggtggtaccgcccccccttctctagggtggttcatctctacagaaatggcaaggaccaagatggagaccaggcacctgaatatcggggccggacagagctgctgaaagatgctattggtgagggaaaggtgactctcaggatccggaatgtaaggttctcagatgaaggaggtttcacctgcttcttccgagatcattcttaccaagaggaggcagcaatggaattgaaagtagaagatcctttctactgggtgagccctggagtgctggttctcctcgcggtgctgcctgtgctcctcctgcagatcactgttggcctcgtcttcctctgcctgcagtacagactgagaggaaaacttcgagcagagatagagaatctccaccggacttttgatccccactttctgagggtgccctgctggaagataaccctgtttgtaattgtgccggttcttggacccttggttgccttgatcatctgctacaactggctacatcgaagactagcagggcaattccttgaagagctacgtaagttctcttctctctgttataagcagagaataaaaagccaggaaagggagacagaagcaacaagaggaagaggcgggctattgagggatcacattcccagaggaaaggaggagctggagagcctgggtggagggaagactcctcctgggaggtagagggcaaagaagccagctgttagagacacatttacaggtggcagagaagctggaggcactcctatctgccacctgatccattcctccttcactgcccctaagcaggaatccaaccctagctggtctcattgcccattccacagcaactgcccagtgcctcacctctcagatcaaccattgaggcaggaatggagacaagatgaccccaagggcttttcttctccctagttcaatggttttatgatacaaactactgacatacgtttttcaagttattttctccttcttctaggaaatcccttctgagtgatgtcacatcttggcaggggtggaggagagcctggttgcccagggatttgtccttggggacatctcatccatcaagttgcacactcactggcatctttgctatggggacattccaatttgcactttcaggaacactctgaattccaagtagaattgatttcccttcttctgtcatctaccttttctcttcattttcccatttttattacccttctttccatttctctctccagtcttccacctggaagccctctctggctaaggacaggcaggtgcccctctctccatcagaggacacctgtactggagagcaacacaggatggtctctgccatgaactggaggccaggaatctcctcactgaaaattacagtatggtaactttgcaaatggtggttgtttcttccaagactccagccctgattgcgcaaaactgaaaggcatgtgaagggaaggaagaggaagagtgcaaaacattgaagagagagctgagtgagctgaagagtgaggatatgagtagccccaacccaaacctggagatggggagaaacctacagaatactagccagagctcctccttgtcttggcagcctactagggacctggggaagcaaaaacgaaagctgggcaacatgcctgctttagaatgttttccttctacttacacatcttccacaggtctcagaatctttccttcctctcatccttttctcctatcttcatatctatcagagtatccactgtttattcaacaactactacttgatggtcagacacaaacaaacaagctaggtgctaattaataaagatacgagttttggccgggtgcggtggctcacgcctgtaatcccagcactttgggaggccgaggcgggcgaatcacgaggtcaggagttcaagaccagcctggccaacatggtgaaaccccatctctactaaaaatacaaacaattaactgagcatagtggtgggcacctataataccagctactccggaggctgaggcaggagaatcgcttgaacccaggaggcagaggttgcagtgagctgagatcgcgccactgcactctagccggagtgacagagtaagactctgtctcaaaaataaataaataaataaataaataaataaataaataaataaataaataaaaaataataatacaagttttcataagcacacttctaa

SEQ ID NO: 12856 - DNA, 1735 bp, Homo sapiens
  source 1..1735: mol_type = unassigned DNA
ggcagttcagagtgataggaccaagacaccctatccgggctctggtcggggatgaagtggaattgccatgtcgcatatctcctgggaagaacgctacaggcatggaggtggggtggtaccgcccccccttctctagggtggttcatctctacagaaatggcaaggaccaagatggagaccaggcacctgaatatcggggccggacagagctgctgaaagatgctattggtgagggaaaggtgactctcaggatccggaatgtaaggttctcagatgaaggaggtttcacctgcttcttccgagatcattcttaccaagaggaggcagcaatggaattgaaagtagaagtgtctcactctgtcacccaggattggttgcagtggcacgatcatggctcattgcagcctccacctcccaggctcaagtgatcctcctgactcagcctcttgaatagctgagaccacaggcttgtgtcaccatgcccagatcctttctactgggtgagccctggagtgctggttctcctcgcggtgctgcctgtgctcctcctgcagatcactgttggcctcgtcttcctctgcctgcagtacagactgagaggaaaacttcgagcagagatagagaatctccaccggacttttgatccccactttctgagggtgccctgctggaagataaccctgtttgtaattgtgccggttcttggacccttggttgccttgatcatctgctacaactggctacatcgaagactagcagggcaattccttgaagagctactcttccacctggaagccctctctggctaaggacaggcaggtgcccctctctccatcagaggacacctgtactggagagcaacacaggatggtctctgccatgaactggaggccaggaatctcctcactgaaaattacagtatggtaactttgcaaatggtggttgtttcttccaagactccagccctgattgcgcaaaactgaaaggcatgtgaagggaaggaagaggaagagtgcaaaacattgaagagagagctgagtgagctgaagagtgaggatatgagtagccccaacccaaacctggagatggggagaaacctacagaatactagccagagctcctccttgtcttggcagcctactagggacctggggaagcaaaaacgaaagctgggcaacatgcctgctttagaatgttttccttctacttacacatcttccacaggtctcagaatctttccttcctctcatccttttctcctatcttcatatctatcagagtatccactgtttattcaacaactactacttgatggtcagacacaaacaaacaagctaggtgctaattaataaagatacgagttttggccgggtgcggtggctcacgcctgtaatcccagcactttgggaggccgaggcgggcgaatcacgaggtcaggagttcaagaccagcctggccaacatggtgaaaccccatctctactaaaaatacaaacaattaactgagcatagtggtgggcacctataataccagctactccggaggctgaggcaggagaatcgcttgaacccaggaggcagaggttgcagtgagctgagatcgcgccactgcactctagccggagtgacagagtaagactctgtctcaaaaataaataaataaataaataaataaataaataaataaataaataaataaaaaataataatacaagttttcataagcacacttctaa

SEQ ID NO: 12857 - DNA, 1985 bp, Homo sapiens
  source 1..1985: mol_type = unassigned DNA
ggcagttcagagtgataggaccaagacaccctatccgggctctggtcggggatgaagtggaattgccatgtcgcatatctcctgggaagaacgctacaggcatggaggtggggtggtaccgcccccccttctctagggtggttcatctctacagaaatggcaaggaccaagatggagaccaggcacctgaatatcggggccggacagagctgctgaaagatgctattggtgagggaaaggtgactctcaggatccggaatgtaaggttctcagatgaaggaggtttcacctgcttcttccgagatcattcttaccaagaggaggcagcaatggaattgaaagtagaagtgtctcactctgtcacccaggattggttgcagtggcacgatcatggctcattgcagcctccacctcccaggctcaagtgatcctcctgactcagcctcttgaatagctgagaccacaggcttgtgtcaccatgcccagatcctttctactgggtgagccctggagtgctggttctcctcgcggtgctgcctgtgctcctcctgcagatcactgttggcctcgtcttcctctgcctgcagtacagactgagaggaaaacttcgagcagagatagagaatctccaccggacttttgatccccactttctgagggtgccctgctggaagataaccctgtttgtaattgtgccggttcttggacccttggttgccttgatcatctgctacaactggctacatcgaagactagcagggcaattccttgaagagctacgaaatcccttctgagtgatgtcacatcttggcaggggtggaggagagcctggttgcccagggatttgtccttggggacatctcatccatcaagttgcacactcactggcatctttgctatggggacattccaatttgcactttcaggaacactctgaattccaagtagaattgatttcccttcttctgtcatctaccttttctcttcattttcccatttttattacccttctttccatttctctctccagtcttccacctggaagccctctctggctaaggacaggcaggtgcccctctctccatcagaggacacctgtactggagagcaacacaggatggtctctgccatgaactggaggccaggaatctcctcactgaaaattacagtatggtaactttgcaaatggtggttgtttcttccaagactccagccctgattgcgcaaaactgaaaggcatgtgaagggaaggaagaggaagagtgcaaaacattgaagagagagctgagtgagctgaagagtgaggatatgagtagccccaacccaaacctggagatggggagaaacctacagaatactagccagagctcctccttgtcttggcagcctactagggacctggggaagcaaaaacgaaagctgggcaacatgcctgctttagaatgttttccttctacttacacatcttccacaggtctcagaatctttccttcctctcatccttttctcctatcttcatatctatcagagtatccactgtttattcaacaactactacttgatggtcagacacaaacaaacaagctaggtgctaattaataaagatacgagttttggccgggtgcggtggctcacgcctgtaatcccagcactttgggaggccgaggcgggcgaatcacgaggtcaggagttcaagaccagcctggccaacatggtgaaaccccatctctactaaaaatacaaacaattaactgagcatagtggtgggcacctataataccagctactccggaggctgaggcaggagaatcgcttgaacccaggaggcagaggttgcagtgagctgagatcgcgccactgcactctagccggagtgacagagtaagactctgtctcaaaaataaataaataaataaataaataaataaataaataaataaataaataaaaaataataatacaagttttcataagcacacttctaa

SEQ ID NO: 12858 - DNA, 702 bp, Homo sapiens; identical to SEQ ID NO: 12811
  source 1..702: mol_type = unassigned DNA

SEQ ID NO: 12859 - DNA, 774 bp, Homo sapiens; identical to SEQ ID NO: 12812
  source 1..774: mol_type = unassigned DNA

SEQ ID NO: 12860 - DNA, 2045 bp, Homo sapiens
  source 1..2045: mol_type = unassigned DNA
gtcatcccctcagtctgtagcccttttgtgtgagtgcctggcaagggtgacgtggggctgtttctgcgggcacagctgcagcaattaccggagtggaggcagggcccaggcagcactgccctccaagatcttcccttgggcttttcagcagtaaggggacatgcaccccaagggcctccacttggcctgaccttgctgcgggggctctctgtccccaggaacagtagagatggcaagcttatcgagaccctctctgcccagctgcctctgctccttcctcctcctcctcctcctccaagtgtcttccagctatgcagggcagttcagagtgataggaccaagacaccctatccgggctctggtcggggatgaagtggaattgccatgtcgcatatctcctgggaagaacgctacaggcatggaggtggggtggtaccgcccccccttctctagggtggttcatctctacagaaatggcaaggaccaagatggagaccaggcacctgaatatcggggccggacagagctgctgaaagatgctattggtgagggaaaggtgactctcaggatccggaatgtaaggttctcagatgaaggaggtttcacctgcttcttccgagatcattcttaccaagaggaggcagcaatggaattgaaagtagaagatcctttctactgggtgagccctggagtgctggttctcctcgcggtgctgcctgtgctcctcctgcagatcactgttggcctcgtcttcctctgcctgcagtacagactgagaggaaaacttcgagcagagatagagaatctccaccggacttttgggcaattccttgaagagctacgaaatcccttctgagtgatgtcacatcttggcaggggtggaggagagcctggttgcccagggatttgtccttggggacatctcatccatcaagttgcacactcactggcatctttgctatggggacattccaatttgcactttcaggaacactctgaattccaagtagaattgatttcccttcttctgtcatctaccttttctcttcattttcccatttttattacccttctttccatttctctctccagtcttccacctggaagccctctctggctaaggacaggcaggtgcccctctctccatcagaggacacctgtactggagagcaacacaggatggtctctgccatgaactggaggccaggaatctcctcactgaaaattacagtatggtaactttgcaaatggtggttgtttcttccaagactccagccctgattgcgcaaaactgaaaggcatgtgaagggaaggaagaggaagagtgcaaaacattgaagagagagctgagtgagctgaagagtgaggatatgagtagccccaacccaaacctggagatggggagaaacctacagaatactagccagagctcctccttgtcttggcagcctactagggacctggggaagcaaaaacgaaagctgggcaacatgcctgctttagaatgttttccttctacttacacatcttccacaggtctcagaatctttccttcctctcatccttttctcctatcttcatatctatcagagtatccactgtttattcaacaactactacttgatggtcagacacaaacaaacaagctaggtgctaattaataaagatacgagttttggccgggtgcggtggctcacgcctgtaatcccagcactttgggaggccgaggcgggcgaatcacgaggtcaggagttcaagaccagcctggccaacatggtgaaaccccatctctactaaaaatacaaacaattaactgagcatagtggtgggcacctataataccagctactccggaggctgaggcaggagaatcgcttgaacccaggaggcagaggttgcagtgagctgagatcgcgccactgcactctagccggagtgacagagtaagactctgtctcaaaaataaataaataaataaataaataaataaataaataaataaataaataaaaaataataatacaagttttcataagcacacttct

SEQ ID NO: 12861 - DNA, 702 bp, Homo sapiens; identical to SEQ ID NO: 12811
  source 1..702: mol_type = unassigned DNA

SEQ ID NO: 12862 - DNA, 2087 bp, Homo sapiens
  source 1..2087: mol_type = unassigned DNA
caattaccggagtggaggcagggcccaggcagcactgccctccaagatcttcccttgggcttttcagcagtaaggggacatgcaccccaagggcctccacttggcctgaccttgctgcgggggctctctgtccccaggaacagtagagatggcaagcttatcgagaccctctctgcccagctgcctctgctccttcctcctcctcctcctcctccaagtgtcttccagctatgcagggcagttcagagtgataggaccaagacaccctatccgggctctggtcggggatgaagtggaattgccatgtcgcatatctcctgggaagaacgctacaggcatggaggtggggtggtaccgcccccccttctctagggtggttcatctctacagaaatggcaaggaccaagatggagaccaggcacctgaatatcggggccggacagagctgctgaaagatgctattggtgagggaaaggtgactctcaggatccggaatgtaaggttctcagatgaaggaggtttcacctgcttcttccgagatcattcttaccaagaggaggcagcaatggaattgaaagtagaagatcctttctactgggtgagccctggagtgctggttctcctcgcggtgctgcctgtgctcctcctgcagatcactgttggcctcgtcttcctctgcctgcagtacagactgagaggaaaacttcgagcagagatagagaatctccaccggacttttgatccccactttctgagggtgccctgctggaagataaccctgtttgtaattgtgccggttcttggacccttggttgccttgatcatctgctacaactggctacatcgaagactagcagggcaattccttgaagagctacgaaatcccttctgagtgatgtcacatcttggcaggggtggaggagagcctggttgcccagggatttgtccttggggacatctcatccatcaagttgcacactcactggcatctttgctatggggacattccaatttgcactttcaggaacactctgaattccaagtagaattgatttcccttcttctgtcatctaccttttctcttcattttcccatttttattacccttctttccatttctctctccagtcttccacctggaagccctctctggctaaggacaggcaggtgcccctctctccatcagaggacacctgtactggagagcaacacaggatggtctctgccatgaactggaggccaggaatctcctcactgaaaattacagtatggtaactttgcaaatggtggttgtttcttccaagactccagccctgattgcgcaaaactgaaaggcatgtgaagggaaggaagaggaagagtgcaaaacattgaagagagagctgagtgagctgaagagtgaggatatgagtagccccaacccaaacctggagatggggagaaacctacagaatactagccagagctcctccttgtcttggcagcctactagggacctggggaagcaaaaacgaaagctgggcaacatgcctgctttagaatgttttccttctacttacacatcttccacaggtctcagaatctttccttcctctcatccttttctcctatcttcatatctatcagagtatccactgtttattcaacaactactacttgatggtcagacacaaacaaacaagctaggtgctaattaataaagatacgagttttggccgggtgcggtggctcacgcctgtaatcccagcactttgggaggccgaggcgggcgaatcacgaggtcaggagttcaagaccagcctggccaacatggtgaaaccccatctctactaaaaatacaaacaattaactgagcatagtggtgggcacctataataccagctactccggaggctgaggcaggagaatcgcttgaacccaggaggcagaggttgcagtgagctgagatcgcgccactgcactctagccggagtgacagagtaagactctgtctcaaaaataaataaataaataaataaataaataaataaataaataaataaataaataaaaaataataatacaagttttcataagcacacttctaa

SEQ ID NO: 12863 - DNA, 2507 bp, Homo sapiens
  source 1..2507: mol_type = unassigned DNA
agcactgccctccaagatcttcccttgggcttttcagcagtaaggggacatgcaccccaagggcctccacttggcctgaccttgctgcgggggctctctgtccccaggaacagtagagatggcaagcttatcgagaccctctctgcccagctgcctctgctccttcctcctcctcctcctcctccaagtgtcttccagctatgcagggcagttcagagtgataggaccaagacaccctatccgggctctggtcggggatgaagtggaattgccatgtcgcatatctcctgggaagaacgctacaggcatggaggtggggtggtaccgcccccccttctctagggtggttcatctctacagaaatggcaaggaccaagatggagaccaggcacctgaatatcggggccggacagagctgctgaaagatgctattggtgagggaaaggtgactctcaggatccggaatgtaaggttctcagatgaaggaggtttcacctgcttcttccgagatcattcttaccaagaggaggcagcaatggaattgaaagtagaagatcctttctactgggtgagccctggagtgctggttctcctcgcggtgctgcctgtgctcctcctgcagatcactgttggcctcgtcttcctctgcctgcagtacagactgagaggaaaacttcgagcagagatagagaatctccaccggacttttgatccccactttctgagggtgccctgctggaagataaccctgtttgtaattgtgccggttcttggacccttggttgccttgatcatctgctacaactggctacatcgaagactagcagggcaattccttgaagagctacgtaagttctcttctctctgttataagcagagaataaaaagccaggaaagggagacagaagcaacaagaggaagaggcgggctattgagggatcacattcccagaggaaaggaggagctggagagcctgggtggagggaagactcctcctgggaggtagagggcaaagaagccagctgttagagacacatttacaggtggcagagaagctggaggcactcctatctgccacctgatccattcctccttcactgcccctaagcaggaatccaaccctagctggtctcattgcccattccacagcaactgcccagtgcctcacctctcagatcaaccattgaggcaggaatggagacaagatgaccccaagggcttttcttctccctagttcaatggttttatgatacaaactactgacatacgtttttcaagttattttctccttcttctaggaaatcccttctgagtgatgtcacatcttggcaggggtggaggagagcctggttgcccagggatttgtccttggggacatctcatccatcaagttgcacactcactggcatctttgctatggggacattccaatttgcactttcaggaacactctgaattccaagtagaattgatttcccttcttctgtcatctaccttttctcttcattttcccatttttattacccttctttccatttctctctccagtcttccacctggaagccctctctggctaaggacaggcaggtgcccctctctccatcagaggacacctgtactggagagcaacacaggatggtctctgccatgaactggaggccaggaatctcctcactgaaaattacagtatggtaactttgcaaatggtggttgtttcttccaagactccagccctgattgcgcaaaactgaaaggcatgtgaagggaaggaagaggaagagtgcaaaacattgaagagagagctgagtgagctgaagagtgaggatatgagtagccccaacccaaacctggagatggggagaaacctacagaatactagccagagctcctccttgtcttggcagcctactagggacctggggaagcaaaaacgaaagctgggcaacatgcctgctttagaatgttttccttctacttacacatcttccacaggtctcagaatctttccttcctctcatccttttctcctatcttcatatctatcagagtatccactgtttattcaacaactactacttgatggtcagacacaaacaaacaagctaggtgctaattaataaagatacgagttttggccgggtgcggtggctcacgcctgtaatcccagcactttgggaggccgaggcgggcgaatcacgaggtcaggagttcaagaccagcctggccaacatggtgaaaccccatctctactaaaaatacaaacaattaactgagcatagtggtgggcacctataataccagctactccggaggctgaggcaggagaatcgcttgaacccaggaggcagaggttgcagtgagctgagatcgcgccactgcactctagccggagtgacagagtaagactctgtctcaaaaataaataaataaataaataaataaataaataaataaataaataaataaataaaaaataataatacaagttttcataagcacacttctaa

SEQ ID NO: 12864 - DNA, 774 bp, Homo sapiens; identical to SEQ ID NO: 12812
  source 1..774: mol_type = unassigned DNA

SEQ ID NO: 12865 - DNA, 1591 bp, Homo sapiens
  source 1..1591: mol_type = unassigned DNA
atggcaagcttatcgagaccctctctgcccagctgcctctgctccttcctcctcctcctcctcctccaagtgtcttccagctatgcagatcctttctactgggtgagccctggagtgctggttctcctcgcggtgctgcctgtgctcctcctgcagatcactgttggcctcgtcttcctctgcctgcagtacagactgagaggaaaacttcgagcagagatagagaatctccaccggacttttgatccccactttctgagggtgccctgctggaagataaccctgtttgtaattgtgccggttcttggacccttggttgccttgatcatctgctacaactggctacatcgaagactagcagggcaattccttgaagagctacgaaatcccttctgagtgatgtcacatcttggcaggggtggaggagagcctggttgcccagggatttgtccttggggacatctcatccatcaagttgcacactcactggcatctttgctatggggacattccaatttgcactttcaggaacactctgaattccaagtagaattgatttcccttcttctgtcatctaccttttctcttcattttcccatttttattacccttctttccatttctctctccagtcttccacctggaagccctctctggctaaggacaggcaggtgcccctctctccatcagaggacacctgtactggagagcaacacaggatggtctctgccatgaactggaggccaggaatctcctcactgaaaattacagtatggtaactttgcaaatggtggttgtttcttccaagactccagccctgattgcgcaaaactgaaaggcatgtgaagggaaggaagaggaagagtgcaaaacattgaagagagagctgagtgagctgaagagtgaggatatgagtagccccaacccaaacctggagatggggagaaacctacagaatactagccagagctcctccttgtcttggcagcctactagggacctggggaagcaaaaacgaaagctgggcaacatgcctgctttagaatgttttccttctacttacacatcttccacaggtctcagaatctttccttcctctcatccttttctcctatcttcatatctatcagagtatccactgtttattcaacaactactacttgatggtcagacacaaacaaacaagctaggtgctaattaataaagatacgagttttggccgggtgcggtggctcacgcctgtaatcccagcactttgggaggccgaggcgggcgaatcacgaggtcaggagttcaagaccagcctggccaacatggtgaaaccccatctctactaaaaatacaaacaattaactgagcatagtggtgggcacctataataccagctactccggaggctgaggcaggagaatcgcttgaacccaggaggcagaggttgcagtgagctgagatcgcgccactgcactctagccggagtgacagagtaagactctgtctcaaaaataaataaataaataaataaataaataaataaataaataaataaataaataaaaaataataatacaagttttcataagcacacttctaa

SEQ ID NO: 12866 - DNA, 1572 bp, Homo sapiens
  source 1..1572: mol_type = unassigned DNA
atggcaagcttatcgagaccctctctgcccagctgcctctgctccttcctcctcctcctcctcctccaagtgtcttccagctatgcagggcagttcagagtgataggaccaagacaccctatccgggctctggtcggggatgaagtggaattgccatgtcgcatatctcctgggaagaacgctacaggcatggaggtggggtggtaccgcccccccttctctagggtggttcatctctacagaaatggcaaggaccaagatggagaccaggcacctgaatatcggggccggacagagctgctgaaagatgctattggtgagggaaaggtgactctcaggatccggaatgtaaggttctcagatgaaggaggtttcacctgcttcttccgagatcattcttaccaagaggaggcagcaatggaattgaaagtagaagatcctttctactgggtgagccctggagtgctggttctcctcgcggtgctgcctgtgctcctcctgcagatcactgttggcctcgtcttcctctgcctgcagtacagactgagaggaaaacttcgagcagagatagagaatctccaccggacttttgggcaattccttgaagagctactcttccacctggaagccctctctggctaaggacaggcaggtgcccctctctccatcagaggacacctgtactggagagcaacacaggatggtctctgccatgaactggaggccaggaatctcctcactgaaaattacagtatggtaactttgcaaatggtggttgtttcttccaagactccagccctgattgcgcaaaactgaaaggcatgtgaagggaaggaagaggaagagtgcaaaacattgaagagagagctgagtgagctgaagagtgaggatatgagtagccccaacccaaacctggagatggggagaaacctacagaatactagccagagctcctccttgtcttggcagcctactagggacctggggaagcaaaaacgaaagctgggcaacatgcctgctttagaatgttttccttctacttacacatcttccacaggtctcagaatctttccttcctctcatccttttctcctatcttcatatctatcagagtatccactgtttattcaacaactactacttgatggtcagacacaaacaaacaagctaggtgctaattaataaagatacgagttttggccgggtgcggtggctcacgcctgtaatcccagcactttgggaggccgaggcgggcgaatcacgaggtcaggagttcaagaccagcctggccaacatggtgaaaccccatctctactaaaaatacaaacaattaactgagcatagtggtgggcacctataataccagctactccggaggctgaggcaggagaatcgcttgaacccaggaggcagaggttgcagtgagctgagatcgcgccactgcactctagccggagtgacagagtaagactctgtctcaaaaataaataaataaataaataaataaataaataaataaataaataaataaataaaaaataataatacaagttttcataagcacacttctaa

SEQ ID NO: 12867 - DNA, 1689 bp, Homo sapiens
  source 1..1689: mol_type = unassigned DNA
atggcaagcttatcgagaccctctctgcccagctgcctctgctccttcctcctcctcctcctcctccaagtgtcttccagctatgcagggcagttcagagtgataggaccaagacaccctatccgggctctggtcggggatgaagtggaattgccatgtcgcatatctcctgggaagaacgctacaggcatggaggtggggtggtaccgcccccccttctctagggtggttcatctctacagaaatggcaaggaccaagatggagaccaggcacctgaatatcggggccggacagagctgctgaaagatgctattggtgagggaaaggtgactctcaggatccggaatgtaaggttctcagatgaaggaggtttcacctgcttcttccgagatcattcttaccaagaggaggcagcaatggaattgaaagtagaagatcctttctactgggtgagccctggagtgctggttctcctcgcggtgctgcctgtgctcctcctgcagatcactgttggcctcgtcttcctctgcctgcagtacagactgagaggaaaacttcgagcagagatagagaatctccaccggacttttgatccccactttctgagggtgccctgctggaagataaccctgtttgtaattgtgccggttcttggacccttggttgccttgatcatctgctacaactggctacatcgaagactagcagggcaattccttgaagagctactcttccacctggaagccctctctggctaaggacaggcaggtgcccctctctccatcagaggacacctgtactggagagcaacacaggatggtctctgccatgaactggaggccaggaatctcctcactgaaaattacagtatggtaactttgcaaatggtggttgtttcttccaagactccagccctgattgcgcaaaactgaaaggcatgtgaagggaaggaagaggaagagtgcaaaacattgaagagagagctgagtgagctgaagagtgaggatatgagtagccccaacccaaacctggagatggggagaaacctacagaatactagccagagctcctccttgtcttggcagcctactagggacctggggaagcaaaaacgaaagctgggcaacatgcctgctttagaatgttttccttctacttacacatcttccacaggtctcagaatctttccttcctctcatccttttctcctatcttcatatctatcagagtatccactgtttattcaacaactactacttgatggtcagacacaaacaaacaagctaggtgctaattaataaagatacgagttttggccgggtgcggtggctcacgcctgtaatcccagcactttgggaggccgaggcgggcgaatcacgaggtcaggagttcaagaccagcctggccaacatggtgaaaccccatctctactaaaaatacaaacaattaactgagcatagtggtgggcacctataataccagctactccggaggctgaggcaggagaatcgcttgaacccaggaggcagaggttgcagtgagctgagatcgcgccactgcactctagccggagtgacagagtaagactctgtctcaaaaataaataaataaataaataaataaataaataaataaataaataaataaataaaaaataataatacaagttttcataagcacacttctaa

SEQ ID NO: 12868 - DNA, 1620 bp, Homo sapiens
  source 1..1620: mol_type = unassigned DNA
atggcaagcttatcgagaccctctctgcccagctgcctctgctccttcctcctcctcctcctcctccaagtgtcttccagctatgcagggcagttcagagtgataggaccaagacaccctatccgggctctggtcggggatgaagtggaattgccatgtcgcatatctcctgggaagaacgctacaggcatggaggtggggtggtaccgcccccccttctctagggtggttcatctctacagaaatggcaaggaccaagatggagaccaggcacctgaatatcggggccggacagagctgctgaaagatgctattggtgagggaaaggtgactctcaggatccggaatgtaaggttctcagatgaaggaggtttcacctgcttcttccgagatcattcttaccaagaggaggcagcaatggaattgaaagtagaagatcctttctactgggtgagccctggagtgctggttctcctcgcggtgctgcctgtgctcctcctgcagatcactgttggcctcgtcttcctctgcctgcagtacagactgagaggaaaacttcgagcagagatagagaatctccaccggacttttgagtcctttggtgttctaggaccccaggttaaggaaccaaaaaagacagggcaattccttgaagagctactcttccacctggaagccctctctggctaaggacaggcaggtgcccctctctccatcagaggacacctgtactggagagcaacacaggatggtctctgccatgaactggaggccaggaatctcctcactgaaaattacagtatggtaactttgcaaatggtggttgtttcttccaagactccagccctgattgcgcaaaactgaaaggcatgtgaagggaaggaagaggaagagtgcaaaacattgaagagagagctgagtgagctgaagagtgaggatatgagtagccccaacccaaacctggagatggggagaaacctacagaatactagccagagctcctccttgtcttggcagcctactagggacctggggaagcaaaaacgaaagctgggcaacatgcctgctttagaatgttttccttctacttacacatcttccacaggtctcagaatctttccttcctctcatccttttctcctatcttcatatctatcagagtatccactgtttattcaacaactactacttgatggtcagacacaaacaaacaagctaggtgctaattaataaagatacgagttttggccgggtgcggtggctcacgcctgtaatcccagcactttgggaggccgaggcgggcgaatcacgaggtcaggagttcaagaccagcctggccaacatggtgaaaccccatctctactaaaaatacaaacaattaactgagcatagtggtgggcacctataataccagctactccggaggctgaggcaggagaatcgcttgaacccaggaggcagaggttgcagtgagctgagatcgcgccactgcactctagccggagtgacagagtaagactctgtctcaaaaataaataaataaataaataaataaataaataaataaataaataaataaataaaaaataataatacaagttttcataagcacacttctaa

SEQ ID NO: 12869 - DNA, 1870 bp, Homo sapiens
  source 1..1870: mol_type = unassigned DNA
atggcaagcttatcgagaccctctctgcccagctgcctctgctccttcctcctcctcctcctcctccaagtgtcttccagctatgcagggcagttcagagtgataggaccaagacaccctatccgggctctggtcggggatgaagtggaattgccatgtcgcatatctcctgggaagaacgctacaggcatggaggtggggtggtaccgcccccccttctctagggtggttcatctctacagaaatggcaaggaccaagatggagaccaggcacctgaatatcggggccggacagagctgctgaaagatgctattggtgagggaaaggtgactctcaggatccggaatgtaaggttctcagatgaaggaggtttcacctgcttcttccgagatcattcttaccaagaggaggcagcaatggaattgaaagtagaagatcctttctactgggtgagccctggagtgctggttctcctcgcggtgctgcctgtgctcctcctgcagatcactgttggcctcgtcttcctctgcctgcagtacagactgagaggaaaacttcgagcagagatagagaatctccaccggacttttgagtcctttggtgttctaggaccccaggttaaggaaccaaaaaagacagggcaattccttgaagagctacgaaatcccttctgagtgatgtcacatcttggcaggggtggaggagagcctggttgcccagggatttgtccttggggacatctcatccatcaagttgcacactcactggcatctttgctatggggacattccaatttgcactttcaggaacactctgaattccaagtagaattgatttcccttcttctgtcatctaccttttctcttcattttcccatttttattacccttctttccatttctctctccagtcttccacctggaagccctctctggctaaggacaggcaggtgcccctctctccatcagaggacacctgtactggagagcaacacaggatggtctctgccatgaactggaggccaggaatctcctcactgaaaattacagtatggtaactttgcaaatggtggttgtttcttccaagactccagccctgattgcgcaaaactgaaaggcatgtgaagggaaggaagaggaagagtgcaaaacattgaagagagagctgagtgagctgaagagtgaggatatgagtagccccaacccaaacctggagatggggagaaacctacagaatactagccagagctcctccttgtcttggcagcctactagggacctggggaagcaaaaacgaaagctgggcaacatgcctgctttagaatgttttccttctacttacacatcttccacaggtctcagaatctttccttcctctcatccttttctcctatcttcatatctatcagagtatccactgtttattcaacaactactacttgatggtcagacacaaacaaacaagctaggtgctaattaataaagatacgagttttggccgggtgcggtggctcacgcctgtaatcccagcactttgggaggccgaggcgggcgaatcacgaggtcaggagttcaagaccagcctggccaacatggtgaaaccccatctctactaaaaatacaaacaattaactgagcatagtggtgggcacctataataccagctactccggaggctgaggcaggagaatcgcttgaacccaggaggcagaggttgcagtgagctgagatcgcgccactgcactctagccggagtgacagagtaagactctgtctcaaaaataaataaataaataaataaataaataaataaataaataaataaataaataaaaaataataatacaagttttcataagcacacttctaa

SEQ ID NO: 12870 - DNA, 1545 bp, Homo sapiens
  source 1..1545: mol_type = unassigned DNA
agcttatcgagaccctctctgcccagctgcctctgctccttcctcctcctcctcctcctccaagtgtcttccagctatgcagggcagttcagagtgataggaccaagacaccctatccgggctctggtcggggatgaagtggaattgccatgtcgcatatctcctgggaagaacgctacaggcatggaggtggggtggtaccgcccccccttctctagggtggttcatctctacagaaatggcaaggaccaagatggagaccaggcacctgaatatcggggccggacagagctgctgaaagatgctattggtgagggaaaggtgactctcaggatccggaatgtaaggttctcagatgaaggaggtttcacctgcttcttccgagatcattcttaccaagaggaggcagcaatggaattgaaagtagaagatcctttctactgggtgagccctggagtgctggttctcctcgcggtgctgcctgtgctcctcctgcagatcactgttggcctcgtcttcctctgcctgcagtacagactgagaggaaaacttcgagcagagatagagaatctccaccggacttttgtcttccacctggaagccctctctggctaaggacaggcaggtgcccctctctccatcagaggacacctgtactggagagcaacacaggatggtctctgccatgaactggaggccaggaatctcctcactgaaaattacagtatggtaactttgcaaatggtggttgtttcttccaagactccagccctgattgcgcaaaactgaaaggcatgtgaagggaaggaagaggaagagtgcaaaacattgaagagagagctgagtgagctgaagagtgaggatatgagtagccccaacccaaacctggagatggggagaaacctacagaatactagccagagctcctccttgtcttggcagcctactagggacctggggaagcaaaaacgaaagctgggcaacatgcctgctttagaatgttttccttctacttacacatcttccacaggtctcagaatctttccttcctctcatccttttctcctatcttcatatctatcagagtatccactgtttattcaacaactactacttgatggtcagacacaaacaaacaagctaggtgctaattaataaagatacgagttttggccgggtgcggtggctcacgcctgtaatcccagcactttgggaggccgaggcgggcgaatcacgaggtcaggagttcaagaccagcctggccaacatggtgaaaccccatctctactaaaaatacaaacaattaactgagcatagtggtgggcacctataataccagctactccggaggctgaggcaggagaatcgcttgaacccaggaggcagaggttgcagtgagctgagatcgcgccactgcactctagccggagtgacagagtaagactctgtctcaaaaataaataaataaataaataaataaataaataaataaataaataaataaataaaaaataataatacaagttttcataagcacacttctaa

SEQ ID NO: 12871 - DNA, 1734 bp, Homo sapiens
  source 1..1734: mol_type = unassigned DNA
ggcagttcagagtgataggaccaagacaccctatccgggctctggtcggggatgaagtggaattgccatgtcgcatatctcctgggaagaacgctacaggcatggaggtggggtggtaccgcccccccttctctagggtggttcatctctacagaaatggcaaggaccaagatggagaccaggcacctgaatatcggggccggacagagctgctgaaagatgctattggtgagggaaaggtgactctcaggatccggaatgtaaggttctcagatgaaggaggtttcacctgcttcttccgagatcattcttaccaagaggaggcagcaatggaattgaaagtagaagatcctttctactgggtgagccctggagtgctggttctcctcgcggtgctgcctgtgctcctcctgcagatcactgttggcctcgtcttcctctgcctgcagtacagactgagaggaaaacttcgagcagagatagagaatctccaccggacttttgggcaattccttgaagagctacgaaatcccttctgagtgatgtcacatcttggcaggggtggaggagagcctggttgcccagggatttgtccttggggacatctcatccatcaagttgcacactcactggcatctttgctatggggacattccaatttgcactttcaggaacactctgaattccaagtagaattgatttcccttcttctgtcatctaccttttctcttcattttcccatttttattacccttctttccatttctctctccagtcttccacctggaagccctctctggctaaggacaggcaggtgcccctctctccatcagaggacacctgtactggagagcaacacaggatggtctctgccatgaactggaggccaggaatctcctcactgaaaattacagtatggtaactttgcaaatggtggttgtttcttccaagactccagccctgattgcgcaaaactgaaaggcatgtgaagggaaggaagaggaagagtgcaaaacattgaagagagagctgagtgagctgaagagtgaggatatgagtagccccaacccaaacctggagatggggagaaacctacagaatactagccagagctcctccttgtcttggcagcctactagggacctggggaagcaaaaacgaaagctgggcaacatgcctgctttagaatgttttccttctacttacacatcttccacaggtctcagaatctttccttcctctcatccttttctcctatcttcatatctatcagagtatccactgtttattcaacaactactacttgatggtcagacacaaacaaacaagctaggtgctaattaataaagatacgagttttggccgggtgcggtggctcacgcctgtaatcccagcactttgggaggccgaggcgggcgaatcacgaggtcaggagttcaagaccagcctggccaacatggtgaaaccccatctctactaaaaatacaaacaattaactgagcatagtggtgggcacctataataccagctactccggaggctgaggcaggagaatcgcttgaacccaggaggcagaggttgcagtgagctgagatcgcgccactgcactctagccggagtgacagagtaagactctgtctcaaaaataaataaataaataaataaataaataaataaataaataaataaataaataaaaaataataatacaagttttcataagcacacttctaa

SEQ ID NO: 12872 - DNA, 1739 bp, Homo sapiens
  source 1..1739: mol_type = unassigned DNA
ggcagttcagagtgataggaccaagacaccctatccgggctctggtcggggatgaagtggaattgccatgtcgcatatctcctgggaagaacgctacaggcatggaggtggggtggtaccgcccccccttctctagggtggttcatctctacagaaatggcaaggaccaagatggagaccaggcacctgaatatcggggccggacagagctgctgaaagatgctattggtgagggaaaggtgactctcaggatccggaatgtaaggttctcagatgaaggaggtttcacctgcttcttccgagatcattcttaccaagaggaggcagcaatggaattgaaagtagaagtgtctcactctgtcacccaggattggttgcagtggcacgatcatggctcattgcagcctccacctcccaggctcaagtgatcctcctgactcagcctcttgaatagctgagaccacaggcttgtgtcaccatgcccagatcctttctactgggtgagccctggagtgctggttctcctcgcggtgctgcctgtgctcctcctgcagatcactgttggcctcgtcttcctctgcctgcagtacagactgagaggaaaacttcgagcagagatagagaatctccaccggacttttgatccccactttctgagggtgccctgctggaagataaccctgtttgtaattgtgccggttcttggacccttggttgccttgatcatctgctacaactggctacatcgaagactagcagggcaattccttgaagagctactcttccacctggaagccctctctggctaaggacaggcaggtgcccctctctccatcagaggacacctgtactggagagcaacacaggatggtctctgccatgaactggaggccaggaatctcctcactgaaaattacagtatggtaactttgcaaatggtggttgtttcttccaagactccagccctgattgcgcaaaactgaaaggcatgtgaagggaaggaagaggaagagtgcaaaacattgaagagagagctgagtgagctgaagagtgaggatatgagtagccccaacccaaacctggagatggggagaaacctacagaatactagccagagctcctccttgtcttggcagcctactagggacctggggaagcaaaaacgaaagctgggcaacatgcctgctttagaatgttttccttctacttacacatcttccacaggtctcagaatctttccttcctctcatccttttctcctatcttcatatctatcagagtatccactgtttattcaacaactactacttgatggtcagacacaaacaaacaagctaggtgctaattaataaagatacgagttttggccgggtgcggtggctcacgcctgtaatcccagcactttgggaggccgaggcgggcgaatcacgaggtcaggagttcaagaccagcctggccaacatggtgaaaccccatctctactaaaaatacaaacaattaactgagcatagtggtgggcacctataataccagctactccggaggctgaggcaggagaatcgcttgaacccaggaggcagaggttgcagtgagctgagatcgcgccactgcactctagccggagtgacagagtaagactctgtctcaaaaataaataaataaataaataaataaataaataaataaataaataaataaataaaaaataataatacaagttttcataagcacacttctaa

SEQ ID NO: 12873 - DNA, 1989 bp, Homo sapiens
  source 1..1989: mol_type = unassigned DNA
ggcagttcagagtgataggaccaagacaccctatccgggctctggtcggggatgaagtggaattgccatgtcgcatatctcctgggaagaacgctacaggcatggaggtggggtggtaccgcccccccttctctagggtggttcatctctacagaaatggcaaggaccaagatggagaccaggcacctgaatatcggggccggacagagctgctgaaagatgctattggtgagggaaaggtgactctcaggatccggaatgtaaggttctcagatgaaggaggtttcacctgcttcttccgagatcattcttaccaagaggaggcagcaatggaattgaaagtagaagtgtctcactctgtcacccaggattggttgcagtggcacgatcatggctcattgcagcctccacctcccaggctcaagtgatcctcctgactcagcctcttgaatagctgagaccacaggcttgtgtcaccatgcccagatcctttctactgggtgagccctggagtgctggttctcctcgcggtgctgcctgtgctcctcctgcagatcactgttggcctcgtcttcctctgcctgcagtacagactgagaggaaaacttcgagcagagatagagaatctccaccggacttttgatccccactttctgagggtgccctgctggaagataaccctgtttgtaattgtgccggttcttggacccttggttgccttgatcatctgctacaactggctacatcgaagactagcagggcaattccttgaagagctacgaaatcccttctgagtgatgtcacatcttggcaggggtggaggagagcctggttgcccagggatttgtccttggggacatctcatccatcaagttgcacactcactggcatctttgctatggggacattccaatttgcactttcaggaacactctgaattccaagtagaattgatttcccttcttctgtcatctaccttttctcttcattttcccatttttattacccttctttccatttctctctccagtcttccacctggaagccctctctggctaaggacaggcaggtgcccctctctccatcagaggacacctgtactggagagcaacacaggatggtctctgccatgaactggaggccaggaatctcctcactgaaaattacagtatggtaactttgcaaatggtggttgtttcttccaagactccagccctgattgcgcaaaactgaaaggcatgtgaagggaaggaagaggaagagtgcaaaacattgaagagagagctgagtgagctgaagagtgaggatatgagtagccccaacccaaacctggagatggggagaaacctacagaatactagccagagctcctccttgtcttggcagcctactagggacctggggaagcaaaaacgaaagctgggcaacatgcctgctttagaatgttttccttctacttacacatcttccacaggtctcagaatctttccttcctctcatccttttctcctatcttcatatctatcagagtatccactgtttattcaacaactactacttgatggtcagacacaaacaaacaagctaggtgctaattaataaagatacgagttttggccgggtgcggtggctcacgcctgtaatcccagcactttgggaggccgaggcgggcgaatcacgaggtcaggagttcaagaccagcctggccaacatggtgaaaccccatctctactaaaaatacaaacaattaactgagcatagtggtgggcacctataataccagctactccggaggctgaggcaggagaatcgcttgaacccaggaggcagaggttgcagtgagctgagatcgcgccactgcactctagccggagtgacagagtaagactctgtctcaaaaataaataaataaataaataaataaataaataaataaataaataaataaataaaaaataataatacaagttttcataagcacacttctaa

SEQ ID NO: 12874 - DNA, 2049 bp, Homo sapiens
  source 1..2049: mol_type = unassigned DNA
gtcatcccctcagtctgtagcccttttgtgtgagtgcctggcaagggtgacgtggggctgtttctgcgggcacagctgcagcaattaccggagtggaggcagggcccaggcagcactgccctccaagatcttcccttgggcttttcagcagtaaggggacatgcaccccaagggcctccacttggcctgaccttgctgcgggggctctctgtccccaggaacagtagagatggcaagcttatcgagaccctctctgcccagctgcctctgctccttcctcctcctcctcctcctccaagtgtcttccagctatgcagggcagttcagagtgataggaccaagacaccctatccgggctctggtcggggatgaagtggaattgccatgtcgcatatctcctgggaagaacgctacaggcatggaggtggggtggtaccgcccccccttctctagggtggttcatctctacagaaatggcaaggaccaagatggagaccaggcacctgaatatcggggccggacagagctgctgaaagatgctattggtgagggaaaggtgactctcaggatccggaatgtaaggttctcagatgaaggaggtttcacctgcttcttccgagatcattcttaccaagaggaggcagcaatggaattgaaagtagaagatcctttctactgggtgagccctggagtgctggttctcctcgcggtgctgcctgtgctcctcctgcagatcactgttggcctcgtcttcctctgcctgcagtacagactgagaggaaaacttcgagcagagatagagaatctccaccggacttttgggcaattccttgaagagctacgaaatcccttctgagtgatgtcacatcttggcaggggtggaggagagcctggttgcccagggatttgtccttggggacatctcatccatcaagttgcacactcactggcatctttgctatggggacattccaatttgcactttcaggaacactctgaattccaagtagaattgatttcccttcttctgtcatctaccttttctcttcattttcccatttttattacccttctttccatttctctctccagtcttccacctggaagccctctctggctaaggacaggcaggtgcccctctctccatcagaggacacctgtactggagagcaacacaggatggtctctgccatgaactggaggccaggaatctcctcactgaaaattacagtatggtaactttgcaaatggtggttgtttcttccaagactccagccctgattgcgcaaaactgaaaggcatgtgaagggaaggaagaggaagagtgcaaaacattgaagagagagctgagtgagctgaagagtgaggatatgagtagccccaacccaaacctggagatggggagaaacctacagaatactagccagagctcctccttgtcttggcagcctactagggacctggggaagcaaaaacgaaagctgggcaacatgcctgctttagaatgttttccttctacttacacatcttccacaggtctcagaatctttccttcctctcatccttttctcctatcttcatatctatcagagtatccactgtttattcaacaactactacttgatggtcagacacaaacaaacaagctaggtgctaattaataaagatacgagttttggccgggtgcggtggctcacgcctgtaatcccagcactttgggaggccgaggcgggcgaatcacgaggtcaggagttcaagaccagcctggccaacatggtgaaaccccatctctactaaaaatacaaacaattaactgagcatagtggtgggcacctataataccagctactccggaggctgaggcaggagaatcgcttgaacccaggaggcagaggttgcagtgagctgagatcgcgccactgcactctagccggagtgacagagtaagactctgtctcaaaaataaataaataaataaataaataaataaataaataaataaataaataaataaaaaataataatacaagttttcataagcacacttct

SEQ ID NO: 12875 - DNA, 2142 bp, Homo sapiens
  source 1..2142: mol_type = unassigned DNA
agcccttttgtgtgagtgcctggcaagggtgacgtggggctgtttctgcgggcacagctgcagcaattaccggagtggaggcagggcccaggcagcactgccctccaagatcttcccttgggcttttcagcagtaaggggacatgcaccccaagggcctccacttggcctgaccttgctgcgggggctctctgtccccaggaacagtagagatggcaagcttatcgagaccctctctgcccagctgcctctgctccttcctcctcctcctcctcctccaagtgtcttccagctatgcagggcagttcagagtgataggaccaagacaccctatccgggctctggtcggggatgaagtggaattgccatgtcgcatatctcctgggaagaacgctacaggcatggaggtggggtggtaccgcccccccttctctagggtggttcatctctacagaaatggcaaggaccaagatggagaccaggcacctgaatatcggggccggacagagctgctgaaagatgctattggtgagggaaaggtgactctcaggatccggaatgtaaggttctcagatgaaggaggtttcacctgcttcttccgagatcattcttaccaagaggaggcagcaatggaattgaaagtagaagatcctttctactgggtgagccctggagtgctggttctcctcgcggtgctgcctgtgctcctcctgcagatcactgttggcctcgtcttcctctgcctgcagtacagactgagaggaaaacttcgagcagagatagagaatctccaccggacttttgatccccactttctgagggtgccctgctggaagataaccctgtttgtaattgtgccggttcttggacccttggttgccttgatcatctgctacaactggctacatcgaagactagcagggcaattccttgaagagctacgaaatcccttctgagtgatgtcacatcttggcaggggtggaggagagcctggttgcccagggatttgtccttggggacatctcatccatcaagttgcacactcactggcatctttgctatggggacattccaatttgcactttcaggaacactctgaattccaagtagaattgatttcccttcttctgtcatctaccttttctcttcattttcccatttttattacccttctttccatttctctctccagtcttccacctggaagccctctctggctaaggacaggcaggtgcccctctctccatcagaggacacctgtactggagagcaacacaggatggtctctgccatgaactggaggccaggaatctcctcactgaaaattacagtatggtaactttgcaaatggtggttgtttcttccaagactccagccctgattgcgcaaaactgaaaggcatgtgaagggaaggaagaggaagagtgcaaaacattgaagagagagctgagtgagctgaagagtgaggatatgagtagccccaacccaaacctggagatggggagaaacctacagaatactagccagagctcctccttgtcttggcagcctactagggacctggggaagcaaaaacgaaagctgggcaacatgcctgctttagaatgttttccttctacttacacatcttccacaggtctcagaatctttccttcctctcatccttttctcctatcttcatatctatcagagtatccactgtttattcaacaactactacttgatggtcagacacaaacaaacaagctaggtgctaattaataaagatacgagttttggccgggtgcggtggctcacgcctgtaatcccagcactttgggaggccgaggcgggcgaatcacgaggtcaggagttcgagaccagcctggccaacatggtgaaaccccatctctactaaaaatacaaacaattaactgagcatagtggtgggcacctataataccagctactccggaggctgaggcaggagaatcgcttgaacccaggaggcagaggttgcagtgagctgagatcgcgccactgcactctagccagagtgacagagtaagactctgtctcaaaaataaataaataaataaataaataaataaataaataaataaataaaaaataataatacaagttttcataagcacacttctaa

SEQ ID NO: 12876 - DNA, 702 bp, Homo sapiens; identical to SEQ ID NO: 12811
  source 1..702: mol_type = unassigned DNA

SEQ ID NO: 12877 - DNA, 2499 bp, Homo sapiens
  source 1..2499: mol_type = unassigned DNA
agcactgccctccaagatcttcccttgggcttttcagcagtaaggggacatgcaccccaagggcctccacttggcctgaccttgctgcgggggctctctgtccccaggaacagtagagatggcaagcttatcgagaccctctctgcccagctgcctctgctccttcctcctcctcctcctcctccaagtgtcttccagctatgcagggcagttcagagtgataggaccaagacaccctatccgggctctggtcggggatgaagtggaattgccatgtcgcatatctcctgggaagaacgctacaggcatggaggtggggtggtaccgcccccccttctctagggtggttcatctctacagaaatggcaaggaccaagatggagaccaggcacctgaatatcggggccggacagagctgctgaaagatgctattggtgagggaaaggtgactctcaggatccggaatgtaaggttctcagatgaaggaggtttcacctgcttcttccgagatcattcttaccaagaggaggcagcaatggaattgaaagtagaagatcctttctactgggtgagccctggagtgctggttctcctcgcggtgctgcctgtgctcctcctgcagatcactgttggcctcgtcttcctctgcctgcagtacagactgagaggaaaacttcgagcagagatagagaatctccaccggacttttgatccccactttctgagggtgccctgctggaagataaccctgtttgtaattgtgccggttcttggacccttggttgccttgatcatctgctacaactggctacatcgaagactagcagggcaattccttgaagagctacgtaagttctcttctctctgttataagcagagaataaaaagccaggaaagggagacagaagcaacaagaggaagaggcgggctattgagggatcacattcccagaggaaaggaggagctggagagcctgggtggagggaagactcctcctgggaggtagagggcaaagaagccagctgttagagacacatttacaggtggcagagaagctggaggcactcctatctgccacctgatccattcctccttcactgcccctaagcaggaatccaaccctagctggtctcattgcccattccacagcaactgcccagtgcctcacctctcagatcaaccattgaggcaggaatggagacaagatgaccccaagggcttttcttctccctagttcaatggttttatgatacaaactactgacatacgtttttcaagttattttctccttcttctaggaaatcccttctgagtgatgtcacatcttggcaggggtggaggagagcctggttgcccagggatttgtccttggggacatctcatccatcaagttgcacactcactggcatctttgctatggggacattccaatttgcactttcaggaacactctgaattccaagtagaattgatttcccttcttctgtcatctaccttttctcttcattttcccatttttattacccttctttccatttctctctccagtcttccacctggaagccctctctggctaaggacaggcaggtgcccctctctccatcagaggacacctgtactggagagcaacacaggatggtctctgccatgaactggaggccaggaatctcctcactgaaaattacagtatggtaactttgcaaatggtggttgtttcttccaagactccagccctgattgcgcaaaactgaaaggcatgtgaagggaaggaagaggaagagtgcaaaacattgaagagagagctgagtgagctgaagagtgaggatatgagtagccccaacccaaacctggagatggggagaaacctacagaatactagccagagctcctccttgtcttggcagcctactagggacctggggaagcaaaaacgaaagctgggcaacatgcctgctttagaatgttttccttctacttacacatcttccacaggtctcagaatctttccttcctctcatccttttctcctatcttcatatctatcagagtatccactgtttattcaacaactactacttgatggtcagacacaaacaaacaagctaggtgctaattaataaagatacgagttttggccgggtgcggtggctcacgcctgtaatcccagcactttgggaggccgaggcgggcgaatcacgaggtcaggagttcgagaccagcctggccaacatggtgaaaccccatctctactaaaaatacaaacaattaactgagcatagtggtgggcacctataataccagctactccggaggctgaggcaggagaatcgcttgaacccaggaggcagaggttgcagtgagctgagatcgcgccactgcactctagccagagtgacagagtaagactctgtctcaaaaataaataaataaataaataaataaataaataaataaataaataaaaaataataatacaagttttcataagcacacttctaa

SEQ ID NO: 12878 - DNA, 774 bp, Homo sapiens; identical to SEQ ID NO: 12812
  source 1..774: mol_type = unassigned DNA

SEQ ID NO: 12879 - DNA, 1583 bp, Homo sapiens
  source 1..1583: mol_type = unassigned DNA
atggcaagcttatcgagaccctctctgcccagctgcctctgctccttcctcctcctcctcctcctccaagtgtcttccagctatgcagatcctttctactgggtgagccctggagtgctggttctcctcgcggtgctgcctgtgctcctcctgcagatcactgttggcctcgtcttcctctgcctgcagtacagactgagaggaaaacttcgagcagagatagagaatctccaccggacttttgatccccactttctgagggtgccctgctggaagataaccctgtttgtaattgtgccggttcttggacccttggttgccttgatcatctgctacaactggctacatcgaagactagcagggcaattccttgaagagctacgaaatcccttctgagtgatgtcacatcttggcaggggtggaggagagcctggttgcccagggatttgtccttggggacatctcatccatcaagttgcacactcactggcatctttgctatggggacattccaatttgcactttcaggaacactctgaattccaagtagaattgatttcccttcttctgtcatctaccttttctcttcattttcccatttttattacccttctttccatttctctctccagtcttccacctggaagccctctctggctaaggacaggcaggtgcccctctctccatcagaggacacctgtactggagagcaacacaggatggtctctgccatgaactggaggccaggaatctcctcactgaaaattacagtatggtaactttgcaaatggtggttgtttcttccaagactccagccctgattgcgcaaaactgaaaggcatgtgaagggaaggaagaggaagagtgcaaaacattgaagagagagctgagtgagctgaagagtgaggatatgagtagccccaacccaaacctggagatggggagaaacctacagaatactagccagagctcctccttgtcttggcagcctactagggacctggggaagcaaaaacgaaagctgggcaacatgcctgctttagaatgttttccttctacttacacatcttccacaggtctcagaatctttccttcctctcatccttttctcctatcttcatatctatcagagtatccactgtttattcaacaactactacttgatggtcagacacaaacaaacaagctaggtgctaattaataaagatacgagttttggccgggtgcggtggctcacgcctgtaatcccagcactttgggaggccgaggcgggcgaatcacgaggtcaggagttcgagaccagcctggccaacatggtgaaaccccatctctactaaaaatacaaacaattaactgagcatagtggtgggcacctataataccagctactccggaggctgaggcaggagaatcgcttgaacccaggaggcagaggttgcagtgagctgagatcgcgccactgcactctagccagagtgacagagtaagactctgtctcaaaaataaataaataaataaataaataaataaataaataaataaataaaaaataataatacaagttttcataagcacacttctaa

SEQ ID NO: 12880 - DNA, 1681 bp, Homo sapiens
  source 1..1681: mol_type = unassigned DNA
atggcaagcttatcgagaccctctctgcccagctgcctctgctccttcctcctcctcctcctcctccaagtgtcttccagctatgcagggcagttcagagtgataggaccaagacaccctatccgggctctggtcggggatgaagtggaattgccatgtcgcatatctcctgggaagaacgctacaggcatggaggtggggtggtaccgcccccccttctctagggtggttcatctctacagaaatggcaaggaccaagatggagaccaggcacctgaatatcggggccggacagagctgctgaaagatgctattggtgagggaaaggtgactctcaggatccggaatgtaaggttctcagatgaaggaggtttcacctgcttcttccgagatcattcttaccaagaggaggcagcaatggaattgaaagtagaagatcctttctactgggtgagccctggagtgctggttctcctcgcggtgctgcctgtgctcctcctgcagatcactgttggcctcgtcttcctctgcctgcagtacagactgagaggaaaacttcgagcagagatagagaatctccaccggacttttgatccccactttctgagggtgccctgctggaagataaccctgtttgtaattgtgccggttcttggacccttggttgccttgatcatctgctacaactggctacatcgaagactagcagggcaattccttgaagagctactcttccacctggaagccctctctggctaaggacaggcaggtgcccctctctccatcagaggacacctgtactggagagcaacacaggatggtctctgccatgaactggaggccaggaatctcctcactgaaaattacagtatggtaactttgcaaatggtggttgtttcttccaagactccagccctgattgcgcaaaactgaaaggcatgtgaagggaaggaagaggaagagtgcaaaacattgaagagagagctgagtgagctgaagagtgaggatatgagtagccccaacccaaacctggagatggggagaaacctacagaatactagccagagctcctccttgtcttggcagcctactagggacctggggaagcaaaaacgaaagctgggcaacatgcctgctttagaatgttttccttctacttacacatcttccacaggtctcagaatctttccttcctctcatccttttctcctatcttcatatctatcagagtatccactgtttattcaacaactactacttgatggtcagacacaaacaaacaagctaggtgctaattaataaagatacgagttttggccgggtgcggtggctcacgcctgtaatcccagcactttgggaggccgaggcgggcgaatcacgaggtcaggagttcgagaccagcctggccaacatggtgaaaccccatctctactaaaaatacaaacaattaactgagcatagtggtgggcacctataataccagctactccggaggctgaggcaggagaatcgcttgaacccaggaggcagaggttgcagtgagctgagatcgcgccactgcactctagccagagtgacagagtaagactctgtctcaaaaataaataaataaataaataaataaataaataaataaataaataaaaaataataatacaagttttcataagcacacttctaa

SEQ ID NO: 12881 - DNA, 1564 bp, Homo sapiens
  source 1..1564: mol_type = unassigned DNA
atggcaagcttatcgagaccctctctgcccagctgcctctgctccttcctcctcctcctcctcctccaagtgtcttccagctatgcagggcagttcagagtgataggaccaagacaccctatccgggctctggtcggggatgaagtggaattgccatgtcgcatatctcctgggaagaacgctacaggcatggaggtggggtggtaccgcccccccttctctagggtggttcatctctacagaaatggcaaggaccaagatggagaccaggcacctgaatatcggggccggacagagctgctgaaagatgctattggtgagggaaaggtgactctcaggatccggaatgtaaggttctcagatgaaggaggtttcacctgcttcttccgagatcattcttaccaagaggaggcagcaatggaattgaaagtagaagatcctttctactgggtgagccctggagtgctggttctcctcgcggtgctgcctgtgctcctcctgcagatcactgttggcctcgtcttcctctgcctgcagtacagactgagaggaaaacttcgagcagagatagagaatctccaccggacttttgggcaattccttgaagagctactcttccacctggaagccctctctggctaaggacaggcaggtgcccctctctccatcagaggacacctgtactggagagcaacacaggatggtctctgccatgaactggaggccaggaatctcctcactgaaaattacagtatggtaactttgcaaatggtggttgtttcttccaagactccagccctgattgcgcaaaactgaaaggcatgtgaagggaaggaagaggaagagtgcaaaacattgaagagagagctgagtgagctgaagagtgaggatatgagtagccccaacccaaacctggagatggggagaaacctacagaatactagccagagctcctccttgtcttggcagcctactagggacctggggaagcaaaaacgaaagctgggcaacatgcctgctttagaatgttttccttctacttacacatcttccacaggtctcagaatctttccttcctctcatccttttctcctatcttcatatctatcagagtatccactgtttattcaacaactactacttgatggtcagacacaaacaaacaagctaggtgctaattaataaagatacgagttttggccgggtgcggtggctcacgcctgtaatcccagcactttgggaggccgaggcgggcgaatcacgaggtcaggagttcgagaccagcctggccaacatggtgaaaccccatctctactaaaaatacaaacaattaactgagcatagtggtgggcacctataataccagctactccggaggctgaggcaggagaatcgcttgaacccaggaggcagaggttgcagtgagctgagatcgcgccactgcactctagccagagtgacagagtaagactctgtctcaaaaataaataaataaataaataaataaataaataaataaataaataaaaaataataatacaagttttcataagcacacttctaa

SEQ ID NO: 12882 - DNA, 1612 bp, Homo sapiens
  source 1..1612: mol_type = unassigned DNA
atggcaagcttatcgagaccctctctgcccagctgcctctgctccttcctcctcctcctcctcctccaagtgtcttccagctatgcagggcagttcagagtgataggaccaagacaccctatccgggctctggtcggggatgaagtggaattgccatgtcgcatatctcctgggaagaacgctacaggcatggaggtggggtggtaccgcccccccttctctagggtggttcatctctacagaaatggcaaggaccaagatggagaccaggcacctgaatatcggggccggacagagctgctgaaagatgctattggtgagggaaaggtgactctcaggatccggaatgtaaggttctcagatgaaggaggtttcacctgcttcttccgagatcattcttaccaagaggaggcagcaatggaattgaaagtagaagatcctttctactgggtgagccctggagtgctggttctcctcgcggtgctgcctgtgctcctcctgcagatcactgttggcctcgtcttcctctgcctgcagtacagactgagaggaaaacttcgagcagagatagagaatctccaccggacttttgagtcctttggtgttctaggaccccaggttaaggaaccaaaaaagacagggcaattccttgaagagctactcttccacctggaagccctctctggctaaggacaggcaggtgcccctctctccatcagaggacacctgtactggagagcaacacaggatggtctctgccatgaactggaggccaggaatctcctcactgaaaattacagtatggtaactttgcaaatggtggttgtttcttccaagactccagccctgattgcgcaaaactgaaaggcatgtgaagggaaggaagaggaagagtgcaaaacattgaagagagagctgagtgagctgaagagtgaggatatgagtagccccaacccaaacctggagatggggagaaacctacagaatactagccagagctcctccttgtcttggcagcctactagggacctggggaagcaaaaacgaaagctgggcaacatgcctgctttagaatgttttccttctacttacacatcttccacaggtctcagaatctttccttcctctcatccttttctcctatcttcatatctatcagagtatccactgtttattcaacaactactacttgatggtcagacacaaacaaacaagctaggtgctaattaataaagatacgagttttggccgggtgcggtggctcacgcctgtaatcccagcactttgggaggccgaggcgggcgaatcacgaggtcaggagttcgagaccagcctggccaacatggtgaaaccccatctctactaaaaatacaaacaattaactgagcatagtggtgggcacctataataccagctactccggaggctgaggcaggagaatcgcttgaacccaggaggcagaggttgcagtgagctgagatcgcgccactgcactctagccagagtgacagagtaagactctgtctcaaaaataaataaataaataaataaataaataaataaataaataaataaaaaataataatacaagttttcataagcacacttctaa

SEQ ID NO: 12883 - DNA, 1862 bp, Homo sapiens
  source 1..1862: mol_type = unassigned DNA
atggcaagcttatcgagaccctctctgcccagctgcctctgctccttcctcctcctcctcctcctccaagtgtcttccagctatgcagggcagttcagagtgataggaccaagacaccctatccgggctctggtcggggatgaagtggaattgccatgtcgcatatctcctgggaagaacgctacaggcatggaggtggggtggtaccgcccccccttctctagggtggttcatctctacagaaatggcaaggaccaagatggagaccaggcacctgaatatcggggccggacagagctgctgaaagatgctattggtgagggaaaggtgactctcaggatccggaatgtaaggttctcagatgaaggaggtttcacctgcttcttccgagatcattcttaccaagaggaggcagcaatggaattgaaagtagaagatcctttctactgggtgagccctggagtgctggttctcctcgcggtgctgcctgtgctcctcctgcagatcactgttggcctcgtcttcctctgcctgcagtacagactgagaggaaaacttcgagcagagatagagaatctccaccggacttttgagtcctttggtgttctaggaccccaggttaaggaaccaaaaaagacagggcaattccttgaagagctacgaaatcccttctgagtgatgtcacatcttggcaggggtggaggagagcctggttgcccagggatttgtccttggggacatctcatccatcaagttgcacactcactggcatctttgctatggggacattccaatttgcactttcaggaacactctgaattccaagtagaattgatttcccttcttctgtcatctaccttttctcttcattttcccatttttattacccttctttccatttctctctccagtcttccacctggaagccctctctggctaaggacaggcaggtgcccctctctccatcagaggacacctgtactggagagcaacacaggatggtctctgccatgaactggaggccaggaatctcctcactgaaaattacagtatggtaactttgcaaatggtggttgtttcttccaagactccagccctgattgcgcaaaactgaaaggcatgtgaagggaaggaagaggaagagtgcaaaacattgaagagagagctgagtgagctgaagagtgaggatatgagtagccccaacccaaacctggagatggggagaaacctacagaatactagccagagctcctccttgtcttggcagcctactagggacctggggaagcaaaaacgaaagctgggcaacatgcctgctttagaatgttttccttctacttacacatcttccacaggtctcagaatctttccttcctctcatccttttctcctatcttcatatctatcagagtatccactgtttattcaacaactactacttgatggtcagacacaaacaaacaagctaggtgctaattaataaagatacgagttttggccgggtgcggtggctcacgcctgtaatcccagcactttgggaggccgaggcgggcgaatcacgaggtcaggagttcgagaccagcctggccaacatggtgaaaccccatctctactaaaaatacaaacaattaactgagcatagtggtgggcacctataataccagctactccggaggctgaggcaggagaatcgcttgaacccaggaggcagaggttgcagtgagctgagatcgcgccactgcactctagccagagtgacagagtaagactctgtctcaaaaataaataaataaataaataaataaataaataaataaataaataaaaaataataatacaagttttcataagcacacttctaa

SEQ ID NO: 12884 - DNA, 1537 bp, Homo sapiens
  source 1..1537: mol_type = unassigned DNA
agcttatcgagaccctctctgcccagctgcctctgctccttcctcctcctcctcctcctccaagtgtcttccagctatgcagggcagttcagagtgataggaccaagacaccctatccgggctctggtcggggatgaagtggaattgccatgtcgcatatctcctgggaagaacgctacaggcatggaggtggggtggtaccgcccccccttctctagggtggttcatctctacagaaatggcaaggaccaagatggagaccaggcacctgaatatcggggccggacagagctgctgaaagatgctattggtgagggaaaggtgactctcaggatccggaatgtaaggttctcagatgaaggaggtttcacctgcttcttccgagatcattcttaccaagaggaggcagcaatggaattgaaagtagaagatcctttctactgggtgagccctggagtgctggttctcctcgcggtgctgcctgtgctcctcctgcagatcactgttggcctcgtcttcctctgcctgcagtacagactgagaggaaaacttcgagcagagatagagaatctccaccggacttttgtcttccacctggaagccctctctggctaaggacaggcaggtgcccctctctccatcagaggacacctgtactggagagcaacacaggatggtctctgccatgaactggaggccaggaatctcctcactgaaaattacagtatggtaactttgcaaatggtggttgtttcttccaagactccagccctgattgcgcaaaactgaaaggcatgtgaagggaaggaagaggaagagtgcaaaacattgaagagagagctgagtgagctgaagagtgaggatatgagtagccccaacccaaacctggagatggggagaaacctacagaatactagccagagctcctccttgtcttggcagcctactagggacctggggaagcaaaaacgaaagctgggcaacatgcctgctttagaatgttttccttctacttacacatcttccacaggtctcagaatctttccttcctctcatccttttctcctatcttcatatctatcagagtatccactgtttattcaacaactactacttgatggtcagacacaaacaaacaagctaggtgctaattaataaagatacgagttttggccgggtgcggtggctcacgcctgtaatcccagcactttgggaggccgaggcgggcgaatcacgaggtcaggagttcgagaccagcctggccaacatggtgaaaccccatctctactaaaaatacaaacaattaactgagcatagtggtgggcacctataataccagctactccggaggctgaggcaggagaatcgcttgaacccaggaggcagaggttgcagtgagctgagatcgcgccactgcactctagccagagtgacagagtaagactctgtctcaaaaataaataaataaataaataaataaataaataaataaataaataaaaaataataatacaagttttcataagcacacttctaa

SEQ ID NO: 12885 - DNA, 1726 bp, Homo sapiens
  source 1..1726: mol_type = unassigned DNA
ggcagttcagagtgataggaccaagacaccctatccgggctctggtcggggatgaagtggaattgccatgtcgcatatctcctgggaagaacgctacaggcatggaggtggggtggtaccgcccccccttctctagggtggttcatctctacagaaatggcaaggaccaagatggagaccaggcacctgaatatcggggccggacagagctgctgaaagatgctattggtgagggaaaggtgactctcaggatccggaatgtaaggttctcagatgaaggaggtttcacctgcttcttccgagatcattcttaccaagaggaggcagcaatggaattgaaagtagaagatcctttctactgggtgagccctggagtgctggttctcctcgcggtgctgcctgtgctcctcctgcagatcactgttggcctcgtcttcctctgcctgcagtacagactgagaggaaaacttcgagcagagatagagaatctccaccggacttttgggcaattccttgaagagctacgaaatcccttctgagtgatgtcacatcttggcaggggtggaggagagcctggttgcccagggatttgtccttggggacatctcatccatcaagttgcacactcactggcatctttgctatggggacattccaatttgcactttcaggaacactctgaattccaagtagaattgatttcccttcttctgtcatctaccttttctcttcattttcccatttttattacccttctttccatttctctctccagtcttccacctggaagccctctctggctaaggacaggcaggtgcccctctctccatcagaggacacctgtactggagagcaacacaggatggtctctgccatgaactggaggccaggaatctcctcactgaaaattacagtatggtaactttgcaaatggtggttgtttcttccaagactccagccctgattgcgcaaaactgaaaggcatgtgaagggaaggaagaggaagagtgcaaaacattgaagagagagctgagtgagctgaagagtgaggatatgagtagccccaacccaaacctggagatggggagaaacctacagaatactagccagagctcctccttgtcttggcagcctactagggacctggggaagcaaaaacgaaagctgggcaacatgcctgctttagaatgttttccttctacttacacatcttccacaggtctcagaatctttccttcctctcatccttttctcctatcttcatatctatcagagtatccactgtttattcaacaactactacttgatggtcagacacaaacaaacaagctaggtgctaattaataaagatacgagttttggccgggtgcggtggctcacgcctgtaatcccagcactttgggaggccgaggcgggcgaatcacgaggtcaggagttcgagaccagcctggccaacatggtgaaaccccatctctactaaaaatacaaacaattaactgagcatagtggtgggcacctataataccagctactccggaggctgaggcaggagaatcgcttgaacccaggaggcagaggttgcagtgagctgagatcgcgccactgcactctagccagagtgacagagtaagactctgtctcaaaaataaataaataaataaataaataaataaataaataaataaataaaaaataataatacaagttttcataagcacacttctaa

SEQ ID NO: 12886 - DNA, 1731 bp, Homo sapiens
  source 1..1731: mol_type = unassigned DNA
ggcagttcagagtgataggaccaagacaccctatccgggctctggtcggggatgaagtggaattgccatgtcgcatatctcctgggaagaacgctacaggcatggaggtggggtggtaccgcccccccttctctagggtggttcatctctacagaaatggcaaggaccaagatggagaccaggcacctgaatatcggggccggacagagctgctgaaagatgctattggtgagggaaaggtgactctcaggatccggaatgtaaggttctcagatgaaggaggtttcacctgcttcttccgagatcattcttaccaagaggaggcagcaatggaattgaaagtagaagtgtctcactctgtcacccaggattggttgcagtggcacgatcatggctcattgcagcctccacctcccaggctcaagtgatcctcctgactcagcctcttgaatagctgagaccacaggcttgtgtcaccatgcccagatcctttctactgggtgagccctggagtgctggttctcctcgcggtgctgcctgtgctcctcctgcagatcactgttggcctcgtcttcctctgcctgcagtacagactgagaggaaaacttcgagcagagatagagaatctccaccggacttttgatccccactttctgagggtgccctgctggaagataaccctgtttgtaattgtgccggttcttggacccttggttgccttgatcatctgctacaactggctacatcgaagactagcagggcaattccttgaagagctactcttccacctggaagccctctctggctaaggacaggcaggtgcccctctctccatcagaggacacctgtactggagagcaacacaggatggtctctgccatgaactggaggccaggaatctcctcactgaaaattacagtatggtaactttgcaaatggtggttgtttcttccaagactccagccctgattgcgcaaaactgaaaggcatgtgaagggaaggaagaggaagagtgcaaaacattgaagagagagctgagtgagctgaagagtgaggatatgagtagccccaacccaaacctggagatggggagaaacctacagaatactagccagagctcctccttgtcttggcagcctactagggacctggggaagcaaaaacgaaagctgggcaacatgcctgctttagaatgttttccttctacttacacatcttccacaggtctcagaatctttccttcctctcatccttttctcctatcttcatatctatcagagtatccactgtttattcaacaactactacttgatggtcagacacaaacaaacaagctaggtgctaattaataaagatacgagttttggccgggtgcggtggctcacgcctgtaatcccagcactttgggaggccgaggcgggcgaatcacgaggtcaggagttcgagaccagcctggccaacatggtgaaaccccatctctactaaaaatacaaacaattaactgagcatagtggtgggcacctataataccagctactccggaggctgaggcaggagaatcgcttgaacccaggaggcagaggttgcagtgagctgagatcgcgccactgcactctagccagagtgacagagtaagactctgtctcaaaaataaataaataaataaataaataaataaataaataaataaataaaaaataataatacaagttttcataagcacacttctaa

SEQ ID NO: 12887 - DNA, 1981 bp, Homo sapiens
  source 1..1981: mol_type = unassigned DNA
ggcagttcagagtgataggaccaagacaccctatccgggctctggtcggggatgaagtggaattgccatgtcgcatatctcctgggaagaacgctacaggcatggaggtggggtggtaccgcccccccttctctagggtggttcatctctacagaaatggcaaggaccaagatggagaccaggcacctgaatatcggggccggacagagctgctgaaagatgctattggtgagggaaaggtgactctcaggatccggaatgtaaggttctcagatgaaggaggtttcacctgcttcttccgagatcattcttaccaagaggaggcagcaatggaattgaaagtagaagtgtctcactctgtcacccaggattggttgcagtggcacgatcatggctcattgcagcctccacctcccaggctcaagtgatcctcctgactcagcctcttgaatagctgagaccacaggcttgtgtcaccatgcccagatcctttctactgggtgagccctggagtgctggttctcctcgcggtgctgcctgtgctcctcctgcagatcactgttggcctcgtcttcctctgcctgcagtacagactgagaggaaaacttcgagcagagatagagaatctccaccggacttttgatccccactttctgagggtgccctgctggaagataaccctgtttgtaattgtgccggttcttggacccttggttgccttgatcatctgctacaactggctacatcgaagactagcagggcaattccttgaagagctacgaaatcccttctgagtgatgtcacatcttggcaggggtggaggagagcctggttgcccagggatttgtccttggggacatctcatccatcaagttgcacactcactggcatctttgctatggggacattccaatttgcactttcaggaacactctgaattccaagtagaattgatttcccttcttctgtcatctaccttttctcttcattttcccatttttattacccttctttccatttctctctccagtcttccacctggaagccctctctggctaaggacaggcaggtgcccctctctccatcagaggacacctgtactggagagcaacacaggatggtctctgccatgaactggaggccaggaatctcctcactgaaaattacagtatggtaactttgcaaatggtggttgtttcttccaagactccagccctgattgcgcaaaactgaaaggcatgtgaagggaaggaagaggaagagtgcaaaacattgaagagagagctgagtgagctgaagagtgaggatatgagtagccccaacccaaacctggagatggggagaaacctacagaatactagccagagctcctccttgtcttggcagcctactagggacctggggaagcaaaaacgaaagctgggcaacatgcctgctttagaatgttttccttctacttacacatcttccacaggtctcagaatctttccttcctctcatccttttctcctatcttcatatctatcagagtatccactgtttattcaacaactactacttgatggtcagacacaaacaaacaagctaggtgctaattaataaagatacgagttttggccgggtgcggtggctcacgcctgtaatcccagcactttgggaggccgaggcgggcgaatcacgaggtcaggagttcgagaccagcctggccaacatggtgaaaccccatctctactaaaaatacaaacaattaactgagcatagtggtgggcacctataataccagctactccggaggctgaggcaggagaatcgcttgaacccaggaggcagaggttgcagtgagctgagatcgcgccactgcactctagccagagtgacagagtaagactctgtctcaaaaataaataaataaataaataaataaataaataaataaataaataaaaaataataatacaagttttcataagcacacttctaa

SEQ ID NO: 12888 - DNA, 2041 bp, Homo sapiens
  source 1..2041: mol_type = unassigned DNA
gtcatcccctcagtctgtagcccttttgtgtgagtgcctggcaagggtgacgtggggctgtttctgcgggcacagctgcagcaattaccggagtggaggcagggcccaggcagcactgccctccaagatcttcccttgggcttttcagcagtaaggggacatgcaccccaagggcctccacttggcctgaccttgctgcgggggctctctgtccccaggaacagtagagatggcaagcttatcgagaccctctctgcccagctgcctctgctccttcctcctcctcctcctcctccaagtgtcttccagctatgcagggcagttcagagtgataggaccaagacaccctatccgggctctggtcggggatgaagtggaattgccatgtcgcatatctcctgggaagaacgctacaggcatggaggtggggtggtaccgcccccccttctctagggtggttcatctctacagaaatggcaaggaccaagatggagaccaggcacctgaatatcggggccggacagagctgctgaaagatgctattggtgagggaaaggtgactctcaggatccggaatgtaaggttctcagatgaaggaggtttcacctgcttcttccgagatcattcttaccaagaggaggcagcaatggaattgaaagtagaagatcctttctactgggtgagccctggagtgctggttctcctcgcggtgctgcctgtgctcctcctgcagatcactgttggcctcgtcttcctctgcctgcagtacagactgagaggaaaacttcgagcagagatagagaatctccaccggacttttgggcaattccttgaagagctacgaaatcccttctgagtgatgtcacatcttggcaggggtggaggagagcctggttgcccagggatttgtccttggggacatctcatccatcaagttgcacactcactggcatctttgctatggggacattccaatttgcactttcaggaacactctgaattccaagtagaattgatttcccttcttctgtcatctaccttttctcttcattttcccatttttattacccttctttccatttctctctccagtcttccacctggaagccctctctggctaaggacaggcaggtgcccctctctccatcagaggacacctgtactggagagcaacacaggatggtctctgccatgaactggaggccaggaatctcctcactgaaaattacagtatggtaactttgcaaatggtggttgtttcttccaagactccagccctgattgcgcaaaactgaaaggcatgtgaagggaaggaagaggaagagtgcaaaacattgaagagagagctgagtgagctgaagagtgaggatatgagtagccccaacccaaacctggagatggggagaaacctacagaatactagccagagctcctccttgtcttggcagcctactagggacctggggaagcaaaaacgaaagctgggcaacatgcctgctttagaatgttttccttctacttacacatcttccacaggtctcagaatctttccttcctctcatccttttctcctatcttcatatctatcagagtatccactgtttattcaacaactactacttgatggtcagacacaaacaaacaagctaggtgctaattaataaagatacgagttttggccgggtgcggtggctcacgcctgtaatcccagcactttgggaggccgaggcgggcgaatcacgaggtcaggagttcgagaccagcctggccaacatggtgaaaccccatctctactaaaaatacaaacaattaactgagcatagtggtgggcacctataataccagctactccggaggctgaggcaggagaatcgcttgaacccaggaggcagaggttgcagtgagctgagatcgcgccactgcactctagccagagtgacagagtaagactctgtctcaaaaataaataaataaataaataaataaataaataaataaataaataaaaaataataatacaagttttcataagcacacttct

SEQ ID NO: 12889 - DNA, 1579 bp, Homo sapiens
  source 1..1579: mol_type = unassigned DNA
atggcaagcttatcgagaccctctctgcccagctgcctctgctccttcctcctcctcctcctcctccaagtgtcttccagctatgcagatcctttctactgggtgagccctggagtgctggttctcctcgcggtgctgcctgtgctcctcctgcagatcactcttggcctcgtcttcctctgcctgcagtacagactgagaggaaaacttcgagcagagatagagaatctccaccggacttttgatccccactttctgagggtgccctgctggaagataaccctgtttgtaattgtgccggttcttggacccttggttgccttgatcatctgctacaactggctacatcgaagactagcagggcaattccttgaagagctacgaaatcccttctgagtgatgtcacatcttggcaggggtggaggagagcctggttgcccagggatttgtccttggggacatctcatccatcaagttgcacactcactggcatctttgctatggggacattccaatttgcactttcaggaacactctgaattccaagtagaattgatttcccttcttctgtcatctaccttttctcttcattttcccatttttattacccttctttccatttctctctccagtcttccacctggaagccctctctggctaaggacaggcaggtgcccctctctccatcagaggacacctgtactggagagcaacacaggatggtctctgccatgaactggaggccaggaatctcctcactgaaaattacagtatggtaactttgcaaatggtggttgtttcttccaagactccagccctgattgcgcaaaactgaaaggcatgtgaagggaaggaagaggaagagtgcaaaacattgaagagagagctgagtgagctgaagagtgaggatatgagtagccccaacccaaacctggagatggggagaaacctacagaatactagccagagctcctccttgtcttggcagcctactagggacctggggaagcaaaaacgaaagctgggcaacatgcctgctttagaatgttttccttctacttacacatcttccacaggtctcagaatctttccttcctctcatccttttctcctatcttcatatctatcagagtatccactgtttattcaacaactactacttgatggtcagacacaaacaaacaagctaggtgctaattaataaagatacgagttttggccgggtgcggtggctcacgcctgtaatcccagcactttgggaggccgaggcgggcgaatcacgaggtcaggagttcaagaccagcctggccaacatggtgaaaccccatctctactaaaaatacaaacaattaactgagcatagtggtgggcacctataataccagctactccggaggctgaggcaggagaatcgcttgaacccaggaggcagaggttgcagtgagctgagatcgcgccactgcactctagccggagtgacagagtaagactctgtctcaaaaataaataaataaataaataaataaataaataaataaataaaaaataataatacaagttttcataagcacacttctaa

SEQ ID NO: 12890 - DNA, 1533 bp, Homo sapiens
  source 1..1533: mol_type = unassigned DNA
agcttatcgagaccctctctgcccagctgcctctgctccttcctcctcctcctcctcctccaagtgtcttccagctatgcagggcagttcagagtgataggaccaagacaccctatccgggctctggtcggggatgaagtggaattgccatgtcgcatatctcctgggaagaacgctacaggcatggaggtggggtggtaccgcccccccttctctagggtggttcatctctacagaaatggcaaggaccaagatggagaccaggcacctgaatatcggggccggacagagctgctgaaagatgctattggtgagggaaaggtgactctcaggatccggaatgtaaggttctcagatgaaggaggtttcacctgcttcttccgagatcattcttaccaagaggaggcagcaatggaattgaaagtagaagatcctttctactgggtgagccctggagtgctggttctcctcgcggtgctgcctgtgctcctcctgcagatcactcttggcctcgtcttcctctgcctgcagtacagactgagaggaaaacttcgagcagagatagagaatctccaccggacttttgtcttccacctggaagccctctctggctaaggacaggcaggtgcccctctctccatcagaggacacctgtactggagagcaacacaggatggtctctgccatgaactggaggccaggaatctcctcactgaaaattacagtatggtaactttgcaaatggtggttgtttcttccaagactccagccctgattgcgcaaaactgaaaggcatgtgaagggaaggaagaggaagagtgcaaaacattgaagagagagctgagtgagctgaagagtgaggatatgagtagccccaacccaaacctggagatggggagaaacctacagaatactagccagagctcctccttgtcttggcagcctactagggacctggggaagcaaaaacgaaagctgggcaacatgcctgctttagaatgttttccttctacttacacatcttccacaggtctcagaatctttccttcctctcatccttttctcctatcttcatatctatcagagtatccactgtttattcaacaactactacttgatggtcagacacaaacaaacaagctaggtgctaattaataaagatacgagttttggccgggtgcggtggctcacgcctgtaatcccagcactttgggaggccgaggcgggcgaatcacgaggtcaggagttcaagaccagcctggccaacatggtgaaaccccatctctactaaaaatacaaacaattaactgagcatagtggtgggcacctataataccagctactccggaggctgaggcaggagaatcgcttgaacccaggaggcagaggttgcagtgagctgagatcgcgccactgcactctagccggagtgacagagtaagactctgtctcaaaaataaataaataaataaataaataaataaataaataaataaaaaataataatacaagttttcataagcacacttctaa

SEQ ID NO: 12891 - DNA, 1677 bp, Homo sapiens
  source 1..1677: mol_type = unassigned DNA
atggcaagcttatcgagaccctctctgcccagctgcctctgctccttcctcctcctcctcctcctccaagtgtcttccagctatgcagggcagttcagagtgataggaccaagacaccctatccgggctctggtcggggatgaagtggaattgccatgtcgcatatctcctgggaagaacgctacaggcatggaggtggggtggtaccgcccccccttctctagggtggttcatctctacagaaatggcaaggaccaagatggagaccaggcacctgaatatcggggccggacagagctgctgaaagatgctattggtgagggaaaggtgactctcaggatccggaatgtaaggttctcagatgaaggaggtttcacctgcttcttccgagatcattcttaccaagaggaggcagcaatggaattgaaagtagaagatcctttctactgggtgagccctggagtgctggttctcctcgcggtgctgcctgtgctcctcctgcagatcactcttggcctcgtcttcctctgcctgcagtacagactgagaggaaaacttcgagcagagatagagaatctccaccggacttttgatccccactttctgagggtgccctgctggaagataaccctgtttgtaattgtgccggttcttggacccttggttgccttgatcatctgctacaactggctacatcgaagactagcagggcaattccttgaagagctactcttccacctggaagccctctctggctaaggacaggcaggtgcccctctctccatcagaggacacctgtactggagagcaacacaggatggtctctgccatgaactggaggccaggaatctcctcactgaaaattacagtatggtaactttgcaaatggtggttgtttcttccaagactccagccctgattgcgcaaaactgaaaggcatgtgaagggaaggaagaggaagagtgcaaaacattgaagagagagctgagtgagctgaagagtgaggatatgagtagccccaacccaaacctggagatggggagaaacctacagaatactagccagagctcctccttgtcttggcagcctactagggacctggggaagcaaaaacgaaagctgggcaacatgcctgctttagaatgttttccttctacttacacatcttccacaggtctcagaatctttccttcctctcatccttttctcctatcttcatatctatcagagtatccactgtttattcaacaactactacttgatggtcagacacaaacaaacaagctaggtgctaattaataaagatacgagttttggccgggtgcggtggctcacgcctgtaatcccagcactttgggaggccgaggcgggcgaatcacgaggtcaggagttcaagaccagcctggccaacatggtgaaaccccatctctactaaaaatacaaacaattaactgagcatagtggtgggcacctataataccagctactccggaggctgaggcaggagaatcgcttgaacccaggaggcagaggttgcagtgagctgagatcgcgccactgcactctagccggagtgacagagtaagactctgtctcaaaaataaataaataaataaataaataaataaataaataaataaaaaataataatacaagttttcataagcacacttctaa

SEQ ID NO: 12892 - DNA, 1722 bp, Homo sapiens
  source 1..1722: mol_type = unassigned DNA
ggcagttcagagtgataggaccaagacaccctatccgggctctggtcggggatgaagtggaattgccatgtcgcatatctcctgggaagaacgctacaggcatggaggtggggtggtaccgcccccccttctctagggtggttcatctctacagaaatggcaaggaccaagatggagaccaggcacctgaatatcggggccggacagagctgctgaaagatgctattggtgagggaaaggtgactctcaggatccggaatgtaaggttctcagatgaaggaggtttcacctgcttcttccgagatcattcttaccaagaggaggcagcaatggaattgaaagtagaagatcctttctactgggtgagccctggagtgctggttctcctcgcggtgctgcctgtgctcctcctgcagatcactcttggcctcgtcttcctctgcctgcagtacagactgagaggaaaacttcgagcagagatagagaatctccaccggacttttgggcaattccttgaagagctacgaaatcccttctgagtgatgtcacatcttggcaggggtggaggagagcctggttgcccagggatttgtccttggggacatctcatccatcaagttgcacactcactggcatctttgctatggggacattccaatttgcactttcaggaacactctgaattccaagtagaattgatttcccttcttctgtcatctaccttttctcttcattttcccatttttattacccttctttccatttctctctccagtcttccacctggaagccctctctggctaaggacaggcaggtgcccctctctccatcagaggacacctgtactggagagcaacacaggatggtctctgccatgaactggaggccaggaatctcctcactgaaaattacagtatggtaactttgcaaatggtggttgtttcttccaagactccagccctgattgcgcaaaactgaaaggcatgtgaagggaaggaagaggaagagtgcaaaacattgaagagagagctgagtgagctgaagagtgaggatatgagtagccccaacccaaacctggagatggggagaaacctacagaatactagccagagctcctccttgtcttggcagcctactagggacctggggaagcaaaaacgaaagctgggcaacatgcctgctttagaatgttttccttctacttacacatcttccacaggtctcagaatctttccttcctctcatccttttctcctatcttcatatctatcagagtatccactgtttattcaacaactactacttgatggtcagacacaaacaaacaagctaggtgctaattaataaagatacgagttttggccgggtgcggtggctcacgcctgtaatcccagcactttgggaggccgaggcgggcgaatcacgaggtcaggagttcaagaccagcctggccaacatggtgaaaccccatctctactaaaaatacaaacaattaactgagcatagtggtgggcacctataataccagctactccggaggctgaggcaggagaatcgcttgaacccaggaggcagaggttgcagtgagctgagatcgcgccactgcactctagccggagtgacagagtaagactctgtctcaaaaataaataaataaataaataaataaataaataaataaataaaaaataataatacaagttttcataagcacacttctaa

SEQ ID NO: 12893 - DNA, 1560 bp, Homo sapiens
  source 1..1560: mol_type = unassigned DNA
atggcaagcttatcgagaccctctctgcccagctgcctctgctccttcctcctcctcctcctcctccaagtgtcttccagctatgcagggcagttcagagtgataggaccaagacaccctatccgggctctggtcggggatgaagtggaattgccatgtcgcatatctcctgggaagaacgctacaggcatggaggtggggtggtaccgcccccccttctctagggtggttcatctctacagaaatggcaaggaccaagatggagaccaggcacctgaatatcggggccggacagagctgctgaaagatgctattggtgagggaaaggtgactctcaggatccggaatgtaaggttctcagatgaaggaggtttcacctgcttcttccgagatcattcttaccaagaggaggcagcaatggaattgaaagtagaagatcctttctactgggtgagccctggagtgctggttctcctcgcggtgctgcctgtgctcctcctgcagatcactcttggcctcgtcttcctctgcctgcagtacagactgagaggaaaacttcgagcagagatagagaatctccaccggacttttgggcaattccttgaagagctactcttccacctggaagccctctctggctaaggacaggcaggtgcccctctctccatcagaggacacctgtactggagagcaacacaggatggtctctgccatgaactggaggccaggaatctcctcactgaaaattacagtatggtaactttgcaaatggtggttgtttcttccaagactccagccctgattgcgcaaaactgaaaggcatgtgaagggaaggaagaggaagagtgcaaaacattgaagagagagctgagtgagctgaagagtgaggatatgagtagccccaacccaaacctggagatggggagaaacctacagaatactagccagagctcctccttgtcttggcagcctactagggacctggggaagcaaaaacgaaagctgggcaacatgcctgctttagaatgttttccttctacttacacatcttccacaggtctcagaatctttccttcctctcatccttttctcctatcttcatatctatcagagtatccactgtttattcaacaactactacttgatggtcagacacaaacaaacaagctaggtgctaattaataaagatacgagttttggccgggtgcggtggctcacgcctgtaatcccagcactttgggaggccgaggcgggcgaatcacgaggtcaggagttcaagaccagcctggccaacatggtgaaaccccatctctactaaaaatacaaacaattaactgagcatagtggtgggcacctataataccagctactccggaggctgaggcaggagaatcgcttgaacccaggaggcagaggttgcagtgagctgagatcgcgccactgcactctagccggagtgacagagtaagactctgtctcaaaaataaataaataaataaataaataaataaataaataaataaaaaataataatacaagttttcataagcacacttctaa

SEQ ID NO: 12894 - DNA, 1608 bp, Homo sapiens
  source 1..1608: mol_type = unassigned DNA
atggcaagcttatcgagaccctctctgcccagctgcctctgctccttcctcctcctcctcctcctccaagtgtcttccagctatgcagggcagttcagagtgataggaccaagacaccctatccgggctctggtcggggatgaagtggaattgccatgtcgcatatctcctgggaagaacgctacaggcatggaggtggggtggtaccgcccccccttctctagggtggttcatctctacagaaatggcaaggaccaagatggagaccaggcacctgaatatcggggccggacagagctgctgaaagatgctattggtgagggaaaggtgactctcaggatccggaatgtaaggttctcagatgaaggaggtttcacctgcttcttccgagatcattcttaccaagaggaggcagcaatggaattgaaagtagaagatcctttctactgggtgagccctggagtgctggttctcctcgcggtgctgcctgtgctcctcctgcagatcactcttggcctcgtcttcctctgcctgcagtacagactgagaggaaaacttcgagcagagatagagaatctccaccggacttttgagtcctttggtgttctaggaccccaggttaaggaaccaaaaaagacagggcaattccttgaagagctactcttccacctggaagccctctctggctaaggacaggcaggtgcccctctctccatcagaggacacctgtactggagagcaacacaggatggtctctgccatgaactggaggccaggaatctcctcactgaaaattacagtatggtaactttgcaaatggtggttgtttcttccaagactccagccctgattgcgcaaaactgaaaggcatgtgaagggaaggaagaggaagagtgcaaaacattgaagagagagctgagtgagctgaagagtgaggatatgagtagccccaacccaaacctggagatggggagaaacctacagaatactagccagagctcctccttgtcttggcagcctactagggacctggggaagcaaaaacgaaagctgggcaacatgcctgctttagaatgttttccttctacttacacatcttccacaggtctcagaatctttccttcctctcatccttttctcctatcttcatatctatcagagtatccactgtttattcaacaactactacttgatggtcagacacaaacaaacaagctaggtgctaattaataaagatacgagttttggccgggtgcggtggctcacgcctgtaatcccagcactttgggaggccgaggcgggcgaatcacgaggtcaggagttcaagaccagcctggccaacatggtgaaaccccatctctactaaaaatacaaacaattaactgagcatagtggtgggcacctataataccagctactccggaggctgaggcaggagaatcgcttgaacccaggaggcagaggttgcagtgagctgagatcgcgccactgcactctagccggagtgacagagtaagactctgtctcaaaaataaataaataaataaataaataaataaataaataaataaaaaataataatacaagttttcataagcacacttctaa

SEQ ID NO: 12895 - DNA, 2138 bp, Homo sapiens
  source 1..2138: mol_type = unassigned DNA
agcccttttgtgtgagtgcctggcaagggtgacgtggggctgtttctgcgggcacagctgcagcaattaccggagtggaggcagggcccaggcagcactgccctccaagatcttcccttgggcttttcagcagtaaggggacatgcaccccaagggcctccacttggcctgaccttgctgcgggggctctctgtccccaggaacagtagagatggcaagcttatcgagaccctctctgcccagctgcctctgctccttcctcctcctcctcctcctccaagtgtcttccagctatgcagggcagttcagagtgataggaccaagacaccctatccgggctctggtcggggatgaagtggaattgccatgtcgcatatctcctgggaagaacgctacaggcatggaggtggggtggtaccgcccccccttctctagggtggttcatctctacagaaatggcaaggaccaagatggagaccaggcacctgaatatcggggccggacagagctgctgaaagatgctattggtgagggaaaggtgactctcaggatccggaatgtaaggttctcagatgaaggaggtttcacctgcttcttccgagatcattcttaccaagaggaggcagcaatggaattgaaagtagaagatcctttctactgggtgagccctggagtgctggttctcctcgcggtgctgcctgtgctcctcctgcagatcactcttggcctcgtcttcctctgcctgcagtacagactgagaggaaaacttcgagcagagatagagaatctccaccggacttttgatccccactttctgagggtgccctgctggaagataaccctgtttgtaattgtgccggttcttggacccttggttgccttgatcatctgctacaactggctacatcgaagactagcagggcaattccttgaagagctacgaaatcccttctgagtgatgtcacatcttggcaggggtggaggagagcctggttgcccagggatttgtccttggggacatctcatccatcaagttgcacactcactggcatctttgctatggggacattccaatttgcactttcaggaacactctgaattccaagtagaattgatttcccttcttctgtcatctaccttttctcttcattttcccatttttattacccttctttccatttctctctccagtcttccacctggaagccctctctggctaaggacaggcaggtgcccctctctccatcagaggacacctgtactggagagcaacacaggatggtctctgccatgaactggaggccaggaatctcctcactgaaaattacagtatggtaactttgcaaatggtggttgtttcttccaagactccagccctgattgcgcaaaactgaaaggcatgtgaagggaaggaagaggaagagtgcaaaacattgaagagagagctgagtgagctgaagagtgaggatatgagtagccccaacccaaacctggagatggggagaaacctacagaatactagccagagctcctccttgtcttggcagcctactagggacctggggaagcaaaaacgaaagctgggcaacatgcctgctttagaatgttttccttctacttacacatcttccacaggtctcagaatctttccttcctctcatccttttctcctatcttcatatctatcagagtatccactgtttattcaacaactactacttgatggtcagacacaaacaaacaagctaggtgctaattaataaagatacgagttttggccgggtgcggtggctcacgcctgtaatcccagcactttgggaggccgaggcgggcgaatcacgaggtcaggagttcaagaccagcctggccaacatggtgaaaccccatctctactaaaaatacaaacaattaactgagcatagtggtgggcacctataataccagctactccggaggctgaggcaggagaatcgcttgaacccaggaggcagaggttgcagtgagctgagatcgcgccactgcactctagccggagtgacagagtaagactctgtctcaaaaataaataaataaataaataaataaataaataaataaataaaaaataataatacaagttttcataagcacacttctaa

SEQ ID NO: 12896 - DNA, 1858 bp, Homo sapiens
  source 1..1858: mol_type = unassigned DNA
atggcaagcttatcgagaccctctctgcccagctgcctctgctccttcctcctcctcctcctcctccaagtgtcttccagctatgcagggcagttcagagtgataggaccaagacaccctatccgggctctggtcggggatgaagtggaattgccatgtcgcatatctcctgggaagaacgctacaggcatggaggtggggtggtaccgcccccccttctctagggtggttcatctctacagaaatggcaaggaccaagatggagaccaggcacctgaatatcggggccggacagagctgctgaaagatgctattggtgagggaaaggtgactctcaggatccggaatgtaaggttctcagatgaaggaggtttcacctgcttcttccgagatcattcttaccaagaggaggcagcaatggaattgaaagtagaagatcctttctactgggtgagccctggagtgctggttctcctcgcggtgctgcctgtgctcctcctgcagatcactcttggcctcgtcttcctctgcctgcagtacagactgagaggaaaacttcgagcagagatagagaatctccaccggacttttgagtcctttggtgttctaggaccccaggttaaggaaccaaaaaagacagggcaattccttgaagagctacgaaatcccttctgagtgatgtcacatcttggcaggggtggaggagagcctggttgcccagggatttgtccttggggacatctcatccatcaagttgcacactcactggcatctttgctatggggacattccaatttgcactttcaggaacactctgaattccaagtagaattgatttcccttcttctgtcatctaccttttctcttcattttcccatttttattacccttctttccatttctctctccagtcttccacctggaagccctctctggctaaggacaggcaggtgcccctctctccatcagaggacacctgtactggagagcaacacaggatggtctctgccatgaactggaggccaggaatctcctcactgaaaattacagtatggtaactttgcaaatggtggttgtttcttccaagactccagccctgattgcgcaaaactgaaaggcatgtgaagggaaggaagaggaagagtgcaaaacattgaagagagagctgagtgagctgaagagtgaggatatgagtagccccaacccaaacctggagatggggagaaacctacagaatactagccagagctcctccttgtcttggcagcctactagggacctggggaagcaaaaacgaaagctgggcaacatgcctgctttagaatgttttccttctacttacacatcttccacaggtctcagaatctttccttcctctcatccttttctcctatcttcatatctatcagagtatccactgtttattcaacaactactacttgatggtcagacacaaacaaacaagctaggtgctaattaataaagatacgagttttggccgggtgcggtggctcacgcctgtaatcccagcactttgggaggccgaggcgggcgaatcacgaggtcaggagttcaagaccagcctggccaacatggtgaaaccccatctctactaaaaatacaaacaattaactgagcatagtggtgggcacctataataccagctactccggaggctgaggcaggagaatcgcttgaacccaggaggcagaggttgcagtgagctgagatcgcgccactgcactctagccggagtgacagagtaagactctgtctcaaaaataaataaataaataaataaataaataaataaataaataaaaaataataatacaagttttcataagcacacttctaa

SEQ ID NO: 12897 - DNA, 2495 bp, Homo sapiens
  source 1..2495: mol_type = unassigned DNA
agcactgccctccaagatcttcccttgggcttttcagcagtaaggggacatgcaccccaagggcctccacttggcctgaccttgctgcgggggctctctgtccccaggaacagtagagatggcaagcttatcgagaccctctctgcccagctgcctctgctccttcctcctcctcctcctcctccaagtgtcttccagctatgcagggcagttcagagtgataggaccaagacaccctatccgggctctggtcggggatgaagtggaattgccatgtcgcatatctcctgggaagaacgctacaggcatggaggtggggtggtaccgcccccccttctctagggtggttcatctctacagaaatggcaaggaccaagatggagaccaggcacctgaatatcggggccggacagagctgctgaaagatgctattggtgagggaaaggtgactctcaggatccggaatgtaaggttctcagatgaaggaggtttcacctgcttcttccgagatcattcttaccaagaggaggcagcaatggaattgaaagtagaagatcctttctactgggtgagccctggagtgctggttctcctcgcggtgctgcctgtgctcctcctgcagatcactcttggcctcgtcttcctctgcctgcagtacagactgagaggaaaacttcgagcagagatagagaatctccaccggacttttgatccccactttctgagggtgccctgctggaagataaccctgtttgtaattgtgccggttcttggacccttggttgccttgatcatctgctacaactggctacatcgaagactagcagggcaattccttgaagagctacgtaagttctcttctctctgttataagcagagaataaaaagccaggaaagggagacagaagcaacaagaggaagaggcgggctattgagggatcacattcccagaggaaaggaggagctggagagcctgggtggagggaagactcctcctgggaggtagagggcaaagaagccagctgttagagacacatttacaggtggcagagaagctggaggcactcctatctgccacctgatccattcctccttcactgcccctaagcaggaatccaaccctagctggtctcattgcccattccacagcaactgcccagtgcctcacctctcagatcaaccattgaggcaggaatggagacaagatgaccccaagggcttttcttctccctagttcaatggttttatgatacaaactactgacatacgtttttcaagttattttctccttcttctaggaaatcccttctgagtgatgtcacatcttggcaggggtggaggagagcctggttgcccagggatttgtccttggggacatctcatccatcaagttgcacactcactggcatctttgctatggggacattccaatttgcactttcaggaacactctgaattccaagtagaattgatttcccttcttctgtcatctaccttttctcttcattttcccatttttattacccttctttccatttctctctccagtcttccacctggaagccctctctggctaaggacaggcaggtgcccctctctccatcagaggacacctgtactggagagcaacacaggatggtctctgccatgaactggaggccaggaatctcctcactgaaaattacagtatggtaactttgcaaatggtggttgtttcttccaagactccagccctgattgcgcaaaactgaaaggcatgtgaagggaaggaagaggaagagtgcaaaacattgaagagagagctgagtgagctgaagagtgaggatatgagtagccccaacccaaacctggagatggggagaaacctacagaatactagccagagctcctccttgtcttggcagcctactagggacctggggaagcaaaaacgaaagctgggcaacatgcctgctttagaatgttttccttctacttacacatcttccacaggtctcagaatctttccttcctctcatccttttctcctatcttcatatctatcagagtatccactgtttattcaacaactactacttgatggtcagacacaaacaaacaagctaggtgctaattaataaagatacgagttttggccgggtgcggtggctcacgcctgtaatcccagcactttgggaggccgaggcgggcgaatcacgaggtcaggagttcaagaccagcctggccaacatggtgaaaccccatctctactaaaaatacaaacaattaactgagcatagtggtgggcacctataataccagctactccggaggctgaggcaggagaatcgcttgaacccaggaggcagaggttgcagtgagctgagatcgcgccactgcactctagccggagtgacagagtaagactctgtctcaaaaataaataaataaataaataaataaataaataaataaataaaaaataataatacaagttttcataagcacacttctaa

SEQ ID NO: 12898 - DNA, 1727 bp, Homo sapiens
  source 1..1727: mol_type = unassigned DNA
ggcagttcagagtgataggaccaagacaccctatccgggctctggtcggggatgaagtggaattgccatgtcgcatatctcctgggaagaacgctacaggcatggaggtggggtggtaccgcccccccttctctagggtggttcatctctacagaaatggcaaggaccaagatggagaccaggcacctgaatatcggggccggacagagctgctgaaagatgctattggtgagggaaaggtgactctcaggatccggaatgtaaggttctcagatgaaggaggtttcacctgcttcttccgagatcattcttaccaagaggaggcagcaatggaattgaaagtagaagtgtctcactctgtcacccaggattggttgcagtggcacgatcatggctcattgcagcctccacctcccaggctcaagtgatcctcctgactcagcctcttgaatagctgagaccacaggcttgtgtcaccatgcccagatcctttctactgggtgagccctggagtgctggttctcctcgcggtgctgcctgtgctcctcctgcagatcactcttggcctcgtcttcctctgcctgcagtacagactgagaggaaaacttcgagcagagatagagaatctccaccggacttttgatccccactttctgagggtgccctgctggaagataaccctgtttgtaattgtgccggttcttggacccttggttgccttgatcatctgctacaactggctacatcgaagactagcagggcaattccttgaagagctactcttccacctggaagccctctctggctaaggacaggcaggtgcccctctctccatcagaggacacctgtactggagagcaacacaggatggtctctgccatgaactggaggccaggaatctcctcactgaaaattacagtatggtaactttgcaaatggtggttgtttcttccaagactccagccctgattgcgcaaaactgaaaggcatgtgaagggaaggaagaggaagagtgcaaaacattgaagagagagctgagtgagctgaagagtgaggatatgagtagccccaacccaaacctggagatggggagaaacctacagaatactagccagagctcctccttgtcttggcagcctactagggacctggggaagcaaaaacgaaagctgggcaacatgcctgctttagaatgttttccttctacttacacatcttccacaggtctcagaatctttccttcctctcatccttttctcctatcttcatatctatcagagtatccactgtttattcaacaactactacttgatggtcagacacaaacaaacaagctaggtgctaattaataaagatacgagttttggccgggtgcggtggctcacgcctgtaatcccagcactttgggaggccgaggcgggcgaatcacgaggtcaggagttcaagaccagcctggccaacatggtgaaaccccatctctactaaaaatacaaacaattaactgagcatagtggtgggcacctataataccagctactccggaggctgaggcaggagaatcgcttgaacccaggaggcagaggttgcagtgagctgagatcgcgccactgcactctagccggagtgacagagtaagactctgtctcaaaaataaataaataaataaataaataaataaataaataaataaaaaataataatacaagttttcataagcacacttctaa

SEQ ID NO: 12899 - DNA, 1977 bp, Homo sapiens
  source 1..1977: mol_type = unassigned DNA
ggcagttcagagtgataggaccaagacaccctatccgggctctggtcggggatgaagtggaattgccatgtcgcatatctcctgggaagaacgctacaggcatggaggtggggtggtaccgcccccccttctctagggtggttcatctctacagaaatggcaaggaccaagatggagaccaggcacctgaatatcggggccggacagagctgctgaaagatgctattggtgagggaaaggtgactctcaggatccggaatgtaaggttctcagatgaaggaggtttcacctgcttcttccgagatcattcttaccaagaggaggcagcaatggaattgaaagtagaagtgtctcactctgtcacccaggattggttgcagtggcacgatcatggctcattgcagcctccacctcccaggctcaagtgatcctcctgactcagcctcttgaatagctgagaccacaggcttgtgtcaccatgcccagatcctttctactgggtgagccctggagtgctggttctcctcgcggtgctgcctgtgctcctcctgcagatcactcttggcctcgtcttcctctgcctgcagtacagactgagaggaaaacttcgagcagagatagagaatctccaccggacttttgatccccactttctgagggtgccctgctggaagataaccctgtttgtaattgtgccggttcttggacccttggttgccttgatcatctgctacaactggctacatcgaagactagcagggcaattccttgaagagctacgaaatcccttctgagtgatgtcacatcttggcaggggtggaggagagcctggttgcccagggatttgtccttggggacatctcatccatcaagttgcacactcactggcatctttgctatggggacattccaatttgcactttcaggaacactctgaattccaagtagaattgatttcccttcttctgtcatctaccttttctcttcattttcccatttttattacccttctttccatttctctctccagtcttccacctggaagccctctctggctaaggacaggcaggtgcccctctctccatcagaggacacctgtactggagagcaacacaggatggtctctgccatgaactggaggccaggaatctcctcactgaaaattacagtatggtaactttgcaaatggtggttgtttcttccaagactccagccctgattgcgcaaaactgaaaggcatgtgaagggaaggaagaggaagagtgcaaaacattgaagagagagctgagtgagctgaagagtgaggatatgagtagccccaacccaaacctggagatggggagaaacctacagaatactagccagagctcctccttgtcttggcagcctactagggacctggggaagcaaaaacgaaagctgggcaacatgcctgctttagaatgttttccttctacttacacatcttccacaggtctcagaatctttccttcctctcatccttttctcctatcttcatatctatcagagtatccactgtttattcaacaactactacttgatggtcagacacaaacaaacaagctaggtgctaattaataaagatacgagttttggccgggtgcggtggctcacgcctgtaatcccagcactttgggaggccgaggcgggcgaatcacgaggtcaggagttcaagaccagcctggccaacatggtgaaaccccatctctactaaaaatacaaacaattaactgagcatagtggtgggcacctataataccagctactccggaggctgaggcaggagaatcgcttgaacccaggaggcagaggttgcagtgagctgagatcgcgccactgcactctagccggagtgacagagtaagactctgtctcaaaaataaataaataaataaataaataaataaataaataaataaaaaataataatacaagttttcataagcacacttctaa

SEQ ID NO: 12900 - DNA, 702 bp, Homo sapiens
  source 1..702: mol_type = unassigned DNA
gggcacagctgcagcaattaccggagtggaggcagggcccaggcagcactgccctccaagatcttcccttgggcttttcagcagtaaggggacatgcaccccaagggcctccacttggcctgaccttgctgcgggggctctctgtccccaggaacagtagagatggcaagcttatcgagaccctctctgcccagctgcctctgctccttcctcctcctcctcctcctccaagtgtcttccagctatgcagttcagagtgataggaccaagacaccctatccgggctctggtcggggatgaagtggaattgccatgtcgcatatctcctgggaagaacgctacaggcatggaggtggggtggtaccgcccccccttctctagggtggttcatctctacagaaatggcaaggaccaagatggagaccaggcacctgaatatcggggccggacagagctgctgaaagatgctattggtgagggaaaggtgactctcaggatccggaatgtaaggttctcagatgaaggaggtttcacctgcttcttccgagatcattcttaccaagaggaggcagcaatggaattgaaagtagaagatcctttctactgggtgagccctggagtgctggttctcctcgcggtgctgcctgtgctcctcctgcagatcactcttggcctcgtcttcctctgcctgcagtacagact

SEQ ID NO: 12901 - DNA, 774 bp, Homo sapiens; identical to SEQ ID NO: 12812
  source 1..774: mol_type = unassigned DNA

SEQ ID NO: 12902 - DNA, 390 bp, Homo sapiens
  source 1..390: mol_type = unassigned DNA
atggcaagcttatcgagaccctctctgcccagctgcctctgctccttcctcctcctcctcctcctccaagtgtcttccagctatgcagatcctttctactgggtgagccctggagtgctggttctcctcgcggtgctgcctgtgctcctcctgcagatcactcttggcctcgtcttcctctgcctgcagtacagactgagaggaaaacttcgagcagagatagagaatctccaccggacttttgatccccactttctgagggtgccctgctggaagataaccctgtttgtaattgtgccggttcttggacccttggttgccttgatcatctgctacaactggctacatcgaagactagcagggcaattccttgaagagctacgtaagttc

SEQ ID NO: 12903 - DNA, 1541 bp, Homo sapiens; identical to SEQ ID NO: 12842
  source 1..1541: mol_type = unassigned DNA

SEQ ID NO: 12904 - DNA, 1616 bp, Homo sapiens; identical to SEQ ID NO: 12840
  source 1..1616: mol_type = unassigned DNA

SEQ ID NO: 12905 - DNA, 1568 bp, Homo sapiens; identical to SEQ ID NO: 12839
  source 1..1568: mol_type = unassigned DNA

SEQ ID NO: 12906 - DNA, 1730 bp, Homo sapiens; identical to SEQ ID NO: 12843
  source 1..1730: mol_type = unassigned DNA

SEQ ID NO: 12907 - DNA, 1587 bp, Homo sapiens; identical to SEQ ID NO: 12837
  source 1..1587: mol_type = unassigned DNA

SEQ ID NO: 12908 - DNA, 2146 bp, Homo sapiens; identical to SEQ ID NO: 12833
  source 1..2146: mol_type = unassigned DNA

SEQ ID NO: 12909 - DNA, 2503 bp, Homo sapiens; identical to SEQ ID NO: 12835
  source 1..2503: mol_type = unassigned DNA

SEQ ID NO: 12910 - DNA, 1685 bp, Homo sapiens; identical to SEQ ID NO: 12838
  source 1..1685: mol_type = unassigned DNA

SEQ ID NO: 12911 - DNA, 1866 bp, Homo sapiens; identical to SEQ ID NO: 12841
  source 1..1866: mol_type = unassigned DNA

SEQ ID NO: 12912 - DNA, 1735 bp, Homo sapiens; identical to SEQ ID NO: 12844
  source 1..1735: mol_type = unassigned DNA

SEQ ID NO: 12913 - DNA, 1985 bp, Homo sapiens; identical to SEQ ID NO: 12845
  source 1..1985: mol_type = unassigned DNA

SEQ ID NO: 12914 - DNA, 711 bp, Homo sapiens
  source 1..711: mol_type = unassigned DNA
gggcacagctgcagcaattaccggagtggaggcagggcccaggcagcactgccctccaagatcttcccttgggcttttcagcagtaaggggacatgcaccccaagggcctccacttggcctgaccttgctgcgggggctctctgtccccaggaacagtagagatggcaagcttatcgagaccctctctgcccagctgcctctgctccttcctcctcctcctcctcctccaagtgtcttccagctatgcagttcagagtgataggaccaagacaccctatccgggctctggtcggggatgaagtggaattgccatgtcgcatatctcctgggaagaacgctacaggcatggaggtggggtggtaccgcccccccttctctagggtggttcatctctacagaaatggcaaggaccaagatggagaccaggcacctgaatatcggggccggacagagctgctgaaagatgctattggtgagggaaaggtgactctcaggatccggaatgtaaggttctcagatgaaggaggtttcacctgcttcttccgagatcattcttaccaagaggaggcagcaatggaattgaaagtagaagatcctttctactgggtgagccctggagtgctggttctcctcgcggtgctgcctgtgctcctcctgcagatcactgttggcctcgtcttcctctgcctgcagtacagactgagaggtac

SEQ ID NO: 12915 - DNA, 774 bp, Homo sapiens; identical to SEQ ID NO: 12812
  source 1..774: mol_type = unassigned DNA

SEQ ID NO: 12916 - DNA, 2045 bp, Homo sapiens; identical to SEQ ID NO: 12846
  source 1..2045: mol_type = unassigned DNA

SEQ ID NO: 12917 - DNA, 1824 bp, Homo sapiens
  source 1..1824: mol_type = unassigned DNA
gaactttctggaaaattaacagtgcgtatttgcctgaagaaggtcagtgtgcttgcttggagatcaggacgcaaaggtcaccatcagaaaagctaagtttgctgtatagtgaggatcaggagatctgatcctgattgcagaaccttccctgattacagaatcttgggttgtatctcccacttcacccttctagaccatcccagaagatctataagatttcatctgggaaatcactaggagttcttggaagggaaagaaggaagattgttggttggaataaaaacagggttgaatgagttccagaaagcagggttctcaacctcgtggacagcaatctgcagaagaagagaacttcaaaaaaccaactagaagcaacatgcagagaagtaaaatgagaggggcctcctcaggaaagaagacagctggtccacagcagaaaaatcttgaaccagctctcccaggaagatggggtggtcgctctgcagagaaccccccttcaggatccgtgaggaagaccagaaagaacaagcagaagactcctggaaacggagatggtggcagtaccagcgaagcacctcagccccctcggaagaaaagggcccgggcagaccccactgttgaaagtgaggaggcgtttaagaatagaatggaggttaaagtgaagattcctgaagaattaaaaccatggcttgttgaggactgggacttagttaccaggcagaagcagctgtttcaactccctgccaagaaaaatgtagatgcaattctggaggagtatgcaaattgcaagaaatcgcagggaaatgttgataataaggaatatgcggttaatgaagttgtggcaggaataaaagaatatttcaatgtgatgttgggcactcagctgctctacaaatttgagaggccccagtatgctgaaatcctcttggctcaccctgatgctccaatgtcccaggtttatggagcaccacacctactgagattatttgtaagaattggagcaatgttggcctatacgccccttgatgagaaaagccttgcattattgttgggctatttgcatgatttcctaaaatatctggcaaagaattctgcatctctctttactgccagtgattacaaagtggcttctgctgagtaccaccgcaaagccctgtgagcgtctacagacagctcaccatttttgtcctgtatctgtaaacactttttgttcttagtctttttcttgtaaaattgatgttctttaaaatcgttaatgtataacagggcttatgtttcagtttgttttccgttctgttttaaacagaaaataaaaggagtgtaagctccttttctcatttcaaagttgctaccagtgtatgcagtaattagaacaaagaagaaacattcagtagaacattttattgcctagttgacaacattgcttgaatgctggtggttcctatccctttgacactacacaattttctaatatgtgttaatgctatgtgacaaaacgccctgattcctagtgccaaaggttcaacttaatgtatatacctgaaaacccatgcatttgtgctctttttttttttttatggtgcttgaagtaaaacagcccatcctctgcaagtccatctatgttgttcttaggcattctatctttgctcaaattgttgaaggatggtgatttgtttcatggtttttgtatttgagtctaatgcacgttctaacatgatagaggcaatgcattattgtgtagccacggttttctggaaaagttgatattttaggaattgtatttcagatcttaaataaaatttgtttctaaatttcaaagcaagt

SEQ ID NO: 12918 - DNA, 1828 bp, Homo sapiens
  source 1..1828: mol_type = unassigned DNA
cacgtcggctgctgggaagatctggattctcgtttcaggtcaccatcagaaaagctaagtttgctgtatagtgaggatcaggagatctgatcctgattgcagaaccttccctgattacagaatcttggatgatttcacaaaagttcatcttcattgcagatacctgcctttctttctaggttgtatctcccacttcacccttctagaccatcccagaagatctataagatttcatctgggaaatcactaggagttcttggaagggaaagaaggaagattgttggttggaataaaaacagggttgaatgagttccagaaagcagggttctcaacctcgtggacagcaatctgcagaagaagagaacttcaaaaaaccaactagaagcaacatgcagagaagtaaaatgagaggggcctcctcaggaaagaagacagctggtccacagcagaaaaatcttgaaccagctctcccaggaagatggggtggtcgctctgcagagaaccccccttcaggatccgtgaggaagaccagaaagaacaagcagaagactcctggaaacggagatggtggcagtaccagcgaagcacctcagccccctcggaagaaaagggcccgggcagaccccactgttgaaagtgaggaggcgtttaagaatagaatggaggttaaagtgaagattcctgaagaattaaaaccatggcttgttgaggactgggacttagttaccaggcagaagcagctgtttcaactccctgccaagaaaaatgtagatgcaattctggaggagtatgcaaattgcaagaaatcgcagggaaatgttgataataaggaatatgcggttaatgaagttgtggcaggaataaaagaatatttcaatgtgatgttgggcactcagctgctctacaaatttgagaggccccagtatgctgaaatcctcttggctcaccctgatgctccaatgtcccaggtttatggagcaccacacctactgagattatttgtaagaattggagcaatgttggcctatacgccccttgatgagaaaagccttgcattattgttgggctatttgcatgatttcctaaaatatctggcaaagaattctgcatctctctttactgccagtgattacaaagtggcttctgctgagtaccaccgcaaagccctgtgagcgtctacagacagctcaccatttttgtcctgtatctgtaaacactttttgttcttagtctttttcttgtaaaattgatgttctttaaaatcgttaatgtataacagggcttatgtttcagtttgttttccgttctgttttaaacagaaaataaaaggagtgtaagctccttttctcatttcaaagttgctaccagtgtatgcagtaattagaacaaagaagaaacattcagtagaacattttattgcctagttgacaacattgcttgaatgctggtggttcctatccctttgacactacacaattttctaatatgtgttaatgctatgtgacaaaacgccctgattcctagtgccaaaggttcaacttaatgtatatacctgaaaacccatgcatttgtgctctttttttttttttatggtgcttgaagtaaaacagcccatcctctgcaagtccatctatgttgttcttaggcattctatctttgctcaaattgttgaaggatggtgatttgtttcatggtttttgtatttgagtctaatgcacgttctaacatgatagaggcaatgcattattgtgtagccacggttttctggaaaagttgatattttaggaattgtatttcagatcttaaataaaatttgtttctaaatttc

SEQ ID NO: 12919 - DNA, 899 bp, Homo sapiens
  source 1..899: mol_type = unassigned DNA
tatttgcctgaagaaggtcagtgtgcttgcttggagatcaggacgcaaaggtcaccatcagaaaagctaagtttgctgtatagtgaggatcaggagatctgatcctgattgcagaaccttccctgattacagaatcttgggattgttgagaggattacatgtaaagtaccaggacagtgcatggcacatatgatttcacaaaagttcatcttcattgcagatacctgcctttctttctaggttgtatctcccacttcacccttctagaccatcccagaagatctataagatttcatctgggaaatcactaggagttcttggaagggaaagaaggaagattgttggttggaataaaaacagggttgaatgagttccagaaagcagggttctcaacctcgtggacagcaatctgcagaagaagagaacttcaaaaaaccaactagaagcaacatgcagagaagtaaaatgagaggggcctcctcaggaaagaagacagctggtccacagcagaaaaatcttgaaccagctctcccaggaagatggggtggtcgctctgcagagaaccccccttcaggatccgtgaggaagaccagaaagaacaagcagaagactcctggaaacggagatggtggcagtaccagcgaagcacctcagccccctcggaagaaaagggcccgggcagaccccactgttgaaagtgaggaggcgtttaagaatagaatggaggttaaagtgaagattcctgaagaattaaaaccatggcttgttgaggactgggacttagttaccaggcagaagcagctgtttcaactccctgccaagaaaaatgtagatgcaattctggaggagtatgcaaattgcaagaaatcgcagggaaatgttgataataaggaatatgc

SEQ ID NO: 12920 - DNA, 849 bp, Homo sapiens
  source 1..849: mol_type = unassigned DNA
gcgtatttgcctgaagaaggtcagtgtgcttgcttggagatcaggacgcaaaggtcaccatcagaaaagctaagtttgctgtatagtgaggatcaggagatctgatcctgattgcagaaccttccctgattacagaatcttgggattgttgagaggattacatgtaaagtaccaggacagtgcatggcacatgttgtatctcccacttcacccttctagaccatcccagaagatctataagatttcatctgggaaatcactaggagttcttggaagggaaagaaggaagattgttggttggaataaaaacagggttgaatgagttccagaaagcagggttctcaacctcgtggacagcaatctgcagaagaagagaacttcaaaaaaccaactagaagcaacatgcagagaagtaaaatgagaggggcctcctcaggaaagaagacagctggtccacagcagaaaaatcttgaaccagctctcccaggaagatggggtggtcgctctgcagagaaccccccttcaggatccgtgaggaagaccagaaagaacaagcagaagactcctggaaacggagatggtggcagtaccagcgaagcacctcagccccctcggaagaaaagggcccgggcagaccccactgttgaaagtgaggaggcgtttaagaatagaatggaggttaaagtgaagattcctgaagaattaaaaccatggcttgttgaggactgggacttagttaccaggcagaagcagctgtttcaactccctgccaagaaaaatgtagatgcaattctggaggagtatgcaaattgcaagaaatcgcagggaaatgttgataataaggaatat

SEQ ID NO: 12921 - DNA, 869 bp, Homo sapiens
  source 1..869: mol_type = unassigned DNA
acctggctttactatggcggttggaggaacggcagtgatcacacgtcggctgctgggaagatctggattctcgtttcaggtcaccatcagaaaagctaagtttgctgtatagtgaggatcaggagatctgatcctgattgcagaaccttccctgattacagaatcttgggattgttgagaggattacatgtaaagtaccaggacagtgcatggcacatatgatttcacaaaagttcatcttcattgcagatacctgcctttctttctaggttgtatctcccacttcacccttctagaccatcccagaagatctataagatttcatctgggaaatcactaggagttcttggaagggaaagaaggaagattgttggttggaataaaaacagggttgaatgagttccagaaagcagggttctcaacctcgtggacagcaatctgcagaagaagagaacttcaaaaaaccaactagaagcaacatgcagagaagtaaaatgagaggggcctcctcaggaaagaagacagctggtccacagcagaaaaatcttgaaccagctctcccaggaagatggggtggtcgctctgcagagaaccccccttcaggatccgtgaggaagaccagaaagaacaagcagaagactcctggaaacggagatggtggcagtaccagcgaagcacctcagccccctcggaagaaaagggcccgggcagaccccactgttgaaagtgaggaggcgtttaagaatagaatggaggttaaagtgaagattcctgaagaattaaaaccatggcttgttgaggactgggacttagttaccaggcagaagcagctgtttcaactccctgccaagaaaaatgtagatgcaatt

SEQ ID NO: 12922 - DNA, 582 bp, Homo sapiens
  source 1..582: mol_type = unassigned DNA
tttgctgggatttggcggcatctagtggcagactcgagaggtataaaccttactcacagaactttctggaaaattaacagtgcgtatttgcctgaagaaggtcagtgtgcttgcttggagatcaggacgcaaaggtcaccatcagaaaagctaagtttgctgtatagtgaggatcaggagatctgatcctgattgcagaaccttccctgattacagaatcttggtggttggaataaaaacagggttgaatgagttccagaaagcagggttctcaacctcgtggacagcaatctgcagaagaagagaacttcaaaaaaccaactagaagcaacatgcagagaagtaaaatgagaggggcctcctcaggaaagaagacagctggtccacagcagaaaaatcttgaaccagctctcccaggaagatggggtggtcgctctgcagagaaccccccttcaggatccgtgaggaagaccagaaagaacaagcagaagactcctggaaacggagatggtggcagtaccagcgaagcacctcagccccctcggaagaaaagggcccgggcagaccccactgttgaaagtg

SEQ ID NO: 12923 - DNA, 562 bp, Homo sapiens
  source 1..562: mol_type = unassigned DNA
ggctttactatggcggttggaggaacggcagtgatcacacgtcggctgctgggaagatctggattctcgtttcaggtcaccatcagaaaagctaagtttgctgtatagtgaggatcaggagatctgatcctgattgcagaaccttccctgattacagaatcttgggattgttgagaggattacatgtaaagtaccaggacagtgcatggcacatatacctgcctttctttctaggttgtatctcccacttcacccttctagaccatcccagaagatctataagatttcatctgggaaatcactaggagttcttggaagggaaagaaggaagattgttggttggaataaaaacagggttgaatgagttccagaaagcagggttctcaacctcgtggacagcaatctgcagaagaagagaacttcaaaaaaccaactagaagcaacatgcagagaagtaaaatgagaggggcctcctcaggaaagaagacagctggtccacagcagaaaaatcttgaaccagctctcccaggaagatggggtggtcgctctgcagagaaccccc

SEQ ID NO: 12924 - DNA, 573 bp, Homo sapiens
  source 1..573: mol_type = unassigned DNA
tttcatccatttgaaattatatttaaggaaagttaaaaaacaaatttgtcagaaattatacaaatgtacaataaattaaatttgaaaatgtggccacaagaaaggaaaaagaaacacttgtacattatttatcagctttggtgtcctttgtgtgtgatgaaattgcattggctgatgtagaagaaagccatatctcatatctttttattttatgttctttcttgtccttttgtttgaccttctaggtcaccatcagaaaagctaagtttgctgtatagtgaggatcaggagatctgatcctgattgcagaaccttccctgattacagaatcttgggttgtatctcccacttcacccttctagaccatcccagaagatctataagatttcatctgggaaatcactaggagttcttggaagggaaagaaggaagattgttggttggaataaaaacagggttgaatgagttccagaaagcagggttctcaacctcgtggacagcaatctgcagaagaagagaacttcaaaaaaccaactagaagcaacatgcagagaagtaaaatgagaggggcct

SEQ ID NO: 12925 - DNA, 370 bp, Homo sapiens
  source 1..370: mol_type = unassigned DNA
ggaacggcagtgatcacacgtcggctgctgggaagatctggattctcgtttcaggtcaccatcagaaaagctaagtttgctgtatagtgaggatcaggagatctgatcctgattgcagaaccttccctgattacagaatcttggatgatttcacaaaagttcatcttcattgcagatacctgcctttctttctaggttgtatctcccacttcacccttctagaccatcccagaagatctataagatttcatctgggaaatcactaggagttcttggaagggaaagaaggaagattgttggttggaataaaaacagggttgaatgagttccagaaagcagggttctcaacctcgtggacagcaatctgcag

SEQ ID NO: 12926 - DNA, 451 bp, Homo sapiens
  source 1..451: mol_type = unassigned DNA
gattatggaacattctaaaacttagacaagacgattgtgattggctgaagggcatacgccctcctccagggtgacgtgtctgcctatggatatcagttgccagagaaacctggctttactatggcggttggaggaacggcagtgatcacacgtcggctgctgggaagatctggattctcgtttcaggtcaccatcagaaaagctaagtttgctgtatagtgaggatcaggagatctgatcctgattgcagaaccttccctgattacagaatcttgggttgtatctcccacttcacccttctagaccatcccagaagatctataagatttcatctgggaaatcactaggagttcttggaagggaaagaaggaagattgttggttggaataaaaacagggttgaatgagttccagaaagcagggttctcaacctcgtggacagcaatctgcag

SEQ ID NO: 12927 - DNA, 326 bp, Homo sapiens
  source 1..326: mol_type = unassigned DNA
agaaggtcagtgtgcttgcttggagatcaggacgcaaaggtcaccatcagaaaagctaagtttgctgtatagtgaggatcaggagatctgatcctgattgcagaaccttccctgattacagaatcttgggtaagtgcctcccttctgtcctcagttctcaaacaggataataccacataaccttcctaactgtccaggaatattttgaaaattaataagctcctatctgggaaagtagtctaaattctgagaagggaagggtggagctaagtccattgatagttccagtatagaaagtgcataagcaacagagggctttgtaatct

SEQ ID NO: 12928 - DNA, 1983 bp, Homo sapiens
  source 1..1983: mol_type = unassigned DNA
ttgattatggaacattctaaaacttagacaagacgattgtgattggctgaagggcatacgccctcctccagggtgacgtgtctgcctatggatatcagttgccagagaaacctggctttactatggcggttggaggaacggcagtgatcacacgtcggctgctgggaagatctggattctcgtttcaggtcaccatcagaaaagctaagtttgctgtatagtgaggatcaggagatctgatcctgattgcagaaccttccctgattacagaatcttggatgatttcacaaaagttcatcttcattgcagatacctgcctttctttctaggttgtatctcccacttcacccttctagaccatcccagaagatctataagatttcatctgggaaatcactaggagttcttggaagggaaagaaggaagattgttggttggaataaaaacagggttgaatgagttccagaaagcagggttctcaacctcgtggacagcaatctgcagaagaagagaacttcaaaaaaccaactagaagcaacatgcagagaagtaaaatgagaggggcctcctcaggaaagaagacagctggtccacagcagaaaaatcttgaaccagctctcccaggaagatggggtggtcgctctgcagagaaccccccttcaggatccgtgaggaagaccagaaagaacaagcagaagactcctggaaacggagatggtggcagtaccagcgaagcacctcagccccctcggaagaaaagggcccgggcagaccccactgttgaaagtgaggaggcgtttaagaatagaatggaggttaaagtgaagattcctgaagaattaaaaccatggcttgttgaggactgggacttagttaccaggcagaagcagctgtttcaactccctgccaagaaaaatgtagatgcaattctggaggagtatgcaaattgcaagaaatcgcagggaaatgttgataataaggaatatgcggttaatgaagttgtggcaggaataaaagaatatttcaatgtgatgttgggcactcagctgctctacaaatttgagaggccccagtatgctgaaatcctcttggctcaccctgatgctccaatgtcccaggtttatggagcaccacacctactgagattatttgtaagaattggagcaatgttggcctatacgccccttgatgagaaaagccttgcattattgttgggctatttgcatgatttcctaaaatatctggcaaagaattctgcatctctctttactgccagtgattacaaagtggcttctgctgagtaccaccgcaaagccctgtgagcgtctacagacagctcaccatttttgtcctgtatctgtaaacactttttgttcttagtctttttcttgtaaaattgatgttctttaaaatcgttaatgtataacagggcttatgtttcagtttgttttccgttctgttttaaacagaaaataaaaggagtgtaagctccttttctcatttcaaagttgctaccagtgtatgcagtaattagaacaaagaagaaacattcagtagaacattttattgcctagttgacaacattgcttgaatgctggtggttcctatccctttgacactacacaattttctaatatgtgttaatgctatgtgacaaaacgccctgattcctagtgccaaaggttcaacttaatgtatatacctgaaaacccatgcatttgtgctctttttttttttttatggtgcttgaagtaaaacagcccatcctctgcaagtccatctatgttgttcttaggcattctatctttgctcaaattgttgaaggatggtgatttgtttcatggtttttgtatttgagtctaatgcacgttctaacatgatagaggcaatgcattattgtgtagccacggttttctggaaaagttgatattttaggaattgtatttcagatcttaaataaaatttgtttctaaatttcaaagc

SEQ ID NO: 12929 - DNA, 1965 bp, Homo sapiens
  source 1..1965: mol_type = unassigned DNA
aaaatcccagaatcccagggaccaaacagccaatcctttgctgggatttggcggcatctagtggcagactcgagaggtataaaccttactcacagaactttctggaaaattaacagtgcgtatttgcctgaagaaggtcagtgtgcttgcttggagatcaggacgcaaaggtcaccatcagaaaagctaagtttgctgtatagtgaggatcaggagatctgatcctgattgcagaaccttccctgattacagaatcttggatgatttcacaaaagttcatcttcattgcagatacctgcctttctttctaggttgtatctcccacttcacccttctagaccatcccagaagatctataagatttcatctgggaaatcactaggagttcttggaagggaaagaaggaagattgttggttggaataaaaacagggttgaatgagttccagaaagcagggttctcaacctcgtggacagcaatctgcagaagaagagaacttcaaaaaaccaactagaagcaacatgcagagaagtaaaatgagaggggcctcctcaggaaagaagacagctggtccacagcagaaaaatcttgaaccagctctcccaggaagatggggtggtcgctctgcagagaaccccccttcaggatccgtgaggaagaccagaaagaacaagcagaagactcctggaaacggagatggtggcagtaccagcgaagcacctcagccccctcggaagaaaagggcccgggcagaccccactgttgaaagtgaggaggcgtttaagaatagaatggaggttaaagtgaagattcctgaagaattaaaaccatggcttgttgaggactgggacttagttaccaggcagaagcagctgtttcaactccctgccaagaaaaatgtagatgcaattctggaggagtatgcaaattgcaagaaatcgcagggaaatgttgataataaggaatatgcggttaatgaagttgtggcaggaataaaagaatatttcaatgtgatgttgggcactcagctgctctacaaatttgagaggccccagtatgctgaaatcctcttggctcaccctgatgctccaatgtcccaggtttatggagcaccacacctactgagattatttgtaagaattggagcaatgttggcctatacgccccttgatgagaaaagccttgcattattgttgggctatttgcatgatttcctaaaatatctggcaaagaattctgcatctctctttactgccagtgattacaaagtggcttctgctgagtaccaccgcaaagccctgtgagcgtctacagacagctcaccatttttgtcctgtatctgtaaacactttttgttcttagtctttttcttgtaaaattgatgttctttaaaatcgttaatgtataacagggcttatgtttcagtttgttttccgttctgttttaaacagaaaataaaaggagtgtaagctccttttctcatttcaaagttgctaccagtgtatgcagtaattagaacaaagaagaaacattcagtagaacattttattgcctagttgacaacattgcttgaatgctggtggttcctatccctttgacactacacaattttctaatatgtgttaatgctatgtgacaaaacgccctgattcctagtgccaaaggttcaacttaatgtatatacctgaaaacccatgcatttgtgctctttttttttttttatggtgcttgaagtaaaacagcccatcctctgcaagtccatctatgttgttcttaggcattctatctttgctcaaattgttgaaggatggtgatttgtttcatggtttttgtatttgagtctaatgcacgttctaacatgatagaggcaatgcattattgtgtagccacggttttctggaaaagttgatattttaggaattgtatttcagatcttaaataaaatttgtttctaaatttcaaagc

SEQ ID NO: 12930 - DNA, 1830 bp, Homo sapiens
  source 1..1830: mol_type = unassigned DNA
ttgattatggaacattctaaaacttagacaagacgattgtgattggctgaagggcatacgccctcctccagggtgacgtgtctgcctatggatatcagttgccagagaaacctggctttactatggcggttggaggaacggcagtgatcacacgtcggctgctgggaagatctggattctcgtttcaggtcaccatcagaaaagctaagtttgctgtatagtgaggatcaggagatctgatcctgattgcagaaccttccctgattacagaatcttggtggttggaataaaaacagggttgaatgagttccagaaagcagggttctcaacctcgtggacagcaatctgcagaagaagagaacttcaaaaaaccaactagaagcaacatgcagagaagtaaaatgagaggggcctcctcaggaaagaagacagctggtccacagcagaaaaatcttgaaccagctctcccaggaagatggggtggtcgctctgcagagaaccccccttcaggatccgtgaggaagaccagaaagaacaagcagaagactcctggaaacggagatggtggcagtaccagcgaagcacctcagccccctcggaagaaaagggcccgggcagaccccactgttgaaagtgaggaggcgtttaagaatagaatggaggttaaagtgaagattcctgaagaattaaaaccatggcttgttgaggactgggacttagttaccaggcagaagcagctgtttcaactccctgccaagaaaaatgtagatgcaattctggaggagtatgcaaattgcaagaaatcgcagggaaatgttgataataaggaatatgcggttaatgaagttgtggcaggaataaaagaatatttcaatgtgatgttgggcactcagctgctctacaaatttgagaggccccagtatgctgaaatcctcttggctcaccctgatgctccaatgtcccaggtttatggagcaccacacctactgagattatttgtaagaattggagcaatgttggcctatacgccccttgatgagaaaagccttgcattattgttgggctatttgcatgatttcctaaaatatctggcaaagaattctgcatctctctttactgccagtgattacaaagtggcttctgctgagtaccaccgcaaagccctgtgagcgtctacagacagctcaccatttttgtcctgtatctgtaaacactttttgttcttagtctttttcttgtaaaattgatgttctttaaaatcgttaatgtataacagggcttatgtttcagtttgttttccgttctgttttaaacagaaaataaaaggagtgtaagctccttttctcatttcaaagttgctaccagtgtatgcagtaattagaacaaagaagaaacattcagtagaacattttattgcctagttgacaacattgcttgaatgctggtggttcctatccctttgacactacacaattttctaatatgtgttaatgctatgtgacaaaacgccctgattcctagtgccaaaggttcaacttaatgtatatacctgaaaacccatgcatttgtgctctttttttttttttatggtgcttgaagtaaaacagcccatcctctgcaagtccatctatgttgttcttaggcattctatctttgctcaaattgttgaaggatggtgatttgtttcatggtttttgtatttgagtctaatgcacgttctaacatgatagaggcaatgcattattgtgtagccacggttttctggaaaagttgatattttaggaattgtatttcagatcttaaataaaatttgtttctaaatttcaaagc

SEQ ID NO: 12931 - DNA, 717 bp, Homo sapiens
  source 1..717: mol_type = unassigned DNA
aaaatgagaggggcctcctcaggaaagaagacagctggtccacagcagaaaaatcttgaatccgtgaggaagaccagaaagaacaagcagaagactcctggaaacggagatggtggcagtaccagcgaagcacctcagccccctcggaagaaaagggcccgggcagaccccactgttgaaagtgaggaggcgtttaagaatagaatggaggttaaagtgaagattcctgaagaattaaaaccatggcttgttgaggactgggacttagttaccaggcagaagcagctgtttcaactccctgccaagaaaaatgtagatgcaattctggaggagtatgcaaattgcaagaaatcgcagggaaatgttgataataaggaatatgcggttaatgaagttgtggcaggaataaaagaatatttcaatgtgatgttgggcactcagctgctctacaaatttgagaggccccagtatgctgaaatcctcttggctcaccctgatgctccaatgtcccaggtttatggagcaccacacctactgagattatttgtaagaattggagcaatgttggcctatacgccccttgatgagaaaagccttgcattattgttgggctatttgcatgatttcctaaaatatctggcaaagaattctgcatctctctttactgccagtgattacaaagtggcttctgctgagtaccaccgcaaagccctgtga

SEQ ID NO: 12932 - DNA, 1567 bp, Homo sapiens
  source 1..1567: mol_type = unassigned DNA
cggggcggggccgcgtgacgtgccgggaagccggagtctagagctccgggcgcggggaggcgcggccatggcagctccggagccgctgtccccggcgggcggtgcgggcgaggaggcgccggaggaggacgaggacgaagcggaggccgaggaccctgagcggccgaatgcgggagcgggcggtggacgcagtggcggcggcggcagtagcgtcagcggaggaggcggcggcggcggggccggggcggggggctgcggcgggcccgggggcgcgctcaccaggcgcgcggtcacactgcgggtgctcctcaaagacgcgctgctggagcctggcgccggggtgctgtccatctactacctggggaagaagttcctgggcgacctgcagccagacggaaggatcatgtggcaggagaccgggcagaccttcaactcacccagcgcctgggccacccactgcaagaagctggtgaaccctgccaagaagtcgggctgtggctgggcctctgtcaagtacaaaggccagaaactggacaagtacaaggccacctggctccggctgcaccagctgcacacgcctgccacggctgctgatgagagcccagccagtgaaggggaggaggaggagttgctgatggaagaggaggaggaggacgttctggcaggggtctcagcagaggacaagagtcggagaccactggggaagagcccttcagagcctgcccacccggaggccacaaccccagggaagcgggtggacagcaagatccgggttccggtccgctactgcatgctgggcagccgcgacttggccaggaacccccacaccctggtggaagtaacatcctttgcagccatcaacaagttccagccgttcaacgtggctgtttctagcaacgtgctgttcctgctggacttccacagtcacctgacacggagtgaggtcgtgggttacctggggggccgctgggacgtcaacagccagatgctgacggtgctcagagccttcccttgtcggagccggctcggggacgcagagactgcagctgccatcgaagaggagatctaccagagcctgttcctgcggggcctgtccctggtgggctggtaccacagccacccacacagcccggcgctgccatctctgcaggacatcgacgcacagatggactaccagctgcggctgcagggctccagcaatggcttccagccctgcctcgccctgctctgctccccttactattctggcaacccaggccccgagtccaagatctcacctttctgggtgatgcctcctcccgagatgctgctggtggagttctacaagggttcccctgacctcgtgaggctccaggaaccctggagccaggagcacacctacctcgacaagcttaagatctccttggccagcaggacgcccaaggaccagagcctgtgtcacgtcctggaacaggtgtgcggcgtcctcaagcaggggagctgagccttccagggcagggtgggctccagttgtcttgagggtccggatgggctcaggtaataaagaaacggaagcagcagccagcca

SEQ ID NO: 12933 - DNA, 1475 bp, Homo sapiens
  source 1..1475: mol_type = unassigned DNA
aagccggagtctagagctccgggcgcggggaggcgcggccatggcagctccggagccgctgtccccggcgggcggtgcgggcgaggaggcgccggaggaggacgaggacgaagcggaggccgaggaccctgagcggccgaatgcgggagcgggcggtggacgcagtggcggcggcggcagtagcgtcagcggaggaggcggcggcggcggggccggggcggggggctgcggcgggcccgggggcgcgctcaccaggcgcgcggtcacactgcgggtgctcctcaaagacgcgctgctggagcctggcgccggggtgctgtccatctactacctggggaagaagttcctgggcgacctgcagccagacggaaggatcatgtggcaggagaccgggcagaccttcaactcacccagcgcctgggccacccactgcaagaagctggtgaaccctgccaagaagtcgggctgtggctgggcctctgtcaagtacaaaggccagaaactggacaagtacaaggccacctggctccggctgcaccagctgcacacgcctgccacggctgctgatgagagcccagccagtgaaggggaggaggaggagttgctgatggaagaggaggaggaggacgttctggcaggggtctcagcagaggacaagagtcggagaccactggggaagagcccttcagagcctgcccacccggaggccacaaccccagggaagcgggtggacagcaagatccgggttccggtccgctactgcatgctgggcagccgcgacttggccaggaacccccacaccctggtggaagtaacatcctttgcagccatcaacaagttccagccgttcaacgtggctgtttctagcaacgtgctgttcctgctgatctaccagagcctgttcctgcggggcctgtccctggtgggctggtaccacagccacccacacagcccggcgctgccatctctgcaggacatcgacgcacagatggactaccagctgcggctgcagggctccagcaatggcttccagccctgcctcgccctgctctgctccccttactattctggcaacccaggccccgagtccaagatctcacctttctgggtgatgcctcctcccgagcaaaggcccagtgactatggcatccccatggatgtggagatggcctacgtccaggacagcttcctgaccaatgacatccttcacgagatgatgctgctggtggagttctacaagggttcccctgacctcgtgaggctccaggaaccctggagccaggagcacacctacctcgacaagcttaagatctccttggccagcaggacgcccaaggaccagagcctgtgtcacgtcctggaacaggtgtgcggcgtcctcaagcaggggagctgagccttccagggcagggtgggctccagttgtcttgagggtccggatgggctcaggtaataaagaaacggaagcagcagcc

SEQ ID NO: 12934 - DNA, 1611 bp, Homo sapiens
  source 1..1611: mol_type = unassigned DNA
ggagtctagagctccgggcgcggggaggcgcggccatggcagctccggagccgctgtccccggcgggcggtgcgggcgaggaggcgccggaggaggacgaggacgaagcggaggccgaggaccctgagcggccgaatgcgggagcgggcggtggacgcagtggcggcggcggcagtagcgtcagcggaggaggcggcggcggcggggccggggcggggggctgcggcgggcccgggggcgcgctcaccaggcgcgcggtcacactgcgggtgctcctcaaagacgcgctgctggagcctggcgccggggtgctgtccatctactacctggggaagaagttcctgggcgacctgcagccagacggaaggatcatgtggcaggagaccgggcagaccttcaactcacccagcgcctgggccacccactgcaagaagctggtgaaccctgccaagaagtcgggctgtggctgggcctctgtcaagtacaaaggccagaaactggacaagtacaaggccacctggctccggctgcaccagctgcacacgcctgccacggctgctgatgagagcccagccagtgaaggggaggaggaggagttgctgatggaagaggaggaggaggacgttctggcaggggtctcagcagaggacaagagtcggagaccactggggaagagcccttcagagcctgcccacccggaggccacaaccccagggaagcgggtggacagcaagatccgggttccggtccgctactgcatgctgggcagccgcgacttggccaggaacccccacaccctggtggaagtaacatcctttgcagccatcaacaagttccagccgttcaacgtggctgtttctagcaacgtgctgttcctgctggacttccacagtcacctgacacggagtgaggtcgtgggttacctggggggccgctgggacgtcaacagccagatgctgacggtgctcagagccttcccttgtcggagccggctcggggacgcagagactgcagctgccatcgaagaggagatctaccagagcctgttcctgcggggcctgtccctggtgggctggtaccacagccacccacacagcccggcgctgccatctctgcaggacatcgacgcacagatggactaccagctgcggctgcagggctccagcaatggcttccagccctgcctcgccctgctctgctccccttactattctggcaacccaggccccgagtccaagatctcacctttctgggtgatgcctcctcccgagcaaaggcccagtgactatggcatccccatggatgtggagatggcctacgtccaggacagcttcctgaccaatgacatccttcacgagatgatgctgctggtggagttctacaagggttcccctgacctcgtgaggctccaggaaccctggagccaggagcacacctacctcgacaagcttaagatctccttggccagcaggacgcccaaggaccagagcctgtgtcacgtcctggaacaggtgtgcggcgtcctcaagcaggggagctgagccttccagggcagggtgggctccagttgtcttgagggtccggatgggctcaggtaataaagaaacggaa

SEQ ID NO: 12935 - DNA, 1547 bp, Homo sapiens
  source 1..1547: mol_type = unassigned DNA
agagctccgggcgcggggaggcgcggccatggcagctccggagccgctgtccccggcgggcggtgcgggcgaggaggcgccggaggaggacgaggacgaagcggaggccgaggaccctgagcggccgaatgcgggagcgggcggtggacgcagtggcggcggcggcagtagcgtcagcggaggaggcggcggcggcggggccggggcggggggctgcggcgggcccgggggcgcgctcaccaggcgcgcggtcacactgcgggtgctcctcaaagacgcgctgctggagcctggcgccggggtgctgtccatctactacctggggaagaagttcctgggcgacctgcagccagacggaaggatcatgtggcaggagaccgggcagaccttcaactcacccagcgcctgggccacccactgcaagaagctggtgaaccctgccaagaagtcgggctgtggctgggcctctgtcaagtacaaaggccagaaactggacaagtacaaggccacctggctccggctgcaccagctgcacacgcctgccacggctgctgatgagagcccagccagtgaaggggaggaggaggagttgctgatggaagaggaggaggaggacgttctggcaggggtctcagcagaggacaagagtcggagaccactggggaagagcccttcagagcctgcccacccggaggccacaaccccagggaagcgggtggacagcaagatccgggttccggtccgctactgcatgctgggcagccgcgacttggccaggaacccccacaccctggtggaagtaacatcctttgcagccatcaacaagttccagccgttcaacgtggctgtttctagcaacgtgctgttcctgctggacttccacagtcacctgacacggagtgaggtcgtgggttacctggggggccgctgggacgtcaacagccagatgctgacggtgctcagagccttcccttgtcggagccggctcggggacgcagagactgcagctgccatcgaagaggagatctaccagagcctgttcctgcggggcctgtccctggtgggctggtaccacagccacccacacagcccggcgctgccatctctgcaggacatcgacgcacagatggactaccagctgcggctgcagggctccagcaatggcttccagccctgcctcgccctgctctgctccccttactattctggcaacccaggccccgagtccaagatctcacctttctgggtgatgcctcctcccgaggtgccgatcccggtgcagagctgagccggggtgtgcactctcccgttcccagcccgggcactgccaattgtccccagctgccatgggctgcgggctggtgaggcttctctcactggtctgtgtccctgccagcaaaggcccagtgactatggcatccccatggatgtggagatggcctacgtccaggacagcttcctgaccaatgacatccttcacgagatgatgctgctggtggagttctacaagggttcccctgacctcgtgaggctccaggaaccctgga

SEQ ID NO: 12936 - DNA, 1578 bp, Homo sapiens
  source 1..1578: mol_type = unassigned DNA
ggcgggcccagcggggcggaggcgcggggcgcggggctgcaggggcgcggggctgcagagccgtggggcgagcggcctccctgcagcctctcgctgtccgcagctccggagccgctgtccccggcgggcggtgcgggcgaggaggcgccggaggaggacgaggacgaagcggaggccgaggaccctgagcggccgaatgcgggagcgggcggtggacgcagtggcggcggcggcagtagcgtcagcggaggaggcggcggcggcggggccggggcggggggctgcggcgggcccgggggcgcgctcaccaggcgcgcggtcacactgcgggtgctcctcaaagacgcgctgctggagcctggcgccggggtgctgtccatctactacctggggaagaagttcctgggcgacctgcagccagacggaaggatcatgtggcaggagaccgggcagaccttcaactcacccagcgcctgggccacccactgcaagaagctggtgaaccctgccaagaagtcgggctgtggctgggcctctgtcaagtacaaaggccagaaactggacaagtacaaggccacctggctccggctgcaccagctgcacacgcctgccacggctgctgatgagagcccagccagtgaaggggaggaggaggagttgctgatggaagaggaggaggaggacgttctggcaggggtctcagcagaggacaagagtcggagaccactggggaagagcccttcagagcctgcccacccggaggccacaaccccagggaagcgggtggacagcaagatccgggttccggtccgctactgcatgctgggcagccgcgacttggccaggaacccccacaccctggtggaagtaacatcctttgcagccatcaacaagttccagccgttcaacgtggctgtttctagcaacgtgctgttcctgctggacttccacagtcacctgacacggagtgaggtcgtgggttacctggggggccgctgggacgtcaacagccagatgctgacggtgctcagagccttcccttgtcggagccggctcggggacgcagagactgcagctgccatcgaagaggagatctaccagagcctgttcctgcggggcctgtccctggtgggctggtaccacagccacccacacagcccggcgctgccatctctgcaggacatcgacgcacagatggactaccagctgcggctgcagggctccagcaatggcttccagccctgcctcgccctgctctgctccccttactattctggcaacccaggccccgagtccaagatctcacctttctgggtgatgcctcctcccgagatgctgctggtggagttctacaagggttcccctgacctcgtgaggctccaggaaccctggagccaggagcacacctacctcgacaagcttaagatctccttggccagcaggacgcccaaggaccagagcctgtgtcacgtcctggaacaggtgtgcggcgtcctcaagcaggggagctgagccttccagggcagggtgggctccagttgtcttgagggtccggatgggctcaggtaataaagaaac

SEQ ID NO: 12937 - DNA, 1445 bp, Homo sapiens
  source 1..1445: mol_type = unassigned DNA
cggagccgctgtccccggcgggcggtgcgggcgaggaggcgccggaggaggacgaggacgaagcggaggccgaggaccctgagcggccgaatgcgggagcgggcggtggacgcagtggcggcggcggcagtagcgtcagcggaggaggcggcggcggcggggccggggcggggggctgcggcgggcccgggggcgcgctcaccaggcgcgcggtcacactgcgggtgctcctcaaagacgcgctgctggagcctggcgccggggtgctgtccatctactacctggggaagaagttcctgggcgacctgcagccagacggaaggatcatgtggcaggagaccgggcagaccttcaactcacccagcgcctgggccacccactgcaagaagctggtgaaccctgccaagaagtcgggctgtggctgggcctctgtcaagtacaaaggccagaaactggacaagtacaaggccacctggctccggctgcaccagctgcacacgcctgccacggctgctgatgagagcccagccagtgaaggggaggaggaggagttgctgatggaagaggaggaggaggacgttctggcaggggtctcagcagaggacaagagtcggagaccactggggaagagcccttcagagcctgcccacccggaggccacaaccccagggaagcgggtggacagcaagatccgggttccggtccgctactgcatgctgggcagccgcgacttggccaggaacccccacaccctggtggaagtaacatcctttgcagccatcaacaagttccagccgttcaacgtggctgtttctagcaacgtgctgttcctgctggacttccacagtcacctgacacggagtgaggtcgtgggttacctggggggccgctgggacgtcaacagccagatgctgacggtgctcagagccttcccttgtcggagccggctcggggacgcagagactgcagctgccatcgaagaggaggacatcgacgcacagatggactaccagctgcggctgcagggctccagcaatggcttccagccctgcctcgccctgctctgctccccttactattctggcaacccaggccccgagtccaagatctcacctttctgggtgatgcctcctcccgagcaaaggcccagtgactatggcatccccatggatgtggagatggcctacgtccaggacagcttcctgaccaatgacatccttcacgagatgatgctgctggtggagttctacaagggttcccctgacctcgtgaggctccaggaaccctggagccaggagcacacctacctcgacaagcttaagatctccttggccagcaggacgcccaaggaccagagcctgtgtcacgtcctggaacaggtgtgcggcgtcctcaagcaggggagctgagccttccagggcagggtgggctccagttgtcttgag

SEQ ID NO: 12938 - DNA, 379 bp, Homo sapiens
  source 1..379: mol_type = unassigned DNA
agaccactggggaagagcccttcagagcctgcccacccggaggccacaaccccagggaagcgggtggacagcaagatccgggttccggtccgctactgcatgctgggcagccgcgacttggccaggaacccccacaccctggtggaagtaacatcctttgcagccatcaacaagttccagccgttcaacgtggctgtttctagcaacgtgctgttcctgctggtgtgtggcccaccctgtctaggggcaaggggctccggagcccagtcggtgggcagcgggcggggctcccctgcgtatcagctccatgagagctggggccttgtctgctttgtttgctactggtacactgtgggtgctcaataaatgtatgaaggag

SEQ ID NO: 12939 - DNA, 407 bp, Homo sapiens
  source 1..407: mol_type = unassigned DNA
gacttccacagtcacctgacacggagtgaggtcgtgggttacctggggggccgctgggacgtcaacagccagatgctgacggtgctcagagccttcccttgtcggagccggctcggggacgcagagactgcagctgccatcgaagaggagatgctgctggtggagttctacaagggttcccctgacctcgtgaggctccaggaaccctggagccaggagcacacctacctcgacaagcttaagatctccttggccagcaggacgcccaaggaccagagcctgtgtcacgtcctggaacaggtgtgcggcgtcctcaagcaggggagctgagccttccagggcagggtgggctccagttgtcttgagggtccggatgggctcaggtaataaagaaacggaagcagcag

SEQ ID NO: 12940 - DNA, 982 bp, Homo sapiens
  source 1..982: mol_type = unassigned DNA
cgcgcccaagcggcggcggcggcggcggctggaggaggaggaggaggaggaggaggaggaggagggcggctgaggcgcggctggctgcgcgcgcggaggcagcggcgggggcgaccggagctggggcagagtggggagcgagggagggggaggagagagagggaggcggagggcagtgagagacgcatttccagttctcaactacgagccacgagtttgcagatggggctgctcggcggcgcctgtggctgagggagagcagcggcggcggggagcgaccgggagcggcggcagcggcggcgcggaggcggctgaggtgcgagccgcagcaatgcagcaagtcttggaaaaccttacggagctgccctcgtctactggagcagaagaaatagacctaattttcctcaagggaattatggagaatcctattgtaaaatcacttgctaaggctcatgagaggctagaagattccaaactagaagctgtcagtgacaataacttggaattagtcaatgaaattcttgaagacatcactcctctaataaatgtggatgaaaatgtggcagaattggttggtatactcaaagaacctcacttccagtcactgttggaggcccatgatattgtggcatcaaagtgttatgattcacctccatcaagcccagaaatgaataattcttctatcaataatcagttattaccagtagatgccattcgtattcttggtattcacaaaagagctggggaaccactgggtgtgacatttagggttgaaaataatgatctggtaattgcccgaatcctccatgggggaatgatagatcgacaaggtctacttcatgtgggagatataattaaagaagtcaatggccatgaggttggaaataatccaaaggaattacaagaattactgaaaaatattagtggaagtgtcaccctaaaaatcttaccaagttatagagataccattactcctcaacag

SEQ ID NO: 12941 - DNA, 8452 bp, Homo sapiens
  source 1..8452: mol_type = unassigned DNA
ggctggctgcgcgcgcggaggcagcggcgggggcgaccggagctggggcagagtggggagcgagggagggggaggagagagagggaggcggagggcagtgagagacgcatttccagttctcaactacgagccacgagtttgcagatggggctgctcggcggcgcctgtggctgagggagagcagcggcggcggggagcgaccgggagcggcggcagcggcggcgcggaggcggctgaggtgcgagccgcaatgcagcaagtcttggaaaaccttacggagctgccctcgtctactggagcagaagaaatagacctaattttcctcaagggaattatggagaatcctattgtaaaatcacttgctaaggctcatgagaggctagaagattccaaactagaagctgtcagtgacaataacttggaattagtcaatgaaattcttgaagacatcactcctctaataaatgtggatgaaaatgtggcagaattggttggtatactcaaagaacctcacttccagtcactgttggaggcccatgatattgtggcatcaaagtgttatgattcacctccatcaagcccagaaatgaataattcttctatcaataatcagttattaccagtagatgccattcgtattcttggtattcacaaaagagctggggaaccactgggtgtgacatttagggttgaaaataatgatctggtaattgcccgaatcctccatgggggaatgatagatcgacaaggtctacttcatgtgggagatataattaaagaagtcaatggccatgaggttggaaataatccaaaggaattacaagaattactgaaaaatattagtggaagtgtcaccctaaaaatcttaccaagttatagagataccattactcctcaacaggtatttgtgaagtgtcattttgattataatccatacaatgacaacctaataccttgcaaagaagcaggattgaagttttccaaaggagagattcttcagattgtaaatagagaagatccaaattggtggcaggctagccatgtaaaagagggaggaagcgctggtctcattccaagccagttcctggaagagaagagaaaggcatttgttagaagagactgggacaattcaggacctttttgtggaactataagtagcaaaaaaaagaaaaagatgatgtatctcacaaccagaaatgcagaatttgatcgtcatgaaatccagatatatgaggaggtagccaaaatgcctcccttccagagaaaaacattagtattgataggagctcaaggtgtaggccgaagaagcttgaaaaacaggttcatagtattgaatcccactagatttggaactacggtgccatttacttcacggaaaccaagggaagatgaaaaagatggccaggcatataagtttgtgtcacgatctgagatggaagcagatattaaagctggaaagtatttggaacatggggaatatgaaggaaatctctatggaaccaaaattgattctattcttgaggttgtccaaactggacggacttgcattctggatgtcaacccacaagcactgaaagtattgaggacatcagagtttatgccctatgtggtatttattgcggctccggagctagagacgttacgtgccatgcacaaggctgtggtggatgcaggaatcactaccaagcttctgaccgactctgacttgaagaaaacagtggatgaaagtgcacggattcagagagcatacaaccactattttgatttgatcatcataaatgataatctagacaaagcctttgaaaaactgcaaactgccatagagaaactgagaatggaaccacagtgggtcccaatcagctgggtttactgatgattcagtaaggttaacaatgaaaattaaactcttaaaaagtgactgcaacaaataaaccttctactgagaaaatacatcacagatagaagattatctgctaagtccaggcatttttatggtgtagattgaaataatagtacacttctgaatttttatataaaatgtggttggaaggtgtactaatatataatttatcttaatttttctaactttgtatggataatctttctattcatatcacataaagaaatgcgttgaagcattttgtatatgttttgatttagtacccttgcctttttcatcaaaggaattttcaaatcattcactctaacattggtctcatattttcactgtgataatgaatattacttgaaatagttttgtaaagctgtcatttagttcagtattcaaatagtgaagggttagtcttaatagaagaaaatatagttattgaccttccttcttataaatttcttacaaaagcagaattttaagtcagtgttatagctagtctactaccatctaaatctgacatcaaaagtctgatcagtttacgtattttcattatttcggagatgtatggctatccattctaatttatacagctatattagttttgtctcttcatttctatctttactgaaaaattgaagagcaataccttgcactctcttttgaggttattctttttatttgttgcagtgatatgatgctaactaatttaacatgtacacagtaagctctggggctggaagcaaggtcatgcagactgagagagtgccttatcctgtaaaaccttacagcaaaatgacacttgaagaaagtttattttcacatgtaaaattttgactgacaaaaggaacctactactttaaacaatggttttattagaacatggtcagcaaatgtatcatgcctctgcaaattttagtgatgtttagagatgcctctaagtttgcagttggaggtttttgtgcttttagaaatgtgatgtgatccttagggtacctgttttgtctgttgtgttgagaaccaaacccattgaacaacttaaaaaattgggaaataattgtcagctattttgtatacatacacacaaaatatatacattatataatatgtatattatgtattatataatatatataaaatgttttgtatattttttacatatctgttaaaaaatgtactttgtttttttgtttgtttgttttgagatggagtctctctctgtcacccatgctggagtacagtggcgcgatctcagcccgctgcaacctctgcctcctgggttcatgcgactctcgtgcctcagcctcccaagtaattgagattacagttgggtgccaccatgtccggctaatttttgtatttttagtacagatggggtttcaccatgttggccagggtggtctcgagctcctgacctcaagtgatccacccaccttggcctcccaaagtgctgagattacaagcatgagccactgcacctagccaagaagtgtactttttgtttaatgattaccgaaagaagttctcctttagaagcattgacttatacaaattcccacattcacctcagttaatatcttcctttaggattcttggataatagaaattcttcctaaaacatactcagagatgcagctcattattaaattaaggtaaccacattctgtattgttgctagcttttcatgtaaacattattcacactttaaaggattaggtgtttaaatattgatggtcatctttgtctggtgttaggtgccagacacctggctgctgaatttgttttttccctcaccaaagttgtcatttggaacgccagctgggaggactttgaaggaaaagaaaatatatgacaataggcagtattgacacattgtttaaaatctttttcacaataaaacaaaacacccaagttgtcatattgttaaagttggaaatctataggtttttctttttttttttttttttctttttttgattctagatttcatggccagaacacaaattcacgtttcttgtcctaggacagggaattggtgacaaaatggattatactattttaataacagtggaaactttcaaactacatgtgtttacaccaaattcttggcttctcaaagcaacatgaattaaagcacagtatcaaggtgatgccctatgacaatgtttcaacacacacttgaaattttaagagaaatttcagttcttcactcaggaaatgtgctgtattctctaatgtactttcatgctgcagcatggagcctctttaaacagctttgggataattatagcagcacaagaagtttatctgcaaaatatttcaatcatcttggtacaatagatgacttttacatcatgtatattagccttatgtgatataaaatgtattacttagaaaatatacttaaaggaattatttctattataaatggtattcatgattgactacttaattaatgcacattagatttctcctaatataaaatgaaatgatgcagtttagttcatttcagtctagatgcccgtactaacaagaatacagttagataagttcattgtatctcaatgaagaatcattgaacttgaaacccaagtcccaaatgaatctgcaggaatgagcagtgctctgcgggggcaaacagccccagaggtcccagggttcttcctaggtaatgagagtatagctgtgatcaaggaaatgtgaacttctcttttgggaagatctgcgataattagctttatggaagcgaaaatggtttagagtggtgttgagcaattgttaagagttgaaatagacacacacatgcatgtgcttttgggaaacatgatgtgccaacgtattaatgtgcctgagggctccttgtggataggtcagtgtccacatttcagcactcagggcatgactgtacacaacctaagactatatatatattttttcattttcaaatgtacaaatacccatagaggtgatgtgcctggataagtcatttaaccatagcttagtgaaataaatgtgatggccctaaaaagtagaattttcactttcattacagccatgcctttattatgcagtctccatttctgtgtgatatttggtaatatcacatgtcaaatacatcaggactttgtttattttggctaactctaactatacaattgctgaacatagctttctgaaatagaaattataagagaaacccagtatgcctacagcattagtagcctaaatcctagattctagaatccaataaatttatagtagttcttaagaagtttcctttaaagcaacaaatagattattaaggcaaatttagataataacccaagttagcaataaaaccatgtgacattatagattatgtccagatactaactgctttgaccataatatcccaatgacaataaaaaatgatccttggtttaaaaattattaaatggtacttatttttatgtataacaagtgtcatgatcccagtgactggagttgattttcaaggtggatagccatagagttaggtaaaattattttgaattggcaaactaaagataacaattttgaaaattgctcaaaataataatctacttaaattttacttttgtaacttctgaaacagtactccattatccagaaatcacaggctagagagccaataattttgtagtaatgaaccttaactaaacatgaaaaaggcaatcctgaagttttatgtacatagatagcagttcattttttaaatgttcgagttgccatatattatgtatgtgtgtgtgtgtgtgtatatatatatatatatatatatatatatatatatatatacagctatgtgtataatatgtaaaattctcccaaaatgtatgaatataaaactgaatgtattcattcatgtaattataactagcattctaaaatttttaattactcccatttctttgacattctgaaactttttttagattgttttaaaacgctctggttccaccttgaagctgataatctttctgaaaaatatatgagaaactcagaaagtagtcattattataataaatttaattttcttagggaaaaagggcagggttctggatggaaacccctttggaaattcttatttaaacttttgaatgaatctttaatatgattcaggctgagattatgatacctgcccttgtcttatttcaagaggtttgctgtgagaattcatgtaataacatctgtaatgtatttggaatttttgggagaaattcattcttttaaataatgggattattgtatatagtacaaatgaatactcacaaaatttaagaatacatttgactaataattgagcatcttgtcagtttttatgcaagcatatattgtatacctgaggaagatgacagttctataatttttttaaggtaaggttatttttaaattgcatttttgttctaacgttttgcaatttatattctttttaaaatatttcccataattcatcatgctagcttctgtgttcttggaatagtttttgaaaaatgcagagattcgaacatgagtccttaatatactaaacagtgaaagaatgatgatatctcatttctaaagtaagcatggttcacaccactttggcaatacactgcagtactttttaaaaaatattctctagtgataaaagtaaagacagggtactggccaagatcctaattctgacttctgactgtgtgatcttcgatgaaatttatatttccctttatcattactattctacttgttaagtaaggctaagttaatatttgtcttcgccttaaattctgatttgtaatttgtaactctgatgtggtagctgtgatatggtgaactgaaaaatccttattaggctactttatctgttctcttttagttattttaaagtgtacctgtttctgaagtaatgtagtgaatggtgaatacttttcaggaattcttccagttttaaaatagccccaaagatacagtttcagctggtggaaggtctgttctgctctcttagtcctaatcagaaagtcccttttatcttataatcccatactaaatccaaacccttagcaaatccttgctgccaaccagaccactcacaaatcaaacaaaatgtaagcaagcaatccagtactcggttacaccagaagactctgatctttgcccccgaaaactgtcctactttatccttatacctgaaatcactgcatacctgaaatcactgcagccctactgttttacccataccattaatttaaaaaggcatctatttctttatagaaagaaacattcacagtgaggtcttagtttgtgaacctcaaaatccagatattaatccactttagttattactttgtaattgcttctcagtcattggctgataatgcaatggtgtgataaatttgacttatctccacatacaaaagtcgatcagaagggatagttctcttcctttttttcccctcctactggctcttactgttttctaatctccagtgtaaatggaatgaacacatctatagttaaggtaaatgccaccaatcagaagattgagtgatttactgcttgtaaagcaactgtctttgaatcttatgaaataggtggtgttgctaccacagaagccaaaaaggtcttaaaattggaaatagatgtctttattgtacttcagccaacagcaagccaggggaaggaacatacataaatatgacaggtcatatatgaaatttggctctcctcctatcaaagtagcctaggagcttggaggaagcctaattaactaaaacaggaaaaaagcatactcatctgatgtaaaaactcatcagctgtaaattaccaacattaaaccagaagtcattaccagttaaaatgtgtggttttcatcttattcttaaataggagaggtggacagtagtgtaagtaacattgctttaaagacataaagcttgtcctggtaaacatggtctaaatgagaaatgcctccatcttttcaggtagaaccagatttcaggcatagctcagctacatctgtatttgaaatacaataaaaatatttcttatgtctctgtattctcttttaaaaagaactgctgactggctcctgtctcttcagtaacactgatttttttttaaagaagtgatatgttggactctgttgtagaagaatgagcactagtattcagcaacaagtgcaatttctccatgttatgttgagctctgttggagcctatggtgagtatttgatgtgaaaaccttgctgtgggaattttttattcttccttttccccccacgccagttcgttttggtaagtcttttatttgaacacaagacgcatgcttttttaaacctctagtttttgaagtaactgtagaagagaatctttaaaaaaaaaaatggagggcagaatgcttgttagcaatctgaaaatcaaagctgaacaagctgcttaaagtttctgattaagaagtttaaaaagaaaaattaattgctactgctttccaggtaattgtattattagtttctgtataaaagaaacattattgctgttgtataaataaaattttcctgtggtacaa

SEQ ID NO: 12942 - DNA, 1703 bp, Homo sapiens
  source 1..1703: mol_type = unassigned DNA
gggaggagagagagggaggcggagggcagtgagagacgcatttccagttctcaactacgagccacgagtttgcagatggggctgctcggcggcgcctgtggctgagggagagcagcggcggcggggagcgaccgggagcggcggcagcggcggcgcggaggcggctgaggtgcgagccggctcatgagaggctagaagattccaaactagaagctgtcagtgacaataacttggaattagtcaatgaaattcttgaagacatcactcctctaataaatgtggatgaaaatgtggcagaattggttggtatactcaaagaacctcacttccagtcactgttggaggcccatgatattgtggcatcaaagtgttatgattcacctccatcaagcccagaaatgaataattcttctatcaataatcagttattaccagtagatgccattcgtattcttggtattcacaaaagagctggggaaccactgggtgtgacatttagggttgaaaataatgatctggtaattgcccgaatcctccatgggggaatgatagatcgacaaggtctacttcatgtgggagatataattaaagaagtcaatggccatgaggttggaaataatccaaaggaattacaagaattactgaaaaatattagtggaagtgtcaccctaaaaatcttaccaagttatagagataccattactcctcaacaggtatttgtgaagtgtcattttgattataatccatacaatgacaacctaataccttgcaaagaagcaggattgaagttttccaaaggagagattcttcagattgtaaatagagaagatccaaattggtggcaggctagccatgtaaaagagggaggaagcgctggtctcattccaagccagttcctggaagagaagagaaaggcatttgttagaagagactgggacaattcaggacctttttgtggaactataagtagcaaaaaaaagaaaaagatgatgtatctcacaaccagaaatgcagaatttgatcgtcatgaaatccagatatatgaggaggtagccaaaatgcctcccttccagagaaaaacattagtattgataggagctcaaggtgtaggccgaagaagcttgaaaaacaggttcatagtattgaatcccactagatttggaactacggtgccatttacttcacggaaaccaagggaagatgaaaaagatggccaggcatataagtttgtgtcacgatctgagatggaagcagatattaaagctggaaagtatttggaacatggggaatatgaaggaaatctctatggaaccaaaattgattctattcttgaggttgtccaaactggacggacttgcattctggatgtcaacccacaagcactgaaagtattgaggacatcagagtttatgccctatgtggtatttattgcggctccggagctagagacgttacgtgccatgcacaaggctgtggtggatgcaggaatcactaccaagcttctgaccgactctgacttgaagaaaacagtggatgaaagtgcacggattcagagagcatacaaccactattttgatttgatcatcataaatgataatctagacaaagcctttgaaaaactgcaaactgccatagagaaactgagaatggaaccacagtgggtcccaatcagctgggtttactgatgattcagtaaggttaac

SEQ ID NO: 12943 - DNA, 3848 bp, Homo sapiens
  source 1..3848: mol_type = unassigned DNA
caactacgagccacgagtttgcagatggggctgctcggcggcgcctgtggctgagggagagcagcggcggcggggagcgaccgggagcggcggcagcggcggcgcggaggcggctgaggtgcgagccggactaaatcattttgctactttaaaaaaatcacgaaagtacattatttgaagtttggagaagaaagggatttggtaacaaaggacagccatttccattttaagcagctaaacagcaggagagatttctgtaagaaggtaccagctcagattccattgttcatcattttgcaatgcagcaagtcttggaaaaccttacggagctgccctcgtctactggagcagaagaaatagacctaattttcctcaagggaattatggagaatcctattgtaaaatcacttgctaaggctcatgagaggctagaagattccaaactagaagctgtcagtgacaataacttggaattagtcaatgaaattcttgaagacatcactcctctaataaatgtggatgaaaatgtggcagaattggttggtatactcaaagaacctcacttccagtcactgttggaggcccatgatattgtggcatcaaagtgttatgattcacctccatcaagcccagaaatgaataattcttctatcaataatcagttattaccagtagatgccattcgtattcttggtattcacaaaagagctggggaaccactgggtgtgacatttagggttgaaaataatgatctggtaattgcccgaatcctccatgggggaatgatagatcgacaaggtctacttcatgtgggagatataattaaagaagtcaatggccatgaggttggaaataatccaaaggaattacaagaattactgaaaaatattagtggaagtgtcaccctaaaaatcttaccaagttatagagataccattactcctcaacaggtatttgtgaagtgtcattttgattataatccatacaatgacaacctaataccttgcaaagaagcaggattgaagttttccaaaggagagattcttcagattgtaaatagagaagatccaaattggtggcaggctagccatgtaaaagagggaggaagcgctggtctcattccaagccagttcctggaagagaagagaaaggcatttgttagaagagactgggacaattcaggacctttttgtggaactataagtagcaaaaaaaagaaaaagatgatgtatctcacaaccagaaatgcagaatttgatcgtcatgaaatccagatatatgaggaggtagccaaaatgcctcccttccagagaaaaacattagtattgataggagctcaaggtgtaggccgaagaagcttgaaaaacaggttcatagtattgaatcccactagatttggaactacggtgccatttacttcacggaaaccaagggaagatgaaaaagatggccaggcatataagtttgtgtcacgatctgagatggaagcagatattaaagctggaaagtatttggaacatggggaatatgaaggaaatctctatggaaccaaaattgattctattcttgaggttgtccaaactggacggacttgcattctggatgtcaacccacaagcactgaaagtattgaggacatcagagtttatgccctatgtggtatttattgcggctccggagctagagacgttacgtgccatgcacaaggctgtggtggatgcaggaatcactaccaagcttctgaccgactctgacttgaagaaaacagtggatgaaagtgcacggattcagagagcatacaaccactattttgatttgatcatcataaatgataatctagacaaagcctttgaaaaactgcaaactgccatagagaaactgagaatggaaccacagtgggtcccaatcagctgggtttactgatgattcagtaaggttaacaatgaaaattaaactcttaaaaagtgactgcaacaaataaaccttctactgagaaaatacatcacagatagaagattatctgctaagtccaggcatttttatggtgtagattgaaataatagtacacttctgaatttttatataaaatgtggttggaaggtgtactaatatataatttatcttaatttttctaactttgtatggataatctttctattcatatcacataaagaaatgcgttgaagcattttgtatatgttttgatttagtacccttgcctttttcatcaaaggaattttcaaatcattcactctaacattggtctcatattttcactgtgataatgaatattacttgaaatagttttgtaaagctgtcatttagttcagtattcaaatagtgaagggttagtcttaatagaagaaaatatagttattgaccttccttcttataaatttcttacaaaagcagaattttaagtcagtgttatagctagtctactaccatctaaatctgacatcaaaagtctgatcagtttacgtattttcattatttcggagatgtatggctatccattctaatttatacagctatattagttttgtctcttcatttctatctttactgaaaaattgaagagcaataccttgcactctcttttgaggttattctttttatttgttgcagtgatatgatgctaactaatttaacatgtacacagtaagctctggggctggaagcaaggtcatgcagactgagagagtgccttatcctgtaaaaccttacagcaaaatgacacttgaagaaagtttattttcacatgtaaaattttgactgacaaaaggaacctactactttaaacaatggttttattagaacatggtcagcaaatgtatcatgcctctgcaaattttagtgatgtttagagatgcctctaagtttgcagttggaggtttttgtgcttttagaaatgtgatgtgatccttagggtacctgttttgtctgttgtgttgagaaccaaacccattgaacaacttaaaaaattgggaaataattgtcagctattttgtatacatacacacaaaatatatacattatataatatgtatattatgtattatataatatatataaaatgttttgtatattttttacatatctgttaaaaaatgtactttgtttttttgtttgtttgttttgagatggagtctctctctgtcacccatgctggagtacagtggcgcgatctcagcccgctgcaacctctgcctcctgggttcatgcgactctcgtgcctcagcctcccaagtaattgagattacagttgggtgccaccatgtccggctaatttttgtatttttagtacagatggggtttcaccatgttggccagggtggtctcgagctcctgacctcaagtgatccacccaccttggcctcccaaagtgctgagattacaagcatgagccactgcacctagccaagaagtgtactttttgtttaatgattaccgaaagaagttctcctttagaagcattgacttatacaaattcccacattcacctcagttaatatcttcctttaggattcttggataatagaaattcttcctaaaacatactcagagatgcagctcattattaaattaaggtaaccacattctgtattgttgctagcttttcatgtaaacattattcacactttaaaggattaggtgtttaaatattgatggtcatctttgtctggtgttaggtgccagacacctggctgctgaatttgttttttccctcaccaaagttgtcatttggaacgccagctgggaggactttgaaggaaaagaaaatatatgacaataggcagtattgacacattgtttaaaatctttttcacaataaaacaaaacacccaa

SEQ ID NO: 12944 - DNA, 1191 bp, Homo sapiens
  source 1..1191: mol_type = unassigned DNA
gggagtcgcggtggagcctgaatggagagccggcctgggggcggcgttgctgtgactgacacctccggggtctgtcccgagagggggtgattccgccggctcccggttctctcccgagctcggagttggtaggggaggaggctttctccaactaccgccgctacttccgaggtacgagactccagttgtttggccaaagtggctgtgggccgagcacaggctgccgcgggggcgttcgctgctgagatcgtgctcgcggattctcgcaatgcagcaagtcttggaaaaccttacggagctgccctcgtctactggagcagaagaaatagacctaattttcctcaagggaattatggagaatcctattgtaaaatcacttgctaaggctcatgagaggctagaagattccaaactagaagctgtcagtgacaataacttggaattagtcaatgaaattcttgaagacatcactcctctaataaatgtggatgaaaatgtggcagaattggttggtatactcaaagaacctcacttccagtcactgttggaggcccatgatattgtggcatcaaagtgttatgattcacctccatcaagcccagaaatgaataattcttctatcaataatcagttattaccagtagatgccattcgtattcttggtattcacaaaagagctggggaaccactgggtgtgacatttagggttgaaaataatgatctggtaattgcccgaatcctccatgggggaatgatagatcgacaaggtctacttcatgtgggagatataattaaagaagtcaatggccatgaggttggaaataatccaaaggaattacaagaattactgaaaaatattagtggaagtgtcaccctaaaaatcttaccaagttatagagataccattactcctcaacaggtatttgtgaagtgtcattttgattataatccatacaatgacaacctaataccttgcaaagaagcaggattgaagttttccaaaggagagattcttcagattgtaaatagagaagatccaaattggtggcaggctagccatgtaaaagagggaggaagcgctggtctcattccaagccagttcctggaagagaagagaaaggcatttgttagaagagactgggacaattcaggacctttttgtggaactataagtagcaaaaaaaagaaaaa

SEQ ID NO: 12945 - DNA, 552 bp, Homo sapiens
  source 1..552: mol_type = unassigned DNA
caaaatggtaaattaaaggcaccatctttgggactccctggggaaaaacgtaaagaaggcagttgaagaaaggactaaatcattttgctactttaaaaaaatcacgaaagtacattatttgaagtttggagaagaaagggatttggtaacaaaggacagccatttccattttaagcagctaaacagcaggagagatttctgtaagaaggtaccagctcagattccattgttcatcattttgcaatgcagcaagtcttggaaaaccttacggagctgccctcgtctactggagcagaagaaatagacctaattttcctcaagggaattatggagaatcctattgtaaaatcacttgctaagggcctgtgaaaaagatcctgatcctatttccattttcaacaatggcaaagtactgattttcttcttttgcattagactgtgtacctacttttcatgctcatgagaggctagaagattccaaactagaagctgtcagtgacaataacttggaattagtcaatgaaattcttgaagacatcactcctctaataa

SEQ ID NO: 12946 - DNA, 374 bp, Homo sapiens
  source 1..374: mol_type = unassigned DNA
tgaagtactaaatacattgtcagttacaattaaatcagagtggtttgacaaggattttttaaattcagtggcaagtgatacaactatagtatttttaattgtgctatgtgttttaggtatttgtgaagtgtcattttgattataatccatacaatgacaacctaataccttgcaaagaagcaggattgaagttttccaaaggagagattcttcagattgtaaatagagaagatccaaattggtggcaggctagccatgtaaaagagggaggaagcgctggtctcattccaagccagttcctggaagagaagagaaaggcatttgttagaagagactgggacaattcaggacctttttgtggaactataagtagc

SEQ ID NO: 12947 - DNA, 1125 bp, Homo sapiens
  source 1..1125: mol_type = unassigned DNA
ttcaggacctttttgtggaactataagtagcaaaaaaaagaaaaagatgatgtatctcacaaccagaaatgcagttgcagaggatgacagaaataaaaaacagctctatgaatcagaaatttctggaggcttaatcaaaggagttggcaattttaaaagtactttcttgacttcagagctacctctatgctgaatttgatcgtcatgaaatccagatatatgaggaggtagccaaaatgcctcccttccagagaaaaacattagtattgataggagctcaaggtgtaggccgaagaagcttgaaaaacaggttcatagtattgaatcccactagatttggaactacggtgccatttacttcacggaaaccaagggaagatgaaaaagatggccaggcatataagtttgtgtcacgatctgagatggaagcagatattaaagctggaaagtatttggaacatggggaatatgaaggaaatctctatggaaccaaaattgattctattcttgaggttgtccaaactggacggacttgcattctggatgtcaacccacaagcactgaaagtattgaggacatcagagtttatgccctatgtggtatttattgcggctccggagctagagacgttacgtgccatgcacaaggctgtggtggatgcaggaatcactaccaagcttctgaccgactctgacttgaagaaaacagtggatgaaagtgcacggattcagagagcatacaaccactattttgatttgatcatcataaatgataatctagacaaagcctttgaaaaactgcaaactgccatagagaaactgagaatggaaccacagtgggtcccaatcagctgggtttactgatgattcagtaaggttaacaatgaaaattaaactcttaaaaagtgactgcaacaaataaaccttctactgagaaaatacatcacagatagaagattatctgctaagtccaggcatttttatggtgtagattgaaataatagtacacttctgaatttttatataaaatgtggttggaaggtgtactaatatataatttatcttaatttttctaactttgtatggataatctttctattcatatcacataaagaaatgcgttgaa

SEQ ID NO: 12948 - DNA, 126 bp, Homo sapiens
  source 1..126: mol_type = unassigned DNA
atgcagcaagtcttggaaaaccttacggagctgccctcgtctactggagcagaagaaatagacctaattttcctcaagggaattatggagaatcctattgtaaaatcacttgctaagggcctgtga

SEQ ID NO: 12949 - DNA, 5063 bp, Homo sapiens
  source 1..5063: mol_type = unassigned DNA
aatggaactaacaggaaccacctgtgcacttccttttacaggaatgttcataaacagcaggttctcctaggctttgaacaaaatttagcttctccaaggccaaaagcctcattgtgaagagaaagaaagaaacggcttacaaaatatacagatcttggtagacaacgtggctgcaggctgttgaattggaattccctgtggctgtccgaaggcagggtgtccggagagcggtgggctgacctgttcctacaccttgcatcatgccagctttgtcaacgggatctgggagtgacactggtctgtatgagctgttggctgctctgccagcccagctgcagccacatgtggatagccaggaagacctgaccttcctctgggatatgtttggtgaaaaaagcctgcattcattggtaaagattcatgaaaaactacactactatgagaagcagagtccggtgcccattctccatggtgcggcggccttggccgatgatctggccgaagagcttcagaacaagccattaaacagtgagatcagagagctgttgaaactactgtcaaaacccaatgtgaaggctttgctctctgtacatgatactgtggctcagaagaattacgacccagtgttgcctcctatgcctgaagatattgacgatgaggaagactcagtaaaaataatccgtctggtcaaaaatagagaaccactgggagctaccattaagaaggatgaacagaccggggcgatcattgtggccagaatcatgagaggaggagctgcagatagaagtggtcttattcatgttggtgatgaacttagggaagtcaacgggataccagtggaggataaaaggcctgaggaaataatacagattttggctcagtctcagggagcaattacatttaagattatacccggcagcaaagaggagacaccatcaaaagaaggcaagatgtttatcaaagccctctttgactataatcctaatgaggataaggcaattccatgtaaggaagctgggctttctttcaaaaagggagatattcttcagattatgagccaagatgatgcaacttggtggcaagcgaaacacgaagctgatgccaaccccagggcaggcttgatcccctcaaagcatttccaggaaaggagattggctttgagacgaccagaaatattggttcagcccctgaaagtttccaacaggaaatcatctggttttagaaaaagttttcgtcttagtagaaaagataagaaaacaaataaatccatgtatgaatgcaagaagagtgatcagtacgacacagctgacgtacccacatacgaagaagtgacaccgtatcggcgacaaactaatgaaaaatacagactcgttgtcttggttggtcccgtgggagtagggctgaatgaactgaaacgaaagctgctgatcagtgacacccagcactatggcgtgacagtgccccataccaccagagcaagaagaagccaggagagtgatggtgttgaatacattttcatttccaagcatttgtttgagacagatgtacaaaataacaagtttattgaatatggagaatataaaaacaactactacggcacaagtatagactcagttcggtctgtccttgctaaaaacaaagtttgtttgttggatgttcagcctcatacagtgaagcatttaaggacactagaatttaagccctatgtgatatttataaagcctccatcaatagagcgtttgagagaaacaagaaaaaatgcaaagattatttcaagcagagatgaccaaggtgctgcaaaacccttcacagaagaagattttcaagaaatgattaaatctgcacagataatggaaagtcaatatggtcatctttttgacaaaattataataaatgatgacctcactgtggcattcaatgagctcaaaacaacttttgacaaattagagacagagacccattgggtgccagtgagctggttacattcataactaagagaaatttccataattgtctttttctatagagtgcatgatgaaatcaattacagttttggtagtagggtttttaaatctatatcactgtcatagatgtacaatcttggttcaagttgaatgctggttttgtttgtatctttttacagccttatttcaaacgccatgtgttagtataagatccgaaatcaaaatatgcacagtactgtattctaagcaaaacctcaaaccttctcgttgtcttcaataccgctctatctccaagatgaggctgaaattttcagagagacttagctagaggcttagtatgtatgggagttcagcgcttctgctggtctcaggtgtggctgctgctgtcgagtttgaatgttagctgttgaaggtatcaattcagcagccatgagcagctccagacagacaggtgagctctgctgtttctgggtggatcatcacagatttagccgggcaggcagtaaggtgtcctcttactattcaaaaagtgtagactttcttacatattcgcaatacgttcacagtgtgtgcattttaaaataattcttaaaggagtaactgaaattttaccttgagtgaatggccttcataatatagcttgagaagtccttttgagtacctgtcagtgactcaacaacatttaataagggaaagtagacttttaacagttattatatatgtaacgaaaagcctttcctttgggattaatataagtaagaatggtagccttgtggcaagaaatgattacaaaggatatttttatttgtaattcctcagaagacaatttatgaagtcacccaaaatgttattttagctggttttggatttttccaataaattagaagaaggatttctattctaaaacatgtaaaacctgttttacatattactgatacaattaaagattatttttcatctatgtgcaatagatcacccctctttaaattgctctaagatttattttagaaaacttttcatgtgatgttatttctttgtcatcaaaatgcttgttaacactgtccagacaccatcctaaccttgccattgttaaagaagtttaggaaagactcttatattgtaaatatttagatgggttctctcacttttctttgatactactgattttcagcaagtgaattatataattcaaaatgctagaaatgtctatccgttctataagagagcatatcctgccgttcttgcatgcagtgaagccctgcccgtcgaaaatcattgcatctgtgactttcaaagtggaaaaaaaaatgttatttttttgttgatttgtaaagagagtttaaatgtcatgtgaaaaaaaatagaatgtagtaaaattctatatatttatgaaatattttaaaggcatatttttttaaatatcaaacggggctattcataaaataaactgattgtatgtcaagatgtcctaatttaaaagagtagttttataaatcatggtcaacattccatgtaaatatttgagctttacaaagatagatccaagtgtgcgatctgtgcactgcacatttgatagcattattcactggttttccttcatacttgtcaagttcatattagaagcagagacaaaaaccactccaatggccttgacacatagtcacaccaaaatagataatcagactaagtattatataacaacgtgatccagacagtgagttctaagtgtattaattaaatagcaaaaaattttgtttttaaaaaatgaaagagggagggttgccaacctgaagtcttaagtagattgtttgggtagcatatttccttctttgaacattgtctgaaattttctataaatcaagacttcttgtacaaagaatgatgggacatatgtaataattcaggcaatcacctgagtaatttaggcagtccaaattctttaccctgaaatacccacattttaaaaaaattgcagataattgcttcagttatttactttggggacagagatatagtgtaaagtgggagaaactgagtccttttttggtggtggtaataataagatgttataaaaatataacattttaaaaaagaaaggtccagaccttaagcgcagagctagaacaatattttttaaataatggggggaaaagggggcactttggtaattttagaaatcaggtagtatacttttttttttttttttgagacagggtcttgccatgttgctcaggctggtcttgaactcctgggctcaagcaatcctcctgccttggcctcccaaagtgctgggattacaggcatgatccaccgtgcccagccggtagacgtggtcttaaaaacagtgtttacatggccatcttgatgcttagaaagataattgattaaaatttaataaggcagggccaactccgagagttcattgacaacggcagcaaaaaggccctgaattctgtactttcttcccccagcctccttctccagcaaggagaatagcactcctccctccagaagccagctccctaagttggagccactatgtaagagaagaggaacgttcactttttaaaattcatatatttaaaaatcaagaccaaaaagtaaattctgtactcctattattgactgtagtcaatcaaacataaaaaggtgaaagtaaaatttaattttttacccttattttactgaccaatatggaagttcttggtatctttaaggctgaccttcctggtattgtgtaatgattgaatgtatctaaactgtaataatttgaaactgacaaacataaccttctcagacttacaaaactatgttctttctaaagatacagatttttattattttattttgactaggaaggatttataaataaatgtaatgaaaaatctttgatcttaataaagtaccttcaaacagtgtgtgtacttacttgaaaattgtttttgcacttggatattctattttattatactactattgtgatctattccattatactatttcccatggtagaacaaattatattttctactgtgatatgaagtgatgtaattgaacttgccatgtctaaaattaaatttcatatttttttcaatcaaa

SEQ ID NO: 12950 - DNA, 4895 bp, Homo sapiens
  source 1..4895: mol_type = unassigned DNA
agaaacggcttacaaaatatacagatcttggtagacaacgtggctgcaggctgttgaattggaattccctgtggctgtccgaaggcagggtgtccggagagcggtgggctgacctgttcctacaccttgcatcatgccagctttgtcaacgggatctgggagtgacactggtctgtatgagctgttggctgctctgccagcccagctgcagccacatgtggatagccaggaagacctgaccttcctctgggatatgtttggtgaaaaaagcctgcattcattggtaaagattcatgaaaaactacactactatgagaagcagagtccggtgcccattctccatggtgcggcggccttggccgatgatctggccgaagagcttcagaacaagccattaaacagtgagatcagagagctgttgaaactactgtcaaaacccaatgtgaaggctttgctctctgtacatgatactgtggctcagaagaattacgacccagtgttgcctcctatgcctgaagatattgacgatgaggaagactcagtaaaaataatccgtctggtcaaaaatagagaaccactgggagctaccattaagaaggatgaacagaccggggcgatcattgtggccagaatcatgagaggaggagctgcagatagaagtggtcttattcatgttggtgatgaacttagggaagtcaacgggataccagtggaggataaaaggcctgaggaaataatacagattttggctcagtctcagggagcaattacatttaagattatacccggcagcaaagaggagacaccatcaaaagaaggcaagatgtttatcaaagccctctttgactataatcctaatgaggataaggcaattccatgtaaggaagctgggctttctttcaaaaagggagatattcttcagattatgagccaagatgatgcaacttggtggcaagcgaaacacgaagctgatgccaaccccagggcaggcttgatcccctcaaagcatttccaggaaaggagattggctttgagacgaccagaaatattggttcagcccctgaaagtttccaacaggaaatcatctggttttagaaaaagttttcgtcttagtagaaaagataagaaaacaaataaatccatgtatgaatgcaagaagagtgatcagtacgacacagctgacgtacccacatacgaagaagtgacaccgtatcggcgacaaactaatgaaaaatacagactcgttgtcttggttggtcccgtgggagtagggctgaatgaactgaaacgaaagctgctgatcagtgacacccagcactatggcgtgacagtgccccataccaccagagcaagaagaagccaggagagtgatggtgttgaatacattttcatttccaagcatttgtttgagacagatgtacaaaataacaagtatgtggacatttttgagaattttcatgtgactgttttttataagcacatgcctgtcccgttttagacaactgagagttctccatttgaagtgtattttaattatcataataatatttgaaacagatgaaaaggtttattgaatatggagaatataaaaacaactactacggcacaagtatagactcagttcggtctgtccttgctaaaaacaaagtttgtttgttggatgttcagcctcatacagtgaagcatttaaggacactagaatttaagccctatgtgatatttataaagcctccatcaatagagcgtttgagagaaacaagaaaaaatgcaaagattatttcaagcagagatgaccaaggtgctgcaaaacccttcacagaagaagattttcaagaaatgattaaatctgcacagataatggaaagtcaatatggtcatctttttgacaaaattataataaatgatgacctcactgtggcattcaatgagctcaaaacaacttttgacaaattagagacagagacccattgggtgccagtgagctggttacattcataactaagagaaatttccataattgtctttttctatagagtgcatgatgaaatcaattacagttttggtagtagggtttttaaatctatatcactgtcatagatgtacaatcttggttcaagttgaatgctggttttgtttgtatctttttacagccttatttcaaacgccatgtgttagtataagatccgaaatcaaaatatgcacagtactgtattctaagcaaaacctcaaaccttctcgttgtcttcaataccgctctatctccaagatgaggctgaaattttcagagagacttagctagaggcttagtatgtatgggagttcagcgcttctgctggtctcaggtgtggctgctgctgtcgagtttgaatgttagctgttgaaggtatcaattcagcagccatgagcagctccagacagacaggtgagctctgctgtttctgggtggatcatcacagatttagccgggcaggcagtaaggtgtcctcttactattcaaaaagtgtagactttcttacatattcgcaatacgttcacagtgtgtgcattttaaaataattcttaaaggagtaactgaaattttaccttgagtgaatggccttcataatatagcttgagaagtccttttgagtacctgtcagtgactcaacaacatttaataagggaaagtagacttttaacagttattatatatgtaacgaaaagcctttcctttgggattaatataagtaagaatggtagccttgtggcaagaaatgattacaaaggatatttttatttgtaattcctcagaagacaatttatgaagtcacccaaaatgttattttagctggttttggatttttccaataaattagaagaaggatttctattctaaaacatgtaaaacctgttttacatattactgatacaattaaagattatttttcatctatgtgcaatagatcacccctctttaaattgctctaagatttattttagaaaacttttcatgtgatgttatttctttgtcatcaaaatgcttgttaacactgtccagacaccatcctaaccttgccattgttaaagaagtttaggaaagactcttatattgtaaatatttagatgggttctctcacttttctttgatactactgattttcagcaagtgaattatataattcaaaatgctagaaatgtctatccgttctataagagagcatatcctgccgttcttgcatgcagtgaagccctgcccgtcgaaaatcattgcatctgtgactttcaaagtggaaaaaaaaatgttatttttttgttgatttgtaaagagagtttaaatgtcatgtgaaaaaaaatagaatgtagtaaaattctatatatttatgaaatattttaaaggcatatttttttaaatatcaaacggggctattcataaaataaactgattgtatgtcaagatgtcctaatttaaaagagtagttttataaatcatggtcaacattccatgtaaatatttgagctttacaaagatagatccaagtgtgcgatctgtgcactgcacatttgatagcattattcactggttttccttcatacttgtcaagttcatattagaagcagagacaaaaaccactccaatggccttgacacatagtcacaccaaaatagataatcagactaagtattatataacaacgtgatccagacagtgagttctaagtgtattaattaaatagcaaaaaattttgtttttaaaaaatgaaagagggagggttgccaacctgaagtcttaagtagattgtttgggtagcatatttccttctttgaacattgtctgaaattttctataaatcaagacttcttgtacaaagaatgatgggacatatgtaataattcaggcaatcacctgagtaatttaggcagtccaaattctttaccctgaaatacccacattttaaaaaaattgcagataattgcttcagttatttactttggggacagagatatagtgtaaagtgggagaaactgagtccttttttggtggtggtaataataagatgttataaaaatataacattttaaaaaagaaaggtccagaccttaagcgcagagctagaacaatattttttaaataatggggggaaaagggggcactttggtaattttagaaatcaggtagtatacttttttttttttttttgagacagggtcttgccatgttgctcaggctggtcttgaactcctgggctcaagcaatcctcctgccttggcctcccaaagtgctgggattacaggcatgatccaccgtgcccagccggtagacgtggtcttaaaaacagtgtttacatggccatcttgatgcttagaaagataattgattaaaatttaataaggcagggccaactccgagagttcattgacaacggcagcaaaaaggccctgaattctgtactttcttcccccagcctccttctccagcaaggagaatagcactcctccctccagaagccagctccctaagttggagccactatgtaagagaagaggaacgttcactttttaaaattcatatatttaaaaatcaagaccaaaaagtaaattctgtactcctattattgactgtagtcaatcaaacataaaaaggtgaaagtaaaatttaattttttacccttattttactgaccaatatggaagttcttggtatctttaaggctgaccttcctggtattgtgtaatgattgaatgtatctaaactgtaataatttgaaactgacaaacataaccttctcagacttacaaaactatgttctttctaaagatacagatttttattattttattttgactaggaaggatttataaataaatgtaatgaaaaatctttgatcttaataaagtaccttcaaacagtgtgtgta

SEQ ID NO: 12951 - DNA, 2090 bp, Homo sapiens
  source 1..2090: mol_type = unassigned DNA
ataaacagcaggttctcctaggctttgaacaaaatttagcttctccaaggccaaaagcctcattgtgaagagaaagaaaggtatagcagtcttggcagttgctgaactgaattcctggctgatttccttactgcataaactcaactgctctcactgaggtcgtcattaagtcctgtgtgtgtttgggcaggccgacttgatttacagccagcactccactgcggaaacggcttacaaaatatacagatcttggtagacaacgtggctgcaggctgttgaattggaattccctgtggctgtccgaaggcagggtgtccggagagcggtgggctgacctgttcctacaccttgcatcatgccagctttgtcaacgggatctgggagtgacactggtctgtatgagctgttggctgctctgccagcccagctgcagccacatgtggatagccaggaagacctgaccttcctctgggatatgtttggtgaaaaaagcctgcattcattggtaaagattcatgaaaaactacactactatgagaagcagagtccggtgcccattctccatggtgcggcggccttggccgatgatctggccgaagagcttcagaacaagccattaaacagtgagatcagagagctgttgaaactactgtcaaaacccaatgtgaaggctttgctctctgtacatgatactgtggctcagaagaattacgacccagtgttgcctcctatgcctgaagatattgacgatgaggaagactcagtaaaaataatccgtctggtcaaaaatagagaaccactgggagctaccattaagaaggatgaacagaccggggcgatcattgtggccagaatcatgagaggaggagctgcagatagaagtggtcttattcatgttggtgatgaacttagggaagtcaacgggataccagtggaggataaaaggcctgaggaaataatacagattttggctcagtctcagggagcaattacatttaagattatacccggcagcaaagaggagacaccatcaaaagaaggcaagatgtttatcaaagccctctttgactataatcctaatgaggataaggcaattccatgtaaggaagctgggctttctttcaaaaagggagatattcttcagattatgagccaagatgatgcaacttggtggcaagcgaaacacgaagctgatgccaaccccagggcaggcttgatcccctcaaagcatttccaggaaaggagattggctttgagacgaccagaaatattggttcagcccctgaaagtttccaacaggaaatcatctggttttagaaaaagttttcgtcttagtagaaaagataagaaaacaaataaatccatgtatgaatgcaagaagagtgatcagtacgacacagctgacgtacccacatacgaagaagtgacaccgtatcggcgacaaactaatgaaaaatacagactcgttgtcttggttggtcccgtgggagtagggctgaatgaactgaaacgaaagctgctgatcagtgacacccagcactatggcgtgacagtgccccataccaccagagcaagaagaagccaggagagtgatggtgttgaatacattttcatttccaagcatttgtttgagacagatgtacaaaataacaagtttattgaatatggagaatataaaaacaactactacggcacaagtatagactcagttcggtctgtccttgctaaaaacaaagtttgtttgttggatgttcagcctcatacagtgaagcatttaaggacactagaatttaagccctatgtgatatttataaagcctccatcaatagagcgtttgagagaaacaagaaaaaatgcaaagattatttcaagcagagatgaccaaggtgctgcaaaacccttcacagaagaagattttcaagaaatgattaaatctgcacagataatggaaagtcaatatggtcatctttttgacaaaattataataaatgatgacctcactgtggcattcaatgagctcaaaacaacttttgacaaattagagacagagacccattgggtgccagtgagctggttacattcataactaa

SEQ ID NO: 12952 - DNA, 1210 bp, Homo sapiens
  source 1..1210: mol_type = unassigned DNA
gcaaaacagtagcttcactcagacaccgtaaccatcatctcatcctggatgcaattgctgtggttaacacaggaagaaaaggagaagtatcactctttttgctgcacaaatgtgaaaactcacaataaagagaagggagaaagaaacggcttacaaaatatacagatcttggtagacaacgtggctgcaggctgttgaattggaattccctgtggctgtccgaaggcagggtgtccggagagcggtgggctgacctgttcctacaccttgcatcatgccagctttgtcaacgggatctgggagtgacactggtctgtatgagctgttggctgctctgccagcccagctgcagccacatgtggatagccaggaagacctgaccttcctctgggatatgtttggtgaaaaaagcctgcattcattggtaaagcatttccaggaaaggagattggctttgagacgaccagaaatattggttcagcccctgaaagtttccaacaggaaatcatctggttttagaaaaagttttcgtcttagtagaaaagataagaaaacaaataaatccatgtatgaatgcaagaagagtgatcagtacgacacagctgacgtacccacatacgaagaagtgacaccgtatcggcgacaaactaatgaaaaatacagactcgttgtcttggttggtcccgtgggagtagggctgaatgaactgaaacgaaagctgctgatcagtgacacccagcactatggcgtgacagtgccccataccaccagagcaagaagaagccaggagagtgatggtgttgaatacattttcatttccaagcatttgtttgagacagatgtacaaaataacaagtttattgaatatggagaatataaaaacaactactacggcacaagtatagactcagttcggtctgtccttgctaaaaacaaagtttgtttgttggatgttcagcctcatacagtgaagcatttaaggacactagaatttaagccctatgtgatatttataaagcctccatcaatagagcgtttgagagaaacaagaaaaaatgcaaagattatttcaagcagagatgaccaaggtgctgcaaaacccttcacagaagaagattttcaagaaatgattaaatctgcacagataatggaaagtcaatatggtcatctttttgacaaaattataataaatgatgacctcactgtggca

SEQ ID NO: 12953 - DNA, 843 bp, Homo sapiens
  source 1..843: mol_type = unassigned DNA
cttttacaggaatgttcataaacagcaggttctcctaggctttgaacaaaatttagcttctccaaggccaaaagcctcattgtgaagagaaagaaaggtatagcagtcttggcagttgctgaactgaattcctggctgaaacggcttacaaaatatacagatcttggtagacaacgtggctgcaggctgttgaattggaattccctgtggctgtccgaaggcagggtgtccggagagcggtgggctgacctgttcctacaccttgcatcatgccagctttgtcaacgggatctgggagtgacactggtctgtatgagctgttggctgctctgccagcccagctgcagccacatgtggatagccaggaagacctgaccttcctctgggatatgtttggtgaaaaaagcctgcattcattggtaaagattcatgaaaaactacactactatgagaagcagagtccggtgcccattctccatggtgcggcggccttggccgatgatctggccgaagagcttcagaacaagccattaaacagtgagatcagagagctgttgaaactactgtcaaaacccaatgtgaaggctttgctctctgtacatgatactgtggctcagaagaattacgacccagtgttgcctcctatgcctgaagatattgacgatgaggaagactcagtaaaaataatccgtctggtcaaaaatagagaaccactgggagctaccattaagaaggatgaacagaccggggcgatcattgtggccagaatcatgagaggaggagctgcagatagaagtggtcttattcatgttggtgatgaacttagggaagtcaacgggatac

SEQ ID NO: 12954 - DNA, 832 bp, Homo sapiens
  source 1..832: mol_type = unassigned DNA
caacagtcccatgtgttgtaggtcccaggaggtcttggtgtttttgtagacagcagacaagaaataaaaggaattttgtcctttttacctcatgtaatcccactggaaaatgaaacatgtgctatgagttgatattgactcctgccaggtcacctccctaaagagtctcgggcaggcactgttgcaacatttcttggacaggagtgtgacgggctgtgatggagatggatggtttatgtagtacgctaccgtggaacactgcactactgtctgcccctaggaagtggctagtgaggacgccacgagtaacccgcatctgttactttaactctttcagagggtctgtatgagctgttggctgctctgccagcccagctgcagccacatgtggatagccaggaagacctgaccttcctctgggatatgtttggtgaaaaaagcctgcattcattggtaaagattcatgaaaaactacactactatgagaagcagagtccggtgcccattctccatggtgcggcggccttggccgatgatctggccgaagagcttcagaacaagccattaaacagtgagatcagagagctgttgaaactactgtcaaaacccaatgtgaaggctttgctctctgtacatgatactgtggctcagaagaattacgacccagtgttgcctcctatgcctgaagatattgacgatgaggaagactcagtaaaaataatccgtctggtcaaaaatagagaaccactgggagctaccattaagaaggatgaacagaccggggcgatcattgtggccagaatcatgagaggaggagctgcagatagaagtg

SEQ ID NO: 12955 - DNA, 472 bp, Homo sapiens
  source 1..472: mol_type = unassigned DNA
acgtggctgcaggctgttgaattggaattccctgtggctgtccgaaggcagggtgtccggagagcggtgggctgacctgttcctacaccttgcatcatgccagctttgtcaacgggatctgggagtgacactggtttgagcaaagcacagaagacaagagtctctgcatttacagaagccgcaaagtacggcgtatgcatcagatgtttgcaactggccagtcgggtcatttttcccataagcagcgttgcttagcagtgtcgctgacgtcgtcccattagttccaggggaacagagttgaagtcagacccttgtgccacaggagcaaggcacccgactcacagcagcctagatgcatggattgctcatttgggaaaatacgttctgtgtaaaacttttaccacttcttctttcccttcttgcttatttcacgaagaaaaaaaaaactaattatacaagtaatacataaaaa

SEQ ID NO: 12956 - DNA, 5080 bp, Homo sapiens
  source 1..5080: mol_type = unassigned DNA
aggtatagcagtcttggcagttgctgaactgaattcctggctgatttccttactgcataaactcaactgctctcactgaggtcgtcattaagtcctgtgtgtgtttgggcaggccgacttgatttacagccagcactccactgcggaaacggcttacaaaatatacagatcttggtagacaacgtggctgcaggctgttgaattggaattccctgtggctgtccgaaggcagggtgtccggagagcggtgggctgacctgttcctacaccttgcatcatgccagctttgtcaacgggatctgggagtgacactggtctgtatgagctgttggctgctctgccagcccagctgcagccacatgtggatagccaggaagacctgaccttcctctgggatatgtttggtgaaaaaagcctgcattcattggtaaagattcatgaaaaactacactactatgagaagcagagtccggtgcccattctccatggtgcggcggccttggccgatgatctggccgaagagcttcagaacaagccattaaacagtgagatcagagagctgttgaaactactgtcaaaacccaatgtgaaggctttgctctctgtacatgatactgtggctcagaagaattacgacccagtgttgcctcctatgcctgaagatattgacgatgaggaagactcagtaaaaataatccgtctggtcaaaaatagagaaccactgggagctaccattaagaaggatgaacagaccggggcgatcattgtggccagaatcatgagaggaggagctgcagatagaagtggtcttattcatgttggtgatgaacttagggaagtcaacgggataccagtggaggataaaaggcctgaggaaataatacagattttggctcagtctcagggagcaattacatttaagattatacccggcagcaaagaggagacaccatcaaaagaaggcaagatgtttatcaaagccctctttgactataatcctaatgaggataaggcaattccatgtaaggaagctgggctttctttcaaaaagggagatattcttcagattatgagccaagatgatgcaacttggtggcaagcgaaacacgaagctgatgccaaccccagggcaggcttgatcccctcaaagcatttccaggaaaggagattggctttgagacgaccagaaatattggttcagcccctgaaagtttccaacaggaaatcatctggttttagaaaaagttttcgtcttagtagaaaagataagaaaacaaataaatccatgtatgaatgcaagaagagtgatcagtacgacacagctgacgtacccacatacgaagaagtgacaccgtatcggcgacaaactaatgaaaaatacagactcgttgtcttggttggtcccgtgggagtagggctgaatgaactgaaacgaaagctgctgatcagtgacacccagcactatggcgtgacagtgccccataccaccagagcaagaagaagccaggagagtgatggtgttgaatacattttcatttccaagcatttgtttgagacagatgtacaaaataacaagtttattgaatatggagaatataaaaacaactactacggcacaagtatagactcagttcggtctgtccttgctaaaaacaaagtttgtttgttggatgttcagcctcatacagtgaagcatttaaggacactagaatttaagccctatgtgatatttataaagcctccatcaatagagcgtttgagagaaacaagaaaaaatgcaaagattatttcaagcagagatgaccaaggtgctgcaaaacccttcacagaagaagattttcaagaaatgattaaatctgcacagataatggaaagtcaatatggtcatctttttgacaaaattataataaatgatgacctcactgtggcattcaatgagctcaaaacaacttttgacaaattagagacagagacccattgggtgccagtgagctggttacattcataactaagagaaatttccataattgtctttttctatagagtgcatgatgaaatcaattacagttttggtagtagggtttttaaatctatatcactgtcatagatgtacaatcttggttcaagttgaatgctggttttgtttgtatctttttacagccttatttcaaacgccatgtgttagtataagatccgaaatcaaaatatgcacagtactgtattctaagcaaaacctcaaaccttctcgttgtcttcaataccgctctatctccaagatgaggctgaaattttcagagagacttagctagaggcttagtatgtatgggagttcagcgcttctgctggtctcaggtgtggctgctgctgtcgagtttgaatgttagctgttgaaggtatcaattcagcagccatgagcagctccagacagacaggtgagctctgctgtttctgggtggatcatcacagatttagccgggcaggcagtaaggtgtcctcttactattcaaaaagtgtagactttcttacatattcgcaatacgttcacagtgtgtgcattttaaaataattcttaaaggagtaactgaaattttaccttgagtgaatggccttcataatatagcttgagaagtccttttgagtacctgtcagtgactcaacaacatttaataagggaaagtagacttttaacagttattatatatgtaacgaaaagcctttcctttgggattaatataagtaagaatggtagccttgtggcaagaaatgattacaaaggatatttttatttgtaattcctcagaagacaatttatgaagtcacccaaaatgttattttagctggttttggatttttccaataaattagaagaaggatttctattctaaaacatgtaaaacctgttttacatattactgatacaattaaagattatttttcatctatgtgcaatagatcacccctctttaaattgctctaagatttattttagaaaacttttcatgtgatgttatttctttgtcatcaaaatgcttgttaacactgtccagacaccatcctaaccttgccattgttaaagaagtttaggaaagactcttatattgtaaatatttagatgggttctctcacttttctttgatactactgattttcagcaagtgaattatataattcaaaatgctagaaatgtctatccgttctataagagagcatatcctgccgttcttgcatgcagtgaagccctgcccgtcgaaaatcattgcatctgtgactttcaaagtggaaaaaaaaatgttatttttttgttgatttgtaaagagagtttaaatgtcatgtgaaaaaaaatagaatgtagtaaaattctatatatttatgaaatattttaaaggcatatttttttaaatatcaaacggggctattcataaaataaactgattgtatgtcaagatgtcctaatttaaaagagtagttttataaatcatggtcaacattccatgtaaatatttgagctttacaaagatagatccaagtgtgcgatctgtgcactgcacatttgatagcattattcactggttttccttcatacttgtcaagttcatattagaagcagagacaaaaaccactccaatggccttgacacatagtcacaccaaaatagataatcagactaagtattatataacaacgtgatccagacagtgagttctaagtgtattaattaaatagcaaaaaattttgtttttaaaaaatgaaagagggagggttgccaacctgaagtcttaagtagattgtttgggtagcatatttccttctttgaacattgtctgaaattttctataaatcaagacttcttgtacaaagaatgatgggacatatgtaataattcaggcaatcacctgagtaatttaggcagtccaaattctttaccctgaaatacccacattttaaaaaaattgcagataattgcttcagttatttactttggggacagagatatagtgtaaagtgggagaaactgagtccttttttggtggtggtaataataagatgttataaaaatataacattttaaaaaagaaaggtccagaccttaagcgcagagctagaacaatattttttaaataatggggggaaaagggggcactttggtaattttagaaatcaggtagtatacttttttttttttttttgagacagggtcttgccatgttgctcaggctggtcttgaactcctgggctcaagcaatcctcctgccttggcctcccaaagtgctgggattacaggcatgatccaccgtgcccagccggtagacgtggtcttaaaaacagtgtttacatggccatcttgatgcttagaaagataattgattaaaatttaataaggcagggccaactccgagagttcattgacaacggcagcaaaaaggccctgaattctgtactttcttcccccagcctccttctccagcaaggagaatagcactcctccctccagaagccagctccctaagttggagccactatgtaagagaagaggaacgttcactttttaaaattcatatatttaaaaatcaagaccaaaaagtaaattctgtactcctattattgactgtagtcaatcaaacataaaaaggtgaaagtaaaatttaattttttacccttattttactgaccaatatggaagttcttggtatctttaaggctgaccttcctggtattgtgtaatgattgaatgtatctaaactgtaataatttgaaactgacaaacataaccttctcagacttacaaaactatgttctttctaaagatacagatttttattattttattttgactaggaaggatttataaataaatgtaatgaaaaatctttgatcttaataaagtaccttcaaacagtgtgtgtacttacttgaaaattgtttttgcacttggatattctattttattatactactattgtgatctattccattatactatttcccatggtagaacaaattatattttctactgtgatatgaagtgatgtaattgaacttgccatgtctaaaattaaatttcatatttttttcaatcaaa

SEQ ID NO: 12957 - DNA, 3657 bp, Homo sapiens
  source 1..3657: mol_type = unassigned DNA
agcaaggcagggcctctttacactgggtgtcgcgccgtctgagttcctgacttgtttacccatcccgttggggctccggccgctgcaggctacctgctgtgcccgggattggggacctgtgactcccgagtggaagagatggtggcccaggaggaggaccccgacctattcagactgggagctggggtcagagtgtctccgtctccggagggggaccttccagaccccgggcgggaggggcccacagcagggtgccccggcggccccaggagggggtccgggcctcgggcgaaggctgcggcgccccggaaggagccgcgcacgcccctgcacgcggtgcccgctgcggaggccacggatccggagtctgtttccaggtctggcggggggccgggctgcggtggcggcagcggtgggagatgccggggcggccggcggaggtccatgtggcgctctaggtgggatgccagcgtcctgaaggcggaggccctggccctcctcccctgcggcctgggcatggcattctcccagtcccacgtgatggccgctcggcggcaccagcacagccggctcatcatcgaggtggacgagtacagctccaaccccacccaggccttcaccttctacaacatcaaccagggccgcttccagccaccgcatgtgcagatggtggacccggtgcctcacgatgcccccaaacctccaggctacacccgcttcgtctgcgtctctgatacccactcgaggacggaccccatccagatgccgtacggcgacgtgctgatccacgctggggacttcactgagctggggctcccgagcgaggtgaagaagttcaacgagtggctgggcagcctgccctacgagtacaagatcgtgatcgcaggcaaccacgagctgacctttgaccaggagttcatggccgacctcatcaagcaggacttttactacttcccatctgtgtcgaagctgaagccggagaactatgagaatgtgcagtcgctgctgaccaactgcatctaccttcaggactcggaggtcaccgtgcggggcttccggatctatggctccccatggcagccctggttctacggctggggcttcaacctcccgcgaggccaagccctgctggagaaatggaacctcattcccgaaggcgtagacatcctgataacccatggaccaccactgggcttcctggactgggtccccaagaagatgcagcgggtgggctgtgtggagctgctcaacacggtgcagaggcgcgtccagccgcggttacatgtctttggccacatccacgaagggtatggtgtcatggcagatgggacgaccacctatgtgaatgcgtccgtatgcactgtgaactaccagcccgtgaacccgcccatagtcatcgacctccccacaccccggaactcctgactgctccccactgcccctgccctgcccgcccgtgtcagctccacaggcctggcccggccactgttccttccatgctgagttgcctggacgacccatctggctgcggggactggcctagcaggcaggtcagggccttggaacgactctttagccttctgtcacctggagttgggaccctgcgcatccccatcaggggttctgtgctcatttactttttctgcgtgtacatcctgcgtgtacctcgttaaaggacctactaagctcatggccctgtcatgtttgggaaatgactaaatcttcattcttctcccttggacgccctcctggtttgggaagctgctgctcttgaatgggttttggaagttacacaaaatctccctctaaccacgggtctgtgtggcggcatgcccctgggttggggtgggtgggaggattcgtgagctgcacacagacagtccctttctctcctcccaagtgagggaggagacaggcccaaggcggaggccctccgagggagcatttagggacatctcaggaattcagaccgcacctggccaggcccacagctgtttgcctggcattgttcccccctttttcttcccataggcatttttgtttacttgaacaatgacctgagtgtcctaggcattcactcggagcctggatgatgggggctggttctacagaatgagccactggcattcgtgcccaggaccagtgagagcgttcccagtcatggggggatgacccttggtcccacggggaacacactgctctgtagaatgcggtagcctggatggagggtctgcaggcttaggctgcagcaggcctgccatgggtgtgaacccatgtccaggcacgcaccgacacacatgcacgcacgcacccctcttaattgaaccaagtgggtcctgtgtttctcttttctgccccgtagtgaggttctgttccttggtgcggcttcccttgcaccgttaggattctgtctggcatgcctgcagccgaggaagcccaggaccagccggccctgtgaattggagggtggcacagggaccgagcgggccccaggctccagcagccccaccttggacagcttctttttcttctttgaattaggactggagggggtggggccagggcggtggtgggaaccggtagggcctagatgaggggcaggcagtcaggcagaaatgggcaagttcagggtcagattctgtcgttatttaatattttgttcatcatggactttttctgcatttattttgatttttaacgttgcattaaagtagtattatttgtcctgattggtgactttttttgcacccctttccgttgtacatctgagagaagggtgtcactccctcacccaggtcccagccctgggaaccagcctaccgtgagcccttttgcagatatagactcatttcatcctcagatggtccttcaaggtaggtactttagtcccattttagagatgagacgattgaggccagaggggtgtggtaacttgcctgggggctcacagcacaaaaggagccgaggcaggatctgacccttgttctctggcctcactgccctcactttgccatgacccgaagttatgtccctacaaagcaatgcatggtccaaggctctttttattgtatttttatttttaagggtcctgttcaaaactggtgtgagctctgaggagtcctgaaccctgggtgcagcatcctagcatcctgggagtccttttctgcccacactgagctgggctcctcgaggggtggggctgctgtccctggaagcctggcagcagcactgtatcgggttggctgaagctgagcgccgtggggtgcagggctccaggaatcccgtttggctgaaggggttcctgtagccagggatgtttatgaggtctctctgatgccccaggcgcaggacatgtgtgcgggtggagaaaagcaggccctttcagtgccagctccactcaatttctatgtggaccaagaacgataaacttaaaaaaatttttttcctaaggtatcttcagaatatggtgtatttttatgtggaaaagaaaagttatgaaggcagctgttactttaagagaaaattcattaaaagtcctcgaggtatgaagatgacggcgtgcttctcaatcattttggcataacttgattgtggctgtaatttttttttttttttttgtcaagcatgtcagacaataaagtctttgtaaaaagagaa

SEQ ID NO: 12958 - DNA, 582 bp, Homo sapiens
  source 1..582: mol_type = unassigned DNA
cacttgcagcctcggacgcgcggcgaggcggccgccgccggaggagcccccgcccctgcgcgcctccctcccgggagcccctgcctccctcggtgcgcgctgctgctcgcagccgccgcggccgccgaagaggagcccggggccagtctgtttccaggtctggcggggggccgggctgcggtggcggcagcggtgggagatgccggggcggccggcggaggtccatgtggcgctctaggtgggatgccagcgtcctgaaggcggaggccctggccctcctcccctgcggcctgggcatggcattctcccagtcccacgtgatggccgctcggcggcaccagcacagccggctcatcatcgaggtggacgagtacagctccaaccccacccaggccttcaccttctacaacatcaaccagggccgcttccagccaccgcatgtgcagatggtggacccggtgcctcacgatgcccccaaacctccaggctacacccgcttcgtctgcgtctctgatacccactcgaggacggaccccatccagatgccgtacggcgacgtgctgatccacgctggggacttca

SEQ ID NO: 12959 - DNA, 728 bp, Homo sapiens
  source 1..728: mol_type = unassigned DNA
aaattgtatttgaatcctgagcaaccacagccctctagcctcttcccctccctagccatatctgaacagcttcccatttcaactccatagatacgtgactctccaagtgctttattttgaaaactaggacgtagcactttgcagaagaaaaatcagtccacttgctattatttatgtgatcgctgatctgctagatggatatagaaagcaccaagaattataataatttatggagtagagcactggtttacaaacatatttctctgcccgagctttgtgtgtttctttgcgtctcggggctcgttctgtgcaatgggaatggagaatattcagaatttgaagacaagcccggcgagccgactgcattcatagctaaaattaaaggaataagtgagcagctatttgtggcagacaggacatgatccatctgtttccaggtctggcggggggccgggctgcggtggcggcagcggtgggagatgccggggcggccggcggaggtccatgtggcgctctaggtgggatgccagcgtcctgaaggcggaggccctggccctcctcccctgcggcctgggcatggcattctcccagtcccacgtgatggccgctcggcggcaccagcacagccggctcatcatcgaggtggacgagtacagctccaaccccacccaggccttcaccttctacaacatcaaccagggccgcttccagccaccgcatgtgcagat

SEQ ID NO: 12960 - DNA, 1943 bp, Homo sapiens
  source 1..1943: mol_type = unassigned DNA
tgtggatatgtctgtgtgcatgtttgaaacagatctgaacagcttcccatttcaactccatagatacgtgactctccaagtgctttattttgaaaactaggacgtagcactttgcagaagaaaaatcagtccacttgctattatttatgtgatcgctgatctgctagatggatatagaaagcaccaagaattataataatttatggagtagagcactggtttacaaacatatttctctgcccgagctttgtgtgtttctttgcgtctcggggctcgttctgtgcaatgggaatggagaatattcagaatttgaagacaagcccggcgagccgactgcattcatagctaaaattaaaggaataagtgagcagctatttgtggcagacaggacatgatccaggaccacttaggaagggttagtgtggtttctctgtgacatttcgccacattgcaacaaaagccctagtaagcactgcctttgctgagccaagccggctttttctctgcatcgccctgagccaccggcctgaagacaggcagctgcacttttggctgtcccatcagagaggctggggctattcagtcgctcctactctcagttaaaggccccaagaggagacggagccaaggtgcgtctaggatcctggtgaaagctttccaaggtggggttcctcagaacgccgcagcggggatggctgttgggggagatgtttctctggaagcttctcatgcttaataagacagtcgtttctgtgtgctcattgactgtcatccgagttttggacccaggacagcaccatattatgctagccccccagtgattgttaaagagctgccgatgaatggaagagaaacacaggtgtgttctggggatggctgccttaccggcctggcactggctttgatcagagtgaccttttccttccaaacgagagcactttcgagagccggagaggatgctggtaatagtggcacagggacagcagatgtgaactggggctgtcctgggcctgcgctgagtttgagaggcctgtgttggctggaagtgatgcttcaagtcacacggtgaagcaaaatctatctttggtctgcagggcagcagctcctctggtagtgcaatcctccaagatcttcctcacacatcttcggacagagaggggccaccagaatgatccaagcatctcttttgcaaacattcatctgctgctgagatgctctgtgtgagccaaggcctctctctctctccttcctgggccttcagcacacactggctggcctcgctgtttggtgggggccttcttaggggcccacagaccccctccactgcaactcctcaaaatagagttctgaggaggtctgttttctgcctggctggttcgccgggtctgagcccttggagggctagtttcgtgtctgggtcctgtggctcccagaacaggatctggcccagagcaggagcagcagtgggtgcgttggggctgaccagtgccctgcagtgtccagatgggggtggtggtgaagaatttgcctagaaaaacgtgtcaagggtgggttgtagtggacgtgtccagccacaactccctgggaagtcaaagcctcagagtcttactcggtggggcgagaaggaaggggccaggcaccatgggctttcaggcaggagaggaggggttgcttgaaaatcccttctgcattcttgaaatttccctggggagcttctgagttcatcagaactttctaactagaggggaagagacatggagtgagcacctcctgtgtgctaggccctggcaggggcttttgaatctcctgtgtccttcagtgctccagcagcccaggaaggaaggattgagaatccacatgtttgtaggtgaaaaactaagattaaggggggcaaagctgcttttgagtcctgctgtcagactcaaaggcctgtgtagtttctc

SEQ ID NO: 12961 - DNA, 578 bp, Homo sapiens
  source 1..578: mol_type = unassigned DNA
attatttatgtgatcgctgatctgctagatggatatagaaagcaccaagaattataataatttatggagtagagcactggtttacaaacatatttctctgcccgagctttgtgtgtttctttgcgtctcggggctcgttctgtgcaatgggaatggagaatattcagaatttgaagacaagcccggcgagccgactgcattcatagctaaaattaaaggaataagtgagcagctatttgtggcagacaggacatgatccatctgtttccaggtctggcggggggccgggctgcggtggcggcagcggtgggagatgccggggcggccggcggaggtccatgtggcgctctaggtgggatgccagcgtcctgaaggcggaggccctggccctcctcccctgcggcctgggcatggcattctcccagtcccacgtgatggccgctcggcggcaccagcacagccggctcatcatcgaggtggacgagtacagctccaaccccacccaggccttcaccttctacaacatcaaccagggccgcttccagccaccgcatgtgcagatgtaagtgggaccggtg

SEQ ID NO: 12962 - DNA, 2507 bp, Homo sapiens
  source 1..2507: mol_type = unassigned DNA
acttgcagcctcggacgcgcggcgaggcggccgccgccggaggagcccccgcccctgcgcgcctccctcccgggagcccctgcctccctcggtgcgcgctgctgctcgcagccgccgcggccgccgaagaggagcccggggccagtctgtttccaggtctggcggggggccgggctgcggtggcggcagcggtgggagatgccggggcggccggcggaggtccatgtggcgctctaggtgggatgccagcgtcctgaaggcggaggccctggccctcctcccctgcggcctgggcatggcattctcccagtcccacgtgatggccgctcggcggcaccagcacagccggctcatcatcgaggtggacgagtacagctccaaccccacccaggccttcaccttctacaacatcaaccagggccgcttccagccaccgcatgtgcagatggtggacccggtgcctcacgatgcccccaaacctccaggctacacccgcttcgtctgcgtctctgatacccactcgaggacggaccccatccagatgccgtacggcgacgtgctgatccacgctggggacttcactgagctggggctcccgagcgaggtgaagaagttcaacgagtggctgggcagcctgccctacgagtacaagatcgtgatcgcaggcaaccacgagctgacctttgaccaggagttcatggccgacctcatcaagcaggacttttactacttcccatctgtgtcgaagctgaagccggagaactatgagaatgtgcagtcgctgctgaccaactgcatctaccttcaggactcggaggtcaccgtgcggggcttccggatctatggctccccatggcagccctggttctacggctggggcttcaacctcccgcgaggccaagccctgctggagaaatggaacctcattcccgaaggcgtagacatcctgataacccatggaccaccactgggcttcctggactgggtccccaagaagatgcagcgggtgggctgtgtggagctgctcaacacggtgcagaggcgcgtccagccgcggttacatgtctttggccacatccacgaagggtatggtgtcatggcagatgggacgaccacctatgtgaatgcgtccgtatgcactgtgaactaccagcccgtgaacccgcccatagtcatcgacctccccacaccccggaactcctgactgctccccactgcccctgccctgcccgcccgtgtcagctccacaggcctggcccggccactgttccttccatgctgagttgcctggacgacccatctggctgcggggactggcctagcaggcaggtcagggccttggaacgactctttagccttctgtcacctggagttgggaccctgcgcatccccatcaggggttctgtgctcatttactttttctgcgtgtacatcctgcgtgtacctcgttaaaggacctactaagctcatggccctgtcatgtttgggaaatgactaaatcttcattcttctcccttggacgccctcctggtttgggaagctgctgctcttgaatgggttttggaagttacacaaaatctccctctaaccacgggtctgtgtggcggcatgcccctgggttggggtgggtgggaggattcgtgagctgcacacagacagtccctttctctcctcccaagtgagggaggagacaggcccaaggcggaggccctccgagggagcatttagggacatctcaggaattcagaccgcacctggccaggcccacagctgtttgcctggcattgttcccccctttttcttcccataggcatttttgtttacttgaacaatgacctgagtgtcctaggcattcactcggagcctggatgatgggggctggttctacagaatgagccactggcattcgtgcccaggaccagtgagagcgttcccagtcatggggggatgacccttggtcccacggggaacacactgctctgtagaatgcggtagcctggatggagggtctgcaggcttaggctgcagcaggcctgccatgggtgtgaacccatgtccaggcacgcaccgacacacatgcacgcacgcacccctcttaattgaaccaagtgggtcctgtgtttctcttttctgccccgtagtgaggttctgttccttggtgcggcttcccttgcaccgttaggattctgtctggcatgcctgcagccgaggaagcccaggaccagccggccctgtgaattggagggtggcacagggaccgagcgggccccaggctccagcagccccaccttggacagcttctttttcttctttgaattaggactggagggggtggggccagggcggtggtgggaaccggtagggcctagatgaggggcaggcagtcaggcagaaatgggcaagttcagggtcagattctgtcgttatttaatattttgttcatcatggactttttctgcatttattttgatttttaacgttgcattaaagtagtattatttgtcctg

SEQ ID NO: 12963 - DNA, 1693 bp, Homo sapiens
  source 1..1693: mol_type = unassigned DNA
cactttctcaaccccacagatgctccgggcccctgcccctgccccagctatggctcctggggctccctcatccagccccagccctatcctggctgtgctgctcttctcttctttggtgctgtccccggcccaggccatcgtggtttacaccgacagggaggtccatggtgctgtgggctcccgggtgaccctgcactgctccttctggtccagtgagtgggtctcagatgacatctccttcacctggcgctaccagcccgaagggggcagagatgccatttcgatcttccactatgccaagggacaaccctacattgacgaggtggggaccttcaaagagcgcatccagtgggtaggggaccctcgctggaaggatggctccattgtcatacacaacctagactacagtgacaatggcacgttcacttgtgacgtcaaaaaccctccagacatagtgggcaagacctctcaggtcacgctgtatgtctttgaaaaagtgccaactaggtacggggtcgttctgggagctgtgatcgggggtgtcctcggggtggtgctgttgctgctgctgcttttctacgtggttcggtactgctggctacgcaggcaggcggccctgcagaggaggctcagtgctatggagaaggggaaattgcacaagccaggaaaggacgcgtcgaagcgcgggcggcagacgccagtgctgtatgcaatgctggaccacagcagaagcaccaaagctgtcagtgagaagaaggccaaggggctgggggagtctcgcaaggataagaaatagcggttagcgggccgggcgggggatcgggggttaggggtggagtccgccaaaggcccaaaggtgatggtcatcgagatggagctacgaaaggatgagcagagcccggagctccggcctgctgtcaagtcccccagcagaaccagcctcaaaaacgccctcaagaacatgatgggcctgaactcggacaagtgatcgccacccccccaccccaggccctgccagagcagggggacctaggctcctcttacccccgtctaggtgctttccctctttgctcccccgccctgccctgccctcacctccctttgagatgtaagtttcattccagaattcattccccagctccatactctgtccccccagctaatacccagagcacccagatcagactctccttcagggtttatttaggttattattttttattttttaatccattctttgtttgtttacctgtgctcatcctctgcccttacacccatgactgaggaccaatgacgtcatgtggcttttgcaattcacgccccccttaagtccttaatgaagagccagcccaagtagaggggcccctgatcctcacacttcagtatagcattggttccccctgaccactttggagcactgttctgggactccaggtcttgaggagagagacagagagagagaatggatcctcataggtcagggagtgggggagggggcaaatgagccttaagaaatggtttttaaacaaccaaacaaaaagcaggaaaaacaaatgggaaatgggggggcgggggggaggaagaggctgcactgcagccacaggggattcttaggatttttctacattctgtatatttcttctcaaacctccaaatgtccttaaatgtttaataaacactgacatttccagaa

SEQ ID NO: 12964 - DNA, 1955 bp, Homo sapiens
  source 1..1955: mol_type = unassigned DNA
gttcagttcctggtcccccactttctcaaccccacagatgctccgggcccctgcccctgccccagctatggctcctggggctccctcatccagccccagccctatcctggctgtgctgctcttctcttctttggtgctgtccccggcccaggccatcgtggtttacaccgacagggaggtccatggtgctgtgggctcccgggtgaccctgcactgctccttctggtccagtgagtgggtctcagatgacatctccttcacctggcgctaccagcccgaagggggcagagatgccatttcgatcttccactatgccaagggacaaccctacattgacgaggtggggaccttcaaagagcgcatccagtgggtaggggaccctcgctggaaggatggctccattgtcatacacaacctagactacagtgacaatggcacgttcacttgtgacgtcaaaaaccctccagacatagtgggcaagacctctcaggtcacgctgtatgtctttgaaaaagtgccaactaggtacggggtcgttctgggagctgtgatcgggggtgtcctcggggtggtgctgttgctgctgctgcttttctacgtggttcggtactgctggctacgcaggcaggcggccctgcagaggaggctcagtgctatggagaaggggaaattgcacaagccaggaaaggacgcgtcgaagcgcgggcggcagacgccagtgctgtatgcaatgctggaccacagcagaagcaccaaagctgtcagtgagaagaaggccaaggggctgggggagtctcgcaaggataagaaatagcggttagcgggccgggcgggggatcgggggttaggggtggagtccgccaaaggcccaaaggtgatggtcatcgagatggagctacgaaaggatgagcagagcccggagctccggcctgctgtcaagtcccccagcagaaccagcctcaaaaacgccctcaagaacatgatgggcctgaactcggacaagtgatcgccacccccccaccccaggccctgccagagcagggggacctaggctcctcttacccccgtctaggtgctttccctctttgctcccccgccctgccctgccctcacctccctttgagatgtaagtttcattccagaattcattccccaggcaattgtattctcccccaccttcacccctggctttctgggagcccaggagctaatcctacccctcacctgccccgggggctgtgtgtttggtgcctgtccacctgagcactgagaagaaagggactttgataccctctgcctcaagtccaggccacctggcattcccatctcctgcatcccccagcctgtccccctggctgtttcctctcccgtccctccctcccctctaccaggtggcccagctccatactctgtccccccagctaatacccagagcacccagatcagactctccttcagggtttatttaggttattattttttattttttaatccattctttgtttgtttacctgtgctcatcctctgcccttacacccatgactgaggaccaatgacgtcatgtggcttttgcaattcacgccccccttaagtccttaatgaagagccagcccaagtagaggggcccctgatcctcacacttcagtatagcattggttccccctgaccactttggagcactgttctgggactccaggtcttgaggagagagacagagagagagaatggatcctcataggtcagggagtgggggagggggcaaatgagccttaagaaatggtttttaaacaaccaaacaaaaagcaggaaaaacaaatgggaaatgggggggcgggggggaggaagaggctgcactgcagccacaggggattcttaggatttttctacattctgtatatttcttctcaaacctccaaatgtccttaaatgtttaataaacactgacatttccagaa

SEQ ID NO: 12965 - DNA, 1824 bp, Homo sapiens
  source 1..1824: mol_type = unassigned DNA
cttactgggcccataggtgcatctgattccccactttgtgcttgcagtgctgtccccggcccaggccatcgtggtttacaccgacagggaggtccatggtgctgtgggctcccgggtgaccctgcactgctccttctggtccagtgagtgggtctcagatgacatctccttcacctggcgctaccagcccgaagggggcagagatgccatttcgatcttccactatgccaagggacaaccctacattgacgaggtggggaccttcaaagagcgcatccagtgggtaggggaccctcgctggaaggatggctccattgtcatacacaacctagactacagtgacaatggcacgttcacttgtgacgtcaaaaaccctccagacatagtgggcaagacctctcaggtcacgctgtatgtctttgaaaaagtgccaactaggtacggggtcgttctgggagctgtgatcgggggtgtcctcggggtggtgctgttgctgctgctgcttttctacgtggttcggtactgctggctacgcaggcaggcggccctgcagaggaggctcagtgctatggagaaggggaaattgcacaagccaggaaaggacgcgtcgaagcgcgggcggcagacgccagtgctgtatgcaatgctggaccacagcagaagcaccaaagctgtcagtgagaagaaggccaaggggctgggggagtctcgcaaggataagaaatagcggttagcgggccgggcgggggatcgggggttaggggtggagtccgccaaaggcccaaaggtgatggtcatcgagatggagctacgaaaggatgagcagagcccggagctccggcctgctgtcaagtcccccagcagaaccagcctcaaaaacgccctcaagaacatgatgggcctgaactcggacaagtgatcgccacccccccaccccaggccctgccagagcagggggacctaggctcctcttacccccgtctaggtgctttccctctttgctcccccgccctgccctgccctcacctccctttgagatgtaagtttcattccagaattcattccccaggcaattgtattctcccccaccttcacccctggctttctgggagcccaggagctaatcctacccctcacctgccccgggggctgtgtgtttggtgcctgtccacctgagcactgagaagaaagggactttgataccctctgcctcaagtccaggccacctggcattcccatctcctgcatcccccagcctgtccccctggctgtttcctctcccgtccctccctcccctctaccaggtggcccagctccatactctgtccccccagctaatacccagagcacccagatcagactctccttcagggtttatttaggttattattttttattttttaatccattctttgtttgtttacctgtgctcatcctctgcccttacacccatgactgaggaccaatgacgtcatgtggcttttgcaattcacgccccccttaagtccttaatgaagagccagcccaagtagaggggcccctgatcctcacacttcagtatagcattggttccccctgaccactttggagcactgttctgggactccaggtcttgaggagagagacagagagagagaatggatcctcataggtcagggagtgggggagggggcaaatgagccttaagaaatggtttttaaacaaccaaacaaaaagcaggaaaaacaaatgggaaatgggggggcgggggggaggaagaggctgcactgcagccacaggggattcttaggatttttctacattctgtatatttcttctcaaacc

SEQ ID NO: 12966 - DNA, 957 bp, Homo sapiens
  source 1..957: mol_type = unassigned DNA
aaccctacattgacgaggtggggaccttcaaagagcgcatccagtgggtaggggaccctcgctggaaggatggctccattgtcatacacaacctagactacagtgacaatgtgccaactaggtacggggtcgttctgggagctgtgatcgggggtgtcctcggggtggtgctgttgctgctgctgcttttctacgtggttcggtactgctggctacgcaggcaggcggccctgcagaggaggctcagtgctatggagaaggggaaattgcacaagccaggaaaggacgcgtcgaagcgcgggcggcagacgccagtgctgtatgcaatgctggaccacagcagaagcaccaaagctgtcagtgagaagaaggccaaggggctgggggagtctcgcaaggataagaaatagcggttagcgggccgggcgggggatcgggggttaggggtggagtccgccaaaggcccaaaggtgatggtcatcgagatggagctacgaaaggatgagcagagcccggagctccggcctgctgtcaagtcccccagcagaaccagcctcaaaaacgccctcaagaacatgatgggcctgaactcggacaagtgatcgccacccccccaccccaggccctgccagagcagggggacctaggctcctcttacccccgtctaggtgctttccctctttgctcccccgccctgccctgccctcacctccctttgagatgtaagtttcattccagaattcattccccaggcaattgtattctcccccaccttcacccctggctttctgggagcccaggagctaatcctacccctcacctgccccgggggctgtgtgtttggtgcctgtccacctgagcactgagaagaaagggactttgataccctctgcctcaagtccaggccacctggcattcccatctcctgcatcccccagcctgtccccctggctgttt

SEQ ID NO: 12967 - DNA, 878 bp, Homo sapiens
  source 1..878: mol_type = unassigned DNA
tactgctggctacgcaggcaggcggccctgcagaggaggctcagtgctatggagaaggggaaattgcacaagccaggaaaggacgcgtcgaagcgcgggcggcaggttagcgggacttggggcctagacaagatgggaaggagaaccctgggagccgccgggcagcagtgaggggtgggatgggaacagtcaagccccagtcgctcggtgactgatgtgtgcgcccctcccccagacgccagtgctgtatgcaatgctggaccacagcagaagcaccaaagctgtcagtgagaagaaggccaaggggctgggggagtctcgcaaggataagaaatagcggttagcgggccgggcgggggatcgggggttaggggtggagtccgccaaaggcccaaaggtgatggtcatcgagatggagctacgaaaggatgagcagagcccggagctccggcctgctgtcaagtcccccagcagaaccagcctcaaaaacgccctcaagaacatgatgggcctgaactcggacaagtgatcgccacccccccaccccaggccctgccagagcagggggacctaggctcctcttacccccgtctaggtgctttccctctttgctcccccgccctgccctgccctcacctccctttgagatgtaagtttcattccagaattcattccccaggcaattgtattctcccccaccttcacccctggctttctgggagcccaggagctaatcctacccctcacctgccccgggggctgtgtgtttggtgcctgtccacctgagcactgagaagaaagggactttgataccctctgcctcaagtccaggccacctggcattcccatctcctgcatcccccagcctgtccccctgg

SEQ ID NO: 12968 - DNA, 366 bp, Homo sapiens
  source 1..366: mol_type = unassigned DNA
acagcagtctctcttcttgcagtgctatggagaaggggaaattgcacaagccaggaaaggacgcgtcgaagcgcgggcggcagacgccagtgctgtatgcaatgctggaccacagcagaagcaccaaagctgtcagtgagaagaaggccaaggggctgggggagtctcgcaaggataagaaatagcggttagcgggccgggcgggggatcgggggttaggggtggagtccgccaaaggcccaaaggtgatggtcatcgagatggagctacgaaaggatgagcagagcccggagctccggcctgctgtcaagtcccccagcagaaccagcctcaaaaacgccctcaagaacatgatgggcctgaact

SEQ ID NO: 12969 - DNA, 2153 bp, Homo sapiens
  source 1..2153: mol_type = unassigned DNA
ctcggatctaggagctactcgcccggccctgggcggtgggaggcggcggcggcggcggcgctcgcgcacctcggaggagccaggagccggaaccagggccgagcccgcgggccggggctagccagccggtcggagatgtccgcccagaggttaatttctaacagaacctcccagcaatcggcatctaattctgattacacctgggaatatgaatattatgagattggaccagtttcctttgaaggactgaaggctcataaatattccattgtgattggattttgggttggtcttgcagtcttcgtgatttttatgttttttgtgctgaccttgctgaccaagacaggagccccacaccaagacaatgcagagtcctcagagaagagattcagaatgaacagctttgtgtcagactttggaagacctctggagccagataaagtattttctcgccaaggcaacgaggagtccaggtctctctttcactgctacatcaatgaggtggaacgcttggacagagccaaagcttgtcaccagaccacagcccttgacagtgacgtccaactccaggaagccatcagaagcagtgggcagccagaggaggagctgaacaggctcatgaagtttgacatccccaactttgtgaacacagaccagaactactttggggaggatgatcttctgatttctgaaccacctattgttctggaaactaagccactttcccagacctcacacaaagacctggattgagaaacatgctctgtaaagggtcttcctgaagatgtggattctatctttatgtagcaagaaatctacatccaccaaaattgtgtgtgtttgggggagagagagacatagagatagagacagagaggcagagaagagacccctttagaagagagctgagctgattaagctgagtggttttttgttttgttttgtttttgctttttaatacatttggagctttgggagtattaaagtatttacaccaagcttgtccaacccgtggcatgtgtcccaggacagctttgaatgtggcccaatacaaattttaaactttattaaaacatgagttttgtttttttttttgctattttttttaaagctcgtcagctatcgttagtgttagtgtactttatgtgtggcccaagacaactcttcttccagtgtggcacagggaagctaaaagattggacacctctgatttatactagctcgttttgcttgttgaaaaatttggccaaatacctattgtcagcattcttgggtgaggattagcctaccatgttctaatctggccctgccactactatgctctacctttggtgagttgctttacctctctgggctgccccatttttaactgtaggttgacaggtctagagtgatccatcccacctctaatattttgtgaatttatgactttgccttcagatgaggctgagctatacataaaacagtataaactagggtactgcctcgtatctcttgtaggctctctcaaatctctgtaccttccacttaaccctaattgagccaagctttagtcaggggatctggttgtctaccagaatgtcaggagactcatcttacacagtcatggtggccaatgtttctggtgggttgtgctgaaacagctcttctgagaacttccaaccacccatgctctaacctggagacagccatcccctgcctcagaataagtaccaattcgtagtacatgtatggtactcttgtccccaagaaatgttaggaagcttgtcagctgaatgagaggaggtgccttctgggtatctctgtgttggtgtatctgtgccattggctacagaacaagaaaaatactatttgccatgctattaccttggcagatgtgtaggtgatagtcatctggctttgagctgagatggtcagtgggttgtaaattccccactagcagatattcagggtggcctgagttatgtaaacaagtgagcaacacagctttaatttcatggaggaatcaaagctgcacactggtattaaaacaacttgattttgcgcacacagttgcatgcatggcaagctgttaacctctgggtggcattttcattatgaatttgttcaccacctgtcttgcttaagctacaaaataaatgcatttgactgca

SEQ ID NO: 12970 - DNA, 2295 bp, Homo sapiens
  source 1..2295: mol_type = unassigned DNA
gatgagttcccggtggggctctggggggggctcctgagcggggcattccttcctgaagcctcatccccgctcagccctgctcagcccctcctcctactcccctccccctccccctcctgccgggccaggaattgggtttggggcgggttctgcttccaaagccatctcttccagcaggagagggctctactctgagctcctattttccaaggctccgggccgcgctcggcgctggcctgctgccccggcgggtccgccggccggaggcgggagtcacaggaagagccctccacaaaaggaggcctcggcggatcaggacagctgcaggtgggtgtgcagactggtgagctgccagcaggggcccagacgcgccaggcctggagatggctggaaactgctcctgggaggcccatcccggcaacaggaacaagatgtgccctggcctgagcgaggccccggaactctacagccggggcttcctgaccatcgagcagatcgcgatgctgccgcctccggccgtcatgaactacatcttcctgctcctctgcctgtgtggcctggtgggcaacgggctggtcctctggtttttcggcttctccatcaagaggaaccccttctccatctacttcctgcacctggccagcgccgatgtgggctacctcttcagcaaggcggtgttctccatcctgaacacggggggcttcctgggcacgtttgccgactacatccgcagcgtgtgccgggtcctggggctctgcatgttccttaccggcgtgagcctcctgccggccgtcagcgccgagcgctgcgcctcggtcatcttccccgcctggtactggcgccggcggcccaagcgcctgtcggccgtggtgtgcgccctgctgtgggtcctgtccctcctggtcacctgcctgcacaactacttctgcgtgttcctgggccgcggggcccccggcgcggcctgcaggcacatggacatcttcctgggcatcctcctgttcctgctctgctgcccgctcatggtgctgccctgcctggccctcatcctgcacgtggagtgccgggcccgacggcgccagcgctctgccaagctcaaccacgtcatcctggccatggtctccgtcttcctggtgtcctccatctacttagggatcgactggttcctcttctgggtcttccagatcccggcccccttccccgagtacgtcactgacctgtgcatctgcatcaacagcagcgccaagcccatcgtctacttcctggccgggagggacaagtcgcagcggctgtgggagccgctcagggtggtcttccagcgggccctgcgggacggcgctgagctgggggaggccgggggcagcacgcccaacacagtcaccatggagatgcagtgtcccccggggaacgcctcctgagactccagcgcctggaggaggcaggggcaggaagcggcctccaagacccttcgccttgggacaggaatgggcacctgcttctgagtccatacaggagaagaaagatctgtttcctctcctcgggcctccttctccctgggctggggactccaggggtggctgggagactgggcagccaccagcaaacagaccctgtggcccctgcccggctcccccacccattctgctcccctagagacctcttgtacagaagttgcccccaggtggtggggcccctccttgccctaggctggttggtaaaagagaggaggtcaacacccagcctagccacctctgcctcttgggtcagccctccttgactgtgtcccagccagcaccaggccagcagcctcatccctgccattcagggctgttccagagattcgatcctcttaaggcattatcagtgagcaaatgtgaaggaaatggtgtctggaagaaagttctggttcacatgccttgtagctaagtctttctgcaaacaacctcccttccccccgtcgagtcatttggtgactttgatggggggatttctggttatgtcaaggctctggagacaggaagggcctttggccgccttgggtagttgacctgccttttctgactccgggacgagccagtcctaggctgcctccgggagcacttgaggtatcccgcaggccatgaggacccactgggcagctcctggacagcctcttggctccagcccccacccgaaagtggacactggctccgccctggccacctggggactggcactgtggtgcacagtggcccaatgtggccaacggaagttttataaaagacaaaatgtatatcaataaacattttataacttgca

SEQ ID NO: 12971 - DNA, 705 bp, Homo sapiens
  source 1..705: mol_type = unassigned DNA
atctcttccagcaggagagggctctactctgagctcctattttccaaggctccgggccgcgctcggcgctggcctgctgccccggcgggtccgccggccggaggcgggagtcacaggaagagccctccacaaaaggaggcctcggcggatcaggacagctgcaggtgggtgtgcagactggtgagctgccagcaggggcccagacgcgccaggcctggagatggctggaaactgctcctgggaggcccatcccggcaacaggaacaaggtaagtgccacaggcggagggccctggtcttgcccagacgggtgtgggtgggaggggcagacccagcccagcatctcctcccccatcccccccttcctggccccactttccagctctggacccaccgtgggcagtgggctcctctgggctatgtggccgggcacaagttccctggaccctcctaccctcctgtcctcatcagtgaggcaagcaccaggactggacctcaaggtccctcgctgtgctgacactgtggtcgccttgtagcatccttgcaaggtcttgtttcatctcttccctgcagaggtggggcagtcagctacttactacagccaggcgggccaggaagccctgggacgctgactccaaggtggccctgatgtcatgtgctccatggagcctagggggtcctgggccaccccgagagtgttgcccca

SEQ ID NO: 12972 - DNA, 2282 bp, Homo sapiens
  source 1..2282: mol_type = unassigned DNA
gggctcctgagcggggcattccttcctgaagcctcatccccgctcagccctgctcagcccctcctcctactcccctccccctccccctcctgccgggccaggaattgggtttggggcgggttctgcttccaaagccatctcttccagcaggagagggctctactctgagctcctattttccaaggctccgggccgcgctcggcgctggcctgctgccccggcgggtccgccggccggaggcgggagtcacaggaagagccctccacaaaaggaggcctcggcggatcaggacagctgcaggcttctgccaggtgggtgtgcagactggtgagctgccagcaggggcccagacgcgccaggcctggagatggctggaaactgctcctgggaggcccatcccggcaacaggaacaagatgtgccctggcctgagcgaggccccggaactctacagccggggcttcctgaccatcgagcagatcgcgatgctgccgcctccggccgtcatgaactacatcttcctgctcctctgcctgtgtggcctggtgggcaacgggctggtcctctggtttttcggcttctccatcaagaggaaccccttctccatctacttcctgcacctggccagcgccgatgtgggctacctcttcagcaaggcggtgttctccatcctgaacacggggggcttcctgggcacgtttgccgactacatccgcagcgtgtgccgggtcctggggctctgcatgttccttaccggcgtgagcctcctgccggccgtcagcgccgagcgctgcgcctcggtcatcttccccgcctggtactggcgccggcggcccaagcgcctgtcggccgtggtgtgcgccctgctgtgggtcctgtccctcctggtcacctgcctgcacaactacttctgcgtgttcctgggccgcggggcccccggcgcggcctgcaggcacatggacatcttcctgggcatcctcctgttcctgctctgctgcccgctcatggtgctgccctgcctggccctcatcctgcacgtggagtgccgggcccgacggcgccagcgctctgccaagctcaaccacgtcatcctggccatggtctccgtcttcctggtgtcctccatctacttagggatcgactggttcctcttctgggtcttccagatcccggcccccttccccgagtacgtcactgacctgtgcatctgcatcaacagcagcgccaagcccatcgtctacttcctggccgggagggacaagtcgcagcggctgtgggagccgctcagggtggtcttccagcgggccctgcgggacggcgctgagctgggggaggccgggggcagcacgcccaacacagtcaccatggagatgcagtgtcccccggggaacgcctcctgagactccagcgcctggaggaggcaggggcaggaagcggcctccaagacccttcgccttgggacaggaatgggcacctgcttctgagtccatacaggagaagaaagatctgtttcctctcctcgggcctccttctccctgggctggggactccaggggtggctgggagactgggcagccaccagcaaacagaccctgtggcccctgcccggctcccccacccattctgctcccctagagacctcttgtacagaagttgcccccaggtggtggggcccctccttgccctaggctggttggtaaaagagaggaggtcaacacccagcctagccacctctgcctcttgggtcagccctccttgactgtgtcccagccagcaccaggccagcagcctcatccctgccattcagggctgttccagagattcgatcctcttaaggcattatcagtgagcaaatgtgaaggaaatggtgtctggaagaaagttctggttcacatgccttgtagctaagtctttctgcaaacaacctcccttccccccgtcgagtcatttggtgactttgatggggggatttctggttatgtcaaggctctggagacaggaagggcctttggccgccttgggtagttgacctgccttttctgactccgggacgagccagtcctaggctgcctccgggagcacttgaggtatcccgcaggccatgaggacccactgggcagctcctggacagcctcttggctccagcccccacccgaaagtggacactggctccgccctggccacctggggactggcactgtggtgcacagtggcccaatgtggccaacggaagttttataaaagacaaaatgtatatcaataaacattttataacttgcagcc

SEQ ID NO: 12973 - DNA, 644 bp, Homo sapiens
  source 1..644: mol_type = unassigned DNA
atttgacacaggaatcaaggttgctaagagaccacctgtgctgaatacactttgttctggcaagagcagaaaactgagaagccgtgttacctaccactacctgggattaattcagggagcgggataattctggatatgactggtaaaaactggatattaatttctactactactcccaaaagtctagaagatgaaattgtgggaagacttctaaaaattttgtttgttatctttgttgacttaatttctattatatatgttgtgataacttcttagaaagctgacttcctttccatgtacatttcaaactgaattacagtgaataaaaatttgtattttaacttgttgagtgactcacattttatgacattgccaatttattctagaagccaacaggacactgcaatacaaacaacattgtgtattgtttagttctttatggtttatgaaacattcacatatactgaagtgaatttttttccccaaaaacatctatcctactgagtcatgaaacttctagatttttagccaggtgtggtggctcacacctgtaatcccagcactttgagaggcccaggtaggcggatcccttgagtgcaggagttcgatacgggcctgagcaacctgaagaaatcccatctcta

SEQ ID NO: 12974 - DNA, 495 bp, Homo sapiens
  source 1..495: mol_type = unassigned DNA
tcattcccttgactttggacttcgcttattgaacccctggacaacggaatctccctctgtcgcccaggctggagtgcagtggcaccatctcggcttaccgcaacctccgcctcctgggttcaaacaatactcctaccttggcctcctgagtagctgggattacaggaatcaaggttgctaagagaccacctgtgctgaatacactttgttctggcaagagcagaaaactgagaagccgtgttacctaccactacctgggattaattcagggagcgggataattctggatatgactggtaaaaactggatattaatttctactactactcccaaaagtctagaagatgaaattgtgggaagacttctaaaaattttgtttgttatctttgttgacttaatttctattatatatgttgtgataacttcttagaaagctgacttcctttccatgtacatttcaaactgaattacagtgaataaaaatttgtattttaa

SEQ ID NO: 12975 - DNA, 422 bp, Homo sapiens
  source 1..422: mol_type = unassigned DNA
gcctcctgatccaccaagaccatatggtgtttttcataaaagagagagatcattcccttgactttggacttcgcttattgaacccctggacagaatcaaggttgctaagagaccacctgtgctgaatacactttgttctggcaagagcagaaaactgagaagccgtgttacctaccactacctgggattaattcagggagcgggataattctggatatgactggtaaaaactggatattaatttctactactactcccaaaagtctagaagatgaaattgtgggaagacttctaaaaattttgtttgttatctttgttgacttaatttctattatatatgttgtgataacttcttagaaagctgacttcctttccatgtacatttcaaactgaattacagtgaataaaaatttgtattttaa

SEQ ID NO: 12976 - DNA, 520 bp, Homo sapiens
  source 1..520: mol_type = unassigned DNA
gcctcctgatccaccaagaccatatggtgtttttcataaaagagagagatcattcccttgactttggacttcgcttattgaacccctggacagctggagtgcagtggcaccatctcggcttaccgcaacctccgcctcctgggttcaaacaatactcctaccttggcctcctgagtagctgggattacaggaatcaaggttgctaagagaccacctgtgctgaatacactttgttctggcaagagcagaaaactgagaagccgtgttacctaccactacctgggattaattcagggagcgggataattctggatatgactggtaaaaactggatattaatttctactactactcccaaaagtctagaagatgaaattgtgggaagacttctaaaaattttgtttgttatctttgttgacttaatttctattatatatgttgtgataacttcttagaaagctgacttcctttccatgtacatttcaaactgaattacagtgaataaaaatttgtattttaa

SEQ ID NO: 12977 - DNA, 421 bp, Homo sapiens
  source 1..421: mol_type = unassigned DNA
actgagggatgactgtacttaaaaaataggcacacaatctcatgagttatggtcacttacatacgaaggcttttctggttgtaattgttgttttgtcatgaagatattaaagccttggtttcagacaatttttagggaattatttcttttcttttctttttttttttttgagacggaatctccctctgtcgcccaggctggagtgcagtggcaccatctcggcttaccgcaacctccgcctcctgggttcaaacaatactcctaccttggcctcctgagtagctgggattacaggaatcaaggttgctaagagaccacctgtgctgaatacactttgttctggcaagagcagaaaactgagaagccgtgttacctaccactacctgggattaattcagggagcgggataattctggatatg

SEQ ID NO: 12978 - DNA, 870 bp, Homo sapiens
  source 1..870: mol_type = unassigned DNA
aatccctcatgggtactgagggatgactgtacttaaaaaataggcacacaatctcatgagttatggtcacttacatacgaaggcttttctggttgtaattgttgttttgtcatgaagatattaaagccttggtttcagacaatttttagggaattatttcttttcttttctttttttttttttgagacggaatctccctctgtcgcccaggctggagtgcagtggcaccatctcggcttaccgcaacctccgcctcctgggttcaaacaatactcctaccttggcctcctgagtagctgggattacaggtgagcaccaccatgcccggctaattttttttgtacttttagtagagacggggtttcaccatattggtcaggctggtctcgaactcctgaccttgtgatctgcccgctttggccttccaaagtgctgggattacaggcgtgagccaccgtgcccggtcgggaattacttctttaaaaagtgtggtgaatgtttgccccaccaggaaaatcctagaatttagcttaatctttctgtccaatgttcagttttaagctctacaattctgggataaacagaaattaaagtgtcatattttcaaaagttcactcttagacatctccttccaatctagttttgaaaacaattttagaagtttttctgtgtaggctccctgcccctccacttcctacactacctcactgtccagtaaaactttttgctatgatttgacacaggaatcaaggttgctaagagaccacctgtgctgaatacactttgttctggcaagagcagaaaactgagaagccgtgttacctaccactacctgggattaattcagggagcgggataattctggatatg

SEQ ID NO: 12979 - DNA, 286 bp, Homo sapiens
  source 1..286: mol_type = unassigned DNA
acaatgggtggccgggcagagacgctcctcacttcctagacaggatgacggccgggaagaggctggagtgcagtggcaccatctcggcttaccgcaacctccgcctcctgggttcaaacaatactcctaccttggcctcctgagtagctgggattacaggaatcaaggttgctaagagaccacctgtgctgaatacactttgttctggcaagagcagaaaactgagaagccgtgttacctaccactacctgggattaattcagggagcgggataattctggatatg

SEQ ID NO: 12980 - DNA, 281 bp, Homo sapiens
  source 1..281: mol_type = unassigned DNA
aatccatttaacccttagtggacacagaacatgtttcagagagcacggagttgggggctggagtgcagtggcaccatctcggcttaccgcaacctccgcctcctgggttcaaacaatactcctaccttggcctcctgagtagctgggattacaggaatcaaggttgctaagagaccacctgtgctgaatacactttgttctggcaagagcagaaaactgagaagccgtgttacctaccactacctgggattaattcagggagcgggataattctggatatg

SEQ ID NO: 12981 - DNA, 898 bp, Homo sapiens
  source 1..898: mol_type = unassigned DNA
agggacttgagcatttatggattttggtatccatggttactgtatctgtggggtattctagaactaatccctcatgggtactgagggatgactgtacttaaaaaataggcacacaatctcatgagttatggtcacttacatacgaaggcttttctggttgtaattgttgttttgtcatgaagatattaaagccttggtttcagacaatttttagggaattatttcttttcttttctttttttttttttgagacggaatctccctctgtcgcccaggctggagtgcagtggcaccatctcggcttaccgcaacctccgcctcctgggttcaaacaatactcctaccttggcctcctgagtagctgggattacaggaatcaaggttgctaagagaccacctgtgctgaatacactttgttctggcaagagcagaaaactgagaagccgtgttacctaccactacctgggattaattcaggtgagaaatgggtctctactcactcctcattcctcactaattgtctattcccctcctcacttcttatttcagtctctctcttactctatttggagagagttgaaggtacccctgggagccacagactgaagaaacacaagctggagtttgaggtttctggagagaaggaaaatcactttgcaaacccgtgtattatttttgctccttgttgctgaaacacaggcaaaaggaattgttgcatgcagggaaaattctaggtgtttcttttgctaatgattattgtataatttggggcaagtaattcccttctctaggaatggagcaatttattacagaaattatcaagatagctcaaaatgggagtagacaacactggcagagtactcatttctttccccttctctttttcttattctctctt

SEQ ID NO: 12982 - DNA, 781 bp, Homo sapiens
  source 1..781: mol_type = unassigned DNA
actccattttctaatttgtttgtaaaaatgatacaaaatactaaaacataatacagttggccctccagatccatgggttccatatccatggattcaaccaaccacagattgaaaatattttgaaaaaactatgtatctctattgcatatgtacagactttttttcttgtcattgttttgtatacaatacagcataacagctatttacatagcacttatattgtattaggtattataagtaacgtatggagatgatttacagcatatgggaggatatgtgtagtttatatgtaaatactatgccatttatatcagggacttgagcatttatggattttggtatccatggttactgtatctgtggggtattctagaactaatccctcatgggtactgagggatgactgtacttaaaaaataggcacacaatctcatgagttatggtcacttacatacgaaggcttttctggttgtaattgttgttttgtcatgaagatattaaagccttggtttcagacaatttttagggaattatttcttttcttttctttttttttttttgagacggaatctccctctgtcgcccaggctggagtgcagtggcaccatctcggcttaccgcaacctccgcctcctgggttcaaacaatactcctaccttggcctcctgagtagctgggattacaggaatcaaggttgctaagagaccacctgtgctgaatacactttgttctggcaagagcagaaaactgagaagccgtgttacctaccactacctgggat

SEQ ID NO: 12983 - DNA, 771 bp, Homo sapiens
  source 1..771: mol_type = unassigned DNA
aaaaatactttttaaagtattagaacctcaattctaccaccaacagggtggcttaaaacaacagaaatttattgtgtcatttatggagaccagaagaccaagattaaggtatcggcaggaccatggcccctctgaaggctctgggggagggtctttctttgcctcttccttgcttctctggtggttgcccacagtccttggtattccttggcttgtggacacgtcactccaatatctatttcctttgtcacatgatgtctccctatgtgcctgactatgtccccatttcccacttctcacaaggactcaggtcattggattagggcccaccctaatccagcatgatctcattttgattatatcagcaaggccctatttccaaatagggtcacattcacaggtactgaggacttgggcttgaaaatgtctctaggggatgcagttcaacccacaacagctaataagtggtgggcctggtgttctgaacactcatcagtcagctgcagagtggagtgtccatgccccagggaccagtaaagatgacccattggaagtgtgacggaatctccctctgtcgcccaggctggagtgcagtggcaccatctcggcttaccgcaacctccgcctcctgggttcaaacaatactcctaccttggcctcctgagtagctgggattacaggaatcaaggttgctaagagaccacctgtgctgaatacactttgttctggcaagagcagaaaactgagaagccgtgttacctaccactacct

SEQ ID NO: 12984 - DNA, 1819 bp, Homo sapiens
  source 1..1819: mol_type = unassigned DNA
atggcggggtgagctgggcgctgctgctgcgcgtgcagacagcgggagtggttgggggtccgcccggtcgccttcctcggtcctggcctcggggctgggtgccgagcgctgggcaccgtccccgcactcagcgagcgcgacaggggcgaggccaggattccgggtcgcagttccccgggaggagggcgccctcaggtacttgaagctggtgtgtgtttcctttcagcgtcaagggttccacactgttgggagtcgctgcaagaatcggacaggcgctgagcacctgtggctgacccgacatctcagggacccatttgtgaaggctgcgaaggtggagagttaccggtgtcgaagcgccttcaagctcctggaggtgaacgagaggcaccagattctgcggcccggccttcgggtgttagactgtggggcagctcctggggcctggagtcaggtggcggtgcagaaggtcaacgccgcaggcacagatcccagctctcctgttggcttcgtgcttggggtagatcttcttcacatattccccctggaaggagcaacttttctgtgccctgctgacgtgactgacccgagaacctcacagagaatcctcgaggtgcttcctggcaggagagcagatgtgattctgagcgacatggcgcccaatgccacagggttccgggacctcgatcatgacaggctcatcagcctgtgcctgacccttctcagcgtgaccccagacatcctgcaacctggggggacattcctttgtaaaacctgggctggaagtcaaagccgtcggttacagaggagactgacagaggaattccagaatgtaaggatcatcaaacctgaagccagcaggaaagagtcatcagaagtgtacttcttggccacacagtaccacggaaggaagggcactgtgaagcagtgaggatttcttgtgccattttcataatggtcattagctccttttaagctagaaacgtagcctgagctcctgaagagttcctgggagatttgagctgattttggagatggagcaggacaagtggggagtctctctctctctttctctctctctctttttaaccaaaaagagatgacaaaactaagttcaggggccatggaaaatgaaaaagtccgctatattgtgatttgggaagagaaagttatcaagagaaagaggtgaggatggaaggatggagaaaaacagactgtgggaaggatcagaaggaatccgccgaggcagggatgggtgtgcccatgtgtgccttgacgggacttcatcttatagactgttaaactgtcacacacaaacaggctttccacccctgctctgagagcaccacgcacagatttccagttcttagtgtggctgtttaaagtagaaaatctgggggctgggtgaggccactcatgcctgtaaacccagggctttagaaggctgaggctgggggattgcttgaagtcaggagttcaagaccaacctgggcaacatagcaacaccccccatgtctacaaaaatgaaaaaccaaaaagcaaaccaaaagaaaaatctgaaatttccatctggggattaacttctgtctttctggtgaacaatatagcaattcacgcattcttcaagcagcaaaagttcccggaacaattagggaagacgtatggtctgaatttatccaggcagtgggtctgctttggtttttgctggaaatttatatcagtgtctgggctcccaagaacataaatgtaattgccaaagcaagcagtgatgtggtgtgtttattttcttttactcatctaggaacttgacgcagctttatat

SEQ ID NO: 12985 - DNA, 1601 bp, Homo sapiens
  source 1..1601: mol_type = unassigned DNA
gcggcgcgctgcaggcgcggggaacaccaatggcggggtacttgaagctggtgtgtgtttcctttcagcgtcaagggttccacactgttgggagtcgctgcaagaatcggacaggcgctgagcacctgtggctgacccgacatctcagggacccatttgtgaaggctgcgaaggtggagagttaccggtgtcgaagcgccttcaagctcctggaggtgaacgagaggcaccagattctgcggcccggccttcgggtgttagactgtggggcagctcctggggcctggagtcaggtggcggtgcagaaggtcaacgccgcaggcacagatcccagctctcctgttggcttcgtgcttggggtagatcttcttcacatattccccctggaaggagcaacttttctgtgccctgctgacgtgactgacccgagaacctcacagagaatcctcgaggtgcttcctggcaggagagcagatgtgattctgagcgacatggcgcccaatgccacagggttccgggacctcgatcatgacaggctcatcagcctgtgcctgacccttctcagcgtgaccccagacatcctgcaacctggggggacattcctttgtaaaacctgggctggaagtcaaagccgtcggttacagaggagactgacagaggaattccagaatgtaaggatcatcaaacctgaagccagcaggaaagagtcatcagaagtgtacttcttggccacacagtaccacggaaggaagggcactgtgaagcagtgaggatttcttgtgccattttcataatggtcattagctccttttaagctagaaacgtagcctgagctcctgaagagttcctgggagatttgagctgattttggagatggagcaggacaagtggggagtctctctctctctttctctctctctctttttaaccaaaaagagatgacaaaactaagttcaggggccatggaaaatgaaaaagtccgctatattgtgatttgggaagagaaagttatcaagagaaagaggtgaggatggaaggatggagaaaaacagactgtgggaaggatcagaaggaatccgccgaggcagggatgggtgtgcccatgtgtgccttgacgggacttcatcttatagactgttaaactgtcacacacaaacaggctttccacccctgctctgagagcaccacgcacagatttccagttcttagtgtggctgtttaaagtagaaaatctgggggctgggtgaggccactcatgcctgtaaacccagggctttagaaggctgaggctgggggattgcttgaagtcaggagttcaagaccaacctgggcaacatagcaacaccccccatgtctacaaaaatgaaaaaccaaaaagcaaaccaaaagaaaaatctgaaatttccatctggggattaacttctgtctttctggtgaacaatatagcaattcacgcattcttcaagcagcaaaagttcccggaacaattagggaagacgtatggtctgaatttatccaggcagtgggtctgctttggtttttgctggaaatttatatcagtgtctgggctcccaagaacataaatgtaattgccaaagcaa

SEQ ID NO: 12986 - DNA, 2511 bp, Homo sapiens
  source 1..2511: mol_type = unassigned DNA
tgcaggcgcggggaacaccaatggcggggtacttgaagctggtgtgtgtttcctttcagcgtcaagggttccacactgttgggagtcgctgcaagaatcggacaggcgctgagcacctgtggctgacccgacatctcagggacccatttgtgaaggctgcgaaggtggagagttaccggtgtcgaagcgccttcaagctcctggaggtgaacgagaggcaccagattctgcggcccggccttcgggtgttagactgtggggcagctcctggggcctggagtcaggtggcggtgcagaaggtcaacgccgcaggcacagatggagtctcactcttgcccaggctgcagtgcaatggtgtgatctcggctcactgcaacctctgcctacctggttcaagcgattctcctgcctcagcctcccaagtagctgggattacaggcgcccgccaccgcacccagctaattttttctttttgtttttttaagtagagatagggtttcactatgttggctaggctgatctcgaactcttgacctcaggtgatctgcccacctcggcctcccaaagtgctgggattacagatgtgagccatggtgcccggctactcttaatgatgtattgacatctttccccaacagcacagctaaatttccaagtcgcataagccctggggctttcctggtggccccactggggctgctccgtccggaacctagaagaggcttcatggccagggctatggattctttgctctggatgaagctgagacacagttttcatctgttttgtatcttagggttttgagtaagattttctatataaaaaggttctcctgaataatgagatcagccaaccgcccatgcaactgaagacactgtcgtcattgggaaagtttcatcctattccatgtagtgcttgcaccgtaggttctttaaccagctccctcactgtggcatcaaggttgcttttggcttttggctgggatgcgtgtgctgtggtgaatatccttgccatttatgtttcctgctgtaaagccagggtagctgcatgcactggcatttgaacagggtgagacagtccacccagagctctcccaagtctctcccaaataccttagagtagggacactggtccccatttattggtgagaaaacaggctcagggtttcatgacttgttgaaagtgcagaaatggaatgctggccccctggatctgcacatctgcctcgctgctggtttgcgatcccagctctcctgttggcttcgtgcttggggtagatcttcttcacatattccccctggaaggagcaacttttctgtgccctgctgacgtgactgacccgagaacctcacagagaatcctcgaggtgcttcctggcaggagagcagatgtgattctgagcgacatggcgcccaatgccacagggttccgggacctcgatcatgacaggctcatcagcctgtgcctgacccttctcagcgtgaccccagacatcctgcaacctggggggacattcctttgtaaaacctgggctggaagtcaaagccgtcggttacagaggagactgacagaggaattccagaatgtaaggatcatcaaacctgaagccagcaggaaagagtcatcagaagtgtacttcttggccacacagtaccacggaaggaagggcactgtgaagcagtgaggatttcttgtgccattttcataatggtcattagctccttttaagctagaaacgtagcctgagctcctgaagagttcctgggagatttgagctgattttggagatggagcaggacaagtggggagtctctctctctctttctctctctctctttttaaccaaaaagagatgacaaaactaagttcaggggccatggaaaatgaaaaagtccgctatattgtgatttgggaagagaaagttatcaagagaaagaggtgaggatggaaggatggagaaaaacagactgtgggaaggatcagaaggaatccgccgaggcagggatgggtgtgcccatgtgtgccttgacgggacttcatcttatagactgttaaactgtcacacacaaacaggctttccacccctgctctgagagcaccacgcacagatttccagttcttagtgtggctgtttaaagtagaaaatctgggggctgggtgaggccactcatgcctgtaaacccagggctttagaaggctgaggctgggggattgcttgaagtcaggagttcaagaccaacctgggcaacatagcaacaccccccatgtctacaaaaatgaaaaaccaaaaagcaaaccaaaagaaaaatctgaaatttccatctggggattaacttctgtctttctggtgaacaatatagcaattcacgcattcttcaagcagcaaaagttcccggaacaattagggaagacgtatggtctgaatttatccaggcagtgggtctgctttggtttttgctggaaatttatatcagtgtctgggctcccaagaacataaatgtaattgccaaa

SEQ ID NO: 12987 - DNA, 582 bp, Homo sapiens
  source 1..582: mol_type = unassigned DNA
aatgaaagacaaggtagaaaggtgcagtgaacatggaaatcacctcgcatgagaccgcccgcagatcccagctctcctgttggcttcgtgcttggggtagatcttcttcacatattccccctggaaggagcaacttttctgtgccctgctgacgtgactgacccgagaacctcacagagaatcctcgaggtgcttcctggcaggagagcagatgtgattctgagcgacatggcgcccaatgccacagggttccgggacctcgatcatgacaggctcatcagcctgtgcctgacccttctcagcgtgaccccagacatcctgcaacctggggggacattcctttgtaaaacctgggctggaagtcaaagccgtcggttacagaggagactgacagaggaattccagaatgtaaggatcatcaaacctgaagccagcaggaaagagtcatcagaagtgtacttcttggccacacagtaccacggaaggaagggcactgtgaagcagtgaggatttcttgtgccattttcataatggtcattagctccttttaagctagaaacgtagcctgagctcctgaagagt

SEQ ID NO: 12988 - DNA, 1570 bp, Homo sapiens
  source 1..1570: mol_type = unassigned DNA
atggccgggtacttgaagctggtgtgtgtttcctttcagcgtcaagggttccacactgttgggagtcgctgcaagaatcggacaggcgctgagcacctgtggctgacccgacatctcagggacccatttgtgaaggctgcgaaggtggagagttaccggtgtcgaagcgccttcaagctcctggaggtgaacgagaggcaccagattctgcggcccggccttcgggtgttagactgtggggcagctcctggggcctggagtcaggtggcggtgcagaaggtcaacgccgcaggcacagatcccagctctcctgttggcttcgtgcttggggtagatcttcttcacatattccccctggaaggagcaacttttctgtgccctgctgacgtgactgacccgagaacctcacagagaatcctcgaggtgcttcctggcaggagagcagatgtgattctgagcgacatggcgcccaatgccacagggttccgggacctcgatcatgacaggctcatcagcctgtgcctgacccttctcagcgtgaccccagacatcctgcaacctggggggacattcctttgtaaaacctgggctggaagtcaaagccgtcggttacagaggagactgacagaggaattccagaatgtaaggatcatcaaacctgaagccagcaggaaagagtcatcagaagtgtacttcttggccacacagtaccacggaaggaagggcactgtgaagcagtgaggatttcttgtgccattttcataatggtcattagctccttttaagctagaaacgtagcctgagctcctgaagagttcctgggagatttgagctgattttggagatggagcaggacaagtggggagtctctctctctctttctctctctctctttttaaccaaaaagagatgacaaaactaagttcaggggccatggaaaatgaaaaagtccgctatattgtgatttgggaagagaaagttatcaagagaaagaggtgaggatggaaggatggagaaaaacagactgtgggaaggatcagaaggaatccgccgaggcagggatgggtgtgcccatgtgtgccttgacgggacttcatcttatagactgttaaactgtcacacacaaacaggctttccacccctgctctgagagcaccacgcacagatttccagttcttagtgtggctgtttaaagtagaaaatctgggggctgggtgaggccactcatgcctgtaaacccagggctttagaaggctgaggctgggggattgcttgaagtcaggagttcaagaccaacctgggcaacatagcaacaccccccatgtctacaaaaatgaaaaaccaaaaagcaaaccaaaagaaaaatctgaaatttccatctggggattaacttctgtctttctggtgaacaatatagcaattcacgcattcttcaagcagcaaaagttcccggaacaattagggaagacgtatggtctgaatttatccaggcagtgggtctgctttggtttttgctggaaatttatatcagtgtctgggctcccaagaacataaatgtaattgccaaagc

SEQ ID NO: 12989 - DNA, 758 bp, Homo sapiens
  source 1..758: mol_type = unassigned DNA
gctgggaagaggttgaaccttcgcctcaaacgatgttgcgcagacgcagtgggccattctagtgccttctagaaaagggtgcaggttcgcagccctgtcaaccagctccgagccggcagcgaaacctgaagtggaccctgtggaaaatgaagctgtcgccccagaattcaccaaccggaacccccggaacctggagcttttatctgtagccaggaaagagcggggctggcggacggtgtttccctcccgtgagttctggcacaggttgcgagttataaggactcagcatcatgtagaagcacttgtggagcatcagaatggcaaggttgtggtttcggcctccactcgtgagtgggctattaaaaagcacctttatagtaccagaaatgtggtggcttgtgagagtataggacgagtgctggcacagagatgcttagaggcgggaatcaacttcatggtctaccaaccaaccccgtgggaggcagcctcagactcgatgaaacgactacaaagtgccatgacagaaggtggtgtggttctacgggaacctcagagaatctatgaataaatggaagcattaattgttttgaacatgtaaatataaatctgtcagccactacagccatcaaaagagagcatctggaagaacagccagcttggaagttttacagcaataatgttgcagtggaatattatttgtagttaaggtcatcctcctcccctttctgtttttttaaatcaagaactacgttctgccc

SEQ ID NO: 12990 - DNA, 600 bp, Homo sapiens
  source 1..600: mol_type = unassigned DNA
aaggttgtaagaagggtggagcttggagctggggtgtaactggaggggcgggcccttctccaagttagagttggggttctgagcgagtcgtgcgttttaggtttagtgtcttttccttgtccctgctcggggagcgtgaggcagatcggccggctttgctccaggcctcaggagtctcactcgcctgggcttgcacagtacattggaacgtgcgggttctattttgtattcgacgtgccggatcgaaatagagctcgcggcactgcgaagaccacagtaggaagttaaggacgggggtgcaggttcgcagccctgtcaaccagctccgagccggcagcgaaacctgaagtggaccctgtggaaaatgaagctgtcgccccagaattcaccaaccggaacccccggaacctggagcttttatctgtagccaggaaagagcggggctggcggacggtgtttccctcccgtgagttctggcacaggttgcgagttataaggactcagcatcatgtagaagcacttgtggagcatcagaatggcaaggttgtggtttcggcctccactcgtgagtgggctattaaaaagcacctttatagtacc

SEQ ID NO: 12991 - DNA, 978 bp, Homo sapiens
  source 1..978: mol_type = unassigned DNA
ggagagtttggggatctacagcagccaaaggcttgtccctgactttatatggctgctcctggcgagcgactgagtcgtccgtgaggaaaaagaggcgaggcttttccgagatcgtctcagcgatggcgcttcggtcgcggttttgggggttgttctcggtttgcaggaaccctgggtgcaggttcgcagccctgtcaaccagctccgagccggcagcgaaacctgaagtggaccctgtggaaaatgaagctgtcgccccagaattcaccaaccggaacccccggaacctggagcttttatctgtagccaggaaagagcggggctggcggacggtgtttccctcccgtgagttctggcacaggttgcgagttataaggactcagcatcatgtagaagcacttgtggagcatcagaatggcaaggttgtggtttcggcctccactcgtgagtgggctattaaaaagcacctttatagtaccagaaatgtggtggcttgtgagagtataggacgagtgctggcacagagatgcttagaggcgggaatcaacttcatggtctaccaaccaaccccgtgggaggcagcctcagactcgatgaaacgactacaaagtgccatgacagaaggtggtgtggttctacgggaacctcagagaatctatgaataaatggaagcattaattgttttgaacatgtaaatataaatctgtcagccactacagccatcaaaagagagcatctggaagaacagccagcttggaagttttacagcaataatgttgcagtggaatattatttgtagttaaggtcatcctcctcccctttctgtttttttaaatcaagaactacgttctgcccctctcttgggcttcagaagcatctaagaaaagcagtcatcaattataattaactttcaaagggcaagtcagaagttgtttataaattacaaaataaaggcatattatgaactcttattttctg

SEQ ID NO: 12992 - DNA, 1075 bp, Homo sapiens
  source 1..1075: mol_type = unassigned DNA
gctgctcctggcgagcgactgagtcgtccgtgaggaaaaagaggcgaggcttttccgagatcgtctcagcgatggcgcttcggtcgcggttttgggggttgttctcggtttgcaggaaccctggtaattagtcttgccccccttctcccagctcactcgcctgggcttgcacagtacattggaacgtgcgggttctattttgtattcgacgtgccggatcgaaatagagctcgcggcactgcgaagaccacagtaggaagttaaggacgggggtgcaggttcgcagccctgtcaaccagctccgagccggcagcgaaacctgaagtggaccctgtggaaaatgaagctgtcgccccagaattcaccaaccggaacccccggaacctggagcttttatctgtagccaggaaagagcggggctggcggacggtgtttccctcccgtgagttctggcacaggttgcgagttataaggactcagcatcatgtagaagcacttgtggagcatcagaatggcaaggttgtggtttcggcctccactcgtgagtgggctattaaaaagcacctttatagtaccagaaatgtggtggcttgtgagagtataggacgagtgctggcacagagatgcttagaggcgggaatcaacttcatggtctaccaaccaaccccgtgggaggcagcctcagactcgatgaaacgactacaaagtgccatgacagaaggtggtgtggttctacgggaacctcagagaatctatgaataaatggaagcattaattgttttgaacatgtaaatataaatctgtcagccactacagccatcaaaagagagcatctggaagaacagccagcttggaagttttacagcaataatgttgcagtggaatattatttgtagttaaggtcatcctcctcccctttctgtttttttaaatcaagaactacgttctgcccctctcttgggcttcagaagcatctaagaaaagcagtcatcaattataattaactttcaaagggcaagtcagaagttgtttataaattacaaaataaaggcatattatgaactcttattttctg

SEQ ID NO: 12993 - DNA, 2975 bp, Homo sapiens
  source 1..2975: mol_type = unassigned DNA
cttcgccgcgctcctcatctgccccgcgccgagcgccgccgccgccgccgccgccgccgctccgctgcccgcgccgcccgcggctcccgatggagactgacgcgccccagcccggcctcgcctccccggactcgccgcacgacccctgcaagatgttcatcgggggactcagttggcagactacgcaggaagggctgcgcgaatacttcggccagttcggggaggtgaaggagtgtctggtgatgcgggaccccctgaccaagagatccaggggtttcggcttcgtcactttcatggaccaggcgggggtggataaagtgctggcgcaatcgcggcacgagctcgactccaaaacaattgaccctaaggtggccttccctcggcgagcacagcccaagatggtgactcgaacgaagaagatctttgtgggggggctgtcggtgaacaccacggtggaggacgtgaagcaatattttgagcagtttgggaaggtggacgacgccatgctgatgtttgacaaaaccaccaaccggcaccgagggttcgggtttgtcacgtttgagagtgaggacatcgtggagaaagtgtgtgaaattcattttcatgaaatcaacaacaaaatggtggaatgtaagaaagctcagccaaaggaggtgatgtcgccaacgggctcagcccgggggaggtctcgagtcatgccctacggaatggacgccttcatgctgggcatcggcatgctgggttacccaggtttccaagccacaacctacgccagccggagttatacaggcctcgcccctggctacacctaccagttccccgaattccgtgtagagcggacccctctcccgagcgccccagtcctccccgagcttacagccattcctctcactgcctacggaccaatggcggcggcagcggcggcagcggctgtggttcgagggacaggctctcacccctggacgatggctccccctccaggttcgactcccagccgcacagggggcttcctggggaccaccagccccggccccatggccgagctctacggggcggccaaccaggactcgggggtcagcagttacatcagcgccgccagccctgcccccagcaccggcttcggccacagtcttgggggccctttgattgccacagccttcaccaatgggtaccactgaagcaggggacggtggcaggagcgccccagcctgcagctgactgaggaccacgagtgagccagcgagggggcgggagacctcagccgcagccgccgccccctcccctgcagcgactcggacccgctactgcctgcccccaactccccgggcccggcccctgccctgctgcccccaacagcgtctggctcccctactaacgtccccctcttcgcccttgcccccatccccacccgcccctctcccggccctgcttttatttattttggattagccggttgcccaccccagccctctggtccatccctccctccgtgccgcgcccccctaggaccgccccctccccaaaaggcttttggatttgtgcatagctggagtgaaggcggagggagcctgctacaggccgcagcccaacccctgttttttattcagatttcccctcctttaccctttccctttttttttttttttttttttttaaagaaaccttttttaaactatttctaggtttgtgaatgtgaagccccaggccgcagggggcaaggggccaggtgccccccaccagctgagaacaaagtgtctatctgggtgtgggcccctggccgcctccctccagccctggagaggagggcagggctgcggggaggccaggccgagcccctggaaccatcccgtcctgtatcatatgtaaatactgtgaggtgatgtgcccacccctctctaagacccctcgggggtgaggggctcccccctcccctgtttctgtcccctcagacaccgttactgtaagcttgcaggcctcagctgtggccacggcaggcccgctctctcaggccctcagggtcaaggccttggttggacctgcccactccaaaaacccagtgtgggggcaaagggcgtgggaagagcagggcttgcccagcgacactgctggacaggaattaactctccaaaggtctcccctgctccctacctaggttggggcttcatggtttctgctcagtctgtcccccttccccctcgacccccgcaatgagtgggcaccaggggacgctctggcgagggcagaccccaggggaaagcaaagggcgtctcagggaacccccacattctctcactgaagtttcccaccaggatgaccccacagccagagtcccttggcagcccctcaccccagaccccccttctaaggaaaaagagaggttcagagcgttggaccttcatgaacagtggcctggctggcgtggcagggccaaggcccacccactgccatcccccttctgtgtgtccctctcccccagttatgaggcccagggcctgagctctcttccccagcattgcccccacccggaaaccccacctttggagagttaattgtctgtgtgaggtgcttaacctatcagccctgagaacacaaagcaataatctttgttactgagatgcgcggctgttcgtgttttgggttttttttttttttaatgtttcctaataaaagagaagctgcattttattggtttttatttttaattttctacacgtttgagctgagtcctgagacacttagcttccctctccctcattcccggacccttccaccccactgggcccaaccatgggctcaggaccctggaattccgttttctgatttgctttgggattttttttttttttaagatgttacatggtgtttcgaagccagcaagttaccatcctccggtgtctcttctctccacatctgtaacttctttttccaggttttattttcagttttaaattcctaataaattatttgaaaacgtt

SEQ ID NO: 12994 - DNA, 698 bp, Homo sapiens
  source 1..698: mol_type = unassigned DNA
tggaccaggcgggggtggataaagtgctggcgcaatcgcggcacgagctcgactccaaaacaattgaccctaaggtggccttccctcggcgagcacagcccaagatggtgactcgaacgaagaagatctttgtgggggggctgtcggtgaacaccacggtggaggacgtgaagcaatattttgagcagtttgggaaggtggacgacgccatgctgatgtttgacaaaaccaccaaccggcaccgagggttcgggtttgtcacgtttgagagtgaggacatcgtggagaaagtgtgtgaaattcattttcatgaaatcaacaacaaaatggtggaatgtaagaaagctcagccaaaggaggtgatgtcgccaacgggctcagcccgggggaggtctcgagtcatgccctacggaatggacgccttcatgctgggcatcggcatgctgggttacccaggtttccaagccacaacctacgccagccggagttatacaggcctcgcccctggctacacctaccagttccccgccattcctctcactgcctacggaccaatggcggcggcagcggcggcagcggctgtggttcgagggacaggctctcacccctggacgatggctccccctccaggttcgactcccagccgcacagggggcttcctggggaccaccagccccggccccatggccgagctctac

SEQ ID NO: 12995 - DNA, 422 bp, Homo sapiens
  source 1..422: mol_type = unassigned DNA
tcgccccaggaggggacaccggtggggctaacccggacccccagccatcttccttgccccctgccctggcctcaaccccaccgtcccactaggggcctctccagccaaggcccaggtggacgacgccatgctgatgtttgacaaaaccaccaaccggcaccgagggttcgggtttgtcacgtttgagagtgaggacatcgtggagaaagtgtgtgaaattcattttcatgaaatcaacaacaaaatggtggaatgtaagaaagctcagccaaaggaggtgatgtcgccaacgggctcagcccgggggaggtctcgagtcatgccctacggaatggacgccttcatgctgggcatcggcatgctgggttacccaggtttccaagccacaacctacgccagccggagttatacaggcctcgccc

SEQ ID NO: 12996 - DNA, 2269 bp, Homo sapiens
  source 1..2269: mol_type = unassigned DNA
agctctcgcaggccaataacgacaggacgggccgcctggcccacccggctccacccccaagccaggcgaggcaggttccgaggttggaacacctggcgagtcctcggtgtcggtggccggcagtcatctcgcggccgttcagaattataaggctgtctgcagagatttgaaaaatggcaacaaatgaaagtgtcagcatctttagttcagcatccttggctgtggaatatgtagattcacttttacctgagaatcctctgcaagaaccatttaaaaatgcttggaactatatgttgaataattatacaaagttccagattgcaacatggggatcccttatagttcatgaagccctttatttcttattctgtttacctggatttttatttcaatttataccttatatgaaaaaatacaaaattcaaaaggataagccagagacatgggaaaaccaatggaagtgtttcaaagttcttctctttaatcacttctgtatccagctgcctttgatttgtggaacctattattttacagagtatttcaatattccttatgattgggaaagaatgccaagatggtattttcttttggcaagatgctttggttgtgcagtcattgaagatacttggcactattttctgcatagactcttacaccacaaaagaatatacaagtatattcataaagttcatcatgagtttcaggctccatttggaatggaagctgaatatgcacatcctttggagactctaattcttggaactggatttttcattggaatcgtgcttttgtgtgatcatgtaattcttctttgggcatgggtgaccattcgtttattagaaactattgatgtccatagtggttatgatattcctctcaaccctttaaatctgatccctttctatgctggttctcggcatcatgatttccaccacatgaacttcattggaaactatgcttcaacatttacatggtgggatcgaatttttggaacagactctcagtataatgcctataatgaaaagaggaagaagtttgagaaaaagactgaataaatatctcacgtaaaccttcctgaaagataaacgttttcctgaattcagaaactagtagctaacattgcttctggagagcagaaataagcatgtcttctggctactaagtgataaaaagaacattaacaacctttaattaccttcctagtgggaactttttctactttacctacaagttctatatatgtagaaatgaataaatatatatttaagtacagttttcatgaggaagttttaaaagaccatgttcctaagcttccaagaaggttttggatactagaagtattaatctatggcttttctcccagtaaaaccataggcctgaagttcacattgggtctttaaatcttttagatatatactggtcatttcagaaaattcttcatagtggtattggccttatatttaactttttttttattttttttttgagacaaagccacactctgtctccttggctggagtgtggtggcacagtctcagctcactgcaacctctgcctcccagttcaagcaattcttctgcctcagcctcccaagtagctgggattacaggcacccgccaccacgcccagctaatttttgtatttttgtagagatggggtttcacgatgttggccaggctggtctcaaacttctgacctcaagtgatctgcccaccttggcctcccaaagtgctgggattacaggtgtaagccactgcgcccggcctttttaactttaaacatgttttagaattcacctaaagatcaaaatatcatggattgaacctcatcaattgatagcagtgagtgactgaagcttccaaatcaagaaaagccggcaccaagaacttccattctaatctagagctgaccagtttgagctgattctctctttgaagagtccttcttgattgcagtgcagtactggcatttctgaatggatgtaagtggagtattttagtctaaaggcttttcaaattacttgaatttttttaaaaattgaggagctttatttctatttacccttccatttttgtatatcaaatttccattgtcattaaaaactgtatcttgaaactttgtgaactgacttgctgtatttgcactttgagctcttgaaataaatgtgatttttgtgtgattatctggtttccagttttaaacattaactgtcaccttttattcttaaacttgaaagtacagaaatcattaaattattaagttgtacaat

SEQ ID NO: 12997 - DNA, 973 bp, Homo sapiens
  source 1..973: mol_type = unassigned DNA
ccggctccacccccaagccaggcgaggcaggttccgaggttggaacacctggcgagtcctcggtgtcggtggccggcagtcatctcgcggccgttcaggtgagggggttggaggagtggctcatgagcgaggaagggggagcaggcgggctcccacccggtgctccgtgagatcgaggggagcgggttctgggtgcggatgcacgcgctgggcgggacgctggcagtggtacccgagacggggcggaaggagactggagtgaaggtgggcctaggctaagaattataaggctgtctgcagagatttgaaaaatggcaacaaatgaaagtgtcagcatctttagttcagcatccttggctgtggaatatgtagattcacttttacctgagaatcctctgcaagaaccatttaaaaatgcttggaactatatgttgaataattatacaaagttccagattgcaacatggggatcccttatagttcatgaagccctttatttcttattctgtttacctggatttttatttcaatttataccttatatgaaaaaatacaaaattcaaaaggataagccagagacatgggaaaaccaatggaagtgtttcaaagttcttctctttaatcacttctgtatccagctgcctttgatttgtggaacctattattttacagagtatttcaatattccttatgattgggaaagaatgccaagatggtattttcttttggcaagatgctttggttgtgcagtcattgaagatacttggcactattttctgcatagactcttacaccacaaaagaatatacaagtatattcataaagttcatcatgagtttcaggctccatttggaatggaagctgaatatgcacatcctttggagactctaattcttggaactggatttttcattggaatcgtgcttttgtgtgatcatgtaattcttctttgggcatgggtgaccattcgttt

SEQ ID NO: 12998 - DNA, 1789 bp, Homo sapiens
  source 1..1789: mol_type = unassigned DNA
aggcgaggcaggttccgaggttggaacacctggcgagtcctcggtgtcggtggccggcagtcatctcgcggccgttcaggataagccagagacatgggaaaaccaatggaagtgtttcaaagttcttctctttaatcacttctgtatccagctgcctttgatttgtggaacctattattttacagagtatttcaatattccttatgattgggaaagaatgccaagatggtattttcttttggcaagatgctttggttgtgcagtcattgaagatacttggcactattttctgcatagactcttacaccacaaaagaatatacaagtatattcataaagttcatcatgagtttcaggctccatttggaatggaagctgaatatgcacatcctttggagactctaattcttggaactggatttttcattggaatcgtgcttttgtgtgatcatgtaattcttctttgggcatgggtgaccattcgtttattagaaactattgatgtccatagtggttatgatattcctctcaaccctttaaatctgatccctttctatgctggttctcggcatcatgatttccaccacatgaacttcattggaaactatgcttcaacatttacatggtgggatcgaatttttggaacagactctcagtataatgcctataatgaaaagaggaagaagtttgagaaaaagactgaataaatatctcacgtaaaccttcctgaaagataaacgttttcctgaattcagaaactagtagctaacattgcttctggagagcagaaataagcatgtcttctggctactaagtgataaaaagaacattaacaacctttaattaccttcctagtgggaactttttctactttacctacaagttctatatatgtagaaatgaataaatatatatttaagtacagttttcatgaggaagttttaaaagaccatgttcctaagcttccaagaaggttttggatactagaagtattaatctatggcttttctcccagtaaaaccataggcctgaagttcacattgggtctttaaatcttttagatatatactggtcatttcagaaaattcttcatagtggtattggccttatatttaactttttttttattttttttttgagacaaagccacactctgtctccttggctggagtgtggtggcacagtctcagctcactgcaacctctgcctcccagttcaagcaattcttctgcctcagcctcccaagtagctgggattacaggcacccgccaccacgcccagctaatttttgtatttttgtagagatggggtttcacgatgttggccaggctggtctcaaacttctgacctcaagtgatctgcccaccttggcctcccaaagtgctgggattacaggtgtaagccactgcgcccggcctttttaactttaaacatgttttagaattcacctaaagatcaaaatatcatggattgaacctcatcaattgatagcagtgagtgactgaagcttccaaatcaagaaaagccggcaccaagaacttccattctaatctagagctgaccagtttgagctgattctctctttgaagagtccttcttgattgcagtgcagtactggcatttctgaatggatgtaagtggagtattttagtctaaaggcttttcaaattacttgaatttttttaaaaattgaggagctttatttctatttacccttccatttttgtatatcaaatttccattgtcattaaaaactgtatcttgaaactttgtgaactgacttgctgtat

SEQ ID NO: 12999 - DNA, 1026 bp, Homo sapiens
  source 1..1026: mol_type = unassigned DNA
agtcctcggtgtcggtggccggcagtcatctcgcggccgttcagaattataaggctgtctgcagagatttgaaaaatggcaacaaatgaaagtgtcagcatctttagttcagcatccttggctgtggaatatgtagattcacttttacctgagaatcctctgcaagaaccatttaaaaatgcttggaactatatgttgaataattatacaaagttccagattgcaacatggggatcccttatagttcatgaagccctttatttcttattctgtttacctggatttttatttcaatttataccttatatgaaaaaatacaaaattcaaaaggataagccagagacatgggaaaaccaatggaagtgtttcaaagttcttctctttaatcacttctgtatccagctgcctttgatttgtggaacctattattttacagagtatttcaatattccttatgattgggaaagaatgccaagatggtattttcttttggcaagatgctttggttgtgcagtcattgaagatacttggcactattttctgcatagactcttacaccacaaaagaatatacaagtatattcataaagttcatcatgagtttcaggctccatttggaatggaagctgaatatgcacatcctttggagactctaattcttggaactggatttttcattggaatcgtgcttttgtgtgatcatgtaattcttctttgggcatgggtgaccattcgtttattagaaactattgatgtccataggtgagtattaatttctgttcaggtataaagcataatgaaatatatttattttcatggccataagattatcatatttctaaggagactaataggagaagttaatcttcttaatgttatattaagaaaacataactgttggataaaagtttaaataatagatgtttttacattctagcctatgctgttataatttttatagtgataatgtgttattagggcaagtatatattcaggaccagcaatttccttatccttctgtaataaa

SEQ ID NO: 13000 - DNA, 482 bp, Homo sapiens
  source 1..482: mol_type = unassigned DNA
gaaggtgggcctaggctaaggtacgtgctagaaaggatgaaaacggagtgaaattcttaagtgatggaactaggctagggcatgtttcttgccctttaaaatgtgttgtcttcgggagacaggacgtagaagatagttgcagcacagggtgataggctggcgaaagttatacaaaagcaggaaccactagaaggagaattataaggctgtctgcagagatttgaaaaatggcaacaaatgaaagtgtcagcatctttagttcagcatccttggctgtggaatatgtagattcacttttacctgagaatcctctgcaagaaccatttaaaaatgcttggaactatatgttgaataattatacaaagttccagattgcaacatggggatcccttatagttcatgaagccctttatttcttattctgtttacctggatttttatttcaatttataccttatatgaaaaaatacaaaattcaaaag

SEQ ID NO: 13001 - DNA, 1536 bp, Homo sapiens
  source 1..1536: mol_type = unassigned DNA
ggaactcgccgggccacaccccctgtccagggaaggaacacgcccccggtgacagccggtacggccccgggtttgggcaacctcgattacgggcggcctccagccccgccagcagcgccccgcgcccgcccgcccgcgcccctgccgccccccggttccggccgcggaccccactctctgccgttccggctgcggctccgctgccggtagcgccgtcccccgggaccacccttcggctggcgccctcccatgctctcggccacccggagggcttgccagctcctcctcctccacagcctctttcccgtcccgaggatgggcaactcggcctcgaacatcgtcagcccccaggaggccttgccgggccggaaggaacagacccctgtagcggccaaacatcatgtcaatggcaacagaacagtcgaacctttcccagagggaacacagatggctgtatttggaatgggatgtttctggggagctgaaaggaaattctgggtcttgaaaggagtgtattcaactcaagttggttttgcaggaggctatacttcaaatcctacttataaagaagtctgctcagaaaaaactggccatgcagaagtcgtccgagtggtgtaccagccagaacacatgagttttgaggaactgctcaaggtcttctgggagaatcacgacccgacccaaggtatgcgccaggggaacgaccatggcactcagtaccgctcggccatctacccgacctctgccaagcaaatggaggcagccctgagctccaaagagaactaccaaaaggttctttcagagcacggcttcggccccatcactaccgacatccgggagggacagactttctactatgcggaagactaccaccagcagtacctgagcaagaaccccaatggctactgcggccttgggggcaccggcgtgtcctgcccagtgggtattaaaaaataatttctccccacatggtgggcctttgaggttccagtaaaaatgctttcaacaaattgggcaatgcttgtgtgattcacaatcgtggcatttaaagtgcacaaagtacaaaggaatttatacagattgggtttaccgaagtataatctataggaggcgcgatggcaagttgataaaatgtgacttatctcctaataagttatggtgggagtggagctgtgcagtttcctgtgtcttctggggtctgagtgaagatagcagggatgctgtgttcacccttcttggtagaagctaaggtgtgagctgggaggttgctggacaggatgggggaccccagaagtcctttatctgtgctctctgcccgccagtgccttacaatttgcaaacgtgtatagcctcagtgactcattcgctgaaatccttcgctttaccaaatctagacatacataaggggctttctctcccttttcagccctctctgtgcagagaaaagatgtgagtccgcttgatgaattctaatgctttgcttagagctatgagaaatgtttgttttaataaaaacctacagtccaataatgccaa

SEQ ID NO: 13002 - DNA, 788 bp, Homo sapiens
  source 1..788: mol_type = unassigned DNA
gccccgccagcagcgccccgcgcccgcccgcccgcgcccctgccgccccccggttccggccgcggaccccactctctgccgttccggctgcggctccgctgccggtagcgccgtcccccgggaccacccttcggctggcgccctcccatgctctcggccacccggagggcttgccagctcctcctcctccacagcctctttcccgtcccgaggatgggcaactcggcctcgaacatcgtcagcccccaggaggccttgccgggccggaaggaacagacccctgtagcggccaaacatcatgtcaatggcaacagaacagtcgaacctttcccagagggaacacagatggctgtatttgaaaaaactggccatgcagaagtcgtccgagtggtgtaccagccagaacacatgagttttgaggaactgctcaaggtcttctgggagaatcacgacccgacccaaggtatgcgccaggggaacgaccatggcactcagtaccgctcggccatctacccgacctctgccaagcaaatggaggcagccctgagctccaaagagaactaccaaaaggttctttcagagcacggcttcggccccatcactaccgacatccgggagggacagactttctactatgcggaagactaccaccagcagtacctgagcaagaaccccaatggctactgcggccttgggggcaccggcgtgtcctgcccagtgggtattaaaaaataatttctccccacatggtgggcctttgaggttccagtaaaaatgctttcaacaaa

SEQ ID NO: 13003 - DNA, 674 bp, Homo sapiens
  source 1..674: mol_type = unassigned DNA
cggctggcgccctcccatgctctcggccacccggagggcttgccagctcctcctcctccacagcctctttcccgtcccgaggatgggcaactcggcctcgaacatcgtcagcccccaggaggccttgccgggccggaaggaacagacccctgtagcggccaaacatcatgtcaatggcaacagaacagtcgaacctttcccagagggaacacagatggctgtatttggaatgggatgtttctggggagctgaaaggaaattctgggtcttgaaaggagtgtattcaactcaagttggttttgcaggaggctatacttcaaatcctacttataaagaagtctgctcagaaaaaactggccatgcagaagtcgtccgagtggtgtaccagccagaacacatgagttttgaggaactgctcaaggtcttctgggagaatcacgacccgacccaaggtatgcgccaggggaacgaccatggcactcagtaccgctcggccatctacccgacctctgccaagcaaatggaggcagccctgagctccaaagagaactaccaaaagctggtgcttccctgttcttcctcagccatgctggggctcactgcagcctcctctgctcaactcgcctgggtgcagccatcttcaagaaaacattattaaagcaatattattagta

SEQ ID NO: 13004 - DNA, 814 bp, Homo sapiens
  source 1..814: mol_type = unassigned DNA
tgaatgatagattattattttacattgtaggtacagccagtgtgatcagacaaagcaattcgagaactacaaaagaggaaaaaagatcagaagttcttaaatacataagggaatgcagcatttgataaagccaaacatcatgtcaatggcaacagaacagtcgaacctttcccagagggaacacagatggctgtatttggaatgggatgtttctggggagctgaaaggaaattctgggtcttgaaaggagtgtattcaactcaagttggttttgcaggaggctatacttcaaatcctacttataaagaagtctgctcagatgttcagaacaattccatgtttattagtctattcaaaagcttttagaaatctgcacagccaagtggcactgaatccagaagcatgaaaggagctgcacaacttttcctcgtaagatttacacaagcagcacgggaaatctgaggcccagacatttccttatcaacagaatactccggtggattttcaagcaggctgttcagcagaggtttcgagcaggagcccaggtgtgggaagagcggagtgtgggagtcctcgtgtgaccctctgggggtggtgatggaactgactgtatggtctgcaaaacctaaaatatttactgtcaggtgcttatgtgtcctgtcctgagcccgtttcctctcttgtaaaatggggcaatgctgcttgatgaaaccagtcaagttgtggttggattcttatatgtaataaacctgcacattgtgcacatataccctaaaacttaaagtatgataaaaataaaaaaaattgttgcaaa

SEQ ID NO: 13005 - DNA, 871 bp, Homo sapiens
  source 1..871: mol_type = unassigned DNA
agagtgagagagagaaagagggagagagagaggcagagggagagctgaggaaagaaaaaaaggcaagacttggcacagctcagtcaaatcagcttcttttgtctgctttctcggcttgagcttcaggaaagaaaaccgtcctggggtacagaaaaactcagaactttttggttttcaaacttagaaggctttttaagtctcttgggctatttgaaagtgttggtacatacaatgacgtttagtcaccagtattaagggaaataaaagcctttttcaaaacgaagcttccatagtgtccatgcatttgggaaatactatatttgattttttgcatgtatgattataccatgagagacaggattaatatagaagatggcaaggcaaatttctaattagagggaatattaattttctacaaaataaagtttgttcatcaatacaaacctgctttcaaatcaaatcagaaagacatccttcggaatgtgttcagaaccaattagtgacaacactgaagaccagaaaggcaagctgaagacaccagacttcgcttgaagggcaaacaagaaatccaaacatcatgtcaatggcaacagaacagtcgaacctttcccagagggaacacagatggctgtatttggaatgggatgtttctggggagctgaaaggaaattctgggtcttgaaaggagtgtattcaactcaagttggttttgcaggaggctatacttcaaatcctacttataaagaagtctgctcagaaaaaactggccatgcagaagtcgtccgagtggtgtaccagccagaacacatgagttttgaggaactgctcaaggtcttctgggagaatcacgacccgacccaaggtatgcgcc

SEQ ID NO: 13006 - DNA, 1706 bp, Homo sapiens
  source 1..1706: mol_type = unassigned DNA
gagtgagagagagaaagagggagagagagaggcagagggagagctgaggaaagaaaaaaaggcaagacttggcacagctcagtcaaatcagcttcttttgtctgctttctcggcttgagcttcaggaaagaaaaccgtcctggggtacagaaaaactcagaactttttggttttcaaacttagaaggctttttaagtctcttgggctatttgaaagtgttggtacatacaatgacgtttagtcaccagtattaagggaaataaaagcctttttcaaaacgaagcttccatagtgtccatgcatttgggaaatactatatttgattttttgcatgtatgattataccatgagagacaggattaatatagaagatggcaaggcaaatttctaattagagggaatattaattttctacaaaataaagtttgttcatcaatacaaacctgctttcaaatcaaatcagaaagacatccttcggaatgtgttcagaaccaattagtgacaacactgaagaccagaaaggcaagctgaagacaccagacttcgcttgaagggcaaacaagaaatccaaacatcatgtcaatggcaacagaacagtcgaacctttcccagagggaacacagatggctgtatttggaatgggatgtttctggggagctgaaaggaaattctgggtcttgaaaggagtgtattcaactcaagttggttttgcaggaggctatacttcaaatcctacttataaagaagtctgctcagaaaaaactggccatgcagaagtcgtccgagtggtgtaccagccagaacacatgagttttgaggaactgctcaaggtcttctgggagaatcacgacccgacccaaggtatgcgccaggggaacgaccatggcactcagtaccgctcggccatctacccgacctctgccaagcaaatggaggcagccctgagctccaaagagaactaccaaaaggttctttcagagcacggcttcggccccatcactaccgacatccgggagggacagactttctactatgcggaagactaccaccagcagtacctgagcaagaaccccaatggctactgcggccttgggggcaccggcgtgtcctgcccagtgggtattaaaaaataatttctccccacatggtgggcctttgaggttccagtaaaaatgctttcaacaaattgggcaatgcttgtgtgattcacaatcgtggcatttaaagtgcacaaagtacaaaggaatttatacagattgggtttaccgaagtataatctataggaggcgcgatggcaagttgataaaatgtgacttatctcctaataagttatggtgggagtggagctgtgcagtttcctgtgtcttctggggtctgagtgaagatagcagggatgctgtgttcacccttcttggtagaagctaaggtgtgagctgggaggttgctggacaggatgggggaccccagaagtcctttatctgtgctctctgcccgccagtgccttacaatttgcaaacgtgtatagcctcagtgactcattcgctgaaatccttcgctttaccaaatctagacatacataaggggctttctctcccttttcagccctctctgtgcagagaaaagatgtgagtccgcttgatgaattctaatgctttgcttagagctatgagaaatgtttgttttaataaaaacctacagtccaataa

SEQ ID NO: 13007 - DNA, 1092 bp, Homo sapiens
  source 1..1092: mol_type = unassigned DNA
aaacttagaaggctttttaagtctcttgggctatttgaaagtgttggtacatacaatgacgtttagtcaccagtattaagggaaataaaagcctttttcaaaacgaagcttccatagtgtccatgcatttgggaaatactatatttgattttttgcatgtatgattataccatgagagacaggattaatatagaagatggcaaggcaaatttctaattagagggaatattaattttctacaaaataaagtttgttcatcaatacaaacctgctttcaaatcaaatcagaaagacatccttcggaatgtgttcagaacccaaacatcatgtcaatggcaacagaacagtcgaacctttcccagagggaacacagatggctgtatttggaatgggatgtttctggggagctgaaaggaaattctgggtcttgaaaggagtgtattcaactcaagttggttttgcaggaggctatacttcaaatcctacttataaagaagtctgctcagaaaaaactggccatgcagaagtcgtccgagtggtgtaccagccagaacacatgagttttgaggaactgctcaaggtcttctgggagaatcacgacccgacccaaggtatgcgccaggggaacgaccatggcactcagtaccgctcggccatctacccgacctctgccaagcaaatggaggcagccctgagctccaaagagaactaccaaaaggtagggattgctgggctcctagcccctggcttaggccaccatgactagggccaggttctgattttagagggcagtctgctgcttttcaactggaattgtgttttatttgcacatctcttagaaatttctgtcagcctctaggagtggagccattgtgtctaatacgtgtgctaaatgaggttttaagagtaggcctgggccagggccagtggctcatgcctgtaatcccagtactttggggggccgaagcagaaggatacttgaggccaggagttcgagaccagcctgggcaacatgaagaaaccccatctctacaaaaaatacaaaaataagccaggcatggtggcctgcacctacagtcccagctacctggg

SEQ ID NO: 13008 - DNA, 1460 bp, Homo sapiens
  source 1..1460: mol_type = unassigned DNA
aaacttagaaggctttttaagtctcttgggctatttgaaagtgttggtacatacaatgacgtttagtcaccagtattaagggaaataaaagcctttttcaaaacgaagcttccatagtgtccatgcatttgggaaatactatatttgattttttgcatgtatgattataccatgagagacaggattaatatagaagatggcaaggcaaatttctaattagagggaatattaattttctacaaaataaagtttgttcatcaatacaaacctgctttcaaatcaaatcagaaagacatccttcggaatgtgttcagaacccaaacatcatgtcaatggcaacagaacagtcgaacctttcccagagggaacacagatggctgtatttggaatgggatgtttctggggagctgaaaggaaattctgggtcttgaaaggagtgtattcaactcaagttggttttgcaggaggctatacttcaaatcctacttataaagaagtctgctcagaaaaaactggccatgcagaagtcgtccgagtggtgtaccagccagaacacatgagttttgaggaactgctcaaggtcttctgggagaatcacgacccgacccaaggtatgcgccaggggaacgaccatggcactcagtaccgctcggccatctacccgacctctgccaagcaaatggaggcagccctgagctccaaagagaactaccaaaaggttctttcagagcacggcttcggccccatcactaccgacatccgggagggacagactttctactatgcggaagactaccaccagcagtacctgagcaagaaccccaatggctactgcggccttgggggcaccggcgtgtcctgcccagtgggtattaaaaaataatttctccccacatggtgggcctttgaggttccagtaaaaatgctttcaacaaattgggcaatgcttgtgtgattcacaatcgtggcatttaaagtgcacaaagtacaaaggaatttatacagattgggtttaccgaagtataatctataggaggcgcgatggcaagttgataaaatgtgacttatctcctaataagttatggtgggagtggagctgtgcagtttcctgtgtcttctggggtctgagtgaagatagcagggatgctgtgttcacccttcttggtagaagctaaggtgtgagctgggaggttgctggacaggatgggggaccccagaagtcctttatctgtgctctctgcccgccagtgccttacaatttgcaaacgtgtatagcctcagtgactcattcgctgaaatccttcgctttaccaaatctagacatacataaggggctttctctcccttttcagccctctctgtgcagagaaaagatgtgagtccgcttgatgaattctaatgctttgcttagagctatgagaaatgtttgttttaataaaaacctacagtccaataatgcc

SEQ ID NO: 13009 - DNA, 559 bp, Homo sapiens
  source 1..559: mol_type = unassigned DNA
aaaaactggccatgcagaagtcgtccgagtggtgtaccagccagaacacatgagttttgaggaactgctcaaggtcttctgggagaatcacgacccgacccaaggtatgcgccaggggaacgaccatggcactcagtaccgctcggccatctacccgacctctgccaagcaaatggaggcagccctgagctccaaagagaactaccaaaaggtacccaagcatgttcactggaagaagagaacacagactgggctgcagacggagggaagatgagtatagggactctccttgtctgtccctgtacctgcccactgccacctgtctacgtcctgagatacccagcagaggacagggttccacttggaaaattcttttgaatctcacacaagacagtaataaacatagagggagaaataacaagacattttaccatgtcttgtgtcatgtaggaaactttacatttcagaaaatatgaagacaaaaagatgaaggaaagggctttaaggatacaaaggaccttattatggaaggaaagcagtgttgtcaagagagctaaaa

SEQ ID NO: 13010 - DNA, 596 bp, Homo sapiens
  source 1..596: mol_type = unassigned DNA
aaaagaggcaggaaagacttaaggaggaggatggagtcttaaggagtgaaacttgaacttcacgctgggtttgctgaccttgaacatgctggattctgcttacagaatttgacagctgcttcatatctttggttttacttttcctctttgttattctcttggcaattagaagaaccgaagaggccagagtcctccgaagacgcctgcttggaagttgagatgctgttgctgaaactgctagaatgccaggcatgctatcacctgcagctttgagacgtcacgctgacagtatcacaggaaaacagccttttgtgggccgtcctctgtgtgttcacaccgtgtcgtttttaagctttaaaggaaactgacaaaagcttcttttctctctgtcttgagcttcactgcgtattcttaaccatgtggagctgggagctaacgcatcacagccaactgtatctggagtgcatttgctcatatagcccttattttattttttagtcttatttttagtttcctttgaatataataataaaaaaaaaaaacccaatcattgaattcttagcttcagccaatatagtgtgaggttagacatattg

SEQ ID NO: 13011 - DNA, 2241 bp, Homo sapiens
  source 1..2241: mol_type = unassigned DNA
cttcccctcggaggaaaggctcagctcccagcgcgcccctcccgtctccgcagcaaaaaagtttgagtcgccgctgccgggttgccagcggagtcgcgcgtcgggagctacgtagggcagagaagtcatggcttctccgtccaaaggcaatgacttgttttcgcccgacgaggagggcccagcagtggtggccggaccaggcccggggcctgggggcgccgagggggccgcggaggagcgccgcgtcaaggtctccagcctgcccttcagcgtggaggcgctcatgtccgacaagaagccgcccaaggaggcgtccccgctgccggccgaaagcgcctcggccggggccaccctgcggccactgctgctgtcggggcacggcgctcgggaagcgcacagccccgggccgctggtgaagcccttcgagaccgcctcggtcaagtcggaaaattcagaagatggagcggcgtggatgcaggaacccggccgatattcgccgccgccaagacatatgagccctaccacctgcaccctgaggaaacacaagaccaatcggaagccgcgcacgccctttaccacatcccagctcctcgccctggagcgcaagttccgtcagaaacagtacctctccattgcagagcgtgcagagttctccagctctctgaacctcacagagacccaggtcaaaatctggttccagaaccgaagggccaaggcgaaaagactgcaggaggcagaactggaaaagctgaaaatggctgcaaaacctatgctgccctccagcttcagtctccctttccccatcagctcgcccctgcaggcagcgtccatatatggagcatcctacccgttccatagacctgtgcttcccatcccgcctgtgggactctatgccacgccagtgggatatggcatgtaccacctgtcctaaggaagaccagatcaatagactccatgatggatgcttgtttcaaagggtttcctctccctctccacgaaggcagtaccagccagtactcctgctctgctaaccctgcgtgcaccaccctaagcggctaggctgacagggccacacgacatagctgaaatttgttctgtaggcggaggcaccaagccctgttttcttggtgtaatcttccagatgcccccttttcctttcacaaagattggctctgatggtttttatgtataaatatatatatataataaaatataatacatttttatacagcagacgtaaaaattcaaattattttaaaaggcaaaatttatatacatatgtgctttttttctatatctcaccttcccaaaagacactgtgtaagtccatttgttgtattttcttaaagagggagacaaattatttgcaaaatgtgctaaagtcaatgatttttacgggattattgacttctgcttatggaaaacaaagaaacagacacaatgcacacagaaaatattagatatggagagattattcaaagtgaaggggacacatcatatttctgcattttacttgcattaaaagaaacctctttatatactacagttgttcctatctctcccccgccccccaccgccccaccacacacatatttttaaagtttttccttttttaagaatatttttgtaagaccaatacctgggatgagaagaatcctgagactgcctggaggtgaggtagaaaattagaaatacttcctaattcttctcaaggctgttggtaactttatttcagataattggagagtaaaatgttaaaacctgttgagaggaattgatggtttctgagaaatactaggtacattcatcctcacagattgcaaaggtgatttgggtgggggtttagtaattttctgcttaaaaaatgagtatcttgtaaccattacctatatgctaaatattcttgaacaattagtagatccagaaagaaaaaaaaatatgctttctctgtgtgtgtacctgttgtatgtcctaaacttattagaaaattttatatacttttttacatgttggggggcagaaggtaaagccatgttttgacttggtgaaaatgggattgtcaaacagcccattaagttccctggtatttcaccttcctgtccatctgtcccctccctccggtatacctttatccctttgaaagggtgcttgtacaatttgatatattttattgaagagttatctcttattctgaattaaattaagcatttgttttattgcagtaaagtttgtccaaactca

SEQ ID NO: 13012 - DNA, 1188 bp, Homo sapiens
  source 1..1188: mol_type = unassigned DNA
gccgctgccgggttgccagcggagtcgcgcgtcgggagctacgtagggcagagaagtcatggcttctccgtccaaaggcaatgacttgttttcgcccgacgaggagggcccagcagtggtggccggaccaggcccggggcctgggggcgccgagggggccgcggaggagcgccgcgtcaaggtctccagcctgcccttcagcgtggaggcgctcatgtccgacaagaagccgcccaaggaggcgtccccgctgccggccgaaagcgcctcggccggggccaccctgcggccactgctgctgtcggggcacggcgctcgggaagcgcacagccccgggccgctggtgaagcccttcgagaccgcctcggtcaagtcggaaaattcagaagatggagcggcgtggatgcaggaacccggccgatattcgccgccgccaagtgagtgcgcgccggggcaggagtaggaggacatatgagccctaccacctgcaccctgaggaaacacaagaccaatcggaagccgcgcacgccctttaccacatcccagctcctcgccctggagcgcaagttccgtcagaaacagtacctctccattgcagagcgtgcagagttctccagctctctgaacctcacagagacccaggtcaaaatctggttccagaaccgaagggccaaggcgaaaagactgcaggaggcagaactggaaaagctgaaaatggctgcaaaacctatgctgccctccagcttcagtctccctttccccatcagctcgcccctgcaggcagcgtccatatatggagcatcctacccgttccatagacctgtgcttcccatcccgcctgtgggactctatgccacgccagtgggatatggcatgtaccacctgtcctaaggaagaccagatcaatagactccatgatggatgcttgtttcaaagggtttcctctccctctccacgaaggcagtaccagccagtactcctgctctgctaaccctgcgtgcaccaccctaagcggctaggctgacagggccacacgacatagctgaaatttgttctgtaggcggaggcaccaagccctgttttcttggtgtaatcttccagatgcccccttttcctttcacaaagattggctctgatggtttttatgtataaatatatatatataataaaatataatacatttttata

SEQ ID NO: 13013 - DNA, 1542 bp, Homo sapiens
  source 1..1542: mol_type = unassigned DNA
atgttcgccgaccgttgactattctctacaaaccacaaagacattggaacactatacctattattcggcgcatgagctggagtcctaggcacagctctaagcctccttattcgagccgagctgggccagccaggcaaccttctaggtaacgaccacatctacaacgttatcgtcacagcccatgcatttgtaataatcttcttcatagtaatacccatcataatcggaggctttggcaactgactagttcccctaataatcggtgcccccgatatggcgtttccccgcataaacaacataagcttctgactcttacctccctctctcctactcctgctcgcatctgctatagtggaggccggagcaggaacaggttgaacagtctaccctcccttagcagggaactactcccaccctggagcctccgtagacctaaccatcttctccttacacctagcaggtgtctcctctatcttaggggccatcaatttcatcacaacaattatcaatataaaaccccctgccataacccaataccaaacgcccctcttcgtctgatccgtcctaatcacagcagtcctacttctcctatctctcccagtcctagctgctggcatcactatactactaacagaccgcaacctcaacaccaccttcttcgaccccgccggaggaggagaccccattctataccaacacctattctgatttttcggtcaccctgaagtttatattcttatcctaccaggcttcggaataatctcccatattgtaacttactactccggaaaaaaagaaccatttggatacataggtatggtctgagctatgatatcaattggcttcctagggtttatcgtgtgagcacaccatatatttacagtaggaatagacgtagacacacgagcatatttcacctccgctaccataatcatcgctatccccaccggcgtcaaagtatttagctgactcgccacactccacggaagcaatatgaaatgatctgctgcagtgctctgagccctaggattcatctttcttttcaccgtaggtggcctgactggcattgtattagcaaactcatcactagacatcgtactacacgacacgtactacgttgtagcccacttccactatgtcctatcaataggagctgtatttgccatcataggaggcttcattcactgatttcccctattctcaggctacaccctagaccaaacctacgccaaaatccatttcactatcatattcatcggcgtaaatctaactttcttcccacaacactttctcggcctatccggaatgccccgacgttactcggactaccccgatgcatacaccacatgaaacatcctatcatctgtaggctcattcatttctctaacagcagtaatattaataattttcatgatttgagaagccttcgcttcgaagcgaaaagtcctaatagtagaagaaccctccataaacctggagtgactatatggatgccccccaccctaccacacattcgaagaacccgtatacataaaatctaga

SEQ ID NO: 13014 - DNA, 1378 bp, Homo sapiens
  source 1..1378: mol_type = unassigned DNA
atgctaaaactaatcgtcccaacaattatattactaccactgacatgactttccaaaaaacacataatttgaatcaacacaaccacccacagcctaattattagcatcatccctctactattttttaaccaaatcaacaacaacctatttagctgttccccaaccttttcctccgaccccctaacaacccccctcctaatactaactacctgactcctacccctcacaatcatggcaagccaacgccacttatccagtgaaccactatcacgaaaaaaactctacctctctatactaatctccctacaaatctccttaattataacattcacagccacagaactaatcatattttatatcttcttcgaaaccacacttatccccaccttggctatcatcacccgatgaggcaaccagccagaacgcctgaacgcaggcacatacttcctattctacaccctagtaggctcccttcccctactcatcgcactaatttacactcacaacaccctaggctcactaaacattctactactcactctcactgcccaagaactatcaaactcctgagccaacaacttaatatgactagcttacacaatagcttttatagtaaagatacctctttacggactccacttatgactccctaaagcccatgtcgaagcccccatcgctgggtcaatagtacttgccgcagtactcttaaaactaggcggctatggtataatacgcctcacactcattctcaaccccctgacaaaacacatagcctaccccttccttgtactatccctatgaggcataattataacaagctccatctgcctacgacaaacagacctaaaatcgctcattgcatactcttcaatcagccacatagccctcgtagtaacagccattctcatccaaaccccctgaagcttcaccggcgcagtcattctcataatcgcccacgggcttacatcctcattactattctgcctagcaaactcaaactacgaacgcactcacagtcgcatcataatcctctctcaaggacttcaaactctactcccactaatagctttttgatgacttctagcaagcctcgctaacctcgccttaccccccactattaacctactgggagaactctctgtgctagtaaccacgttctcctgatcaaatatcactctcctacttacaggactcaacatactagtcacagccctatactccctctacatatttaccacaacacaatggggctcactcacccaccacattaacaacataaaaccctcattcacacgagaaaacaccctcatgttcatacacctatcccccattctcctcctatccctcaaccccgacatcattaccgggttttcctctt

SEQ ID NO: 13015 - DNA, 581 bp, Homo sapiens
  source 1..581: mol_type = unassigned DNA
gcgaacccgcgtgcaacctgtcccgactctagccgcctcttcagctcgccatggatcccaactgctcctgcgccgccggtgactcctgcacctgcgccggctcctgcaaatgcaaagagtgcaaatgcacctcctgcaagaaaagtaagtgggatcctctctttcctctaccccttccctgtcctccagcctgtcccctctccaccatcctcaggggaattaaagcagtctggggatgccccattgcgcggaaattgttgcctcctcagtgatccttatcagggagagcaggaatccttattcccggtgtcgctagtactcatctctgccgcctcctgtctgcccccaggctgctgctcctgctgccctgtgggctgtgccaagtgtgcccagggctgcatctgcaaaggggcgtcggacaagtgcagctgctgcgcctgatgctgggacagccccgctcccagatgtaaagaacgcgacttccacaaacctggattttttatgtacaaccctgaccgtgaccgtttgctatattcctttttctatgaaataatgtgaatgataataaaacagctttgact

SEQ ID NO: 13016 - DNA, 416 bp, Homo sapiens
  source 1..416: mol_type = unassigned DNA
ggctggggatgcccagtgtagactgtagcgctagagaagcaatttctgacccctctttctttctctggtcactcaatttcaggacaggagttgctccttcccaaagagttttggggtgactcctgcacctgcgccggctcctgcaaatgcaaagagtgcaaatgcacctcctgcaagaaaagctgctgctcctgctgccctgtgggctgtgccaagtgtgcccagggctgcatctgcaaaggggcgtcggacaagtgcagctgctgcgcctgatgctgggacagccccgctcccagatgtaaagaacgcgacttccacaaacctggattttttatgtacaaccctgaccgtgaccgtttgctatattcctttttctatgaaataatgtgaatgataataaaacagctttgacttga

SEQ ID NO: 13017 - DNA, 903 bp, Homo sapiens
  source 1..903: mol_type = unassigned DNA
tccaagtcccagcgaacccgcgtgcaacctgtcccgactctagccgcctcttcagctcgccatggatcccaactgctcctgcgccgccggtaagaggctggggatgcccagtgtagactgtagcgctagagaagcaatttctgacccctctttctttctctggtcactcaatttcaggacaggagttgctccttcccaaagagttttggggtatctttctctccattctaggttattcggagccccctttttaccgttaaggagatctgagttaatggcttgctcaagttcccaggaatcggttgtggactgaggaactcggccccgggctcttagtacgccgtcccttgttcaggtatccagggacggttctcacctctgtcttttctccttgcaggtgactcctgcacctgcgccggctcctgcaaatgcaaagagtgcaaatgcacctcctgcaagaaaagtaagtgggatcctctctttcctctaccccttccctgtcctccagcctgtcccctctccaccatcctcaggggaattaaagcagtctggggatgccccattgcgcggaaattgttgcctcctcagtgatccttatcagggagagcaggaatccttattcccggtgtcgctagtactcatctctgccgcctcctgtctgcccccaggctgctgctcctgctgccctgtgggctgtgccaagtgtgcccagggctgcatctgcaaaggggcgtcggacaagtgcagctgctgcgcctgatgctgggacagccccgctcccagatgtaaagaacgcgacttccacaaacctggattttttatgtacaaccctgaccgtgaccgtttgctatattcctttttctatgaaataatgtgaatgataataaaacagctttgacttga

SEQ ID NO: 13018 - DNA, 786 bp, Homo sapiens
  source 1..786: mol_type = unassigned DNA
aagcagcattcccaagtcccgctttcacccgcgcgctaacggctcaggttcgagtacaggacaggagggaggggagctgtgcacacggcggaggcgcacggcgtgggcacccagcacccggtacactgtgtcctcccgctgcacccagccccttccgcgccgaggcgtccccgaggcgcaagtgggccgccttcagggaactgaccgcccgcggcccgtgtgcagagccgggtgcgcccggcccagtgcgcgcggccgggtgtttcgcctggagccgcaagtgactcagcgcggggcgtgtgcaggcagcgcccggccggggcggggcttttgcactcgtcccggctctttctagctataaacactgcttgccgcgctgcactccaccacgcctcctccaagtcccagcgaacccgcgtgcaacctgtcccgactctagccgcctcttcagctcgccatggatcccaactgctcctgcgccgccggtgactcctgcacctgcgccggctcctgcaaatgcaaagagtgcaaatgcacctcctgcaagaaaagctgctgctcctgctgccctgtgggctgtgccaagtgtgcccagggctgcatctgcaaaggggcgtcggacaagtgcagctgctgcgcctgatgctgggacagccccgctcccagatgtaaagaacgcgacttccacaaacctggattttttatgtacaaccctgaccgtgaccgtttgctatattcctttttctatgaaataatgtgaatgataataaaacagctttgacttga

SEQ ID NO: 13019 - DNA, 688 bp, Homo sapiens
  source 1..688: mol_type = unassigned DNA
accacgcctcctccaagtcccagcgaacccgcgtgcaacctgtcccgactctagccgcctcttcagctcgccatggatcccaactgctcctgcgccgccggtaagaggctggggatgcccagtgtagactgtagcgctagagaagcaatttctgacccctctttctttctctggtcactcaatttcaggacaggagttgctccttcccaaagagttttggggtatctttctctccattctaggttattcggagccccctttttaccgttaaggagatctgagttaatggcttgctcaagttcccaggaatcggttgtggactgaggaactcggccccgggctcttagtacgccgtcccttgttcaggtatccagggacggttctcacctctgtcttttctccttgcaggtgactcctgcacctgcgccggctcctgcaaatgcaaagagtgcaaatgcacctcctgcaagaaaagctgctgctcctgctgccctgtgggctgtgccaagtgtgcccagggctgcatctgcaaaggggcgtcggacaagtgcagctgctgcgcctgatgctgggacagccccgctcccagatgtaaagaacgcgacttccacaaacctggattttttatgtacaaccctgaccgtgaccgtttgctatattcctttttctatgaaataatgtgaatgat

SEQ ID NO: 13020 - DNA, 514 bp, Homo sapiens
  source 1..514: mol_type = unassigned DNA
ttcagcaacccgtctgaacagatctggcgtcctggagaattctagaatgaaggggaagagaggcagggaagagctgggaaatacgcaaagcgcctttttctccactttcggagatgccaagccgcgcgtccagttgcttggagaagcccgttcaccgcctccagctgctgctctcctcgacatggaccctgagacctgcccctgcccttctggtggctcctgcacctgcgcggactcctgcaagtgcgagggatgcaaatgcacctcctgcaagaagagctgctgctcctgctgccctgcggagtgtgagaagtgtgccaaggactgtgtgtgcaaaggcggagaggcagctgaggcagaagcagagaagtgcagctgctgccagtgagaaggcacccctccgtgtggagcacgtggagatagtgccaggtggctcagtgccacctatgcctgtggtgaagtgtggctggtgtccccttcccctgctgaccttggaggaatgacaataaatccc

SEQ ID NO: 13021 - DNA, 421 bp, Homo sapiens
  source 1..421: mol_type = unassigned DNA
ttcagcaacccgtctgaacagatctggcgtcctggagaattctagaatgaaggggaagagaggcagggaagagctgggaaatacgcaaagcgcctttttctccactttcggagatggtggctcctgcacctgcgcggactcctgcaagtgcgagggatgcaaatgcacctcctgcaagaagagctgctgctcctgctgccctgcggagtgtgagaagtgtgccaaggactgtgtgtgcaaaggcggagaggcagctgaggcagaagcagagaagtgcagctgctgccagtgagaaggcacccctccgtgtggagcacgtggagatagtgccaggtggctcagtgccacctatgcctgtggtgaagtgtggctggtgtccccttcccctgctgaccttggaggaatgacaataaatcccatg

SEQ ID NO: 13022 - DNA, 569 bp, Homo sapiens
  source 1..569: mol_type = unassigned DNA
acacacggcaggggcgggcgacagatgcagtgcgtgcgccggagcccaagcgcacaaacggaaagagcgggcgcggtgcgcaggggcgggcgcccagcgggcttggcatgcgcgcccccgcccgaggctataaaagcatcgccacctgctgccactagccaagccgcgcgtccagttgcttggagaagcccgttcaccgcctccagctgctgctctcctcgacatggaccctgagacctgcccctgcccttctggtggctcctgcacctgcgcggactcctgcaagtgcgagggatgcaaatgcacctcctgcaagaagagctgctgctcctgctgccctgcggagtgtgagaagtgtgccaaggactgtgtgtgcaaaggcggagaggcagctgaggcagaagcagagaagtgcagctgctgccagtgagaaggcacccctccgtgtggagcacgtggagatagtgccaggtggctcagtgccacctatgcctgtggtgaagtgtggctggtgtccccttcccctgctgaccttggaggaatgacaataaatcccatgaacagcatga

SEQ ID NO: 13023 - DNA, 1550 bp, Homo sapiens
  source 1..1550: mol_type = unassigned DNA
cgtccagttgcttggagaagcccgttcaccgcctccagctgctgctctcctcgacatggaccctgagacctgcccctgcccttctggtgagcccccgcccccgctcgcatcctgcgcactgcgcgcccttgtacctgcaaagaaacccacgccctgcgccttcgctcaaggacacttgggggaagggcccctgattccctattcttcacctcgtgaagggcgggcatgcctgtgtcgcggagaacagggagacttggcaccccatctcctcgtgacaggcgtggggacccgagttcgtccacattaacccttcctgtggcgtcgccctctctaggtggctcctgcacctgcgcggactcctgcaagtgcgagggatgcaaatgcacctcctgcaagaagagtgagtgcggggacccttcccctctgccgccgccccctctgctctgcggagtcggtgtctcaccacgcaggatgtggagagacagccaggccccgatcccgtggtttctgactcttgctggaatagaaccacccgggcagacattaaaatacagatgcccctgccccacacccaggaattgatggcctaggcgtgggacgagaggtttttgtaaatccccagaagactccaatggcagctgggattgaggactgccacactggtccaacctttcccgacccatccctcaaaaactccccaaaacctggggaagccattagtgaggctgcggctcagctctggagttccggtcccttggcctctctccggccttacggatcctctcagtttgatctcaaaatctccccagctcacggcagtgtaatatgcatagggagtaagaggtgggaggaaggctcccttcttccctaggtatgaaaccaggcacaggtccccaccgcctccccacggctttcctgggccccttacatctgcaccatatctgcccctcccaagtttatcctttgaggcccctttcaaggtcgtttaccctgtgatgctttctccttaaggcctagtacccacctaagctgggcttaagcccaccagcccccaggacttcctggcatccacccaaggggctctggtcatttcctgggtacctcactcctgtggaggtgcaggatgccactgccgcgacatagatgctgagtcaaagcaggtgtgagactaagaagggggctgcgactagccctggctgaatgaaccaggatgactccccacccagcacccttccctcccctttgatggggacgaattgggggagtgtgcatcagagagtggtcatcttccattttatctgcaggctgctgctcctgctgccctgcggagtgtgagaagtgtgccaaggactgtgtgtgcaaaggcggagaggcagctgaggcagaagcagagaagtgcagctgctgccagtgagaaggcacccctccgtgtggagcacgtggagatagtgccaggtggctcagtgccacctatgcctgtggtgaagtgtggctggtgtccccttcccctgctgaccttggaggaatgacaataaatcccatgaacagca

SEQ ID NO: 13024 - DNA, 579 bp, Homo sapiens
  source 1..579: mol_type = unassigned DNA
cagttgcttggagaagcccgttcaccgcctccagctgctgctctcctcgacatggaccctgagacctgcccctgcccttctggtggctcctgcacctgcgcggactcctgcaagtgcgagggatgcaaatgcacctcctgcaagaagagtgagtgcggggacccttcccctctgccgccgccccctctgctctgcggagtcggtgtctcaccacgcaggatgtggagagacagccaggccccgatcccgtggtttctgactcttgctggaatagaaccacccgggcagacattaaaatacagatgcccctgccccacacccaggaattgatggcctaggcgtgggacgagaggtttttgtaaatccccagaagactccaatggcagctgggattgaggactgccacactggtccaacctttcccgacccatccctcaaaaactccccaaaacctggggaagccattagtgaggctgcggctcagctctggagttccggtcccttggcctctctccggccttacggatcctctcagtttgatctcaaaatctccccagctcacggcagtgtaatatgcat

SEQ ID NO: 13025 - DNA, 448 bp, Homo sapiens
  source 1..448: mol_type = unassigned DNA
gcttggagaagcccgttcaccgcctccagctgctgctctcctcgacatggaccctgagacctgcccctgcccttctggcgtggggacccgagttcgtccacattaacccttcctgtggcgtcgccctctctaggtggctcctgcacctgcgcggactcctgcaagtgcgagggatgcaaatgcacctcctgcaagaagagctgctgctcctgctgccctgcggagtgtgagaagtgtgccaaggactgtgtgtgcaaaggcggagaggcagctgaggcagaagcagagaagtgcagctgctgccagtgagaaggcacccctccgtgtggagcacgtggagatagtgccaggtggctcagtgccacctatgcctgtggtgaagtgtggctggtgtccccttcccctgctgaccttggaggaatgacaataaatcccatgaacagcatga

SEQ ID NO: 13026 - DNA, 2006 bp, Homo sapiens
  source 1..2006: mol_type = unassigned DNA
cccgccgcaccacgctcccgagctcccccgcggcctggagtggtgcgccccggccccgccccctgacgccggtgagggggcgtggccccgtcacgtgacggggagtgacctcgccgccgggcgccatgggagcttcggacccggaagtggcgccctgggctcgcggcggtgccgcggggatggcgggagccggagctggagccggagctcgcggcggagcggcggcgggggtcgaggctcgagctcgcgatccaccgcccgcgcaccgcgcacatcctcgccaccctcggcctgcggctcagccctcggcccgcaggatggatggcgggtcagggggcctggggtctggggacaacgccccgaccactgaggctcttttcgtggcactgggcgcgggcgtgacggcgctcagccatcccctgctctacgtgaagctgctcatccaggtgggtcatgagccgatgccccccacccttgggaccaatgtgctggggaggaaggtcctctatctgccgagcttcttcacctacgccaagtacatcgtgcaagtggatggtaagatagggctgttccgaggcctgagtccccggctgatgtccaacgccctctctactgtgactcggggtagcatgaagaaggttttccctccagatgagattgagcaggtttccaacaaggatgatatgaagacttccctgaagaaagttgtgaaggagacctcctacgagatgatgatgcagtgtgtgtcccgcatgttggcccaccccctgcatgtcatctcaatgcgctgcatggtccagtttgtgggacgggaggccaagtacagtggtgtgctgagctccattgggaagattttcaaagaggaagggctgctgggattcttcgttggattaatccctcacctcctgggcgatgtggttttcttgtggggctgtaacctgctggcccacttcatcaatgcctacctggtggatgacagcttcagccaggccctggccatccggagctataccaagttcgtgatggggattgcagtgagcatgctgacctaccccttcctgctagttggcgacctcatggctgtgaacaactgcgggctgcaagctgggctccccccttactccccagtgttcaaatcctggattcactgctggaagtacctgagtgtgcagggccagctcttccgaggctccagcctgcttttccgccgggtgtcatcaggatcatgctttgccctggagtaacctgaatcatctaaaaaacacggtctcaacctggccaccgtgggtgaggcctgaccaccttgggacacctgcaagacgactccaacccaacaacaaccagatgtgctccagcccagccgggcttcagttccatatttgccatgtgtctgtccagatgtggggttgagcgggggtggggctgcacccagtggattgggtcacccggcagacctagggaaggtgaggcgaggtggggagttggcagaatccccatacctcgcagatttgctgagtctgtcttgtgcagagggccagagaatggcttatgggggcccaggttggatggggaaaggctaatggggtcagaccccaccccgtctacccctccagtcagcccagcgcccatcctgcagctcagctgggagcatcattctcctgctttgtacatagggtgtggtcccctggcacgtggccaccatcatgtctaggcctatgctaggaggcaaatggccaggctctgcctgtgtttttctcaacactacttttctgatatgagggcagcacctgcctctgaatgggaaatcatgcaactactcagaatgtgtcctcctcatctaatgctcatctgtttaatggtgatgcctcgcgtacaggatctggttacctgtgcagttgtgaatacccagaggttgggcagatcagtgtctctagtcctacccagttttaaagttcatggtaagatttgacctcatctcccgcaaataaatgtattggtgatttgga

SEQ ID NO: 13027 - DNA, 2057 bp, Homo sapiens
  source 1..2057: mol_type = unassigned DNA
cccgccgcaccacgctcccgagctcccccgcggcctggagtggtgcgccccggccccgccccctgacgccggtgagggggcgtggccccgtcacgtgacggggagtgacctcgccgccgggcgccatgggagcttcggacccggaagtggcgccctgggctcgcggcggtgccgcggggatggcgggagccggagctggagccggagctcgcggcggagcggcggcgggggtcgaggctcgagctcgcgatccaccgcccgcgcaccgcgcacatcctcgccaccctcggcctgcggctcagccctcggcccgcaggatggatggcgggtcagggggcctggggtctggggacaacgccccgaccactgaggctcttttcgtggcactgggcgcgggcgtgacggcgctcagccatcccctgctctacgtgaagctgctcatccaggtgggtcatgagccgatgccccccacccttgggaccaatgtgctggggaggaaggtcctctatctgccgagcttcttcacctacgccaagtacatcgtgcaagtggatggtaagatagggctgttccgaggcctgagtccccggctgatgtccaacgccctctctactgtgactcggggtagcatgaagaaggttttccctccagatgagattgagcaggtttccaacaaggatgatatgaagacttccctgaagaaagttgtgaaggagacctcctacgagatgatgatgcagtgtgtgtcccgcatgttggcccaccccctgcatgtcatctcaatgcgctgcatggtccagtttgtgggacgggaggccaagtacagtggtgtgctgagctccattgggaagattttcaaagaggaagggctgctgggattcttcgttggattaatccctcacctcctgggcgatgtggttttcttgtggggctgtaacctgctggcccacttcatcaatgcctacctggtggatgacagcgtgagtgacaccccaggggggctgggaaacgaccagaatccaggttcccagttcagccaggccctggccatccggagctataccaagttcgtgatggggattgcagtgagcatgctgacctaccccttcctgctagttggcgacctcatggctgtgaacaactgcgggctgcaagctgggctccccccttactccccagtgttcaaatcctggattcactgctggaagtacctgagtgtgcagggccagctcttccgaggctccagcctgcttttccgccgggtgtcatcaggatcatgctttgccctggagtaacctgaatcatctaaaaaacacggtctcaacctggccaccgtgggtgaggcctgaccaccttgggacacctgcaagacgactccaacccaacaacaaccagatgtgctccagcccagccgggcttcagttccatatttgccatgtgtctgtccagatgtggggttgagcgggggtggggctgcacccagtggattgggtcacccggcagacctagggaaggtgaggcgaggtggggagttggcagaatccccatacctcgcagatttgctgagtctgtcttgtgcagagggccagagaatggcttatgggggcccaggttggatggggaaaggctaatggggtcagaccccaccccgtctacccctccagtcagcccagcgcccatcctgcagctcagctgggagcatcattctcctgctttgtacatagggtgtggtcccctggcacgtggccaccatcatgtctaggcctatgctaggaggcaaatggccaggctctgcctgtgtttttctcaacactacttttctgatatgagggcagcacctgcctctgaatgggaaatcatgcaactactcagaatgtgtcctcctcatctaatgctcatctgtttaatggtgatgcctcgcgtacaggatctggttacctgtgcagttgtgaatacccagaggttgggcagatcagtgtctctagtcctacccagttttaaagttcatggtaagatttgacctcatctcccgcaaataaatgtattggtgatttgga

SEQ ID NO: 13028 - DNA, 629 bp, Homo sapiens
  source 1..629: mol_type = unassigned DNA
atccctcttaccgggtctccttctcgggactcccttcagtccacttaccccgtttctgccccccaggccttctctgggcagtgactgtgagggctgacaggaaaggcatgtgcagcgtgcttgtgaggagctcagcacagagggtggggtgagggcatgtgttgctgaagtctgcatcctgaggtgcctgtggcaaaccactcttcccttctgtctcctcagttcagccaggccctggccatccggagctataccaagttcgtgatggggattgcagtgagcatgctgacctaccccttcctgctagttggcgacctcatggctgtgaacaactgcgggctgcaagctgggctccccccttactccccagtgttcaaatcctggattcactgctggaagtacctgagtgtgcagggccagctcttccgaggctccagcctgcttttccgccgggtgtcatcaggatcatgctttgccctggagtaacctgaatcatctaaaaaacacggtctcaacctggccaccgtgggtgaggcctgaccaccttgggacacctgcaagacgactccaacccaacaacaaccagatgtgctccagcccagccgggcttcagttccatatttgccatg

SEQ ID NO: 13029 - DNA, 602 bp, Homo sapiens
  source 1..602: mol_type = unassigned DNA
atgcagtgtgtgtcccgcatgttggcccaccccctgcatgtcatctcaatgcgctgcatggtccagtttgtgggacgggaggccaagtacagctgtcctgcggggccaccatcccaggaagctcagctgccatggtgcctcattttggggtcattaatgggaaattggcccattcccctagactgattatgagtggtgtgctgagctccattgggaagattttcaaagaggaagggctgctgggattcttcgttggattaatccctcacctcctgggcgatgtggttttcttgtggggctgtaacctgctggcccacttcatcaatgcctacctggtggatgacagcttcagccaggccctggccatccggagctataccaagttcgtgatggggattgcagtgagcatgctgacctaccccttcctgctagttggcgacctcatggctgtgaacaactgcgggctgcaagctgggctccccccttactccccagtgttcaaatcctggattcactgctggaagtacctgagtgtgcagggccagctcttccgaggctccagcctgcttttccgccgggtgtcatcaggatcatgctttgcc

SEQ ID NO: 13030 - DNA, 1572 bp, Homo sapiens
  source 1..1572: mol_type = unassigned DNA
gcggggatggcgggagccggagctggagccggagctcgcggcggagcggcggcgggggtcgaggctcgagctcgcgatccaccgcccgcgcaccgcgcacatcctcgccaccctcggcctgcggctcagccctcggcccgcaggatggatggcgggtcagggggcctggggtctggggacaacgccccgaccactgaggctcttttcgtggcactgggcgcgggcgtgacggcgctcagccatcccctgctctacgtgaagctgctcatccaggtgggtcatgagccgatgccccccacccttgggaccaatgtgctggggaggaaggtcctctatctgccgagcttcttcacctacgccaagtacatcgtgcaagtggatggtaagatagggctgttccgaggcctgagtccccggctgatgtccaacgccctctctactgtgactcggggtagcatgaagaaggttttccctccagatgagattgagcaggtttccaacaaggatgatatgaagacttccctgaagaaagttgtgaaggagacctcctacgagatgatgatgcagtgtgtgtcccgcatgttggcccaccccctgcatgtcatctcaatgcgctgcatggtccagtttgtgggacgggaggccaagtacagtggtgtgctgagctccattgggaagattttcaaagaggaagggctgctgggattcttcgttggattaatccctcacctcctgggcgatgtggttttcttgtggggctgtaacctgctggcccacttcatcaatgcctacctggtggatgacagcttcagccaggccctggccatccggagctataccaagttcgtgatggggattgcagtgagcatgctgacctaccccttcctgctagttggcgacctcatggctgtgaacaactgcgggctgcaagctgggctccccccttactccccagtgttcaaatcctggattcactgctggaagtacctgagtgtgcaggtgagcaagcactggacggcggaggcctttcctgttctttgctacatccttcagctgaaatggttttgtggatgcttcattgcatgcaaagataagtggtttcatggaattcaatattgtgaggagatacttggtatctataaggcatttaagttttcatcttacataatttcagaaaggatttgaggtggctaagtgtgggtttattttaagattatacatcagacaagaccttttcttctttgagtcttaaagactcttaggataaggataagagaactctggcccaggtggcaggtggtaaagcccaagaactgcttctccttcaagtaacatgggctgaaaattcgaggtctgtaaccagttgagctgagttcctgggttgttagggcggctggcattggaaaccgactcctccctcctgcaggacattcctgggcccaggagagcctgtgggtggggctgggccacgtggggaactggcagcagtaccaaccttgggttctcgtgttctgtaccgaagctacctctccgtagctggagctcttgggcccagcagtcaggggtccaggc

SEQ ID NO: 13031 - DNA, 373 bp, Homo sapiens
  source 1..373: mol_type = unassigned DNA
aaacgaccagaatccaggttcccagttcagccaggccctggccatccggagctataccaagttcgtgatgggggtaagttgtgccagctgtccttccttcccactgccttgcggacccaagcggggcctaggaggccaaccctggtaatggctggaggcaggtcttggtacagggtgttggcgtggtgtgtccctgctccctgggccggggtgggtcactggcactcaggcctctctgggtttcagattgcagtgagcatgctgacctaccccttcctgctagttggcgacctcatggctgtgaacaactgcgggctgcaagctgggctccccccttactccccagtgttcaaatcctggattcactgctgga

SEQ ID NO: 13032 - DNA, 581 bp, Homo sapiens
  source 1..581: mol_type = unassigned DNA
ccagtcaggtgctcctgggctccggtctcaccatcctgtcccagccgctcatgtacgtgaaagtgctcatccaggtgggatatgagcctcttcctccaacaataggacgaaatatttttgggcggcaagtgtgtcagcttcctggtctctttagttatgctcagcacattgccagtatcgatgggaggcgcgggttgttcacaggcttaactccaagactgtgttcgggagtccttggaactgtggtccatggtaaagttttacagcattaccaggagagtgacaagggtgaggagttaggacctggaaatgtacagaaagaagtctcatcttcctttgaccacgttatcaaggagacagaacgagaatgcaggggtctcttccctcccctggggtttaggaagctcatgaggagctcggcttaaaatgtctttgatgtctcttcctttgtctcaaaaagtaatgtcaattttatatactatttcaatattactatctgcatttgttttaatataaaaatgtttgctgcctacctttttctcccaaaaaatctttaagtaaagatgatctgggaaaatgtg

SEQ ID NO: 13033 - DNA, 2587 bp, Homo sapiens
  source 1..2587: mol_type = unassigned DNA
ggggcggggactgggcggagaggcgcgtgctgctgcgtgcgtgcgcgcgcgccgcgggcgggccagtgaaaccggcggccctggcacgtgacctaggaccggctcaccgggtcgcttggtggctccgtctgtctgtccgtccgcccgcgggtgccatcatggcggacgcggccagtcaggtgctcctgggctccggtctcaccatcctgtcccagccgctcatgtacgtgaaagtgctcatccaggtgggatatgagcctcttcctccaacaataggacgaaatatttttgggcggcaagtgtgtcagcttcctggtctctttagttatgctcagcacattgccagtatcgatgggaggcgcgggttgttcacaggcttaactccaagactgtgttcgggagtccttggaactgtggtccatggtaaagttttacagcattaccaggagagtgacaagggtgaggagttaggacctggaaatgtacagaaagaagtctcatcttcctttgaccacgttatcaaggagacaactcgagagatgatcgctcgttctgctgctaccctcatcacacatcccttccatgtgatcactctgagatctatggtacagttcattggcagagaatccaagtactgtggactttgtgattccataataaccatctatcgggaagagggcattctaggatttttcgcgggtcttgttcctcgccttctaggtgacatcctttctttgtggctgtgtaactcactggcctacctcgtcaatacctatgcactggacagtggggtttctaccatgaatgaaatgaagagttattctcaagctgtcacaggattttttgcgagtatgttgacctatccctttgtgcttgtctccaatcttatggctgtcaacaactgtggtcttgctggtggatgccctccttactccccaatatatacgtcttggatagactgttggtgcatgctacaaaaagaggggaatatgagccgaggaaatagcttatttttccggaaggtcccctttgggaagacttattgttgtgacctgaaaatgttaatttgaagatgtggggcagggacagtgacatttctgtagtcccagatgcacagaattatgggagagaatgttgatttctatacagtgtggcgcgcttttttaataatcatttaatcttgggaaaattcaggtgtttggtgtctgccttttttgttcttttttccagcacaacataacttaccactgatactccccctttagttattctgaattaggatatttttgctccaaattcttattttacttaaccagaagggaaaaaaagttgtattttcctgaagctacaggcactttgtcatgtgatttttgagtctcaatttaaggctttgtaaaatgaagagtagaattccaagaaaaatgagaaataattttgtaaaacttaacaaaatcactaaattaaactatatgggaggttatgaattactttttcttgggtagaccctaaaatgtcagtagcatgcaccagaatctgactcccattatgcttctaagcacatttcattgaccttgtctctcatacttcaagaaaaggacagtacattgctacattaccctagaaagtctgtgtgaggatctgccccttcagtctgttattgcaaagtaataaaatgtcacctacagggagcctctgagcctactctagttcaagaggctacctgaaaaaaaataaataagataaagggtcagcaacaacaaagaaaaagacaattacagaaaataagcaagatttggaaaggaagtataatggcacttttttcctcaaaggaagttcttgttttcacataaaatatgaaaagcagatcctgcaggagtaacccccttctttaagagccaagtatttgccagtgcttaaattacaccatacagttctaattatatataatcttttgttcttcagttttttgttttgtttcctttttgttattgttgccgaaggtgagtagttttgcatttctgatgacagccttggaaagtatatttgtaactccatgtctggtaatgccaacccaagtcgacatgggtcttaggacactgaccacctcacatgccataccctcagttaagcatgttaacatttataggaggaaaaaaatcactttgggagaaaataaaattcaactcaagcataaagcttctgtttactcaggccttctaaaaagcaggttaaaatgctctaaaatgagaaagcctgtggtttcacttatttatataactcactgggacattgccaaatgagtaagcacttaattcgctgcttctgagacttctctgtcaaaacagccccactgataatattagacagaacgagaatgcaggggtctcttccctcccctggggtttaggaagctcatgaggagctcggcttaaaatgtctttgatgtctcttcctttgtctcaaaaagtaatgtcaattttatatactatttcaatattactatctgcatttgttttaatataaaaatgtttgctgcctacctttttctcccaaaaaatctttaagtaaagatgatctgggaaaatgt

SEQ ID NO: 13034 - DNA, 811 bp, Homo sapiens
  source 1..811: mol_type = unassigned DNA
cttctgcaaagcacctcgcaaatcttttgcctccctgcttacagttatgaatagtaaggtgagccactgagggtatagccgacctgcattttaaacataggaacaaaagtcactggagatcagcttcaagtacagctgtgttaacgagaatgaactaggtatgcgggctggattctggtgtttgattccttttttacttccctagaatgttttgtgacctctaattatttgacaaacatttgtactgaagagcctgtcatgttactgatcacattttttggttcttatttttattgtttcttcatgtaggggtcttgttcctcgccttctaggtgacatcctttctttgtggctgtgtaactcactggcctacctcgtcaatacctatgcactggacagtggggtttctaccatgaatgaaatgaagagttattctcaagctgtcacaggattttttgcgagtatgttgacctatccctttgtgcttgtctccaatcttatggctgtcaacaactgtggtcttgctggtggatgccctccttactccccaatatatacgtcttggatagactgttggtgcatgctacaaaaagaggggaatatgagccgaggaaatagcttatttttccggaaggtcccctttgggaagacttattgttgtgacctgaaaatgttaatttgaagatgtggggcagggacagtgacatttctgtagtcccagatgcacagaattatgggagagaatgttgatttctatacagtgtggcgcgcttttttaataatcatttaatcttgggaaaattcaggtgtt

SEQ ID NO: 13035 - DNA, 599 bp, Homo sapiens
  source 1..599: mol_type = unassigned DNA
agtatcgatgggaggcgcgggttgttcacaggcttaactccaagactgtgttcgggagtccttggaactgtggtccatggtaaagttttacagcattaccaggagagtgacaagggtgagtgatcactctgagatctatggtacagttcattggcagagaatccaagtactgtggactttgtgattccataataaccatctatcgggaagagggcattctaggatttttcgcgggtcttgttcctcgccttctaggtgacatcctttctttgtggctgtgtaactcactggcctacctcgtcaatacctatgcactggacagtggggtttctaccatgaatgaaatgaagagttattctcaagctgtcacaggattttttgcgagtatgttgacctatccctttgtgcttgtctccaatcttatggctgtcaacaactgtggtcttgctggtggatgccctccttactccccaatatatacgtcttggatagactgttggtgcatgctacaaaaagaggggaatatgagccgaggaaatagcttatttttccggaaggtcccctttgggaagacttattgttgtgacctgaaaatgtta

SEQ ID NO: 13036 - DNA, 930 bp, Homo sapiens
  source 1..930: mol_type = unassigned DNA
ggagaggcgcgtgctgctgcgtgcgtgcgcgcgcgccgcgggcgggccagtgaaaccggcggccctggcacgtgacctaggaccggctcaccgggtcgcttggtggctccgtctgtctgtccgtccgcccgcgggtgccatcatggcggacgcggccagtcaggtgctcctgggctccggtctcaccatcctgtcccagccgctcatgtacgtgaaagtgctcatccaggtgggatatgagcctcttcctccaacaataggacgaaatatttttgggcggcaagtgtgtcagcttcctggtctctttagttatgctcagcacattgccagtatcgatgggaggcgcgggttgttcacaggcttaactccaagactgtgttcgggagtccttggaactgtggtccatggtaaagttttacaggagttaggacctggaaatgtacagaaagaagtctcatcttcctttgaccacgttatcaaggagacaactcgagagatgatcgctcgttctgctgctaccctcatcacacatcccttccatgtgatcactctgagatctatggtacagttcattggcagagaatccaagtactgtggactttgtgattccataataaccatctatcgggaagagggcattctaggatttttcgcgggtcttgttcctcgccttctaggtgacatcctttctttgtggctgtgtaactcactggcctacctcgtcaatacctatgcactggacagtggggtttctaccatgaatgaaatgaagagttattctcaagctgtcacaggattttttgcgagtatgttgacctatccctttgtgcttgtctccaatcttatggctgtcaacaactgtggtcttgctggtggatgccctccttactccccaatatatacgtcttggatagactgttggtgcatgct

SEQ ID NO: 13037 - DNA, 535 bp, Homo sapiens
  source 1..535: mol_type = unassigned DNA
gctgctgcgtgcgtgcgcgcgcgccgcgggcgggccagtgaaaccggcggccctggcacgtgacctaggaccggctcaccgggtcgcttggtggctccgtctgtctgtccgtccgcccgcgggtgccatcatggcggacgcggccagtcaggtgctcctgggctccggtctcaccatcctgtcccagccgctcatgtgggatatgagcctcttcctccaacaataggacgaaatatttttgggcggcaagtgtgtcagcttcctggtctctttagttatgctcagcacattgccagtatcgatgggaggcgcgggttgttcacaggcttaactccaagactgtgttcgggagtccttggaactgtggtccatggtaaagttttacagcattaccaggagagtgacaagggtgaggagttaggacctggaaatgtacagaaagaagtctcatcttcctttgaccacgttatcaaggagacaactcgagagatgatcgctcgttctgctgctaccctcatcacacatcccttccatg

SEQ ID NO: 13038 - DNA, 1370 bp, Homo sapiens
  source 1..1370: mol_type = unassigned DNA
gaataaagagatgctggataagcccgaggtcacaagctttgcagtgtagcatcccccaacttgatcccctgtctctttggctccaaaacctacactcagtcctgggagcgattagcgccaacagctcagagaaaacgtgacgaaaaccagtctgtaaaacccgagcctgggagaggggcttcggtgcgcggggggaatttgcagacgctccctgctggcggagatttcctgacctgtccttcggcgcgggactttcggcgggtcccggccgggcagacccaagtgccggcggcggagactgcagtggagccagtaccggctgtagtggccggggccgtggcgggagagtcatgtcagagccgcagccgcggggcgcagagcgcgatctctaccgggacacgtgggtgcgatacctgggctatgccaatgaggtgggcgaggctttccgctctcttgtgccagcggcggtggtgtggctgagctatggcgtggccagctcctacgtgctggcggatgccattgacaaaggcaagaaggctggagaggtgcccagccctgaagcaggccgcagcgccagggtgactgtggctgtggtggacacctttgtatggcaggctctagcctctgtggccattccgggcttcaccatcaaccgcgtgtgtgctgcctctctctatgtcctgggcactgccacccgctggcccctggctgtccgcaagtggaccaccaccgcgcttgggctgttgaccatccccatcattatccaccccattgacaggtcggtggatttcctcctggactccagcctgcgcaagctctacccaacagtggggaagcccagctcctcctgatcatactctggtacctggcctgtgcatcggcctcctgcttcatgtcaacctcctactcctgccagggaatgtggacacctggctccctggtgtccaaagaccctggcacctgggtgggtttgagctggacagaagcttagagacaaaggcttcaagaagcagtggctgcagggagtcacagaagggcaggacctgaacgctgtctgcttccctggaatccaagatgctgagtggaagtggaccctgggtgggcccggccctgtctttttcaggaaaattacatcctcccatggaggatgagagactgaggctcagggagggcaaggaataggcccaagatcacttggcaagctgggcacccaggacccccaggtgcttgacagagtcaccccatggtggtatggctgaacaaggagcggcagacaactcagggagaaactcaggagtgcagtaccagggacacctcaggacagattctctggccaggcccttccctgacccaataaatcctgaagaggt

SEQ ID NO: 13039 - DNA, 648 bp, Homo sapiens
  source 1..648: mol_type = unassigned DNA
gcgggactttcggcgggtcccggccgggcagacccaagtgccggcggcggagactgcagtggagccagtaccggctgtagtggccggggccgtggcgggagagtcatgtcagagccgcagccgcggggcgcagagcgcgatctctaccgggacacgtgggtgcgatacctgggctatgccaatgaggtgggcgaggctttccgctctcttgtgccagcggcggtggtgtggctgagctatggcgtggccagctcctacgtgctggcggatgccattgacaaaggcaagaaggctggagaggtgagtgttagcctattttccaacccccaaccctagctctcttcttgtgtggttcagtccacagccttgcatgtgataaagtccctgtgggacactccagtccctacaaccttgcctagtgcagtccatagacagtcctgtttgtaggacagtgtacccctgcccccacactcccactccccgaactggatgtggcagactgtaccccactcctgggtgcggacaagtccactggccacttgcccctcccggtctagcctcgtgccccttgtcgcaggattttctgcctctgccccagctggattaagtgtctctgcgcccaccaggtgcccagccctgaagcaggcc

SEQ ID NO: 13040 - DNA, 891 bp, Homo sapiens
  source 1..891: mol_type = unassigned DNA
cgggactttcggcgggtcccggccgggcagacccaagtgccggcggcggagactgcagtggagccagtaccggctgtagtggccggggccgtggcgggagagtcatgtcagagccgcagccgcggggcgcagagcgcgatctctaccgggacacgtgggtgcgatacctgggctatgccaatgaggtgggcgaggctttccgctctcttgtgccagcggcggtggtgtggctgagctatggcgtggccagctcctacgtgctggcggatgccattgacaaaggcaagaaggctggagaggtcggtggatttcctcctggactccagcctgcgcaagctctacccaacagtggggaagcccagctcctcctgatcatactctggtacctggcctgtgcatcggcctcctgcttcatgtcaacctcctactcctgccagggaatgtggacacctggctccctggtgtccaaagaccctggcacctgggtgggtttgagctggacagaagcttagagacaaaggcttcaagaagcagtggctgcagggagtcacagaagggcaggacctgaacgctgtctgcttccctggaatccaagatgctgagtggaagtggaccctgggtgggcccggccctgtctttttcaggaaaattacatcctcccatggaggatgagagactgaggctcagggagggcaaggaataggcccaagatcacttggcaagctgggcacccaggacccccaggtgcttgacagagtcaccccatggtggtatggctgaacaaggagcggcagacaactcagggagaaactcaggagtgcagtaccagggacacctcaggacagattctctggccaggcccttccctgacccaataaatcctgaagaggt

SEQ ID NO: 13041 - DNA, 759 bp, Homo sapiens
  source 1..759: mol_type = unassigned DNA
actttcggcgggtcccggccgggcagacccaagtgccggcggcggagactgcagtggagccagtaccggctgtagtggccggggccgtggcgggagagtcatgtcagagccgcagccgcggggcgcagagcgcgatctctaccgggacacgtgggtgcgatacctgggctatgccaatgaggtgggcgaggctttccgctctcttgtgccagcggcggtggtgtggctgagctatggcgtggccagctcctacgtgctggcggatgccattgacaaaggcaagaaggctggagaggattttctgcctctgccccagctggattaagtgtctctgcgcccaccaggtgcccagccctgaagcaggccgcagcgccagggtgactgtggctgtggtggacacctttgtatggcaggctctagcctctgtggccattccgggcttcaccatcaaccgcgtgtgtgctgcctctctctatgtcctgggcactgccacccgctggcccctggctgtccgcaagtggaccaccaccgcgcttgggctgttgaccatccccatcattatccaccccattgacaggtcggtggatttcctcctggactccagcctgcgcaagctctacccaacagtggggaagcccagctcctcctgatcatactctggtacctggcctgtgcatcggcctcctgcttcatgtcaacctcctactcctgccagggaatgtggacacctggctccctggtgtccaaagaccctggcac

SEQ ID NO: 13042 - DNA, 912 bp, Homo sapiens
  source 1..912: mol_type = unassigned DNA
ggcggcggagactgcagtggagccagtaccggctgtagtggccggggccgtggcgggagagtcatgtcagagccgcagccgcggggcgcagagcgcgatctctaccgggacacgtgggtgcgatacctgggctatgccaatgaggtgggcgaggctttccgctctcttgtgccagcggcggtggtgtggctgagctatggcgtggccagctcctacgtgctggcggatgccattgacaaaggcaagaaggctggagaggctctagcctctgtggccattccgggcttcaccatcaaccgcgtgtgtgctgcctctctctatgtcctgggcactgccacccgctggcccctggctgtccgcaagtggaccaccaccgcgcttgggctgttgaccatccccatcattatccaccccattgacaggtcggtggatttcctcctggactccagcctgcgcaagctctacccaacagtggggaagcccagctcctcctgatcatactctggtacctggcctgtgcatcggcctcctgcttcatgtcaacctcctactcctgccagggaatgtggacacctggctccctggtgtccaaagaccctggcacctgggtgggtttgagctggacagaagcttagagacaaaggcttcaagaagcagtggctgcagggagtcacagaagggcaggacctgaacgctgtctgcttccctggaatccaagatgctgagtggaagtggaccctgggtgggcccggccctgtctttttcaggaaaattacatcctcccatggaggatgagagactgaggctcagggagggcaaggaataggcccaagatcacttggcaagctgggcacccaggacccccaggtgcttgacagagtcaccccatggtggtatggctgaacaaggagc

SEQ ID NO: 13043 - DNA, 482 bp, Homo sapiens
  source 1..482: mol_type = unassigned DNA
actcagtcctgggagcgattagcgccaacagctcagagaaaacgtgacgaaaaccagtctgtaaaacccgagcctgggagaggggcttcggtgcgcggggggaatttgcagacgctccctgctggcggagatttcctgacctgtccttcggcgcgggactttcggcgggtcccggccgggcagacccaagtgccggcggcggagactgcagtggagccagtaccggctgtagtggccggggccgtggcgggagagtcatgtcagagccgcagccgcggggcgcagagcgcgatctctaccgggacacgtgggtgcgatacctgggctatgccaatgaggtgggcgaggctttccgctctcttgtgccagcggcggtggtgtggctgagctatggcgtggccagctcctacgtgctggcggatgccattgacaaaggcaagaaggctggagaggattttctgcctctgccccagctggattaa

SEQ ID NO: 13044 - DNA, 3604 bp, Homo sapiens
  source 1..3604: mol_type = unassigned DNA
tgagtcccactccgcaccccaccctctgtctggtacagcttaccaaaccaaagtgcccaaagccgtgacatcccggccggcggctcgcaggcccccgccctccgcacgtcacggccgccgggtgcagtgccccctaggggcccctgggacgaggaggaagcgccaggtccttcccgccgccgccgccgccgccgccgcctgctcccctggcacgcgccccgccgccctcggcagccgcagctccgtgtcccctgagaaccagccgtcccgcgccatgggcacgcgtctgccgctcgtcctgcgccagctccgccgcccgccccagcccccgggccctccgcgccgcctccgtgtgccctgtcgcgctagcagcggcggcggcggaggcggcggcggtggccgggagggcctgcttggacagcggcggccgcaggatggccaggcccggagcagctgcagccccggcggccgaacgcccgcggcgcgggactccatcgtcagagaagtcattcagaattcaaaagaagttctaagtttattgcaagaaaaaaaccctgccttcaagccggttcttgcaattatccaggcaggtgacgacaacttgatgcaggaaatcaaccagaatttggctgaggaggctggtctgaacatcactcacatttgcctccctccagatagcagtgaagccgagattatagatgaaatcttaaagatcaatgaagataccagagtacatggccttgcccttcagatctctgagaacttgtttagcaacaaagtcctcaatgccttgaaaccagaaaaagatgtggatggagtaacagacataaacctggggaagctggtgcgaggggatgcccatgaatgttttgtttcacctgttgccaaagctgtaattgaacttcttgaaaaatcaggtgtcaacctagatggaaagaagattttggtagtgggggcccatgggtctttggaagctgctctacaatgcctgttccagagaaaagggtccatgacaatgagcatccagtggaaaacacgccagcttcaaagcaagcttcacgaggctgacattgtggtcctaggctcacctaagccagaagagattccccttacttggatacaaccaggaactactgttctcaactgctcccatgacttcctgtcagggaaggttgggtgtggctctccaagaatacattttggtggactcattgaggaagatgatgtgattctccttgctgcagctctgcgaattcagaacatggtcagtagtggaaggagatggcttcgtgaacagcagcacaggcggtggagacttcactgcttgaaacttcagcctctctcccctgtgccaagtgacattgagatttcaagaggacaaactccaaaagctgtggatgtccttgccaaggagattggattgcttgcagatgaaattgaaatctatggcaaaagcaaagccaaagtacgtttgtccgtgctagaaaggttaaaggatcaagcagatggaaaatacgtcttagttgctgggatcacacccacccctcttggagaagggaagagcacagtcaccatcgggcttgtgcaggctctgaccgcacacctgaatgtcaactcctttgcctgcttgaggcagccttcccaaggaccgacgtttggagtgaaaggaggagccgcgggtggtggatatgcccaggtcatccccatggaggagttcaaccttcacttgactggagacatccacgccatcaccgctgccaataacttgctggctgccgccatcgacacgaggattcttcatgaaaacacgcaaacagataaggctctgtataatcggctggttcctttagtgaatggtgtcagagaattttcagaaattcagcttgctcggctaaaaaaactgggaataaataagactgatccgagcacactgacagaagaggaagtgagtaaatttgcccgtctcgacatcgacccatctaccatcacgtggcagagagtattggatacaaatgaccgatttctacgaaaaataaccatcgggcagggaaacacagagaagggccattaccggcaggcgcagtttgacatcgcagtggccagcgagatcatggcggtgctggccctgacggacagcctcgcagacatgaaggcacggctgggaaggatggtggtggccagtgacaaaagcgggcagcctgtgacagcagatgatttgggggtgacaggtgctttgacagttttgatgaaagatgcaataaaaccaaacctgatgcagaccctggaagggacacctgtgttcgtgcatgcgggcccttttgctaacattgctcacggcaactcttcagtgttggctgataaaattgccctgaaactggttggtgaagaaggatttgtagtgaccgaagctggctttggtgctgacatcggaatggagaaattcttcaacatcaagtgccgagcttccggcttggtgcccaacgtggttgtgttagtggcaacggtgcgagctctgaagatgcatggaggcgggccaagtgtaacggctggtgttcctcttaagaaagaatatacagaggagaacatccagctggtggcagacggctgctgtaacctccagaagcaaattcagatcactcagctctttggggttcccgttgtggtggctctgaatgtcttcaagaccgacacccgcgctgagattgacttggtgtgtgagcttgcaaagcgggctggtgcctttgatgcagtcccctgctatcactggtccgttggtggaaaaggatcggtggacttggctcgggctgtgagagaggctgcgagtaaaagaagccgattccagttcctgtatgatgttcaggttccaattgtggacaagataaggaccattgctcaggctgtctatggagccaaagatattgaactctctcctgaggcacaagccaaaatagatcgttacactcaacagggttttggaaatttgcccatctgcatggcaaagacccacctttctctatctcaccaacctgacaaaaaaggtgtgccaagggacttcatcttacctatcagtgacgtccgggccagcataggcgctgggttcatttaccctttggtcggaacgatgagcaccatgccaggactgcccacccggccctgcttttatgacatagatcttgataccgaaacagaacaagttaaaggcttgttctaagtggacaaggctctcacaggacccgatgcagactcctgaaacagactactctttgcctttttgctgcagttggagaagaaactgaatttgaaaaatgtctgttatgcaatgctggagacatggtgaaataggccaaagatttcttcttcgttcaagatgaattctgttcacagtggagtatggtgttcggcaaaaggacctccaccaagactgaaagaaactaatttatttctgtttctgtggagtttccattatttctactgcttacactttagaatgtttattttatggggactaagggattaggagtgtgaactaaaaggtaacattttccactctcaagttttctactttgtctttgaactgaaaataaacatggatctagaaaaccaa

SEQ ID NO: 13045 - DNA, 1049 bp, Homo sapiens
  source 1..1049: mol_type = unassigned DNA
tccttcccgccgccgccgccgccgccgccgcctgctcccctggcacgcgccccgccgccctcggcagccgcagctccgtgtcccctgagaaccagccgtcccgcgccatgggcacgcgtctgccgctcgtcctgcgccagctccgccgcccgccccagcccccgggccctccgcgccgcctccgtgtgccctgtcgcgctagcagcggcggcggcggaggcggcggcggtggccgggagggcctgcttggacagcggcggccgcaggatggccaggcccggagcagctgcagccccggcggccgaacgcccgcggcgcgggactccatcgtcagagaagtcattcagaattcaaaagaagttctaagtttattgcaagaaaaaaaccctgccttcaagccggttcttgcaattatccaggcaggtgacgacaacttgatgcaggaaatcaaccagaatttggctgaggaggctggtctgaacatcactcacatttgcctccctccagatagcagtgaagccgagattatagatgaaatcttaaagatcaatgaagataccagagtacatggccttgcccttcagatctctgagaacttgtttagcaacaaagtcctcaatgccttgaaaccagaaaaagatgtggatggagtaacagacataaacctggggaagctggtgcgaggggatgcccatgaatgttttgtttcacctgttgccaaagctgtaattgaacttcttgaaaaatcaggtgtcaacctagatggaaagaagattttggtagtgggggcccatgggtctttggaagctgctctacaatgcctgttccagagaaaagggtccatgacaatgagcatccagtggaaaacacgccagcttcaaagcaagacggagtctcgttctgtcaccaggctggagtgcaggcgcgtgatctaggctcactgcaagctctgcctcccaggttgaagtgattctcctgtgaaagggaattatttttgatgagtcattaaagtatatccattcccagaatggtgctgcatttttcctttt

SEQ ID NO: 13046 - DNA, 996 bp, Homo sapiens
  source 1..996: mol_type = unassigned DNA
gtggccgggagggcctgcttggacagcggcggccgcaggatggccaggcccggagcagctgcagccccggcggccgaacgcccgcggcgcgggactccatcgtcagagaagtcattcagaattcaaaagaagttctaagtttattgcaagaaaaaaaccctgccttcaagccggttcttgcaattatccaggcaggtgacgacaacttgatgcaggaaatcaaccagaatttggctgaggaggctggtctgaacatcactcacatttgcctccctccagatagcagtgaagccgagattatagatgaaatcttaaagatcaatgaagataccagagtacatggccttgcccttcagatctctgagaacttgtttagcaacaaagtcctcaatgccttgaaaccagaaaaagatgtggatggagtaacagacataaacctggggaagctggtgcgaggggatgcccatgaatgttttgtttcacctgttgccaaagctgtaattgaacttcttgaaaaatcagtaggtgtcaacctagatggaaagaagattttggtagtgggggcccatgggtctttggaagctgctctacaatgcctgttccagagaaaagggtccatgacaatgagcatccagtggaaaacacgccagcttcaaagcaagcttcacgaggctgacattgtggtcctaggctcacctaagccagaagagattccccttacttggatacaaccaggaactactgttctcaactgctcccatgacttcctgtcagggaaggttgggtgtggctctccaagaatacattttggtggactcattgaggaagatgatgtgattctccttgctgcagctctgcgaattcagaacatggtcagtagtggaaggagatggcttcgtgaacagcagcacaggcggtggagacttcactgcttgaaacttcagcctctctcccctgtgccaagtgacattgagatttcaagaggacaaactccaa

SEQ ID NO: 13047 - DNA, 1134 bp, Homo sapiens
  source 1..1134: mol_type = unassigned DNA
gggagaggcgggctcgggcccagcgccgcccgcgcgaagctccctggtgttgtgcgcccttccccgcgcgcggcccctcctgctgggctggggtctgtggctgacgtccgcttttcccggaacggcaaagagaagtcattcagaattcaaaagaagttctaagtttattgcaagaaaaaaaccctgccttcaagccggttcttgcaattatccaggcaggtgacgacaacttgatgcaggaaatcaaccagaatttggctgaggaggctggtctgaacatcactcacatttgcctccctccagatagcagtgaagccgagattatagatgaaatcttaaagatcaatgaagataccagagtacatggccttgcccttcagatctctgagaacttgtttagcaacaaagtcctcaatgccttgaaaccagaaaaagatgtggatggagtaacagacataaacctggggaagctggtgcgaggggatgcccatgaatgttttgtttcacctgttgccaaagctgtaattgaacttcttgaaaaatcagcttcacgaggctgacattgtggtcctaggctcacctaagccagaagagattccccttacttggatacaaccaggaactactgttctcaactgctcccatgacttcctgtcagggaaggttgggtgtggctctccaagaatacattttggtggactcattgaggaagatgatgtgattctccttgctgcagctctgcgaattcagaacatggtcagtagtggaaggagatggcttcgtgaacagcagcacaggcggtggagacttcactgcttgaaacttcagcctctctcccctgtgccaagtgacattgagatttcaagaggacaaactccaaaagctgtggatgtccttgccaaggagattggattgcttgcagatgaaattgaaatctatggcaaaagcaaagccaaagtacgtttgtccgtgctagaaaggttaaaggatcaagcagatggaaaatacgtcttagttgctgggatcacacccacccctcttggagaagggaagagcacagtcaccatcgggcttgtgcaggctctgaccgcacacctgaatgtcaactcctttgcctgcttgaggcagccttcc

SEQ ID NO: 13048 - DNA, 524 bp, Homo sapiens
  source 1..524: mol_type = unassigned DNA
gtgcgcccttccccgcgcgcggcccctcctgctgggctggggtctgtggctgacgtccgcttttcccggaacggcaaagagaagtcattcagaattcaaaagaagttctaagtttattgcaagaaaaaaaccctgccttcaagccggttcttgcaattatccaggcaggtgacgacaacttgatgcaggaaatcaaccagaatttggctgaggaggctggtctgaacatcactcacatttgcctccctccagatagcagtgaagccgagattatagatgaaatcttaaagatcaatgaagataccagagtacatggccttgcccttcagatctctgagaacttgtttagcaacaaagtcctcaatgccttgaaaccagaaaaagatgtggatggagtaacagacataaacctggggaagctggtgcgaggggatgcccatgaatgttttgtttcacctgttgccaaagctgtaattgaacttcttgaaaaatcaggtgtcaacctagatggaaagaagattttg

SEQ ID NO: 13049 - DNA, 373 bp, Homo sapiens
  source 1..373: mol_type = unassigned DNA
ggtcctaggctcacctaagccagaagagattccccttacttggatacaaccaggaactactgttctcaactgctcccatgacttcctgtcagaaagtttgattatcattagaagaatggccatcttttaaagtgattcattgacttgtccctggagaaatcatgagttagatgagagtgtttagtgggaagtgaaaagacccgtccacggtttcggatgagatcctcgttggactgtgatcccaggatattacccaggcccagatcgtagacaacctcccaatggagtcctgcccctacacgggcagggggtgaaataatgattccctttcttaattttctttagccatgaaatttattaaaaatgtatgtct

SEQ ID NO: 13050 - DNA, 421 bp, Homo sapiens
  source 1..421: mol_type = unassigned DNA
ggacacctgtgttcgtgcatgcgggcccttttgctaacattgctcacggcaactcttcagtgttggctgataaaattgccctgaaactggttggtgaagaaggatttgtaggcttgttctaggcatgaagtgcagtgatgatggagaaggcatggactgtggcacaaatagaagagtcaggggttggcagctcctattcccactgtacgatgccaaggatctttacctataggataagccttcagaaacataatttggtctttcaagtgctgaatacctcttgaccgaagctggctttggtgctgacatcggaatggagaaattcttcaacatcaagtgccgagcttccggcttggtgcccaacgtggttgtgttagtggcaacggtgcgagctctgaagatgcatggaggcgggccaagt

SEQ ID NO: 13051 - DNA, 606 bp, Homo sapiens
  source 1..606: mol_type = unassigned DNA
aacatccagctggtggcagacggctgctgtaacctccagaagcaaattcagatcactcagctctttggggttcccgttgtggtggctctgaatgtcttcaagaccgacacccgcgctgagattgacttggtgtgtgagcttgcaaagcgggctggtgcctttgatgcagtcccctgctatcactggtccgttggtggaaaaggatcggtggacttggctcgggctgtgagagaggctgcgagtaaaagaagccgattccagttcctgtatgatgttcagccattctcttgatcccagtgggggctggatgaaggaagagcaaaacaaaccacgaagacagcctggagccgcagccagctctgctgacttctgaacttcacgctctcactgcccagatggccaggggtgtttcctcctctgctggtcttttttaaggcaggatgtttgttgttattgttgttgtttttctggttggttcttaagaaattattttctacatcttgaaaatgccagctggaacctacaccagttgttggtggggtgtgagaactatcctttacatggacttggagcatttgcaactagagcctccacattgaaataaac

SEQ ID NO: 13052 - DNA, 503 bp, Homo sapiens
  source 1..503: mol_type = unassigned DNA
gtctatggagccaaagatattgaactctctcctgaggcacaagccaaaatagatcgttacactcaacagggttttggaaatttgcccatctgcatggcaaagacccacctttctctatctcaccaacctgacaaaaaaggtgtgccaagggacttcatcttacctatcagtgacgtccgggccagcataggcgctgggttcatttaccctttggtcggaacgagaagctcccctctggctctagttggagaatcccaacccaagcaagtccatccttaaacaataaacatctccagcattgctggctttggaagaccccatggtgagatgctggagcttttttccgctccagatttcgcttctaaatatttacttttactttccatgttcacttataggccagggtttttttttcctaccattgaattatttcgtcatgttctatttaattattgctttaattggcattggtgaccacaaataataataaatactattaactg

SEQ ID NO: 13053 - DNA, 427 bp, Homo sapiens
  source 1..427: mol_type = unassigned DNA
aatttgcccatctgcatggcaaagacccacctttctctatctcaccaacctgacaaaaaaggtgtgccaagggacttcatcttacctatcagtgacgtccgggccagcataggcgctgggttcatttaccctttggtcggaacgggaggcagagaagctcccctctggctctagttggagaatcccaacccaagcaagtccatccttaaacaataaacatctccagcattgctggctttggaagaccccatggtgagatgctggagcttttttccgctccagatttcgcttctaaatatttacttttactttccatgttcacttataggccagggtttttttttcctaccattgaattatttcgtcatgttctatttaattattgctttaattggcattggtgaccacaaataataataaatactat

SEQ ID NO: 13054 - DNA, 3159 bp, Homo sapiens
  source 1..3159: mol_type = unassigned DNA
acgtgcgcagccggccgccggctctgatgcaatcgcgccgggcgcgacccagacgagaagtcattcagaattcaaaagaagttctaagtttattgcaagaaaaaaaccctgccttcaagccggttcttgcaattatccaggcaggtgacgacaacttgatgcaggaaatcaaccagaatttggctgaggaggctggtctgaacatcactcacatttgcctccctccagatagcagtgaagccgagattatagatgaaatcttaaagatcaatgaagataccagagtacatggccttgcccttcagatctctgagaacttgtttagcaacaaagtcctcaatgccttgaaaccagaaaaagatgtggatggagtaacagacataaacctggggaagctggtgcgaggggatgcccatgaatgttttgtttcacctgttgccaaagctgtaattgaacttcttgaaaaatcagtaggtgtcaacctagatggaaagaagattttggtagtgggggcccatgggtctttggaagctgctctacaatgcctgttccagagaaaagggtccatgacaatgagcatccagtggaaaacacgccagcttcaaagcaagcttcacgaggctgacattgtggtcctaggctcacctaagccagaagagattccccttacttggatacaaccaggaactactgttctcaactgctcccatgacttcctgtcagggaaggttgggtgtggctctccaagaatacattttggtggactcattgaggaagatgatgtgattctccttgctgcagctctgcgaattcagaacatggtcagtagtggaaggagatggcttcgtgaacagcagcacaggcggtggagacttcactgcttgaaacttcagcctctctcccctgtgccaagtgacattgagatttcaagaggacaaactccaaaagctgtggatgtccttgccaaggagattggattgcttgcagatgaaattgaaatctatggcaaaagcaaagccaaagtacgtttgtccgtgctagaaaggttaaaggatcaagcagatggaaaatacgtcttagttgctgggatcacacccacccctcttggagaagggaagagcacagtcaccatcgggcttgtgcaggctctgaccgcacacctgaatgtcaactcctttgcctgcttgaggcagccttcccaaggaccgacgtttggagtgaaaggaggagccgcgggtggtggatatgcccaggtcatccccatggaggagttcaaccttcacttgactggagacatccacgccatcaccgctgccaataacttgctggctgccgccatcgacacgaggattcttcatgaaaacacgcaaacagataaggctctgtataatcggctggttcctttagtgaatggtgtcagagaattttcagaaattcagcttgctcggctaaaaaaactgggaataaataagactgatccgagcacactgacagaagaggaagtgagtaaatttgcccgtctcgacatcgacccatctaccatcacgtggcagagagtattggatacaaatgaccgatttctacgaaaaataaccatcgggcagggaaacacagagaagggccattaccggcaggcgcagtttgacatcgcagtggccagcgagatcatggcggtgctggccctgacggacagcctcgcagacatgaaggcacggctgggaaggatggtggtggccagtgacaaaagcgggcagcctgtgacagcagatgatttgggggtgacaggtgctttgacagttttgatgaaagatgcaataaaaccaaacctgatgcagaccctggaagggacacctgtgttcgtgcatgcgggcccttttgctaacattgctcacggcaactcttcagtgttggctgataaaattgccctgaaactggttggtgaagaaggatttgtagtgaccgaagctggctttggtgctgacatcggaatggagaaattcttcaacatcaagtgccgagcttccggcttggtgcccaacgtggttgtgttagtggcaacggtgcgagctctgaagatgcatggaggcgggccaagtgtaacggctggtgttcctcttaagaaagaatatacagaggagaacatccagctggtggcagacggctgctgtaacctccagaagcaaattcagatcactcagctctttggggttcccgttgtggtggctctgaatgtcttcaagaccgacacccgcgctgagattgacttggtgtgtgagcttgcaaagcgggctggtgcctttgatgcagtcccctgctatcactggtccgttggtggaaaaggatcggtggacttggctcgggctgtgagagaggctgcgagtaaaagaagccgattccagttcctgtatgatgttcaggttccaattgtggacaagataaggaccattgctcaggctgtctatggagccaaagatattgaactctctcctgaggcacaagccaaaatagatcgttacactcaacagggttttggaaatttgcccatctgcatggcaaagacccacctttctctatctcaccaacctgacaaaaaaggtgtgccaagggacttcatcttacctatcagtgacgtccgggccagcataggcgctgggttcatttaccctttggtcggaacgatgagcaccatgccaggactgcccacccggccctgcttttatgacatagatcttgataccgaaacagaacaagttaaaggcttgttctaagtggacaaggctctcacaggacccgatgcagactcctgaaacagactactctttgcctttttgctgcagttggagaagaaactgaatttgaaaaatgtctgttatgcaatgctggagacatggtgaaataggccaaagatttcttcttcgttcaagatgaattctgttcacagtggagtatggtgttcggcaaaaggacctccaccaagactgaaagaaactaatttatttctgtttctgtggagtttccattatttctactgcttacactttagaatgtttattttatggggactaagggattaggagtgtgaactaaaaggtaacattttccactctcaagttttctactttgtctttgaactgaaaataaacatggatctagaaaacc

SEQ ID NO: 13055 - DNA, 3475 bp, Homo sapiens
  source 1..3475: mol_type = unassigned DNA
cccctaggggcccctgggacgaggaggaagcgccaggtccttcccgccgccgccgccgccgccgccgcctgctcccctggcacgcgccccgccgccctcggcagccgcagctccgtgtcccctgagaaccagccgtcccgcgccatgggcacgcgtctgccgctcgtcctgcgccagctccgccgcccgccccagcccccgggccctccgcgccgcctccgtgtgccctgtcgcgctagcagcggcggcggcggaggcggcggcggtggccgggagggcctgcttggacagcggcggccgcaggatggccaggcccggagcagctgcagccccggcggccgaacgcccgcggcgcgggactccatcgtcagagaagtcattcagaattcaaaagaagttctaagtttattgcaagaaaaaaaccctgccttcaagccggttcttgcaattatccaggcaggtgacgacaacttgatgcaggaaatcaaccagaatttggctgaggaggctggtctgaacatcactcacatttgcctccctccagatagcagtgaagccgagattatagatgaaatcttaaagatcaatgaagataccagagtacatggccttgcccttcagatctctgagaacttgtttagcaacaaagtcctcaatgccttgaaaccagaaaaagatgtggatggagtaacagacataaacctggggaagctggtgcgaggggatgcccatgaatgttttgtttcacctgttgccaaagctgtaattgaacttcttgaaaaatcagtaggtgtcaacctagatggaaagaagattttggtagtgggggcccatgggtctttggaagctgctctacaatgcctgttccagagaaaagggtccatgacaatgagcatccagtggaaaacacgccagcttcaaagcaagcttcacgaggctgacattgtggtcctaggctcacctaagccagaagagattccccttacttggatacaaccaggaactactgttctcaactgctcccatgacttcctgtcagggaaggttgggtgtggctctccaagaatacattttggtggactcattgaggaagatgatgtgattctccttgctgcagctctgcgaattcagaacatggtcagtagtggaaggagatggcttcgtgaacagcagcacaggcggtggagacttcactgcttgaaacttcagcctctctcccctgtgccaagtgacattgagatttcaagaggacaaactccaaaagctgtggatgtccttgccaaggagattggattgcttgcagatgaaattgaaatctatggcaaaagcaaagccaaagtacgtttgtccgtgctagaaaggttaaaggatcaagcagatggaaaatacgtcttagttgctgggatcacacccacccctcttggagaagggaagagcacagtcaccatcgggcttgtgcaggctctgaccgcacacctgaatgtcaactcctttgcctgcttgaggcagccttcccaaggaccgacgtttggagtgaaaggaggagccgcgggtggtggatatgcccaggtcatccccatggaggagttcaaccttcacttgactggagacatccacgccatcaccgctgccaataacttgctggctgccgccatcgacacgaggattcttcatgaaaacacgcaaacagataaggctctgtataatcggctggttcctttagtgaatggtgtcagagaattttcagaaattcagcttgctcggctaaaaaaactgggaataaataagactgatccgagcacactgacagaagaggaagtgagtaaatttgcccgtctcgacatcgacccatctaccatcacgtggcagagagtattggatacaaatgaccgatttctacgaaaaataaccatcgggcagggaaacacagagaagggccattaccggcaggcgcagtttgacatcgcagtggccagcgagatcatggcggtgctggccctgacggacagcctcgcagacatgaaggcacggctgggaaggatggtggtggccagtgacaaaagcgggcagcctgtgacagcagatgatttgggggtgacaggtgctttgacagttttgatgaaagatgcaataaaaccaaacctgatgcagaccctggaagggacacctgtgttcgtgcatgcgggcccttttgctaacattgctcacggcaactcttcagtgttggctgataaaattgccctgaaactggttggtgaagaaggatttgtagtgaccgaagctggctttggtgctgacatcggaatggagaaattcttcaacatcaagtgccgagcttccggcttggtgcccaacgtggttgtgttagtggcaacggtgcgagctctgaagatgcatggaggcgggccaagtgtaacggctggtgttcctcttaagaaagaatatacagaggagaacatccagctggtggcagacggctgctgtaacctccagaagcaaattcagatcactcagctctttggggttcccgttgtggtggctctgaatgtcttcaagaccgacacccgcgctgagattgacttggtgtgtgagcttgcaaagcgggctggtgcctttgatgcagtcccctgctatcactggtccgttggtggaaaaggatcggtggacttggctcgggctgtgagagaggctgcgagtaaaagaagccgattccagttcctgtatgatgttcaggttccaattgtggacaagataaggaccattgctcaggctgtctatggagccaaagatattgaactctctcctgaggcacaagccaaaatagatcgttacactcaacagggttttggaaatttgcccatctgcatggcaaagacccacctttctctatctcaccaacctgacaaaaaaggtgtgccaagggacttcatcttacctatcagtgacgtccgggccagcataggcgctgggttcatttaccctttggtcggaacgatgagcaccatgccaggactgcccacccggccctgcttttatgacatagatcttgataccgaaacagaacaagttaaaggcttgttctaagtggacaaggctctcacaggacccgatgcagactcctgaaacagactactctttgcctttttgctgcagttggagaagaaactgaatttgaaaaatgtctgttatgcaatgctggagacatggtgaaataggccaaagatttcttcttcgttcaagatgaattctgttcacagtggagtatggtgttcggcaaaaggacctccaccaagactgaaagaaactaatttatttctgtttctgtggagtttccattatttctactgcttacactttagaatgtttattttatggggactaagggattaggagtgtgaactaaaaggtaacattttccactctcaagttttctactttgtctttgaactgaaaataaacatggatctagaaaacc

SEQ ID NO: 13056 - DNA, 1798 bp, Homo sapiens
  source 1..1798: mol_type = unassigned DNA
ctcgttcaccagagcacctactatgttccaggtggtatcataagaacttgggagacatcactaaacaaaatagaaaaatccctgcccttatggagctgacattctagtgggggcttggtttttttccttgggtactgggtttgtttttccatgatgagcatatcctatgatgcactatagcactcaagcaagatgcctgaagcaaaggaggccaaagtaatgattcatggattcagcacactttcctttgttgaaaagcactgcttgttccccctcaaagctatgtgagaggctgtgtaggagagagtggagagcaggtagcctaccggacctacagttcaccatttcagccctgtaattgaccagctgtgggacctcagtgtgaagcttattcatgaagagacctctgcctgaacatacagcaaatttaagaaggttgtgcagatagtctgaaggaggaccagcagagagaagagattccatcttccagagacatgaagccattattatatcaggaaccgaaatggccaagcatatccagaaagaaatacagcgaggtgtggaatcatgggtttcccttggaaacagaagacctcacctcagtataattttagtgggagataacccagcaagccatacatatgtcaggaataagataagagctgcctctgctgtaggtatttgtagtgagctcattctaaaacctaaggatgtttctcaggaagaacttttggacgtaactgatcaattgaatatggacccaagagtcagcggtatattagttcagttaccactaccagaccacgttgatgagcgaacaatatgcaatggaattgccccagaaaaagatgtagatggatttcatattatcaatattggaagattgtgccttgatcagcattctctcatacctgccactgccagtgctgtttgggaaataataaaaagaacaggaattcaaacatttggaaaaaatgtggttgtggctggaagatccaagaacgtagggatgcctattgccatgcttttacacactgatggagagcatgaacggccaggaggtgatgcaactgtgacaatagctcacagatacacccccaaagagcaactgaagattcatacgcagctggcagatattatcatagttgctgcagagagatttcaccattttgcccaggacctctccaactcctgaactcaagcgatccacctgcctcagcttcccaaagtgctgagattacaggcatgagccaccacacccggcactatataagtattttagaccttagaaaaacctatctagttttaaatttgtcttattaattttcttgacattgctaaaaaaagaagcatgtatatccattcatgcaatattcctcagcagtgaaaaggaatgaactattgatacagcaacctgaatgaatttccagcaaattatgaagtaaaaaaggcaatctcacatgttctttgttcaatcatagaatatatgattccatttatatagcattcttgaaagtgacaaaattagcggtttccgggagtcaaggacaggttgatgtgggagggaactgggtgtggctgtaataaggcaacatgagggacccttttgatgatggaaatgttctatatcttaactgtatcaatgtcaatatcctgggtataatattgtcctgtagtttggcaagatattatcattgtatagtatcttgtattatttcttacaatggatgtgaatctataattatcaaaaaatgacaatttaattaaagcatatagtaaataagtaaaaaaataaaaa

SEQ ID NO: 13057 - DNA, 689 bp, Homo sapiens
  source 1..689: mol_type = unassigned DNA
acaacaagtccccagggacagctaagcactccagtgtctagggactgtgggaaactggaaagaaacaatccagtgtaaatatgacttctaagctggctgttgctctactgctttcttggcagttgcatgctttctgtagcactgtgtgaagtgtgaagcttattcatgaagagacctctgcctgaacatacagcaaatttaagaaggttgtgcagatagtctgaaggaggaccagcagagagaagagattccatcttccagaggttgccactgtctgcctccccacttgtccccatccacagtcatcttttttatatatataatgacacattagttgtctagttcttcatagttaatgtggtttaagtctgacatcttttcttttgccatgaaatttacaccttagtgttattctcactgaaaattgcctttgagtttgataaactcttatcccagtgatattgactgttttaaattaacagatttatcaccatttctgagctgtgtagggccttaattgaaaaagtatctttgattattttttcacattttggccacatgcctataataatggaatatttacagtactttttagtggagaacttttttaagtagaatttcaataattaatgtttgatggagtttggaagttaccgtattttgaagtatcgtttaacattcttctctca

SEQ ID NO: 13058 - DNA, 954 bp, Homo sapiens
  source 1..954: mol_type = unassigned DNA
aatccagtgtaaatatgacttctaagctggctgttgctctactgctttcttggcagttgcatgctttctgtagcactgtgtgaagtgtgaagcttattcatgaagagacctctgcctgaacatacagcaaatttaagaaggttgtgcagatagtctgaaggaggctggtgcagcatggaaacacggatttgagctcattactccaattttcacgctgagtttggaagggtcctagagggaccagcagagagaagagattccatcttccagaggttgccactgtctgcctccccacttgtccccatccacagtcatcttttttatatatataatgacacattagttgtctagttcttcatagttaatgtggtttaagtctgacatcttttcttttgccatgaaatttacaccttagtgttattctcactgaaaattgcctttgagtttgataaactcttatcccagtgatattgactgttttaaattaacagatttatcaccatttctgagctgtgtagggccttaattgaaaaagtatctttgattattttttcacattttggccacatgcctataataatggaatatttacagtactttttagtggagaacttttttaagtagaatttcaataattaatgtttgatggagtttggaagttaccgtattttgaagtatcgtttaacattcttctctcaatgagttttcctttaaaatttgcagtgaatttgttttcctgtttatgcatgagaatttaggtcttattaattgggggaaattaatgttaaagtaataaataagcccttgttgcagcttattgtttcttgaaatgaattaactatccaggcaaaaggttaaaaatgaaaaaaaaagtctttgtaactaaatttttcccattttgttgtggtatttgaggagtttacaaatcaaaatgtcctgggttaaaaggcatca

SEQ ID NO: 13059 - DNA, 786 bp, Homo sapiens
  source 1..786: mol_type = unassigned DNA
agtgtaaatatgacttctaagctggctgttgctctactgctttcttggcagttgcatgctttctgtagcactgtgtgaagtgtgaagcttattcatgaagagacctctgcctgaacatacagcaaatttaagaaggttgtgcagatagtctgaaggaggctggtgcagcatggaaacacggatttgagctcattactccaattttcacgctgagtttggaagggtcctagaggacatgaagccattattatatcaggaaccgaaatggccaagcatatccagaaagaaatacagcgaggtgtggaatcatgggtttcccttggaaacagaagacctcacctcagtataattttagtgggagataacccagcaagccatacatatgtcaggaataagataagagctgcctctgctgtaggtatttgtagtgagctcattctaaaacctaaggatgtttctcaggaagaacttttggacgtaactgatcaattgaatatggacccaagagtcagcggtatattagttcagttaccactaccagaagctgtgcaactttgttcaggatttgaaatgctcgggatataagagtacacaggcttgctctttgtccagtagctgaccctaaagctaaggagaaataaaaatgaccgaatgcagatgctttcctactcctgtcctgaccgtgcagagattcttatcaataagtggtcactttgtcgagttgtctagtttgaagcctttgaggattagcaccttccagtttattcaagggaattggacaaagaa

SEQ ID NO: 13060 - DNA, 2007 bp, Homo sapiens
  source 1..2007: mol_type = unassigned DNA
gccccagtccggaagccggggatccgcggccatgacggtgccggtccgcggcttctcgctgctccgcggccgccttggccgagcgccggcgttgggcagaagcacagcaccctccgtaagggcaccgggagagcccgggagtgcgttccggggctttcggagcagcggtgtgaggaccagcagagagaagagattccatcttccagagacatgaagccattattatatcaggaaccgaaatggccaagcatatccagaaagaaatacagcgaggtgtggaatcatgggtttcccttggaaacagaagacctcacctcagtataattttagtgggagataacccagcaagccatacatatgtcaggaataagataagagctgcctctgctgtaggtatttgtagtgagctcattctaaaacctaaggatgtttctcaggaagaacttttggacgtaactgatcaattgaatatggacccaagagtcagcggtatattagttcagttaccactaccagaagctgtgcaactttgttcaggatttgaaatgctcgggatataagagtacacaggcttgctctttgtccagtagctgaccctaaagctaaggagaaataaaaatgaccgaatgcagatgctttcctactcctgtcctgaccgtgcagagattcttatcaataagtggtcactttgtcgagttgtctagtttgaagcctttgaggattagcaccttccagtttattcaagggaattggacaaagaaatgagaatgaactataggattaaaggataaaactaaagaagattgagcccatgtgactactggacaatagattgtaaaaggaagagacatttttggaaccacttccagactgagatggttaaaagctgttgtgccctcctccttcacttctgtttctgttgcattgttcttggaaactaggtattacagatggttgtaaattacaaaaagtagggcagtagaattcttattggacttgacatgaataagaaataaatacccttttataaatgactgggatttcagatttttttaaacctataaactcacagatcaaagaagctcaccaaactctcaagctcatgaaacatgaagaaaactatgccaaagaacaccataatcaaattattcaaaaccactgatagaaaaaaatcttaaaagcaataagggggttgggggagggcattacatacaaaggaacaaagaggacagtgacagaatatttattgatagaaacaatgcaagcaagaagacaatagaacaatatctttaagtattaagaggaaaaaaaacacctgtaaacccaaatttctatacctagtgaaaataccttcaaaaacaaaggcaaaaagtcttttatgagacatgtgaggaagagagctcaaaactaaaaacaattatttactagcagacctatgatctaagaaatactaaaaggcccgggtgtggtggctcatgcctgtaatccctgcccttgtgggtggatcacttgaggtcaggagttcaagaccagcctggccaacatcgggaaaccccatctctactgaaaatacaaaaatcagctgggcattgtggtgcacacctgtaatcacagctactcaggaggttgagacaggaggattgcttggacctgggaagtggaggttggagtgagccaagatcatgccactggactccagcctgggcaacagagcaagactccatctcaacaaccacaacaaaaaagagatattaaaggaagtccttcacctagatggaaatgatactagatggaaatatggatctgtccaaggaattaagagctctggaagtggtaactacctgaataaatatatattattcatgtatatatatgttataatatattgttcttattcttattattcagattattttagaagataattaatgtttaaccaaagccaaaaacaatgtagtttgtggtttgtaacatacaattaaaatgtatggcaacaatagcacaaaa

SEQ ID NO: 13061 - DNA, 2363 bp, Homo sapiens
  source 1..2363: mol_type = unassigned DNA
ggaagccggggatccgcggccatgacggtgccggtccgcggcttctcgctgctccgcggccgccttggccgagcgccggcgttgggcagaagcacagcaccctccgtaagggcaccgggagagcccgggagtgcgttccggggctttcggagcagcggtgtgaggaccagcagagagaagagattccatcttccagaggttgccactgtctgcctccccacttgtccccatccacagtcatcttttttatatatataatgacacattagttgtctagttcttcatagttaatgtggtttaagtctgacatcttttcttttgccatgaaatttacaccttagtgttattctcactgaaaattgcctttgagtttgataaactcttatcccagtgatattgactgttttaaattaacagatttatcaccatttctgagctgtgtagggccttaattgaaaaagtatctttgattattttttcacattttggccacatgcctataataatggaatatttacagtactttttagtggagaacttttttaagtagaatttcaataattaatgtttgatggagtttggaagttaccgtattttgaagtatcgtttaacattcttctctcaatgagttttcctttaaaatttgcagtgaatttgttttcctgtttatgcatgagaatttaggtcttattaattgggggaaattaatgttaaagtaataaataagcccttgttgcagcttattgtttcttgaaatgaattaactatccaggcaaaaggttaaaaatgaaaaaaaaagtctttgtaactaaatttttcccattttgttgtggtatttgaggagtttacaaatcaaaatgtcctgggttaaaaggcatcacatgagtttgtgcccattgcttttcagtgtgaggagtctgatagcagcccatcccatttgggtgggaaggttatagaccttgcacattaatgccatgctcaaagcagatttgcaggtatcctgcaacacagggactttcacaaaacccgctttggcttattctacctgaactacttattttaattaactaaatggatatcccaagcattccatgtttatcctgttgctcagtgaatcctcaaatcgttaatttggtagattctcttttttgtcttcatactattatttcttttagcttttaaaaaaattgtgtactgcctacaggtctttatggaagtttcacctttctttgtgtcgcactggcatcggctgtataatttttgcagctagaccacattttaaaaaaatctacatttttggaactagtaaaagatacttatttgtgttatttaagtattcacgtcttttaccgtgggtagttaagtttaataatttaaaaagacacattttatcagtaacaatgttcattttatttttcagactcttccctctactacttactctgtatttctgtctcttctaatgactaggaaaggcagtttctcaaaatcatcttctatttagttggcaaatgtgataatgtgggtagtgttcctaccttcctgctgtatgtgttctactgaaatgagatataatagccatctggctacaattttgatttctaagaagttcttatgtcattttaaattcaaaaactaagtgtttcaacatttggtctctcatatcttaagttttattttctttgttccagctgttcagagatagtgtgttctaatatctccacaatcaagatttttgactaaaatggatcagtacatgaaaaagagggactagtattaattttagatcttgttagttaatcatggtcttactaataatttggcaagttctttaatgagccaaatctttgtatttcaaatgccttgaagttgttattctttcctattagtaccctgatgggaggatgaaaacagcagaaaggagcagcaccagatgatcttttcatgggcacgtactctttcaaggaatcccatggagctcagtgaaattacactttggcttagagataattaagttgtggaaggaggtttaagagaggagcttaggtgaaatttgagctgtaaatgagtatgctaaattaaagaaatgattagtaataaatgagatttgctattaagaaattcactttggatctgagacaacattttacatacaatgtagaaaactttatggtcagaacagaacacagtctgaacctaaattaacagtagtgttaaagaattcagggcgggatattatccaagaaggcctagccagctgctccacttaatgttacatcacaagtggtttctgtgttgctattgtttttattagcatttcaatgactgtgtcatattacattaaatcaattggctctaactta

SEQ ID NO: 13062 - DNA, 954 bp, Homo sapiens
  source 1..954: mol_type = unassigned DNA
ggtccgcggcttctcgctgctccgcggccgccttggccgagcgccggcgttgggcagaagcacagcaccctccgtaagggcaccgggagagcccgggagtgcgttccggggctttcggagcagcggtgtgaggaccagcagagagaagagattccatcttccagagacatgaagccattattatatcaggaaccgaaatggccaagcatatccagaaagaaatacagcgaggtgtggaatcatgggtttcccttggaaacagaagacctcacctcagtataattttagtgggagataacccagcaagccatacatatgtcaggaataagataagagctgcctctgctgtaggtatttgtagtgagctcattctaaaacctaaggatgtttctcaggaagaacttttggacgtaactgatcaattgaatatggacccaagagtcagcggtatattagttcagttaccactaccagaccacgttgatgagcgaacaatatgcaatggaattgccccagaaaaagatgtagatggatttcatattatcaatattggaagattgtgccttgatcagcattctctcatacctgccactgccagtgctgtttgggaaataataaaaagaacaggaattcaaacatttggaaaaaatgtggttgtggctggaagatccaagaacgtagggatgcctattgccatgcttttacacactgatggagagcatgaacggccaggaggtgatgcaactgtgacaatagctcacagatacacccccaaagagcaactgaagattcatacgcagctggcagatattatcatagttgctgcaggtattccaaagttgattacgtctgatatggttaaagaaggtgctgctgtaattgatgtgggtatcaactatgtccacgatccagtgacaggaaagacaaaattagttggagatgtggacttcgaag

SEQ ID NO: 13063 - DNA, 2300 bp, Homo sapiens
  source 1..2300: mol_type = unassigned DNA
gcggccgccttggccgagcgccggcgttgggcagaagcacagcaccctccgtaagggcaccgggagagcccgggagtgcgttccggggctttcggagcagcggtgtgagacatgaagccattattatatcaggaaccgaaatggccaagcatatccagaaagaaatacagcgaggtgtggaatcatgggtttcccttggaaacagaagacctcacctcagtataattttagtgggagataacccagcaagccatacatatgtcaggaataagataagagctgcctctgctgtaggtatttgtagtgagctcattctaaaacctaaggatgtttctcaggaagaacttttggacgtaactgatcaattgaatatggacccaagagtcagcggtatattagttcagttaccactaccagaccacgttgatgagcgaacaatatgcaatggaattgccccagaaaaagatgtagatggatttcatattatcaatattggaagattgtgccttgatcagcattctctcatacctgccactgccagtgctgtttgggaaataataaaaagaacaggaattcaaacatttggaaaaaatgtggttgtggctggaagatccaagaacgtagggatgcctattgccatgcttttacacactgatggagagcatgaacggccaggaggtgatgcaactgtgacaatagctcacagatacacccccaaagagcaactgaagattcatacgcagctggcagatattatcatagttgctgcaggtattccaaagttgattacgtctgatatggttaaagaaggtgctgctgtaattgatgtgggtatcaactatgtccacgatccagtgacaggaaagacaaaattagttggagatgtggacttcgaagctgttaaaaagaaagctggctttatcactccagttccaggaggtgtgggacccatgacagtggcaatgcttctgaagaacacccttctggcagctaaaaaaatcatttactagatcacatgaaaggataaagcaaactgaagtcatgctatttgtttatttgacaaagggtaaaacctttatattttactacaaagctatttatttctacatggtatttattttttcatgggtgaaatcattgtgaatcaattgattcacatagttttatgcatttcctgctaatttattttgagttttaagaaaacaaccaaaacaattccaatgaaaattttagtaacaattgtttattttgagggtatttgttcataacattaaaacaataaagggctcataataaataaatatatttttgacacaattaaatattacatagagtatgtttacaacaaatatcctgtcagccaaatggttacccatataaaatgtaatttaggttttgctacttgcatgctaacatttttaatgtattttatgatctatgtcatatattaaaaaagagcttgcttactacaagaaaaatattgaaatattgaaaatattgaaaatattattattgaaaataaaatcttgatctcaactatcccccaaatgcatcctataagtccatcctaatgagaaatgatgttctatttaaggaaaggaaaatattccgggaaggcaaaaaatgcagtgctgtttggaagtgtaatgattttatcacatggtgaatgactactaagagtaatgattatatcacattgtgaatgactacttgccacagtaaaaatacatgaagaatgtgttaggtttaaacgtcgtttctttcttctaaaaaatatttggttagtaccttcactgagcaatagtggaaaaataaaaaaataagtaaacagaaaaaactaaagttgtattttcccacaaatatagtatgaatgaggtcatattaaagaacagcaactgttaatgtttgttcacaaattcagaaatctaataggaaaacatgatactttcaatgtgccaaaactaaaccttagtatacaactaaaaatctcctgccttcttgcctacctgtcttccctcttctgttacagaatttgttcctcaaagtagatgcaatgtttctaacacaatttaaattaggaaatatatatgaatgtcgttgaagtctattttgagactgctaaagctattaattgatactgtgtttttatgcccaaatcccagtatgtttatgtaccaataatgactcttacccagcgcatgtctttatcagtgtgtactcgtgacgatttgtgtgaaaatagacttgatgtttataattaataccattacaactgtataataaaagcaatttgaagaaaa

SEQ ID NO: 13064 - DNA, 468 bp, Homo sapiens
  source 1..468: mol_type = unassigned DNA
ggccgccttggccgagcgccggcgttgggcagaagcacagcaccctccgtaagggcaccgggagagcccgggagtgcgttccggggctttcggagcagcggtgtgaggaccagcagagagaagagattccatcttccagagtaccctgatgggaggatgaaaacagcagaaaggagcagcaccagatgatcttttcatgggcacgtactctttcaaggaatcccatggagctcagtgaaattacactttggcttagagataattaagttgtggaaggaggtttaagagaggagcttaggtgaaatttgagctgtaaatgagtatgctaaattaaagaaatgattagtaataaatgagatttgctattaagaaattcactttggatctgagacaacattttacatacaatgtagaaaactttatggtcagaacagaacacagtctgaacctaaattaacagtagtgtta

SEQ ID NO: 13065 - DNA, 3181 bp, Homo sapiens
  source 1..3181: mol_type = unassigned DNA
ttataaatgcctgtatcagattggggacttaaagatttgcttctcctctggtgaaccacaggtacaatctctggtaagttatcttatccttagatgagcttcttggggtttgtttcctgtgtgtttgttcaggggtcattcagagatacagaatttgtatacaatgtatgggactcctttctgtggctttctcctttcctggatatatcgcttcaattttcaactacggtgttagccccaaacttcatcttttgatctcttaagcaagtaggactgaatatttctatccaaattctagctgtcctgtggctagaaaagcttttaaagtggagaactctttcagtgatttttttttctttaagctatctactttcctctacatctgtttgtttttagtgactttccatttttttcagatagttgtttttgtattttttcaaatgattttactgaagtttgcagttgttttctgtaagaagtttagtccaatataagctacttcacaatcactagaaactgaacctacatttttaaatagtgtggtcagaattgtcctcactgatgttaatcaagtttagcctaaagctgcctccttacatatttaagattagcctaaaggtttttctgtatattgtgaactataacaagtagaggtgtaaaccaatcgtggcccacacctgtgccaatcactgagttttggccaatcaagtgtagccagctgctcgaaccatgttcaaataaggcaaacactgagctgtaaccaatccagttgtttctgtacctcacttctgatttctgtgtgttgtgtccctttttttgtctacaaatcttcttctaccacgtggctgttctggagtctctctgaatctgctgtgattctggggggctgcccaattcgttaattgttcattgctcaattaaacatctttaaatttaatttggctgaagtttttcttttaacagtgagaatgtggtatttaagaaaacatttgaaagaaggtagggatttagcctaggtgacagttcttttttaggaaagccttccaggcagatagaaagctatagctaaggtggcaaaatgcctcatgttttcaaggaacatcaaggggaccagcttgatgctcacagattgagagaagacgagagtaaccagtgatgggattagacacatagctatggttttggtgcagtaaaaatcatgtagagccttgtttgcaatttttaaggtaataacattgcagggttttgagaaaagcaatgtgatcaaatatgtacttcaaaggtataactctattgctgttttgtgaataaattgtatggttgcacatatagaagaaggaaactaattaggaggctgtttcaagaattgacaggaagaataatgttcactcaaagtagagtagtatcatgaacatggtgagactgataaagtgctagatatattattatgaagaaagtcaacagattttccaatggtttggatgttaggtgtgagagaaagagggatatttaagatgactccaggttttcttggcaagtagcacagaaggatgggtttcccattatgaaccctgaaaatctgagacaaatgtcagtttattttgccaaggttgaagacatgcacccattagacagcctcagagtcctgaaaacatgtgcccaaggtagttgggccacagcttggttttatacattttagggagtcgtgagacatcaatcaacatatgtaagaagtacactggttccatccagaaaggcggggacaacttgaagcaggggaggagtcttccaggtcacagaccacgttgatgagcgaacaatatgcaatggaattgccccagaaaaagatgtagatggatttcatattatcaatattggaagattgtgccttgatcagcattctctcatacctgccactgccagtgctgtttgggaaataataaaaagaacaggaattcaaacatttggaaaaaatgtggttgtggctggaagatccaagaacgtagggatgcctattgccatgcttttacacactgatggagagcatgaacggccaggaggtgatgcaactgtgacaatagctcacagatacacccccaaagagcaactgaagattcatacgcagctggcagatattatcatagttgctgcaggtattccaaagttgattacgtctgatatggttaaagaaggtgctgctgtaattgatgtgggtatcaactatgtccacgatccagtgacaggaaagacaaaattagttggagatgtggacttcgaagctgttaaaaagaaagctggctttatcactccagttccaggaggtgtgggacccatgacagtggcaatgcttctgaagaacacccttctggcagctaaaaaaatcatttactagatcacatgaaaggataaagcaaactgaagtcatgctatttgtttatttgacaaagggtaaaacctttatattttactacaaagctatttatttctacatggtatttattttttcatgggtgaaatcattgtgaatcaattgattcacatagttttatgcatttcctgctaatttattttgagttttaagaaaacaaccaaaacaattccaatgaaaattttagtaacaattgtttattttgagggtatttgttcataacattaaaacaataaagggctcataataaataaatatatttttgacacaattaaatattacatagagtatgtttacaacaaatatcctgtcagccaaatggttacccatataaaatgtaatttaggttttgctacttgcatgctaacatttttaatgtattttatgatctatgtcatatattaaaaaagagcttgcttactacaagaaaaatattgaaatattgaaaatattgaaaatattattattgaaaataaaatcttgatctcaactatcccccaaatgcatcctataagtccatcctaatgagaaatgatgttctatttaaggaaaggaaaatattccgggaaggcaaaaaatgcagtgctgtttggaagtgtaatgattttatcacatggtgaatgactactaagagtaatgattatatcacattgtgaatgactacttgccacagtaaaaatacatgaagaatgtgttaggtttaaacgtcgtttctttcttctaaaaaatatttggttagtaccttcactgagc

SEQ ID NO: 13066 - DNA, 593 bp, Homo sapiens
  source 1..593: mol_type = unassigned DNA
gaggaggtcctgtgcagccttctgactcctttattactttcacagagtcagattgctttcttctaaaatagcccctctatgtgatgcaactgtgacaatagctcacagatacacccccaaagagcaactgaagattcatacgcagctggcagatattatcatagttgctgcaggtattccaaagttgattacgtctgatatggttaaagaaggtgctgctgtaattgatgtgggtatcaactatgtccacgatccagtgacaggaaagacaaaattagttggagatgtggacttcgaagctgttaaaaagaaagctggctttatcactccagttccaggaggtgtgggacccatgacagtggcaatgcttctgaagaacacccttctggcagctaaaaaaatcatttactagatcacatgaaaggataaagcaaactgaagtcatgctatttgtttatttgacaaagggtaaaacctttatattttactacaaagctatttatttctacatggtatttattttttcatgggtgaaatcattgtgaatcaattgattcacatagttttatgcatttcctgctaatttattttga

SEQ ID NO: 13067 - DNA, 1268 bp, Homo sapiens
  source 1..1268: mol_type = unassigned DNA
gacagaagtgacattatgctggtttcccagtccaagcattaagaggctggtaactaatacttcttgtctcctggaacactcactcttggaagccagctgccaagctgtgagaaaccaagccccatgaagagttcatgcatatgtgttccagttgacagccttagctatgctcccagccaatcacaagcatccactgcaaccatgtattccaaagttgattacgtctgatatggttaaagaaggtgctgctgtaattgatgtgggtatcaactatgtccacgatccagtgacaggaaagacaaaattagttggagatgtggacttcgaagctgttaaaaagaaagctggctttatcactccagttccaggaggtgtgggacccatgacagtggcaatgcttctgaagaacacccttctggcagctaaaaaaatcatttactagatcacatgaaaggataaagcaaactgaagtcatgctatttgtttatttgacaaagggtaaaacctttatattttactacaaagctatttatttctacatggtatttattttttcatgggtgaaatcattgtgaatcaattgattcacatagttttatgcatttcctgctaatttattttgagttttaagaaaacaaccaaaacaattccaatgaaaattttagtaacaattgtttattttgagggtatttgttcataacattaaaacaataaagggctcataataaataaatatatttttgacacaattaaatattacatagagtatgtttacaacaaatatcctgtcagccaaatggttacccatataaaatgtaatttaggttttgctacttgcatgctaacatttttaatgtattttatgatctatgtcatatattaaaaaagagcttgcttactacaagaaaaatattgaaatattgaaaatattgaaaatattattattgaaaataaaatcttgatctcaactatcccccaaatgcatcctataagtccatcctaatgagaaatgatgttctatttaaggaaaggaaaatattccgggaaggcaaaaaatgcagtgctgtttggaagtgtaatgattttatcacatggtgaatgactactaagagtaatgattatatcacattgtgaatgactacttgccacagtaaaaatacatgaagaatgtgttaggtttaaacgtcgtttctttcttctaaaaaatatttggttagtaccttcactgagcaatagtggaaaaataaaaaaataagtaaacagaaaaa

SEQ ID NO: 13068 - DNA, 478 bp, Homo sapiens
  source 1..478: mol_type = unassigned DNA
gtattccaaagttgattacgtctgatatggttaaagaaggtgctgctgtaattgatgtgggtatcaactatgtccacgatccagtgacaggaaagacaaaattagttggagatgtggacttcgaaggaaaagtgaaagagagagcccagaacaataaaatccatctttaataaaattgaactagaaggtgcatgcatcacatctgctagctttctactgacctgaatatagtcatgtgtggagtacaagggatgtggaatccatagtctctgaatgggaggctacactttggatgccacgataatgaacatctcaatatatttagaaaacttgtggaaacctcaagattcagcaaccagatgaatgtaagaagaaatatagtaaattccctccggagcacttgattcctggttgccttccaagttcaatggcaagctactaacttgttaaggagccctctgctccctggttcaccatg

SEQ ID NO: 13069 - DNA, 2354 bp, Homo sapiens
  source 1..2354: mol_type = unassigned DNA
cagtccggaagccggggatccgcggccatgacggtgccggtccgcggcttctcgctgctccgcggccgccttggccgagcgccggcgttgggcagaagcacagcaccctccgtaagggcaccgggagagcccgggagtgcgttccggggctttcggagcagcggtgtgagacatgaagccattattatatcaggaaccgaaatggccaagcatatccagaaagaaatacagcgaggtgtggaatcatgggtttcccttggaaacagaagacctcacctcagtataattttagtgggagataacccagcaagccatacatatgtcaggaataagataagagctgcctctgctgtaggtatttgtagtgagctcattctaaaacctaaggatgtttctcaggaagaacttttggacgtaactgatcaattgaatatggacccaagagtcagcggtatattagttcagttaccactaccagaccacgttgatgagcgaacaatatgcaatggaattgccccagaaaaagatgtagatggatttcatattatcaatattggaagattgtgccttgatcagcattctctcatacctgccactgccagtgctgtttgggaaataataaaaagaacaggaattcaaacatttggaaaaaatgtggttgtggctggaagatccaagaacgtagggatgcctattgccatgcttttacacactgatggagagcatgaacggccaggaggtgatgcaactgtgacaatagctcacagatacacccccaaagagcaactgaagattcatacgcagctggcagatattatcatagttgctgcaggtattccaaagttgattacgtctgatatggttaaagaaggtgctgctgtaattgatgtgggtatcaactatgtccacgatccagtgacaggaaagacaaaattagttggagatgtggacttcgaagctgttaaaaagaaagctggctttatcactccagttccaggaggtgtgggacccatgacagtggcaatgcttctgaagaacacccttctggcagctaaaaaaatcatttactagatcacatgaaaggataaagcaaactgaagtcatgctatttgtttatttgacaaagggtaaaacctttatattttactacaaagctatttatttctacatggtatttattttttcatgggtgaaatcattgtgaatcaattgattcacatagttttatgcatttcctgctaatttattttgagttttaagaaaacaaccaaaacaattccaatgaaaattttagtaacaattgtttattttgagggtatttgttcataacattaaaacaataaagggctcataataaataaatatatttttgacacaattaaatattacatagagtatgtttacaacaaatatcctgtcagccaaatggttacccatataaaatgtaatttaggttttgctacttgcatgctaacatttttaatgtattttatgatctatgtcatatattaaaaaagagcttgcttactacaagaaaaatattgaaatattgaaaatattgaaaatattattattgaaaataaaatcttgatctcaactatcccccaaatgcatcctataagtccatcctaatgagaaatgatgttctatttaaggaaaggaaaatattccgggaaggcaaaaaatgcagtgctgtttggaagtgtaatgattttatcacatggtgaatgactactaagagtaatgattatatcacattgtgaatgactacttgccacagtaaaaatacatgaagaatgtgttaggtttaaacgtcgtttctttcttctaaaaaatatttggttagtaccttcactgagcaatagtggaaaaataaaaaaataagtaaacagaaaaaactaaagttgtattttcccacaaatatagtatgaatgaggtcatattaaagaacagcaactgttaatgtttgttcacaaattcagaaatctaataggaaaacatgatactttcaatgtgccaaaactaaaccttagtatacaactaaaaatctcctgccttcttgcctacctgtcttccctcttctgttacagaatttgttcctcaaagtagatgcaatgtttctaacacaatttaaattaggaaatatatatgaatgtcgttgaagtctattttgagactgctaaagctattaattgatactgtgtttttatgcccaaatcccagtatgtttatgtaccaataatgactcttacccagcgcatgtctttatcagtgtgtactcgtgacgatttgtgtgaaaatagacttgatgtttataattaataccattacaactgtataataaaagcaatttg

SEQ ID NO: 13070 - DNA, 1407 bp, Homo sapiens
  source 1..1407: mol_type = unassigned DNA
agtgtgaagcttattcatgaagagacctctgcctgaacatacagcaaatttaagaaggttgtgcagatagtctgaaggaggaccagcagagagaagagattccatcttccagagacatgaagccattattatatcaggaaccgaaatggccaagcatatccagaaagaaatacagcgaggtgtggaatcatgggtttcccttggaaacagaagacctcacctcagtataattttagtgggagataacccagcaagccatacatatgtcaggaataagataagagctgcctctgctgtaggtatttgtagtgagctcattctaaaacctaaggatgtttctcaggaagaacttttggacgtaactgatcaattgaatatggacccaagagtcagcggtatattagttcagttaccactaccagaccacgttgatgagcgaacaatatgcaatggaattgccccagaaaaagatgtagatggatttcatattatcaatattggaagattgtgccttgatcagcattctctcatacctgccactgccagtgctgtttgggaaataataaaaagaacaggaattcaaacatttggaaaaaatgtggttgtggctggaagatccaagaacgtagggatgcctattgccatgcttttacacactgatggagagcatgaacggccaggaggtgatgcaactgtgacaatagctcacagatacacccccaaagagcaactgaagattcatacgcagctggcagatattatcatagttgctgcagagagatttcaccattttgcccaggacctctccaactcctgaactcaagcgatccacctgcctcagcttcccaaagtgctgagattacaggcatgagccaccacacccggcactatataagtattttagaccttagaaaaacctatctagttttaaatttgtcttattaattttcttgacattgctaaaaaaagaagcatgtatatccattcatgcaatattcctcagcagtgaaaaggaatgaactattgatacagcaacctgaatgaatttccagcaaattatgaagtaaaaaaggcaatctcacatgttctttgttcaatcatagaatatatgattccatttatatagcattcttgaaagtgacaaaattagcggtttccgggagtcaaggacaggttgatgtgggagggaactgggtgtggctgtaataaggcaacatgagggacccttttgatgatggaaatgttctatatcttaactgtatcaatgtcaatatcctgggtataatattgtcctgtagtttggcaagatattatcattgtatagtatcttgtattatttcttacaatggatgtgaatctataattatcaaaaaatgacaatttaattaaagcatatagtaaataagt

SEQ ID NO: 13071 - DNA, 3013 bp, Homo sapiens
  source 1..3013: mol_type = unassigned DNA
aagcgtcgcacagcgactgcatcaccatggagccgagggcagtaggtgtctccaaacaggacatacgtgaacaaatttggggctacatggaatcacaaaatttagctgactttccccgacctgttcatcacaggatacccaactttaaggggtcttatctggcttgccaaaacatcaaagacctagacgtttttgccagaacacaggaagttaaagtggaccctgataaaccactggaaggcgttcggctgctggtgctgcagagcaaaaaaacattgttggttccaacaccacgactgagaacgggattgtttaataagatcacaccaccccctggggcaactaaagacatcttgagaaaatgtgccacctctcagggtgtgaggaactacagtgtccccataggcttggactccagagtcctcgtggatttagttgtggtgggatccgtcgccgtttctgaaaaaggctggagaatcgggaagggagaaggctacgccgatctggaatatgccatgatggtatccatgggcgccgtcagcaaggagacgccggtggtcaccatcgtccacgactgccaggtcgtggacatccctgaagagcttgttgaggagcacgacatcactgtggactacatcctcactccaaccagagtcatcgccacaggctgcaagcgcccaaagccaatgggaatcacctggttcaagatcagcctggagatgatggagaaaatccccatactgaggagcctccgcgcccgagagcagcaggctgggaaggatgtcaccctccagggtgagcaccagcaccttccggaaccaggctgccagcagacagtgcccctgagtgttggcaggaggcccccggacacacccggaccagaaaccaattccatggaggcagcccctggctccccaccaggggagggtgccccgcttgcagccgatgtttacgttgggaacctccccggggacgcccgtgtgagtgacctgaagagagccctgcgggaactcggctccgtgcccctgcggctcacctggcagggcccgcggcgcagagccttcctccattacccggactctgccgcagcccagcaggccgtctcctgcttgcagggcctgcgcctgggcaccgacaccctgagggtggcgctggccaggcagcagagggacaagtgacctcgtggacagccacggagctcactgcagactcgccatccccgtcccctgccgctccggttccgatggcactcgagaggcctgcgtggcaagacgtgtcggagccaccgcctgagctgctcgggtctcaattcttctcagaagtcaccgctcagtgaacgcccaggccctcctgtgagtggggaagccgccctgcggttcatctcacagcgcgcagagactgcagcctcccaatcgtgcaggctcgggccttgagtcggtttctgtttctctggagggacagagcagaggggccagggactgagtgagtggctaagcaggggagggtgatgtgaaggtgatctcgagtttgccaggggtgggctgaacaggagaagatgaacaaaggatccggctctcaaaaggccctggcagggactggatgctgggtacagaagcgcgcccttgggcttcaggctcctgagctggcagcacggcagggagagctccatccatgtcgcaggagcccaggaagctcagcccctgggtaaaaagtgctcactgcagctcagatcagtcctcaggtcacatttcggggagccagcctcccctcttcccctccccagccccgctcctccctctgtggacacactccgggccctcagccagctggctgcatgaggagcagctttgtgctgtgggagagaccggctctgggagaatgggtttcatcccagcctacgtcacatttgcccagtgccttatgttttctgggtttttttcctccagttctgtttctaaaaaccagcttgagtttggctgaactgtcctttctcaacagaagcgcttttgcaattgatcccgggcaacaagtcaaaataagcttttaagtggagattttgtttttttcaaatgtatatgctttggaaattttgattttttagccagagggttttaccaagtgttctttgaagcacattacgatgcctcgagagggcggcccgtgcacgcgctttcaagaaaatgttctcgggacactcggtcttctctttgaaaggacattttctcattggttttgccgtgaaaatcctgtggagacttcgcaaagaaaacgcagccttacatttgctcattaaagacagatttccttcccaagtcgccatgaataaaatgagagagtagaaacgtctggaagcgccacacctggccctgggccctcggccctctgtgtccttggccttgcccccgcccgcacggctggtcacgtttgtcattgggcattcagctcagcgtcagaggctgactcagtccccagttcagagtagtcacctggttacactgaactcctcaccttcttttctctctttttttaaaaaatacttctttttctgaaagattcttatttttttttttttgtttacctttttcctgtggatttgctgccgttagaatagcaactccaggagaagagcaagtgagtcagccccccttctccactccctgccccaccggcagtgggcacagccctgcagacaggagcaaggacttcggggaatagacccactggggccgggagagggagaagctggattctgaccccaccactggcactcctgtgtccagccatgcctgacgcccaccccaccctcagacggcgggattaaaccaggcagtacagggttactcggggaagccagactgctgggatttcctgtcgctttagccagaataatccaggtatatggatatacagataatctgaaagagtttctcatttttatatttgtggaacatcgtgtaagaaaaactgaagagcaagtgcctgaaataaaatcccccacatgtatcagcctgca

SEQ ID NO: 13072 - DNA, 3623 bp, Homo sapiens
  source 1..3623: mol_type = unassigned DNA
tattgatgcttaacttggggcctgtgtacttcttgtagtttggaggcccatgaatagtctttatcgaccctgggaaattgtacagaaaattgtgggtgagtcattcttgggagggaaccccagctcctcacaaaggctcctctctcaccctgccaaggataaggaccattgctctaaattacatattattctgaatgtaatgagagcattgatactagttgaactatttcatcttgtagaacaatttacagttgtctagctcatgtgctgccctgtactgcgacatattcacttctgttggaggcctgcaggtgaccatggcttgcctcttgatgaccatgctcatgtgaaagcttggtgcccaaaagaaaaataaaaagcatctctaaagaatgagaattgtcaaaaaggactacacagtgtctgtctgtttcttttttgcacagggcacggtggtccaggcgtcacctgacttgtcctgacccataggcagcccccagtgcaaactgccccacaggacagagccatcaggccttcaccatttaggctgcatcaagccagttccagtctgttccaaggggcccgctgccgtagctaattgattagaaaaatccagataaagccaaagatgtcctttgtctgcaagtcgcatacaattgagacttaagtttcgcatagcgttactgatttcatagtttgatgacccatcgctaggaagtgttttcaaagctgtgtttcagacttgccttgcttctgcatttttggctgtgcattgaagggggtgacccctgagagacgttccttcaggggagaggagacccctgtggtcttattaaagtcctcatcccacccaaaggtacaggtagggggcagatgcggaggcagctccccattattctgggggggtcattaggggagctgccttttgtgaccctataatcccaatagtagcaatcttaggtgcctcttctgggtaggaggcctgagcagagagccccagctttactttcctgcttctgggcctggaggaaaatggaggcccaaccctgcagcctccacagctcgtggcaaacgctccagagcccccgtgagtgctgacttcccttaagccaggggcgaggggcagagctacagactggtgacatcgtctgtgtgagatagtgggtgggacagtgggagtcccatgtccctggggctcagaccacttggcatccagtccacgtgtgcagcacagccagtagtcagaggtgtggatgcgtgtgtggcaggtgcccctgcgattctgtccctgaaagagctgcaactgctttgcttttcagatcagcctggagatgatggagaaaatccccatactgaggagcctccgcgcccgagagcagcaggctgggaaggatgtcaccctccagggtgagcaccagcaccttccggaaccaggctgccagcagacagtgcccctgagtgttggcaggaggcccccggacacacccggaccagaaaccaattccatggaggcagcccctggctccccaccaggggagggtgccccgcttgcagccgatgtttacgttgggaacctccccggggacgcccgtgtgagtgacctgaagagagccctgcgggaactcggctccgtgcccctgcggctcacctggcagggcccgcggcgcagagccttcctccattacccggactctgccgcagcccagcaggccgtctcctgcttgcagggcctgcgcctgggcaccgacaccctgagggtggcgctggccaggcagcagagggacaagtgacctcgtggacagccacggagctcactgcagactcgccatccccgtcccctgccgctccggttccgatggcactcgagaggcctgcgtggcaagacgtgtcggagccaccgcctgagctgctcgggtctcaattcttctcagaagtcaccgctcagtgaacgcccaggccctcctgtgagtggggaagccgccctgcggttcatctcacagcgcgcagagactgcagcctcccaatcgtgcaggctcgggccttgagtcggtttctgtttctctggagggacagagcagaggggccagggactgagtgagtggctaagcaggggagggtgatgtgaaggtgatctcgagtttgccaggggtgggctgaacaggagaagatgaacaaaggatccggctctcaaaaggccctggcagggactggatgctgggtacagaagcgcgcccttgggcttcaggctcctgagctggcagcacggcagggagagctccatccatgtcgcaggagcccaggaagctcagcccctgggtaaaaagtgctcactgcagctcagatcagtcctcaggtcacatttcggggagccagcctcccctcttcccctccccagccccgctcctccctctgtggacacactccgggccctcagccagctggctgcatgaggagcagctttgtgctgtgggagagaccggctctgggagaatgggtttcatcccagcctacgtcacatttgcccagtgccttatgttttctgggtttttttcctccagttctgtttctaaaaaccagcttgagtttggctgaactgtcctttctcaacagaagcgcttttgcaattgatcccgggcaacaagtcaaaataagcttttaagtggagattttgtttttttcaaatgtatatgctttggaaattttgattttttagccagagggttttaccaagtgttctttgaagcacattacgatgcctcgagagggcggcccgtgcacgcgctttcaagaaaatgttctcgggacactcggtcttctctttgaaaggacattttctcattggttttgccgtgaaaatcctgtggagacttcgcaaagaaaacgcagccttacatttgctcattaaagacagatttccttcccaagtcgccatgaataaaatgagagagtagaaacgtctggaagcgccacacctggccctgggccctcggccctctgtgtccttggccttgcccccgcccgcacggctggtcacgtttgtcattgggcattcagctcagcgtcagaggctgactcagtccccagttcagagtagtcacctggttacactgaactcctcaccttcttttctctctttttttaaaaaatacttctttttctgaaagattcttatttttttttttttgtttacctttttcctgtggatttgctgccgttagaatagcaactccaggagaagagcaagtgagtcagccccccttctccactccctgccccaccggcagtgggcacagccctgcagacaggagcaaggacttcggggaatagacccactggggccgggagagggagaagctggattctgaccccaccactggcactcctgtgtccagccatgcctgacgcccaccccaccctcagacggcgggattaaaccaggcagtacagggttactcggggaagccagactgctgggatttcctgtcgctttagccagaataatccaggtatatggatatacagataatctgaaagagtttctcatttttatatttgtggaacatcgtgtaagaaaaactgaagagcaagtgcctgaaataaaatcccccacatgtatcagcctg

SEQ ID NO: 13073 - DNA, 2451 bp, Homo sapiens
  source 1..2451: mol_type = unassigned DNA
actacgcgccagaacctgcgccgggaagcgtcgcacagcgactgcatcaccatggagccgagggtgtctccaaacaggacatacgtgaacaaatttggggctacatggaatcacaaaatttagctgactttccccgacctgttcatcacaggatacccaactttaagggcgcttctcatgctgccgagcaactcccacgcttgcaggcgttcaaaacggccaggaccattaaagtaaatcctgatgccccccagaaaagtgctcgcttcttcgtccttgaaagcaaaaaaacattgttggttccaacaccacgactgagaacgggattgtttaataagatcacaccaccccctggggcaactaaagacatcttgagaaaatgtgccacctctcaggtgccaccagagcgactggggagacaggatagaatttccaaaacatgctccattggaaattgcctcaccagttctaaggtgtgaggaactacagtgtccccataggcttggactccagagtcctcgtggatttagttgtggtgggatccgtcgccgtttctgaaaaaggctggagaatcgggaagggagaaggctacgccgatctggaatatgccatgatggtatccatgggcgccgtcagcaaggagacgccggtggtcaccatcgtccacgactgccaggtcgtggacatccctgaagagcttgttgaggagcacgacatcactgtggactacatcctcactccaaccagagtcatcgccacaggctgcaagcgcccaaagccaatgggaatcacctggttcaagatcagcctggagatgatggagaaaatccccatactgaggagcctccgcgcccgagagcagcaggctgggaaggatgtcaccctccagggtgagcaccagcaccttccggaaccaggctgccagcagacagtgcccctgagtgttggcaggaggcccccggacacacccggaccagaaaccaattccatggaggcagcccctggctccccaccaggggagggtgccccgcttgcagccgatgtttacgttgggaacctccccggggacgcccgtgtgagtgacctgaagagagccctgcgggaactcggctccgtgcccctgcggctcacctggcagggcccgcggcgcagagccttcctccattacccggactctgccgcagcccagcaggccgtctcctgcttgcagggcctgcgcctgggcaccgacaccctgagggtggcgctggccaggcagcagagggacaagtgacctcgtggacagccacggagctcactgcagactcgccatccccgtcccctgccgctccggttccgatggcactcgagaggcctgcgtggcaagacgtgtcggagccaccgcctgagctgctcgggtctcaattcttctcagaagtcaccgctcagtgaacgcccaggccctcctgtgagtggggaagccgccctgcggttcatctcacagcgcgcagagactgcagcctcccaatcgtgcaggctcgggccttgagtcggtttctgtttctctggagggacagagcagaggggccagggactgagtgagtggctaagcaggggagggtgatgtgaaggtgatctcgagtttgccaggggtgggctgaacaggagaagatgaacaaaggatccggctctcaaaaggccctggcagggactggatgctgggtacagaagcgcgcccttgggcttcaggctcctgagctggcagcacggcagggagagctccatccatgtcgcaggagcccaggaagctcagcccctgggtaaaaagtgctcactgcagctcagatcagtcctcaggtcacatttcggggagccagcctcccctcttcccctccccagccccgctcctccctctgtggacacactccgggccctcagccagctggctgcatgaggagcagctttgtgctgtgggagagaccggctctgggagaatgggtttcatcccagcctacgtcacatttgcccagtgccttatgttttctgggtttttttcctccagttctgtttctaaaaaccagcttgagtttggctgaactgtcctttctcaacagaagcgcttttgcaattgatcccgggcaacaagtcaaaataagcttttaagtggagattttgtttttttcaaatgtatatgctttggaaattttgattttttagccagagggttttaccaagtgttctttgaagcacattacgatgcctcgagagggcggcccgtgcacgcgctttcaagaaaatgttctcgggacactcggtcttctctttgaaaggacattttctcattggttttgccgtgaaaatcctgtggagacttcgcaaagaaaacgcagccttacatttgctcattaaagacagatttccttcccaagtcgccatgaataaaatgagagagtagaaacgtctggaagcgcc

SEQ ID NO: 13074 - DNA, 1207 bp, Homo sapiens
  source 1..1207: mol_type = unassigned DNA
gcacagcgactgcatcaccatggagccgagggcaggtgtctccaaacaggacatacgtgaacaaatttggggctacatggaatcacaaaatttagctgactttccccgacctgttcatcacaggatacccaactttaaggggtcttatctggcttgccaaaacatcaaagacctagacgtttttgccagaacacaggaagttaaagtggaccctgataaaccactggaaggcgttcggctgctggtgctgcagagcaaaaaaacattgttggttccaacaccacgactgagaacgggattgtttaataagatcacaccaccccctggggcaactaaagacatcttgagaaaatgtgccacctctcagggtgtgaggaactacagtgtccccataggcttggactccagagtcctcgtggatttagttgtggtgggatccgtcgccgtttctgaaaaaggctggagaatcgggaagggagaaggctacgccgatctggaatatgccatgatggtatccatgggcgccgtcagcaaggagacgccggtggtcaccatcgtccacgactgccaggtcgtggacatccctgaagagcttgttgaggagcacgacatcactgtggactacatcctcactccaaccagagtcatcgccacaggctgcaagcgcccaaagccaatgggaatcacctggttcaagatcagcctggagatgatggagaaaatccccatactgaggagcctccgcgcccgagagcagcaggctgggaaggatgtcaccctccagggtgagcaccagcaccttccggaaccaggctgccagcagacagtgcccctgagtgttggcaggaggcccccggacacacccggaccagaaaccaattccatggaggcagcccctggctccccaccaggggagggtgccccgcttgcagccgatgtttacgttgggaacctccccggggacgcccgtgtgagtgacctgaagagagccctgcgggaactcggctccgtgcccctgcggctcacctggcagggcccgcggcgcagagccttcctccattacccggactctgccgcagcccagcaggccgtctcctgcttgcagggcctgcgcctgggcaccgacaccctgagggtggcgctggccaggcagcagagggacaagtgacctcgtggacagccacggagctcactgcagactcgccat

SEQ ID NO: 13075 - DNA, 1207 bp, Homo sapiens
  source 1..1207: mol_type = unassigned DNA
gcacagcgactgcatcaccatggagccgagggcaggtgtctccaaacaggacatacgtgaacaaatttggggctacatggaatcacaaaatttagctgactttccccgacctgttcatcacaggatacccaactttaagggcgcttctcatgctgccgagcaactcccacgcttgcaggcgttcaaaacggccaggaccattaaagtaaatcctgatgccccccagaaaagtgctcgcttcttcgtccttgaaagcaaaaaaacattgttggttccaacaccacgactgagaacgggattgtttaataagatcacaccaccccctggggcaactaaagacatcttgagaaaatgtgccacctctcagggtgtgaggaactacagtgtccccataggcttggactccagagtcctcgtggatttagttgtggtgggatccgtcgccgtttctgaaaaaggctggagaatcgggaagggagaaggctacgccgatctggaatatgccatgatggtatccatgggcgccgtcagcaaggagacgccggtggtcaccatcgtccacgactgccaggtcgtggacatccctgaagagcttgttgaggagcacgacatcactgtggactacatcctcactccaaccagagtcatcgccacaggctgcaagcgcccaaagccaatgggaatcacctggttcaagatcagcctggagatgatggagaaaatccccatactgaggagcctccgcgcccgagagcagcaggctgggaaggatgtcaccctccagggtgagcaccagcaccttccggaaccaggctgccagcagacagtgcccctgagtgttggcaggaggcccccggacacacccggaccagaaaccaattccatggaggcagcccctggctccccaccaggggagggtgccccgcttgcagccgatgtttacgttgggaacctccccggggacgcccgtgtgagtgacctgaagagagccctgcgggaactcggctccgtgcccctgcggctcacctggcagggcccgcggcgcagagccttcctccattacccggactctgccgcagcccagcaggccgtctcctgcttgcagggcctgcgcctgggcaccgacaccctgagggtggcgctggccaggcagcagagggacaagtgacctcgtggacagccacggagctcactgcagactcgccat

SEQ ID NO: 13076 - DNA, 1210 bp, Homo sapiens
  source 1..1210: mol_type = unassigned DNA
gcacagcgactgcatcaccatggagccgagggcagtaggtgtctccaaacaggacatacgtgaacaaatttggggctacatggaatcacaaaatttagctgactttccccgacctgttcatcacaggatacccaactttaagggcgcttctcatgctgccgagcaactcccacgcttgcaggcgttcaaaacggccaggaccattaaagtaaatcctgatgccccccagaaaagtgctcgcttcttcgtccttgaaagcaaaaaaacattgttggttccaacaccacgactgagaacgggattgtttaataagatcacaccaccccctggggcaactaaagacatcttgagaaaatgtgccacctctcagggtgtgaggaactacagtgtccccataggcttggactccagagtcctcgtggatttagttgtggtgggatccgtcgccgtttctgaaaaaggctggagaatcgggaagggagaaggctacgccgatctggaatatgccatgatggtatccatgggcgccgtcagcaaggagacgccggtggtcaccatcgtccacgactgccaggtcgtggacatccctgaagagcttgttgaggagcacgacatcactgtggactacatcctcactccaaccagagtcatcgccacaggctgcaagcgcccaaagccaatgggaatcacctggttcaagatcagcctggagatgatggagaaaatccccatactgaggagcctccgcgcccgagagcagcaggctgggaaggatgtcaccctccagggtgagcaccagcaccttccggaaccaggctgccagcagacagtgcccctgagtgttggcaggaggcccccggacacacccggaccagaaaccaattccatggaggcagcccctggctccccaccaggggagggtgccccgcttgcagccgatgtttacgttgggaacctccccggggacgcccgtgtgagtgacctgaagagagccctgcgggaactcggctccgtgcccctgcggctcacctggcagggcccgcggcgcagagccttcctccattacccggactctgccgcagcccagcaggccgtctcctgcttgcagggcctgcgcctgggcaccgacaccctgagggtggcgctggccaggcagcagagggacaagtgacctcgtggacagccacggagctcactgcagactcgccat

SEQ ID NO: 13077 - DNA, 1270 bp, Homo sapiens
  source 1..1270: mol_type = unassigned DNA
gcacagcgactgcatcaccatggagccgagggcagtaggtgtctccaaacaggacatacgtgaacaaatttggggctacatggaatcacaaaatttagctgactttccccgacctgttcatcacaggatacccaactttaaggggtcttatctggcttgccaaaacatcaaagacctagacgtttttgccagaacacaggaagttaaagtggaccctgataaaccactggaaggcgttcggctgctggtgctgcaggtaattccacttccctgagccgagccgagacctggccgccaagggggacaccttttccagagcaaaaaaacattgttggttccaacaccacgactgagaacgggattgtttaataagatcacaccaccccctggggcaactaaagacatcttgagaaaatgtgccacctctcagggtgtgaggaactacagtgtccccataggcttggactccagagtcctcgtggatttagttgtggtgggatccgtcgccgtttctgaaaaaggctggagaatcgggaagggagaaggctacgccgatctggaatatgccatgatggtatccatgggcgccgtcagcaaggagacgccggtggtcaccatcgtccacgactgccaggtcgtggacatccctgaagagcttgttgaggagcacgacatcactgtggactacatcctcactccaaccagagtcatcgccacaggctgcaagcgcccaaagccaatgggaatcacctggttcaagatcagcctggagatgatggagaaaatccccatactgaggagcctccgcgcccgagagcagcaggctgggaaggatgtcaccctccagggtgagcaccagcaccttccggaaccaggctgccagcagacagtgcccctgagtgttggcaggaggcccccggacacacccggaccagaaaccaattccatggaggcagcccctggctccccaccaggggagggtgccccgcttgcagccgatgtttacgttgggaacctccccggggacgcccgtgtgagtgacctgaagagagccctgcgggaactcggctccgtgcccctgcggctcacctggcagggcccgcggcgcagagccttcctccattacccggactctgccgcagcccagcaggccgtctcctgcttgcagggcctgcgcctgggcaccgacaccctgagggtggcgctggccaggcagcagagggacaagtgacctcgtggacagccacggagctcactgcagactcgccat

SEQ ID NO: 13078 - DNA, 556 bp, Homo sapiens
  source 1..556: mol_type = unassigned DNA
actacgcgccagaacctgcgccgggaagcgtcgcacagcgactgcatcaccatggagccgagggcaggtgtctccaaacaggacatacgtgaacaaatttggggctacatggaatcacaaaatttagctgactttccccgacctgttcatcacaggatacccaactttaaggctggagaatcgggaagggagaaggctacgccgatctggaatatgccatgatggtatccatgggcgccgtcagcaaggagacgccggtggtcaccatcgtccacgactgccaggtcgtggacatccctgaagagcttgttgaggagcacgacatcactgtggactacatcctcactccaaccagagtcatcgccacaggctgcaagcgcccaaagccaatgggaatcacctggttcaagatcagcctggagatgatggagaaaatccccatactgaggagcctccgcgcccgagagcagcaggctgggaaggatgtcaccctccagggtgagcaccagcaccttccggaaccaggctgccagcagacagtgcccctgagtgttgg

SEQ ID NO: 13079 - DNA, 691 bp, Homo sapiens
  source 1..691: mol_type = unassigned DNA
ttttcattctttttaagtatgagtcttgctaacataaagctgacatgagtgtgatctgtttccctttgtgacatgcttgaacggtccagtgttcacgtcattgtagtttcaccacctgacattggccgtgttgttattcctgttgaatgcccaaaagtccatcgtcagtgtgggctgcttgtgggcatttggtgggcatttctgtgaaaatttctatagattagctcgggatattgggttcaagtttcttcttccactggacctgatggaaaatccacttctcagcgatgccccggaccgcacagcgatactgattctcggttgtctcttaggctggagaatcgggaagggagaaggctacgccgatctggaatatgccatgatggtatccatgggcgccgtcagcaaggagacgccggtggtcaccatcgtccacgactgccaggtcgtggacatccctgaagagcttgttgaggagcacgacatcactgtggactacatcctcactccaaccagagtcatcgccacaggctgcaagcgcccaaagccaatgggaatcacctggttcaagatcagcctggagatgatggagaaaatccccatactgaggagcctccgcgcccgagagcagcaggctgggaaggatgtcaccctccagggtgagcaccagcaccttccggaaccaggctgc

SEQ ID NO: 13080 - DNA, 1142 bp, Homo sapiens
  source 1..1142: mol_type = unassigned DNA
ggtgtctccaaacaggacatacgtgaacaaatttggggctacatggaatcacaaaatttagctgactttccccgacctgttcatcacaggatacccaactttaaggggtcttatctggcttgccaaaacatcaaagacctagacgtttttgccagaacacaggaagttaaagtggaccctgataaaccactggaaggcgttcggctgctggtgctgcagagcaaaaaaacattgttggttccaacaccacgactgagaacgggattgtttaataagatcacaccaccccctggggcaactaaagacatcttgagaaaatgtgccacctctcagggtgtgaggaactacagtgtccccataggcttggactccagagtcctcgtggatttagttgtggtgggatccgtcgccgtttctgaaaaaggctggagaatcgggaagggagaaggctacgccgatctggaatatgccatgatggtatccatgggcgccgtcagcaaggagacgccggtggtcaccatcgtccacgactgccaggtcgtggacatccctgaagagcttgttgaggagcacgacatcactgtggactacatcctcactccaaccagagtcatcgccacaggctgcaagcgcccaaagccaatgggaatcacctggttcaagattaggtaatggcacaggttgcaaattagtctgcagtaggagtttgaccctgcaaatcagcctgtaggttatgatgctgtctctgctggcaaacagccagaattactgagaagacatttgtgcttcgtgtggacaaaactactggtcaaataagcatacgtgtccacgtctcccattctttaatcccaaatcattcaccgtttgaatccctcctttgggcatggaaaattaacaacatcacctctaaggatgaacacagaatacctgctgcttttgccacagcccagccgggactttccctgcaggtgtcctgggcaggcactgctggggactcccaggtgtgcactcctcggttggccgctgatgaacgcagagggaacagcctttgtaacccagagtgtatgggcggccctctaagcgcaccaggagcactgggaaagaaggtggtcactgctcttccaggaaatgaaaatatccct

SEQ ID NO: 13081 - DNA, 824 bp, Homo sapiens
  source 1..824: mol_type = unassigned DNA
gtgtctccaaacaggacatacgtgaacaaatttggggctacatggaatcacaaaatttagctgactttccccgacctgttcatcacaggatacccaactttaaggggtcttatctggcttgccaaaacatcaaagacctagacgtttttgccagaacacaggaagttaaagtggaccctgataaaccactggaaggcgttcggctgctggtgctgcagagcaaaaaaacattgttggttccaacaccacgactgagaacgggattgtttaataagatcacaccaccccctggggcaactaaagacatcttgagaaaatgtgccacctctcagggtgtgaggaactacagtgtccccataggcttggactccagagtcctcgtggatttagttgtggtgggatccgtcgccgtttctgaaaaaggctggagaatcgggaagggagaaggctacgccgatctggaatatgccatgatggtatccatgggcgccgtcagcaaggagacgccggtggtcaccatcgtccacgactgccaggtcgtggacatccctgaagagcttgttgaggagcacgacatcactgtggactacatcctcactccaaccagagtcatcgccacaggctgcaagcgcccaaagccaatgggaatcacctggttcaaggtgggtcacggcagtggccagctctggcctgtagcttagcggctcctcctcttttaagtgttttctgtctggcatgggagctgttggcaatcccagcatggctgtatgttagaatcacccaaggagcttttgagcaatttggctcctgaatgaccatgtcca

SEQ ID NO: 13082 - DNA, 573 bp, Homo sapiens
  source 1..573: mol_type = unassigned DNA
actacgcgccagaacctgcgccgggaagcgtcgcacagcgactgcatcaccatggagccgagggcaggtgtctccaaacaggacatacgtgaacaaatttggggctacatggaatcacaaaatttagctgactttccccgacctgttcatcacaggatacccaactttaagagcaaaaaaacattgttggttccaacaccacgactgagaacgggattgtttaataagatcacaccaccccctggggcaactaaagacatcttgagaaaatgtgccacctctcagggtgtgaggaactacagtgtccccataggcttggactccagagtcctcgtggatttagttgtggtgggatccgtcgccgtttctgaaaaaggctggagaatcgggaagggagaaggctacgccgatctggaatatgccatgatggtatccatgggcgccgtcagcaaggagacgccggtggtcaccatcgtccacgactgccaggtcgtggacatccctgaagagcttgttgaggagcacgacatcactgtggactacatcctcactccaaccagagtcatcgccaca

SEQ ID NO: 13083 - DNA, 560 bp, Homo sapiens
  source 1..560: mol_type = unassigned DNA
actacgcgccagaacctgcgccgggaagcgtcgcacagcgactgcatcaccatggagccgagggcagtaggtgtctccaaacaggacatacgtgaacaaatttggggctacatggaatcacaaaatttagctgactttccccgacctgttcatcacaggatacccaactttaagagcaaaaaaacattgttggttccaacaccacgactgagaacgggattgtttaataagatcacaccaccccctggggcaactaaagacatcttgagaaaatgtgccacctctcaggtgccaccagagcgactggggagacaggatagaatttccaaaacatgctccattggaaattgcctcaccagttctaaggtgtgaggaactacagtgtccccataggcttggactccagagtcctcgtggatttagttgtggtgggatccgtcgccgtttctgaaaaaggctggagaatcgggaagggagaaggctacgccgatctggaatatgccatgatggtatccatgggcgccgtcagcaaggagacgccggtggtcaccatcgtccac

SEQ ID NO: 13084 - DNA, 565 bp, Homo sapiens
  source 1..565: mol_type = unassigned DNA
actacgcgccagaacctgcgccgggaagcgtcgcacagcgactgcatcaccatggagccgagggcaggggtcttatctggcttgccaaaacatcaaagacctagacgtttttgccagaacacaggaagttaaagtggaccctgataaaccactggaaggcgttcggctgctggtgctgcagagcaaaaaaacattgttggttccaacaccacgactgagaacgggattgtttaataagatcacaccaccccctggggcaactaaagacatcttgagaaaatgtgccacctctcaggtgccaccagagcgactggggagacaggatagaatttccaaaacatgctccattggaaattgcctcaccagttctaaggtgtgaggaactacagtgtccccataggcttggactccagagtcctcgtggatttagttgtggtgggatccgtcgccgtttctgaaaaaggctggagaatcgggaagggagaaggctacgccgatctggaatatgccatgatggtatccatgggcgccgtcagcaaggagacgccggtggtcaccatcgtcc

SEQ ID NO: 13085 - DNA, 543 bp, Homo sapiens
  source 1..543: mol_type = unassigned DNA
actacgcgccagaacctgcgccgggaagcgtcgcacagcgactgcatcaccatggagccgagggcaggggtcttatctggcttgccaaaacatcaaagacctagacgtttttgccagaacacaggaagttaaagtggaccctgataaaccactggaaggcgttcggctgctggtgctgcaggtaattccacttccctgagccgagccgagacctggccgccaagggggacaccttttccagagcaaaaaaacattgttggttccaacaccacgactgagaacgggattgtttaataagatcacaccaccccctggggcaactaaagacatcttgagaaaatgtgccacctctcagggtgtgaggaactacagtgtccccataggcttggactccagagtcctcgtggatttagttgtggtgggatccgtcgccgtttctgaaaaaggctggagaatcgggaagggagaaggctacgccgatctggaatatgccatgatggtatccatgggcgccgtcagcaaggagacgccggtggtcaccat

SEQ ID NO: 13086 - DNA, 493 bp, Homo sapiens
  source 1..493: mol_type = unassigned DNA
ggggctccggggcggctgggaatggggagggacagccgggaccggtgagggtcgaggcggggccaccggggctggcagaggatggggcagaatcaccggaagcggccgaggagtaggtgtctccaaacaggacatacgtgaacaaatttggggctacatggaatcacaaaatttagctgactttccccgacctgttcatcacaggatacccaactttaagggcgcttctcatgctgccgagcaactcccacgcttgcaggcgttcaaaacggccaggaccattaaagtaaatcctgatgccccccagaaaagtgctcgcttcttcgtccttgaaagcaaaaaaacattgttggttccaacaccacgactgagaacgggattgtttaataagatcacaccaccccctggggcaactaaagacatcttgagaaaatgtgccacctctcagggtgtgaggaactacagtgtccccataggcttggactccagagtc

SEQ ID NO: 13087 - DNA, 845 bp, Homo sapiens
  source 1..845: mol_type = unassigned DNA
ccgagggcagtaggtgtctccaaacaggacatacgtgaacaaatttggggctacatggaatcacaaaatttagctgactttccccgacctgttcatcacaggatacccaactttaagggcgcttctcatgctgccgagcaactcccacgcttgcaggcgttcaaaacggccaggaccattaaagtaaatcctgatgccccccagaaaagtgctcgcttcttcgtccttgaaagcaaaaaaacattgttggttccaacaccacgactgagaacgggattgtttaataagatcacaccaccccctggggcaactaaagacatcttgagaaaatgtgccacctctcaggtgccaccagagcgactggggagacaggatagaatttccaaaacatgctccattggaaattgcctcaccagttctaattggtcagtgcctgcccccgtggaccctgcgagatgatgagaacacagggtttcctgcagtgcagggtttcctggactaagcccccttctgtgactgtcgggagacccccaagccacccgtatgcactgatccatacggaacttgtcatagcactgcaggcagatcccaccgccacatcgaatgatcagttactgctggatacgggactgaaaatggctttttcctgagtcttacataaaccgtgttatgagaaccatgaacatattcagcttccctattctttatatgcatgcctgcattagtataaagcggtacacttttgggacattttggttgaagggataattttttagaagcgagtatattgtacataaagatagtggccttcaggattttatattgaataaatatgtcatacagtg

SEQ ID NO: 13088 - DNA, 508 bp, Homo sapiens
  source 1..508: mol_type = unassigned DNA
ggtggggggcctggcggggctccggggcggctgggaatggggagggacagccgggaccggtgagggtcgaggcggggccaccggggctggcagaggatggggcagaatcaccggaagcggccgaggagtaggtgtctccaaacaggacatacgtgaacaaatttggggctacatggaatcacaaaatttagctgactttccccgacctgttcatcacaggatacccaactttaaggggtcttatctggcttgccaaaacatcaaagacctagacgtttttgccagaacacaggaagttaaagtggaccctgataaaccactggaaggcgttcggctgctggtgctgcagagcaaaaaaacattgttggttccaacaccacgactgagaacgggattgtttaataagatcacaccaccccctggggcaactaaagacatcttgagaaaatgtgccacctctcaggtgccaccagagcgactggggagacaggatagaatttccaaaaca

SEQ ID NO: 13089 - DNA, 581 bp, Homo sapiens
  source 1..581: mol_type = unassigned DNA
ggttcgggtcgaaccagcggctctctcgcccggaatcccgagaaagatgtcaggaaaaataaagataacgagaagacgaggcgggagggacacctgccgtgcacgtgggggagcccgtgggccccttgaggtcggggaaactgaggctcaggaacaggatcggaagccggtttgacctacacgcgggggtcgcttaactactgttaagcggtttcagcatgggctctggaattcctttgtatgttattaagtgggaatcttttgttgcagtaggtgtctccaaacaggacatacgtgaacaaatttggggctacatggaatcacaaaatttagctgactttccccgacctgttcatcacaggatacccaactttaaggggtcttatctggcttgccaaaacatcaaagacctagacgtttttgccagaacacaggaagttaaagtggaccctgataaaccactggaaggcgttcggctgctggtgctgcagagcaaaaaaacattgttggttccaacaccacgactgagaacgggattgtttaataagatcacaccaccccctggggcaactaaagacatc

SEQ ID NO: 13090 - DNA, 571 bp, Homo sapiens
  source 1..571: mol_type = unassigned DNA
gggcagtggatggcaccaggcaccgtggagcaggagcgtcgctcctcggggaggctctagctgcacaggagcccgccggtgggggtggggaggctcaggcatggcaggctgcaggtcttggggaggcagctaaggcccggcgagaaatagagcacagcagctggtggcccaggtgctaagcccctcactgcccagggccagccgctgtgagtgcggggctccccacgcctacatggaactcgcgctggcccacaagcaccatgcacagcagcagttcccgcccgcgcctctccctccacaccgcccagcaagctgagggagccggcctgggccagtccagaaaggggctcccacagtgcagctgcgggatgaagggctcctcaagcacggccagagtaggcgccaaggccgaggaggcgccgagagggaccgagggctgccagcacgctgtcacctttcaaggggtcttatctggcttgccaaaacatcaaagacctagacgtttttgccagaacacaggaagttaaagtggaccctgataaaccactggaaggcgttcggctgctggtgc

SEQ ID NO: 13091 - DNA, 2185 bp, Homo sapiens
  source 1..2185: mol_type = unassigned DNA
cgtgatctcgggtttgtcgggctgaaatgtggcgggtctcggaaggttccgacctcagtaaagagagctaacgtgtattcttctttttcttagatgctgagatgaatcgtcacctgtgtgtttggctttttagacatccatctcttaatggttacctccagtgtcacatccagctccattctcatcaatttagacagatacatcttgatacaaggctgcaagtttttagacaaaacaggaattgcattcttcatctgttaagtaagaattggtccaggagatattgccatcaagacaccaagatgctctggaagcataaagcactacagaaatatatggagaacctgagtaaggagtaccaaacacttgagcaatgtctgcagcatatccctgtgaatgaggaaaaccgaaggtccttgaacagaaggcatgctgagttggcacctcttgcagccatttaccaagaaattcaggagactgaacaagcaattgaagaattagaatcaatgtgtaaaagcctaaataaacaagatgaaaagcagttacaagaacttgcactggaagaaaggcaaaccattgatcaaaaaatcaacatgttgtacaatgagcttttccagagccttgtgccaaaggagaaatatgacaaaaatgatgttattttagaggtgacagctggaaggactactggaggtgacatctgccaacaatttacccgagaaatatttgacatgtaccagaattattcgtgctataaacactggcaatttgaacttctgaattatacaccagcagattatggtggactacatcatgcagccgcccgaatttccggtgacggtgtctataagcatttgaagtatgagggtgggattcaccgagttcagcgcatccccgaggtgggcctgtcctcaaggatgcagcgcattcacacaggaacgatgtcggttattgtccttcctcagccagatgaggtggatgtgaaattggaccccaaggatttgcgaatagatacatttcgagccaaaggagcaggagggcagcatgttaataaaactgatagtgccgtcagacttgtccacatccccacagggctagtagtagaatgccaacaagaaagatcacagataaaaaataaagaaatagcctttcgtgtgttgagagctagactctaccagcagattattgagaaagacaagcgtcagcaacaaagtgctagaaaactgcaggtgggaacaagagcccagtcagagcgaattcggacatataatttcacccaggatagagtcagtgaccacaggatagcatatgaagttcgtgatattaaggaatttttatgtggtgggaagggcctggatcagctaattcagagactgcttcaatcagcagatgaagaagccattgctgaacttttggatgaacaccttaaatcagcaaaataaatactaacttattattatttatgattatataaatgaaatggacctatatcaagaggcagactgaagcttggaaatcattatgaatatttgtaaattacagctttaagaacacattacacataaatatatgttttgtaattaatcgaagtcacatttcctgacctaagaatttattttaggtttcctgtaaagtacaatccaactcatcaagtagaaaataagcatgcatcattgaaaagagaaagtattgagaattgattgtgtcatttaggacaagtcacttgttctctttatatgccttttttccccagccatctatgaattaatttaaatatatttttaatctactacttcaggaaaatatggtaaaatttagtaaaatatgaattttagacttccttataaaccttttatttaaatacaaagtaccttggcctatagtggatgcttatgcctgtaatcccagtgctttgaagggccaaagggggaagatctcttgaggtaagaatttgagaccagcctgggcaaaatagaccccatgtctacaaaaaaactcaaaacataaagaaaaaccataatactgttaatcatgttaaagttaagacttagactgcaacttttaaataaaaattatgaagaatatgagtcattcaataacaatgagcatctgggtacagacagtaaagccctttgattgctgtatgaattccacactatataaacaataagctgatattttaaataga

SEQ ID NO: 13092 - DNA, 598 bp, Homo sapiens
  source 1..598: mol_type = unassigned DNA
gggctagtagtagaatgccaacaagaaagatcacagataaaaaataaagaaatagcctttcgtgtgttgagagctagactctaccagcagattattgagaaagacaagcgtcagcaacaaagtgctagaaaactgcaggtgggaacaagagcccagtcagagcgaattcggacatataatttcacccaggatagagtcagtgaccacaggatagcatatgaagttcgtgatattaaggctcagtctcattccacgggtggtagtcgtgaccctgcacattccacattcctatccttggattctgtgagatcacctggtattctcattatgacttcttctgttaggaatttttatgtggtgggaagggcctggatcagctaattcagagactgcttcaatcagcagatgaagaagccattgctgaacttttggatgaacaccttaaatcagcaaaataaatactaacttattattatttatgattatataaatgaaatggacctatatcaagaggcagactgaagcttggaaatcattatgaatatttgtaaattacagctttaagaacacattacacataaatatatgttttgtaatt

SEQ ID NO: 13093 - DNA, 1948 bp, Homo sapiens
  source 1..1948: mol_type = unassigned DNA
gtactcacagttctttcctgatcttccccgccgcctcctgtattgcctctttatggaatcactccatatactgagttacacagcatggtttgcccgtgctgctgccccgcgggctgtcgcttctgacctgcctacactcagaactttccccaaagcatcagagtaatactgttactgtgatgggtaatggagaagtcgtgctgttctcagcgtgttgctttgtcgcccacgctggttgcagtggtgcgatctcagttcactgcaaccttcgcctcccaggttcaagcgattatcctgcctcagcttcccgagcagctaggactacaggatctcagctaaacgggaagcatttttgaaaagtgattgcacaattgagagtgaaaattactgagtcctgaacaggcaacttacattctaataccagctctgtctccatccagccgactgaatagtcgtgattaaatgctgagatgaatcgtcacctgtgtgtttggctttttagacatccatctcttaatggttacctccagtgtcacatccagctccattctcatcaatttagacagatacatcttgatacaaggctgcaagtttttagacaaaacaggaattgcattcttcatctgttaagtaagaattggtccaggagatattgccatcaagacaccaagatgctctggaagcataaagcactacagaaatatatggagaacctgagtaaggagtaccaaacacttgagcaatgtctgcagcatatccctgtgaatgaggaaaaccgaaggtccttgaacagaaggcatgctgagttggcacctcttgcagccatttaccaagaaattcaggagactgaacaagcaattgaagaattagaatcaatgtgtaaaagcctaaataaacaagatgaaaagcagttacaagaacttgcactggaagaaaggcaaaccattgatcaaaaaatcaacatgttgtacaatgagcttttccagagccttgtgccaaaggagaaatatgacaaaaatgatgttattttagaggtgacagctggaaggactactggaggtgacatctgccaacaatttacccgagaaatatttgacatgtaccagaattattcgtgctataaacactggcaatttgaacttctgaattatacaccagcagattatggtggactacatcatgcagccgcccgaatttccggtgacggtgtctataagcatttgaagtatgagggtgggattcaccgagttcagcgcatccccgaggtgggcctgtcctcaaggatgcagcgcattcacacaggaacgatgtcggttattgtccttcctcagccagatgaggtggatgtgaaattggaccccaaggatttgcgaatagatacatttcgagccaaaggagcaggagggcagcatgttaataaaactgatagtgccgtcagacttgtccacatccccacagggctagtagtagaatgccaacaagaaagatcacagataaaaaataaagaaatagcctttcgtgtgttgagagctagactctaccagcagattattgagaaagacaagcgtcagcaacaaagtgctagaaaactgcaggtgggaacaagagcccagtcagagcgaattcggacatataatttcacccaggatagagtcagtgaccacaggatagcatatgaagttcgtgatattaaggaatttttatgtggtgggaagggcctggatcagctaattcagagactgcttcaatcagcagatgaagaagccattgctgaacttttggatgaacaccttaaatcagcaaaataaatactaacttattattatttatgattatataaatgaaatggacctatatcaagaggcagactgaagcttggaaatcattatgaatatttgtaaattacagctttaagaacacattacacataaatatatgttttgtaatt

SEQ ID NO: 13094 - DNA, 1561 bp, Homo sapiens
  source 1..1561: mol_type = unassigned DNA
cgggtttgtcgggctgaaatgtggcgggtctcggaaggttccgacctcagtaaagagagctaacgtgtattcttctttttcttagcgtgttgctttgtcgcccacgctggttgcagtggtgcgatctcagttcactgcaaccttcgcctcccaggttcaagcgattatcctgcctcagcttcccgagcagctaggactacaggtgtgtgccatcacgctcagctaatttttttggtatttttagtagagatggggttttcccatgttggccaggctggtctcgaactcctgacctcagatgatctgcccgcctcggcctcccaaagtggtaggattacaggcgtgagccactgtgctcggcacattttgatgctgagatgaatcgtcacctgtgtgtttggctttttagacatccatctcttaatggttacctccagtgtcacatccagctccattctcatcaatttagacagatacatcttgatacaaggctgcaagtttttagacaaaacaggaattgcattcttcatctgttaagtaagaattggtccaggagatattgccatcaagacaccaagatgctctggaagcataaagcactacagaaatatatggagaacctgagtaaggagtaccaaacacttgagcaatgtctgcagcatatccctgtgaatgaggaaaaccgaaggtccttgaacagaaggcatgctgagttggcacctcttgcagccatttaccaagaaattcaggagactgaacaagcaattgaagaattagaatcaatgtgtaaaaagacagagtcttgctctgtggcccaggctggaatgcagtagtgtaatcatagctcactttaaccttgaactcctggactcaagcaatcctccaacctcagcctcccaagtagctgggactacaggcctaaataaacaagatgaaaagcagttacaagaacttgcactggaagaaaggcaaaccattgatcaaaaaatcaacatgttgtacaatgagcttttccagagccttgtgccaaaggagaaatatgacaaaaatgatgttattttagaggtgacagctggaaggactactggaggtgacatctgccaacaatttacccgagaaatatttgacatgtaccagaattattcgtgctataaacactggcaatttgaacttctgaattatacaccagcagattatggtaggcatattgaggaatttgcctgtaggagatactgaaaattattttacctctgatcttgattagaaccatattgtcccatttttttttgaaacttttggtgtatatctactaaacactgtggcataggctcatcaatcacagtggcttactattatagcagagttgttagctaggagaagacagtagaaaggagggaagcatttgcttagggagaaatatgtgaattagagaaaattcccctgaggaacttagatacgtatcttgcctcaaaatcatttttctctattattgaaagcaaaggtatattaaggtttttactttaaataactttataaaataatataagtattactaattaga

SEQ ID NO: 13095 - DNA, 737 bp, Homo sapiens
  source 1..737: mol_type = unassigned DNA
agaaggcatgctgagttggcacctcttgcagccatttaccaagaaattcaggagactgaacaagcaattgaagaattagaatcaatgtgtaaaagcctaaataaacaagatgaaaagcagttacaagaacttgcactggaagaaaggcaaaccattgatcaaaaaatcaacatgttgtacaatgagcttttccagagccttgtgccaaaggagaaatatgacaaaaatgatgttattttagaggtgacagctggaaggactactggaggtgacatctgccaacaatttacccgagaaatatttgacatgtaccagaattattcgtgctataaacactggcaatttgaacttctgaattatacaccagcagattatggtaggcatattgaggaatttgcctgtaggagatactgaaaattattttacctctgatcttgattagaaccatattgtcccatttttttttgaaacttttggtgtatatctactaaacactgtggcataggctcatcaatcacagtggcttactattatagcagagttgttagctaggagaagacagtagaaaggagggaagcatttgcttagggagaaatatgtgaattagagaaaattcccctgaggaacttagatacgtatcttgcctcaaaatcatttttctctattattgaaagcaaaggtatattaaggtttttactttaaataactttataaaataatataagtattactaatta

SEQ ID NO: 13096 - DNA, 820 bp, Homo sapiens
  source 1..820: mol_type = unassigned DNA
ggcgggtctcggaaggttccgacctcagtaaagagagctaacgtgtattcttctttttcttaggaaagtattccatgctacatgtgcaagaaacttggaaaacactgaaaagtagaaaaaatagcaagcaaaagatgctgagatgaatcgtcacctgtgtgtttggctttttagacatccatctcttaatggttacctccagtgtcacatccagctccattctcatcaatttagacagatacatcttgatacaaggctgcaagtttttagacaaaacaggaattgcattcttcatctgttaagtaagaattggtccaggagatattgccatcaagacaccaagatgctctggaagcataaagcactacagaaatatatggagaacctgagtaaggagtaccaaacacttgagcaatgtctgcagcatatccctgtgaatgaggaaaaccgaaggtccttgaacagaaggcatgctgagttggcacctcttgcagccatttaccaagaaattcaggagactgaacaagcaattgaagaattagaatcaatgtgtaaaagcctaaataaacaagatgaaaagcagttacaagaacttgcactggaagaaaggcaaaccattgatcaaaaaatcaacatgttgtacaatgagcttttccagagccttgtgccaaaggagaaatatgacaaaaatgatgttattttagaggtgacagctggaaggactactggaggtgacatctgccaacaatttacccgagaaatatttgacatgtaccagaattattcgtgctataaacactggcaatttgaacttctgaat

SEQ ID NO: 13097 - DNA, 863 bp, Homo sapiens
  source 1..863: mol_type = unassigned DNA
cgtgatctcgggtttgtcgggctgaaatgtggcgggtctcggaaggttccgacctcagtaaagagagctaacgtgtattcttctttttcttagatgctgagatgaatcgtcacctgtgtgtttggctttttagacatccatctcttaatggttacctccagtgtcacatccagctccattctcatcaatttagacagatacatcttgatacaaggctgcaagtttttagacaaaacaggaattgcattcttcatctgttaagtaagaattggtccaggagatattgccatcaagacaccaagatgctctggaagcataaagcactacagaaatatatggagaacctgagtaaggagtaccaaacacttgagcaatgtctgcagcatatccctgtgaatgaggaaaaccgaaggtccttgaacagaaggcatgctgagttggcacctcttgcagccatttaccaagaaattcaggagactgaacaagcaattgaagaattagaatcaatgtgtaaaagagacagagtcttgctctgtggcccaggctggaatgcagtagtgtaatcatagctcactttaaccttgaactcctggactcaagcaatcctccaacctcagcctcccaagtagctgggactacaggcctaaataaacaagatgaaaagcagttacaagaacttgcactggaagaaaggcaaaccattgatcaaaaaatcaacatgttgtacaatgagcttttccagagccttgtgccaaaggagaaatatgacaaaaatgatgttattttagaggtgacagctggaaggactactggaggtgacatctgccaacaatttacccgagaaatatttgacatgtaccaga

SEQ ID NO: 13098 - DNA, 618 bp, Homo sapiens
  source 1..618: mol_type = unassigned DNA
cggaaggttccgacctcagtaaagagagctaacgtgtattcttctttttcttaggaaagtattccatgctacatgtgcaagaaacttggaaaacactgaaaagtagaaaaaatagcaagcaaaaggatctcagctaaacgggaagcatttttgaaaagtgattgcacaattgagagtgaaaattactgagtcctgaacaggcaacttacattctaataccagctctgtctccatccagccgactgaatagtcgtgattaagttacttgacttccttggatatctagatccttaaagttaaagaattatacaagataataatattttcttcaaactttagaaaatgactttatgaaccgccttaagtttgtatgttttcatagctttcaagagcttgtttacacactcaattctagattctagatactttctagaaaataactgacttaactcattcaattgatatatttgttagttgtactcctactcatatgcttcagttaattatatatgttgaacaggtaggaagcagtgctgtttttatttattttaatatgttattcatacatttgaagaattatgttctttctgtaggcagctgaattttttttttttttga

SEQ ID NO: 13099 - DNA, 728 bp, Homo sapiens
  source 1..728: mol_type = unassigned DNA
tcttaggtactcacagttctttcctgatcttccccgccgcctcctgtattgcctctttatggaatcactccatatactgagttacacagcatggtttgcccgtgctgctgccccgcgggctgtcgcttctgacctgcctacactcagaactttccccaaagcatcagagtaatactgttactgtgatgggtaatggagaagtcgtgctgttctcaggtcgtgttgctttgtcgcccacgctggttgcagtggtgcgatctcagttcactgcaaccttcgcctcccaggttcaagcgattatcctgcctcagcttcccgagcagctaggactacaggatctcagctaaacgggaagcatttttgaaaagtgattgcacaattgagagtgaaaattactgagtcctgaacaggcaacttacattctaataccagctctgtctccatccagccgactgaatagtcgtgattaagttacttgacttccttggatatctagatccttaaagttaaagaattatacaagataataatattttcttcaaactttagaaaatgactttatgaaccgccttaagtttgtatgttttcatagctttcaagagcttgtttacacactcaattctagattctagatactttctagaaaataactgacttaactcattcaattgatatatttgttagttgtactcctactcatatgcttcagttaattatatatgttgaac

SEQ ID NO: 13100 - DNA, 557 bp, Homo sapiens
  source 1..557: mol_type = unassigned DNA
cgtgatctcgggtttgtcgggctgaaatgtggcgggtctcggaaggttccgacctcagtaaagagagctaacgtgtattcttctttttcttagatgctgagatgaatcgtcacctgtgtgtttggctttttagacatccatctcttaatggttacctccagtgtcacatccagctccattctcatcaatttagacagatacatcttgatacaaggctgcaagtttttagacaaaacaggaattgcattcttcatctgttaagtaagaattggtccaggagatattgccatcaagacaccaagatgctctggaagcataaagcactacagaaatatatggagaacctgagtaaggagtaccaaacacttgagcaatgtctgcagcatatccctgtgaatgaggaaaaccgaaggtccttgaacagaaggcatgctgagttggcacctcttgcagccatttaccaagaaattcaggagactgaacaagcaattgaagaattagaatcaatgtgtaaaaagacagagtcttgctctgtggcccaggctggaatgcagtag

SEQ ID NO: 13101 - DNA, 1447 bp, Homo sapiens
  source 1..1447: mol_type = unassigned DNA
aactctagccctaaacttaactaatagtactaccgaataaccttaatcaaaccatttacccaaacaaaagtataggcgaaagaaattttacccaggcgcagtggacgtagtactgcaaggtaaagatgaaaaagttaaccaagaataaaatagcaaggatagacccttataccttctgcgtaatgaattaactagaaataactttacacagagaaccaaagccaaggcccccaaaaccagacgagctacccaagaacagctaaaagaacacacccatctatgtagtaaaatagtggggagattcatgagtagtggtgataagcctactgagcctagtgatagctggttgtccaagatagaatcttagttcaactttaaatttacctacagagccacttaatccccctgtaaatttaactgttagtctaaagagggacagctctttagacattaggaaacaaccttcatgtagagagtaaaaaacattatccccatagttggcccgaaagcagccatcaattaagaaagcattcaagctcaacatccaaccactctaaattctaatcacaccactgaactcctaacaccacattggactaatctattactttatagatgcaataatattaatataagtaacatgaaatattctccactgcttaagcctacatcagaccagaataacccactgacaaattaacagcctaatattaataaacaactcaacaaatttattattaccgatactgttaatccaacacaggcatgctctaaggaaaggttaaaaaaaattaaaaggaactcggcaaattttaccctgcctgtttaccaaaaacatcacctctagcattattagtattagaggcaccacctgccagtgacatatgttcaacggccacagtaccctgaccatgcaaaggtagcataatcacttgttccttaaatagggacttgtatgaatgaccccacgagggttcagctgtctcttacttccaaccagtgaaactgacctgcctgtgaagaggcgaacatgaataaataagatgagaagatcctatggagctttaatttattaatgcaaacaaagctcagataagcccacaggccttaaactactgtccctgcattaaatattttggttggggtgacctcggagcataatttaacctccgagcaacctatgctaagactaaacaagtttaagcgaattactatacatatattgacccaataatttgatcaacggaacaagttaccctagggataacagcgcaatcctattctagagtccatattgacaatagggtttacgacctcgatgttggatcaggacatcctaatggtgtagctgctatcaagggttcatttgttcaatgattaaagtcctacgtggtctgagttcagaccggagcaagccaggtctggtacatgtgtatttaagtcctcc

SEQ ID NO: 13102 - DNA, 1447 bp, Homo sapiens
  source 1..1447: mol_type = unassigned DNA
aactctagccctaaacttaactaatagtactaccgaataaccttaatcaaaccatttacccaaacaaaagtataggcgaaagaaattttacccaggcgcagtggacgtagtactgcaaggtaaagatgaaaaagttaaccaagaataaaatagcaaggatagacccttataccttctgcgtaatgaattaactagaaataactttacacagagaaccaaagccaaggcccccaaaaccagacgagctacccaagaacagctaaaagaacacacccatctatgtagtaaaatagtggggagattcatgagtagtggtgataagcctactgagcctagtgatagctggttgtccaagatagaatcttagttcaactttaaatttacctacagagccacttaatccccctgtaaatttaactgttagtctaaagagggacagctctttagacattaggaaacaaccttcatgtagagagtaaaaaacattatccccatagttggcccgaaagcagccatcaattaagaaagcgttcaagctcaacatccaaccactctaaattctaatcacaccactgaactcctaacaccacattggactaatctattactttatagatgcaataatattaatataagtaacatgaaatattctccactgcttaagcctacatcagaccagaataacccactgacaaattaacagcctaatattaataaacaactcaacaaatttattattaccgatactgttaatccaacacaggcatgctctaaggaaaggttaaaaaaaattaaaaggaactcggcaaattttaccctgcctgtttaccaaaaacatcacctctagcattattagtattagaggcaccacctgccagtgacatatgttcaacggccacagtaccctgaccatgcaaaggtagcataatcacttgttccttaaatagggacttgtatgaatgaccccacgagggttcagctgtctcttacttccaaccagtgaaactgacctgcctgtgaagaggcgaacatgaataaataagatgagaagatcctatggagctttaatttattaatgcaaacaaagctcagataagcccacaggccttaaactactgtccctgcattaaatattttggttggggtgacctcggagcataatttaacctccgagcaacctatgctaagactaaacaagtttaagcgaattactatacatatattgacccaataatttgatcaacggaacaagttaccctagggataacagcgcaatcctattctagagtccatattgacaatagggtttacgacctcgatgttggatcaggacatcctaatggtgtagctgctatcaagggttcatttgttcaatgattaaagtcctacgtggtctgagttcagaccggagcaagccaggtctggtacatgtgtatttaagtcctcc

SEQ ID NO: 13103 - DNA, 1303 bp, Homo sapiens
  source 1..1303: mol_type = unassigned DNA
agccaaacctagccccaaacccattccaccttactaccgaacagctttaaccaaatcatttacccaaataaagtataggcgatagaaattgtaaatcggcgcaatagatatagtaccgcaagggaaagatgaaaaattgcaaccaagcataatacagcaaggactaatccctgtaccttctgcataatgaattaactagaaataactttgcaaagagaaccaaagctaagacccccgaaaccagacgagctacctaagaacagctaaaagagcacacccgtctatgtagcaaaatagtgggaagattcgtaggtagaggcgacaaacctaccgagtctggtgatagctggttgtccaagacagaatcttagttcaactttaaatttacccacagaaccctccaaatccccctgtaaatttaactgttagtccaaagaggaacagctctttggacactaggaaaaaaccttgtaaagagagtaaaaaatttaatacccacagtaggcctaaaagcagccaccaattaagaaagcgttcaagctcgacacctgtcatctaaaaaatcccaaacacataactgaactccttgcacccaattggaccaatctattaccctatagaagagctaatgttagtataagtaacatgaaaacattctcctccgcataagcctacatcagaccaaaatattaaactgacaattaacagcccaatatctataaccaaccaacaagccattattacccccactgttaacccaacacaggcatgcccacaaggaaaggttaaaaaaagtaaaaggaactcggcaaatcttaccccgcctgtttaccaaaaacatcacctctagcattctcagtattagaggcaccgcctgcccagtgacatgcgtttaacggccgcggtaccctaactgtgcaaaggtagcataatcacttgttccttaaatagggacttgtatgaatggctccacgagggttcagctgtctcttactttcaaccagtgaaattgacctgcccgtgaagaggcgggcatagtataacaagacgagaagaccctatggagctttaattcattaacgcaaacaacacttaacaagtccacaggccctaaactatcaaacctgcgtgaaaaatttcggttggggcgacctcggagcacaatccgacctccgagcaacacatgccgagacttcaccagtcaaagcgaattaccacgtttaattgatccaataacttgaccaacggaacaagttaccctagggataacagcgcaatcctattctagagtccatatcaacaa

SEQ ID NO: 13104 - DNA, 4458 bp, Homo sapiens
  source 1..4458: mol_type = unassigned DNA
cccggccccgcgcgcagtccagcggccccgcgtgtgtgccctcgccctgccggagccgggaaaatggaggctgtgattgagaaggaatgcagcgcgctcggaggcctcttccagaccatcatcagcgacatgaaggggagctatccagtttgggaagatttcataaacaaagcaggaaagctgcagtcccagcttcggacaacagtagtagcagcagctgccttcttggacgcctttcagaaagtggctgacatggccaccaacacacgtggtgggaccagggagattggatctgctctcaccaggatgtgcatgaggcacagaagcattgaagccaagctgaggcagttttcgagcgctttaattgattgtctgataaacccacttcaagaacagatggaagaatggaagaaagtggccaaccagctggataaagaccacgcaaaagaatataagaaagcccgccaagagataaaaaagaagtcctcggatacgctgaaactgcagaagaaagcaaaaaaagggagaggtgatatccagcctcagttggacagtgctctccaagatgtcaatgataagtatctcttattggaagaaacagaaaagcaggctgtccggaaggctttgattgaagaacgtggccgattctgtaccttcatctctatgctgcggccagtgattgaagaagaaatctcaatgctaggggaaataacccaccttcagaccatctcggaagatctaaaaagcctgaccatggaccctcacaaactgccctcctcaagtgaacaggtgattctggacttgaaaggttctgattacagctggtcgtatcagacgccaccctcttcccccagcaccaccatgtccagaaagtccagtgtctgcagcagcctgaacagtgtcaacagcagtgactcccggtccagcggctcccactcgcattcccccagctcacattaccgctaccgcagctccaacctggcccagcaggctcctgtgaggctgtccagcgtgtcctcccatgactcaggattcatatcccaggatgccttccagtccaagtcaccatcccccatgccgccagaggcccccaaccagaactcgtccagctcggcctcctccgaagcctcggaaacctgccagtcagtgagcgagtgcagctcccccacctctgtcagctcgggctccaccatgggtgcctgggtgtccacagagaaggactgggctaagcctgggccctatgaccagcctctggtgaacaccctgcagcgccgcaaagagaagcgagaaccggaccccaacgggggaggacccactaccgccagcggcccacctgcagcagctgaggaggctcagagaccacggagcatgactgtatcggctgccaccaggcctggtgaggagatggaggcttgtgaggagctggccctggccctgtctcggggcctgcagctggacacccagaggagcagccgggactcgcttcagtgctccagcggctacagcacccagacaaccaccccctgctgctctgaggacaccatcccttcccaagtttcagattatgattatttctctgtaagtggtgaccaggaggcagatcagcaggagttcgacaagtcctccaccattccaagaaacagcgacatcagccagtcctaccgacggatgttccaagccaagcgtccagcctcaactgctggcctccccaccaccctgggacctgctatggtcactccaggggttgcaactatccgacggaccccttccaccaagccttctgtccgccggggaaccattggagctggtcccatccccatcaagacacccgtgatccctgtcaagaccccaaccgtcccagacctcccaggggtgttgccagcccctccagatgggccagaagagcggggggagcacagccctgagtcgccatctgtgggtgagggcccccaaggtgtcaccagcatgccctcctcaatgtggagcggccaagcttccgttaaccctccacttccaggcccgaagcccagtatccctgaggagcacagacaggcaattccagaaagtgaagctgaagaccaggaacgggaacccccaagtgccactgtctccccaggccagattccagagagtgaccctgcagacctgagcccaagggatactccacaaggagaagacatgctgaacgccatccgaaggggcgtgaaactgaagaagaccacgacaaacgatcgctcagcccctcgcttttcttaggttcacaagaaatgcgccggtggggaatgaactgtttcattaataaaacctaatttgtcttgatccattccactctataataaaacaaaagattttgtaggcaactcggaatatagctcttttgaaagtactcgacacctttagataagaattaaaaccaacctatgtaactgacataatcttgatcttttaatttgtaaatattgacaattttctttctgcacattttaatcttagtttcccttttgatttttctgaaggtgccaaattccatttaacttttttacaagtctttgtaaaattttaaatgcataaagggggttggggcaggggaaccacgaagtagttaattttagaaaaggatttactatacttcactcttctttttttttccccacaagcttttgtagatgcattgtagtagtctagcttagaagcaaatgcaagttattttaatgtacaaactaaatgggtaagaggtaaaatcttcatttaaatatactatgttctggatgaaaagagcaggagtaacaattgatgagcaatattcagagtgaagtaaatctggaaatggtagactgtgttgggattggggggagggccatgggaggggtacatcgtcaacatagccgatcctgttacatttaagagtagcctcgtaggttgaatttcttctggtagcttcatggtaaatgcatccgaataagccatactggattgcagtgtttgtttctgtagggtgtttaaggacttgacttcctttctcccatgattcctctggactgcacacagcacccacaaccagccccatgcatgctgctgcctctgggcagtcgtagaatctcccacttcagtttctcgttgattgtactcacctttatggaatccaaatacatccaaaagggtaaggcagttttaaaaatgtgaaaacatttaaaaatgataatagcagggaattcttagattatagtaaatgccttttacttaactgtgcccagcaggctgggtgcgttaaaaagcccaagtattttgaaaaaactcgaacagatttgacaagggtagccagcttggagtctagcaacttgccaatgtgtttaccaatctgggggcttgtttttcttttcttctttcaaataaatggcagttaactggctttacagtaaacattgaagagaggaggatttgtttattgtcactgggaatctgaccactatactgtcctttttttgtattctgggtaaatgttttttggaaaagatttgtcttttctaagtggaagttaaatttgttatactgcccatcccctaaagccaacagagatttgtagatttaaagggatcacatttgaagacaatagtgtttaagaaagcaagcaagtcccttagcagtcaggtcataacagggcacatttctgaccgaaccctctcaaggcagaggaggagtttggtgggtttcatacaccctgcagattcctgttggctctaaccctcaattacctaatcttatgctttaacacataactgcattggatgtgagagtaacgtaccgtatggtcattgttctatatattaacattgaacactgctgcgattgctcaaggacattttatgttacggctttaaagcaaaggcatgattattagaaactatttaagcttttttctttgaaaaacaagctccttttacagaatataaacaacagtagtgcctgtggtttagcccaccaatcttgatgactaaaagtagctgatgcattgtgcatatgatgcttgagatggtttttgcaaaagcagaaatcgctgcaaggtaatcacaatagataaaagtggtattttaaacctttgaaataaatggatgtaactgtaccttggtacagcttttcacttgtttagtttttaaacgttagtataatctgaataaataaaatgttgccaaattcaatgtagaaagaatgtgacaacacaccttgggtagttctgcttgtgtttttgcatattgtaaaagcagtgtcacagctaaaaagaaagaaatcgtttctaacagtaaattattgtgctttagttgctagtttgtactgagagttgacctctccctgtgcagttttttgttctaaacttgtataaataacaattgtgtaatgtgtctccctcctacattgtaacaattgcttcagcctacgttataaataaagaaccactagatt

SEQ ID NO: 13105 - DNA, 4944 bp, Homo sapiens
  source 1..4944: mol_type = unassigned DNA
gcggccgcagctgcgagcaacagatccggacgccgcgagctgacccgctctgctgttgggcgatttttttttaattgcagaaaaatttattaaattggaaaatcttgcgtttttcaatggcgctggccccgggtcagcgggcgattttctctgcatcaagatgggctttgccgtttccgtagtgggcaccagtggtggcctgattgtcagtcttctcccggcatttttaaggccaggagccgagcgctgcttgtaggcgaataccctacagagcggtttggctttttaaattactgttattattttgggcagagaacagtcggtctggtgcaccccgtcctcgctgcagaagaggctgcgagtccgaggtgggtctctcggaaggtgaaattccttctggggtgagcgagccccggccccgcgcgcagtccagcggccccgcgtgtgtgccctcgccctgccggagccgggaaaatggaggctgtgattgagaaggaatgcagcgcgctcggaggcctcttccagaccatcatcagcgacatgaaggggagctatccagtttgggaagatttcataaacaaagcaggaaagctgcagtcccagcttcggacaacagtagtagcagcagctgccttcttggacgcctttcagaaagtggctgacatggccaccaacacacgtggtgggaccagggagattggatctgctctcaccaggatgtgcatgaggcacagaagcattgaagccaagctgaggcagttttcgagcgctttaattgattgtctgataaacccacttcaagaacagatggaagaatggaagaaagtggccaaccagctggataaagaccacgcaaaagaatataagaaagcccgccaagagataaaaaagaagtcctcggatacgctgaaactgcagaagaaagcaaaaaaagggagaggtgatatccagcctcagttggacagtgctctccaagatgtcaatgataagtatctcttattggaagaaacagaaaagcaggctgtccggaaggctttgattgaagaacgtggccgattctgtaccttcatctctatgctgcggccagtgattgaagaagaaatctcaatgctaggggaaataacccaccttcagaccatctcggaagatctaaaaagcctgaccatggaccctcacaaactgccctcctcaagtgaacaggtgattctggacttgaaaggttctgattacagctggtcgtatcagacgccaccctcttcccccagcaccaccatgtccagaaagtccagtgtctgcagcagcctgaacagtgtcaacagcagtgactcccggtccagcggctcccactcgcattcccccagctcacattaccgctaccgcagctccaacctggcccagcaggctcctgtgaggctgtccagcgtgtcctcccatgactcaggattcatatcccaggatgccttccagtccaagtcaccatcccccatgccgccagaggcccccaaccagttgtctaacgggttttctcactatagtttatcaagtgagtcccacgtggggcccacgggtgcaggccttttccctcattgcctgcctgcctcccgcctgctccctcgggtcacctctgtccaccttccagactacgctcattattacaccattgggcccggcatgttcccgtcatctcagatccctagctggaaggactgggctaagcctgggccctatgaccagcctctggtgaacaccctgcagcgccgcaaagagaagcgagaaccggaccccaacgggggaggacccactaccgccagcggcccacctgcagcagctgaggaggctcagagaccacggagcatgactgtatcggctgccaccaggcctggtgaggagatggaggcttgtgaggagctggccctggccctgtctcggggcctgcagctggacacccagaggagcagccgggactcgcttcagtgctccagcggctacagcacccagacaaccaccccctgctgctctgaggacaccatcccttcccaagtttcagattatgattatttctctgtaagtggtgaccaggaggcagatcagcaggagttcgacaagtcctccaccattccaagaaacagcgacatcagccagtcctaccgacggatgttccaagccaagcgtccagcctcaactgctggcctccccaccaccctgggacctgctatggtcactccaggggttgcaactatccgacggaccccttccaccaagccttctgtccgccggggaaccattggagctggtcccatccccatcaagacacccgtgatccctgtcaagaccccaaccgtcccagacctcccaggggtgttgccagcccctccagatgggccagaagagcggggggagcacagccctgagtcgccatctgtgggtgagggcccccaaggtgtcaccagcatgccctcctcaatgtggagcggccaagcttccgttaaccctccacttccaggcccgaagcccagtatccctgaggagcacagacaggcaattccagaaagtgaagctgaagaccaggaacgggaacccccaagtgccactgtctccccaggccagattccagagagtgaccctgcagacctgagcccaagggatactccacaaggagaagacatgctgaacgccatccgaaggggcgtgaaactgaagaagaccacgacaaacgatcgctcagcccctcgcttttcttaggttcacaagaaatgcgccggtggggaatgaactgtttcattaataaaacctaatttgtcttgatccattccactctataataaaacaaaagattttgtaggcaactcggaatatagctcttttgaaagtactcgacacctttagataagaattaaaaccaacctatgtaactgacataatcttgatcttttaatttgtaaatattgacaattttctttctgcacattttaatcttagtttcccttttgatttttctgaaggtgccaaattccatttaacttttttacaagtctttgtaaaattttaaatgcataaagggggttggggcaggggaaccacgaagtagttaattttagaaaaggatttactatacttcactcttctttttttttccccacaagcttttgtagatgcattgtagtagtctagcttagaagcaaatgcaagttattttaatgtacaaactaaatgggtaagaggtaaaatcttcatttaaatatactatgttctggatgaaaagagcaggagtaacaattgatgagcaatattcagagtgaagtaaatctggaaatggtagactgtgttgggattggggggagggccatgggaggggtacatcgtcaacatagccgatcctgttacatttaagagtagcctcgtaggttgaatttcttctggtagcttcatggtaaatgcatccgaataagccatactggattgcagtgtttgtttctgtagggtgtttaaggacttgacttcctttctcccatgattcctctggactgcacacagcacccacaaccagccccatgcatgctgctgcctctgggcagtcgtagaatctcccacttcagtttctcgttgattgtactcacctttatggaatccaaatacatccaaaagggtaaggcagttttaaaaatgtgaaaacatttaaaaatgataatagcagggaattcttagattatagtaaatgccttttacttaactgtgcccagcaggctgggtgcgttaaaaagcccaagtattttgaaaaaactcgaacagatttgacaagggtagccagcttggagtctagcaacttgccaatgtgtttaccaatctgggggcttgtttttcttttcttctttcaaataaatggcagttaactggctttacagtaaacattgaagagaggaggatttgtttattgtcactgggaatctgaccactatactgtcctttttttgtattctgggtaaatgttttttggaaaagatttgtcttttctaagtggaagttaaatttgttatactgcccatcccctaaagccaacagagatttgtagatttaaagggatcacatttgaagacaatagtgtttaagaaagcaagcaagtcccttagcagtcaggtcataacagggcacatttctgaccgaaccctctcaaggcagaggaggagtttggtgggtttcatacaccctgcagattcctgttggctctaaccctcaattacctaatcttatgctttaacacataactgcattggatgtgagagtaacgtaccgtatggtcattgttctatatattaacattgaacactgctgcgattgctcaaggacattttatgttacggctttaaagcaaaggcatgattattagaaactatttaagcttttttctttgaaaaacaagctccttttacagaatataaacaacagtagtgcctgtggtttagcccaccaatcttgatgactaaaagtagctgatgcattgtgcatatgatgcttgagatggtttttgcaaaagcagaaatcgctgcaaggtaatcacaatagataaaagtggtattttaaacctttgaaataaatggatgtaactgtaccttggtacagcttttcacttgtttagtttttaaacgttagtataatctgaataaataaaatgttgccaaattcaatgtagaaagaatgtgacaacacaccttgggtagttctgcttgtgtttttgcatattgtaaaagcagtgtcacagctaaaaagaaagaaatcgtttctaacagtaaattattgtgctttagttgctagtttgtactgagagttgacctctccctgtgcagttttttgttctaaacttgtataaataacaattgtgtaatgtgtctccctcctacattgtaacaattgcttcagcctacgttataaataaagaaccactagatt

SEQ ID NO: 13106 - DNA, 3548 bp, Homo sapiens
  source 1..3548: mol_type = unassigned DNA
tgccctttagagcctggagagggcatgcagagggcctgtggcttgtcccagccggaggttccccttaaggggaccagctgccttctctggggagctgtctatggggtccccgcagccctccagtggaggcagaggccctggctcctgaccgcacttgttttgcataggactgggctaagcctgggccctatgaccagcctctggtgaacaccctgcagcgccgcaaagagaagcgagaaccggaccccaacgggggaggacccactaccgccagcggcccacctgcagcagctgaggaggctcagagaccacggagcatgactgtatcggctgccaccagggtgatgctcttgttctcagtagctggttggggccacctcagcctggctggggatcacattctggccagcaactggggggccaaggcagccttgcagctggagggacctgggctccattccctgacttcctgctctacagcaaagtccctgggaaaaaaaccttgtgtgggaatgagagaggcagaactttctagggtcagagtgggacccaagcaagtcaatagccccctggccccacagacatgtagtgctcacgggggcagaacaggagtgctgttgagccccccccctaaagcaacctgtgtatttctctcctccaacctgcagcctggtgaggagatggaggcttgtgaggagctggccctggccctgtctcggggcctgcagctggacacccagaggagcagccgggactcgcttcagtgctccagcggctacagcacccagacaaccaccccctgctgctctgaggacaccatcccttcccaagtttcagattatgattatttctctgtaagtggtgaccaggaggcagatcagcaggagttcgacaagtcctccaccattccaagaaacagcgacatcagccagtcctaccgacggatgttccaagccaagcgtccagcctcaactgctggcctccccaccaccctgggacctgctatggtcactccaggggttgcaactatccgacggaccccttccaccaagccttctgtccgccggggaaccattggagctggtcccatccccatcaagacacccgtgatccctgtcaagaccccaaccgtcccagacctcccaggggtgttgccagcccctccagatgggccagaagagcggggggagcacagccctgagtcgccatctgtgggtgagggcccccaaggtgtcaccagcatgccctcctcaatgtggagcggccaagcttccgttaaccctccacttccaggcccgaagcccagtatccctgaggagcacagacaggcaattccagaaagtgaagctgaagaccaggaacgggaacccccaagtgccactgtctccccaggccagattccagagagtgaccctgcagacctgagcccaagggatactccacaaggagaagacatgctgaacgccatccgaaggggcgtgaaactgaagaagaccacgacaaacgatcgctcagcccctcgcttttcttaggttcacaagaaatgcgccggtggggaatgaactgtttcattaataaaacctaatttgtcttgatccattccactctataataaaacaaaagattttgtaggcaactcggaatatagctcttttgaaagtactcgacacctttagataagaattaaaaccaacctatgtaactgacataatcttgatcttttaatttgtaaatattgacaattttctttctgcacattttaatcttagtttcccttttgatttttctgaaggtgccaaattccatttaacttttttacaagtctttgtaaaattttaaatgcataaagggggttggggcaggggaaccacgaagtagttaattttagaaaaggatttactatacttcactcttctttttttttccccacaagcttttgtagatgcattgtagtagtctagcttagaagcaaatgcaagttattttaatgtacaaactaaatgggtaagaggtaaaatcttcatttaaatatactatgttctggatgaaaagagcaggagtaacaattgatgagcaatattcagagtgaagtaaatctggaaatggtagactgtgttgggattggggggagggccatgggaggggtacatcgtcaacatagccgatcctgttacatttaagagtagcctcgtaggttgaatttcttctggtagcttcatggtaaatgcatccgaataagccatactggattgcagtgtttgtttctgtagggtgtttaaggacttgacttcctttctcccatgattcctctggactgcacacagcacccacaaccagccccatgcatgctgctgcctctgggcagtcgtagaatctcccacttcagtttctcgttgattgtactcacctttatggaatccaaatacatccaaaagggtaaggcagttttaaaaatgtgaaaacatttaaaaatgataatagcagggaattcttagattatagtaaatgccttttacttaactgtgcccagcaggctgggtgcgttaaaaagcccaagtattttgaaaaaactcgaacagatttgacaagggtagccagcttggagtctagcaacttgccaatgtgtttaccaatctgggggcttgtttttcttttcttctttcaaataaatggcagttaactggctttacagtaaacattgaagagaggaggatttgtttattgtcactgggaatctgaccactatactgtcctttttttgtattctgggtaaatgttttttggaaaagatttgtcttttctaagtggaagttaaatttgttatactgcccatcccctaaagccaacagagatttgtagatttaaagggatcacatttgaagacaatagtgtttaagaaagcaagcaagtcccttagcagtcaggtcataacagggcacatttctgaccgaaccctctcaaggcagaggaggagtttggtgggtttcatacaccctgcagattcctgttggctctaaccctcaattacctaatcttatgctttaacacataactgcattggatgtgagagtaacgtaccgtatggtcattgttctatatattaacattgaacactgctgcgattgctcaaggacattttatgttacggctttaaagcaaaggcatgattattagaaactatttaagcttttttctttgaaaaacaagctccttttacagaatataaacaacagtagtgcctgtggtttagcccaccaatcttgatgactaaaagtagctgatgcattgtgcatatgatgcttgagatggtttttgcaaaagcagaaatcgctgcaaggtaatcacaatagataaaagtggtattttaaacctttgaaataaatggatgtaactgtaccttggtacagcttttcacttgtttagtttttaaacgttagtataatctgaataaataaaatgttgccaaattcaatgtagaaagaatgtgacaacacaccttgggtagttctgcttgtgtttttgcatattgtaaaagcagtgtcacagct

SEQ ID NO: 13107 - DNA, 1822 bp, Homo sapiens
  source 1..1822: mol_type = unassigned DNA
ctggtcgtatcagacgccaccctcttcccccagcaccaccatgtccagaaagtccagtgtctgcagcagcctgaacagtgtcaacagcagtgactcccggtccagcggctcccactcgcattcccccagctcacattaccgctaccgcagctccaacctggcccagcaggctcctgtgaggctgtccagcgtgtcctcccatgactcaggattcatatcccaggatgccttccagtccaagtcaccatcccccatgccgccagaggcccccaaccagaactcgtccagctcggcctcctccgaagcctcggaaacctgccagtcagtgagcgagtgcagctcccccacctctgtcagctcgggctccaccatgggtgcctgggtgtccacagagaagttgtctaacgggttttctcactatagtttatcaagtgagtcccacgtggggcccacgggtgcaggccttttccctcattgcctgcctgcctcccgcctgctccctcgggtcacctctgtccaccttccagactacgctcattattacaccattgggcccggcatgttcccgtcatctcagatccctagctggaaggactgggctaagcctgggccctatgaccagcctctggtgaacaccctgcagcgccgcaaagagaagcgagaaccggaccccaacgggggaggacccactaccgccagcggcccacctgcagcagctgaggaggctcagagaccacggagcatgactgtatcggctgccaccaggcctggtgaggagatggaggcttgtgaggagctggccctggccctgtctcggggcctgcagctggacacccagaggagcagccgggactcgcttcagtgctccagcggctacagcacccagacaaccaccccctgctgctctgaggacaccatcccttcccaagtttcagattatgattatttctctgtaagtggtgaccaggaggcagatcagcaggagttcgacaagtcctccaccattccaagaaacagcgacatcagccagtcctaccgacggatgttccaagccaagcgtccagcctcaactgctggcctccccaccaccctgggacctgctatggtcactccaggggttgcaactatccgacggaccccttccaccaagccttctgtccgccggggaaccattggagctggtcccatccccatcaagacacccgtgatccctgtcaagaccccaaccgtcccagacctcccaggggtgttgccagcccctccagatgggccagaagagcggggggagcacagccctgagtcgccatctgtgggtgagggcccccaaggtgtcaccagcatgccctcctcaatgtggagcggccaagcttccgttaaccctccacttccaggcccgaagcccagtatccctgaggagcacagacaggcaattccagaaagtgaagctgaagaccaggaacgggaacccccaagtgccactgtctccccaggccagattccagagagtgaccctgcagacctgagcccaagggatactccacaaggagaagacatgctgaacgccatccgaaggggcgtgaaactgaagaagaccacgacaaacgatcgctcagcccctcgcttttcttaggttcacaagaaatgcgccggtggggaatgaactgtttcattaataaaacctaatttgtcttgatccattccactctataataaaacaaaagattttgtaggcaactcggaatatagctcttttgaaagtactcgacacctttagataagaattaaaaccaacctatgtaactgacataatcttgatctttta

SEQ ID NO: 13108 - DNA, 2777 bp, Homo sapiens
  source 1..2777: mol_type = unassigned DNA
caagatgggctttgccgtttccgtagtgggcaccagtggtggcctgattgtcagtcttctcccggcatttttaaggccaggagccgagcgctgcttgtaggcgaataccctacagagcggtttggctttttaaattactgttattattttgggcagagaacagtcggtctggtgcaccccgtcctcgctgcagaagaggctgcgagtccgaggtgggtctctcggaaggtgaaattccttctggggtgagcgagccccggccccgcgcgcagtccagcggccccgcgtgtgtgccctcgccctgccggagccgggaaaatggaggctgtgattgagaaggaatgcagcgcgctcggaggcctcttccagaccatcatcagcgacatgaaggggagctatccagtttgggaagatttcataaacaaagcaggaaagctgcagtcccagcttcggacaacagtagtagcagcagctgccttcttggacgcctttcagaaagtggctgacatggccaccaacacacgtggtgggaccagggagattggatctgctctcaccaggatgtgcatgaggcacagaagcattgaagccaagctgaggcagttttcgagcgctttaattgattgtctgataaacccacttcaagaacagatggaagaatggaagaaagtggccaaccagctggataaagaccacgcaaaagaatataagaaagcccgccaagagataaaaaagaagtcctcggatacgctgaaactgcagaagaaagcaaaaaaagtggacactcttgggagaggtgatatccagcctcagttggacagtgctctccaagatgtcaatgataagtatctcttattggaagaaacagaaaagcaggctgtccggaaggctttgattgaagaacgtggccgattctgtaccttcatctctatgctgcggccagtgattgaagaagaaatctcaatgctaggggaaataacccaccttcagaccatctcggaagatctaaaaagcctgaccatggaccctcacaaactgccctcctcaagtgaacaggtgattctggacttgaaaggttctgattacagctggtcgtatcagacgccaccctcttcccccagcaccaccatgtccagaaagtccagtgtctgcagcagcctgaacagtgtcaacagcagtgactcccggtccagcggctcccactcgcattcccccagctcacattaccgctaccgcagctccaacctggcccagcaggctcctgtgaggctgtccagcgtgtcctcccatgactcaggattcatatcccaggatgccttccagtccaagtcaccatcccccatgccgccagaggcccccaaccagttgtctaacgggttttctcactatagtttatcaagtgagtcccacgtggggcccacgggtgcaggccttttccctcattgcctgcctgcctcccgcctgctccctcgggtcacctctgtccaccttccagactacgctcattattacaccattgggcccggcatgttcccgtcatctcagatccctagctggaaggactgggctaagcctgggccctatgaccagcctctggtgaacaccctgcagcgccgcaaagagaagcgagaaccggaccccaacgggggaggacccactaccgccagcggcccacctgcagcagctgaggaggctcagagaccacggagcatgactgtatcggctgccaccaggcctggtgaggagatggaggcttgtgaggagctggccctggccctgtctcggggcctgcagctggacacccagaggagcagccgggactcgcttcagtgctccagcggctacagcacccagacaaccaccccctgctgctctgaggacaccatcccttcccaagtttcagattatgattatttctctgtaagtggtgaccaggaggcagatcagcaggagttcgacaagtcctccaccattccaagaaacagcgacatcagccagtcctaccgacggatgttccaagccaagcgtccagcctcaactgctggcctccccaccaccctgggacctgctatggtcactccaggggttgcaactatccgacggaccccttccaccaagccttctgtccgccggggaaccattggagctggtcccatccccatcaagacacccgtgatccctgtcaagaccccaaccgtcccagacctcccaggggtgttgccagcccctccagatgggccagaagagcggggggagcacagccctgagtcgccatctgtgggtgagggcccccaaggtgtcaccagcatgccctcctcaatgtggagcggccaagcttccgttaaccctccacttccaggcccgaagcccagtatccctgaggagcacagacaggcaattccagaaagtgaagctgaagaccaggaacgggaacccccaagtgccactgtctccccaggccagattccagagagtgaccctgcagacctgagcccaagggatactccacaaggagaagacatgctgaacgccatccgaaggggcgtgaaactgaagaagaccacgacaaacgatcgctcagcccctcgcttttcttaggttcacaagaaatgcgccggtggggaatgaactgtttcattaataaaacctaatttgtcttgatccattccactctataataaaacaaaagattttgtaggcaactcggaatatagctcttttgaaagtactcgacacctttagataagaattaaaaccaacctatgtaactgacataa

SEQ ID NO: 13109 - DNA, 1711 bp, Homo sapiens
  source 1..1711: mol_type = unassigned DNA
gttgtgttggcagaagagttggtgggggttgtgcagtgtgagaagggagaggtgatatccagcctcagttggacagtgctctccaagatgtcaatgataagtatctcttattggaagaaacagaaaagcaggctgtccggaaggctttgattgaagaacgtggccgattctgtaccttcatctctatgctgcggccagtgattgaagaagaaatctcaatgctaggggaaataacccaccttcagaccatctcggaagatctaaaaagcctgaccatggaccctcacaaactgccctcctcaagtgaacaggtgattctggacttgaaaggttctgattacagctggtcgtatcagacgccaccctcttcccccagcaccaccatgtccagaaagtccagtgtctgcagcagcctgaacagtgtcaacagcagtgactcccggtccagcggctcccactcgcattcccccagctcacattaccgctaccgcagctccaacctggcccagcaggctcctgtgaggctgtccagcgtgtcctcccatgactcaggattcatatcccaggatgccttccagtccaagtcaccatcccccatgccgccagaggcccccaaccagcgccgcaaagagaagcgagaaccggaccccaacgggggaggacccactaccgccagcggcccacctgcagcagctgaggaggctcagagaccacggagcatgactgtatcggctgccaccaggcctggtgaggagatggaggcttgtgaggagctggccctggccctgtctcggggcctgcagctggacacccagaggagcagccgggactcgcttcagtgctccagcggctacagcacccagacaaccaccccctgctgctctgaggacaccatcccttcccaagtttcagattatgattatttctctgtaagtggtgaccaggaggcagatcagcaggagttcgacaagtcctccaccattccaagaaacagcgacatcagccagtcctaccgacggatgttccaagccaagcgtccagcctcaactgctggcctccccaccaccctgggacctgctatggtcactccaggggttgcaactatccgacggaccccttccaccaagccttctgtccgccggggaaccattggagctggtcccatccccatcaagacacccgtgatccctgtcaagaccccaaccgtcccagacctcccaggggtgttgccagcccctccagatgggccagaagagcggggggagcacagccctgagtcgccatctgtgggtgagggcccccaaggtgtcaccagcatgccctcctcaatgtggagcggccaagcttccgttaaccctccacttccaggcccgaagcccagtatccctgaggagcacagacaggcaattccagaaagtgaagctgaagaccaggaacgggaacccccaagtgccactgtctccccaggccagattccagagagtgaccctgcagacctgagcccaagggatactccacaaggagaagacatgctgaacgccatccgaaggggcgtgaaactgaagaagaccacgacaaacgatcgctcagcccctcgcttttcttaggttcacaagaaatgcgccggtggggaatgaactgtttcattaataaaacctaatttgtcttgatccattccactctataataaaacaaaagattttgtaggcaa

SEQ ID NO: 13110 - DNA, 1643 bp, Homo sapiens
  source 1..1643: mol_type = unassigned DNA
agccccagtggacttttgctgcaggctcatggttcctgcaggcagattaaccctgtcccttttcttgctactgacatcagctcccctcgttttggtgcagcctgaacagtgtcaacagcagtgactcccggtccagcggctcccactcgcattcccccagctcacattaccgctaccgcagctccaacctggcccagcaggctcctgtgaggctgtccagcgtgtcctcccatgactcaggattcatatcccaggatgccttccagtccaagtcaccatcccccatgccgccagaggcccccaaccagttgtctaacgggttttctcactatagtttatcaagtgagtcccacgtggggcccacgggtgcaggccttttccctcattgcctgcctgcctcccgcctgctccctcgggtcacctctgtccaccttccagactacgctcattattacaccattgggcccggcatgttcccgtcatctcagatccctagctggaaggactgggctaagcctgggccctatgaccagcctctggtgaacaccctgcagcgccgcaaagagaagcgagaaccggaccccaacgggggaggacccactaccgccagcggcccacctgcagcagctgaggaggctcagagaccacggagcatgactgtatcggctgccaccaggcctggtgaggagatggaggcttgtgaggagctggccctggccctgtctcggggcctgcagctggacacccagaggagcagccgggactcgcttcagtgctccagcggctacagcacccagacaaccaccccctgctgctctgaggacaccatcccttcccaagtttcagattatgattatttctctgtaagtggtgaccaggaggcagatcagcaggagttcgacaagtcctccaccattccaagaaacagcgacatcagccagtcctaccgacggatgttccaagccaagcgtccagcctcaactgctggcctccccaccaccctgggacctgctatggtcactccaggggttgcaactatccgacggaccccttccaccaagccttctgtccgccggggaaccattggagctggtcccatccccatcaagacacccgtgatccctgtcaagaccccaaccgtcccagacctcccaggggtgttgccagcccctccagatgggccagaagagcggggggagcacagccctgagtcgccatctgtgggtgagggcccccaaggtgtcaccagcatgccctcctcaatgtggagcggccaagcttccgttaaccctccacttccaggcccgaagcccagtatccctgaggagcacagacaggcaattccagaaagtgaagctgaagaccaggaacgggaacccccaagtgccactgtctccccaggccagattccagagagtgaccctgcagacctgagcccaagggatactccacaaggagaagacatgctgaacgccatccgaaggggcgtgaaactgaagaagaccacgacaaacgatcgctcagcccctcgcttttcttaggttcacaagaaatgcgccggtggggaatgaactgtttcattaataaaacctaatttgtcttgatccattccactctataataaaacaaaagattttgtaggc

SEQ ID NO: 13111 - DNA, 2166 bp, Homo sapiens
  source 1..2166: mol_type = unassigned DNA
gtgagaaggcaagtcatgaagagttgccccaggacattttccttgtcaggaataagccaggctaaatgtgccctttgggcattgaaaattggaaatggctggtcctagaaaaacagctgccttaaatccttttggggcatgaataaatactttttttacatcctggaaaattgtggttttgactccagcaaggaccccagggaggaggggcacttgttccagaagctggtatttcagcaagccgtgcttgggtctctgttttttgcagggagaggtgatatccagcctcagttggacagtgctctccaagatgtcaatgataagtatctcttattggaagaaacagaaaagcaggctgtccggaaggctttgattgaagaacgtggccgattctgtaccttcatctctatgctgcggccagtgattgaagaagaaatctcaatgctaggggaaataacccaccttcagaccatctcggaagatctaaaaagcctgaccatggaccctcacaaactgccctcctcaagtgaacaggtgattctggacttgaaaggttctgattacagctggtcgtatcagacgccaccctcttcccccagcaccaccatgtccagaaagtccagtgtctgcagcagcctgaacagtgtcaacagcagtgactcccggtccagcggctcccactcgcattcccccagctcacattaccgctaccgcagctccaacctggcccagcaggctcctgtgaggctgtccagcgtgtcctcccatgactcaggattcatatcccaggatgccttccagtccaagtcaccatcccccatgccgccagaggcccccaaccagttgtctaacgggttttctcactatagtttatcaagtgagtcccacgtggggcccacgggtgcaggccttttccctcattgcctgcctgcctcccgcctgctccctcgggtcacctctgtccaccttccagactacgctcattattacaccattgggcccggcatgttcccgtcatctcagatccctagctggaaggactgggctaagcctgggccctatgaccagcctctggtgaacaccctgcagcgccgcaaagagaagcgagaaccggaccccaacgggggaggacccactaccgccagcggcccacctgcagcagctgaggaggctcagagaccacggagcatgactgtatcggctgccaccaggcctggtgaggagatggaggcttgtgaggagctggccctggccctgtctcggggcctgcagctggacacccagaggagcagccgggactcgcttcagtgctccagcggctacagcacccagacaaccaccccctgctgctctgaggacaccatcccttcccaagtttcagattatgattatttctctgtaagtggtgaccaggaggcagatcagcaggagttcgacaagtcctccaccattccaagaaacagcgacatcagccagtcctaccgacggatgttccaagccaagcgtccagcctcaactgctggcctccccaccaccctgggacctgctatggtcactccaggggttgcaactatccgacggaccccttccaccaagccttctgtccgccggggaaccattggagctggtcccatccccatcaagacacccgtgatccctgtcaagaccccaaccgtcccagacctcccaggggtgttgccagcccctccagatgggccagaagagcggggggagcacagccctgagtcgccatctgtgggtgagggcccccaaggtgtcaccagcatgccctcctcaatgtggagcggccaagcttccgttaaccctccacttccaggcccgaagcccagtatccctgaggagcacagacaggcaattccagaaagtgaagctgaagaccaggaacgggaacccccaagtgccactgtctccccaggccagattccagagagtgaccctgcagacctgagcccaagggatactccacaaggagaagacatgctgaacgccatccgaaggggcgtgaaactgaagaagaccacgacaaacgatcgctcagcccctcgcttttcttaggttcacaagaaatgcgccggtggggaatgaactgtttcattaataaaacctaatttgtcttgatccattccactctataataaaacaaaa

SEQ ID NO: 13112 - DNA, 857 bp, Homo sapiens
  source 1..857: mol_type = unassigned DNA
agggagaggtgatatccagcctcagttggacagtgctctccaagatgtcaatgataagtatctcttattggaagaaacagaaaagcaggctgtccggaaggctttgattgaagaacgtggccgattctgtaccttcatctctatgctgcggccagtgattgaagaagaaatctcaatgctaggggaaataacccaccttcagaccatctcggaagatctaaaaagcctgaccatggaccctcacaaactgccctcctcaagtgaacaggtgattctggacttgaaaggttctgattacagctggtcgtatcagacgccaccctcttcccccagcaccaccatgtccagaaagtccagtgtctgcagcagcctgaacagtgtcaacagcagtgactcccggtccagcggctcccactcgcattcccccagctcacattaccgctaccgcagctccaacctggcccagcaggctcctgtgaggctgtccagcgtgtcctcccatgactcaggattcatatcccaggatgccttccagtccaagtcaccatcccccatgccgccagaggcccccaaccaggactgggctaagcctgggccctatgaccagcctctggtgaacaccctgcagcgccgcaaagagaagcgagaaccggaccccaacgggggaggacccactaccgccagcggcccacctgcagcagctgaggaggctcagagaccacggagcatgactgtatcggctgccaccaggcctggtgaggagatggaggcttgtgaggagctggccctggccctgtctcggggcctgcagctggacacccagaggagcagccgggactcgcttcagtgctccagcg

SEQ ID NO: 13113 - DNA, 581 bp, Homo sapiens
  source 1..581: mol_type = unassigned DNA
tttatttataaatattcaggtttcccctcccttgaatgtcaatgccattttgtatctccgcactcatcctgttatattaattttttttccttccccccccctttttttgtttgtttccagttgtctaacgggttttctcactatagtttatcaagtgagtcccacgtggggcccacgggtgcaggccttttccctcattgcctgcctgcctcccgcctgctccctcgggtcacctctgtccaccttccagactacgctcattattacaccattgggcccggcatgttcccgtcatctcagatccctagctggaaggactgggctaagcctgggccctatgaccagcctctggtgaacaccctgcagcgccgcaaagagaagcgagaaccggaccccaacgggggaggacccactaccgccagcggcccacctgcagcagctgaggaggctcagagaccacggagcatgactgtatcggctgccaccaggcctggtgaggagatggaggcttgtgaggagctggccctggccctgtctcggggcctgcagctggacacccagaggagcagccgggactcgct

SEQ ID NO: 13114 - DNA, 559 bp, Homo sapiens
  source 1..559: mol_type = unassigned DNA
agcaggaagttcagacctaagacgctgcatcctggacattctgccccctgaagatattgcagcctgaacagtgtcaacagcagtgactcccggtccagcggctcccactcgcattcccccagctcacattaccgctaccgcagctccaacctggcccagcaggctcctgtgaggctgtccagcgtgtcctcccatgactcaggattcatatcccaggatgccttccagtccaagtcaccatcccccatgccgccagaggcccccaaccagttgtctaacgggttttctcactatagtttatcaagtgagtcccacgtggggcccacgggtgcaggccttttccctcattgcctgcctgcctcccgcctgctccctcgggtcacctctgtccaccttccagactacgctcattattacaccattgggcccggcatgttcccgtcatctcagatccctagctggaagcgccgcaaagagaagcgagaaccggaccccaacgggggaggacccactaccgccagcggcccacctgcagcagctgaggaggctcagagaccac

SEQ ID NO: 13115 - DNA, 788 bp, Homo sapiens
  source 1..788: mol_type = unassigned DNA
ggtgggggttgtgcagtgtgagaagggagaggtgatatccagcctcagttggacagtgctctccaagatgtcaatgataagtatctcttattggaagaaacagaaaagcaggctgtccggaaggctttgattgaagaacgtggccgattctgtaccttcatctctatgctgcggccagtgattgaagaagaaatctcaatgctaggggaaataacccaccttcagaccatctcggaagatctaaaaagcctgaccatggaccctcacaaactgccctcctcaagtgaacaggtgattctggacttgaaaggttctgattacagctggtcgtatcagacgccaccctcttcccccagcaccaccatgtccagaaagtccagtgtctgcagcagcctgaacagtgtcaacagcagtgactcccggtccagcggctcccactcgcattcccccagctcacattaccgctaccgcagctccaacctggcccagcaggctcctgtgaggctgtccagcgtgtcctcccatgactcaggattcatatcccaggatgccttccagtccaagtcaccatcccccatgccgccagaggcccccaaccagttgtctaacgggttttctcactatagtttatcaagtgagtcccacgtggggcccacgggtgcaggccttttccctcattgcctgcctgcctcccgcctgctccctcgggtcacctctgtccaccttccagactacgctcattattacaccattgggcccggcatgttcccgtcatctcagatccctag

SEQ ID NO: 13116 - DNA, 574 bp, Homo sapiens
  source 1..574: mol_type = unassigned DNA
aatttctagtgctggtcaaatagggcagaaatgaccactgaatatcaagtggttaaaatgcgctaccaacaagtctgggaaccatgattaactttatggcattacaagaggaaaatcctgtaaattctagccttgggtataaatggctgttataaattattaattggtcactgtatttctccctctctcgactgatatttcatgattttccttttcccttcctttccttctccctattaattatagttttactttctcagtaaaaggattatgatattgatggatttggtactgtggctcttcaatttaaaaaaaatttttttaacatgttttgctttcattcccacccccacgatggcagcgttttgatgctttggtggatgttaagctttgatggctaacgcttcccctctcagcacctcattcacccagctggctctgtccccttaggtgattctggacttgaaaggttctgattacagctggtcgtatcagacgccaccctcttcccccagcaccaccatgtccagaaagtccagtgtctgcagcagcctgaacagtgtcaacagcagtg

SEQ ID NO: 13117 - DNA, 553 bp, Homo sapiens
  source 1..553: mol_type = unassigned DNA
tttccctcgggggctcaaggcactggctgcaagttttcccattgtctgtccctgaagggagctatccagtttgggaagatttcataaacaaagcaggaaagctgcagtcccagcttcggacaacagtagtagcagcagctgccttcttggacgcctttcagaaagtggctgacatggccaccaacacacgtggtgggaccagggagattggatctgctctcaccaggatgtgcatgaggcacagaagcattgaagccaagctgaggcagttttcgagcgctttaattgattgtctgataaacccacttcaagaacagatggaagaatggaagaaagtggccaaccagctggataaagaccacgcaaaagaatataagaaagcccgccaagagataaaaaagaagtcctcggatacgctgaaactgcagaagaaagcaaaaaaagggagaggtgatatccagcctcagttggacagtgctctccaagatgtcaatgataagtatctcttattggaagaaacagaaaagcaggctgtccggaaggctttgattga

SEQ ID NO: 13118 - DNA, 569 bp, Homo sapiens
  source 1..569: mol_type = unassigned DNA
agggttttggaatggtggctgtgggttcggttcccttggcaccacatctgggtcatgcatgtgcttgtgaccagcttttactccacgtgcaggcagtactcttaaagagtgatttttttttttttttttgtgagacagagtcttgctctgtcacccaggctggagtacagtggtgcgatctaggctcactgcaacctccacctcccgggttcaagcgattctcctgccttagcctcccgagtagctgggattacaggcgcctgctaccattcccagctaaggagtgattttctctgagagggacatttgctgtgaaagtgggaccagggagattggatctgctctcaccaggatgtgcatgaggcacagaagcattgaagccaagctgaggcagttttcgagcgctttaattgattgtctgataaacccacttcaagaacagatggaagaatggaagaaagtggccaaccagctggataaagaccacgcaaaagaatataagaaagcccgccaagagataaaaaagaagtcctcggatacgctgaaactgcagaagaaagcaaaaaaag

SEQ ID NO: 13119 - DNA, 345 bp, Homo sapiens
  source 1..345: mol_type = unassigned DNA
agtcttggcagaggagacaaaaagtaaagagacaatggcaggacgggtgtgacggggcacaggggtctggtttaggcagagaggcgggtcccttggaggcagagcatgggaaatgctgctcagtctaggtgatacccaggcgaggtcttagaggtgcacagaatcctgtgagaagggcaccatcccagcagtggagtgtacagaagctgggaggtgggaccagggagattggatctgctctcaccaggatgtgcatgaggcacagaagcattgaagccaagctgaggcagttttcgagcgctttaattgattgtctgataaacccacttcaagaacagatggaag

SEQ ID NO: 13120 - DNA, 355 bp, Homo sapiens
  source 1..355: mol_type = unassigned DNA
agcggccccgcgtgtgtgccctcgccctgccggagccgggaaaatggaggctgtgattgagaaggaatgcagcgcgctcggaggcctcttccagaccatcatcagcgacatgaaggggagctatccagtttgggaagatttcataaacaaagcaggaaagctgcagtcccagcttcggacaacagtagtagcagcagctgccttcttggacgcctttcagaaagtggctgacatggccaccaacacacgtggcactatcatgggaccacaaaaagcaatatgactctccttgtcctggagcggcttacaattgagtggggaaaatgagaagtataaataaagaatttcaacatag

SEQ ID NO: 13121 - DNA, 707 bp, Homo sapiens
  source 1..707: mol_type = unassigned DNA
cccggccccgcgcgcagtccagcggccccgcgtgtgtgccctcgccctgccggagccgggaaaatggaggctgtgattgagaaggaatgcagcgcgctcggaggcctcttccagaccatcatcagcgacatgaaggggagctatccagtttgggaagatttcataaacaaagcaggaaagctgcagtcccagcttcggacaacagtagtagcagcagctgccttcttggacgcctttcagaaagtggctgacatggccaccaacacacgtggtaagcagatggaggctgactcccagtgttaactgcattctgcacgtggactcttccccttgggtggctgcacaagaagatgcagcttaagttatcagagctgagctgactcgtattttcccattttttaaaactctgtgggattccacatattagaagttgcaactagttttctggataataaagcacatgtgaagaagaatgaaaaaggaagaaaatgaaccactgtttctgcacgagttggcttgatgggttctttgatcactttaatgacgtgctggttgttgaaccttgagctgtgcctttggttgcaatttgcgttttcctccttacgtgggttttccttgtttccttgtggaatgggaagcagtagggatgattggatagaccatttttctgagtttccataaaatgaagaacccttttaaaataagga

SEQ ID NO: 13122 - DNA, 564 bp, Homo sapiens
  source 1..564: mol_type = unassigned DNA
agcaagagcgccgcaggaaaccacttccacaccactgctcccctctcccccggaagcccttgttgctagtagggggctgcatggcacgcgcccctttgcgtccagagaataccatagtgcgggggagcgccaaccagtgccaggacacttaccgagctgaagagttgacaggttctgaagagggtcactccctcactggctgccattgaaagagtccacttctcagtgactcctagctgggcactggatgcagttgaggattgctggtcaatatgattcttcttgctgtgctttttctctgcttcatttcctcatattcagcttctgttaaaggtcacacaactggtctctcattaaataatgaccggctgtacaagctcacgtactccactgaagttcttcttgatcggggcaaaggaaaactgcaagacagcgtgggctaccgcatttcctccaacgtggatgtggccttactatggaggaatcctgatggtgatgatgaccagttgatccaaataacgatgaaggatgtaaatgttgaaaatgtgaatcagcagagaggag

SEQ ID NO: 13123 - DNA, 537 bp, Homo sapiens
  source 1..537: mol_type = unassigned DNA
gctagtagggggctgcatggcacgcgcccctttgcgtccagagaataccatagtgcgggggagcgccaaccagtgccaggacacttaccgagctgaagagttgacaggcaggcccagtataatcacaaggattcataaaacggaagagggagacagaagagatggtcagagtgatatgaagtaaaaaggattcagcttactcttgctggatttgtaaatgcaggaagggaccacgagtcaaggaatgcaggtagcttctagaagctagaaaaggttctgaagagggtcactccctcactggctgccattgaaagagtccacttctcagtgactcctagctgggcactggatgcagttgaggattgctggtcaatatgattcttcttgctgtgctttttctctgcttcatttcctcatattcagcttctgttaaaggtcacacaactggtctctcattaaataatgaccggctgtacaagctcacgtactccactgaagttcttcttgatcggggcaaaggaaaactgcaagacagcg

SEQ ID NO: 13124 - DNA, 549 bp, Homo sapiens
  source 1..549: mol_type = unassigned DNA
agtagggggctgcatggcacgcgcccctttgcgtccagagaataccatagtgcgggggagcgccaaccagtgccaggacacttaccgagctgaagagttgacaggtcacacaactggtctctcattaaataatgaccggctgtacaagctcacgtactccactgaagttcttcttgatcggggcaaaggaaaactgcaagacagcgtgggctaccgcatttcctccaacgtggatgtggccttactatggaggaatcctgatggtgatgatgaccagttgatccaaataacgatgaaggatgtaaatgttgaaaatgtgaatcagcagagaggagagaagagcatcttcaaaggaaaaagcccatctaaaataatgggaaaggaaaacttggaagctctgcaaagacctacgctccttcatctaatccatggaaaggtcaaagagttctactcatatcaaaatgaggcagtggccatagaaaatatcaagagaggtctggctagcctatttcagacacagttaagctctggaaccaccaatgaggtaga

SEQ ID NO: 13125 - DNA, 608 bp, Homo sapiens
  source 1..608: mol_type = unassigned DNA
catttcgaacccgcaatggaagaaaggggaggggtttatgcggggcggggtctggagttagtgttttgggagtgggaggtagttacagtgatgtctgttttttcccgttcaagaattaagtgtgtacctgcagacgtgtattcattcatatattcttgttctgaagagggtcactccctcactggctgccattgaaagagtccacttctcagtgactcctagctgggcactggatgcagttgaggattgctggtcaatatgattcttcttgctgtgctttttctctgcttcatttcctcatattcagcttctgttaaaggtcacacaactggtctctcattaaataatgaccggctgtacaagctcacgtactccactgaagttcttcttgatcggggcaaaggaaaactgcaagacagcgtgggctaccgcatttcctccaacgtggatgtggccttactatggaggaatcctgatggtgatgatgaccagttgatccaaataacgatgaaggatgtaaatgttgaaaatgtgaatcagcagagaggagagaagagcatcttcaaaggaaaaagcccatctaaaataatgggaaaggaaaacttgga

SEQ ID NO: 13126 - DNA, 555 bp, Homo sapiens
  source 1..555: mol_type = unassigned DNA
tttcgaacccgcaatggaagaaaggggaggggtttatgcggggcggggtctggagttagtgttttgggagtgggaggtagttacagtgatgtctgttttttcccgttcaagaattaagtgtgtacctgcagacgtgtattcattcatatattcttgtgagtattggatgaaggaattaagatagtcccactgttaaaaatgcaaaacaacgaagaaaggctcctaatttttctgtgttgaaaatgagagaaaaacatctcttgcctatattatttttaatttatacagaaaattaccatatcacatgattttacataactcaagtggaaaattaaattcaaaaagcaggcccagtataatcacaaggattcataaaacggaagagggagacagaagagatggtcagagtgatatgaagtaaaaaggattcagcttactcttgctggatttgtaaatgcaggaagggaccacgagtcaaggaatgcaggtagcttctagaagctagaaaaggttctgaagagggtcactccctcactggctgccattgaaagagtc

SEQ ID NO: 13127 - DNA, 551 bp, Homo sapiens
  source 1..551: mol_type = unassigned DNA
tttcgaacccgcaatggaagaaaggggaggggtttatgcggggcggggtctggagttagtgttttgggagtgggaggtagttacagtgatgtctgttttttcccgttcaagaattaagtgtgtacctgcagacgtgtattcattcatatattcttgcaggcccagtataatcacaaggattcataaaacggaagagggagacagaagagatggtcagagtgatatgaagtaaaaaggattcagcttactcttgctggatttgtaaatgcaggaagggaccacgagtcaaggaatgcaggtagcttctagaagctagaaaaggttctgaagagggtcactccctcactggctgccattgaaagagtccacttctcagtgactcctagctgggcactggatgcagttgaggattgctggtcaatatgattcttcttgctgtgctttttctctgcttcatttcctcatattcagcttctgttaaaggtcacacaactggtctctcattaaataatgaccggctgtacaagctcacgtactccactgaagttctt

SEQ ID NO: 13128 - DNA, 554 bp, Homo sapiens
  source 1..554: mol_type = unassigned DNA
tttcgaacccgcaatggaagaaaggggaggggtttatgcggggcggggtctggagttagtgttttgggagtgggaggtagttacagtgatgtctgttttttcccgttcaagaattaagtgtgtacctgcagacgtgtattcattcatatattcttgcccagtataatcacaaggattcataaaacggaagagggagacagaagagatggtcagagtgatatgaagtaaaaaggattcagcttactcttgctggatttgtaaatgcaggaagggaccacgagtcaaggaatgcaggtagcttctagaagctagaaaaggtcacacaactggtctctcattaaataatgaccggctgtacaagctcacgtactccactgaagttcttcttgatcggggcaaaggaaaactgcaagacagcgtgggctaccgcatttcctccaacgtggatgtggccttactatggaggaatcctgatggtgatgatgaccagttgatccaaataacgatgaaggatgtaaatgttgaaaatgtgaatcagcagagaggagagaaga

SEQ ID NO: 13129 - DNA, 3154 bp, Homo sapiens
  source 1..3154: mol_type = unassigned DNA
tttcgaacccgcaatggaagaaaggggaggggtttatgcggggcggggtctggagttagtgttttgggagtgggaggtagttacagtgatgtctgttttttcccgttcaagaattaagtgtgtacctgcagacgtgtattcattcatatattcttgtcacacaactggtctctcattaaataatgaccggctgtacaagctcacgtactccactgaagttcttcttgatcggggcaaaggaaaactgcaagacagcgtgggctaccgcatttcctccaacgtggatgtggccttactatggaggaatcctgatggtgatgatgaccagttgatccaaataacgatgaaggatgtaaatgttgaaaatgtgaatcagcagagaggagagaagagcatcttcaaaggaaaaagcccatctaaaataatgggaaaggaaaacttggaagctctgcaaagacctacgctccttcatctaatccatggaaaggtcaaagagttctactcatatcaaaatgaggcagtggccatagaaaatatcaagagaggtctggctagcctatttcagacacagttaagctctggaaccaccaatgaggtagatatctctggaaattgtaaagtgacctaccaggctcatcaagacaaagtgatcaaaattaaggccttggattcatgcaaaatagcgaggtctggatttacgaccccaaatcaggtcttgggtgtcagttcaaaagctacatctgtcaccacctataagatagaagacagctttgttatagctgtgcttgctgaagaaacacacaattttggactgaatttcctacaaaccattaaggggaaaatagtatcgaagcagaaattagagctgaagacaaccgaagcaggcccaagattgatgtctggaaagcaggctgcagccataatcaaagcagttgattcaaagtacacggccattcccattgtggggcaggtcttccagagccactgtaaaggatgtccttctctctcggagctctggcggtccaccaggaaatacctgcagcctgacaacctttccaaggctgaggctgtcagaaacttcctggccttcattcagcacctcaggactgcgaagaaagaagagatccttcaaatactaaagatggaaaataaggaagtattacctcagctggtggatgctgtcacctctgctcagacctcagactcattagaagccattttggactttttggatttcaaaagtgacagcagcattatcctccaggagaggtttctctatgcctgtggatttgcttctcatcccaatgaagaactcctgagagccctcattagtaagttcaaaggttctattggtagcagtgacatcagagaaactgttatgatcatcactgggacacttgtcagaaagttgtgtcagaatgaaggctgcaaactcaaagcagtagtggaagctaagaagttaatcctgggaggacttgaaaaagcagagaaaaaagaggacaccaggatgtatctgctggctttgaagaatgccctgcttccagaaggcatcccaagtcttctgaagtatgcagaagcaggagaagggcccatcagccacctggctaccactgctctccagagatatgatctccctttcataactgatgaggtgaagaagaccttaaacagaatataccaccaaaaccgtaaagttcatgaaaagactgtgcgcactgctgcagctgctatcattttaaataacaatccatcctacatggacgtcaagaacatcctgctgtctattggggagcttccccaagaaatgaataaatacatgctcgccattgttcaagacatcctacgttttgaaatgcctgcaagcaaaattgtccgtcgagttctgaaggaaatggtcgctcacaattatgaccgtttctccaggagtggatcttcttctgcctacactggctacatagaacgtagtccccgttcggcatctacttacagcctagacattctctactcgggttctggcattctaaggagaagtaacctgaacatctttcagtacattgggaaggctggtcttcacggtagccaggtggttattgaagcccaaggactggaagccttaatcgcagccacccctgacgagggggaggagaaccttgactcctatgctggtatgtcagccatcctctttgatgttcagctcagacctgtcacctttttcaacggatacagtgatttgatgtccaaaatgctgtcagcatctggcgaccctatcagtgtggtgaaaggacttattctgctaatagatcattctcaggaacttcagttacaatctggactaaaagccaatatagaggtccagggtggtctagctattgatatttcaggtgcaatggagtttagcttgtggtatcgtgagtctaaaacccgagtgaaaaatagggtgactgtggtaataaccactgacatcacagtggactcctcttttgtgaaagctggcctggaaaccagtacagaaacagaagcaggcttggagtttatctccacagtgcagttttctcagtacccattcttagtttgcatgcagatggacaaggatgaagctccattcaggcaatttgagaaaaagtacgaaaggctgtccacaggcagaggttatgtctctcagaaaagaaaagaaagcgtattagcaggatgtgaattcccgctccatcaagagaactcagagatgtgcaaagtggtgtttgcccctcagccggatagtacttccagcggatggttttgaaactgacctgtgatattttacttgaatttgtctccccgaaagggacacaatgtggcatgactaagtacttgctctctgagagcacagcgtttacatatttacctgtatttaagatttttgtaaaaagctacaaaaaactgcagtttgatcaaatttgggtatatgcagtatgctacccacagcgtcattttgaatcatcatgtgacgctttcaacaacgttcttagtttacttatacctctctcaaatctcatttggtacagtcagaatagttattctctaagaggaaactagtgtttgttaaaaacaaaaataaaaacaaaaccacacaaggagaacccaattttgtttcaacaatttttgatcaatgtatatg

SEQ ID NO: 13130 - DNA, 4037 bp, Homo sapiens
  source 1..4037: mol_type = unassigned DNA
acctacgtttaatcattaatagtgagcccttcagtgaacttaggtcctgattttggagtttggagtctgacctttccccaaagataaacatgattgttgcaggttctgaagagggtcactccctcactggctgccattgaaagagtccacttctcagtgactcctagctgggcactggatgcagttgaggattgctggtcaatatgattcttcttgctgtgctttttctctgcttcatttcctcatattcagcttctgttaaaggtcacacaactggtctctcattaaataatgaccggctgtacaagctcacgtactccactgaagttcttcttgatcggggcaaaggaaaactgcaagacagcgtgggctaccgcatttcctccaacgtggatgtggccttactatggaggaatcctgatggtgatgatgaccagttgatccaaataacgatgaaggatgtaaatgttgaaaatgtgaatcagcagagaggagagaagagcatcttcaaaggaaaaagcccatctaaaataatgggaaaggaaaacttggaagctctgcaaagacctacgctccttcatctaatccatggaaaggtcaaagagttctactcatatcaaaatgaggcagtggccatagaaaatatcaagagaggtctggctagcctatttcagacacagttaagctctggaaccaccaatgaggtagatatctctggaaattgtaaagtgacctaccaggctcatcaagacaaagtgatcaaaattaaggccttggattcatgcaaaatagcgaggtctggatttacgaccccaaatcaggtcttgggtgtcagttcaaaagctacatctgtcaccacctataagatagaagacagctttgttatagctgtgcttgctgaagaaacacacaattttggactgaatttcctacaaaccattaaggggaaaatagtatcgaagcagaaattagagctgaagacaaccgaagcaggcccaagattgatgtctggaaagcaggctgcagccataatcaaagcagttgattcaaagtacacggccattcccattgtggggcaggtcttccagagccactgtaaaggatgtccttctctctcggagctctggcggtccaccaggaaatacctgcagcctgacaacctttccaaggctgaggctgtcagaaacttcctggccttcattcagcacctcaggactgcgaagaaagaagagatccttcaaatactaaagatggaaaataaggaagtattacctcagctggtggatgctgtcacctctgctcagacctcagactcattagaagccattttggactttttggatttcaaaagtgacagcagcattatcctccaggagaggtttctctatgcctgtggatttgcttctcatcccaatgaagaactcctgagagccctcattagtaagttcaaaggttctattggtagcagtgacatcagagaaactgttatgatcatcactgggacacttgtcagaaagttgtgtcagaatgaaggctgcaaactcaaagcagtagtggaagctaagaagttaatcctgggaggacttgaaaaagcagagaaaaaagaggacaccaggatgtatctgctggctttgaagaatgccctgcttccagaaggcatcccaagtcttctgaagtatgcagaagcaggagaagggcccatcagccacctggctaccactgctctccagagatatgatctccctttcataactgatgaggtgaagaagaccttaaacagaatataccaccaaaaccgtaaagttcatgaaaagactgtgcgcactgctgcagctgctatcattttaaataacaatccatcctacatggacgtcaagaacatcctgctgtctattggggagcttccccaagaaatgaataaatacatgctcgccattgttcaagacatcctacgttttgaaatgcctgcaagcaaaattgtccgtcgagttctgaaggaaatggtcgctcacaattatgaccgtttctccaggagtggatcttcttctgcctacactggctacatagaacgtagtccccgttcggcatctacttacagcctagacattctctactcgggttctggcattctaaggagaagtaacctgaacatctttcagtacattgggaaggctggtcttcacggtagccaggtggttattgaagcccaaggactggaagccttaatcgcagccacccctgacgagggggaggagaaccttgactcctatgctggtatgtcagccatcctctttgatgttcagctcagacctgtcacctttttcaacggatacagtgatttgatgtccaaaatgctgtcagcatctggcgaccctatcagtgtggtgaaaggacttattctgctaatagatcattctcaggaacttcagttacaatctggactaaaagccaatatagaggtccagggtggtctagctattgatatttcaggtgcaatggagtttagcttgtggtatcgtgagtctaaaacccgagtgaaaaatagggtgactgtggtaataaccactgacatcacagtggactcctcttttgtgaaagctggcctggaaaccagtacagaaacagaagcaggcttggagtttatctccacagtgcagttttctcagtacccattcttagtttgcatgcagatggacaaggatgaagctccattcaggcaatttgagaaaaagtacgaaaggctgtccacaggcagaggttatgtctctcagaaaagaaaagaaagcgtattagcaggatgtgaattcccgctccatcaagagaactcagagatgtgcaaagtggtgtttgcccctcagccggatagtacttccagcggatggttttgaaactgacctgtgatattttacttgaatttgtctccccgaaagggacacaatgtggcatgactaagtacttgctctctgagagcacagcgtttacatatttacctgtatttaagatttttgtaaaaagctacaaaaaactgcagtttgatcaaatttgggtatatgcagtatgctacccacagcgtcattttgaatcatcatgtgacgctttcaacaacgttcttagtttacttatacctctctcaaatctcatttggtacagtcagaatagttattctctaagaggaaactagtgtttgttaaaaacaaaaataaaaacaaaaccacacaaggagaacccaattttgtttcaacaatttttgatcaatgtatatgaagctcttgataggacttccttaagcatgacgggaaaaccaaacacgttccctaatcaggaaaaaaaaaaaaaaaaaaagtaagacacaaacaaaccattttttttctctttttttggagttgggggcccagggagaagggacaagacttttaaaagacttgttagccaacttcaagaattaatatttatgtctctgttattgttagttttaagccttaaggtagaaggcacatagaaataacatctcatctttctgctgaccattttagtgaggttgttccaaagacattcaggtctctacctccagccctgcaaaaatattggacctagcacagaggaatcaggaaaattaatttcagaaactccatttgatttttcttttgctgtgtctttttgagactgtaatatggtacactgtcctctaagggacatcctcattttatctcacctttttgggggtgagagctctagttcatttaactgtactctgcacaatagctaggatgactaagagaacattgcttcaagaaactggtggatttggatttccaaaatatgaaataaggaaaaaaatgtttttatttgtatgaattaaaagatccatgttgaacatttgcaaatatttattaataaacagatgtggtgataaacccaaaacaaatgacaggtccttattttccactaaacacagacacatgaaatgaaagtttagctagcccactatttgttgtaaattgaaaacgaagtgtgataaaataaatatgtagaaatca

SEQ ID NO: 13131 - DNA, 1155 bp, Homo sapiens
  source 1..1155: mol_type = unassigned DNA
actccctcactggctgccattgaaagagtccacttctcagtgactcctagctgggcactggatgcagttgaggattgctggtcaatatgattcttcttgctgtgctttttctctgcttcatttcctcatattcagcttctgttaaaggtcacacaactggtctctcattaaataatgaccggctgtacaagctcacgtactccactgaagttcttcttgatcggggcaaaggaaaactgcaagacagcgtgggctaccgcatttcctccaacgtggatgtggccttactatggaggaatcctgatggtgatgatgaccagttgatccaaataacgatgaaggatgtaaatgttgaaaatgtgaatcagcagagaggagagaagagcatcttcaaaggaaaaagcccatctaaaataatgggaaaggaaaacttggaagctctgcaaagacctacgctccttcatctaatccatggaaaggtaaaggggcgtttagattccacaactttttctccaacttcatatttttcttcccttcagtagatattattttgaggtaatcacattgtaactacttttatggtaaatggaatttcttcaagaactaaagaacagaggttgtaaattaaatgtttccaaactgaatcaatgccctgagttcccttacatttactagccaatttgtttcctatttttctggaaatctttatagtggaatgaagtatttatttattgatgaaaggcattattaaaaggtaaatttctcatcaaattataagggattacaaacgtaatgtaacaaagcaagtcatcaaagcatgattggatgaattcaggaaaggagacaaattatgagactgaaatgatccaactgagattagtaatattgatttgttatgagattatcgatatctggctaaagtacaaggttaaagattttaaaagggtatgacaagtctaaagtagagtttttttaaagcctttagaaattattttaaaactatgacatggaaaagccttttatatattaaaataatgattgaacactttataatatatatttgaaaatctgttttaaaaattctatgtgtgcattacttatggcttgattctagtcaattgaaatggtctaaataaatttggaattgagaaacaa

SEQ ID NO: 13132 - DNA, 4092 bp, Homo sapiens
  source 1..4092: mol_type = unassigned DNA
tttcgaacccgcaatggaagaaaggggaggggtttatgcggggcggggtctggagttagtgttttgggagtgggaggtagttacagtgatgtctgttttttcccgttcaagaattaagtgtgtacctgcagacgtgtattcattcatatattcttgttctgaagagggtcactccctcactggctgccattgaaagagtccacttctcagtgactcctagctgggcactggatgcagttgaggattgctggtcaatatgattcttcttgctgtgctttttctctgcttcatttcctcatattcagcttctgttaaaggtcacacaactggtctctcattaaataatgaccggctgtacaagctcacgtactccactgaagttcttcttgatcggggcaaaggaaaactgcaagacagcgtgggctaccgcatttcctccaacgtggatgtggccttactatggaggaatcctgatggtgatgatgaccagttgatccaaataacgatgaaggatgtaaatgttgaaaatgtgaatcagcagagaggagagaagagcatcttcaaaggaaaaagcccatctaaaataatgggaaaggaaaacttggaagctctgcaaagacctacgctccttcatctaatccatggaaaggtcaaagagttctactcatatcaaaatgaggcagtggccatagaaaatatcaagagaggtctggctagcctatttcagacacagttaagctctggaaccaccaatgaggtagatatctctggaaattgtaaagtgacctaccaggctcatcaagacaaagtgatcaaaattaaggccttggattcatgcaaaatagcgaggtctggatttacgaccccaaatcaggtcttgggtgtcagttcaaaagctacatctgtcaccacctataagatagaagacagctttgttatagctgtgcttgctgaagaaacacacaattttggactgaatttcctacaaaccattaaggggaaaatagtatcgaagcagaaattagagctgaagacaaccgaagcaggcccaagattgatgtctggaaagcaggctgcagccataatcaaagcagttgattcaaagtacacggccattcccattgtggggcaggtcttccagagccactgtaaaggatgtccttctctctcggagctctggcggtccaccaggaaatacctgcagcctgacaacctttccaaggctgaggctgtcagaaacttcctggccttcattcagcacctcaggactgcgaagaaagaagagatccttcaaatactaaagatggaaaataaggaagtattacctcagctggtggatgctgtcacctctgctcagacctcagactcattagaagccattttggactttttggatttcaaaagtgacagcagcattatcctccaggagaggtttctctatgcctgtggatttgcttctcatcccaatgaagaactcctgagagccctcattagtaagttcaaaggttctattggtagcagtgacatcagagaaactgttatgatcatcactgggacacttgtcagaaagttgtgtcagaatgaaggctgcaaactcaaagcagtagtggaagctaagaagttaatcctgggaggacttgaaaaagcagagaaaaaagaggacaccaggatgtatctgctggctttgaagaatgccctgcttccagaaggcatcccaagtcttctgaagtatgcagaagcaggagaagggcccatcagccacctggctaccactgctctccagagatatgatctccctttcataactgatgaggtgaagaagaccttaaacagaatataccaccaaaaccgtaaagttcatgaaaagactgtgcgcactgctgcagctgctatcattttaaataacaatccatcctacatggacgtcaagaacatcctgctgtctattggggagcttccccaagaaatgaataaatacatgctcgccattgttcaagacatcctacgttttgaaatgcctgcaagcaaaattgtccgtcgagttctgaaggaaatggtcgctcacaattatgaccgtttctccaggagtggatcttcttctgcctacactggctacatagaacgtagtccccgttcggcatctacttacagcctagacattctctactcgggttctggcattctaaggagaagtaacctgaacatctttcagtacattgggaaggctggtcttcacggtagccaggtggttattgaagcccaaggactggaagccttaatcgcagccacccctgacgagggggaggagaaccttgactcctatgctggtatgtcagccatcctctttgatgttcagctcagacctgtcacctttttcaacggatacagtgatttgatgtccaaaatgctgtcagcatctggcgaccctatcagtgtggtgaaaggacttattctgctaatagatcattctcaggaacttcagttacaatctggactaaaagccaatatagaggtccagggtggtctagctattgatatttcaggtgcaatggagtttagcttgtggtatcgtgagtctaaaacccgagtgaaaaatagggtgactgtggtaataaccactgacatcacagtggactcctcttttgtgaaagctggcctggaaaccagtacagaaacagaagcaggcttggagtttatctccacagtgcagttttctcagtacccattcttagtttgcatgcagatggacaaggatgaagctccattcaggcaatttgagaaaaagtacgaaaggctgtccacaggcagaggttatgtctctcagaaaagaaaagaaagcgtattagcaggatgtgaattcccgctccatcaagagaactcagagatgtgcaaagtggtgtttgcccctcagccggatagtacttccagcggatggttttgaaactgacctgtgatattttacttgaatttgtctccccgaaagggacacaatgtggcatgactaagtacttgctctctgagagcacagcgtttacatatttacctgtatttaagatttttgtaaaaagctacaaaaaactgcagtttgatcaaatttgggtatatgcagtatgctacccacagcgtcattttgaatcatcatgtgacgctttcaacaacgttcttagtttacttatacctctctcaaatctcatttggtacagtcagaatagttattctctaagaggaaactagtgtttgttaaaaacaaaaataaaaacaaaaccacacaaggagaacccaattttgtttcaacaatttttgatcaatgtatatgaagctcttgataggacttccttaagcatgacgggaaaaccaaacacgttccctaatcaggaaaaaaaaaaaaaaaaaaagtaagacacaaacaaaccattttttttctctttttttggagttgggggcccagggagaagggacaagacttttaaaagacttgttagccaacttcaagaattaatatttatgtctctgttattgttagttttaagccttaaggtagaaggcacatagaaataacatctcatctttctgctgaccattttagtgaggttgttccaaagacattcaggtctctacctccagccctgcaaaaatattggacctagcacagaggaatcaggaaaattaatttcagaaactccatttgatttttcttttgctgtgtctttttgagactgtaatatggtacactgtcctctaagggacatcctcattttatctcacctttttgggggtgagagctctagttcatttaactgtactctgcacaatagctaggatgactaagagaacattgcttcaagaaactggtggatttggatttccaaaatatgaaataaggaaaaaaatgtttttatttgtatgaattaaaagatccatgttgaacatttgcaaatatttattaataaacagatgtggtgataaacccaaaacaaatgacaggtccttattttccactaaacacagacacatgaaatgaaagtttagctagcccactatttgttgtaaattgaaaacgaagtgtgataaaataaatatgtagaaatcata

SEQ ID NO: 13133 - DNA, 854 bp, Homo sapiens
  source 1..854: mol_type = unassigned DNA
aactcccaagccccacccctgggcttggcctgccttgccctgccgggaagtgatccccaaggcagggtgagagttccccatctgaggcgtttgttgcagctacctgcacttctagatgctccccaggttcatcctgtgtcgtctcccccacctaccagtcatcttcttgtgagccctgggcttaggagtcaccatggcaactgaagagttcatcatccgcatccccccataccactatatccatgtgctggaccagaacagcaacgtgtcccgtgtggaggtcgggccaaagacctacatccggcaggacaatgagagggtactgtttgcccccatgcgcatggtgaccgtccccccacgtcactactgcacagtggccaaccctgtgtctcgggatgcccagggcttggtgctgtttgatgtcacagggcaagttcggcttcgccacgctgacctcgagatccggctggcccaggaccccttccccctgtacccaggggaggtgctggaaaaggacatcacacccctgcaggtggttctgcccaacactgccctccatctaaaggcgctgcttgattttgaggataaagatggagacaaggtggtggcaggagatgagtggcttttcgagggacctggcacgtacatcccccggaaggaagtggaggtcgtggagatcattcaggccaccatcatcaggcagaaccaggctctgcggctcagggcccgcaaggagtgctgggaccgggacggcaaggagagggtgacaggggaagaatggctggtcaccacagtaggggcgtacctcccagcggtgtttgaggaggttctggatttggtggacgccgtcatcc

SEQ ID NO: 13134 - DNA, 2870 bp, Homo sapiens
  source 1..2870: mol_type = unassigned DNA
acccctgggcttggcctgccttgccctgccgggaagtgatccccaaggcagggtgagagttccccatctgaggcgtttgttgcagctacctgcacttctagattcatcttcttgtgagccctgggcttaggagtcaccatggcaactgaagagttcatcatccgcatccccccataccactatatccatgtgctggaccagaacagcaacgtgtcccgtgtggaggtcgggccaaagacctacatccggcaggacaatgagagggtactgtttgcccccatgcgcatggtgaccgtccccccacgtcactactgcacagtggccaaccctgtgtctcgggatgcccagggcttggtgctgtttgatgtcacagggcaagttcggcttcgccacgctgacctcgagatccggctggcccaggaccccttccccctgtacccaggggaggtgctggaaaaggacatcacacccctgcaggtggttctgcccaacactgccctccatctaaaggcgctgcttgattttgaggataaagatggagacaaggtggtggcaggagatgagtggcttttcgagggacctggcacgtacatcccccggaaggaagtggaggtcgtggagatcattcaggccaccatcatcaggcagaaccaggctctgcggctcagggcccgcaaggagtgctgggaccgggacggcaaggagagggtgacaggggaagaatggctggtcaccacagtaggggcgtacctcccagcggtgtttgaggaggttctggatttggtggacgccgtcatccttacggaaaagacagccctgcacctccgggctcggcggaacttccgggacttcaggggagtgtcccgccgcactggggaggagtggctggtaacagtgcaggacacagaggcccacgtgccagatgtccacgaggaggtgctgggggttgtgcccatcaccaccctgggcccccacaactactgcgtgattctcgaccctgtcggaccggatggcaagaatcagctggggcagaagcgcgtggtcaagggagagaagtcttttttcctccagccaggagagcagctggaacaaggcatccaggatgtgtatgtgctgtcggagcagcaggggctgctgctgagggccctgcagcccctggaggagggggaggatgaggagaaggtctcacaccaggctggggaccactggctcatccgcggacccctggagtatgtgccatctgccaaagtggaggtggtggaggagcgccaggccatccctctagacgagaacgagggcatctatgtgcaggatgtcaagaccggaaaggtgcgcgctgtgattggaagcacctacatgctgacccaggacgaagtcctgtgggagaaagagctgcctcccggggtggaggagctgctgaacaaggggcaggaccctctggcagacaggggtgagaaggacacagctaagagcctccagcccttggcgccccggaacaagacccgtgtggtcagctaccgcgtgccccacaacgctgcggtgcaggtgtacgactaccgagagaagcgagcccgcgtggtcttcgggcctgagctggtgtcgctgggtcctgaggagcagttcacagtgttgtccctctcagctgggcggcccaagcgtccccatgcccgccgtgcgctctgcctgctgctggggcctgacttcttcacagacgtcatcaccatcgaaacggcggatcatgccaggctgcaactgcagctggcctacaactggcactttgaggtgaatgaccggaaggacccccaagagacggccaagctcttttcagtgccagactttgtaggtgatgcctgcaaagccatcgcatcccgggtgcggggggccgtggcctctgtcactttcgatgacttccataagaactcagcccgcatcattcgcactgctgtctttggctttgagacctcggaagcgaagggccccgatggcatggccctgcccaggccccgggaccaggctgtcttcccccaaaacgggctggtggtcagcagtgtggacgtgcagtcagtggagcctgtggatcagaggacccgggacgccctgcaacgcagcgtccagctggccatcgagatcaccaccaactcccaggaagcggcggccaagcatgaggctcagagactggagcaggaagcccgcggccggcttgagcggcagaagatcctggaccagtcagaagccgagaaagctcgcaaggaacttttggagctggaggctctgagcatggccgtggagagcaccgggactgccaaggcggaggccgagtcccgtgcggaggcagcccggattgagggagaagggtccgtgctgcaggccaagctaaaagcacaggccttggccattgaaacggaggctgagctccagagggtccagaaggtccgagagctggaactggtctatgcccgggcccagctggagctggaggtgagcaaggctcagcagctggctgaggtggaggtgaagaagttcaagcagatgacagaggccataggccccagcaccatcagggaccttgctgtggctgggcctgagatgcaggtaaaactgctccagtccctgggcctgaaatcaaccctcatcaccgatggctccactcccatcaacctcttcaacacagcctttgggctgctggggatggggcccgagggtcagcccctgggcagaagggtggccagtgggcccagccctggggaggggatatccccccagtctgctcaggcccctcaagctcctggagacaaccacgtggtgcctgtactgcgctaactcctgattaatacaatggaagtttctgggcatttacaatttcaacactt

SEQ ID NO: 13135 - DNA, 589 bp, Homo sapiens
  source 1..589: mol_type = unassigned DNA
aaggcagggtgagagttccccatctgaggcgtttgttgcagctacctgcacttctagattcatcttcttgtgagccctgggcttaggagtcaccatggcaactgaagagttcatcatccgcatccccccataccactatatccatgtgctggaccagaacagcaacgtgtcccgtgtggaggtcgggccaaagacctacatccggcaggacaatgagaggttctggatttggtggacgccgtcatccttacggaaaagacagccctgcacctccgggctcggcggaacttccgggacttcaggggagtgtcccgccgcactggggaggagtggctggtaacagtgcaggacacagaggcccacgtgccagatgtccacgaggaggtgctgggggttgtgcccatcaccaccctgggcccccacaactactgcgtgattctcgaccctgtcggaccggatggcaagaatcagctggggcagaagcgcgtggtcaagggagagaagtcttttttcctccagccaggagagcagctggaacaaggcatccaggatgtgtatgtgctgtcggagcagcaggggctgctgctga

SEQ ID NO: 13136 - DNA, 546 bp, Homo sapiens
  source 1..546: mol_type = unassigned DNA
gttccccatctgaggcgtttgttgcagctacctgcacttctagatgctccccaggttcatcctgtgtcgtctcccccacctaccagtcatcttcttgtgagccctgggcttaggagtcaccatggcaactgaagagttcatcatccgcatccccccataccactatatccatgtgctggaccagaacagcaacgtgtcccgtgtggaggtcgggccaaagacctacatccggcaggacaatgagaggtgggtgtgggggctgggctgtgggggatccttggggatgtgggggcctgtttggctggcatgatggtccttatcctcctccctcttcccaagcaggagtggccctcgcttgggcgatagagaggtttctctctcatttggtgtcctctttggtagtggagacctggtcccaggtcctcacacctcttctcatcttcctgcagggtactgtttgcccccatgcgcatggtgaccgtccccccacgtcactactgcacagtggccaaccctgtgtctcgggatgcccagggcttggtgctg

SEQ ID NO: 13137 - DNA, 548 bp, Homo sapiens
  source 1..548: mol_type = unassigned DNA
atctgaggcgtttgttgcagctacctgcacttctagatgtttcggccctgcggagaaccctccaagggagcagtggaaaaagcttcacttggcagtaaagcccctacttgctgttccatccctgcagctggggtgaaataagccactgaccagtaaacaactgaggcttaaaccagcatgccagctcaggctccccaggttcatcctgtgtcgtctcccccacctaccagtcatcttcttgtgagccctgggcttaggagtcaccatggcaactgaagagttcatcatccgcatccccccataccactatatccatgtgctggaccagaacagcaacgtgtcccgtgtggaggtcgggccaaagacctacatccggcaggacaatgagagggtactgtttgcccccatgcgcatggtgaccgtccccccacgtcactactgcacagtggccaaccctgtgtctcgggatgcccagggcttggtgctgtttgatgtcacagggcaagttcggcttcgccacgctgacctcgagatccggctggcccagg

SEQ ID NO: 13138 - DNA, 525 bp, Homo sapiens
  source 1..525: mol_type = unassigned DNA
atctgaggcgtttgttgcagctacctgcacttctagattcatcttcttgtgagccctgggcttaggagtcaccatggcaactgaagagttcatcatccgcatccccccataccactatatccatgtgctggaccagaacagcaacgtgtcccgtgtggaggtcgggccaaagacctacatccggcaggacaatgagaggacatcacacccctgcaggtggttctgcccaacactgccctccatctaaaggcgctgcttgattttgaggataaagatggagacaaggtggtggcaggagatgagtggcttttcgagggacctggcacgtacatcccccggaaggaagtggaggtcgtggagatcattcaggccaccatcatcaggcagaaccaggctctgcggctcagggcccgcaaggagtgctgggaccgggacggcaaggagagggtgacaggtggggtcaccaaggggcgatgatggtgggtgggcaggaggggtccccactgcaggggaagcaggggaagg

SEQ ID NO: 13139 - DNA, 548 bp, Homo sapiens
  source 1..548: mol_type = unassigned DNA
atctgaggcgtttgttgcagctacctgcacttctagatgctccccaggttcatcctgtgtcgtctcccccacctaccagtcatcttcttgtgagccctgggcttaggagtcaccatggcaactgaagagttcatcatccgcatccccccataccactatatccatgtgctggaccagaacagcaacgtgtcccgtgtggaggtcgggccaaagacctacatccggcaggacaatgagagggtactgtttgcccccatgcgcatggtgaccgtccccccacgtcactactgcacagtggccaaccctgtgtctcgggatgcccagggcttggtgctgtttgatgtcacagggcaagttcggcttcgccacgctgacctcgagatccggctggcccaggaccccttccccctgtacccaggggaggtgctggaaaaggccatccctctagacgagaacgagggcatctatgtgcaggatgtcaagaccggaaaggtgcgcgctgtgattggaagcacctacatgctgacccaggacgaagtcctgtggga

SEQ ID NO: 13140 - DNA, 557 bp, Homo sapiens
  source 1..557: mol_type = unassigned DNA
gaggcgtttgttgcagctacctgcacttctagatgctccccaggttcatcctgtgtcgtctcccccacctaccagtcatcttcttgtgagccctgggcttaggagtcaccatggcaactgaagagttcatcatccgcatccccccataccactatatccatgtgctggaccagaacagcaacgtgtcccgtgtggaggtcgggccaaagacctacatccggcaggacaatgagagggtactgtttgcccccatgcgcatggtgaccgtccccccacgtcactactgcacagtggccaaccctgtgtctcgggatgcccagggcttggtgctgtttgatgtcacagggcaagttcggcttcgccacgctgacctcgagatccggctggcccaggaccccttccccctgtacccaggggaggtgctggaaaaggctccagagcctaccagaagtgcccagccagtctggcattaaatgacatgtgccaaggttaagcagttcattcacccggtgccagacactggtgggcagtgccaaagcagcagtgacaagcccagg

SEQ ID NO: 13141 - DNA, 549 bp, Homo sapiens
  source 1..549: mol_type = unassigned DNA
aggcgtttgttgcagctacctgcacttctagattcatcttcttgtgagccctgggcttaggagtcaccatggcaactgaagagttcatcatccgcatccccccataccactatatccatgtgctggaccagaacagcaacgtgtcccgtgtggagtgtcccgccgcactggggaggagtggctggtaacagtgcaggacacagaggcccacgtgccagatgtccacgaggaggtgctgggggttgtgcccatcaccaccctgggcccccacaactactgcgtgattctcgaccctgtcggaccggatggcaagaatcagctggggcagaagcgcgtggtcaagggagagaagtcttttttcctccagccaggagagcagctggaacaaggcatccaggatgtgtatgtgctgtcggagcagcaggggctgctgctgagggccctgcagcccctggaggagggggaggatgaggagaaggtctcacaccaggctggggaccactggctcatccgcggacccctggagtatgtgccatctgccaaagtgga

SEQ ID NO: 13142 - DNA, 211 bp, Homo sapiens
  source 1..211: mol_type = unassigned DNA
gagcactgggtcggccctcgggtgtggctgtttgggcaggacagccctcttcatcttcttgtgagccctgggcttaggagtcaccatggcaactgaagagttcatcatccgcatccccccataccactatatccatgtgctggaccagaacagcaacgtgtcccgtgtggaggtcgggccaaagacctacatccggcaggacaatgagagg

SEQ ID NO: 13143 - DNA, 658 bp, Homo sapiens
  source 1..658: mol_type = unassigned DNA
agcactgggtcggccctcgggtgtggctgtttgggcaggacagccctctgtatgtagccttgagcagctgtgggaaggtctgggggcagggccgcatcaccgaccttacgtccaacctcaggactgcctggagcaagagccctggggttggggacaaaggaggctgcctggacctggtcatcttcttgtgagccctgggcttaggagtcaccatggcaactgaagagttcatcatccgcatccccccataccactatatccatgtgctggaccagaacagcaacgtgtcccgtgtggaggtcgggccaaagacctacatccggcaggacaatgagagggtactgtttgcccccatgcgcatggtgaccgtccccccacgtcactactgcacagtggccaaccctgtgtctcgggatgcccagggcttggtgctgtttgatgtcacagggcaagttcggcttcgccacgctgacctcgagatccggctggcccaggaccccttccccctgtacccaggggaggtgctggaaaaggacatcacacccctgcaggtggttctgcccaacactgccctccatctaaaggcgctgcttgattttgaggataaagatggagacaaggtggtggcaggagatgagtggcttttcgagggacctgg

SEQ ID NO: 13144 - DNA, 408 bp, Homo sapiens
  source 1..408: mol_type = unassigned DNA
attcctgaacaggccaagcactgggtgaaactactcaggattcagaagcagtcatcttcttgtgagccctgggcttaggagtcaccatggcaactgaagagttcatcatccgcatccccccataccactatatccatgtgctggaccagaacagcaacgtgtcccgtgtggaggtcgggccaaagacctacatccggcaggacaatgagagggtactgtttgcccccatgcgcatggtgaccgtccccccacgtcactactgcacagtggccaaccctgtgtctcgggatgcccagggcttggtgctgtttgatgtcacagggcaagttcggcttcgccacgctgacctcgagatccggctggcccaggaccccttccccctgtacccaggggaggtgctggaaaagg

SEQ ID NO: 13145 - DNA, 811 bp, Homo sapiens
  source 1..811: mol_type = unassigned DNA
caactgcaggagctgaggatgggagagaactggggacgagggggccagagtgatttgcagtgttagtaatgcagctggttctatggaaggctcagttccatctgggatccctttatgagcagtggactaggtcttcacattcagcccaggattactaaagcataggaaagaggcagggaacatagacacagctcatgtaaacattccttttgtttatggccgaatcctagccactggactacctgaggcatacagatattctttggctatgggctgacatttgaatacagctggggcctcaggattctctgaaataaagggctgcctccctctggaggagccaggcagctcctcagagcagctgcccattgcgtgctggacaaggccatgtcaccacctccatggctccccagtttcccagcttgctgtatctctccaccgtaagagactgggagcaccttgatctgaagctctttgcagtgccggtggcagtgtagggggaagtagttgatgggagtgagggaaaggaattggcaaggaaccctgggcctctgtggctcactgcatcaagcagttcttggcaaaggctccccaggttcatcctgtgtcgtctcccccacctaccagtcatcttcttgtgagccctgggcttaggagtcaccatggcaactgaagagttcatcatccgcatccccccataccactatatccatgtgctggaccagaacagcaacgtgtcccgtgtggaggtcgggccaaagacctacatccggcaggacaatgagagggtactgtttgcccccatgcgcat

SEQ ID NO: 13146 - DNA, 2091 bp, Homo sapiens
  source 1..2091: mol_type = unassigned DNA
cccaggctgaagtgcagtggtgcagtcatagctcactgaagccttaacctcctgggctcaagtgatcctcccacctcagcctcccgagtagctgggactacaggtgtgcgccgccaccatgcctggctacactttttttttttttttttttttttagagatgggatcttgctatgttgcccaggctggttcttgaatgtctgaggtcaagcaatcctcctacctcagtctcccaaagttctgggatgacaggtgtgagccactgtgcccggcctccaccccagtcttatttcaggacatacagagatggatgttgtggacccgcctccagagcatcaggcttggccctggggtcacagcactgatggttctgtgtctccaccttcttccccactaggacatcacacccctgcaggtggttctgcccaacactgccctccatctaaaggcgctgcttgattttgaggataaagatggagacaaggtggtggcaggagatgagtggcttttcgagggacctggcacgtacatcccccggaaggaagtggaggtcgtggagatcattcaggccaccatcatcaggcagaaccaggctctgcggctcagggcccgcaaggagtgctgggaccgggacggcaaggagagggtgacaggtggggtcaccaaggggcgatgatggtgggtgggcaggaggggtccccactgcaggggaagcaggggaaggttgaggaaagcctcctgtagccccagagaggcgctttcctggtatcttttgaaagctgttgagggccacccactgctcttccttccccacccccgcttcatgctgtttccacttgggctggaaaatgtgaccatgaccatgcggatgtggcttttccttccctcaccttcaccatgagctgtgggcagtggccatgacttacctgattctggatcaacaaagaagatgttcaaatacaattgacaaatgtaggccaataggtacagtggctcacacctgtcatcccagcactttgccaaggtgggtgaatcgtctgagcccaggagcttaagaccagcctgagcaacacagtgagaccccatctctacagagaatttaaaaattagcctggccttggacacacacctgtggtcccagctactcagaaggctgaagggggagaatttcttgagcccaggatgtggaggctgcagtgagctgtgactgcaccactgcactccatcctgggccacagaggtactaccccgaggtgctaccattcccactttttttttttttttgagacggagtcttgctttcttgctgttgcccaggttggagtgcagtggcgcgatctcggctcactgcaagctccgcctcctgggttcacaccattctcctgcctcagcctcctgagtagctgggactacaggcgcccaccaccatgcccagctaattttttttttttttgtattttttttttttttttttttagtagagacagggtttcaccatgttagccagggtggtcttgatctcctgacctcgtgatccaccaggttcggcctcccaaagtgctgggattacaggcgtgaaccaccgcacccggccattcccactttctatatatcaaaactgggatgcagaatgcaggttgcttgccctggggtgtggccaggcagggcgaggctgggacctgcatccaggcactctggcttctccagtaaaccaaaggacatccacaactctaacagaggcagttctgctgcctgttttagcagaaggacaaaagttggtctttggagcttagagaaggcagaacaggctgttggcatagcagcaacttgggcatcttaggaggccaaggtgggcggatcacttgaggccaggagttccagactagcttgggcaacatggtgaaacaccatctctacaaaaaatacaaatattagccgggcgtggtggcacgtgcctgtaatcccagctactcaggaggctgaggcatgagaatcacttgaatccaggaggctgaggttgcagtgagctgagatcacagcctgggcaacagagggagactccgtctcaaaaaaaaaaaaaaaaaaaaaaaaa

SEQ ID NO: 13147 - DNA, 575 bp, Homo sapiens
  source 1..575: mol_type = unassigned DNA
caggagatgagtggcttttcgagggacctggcacgtacatcccccggaaggaagtggaggtcgtggagatcattcaggccaccatcatcaggcagaaccaggctctgcggctcagggcccgcaaggagtgctgggaccgggacggcaaggagagggtgacaggtggggtcaccaaggggcgatgatggtgggtgggcaggaggggtccccactgcaggggaagcaggggaaggttgaggaaagcctcctgtagccccagagaggcgctttcctggtatcttttgaaagctgttgagggccacccactgctcttccttccccacccccgcttcatgctgtttccacttgggctggaaaatgtgaccatgaccatgcggatgtggcttttccttccctcaccttcaccatgagctgtgggcagtggccatgacttacctgattctggatcaacaaagaagatgttcaaatacaattgacaaatgtaggccaataggggaagaatggctggtcaccacagtaggggcgtacctcccagcggtgtttgaggaggttctggatttggtggacgccgtcat

SEQ ID NO: 13148 - DNA, 674 bp, Homo sapiens
  source 1..674: mol_type = unassigned DNA
ttgaaagctgttgagggccacccactgctcttccttccccacccccgcttcatgctgtttccacttgggctggaaaatgtgaccatgaccatgcggatgtggcttttccttccctcaccttcaccatgagctgtgggcagtggccatgacttacctgattctggatcaacaaagaagatgttcaaatacaattgacaaatgtaggccaataggtacagtggctcacacctgtcatcccagcactttgccaaggggaagaatggctggtcaccacagtaggggcgtacctcccagcggtgtttgaggaggttctggatttggtggacgccgtcatccttacggaaaagacagccctgcacctccgggctcggcggaacttccgggacttcaggggagtgtcccgccgcactggggaggagtggctggtaacagtgcaggacacagaggcccacgtgccagatgtccacgaggaggtgctgggggttgtgcccatcaccaccctgggcccccacaactactgcgtgattctcgaccctgtcggaccggatggcaagaatcagctggggcagaagcgcgtggtcaagggagagaagtcttttttcctccagccaggagagcagctggaacaaggcatccaggatgtgtatgtgctgtcggagcagcaggggctgctg

SEQ ID NO: 13149 - DNA, 561 bp, Homo sapiens
  source 1..561: mol_type = unassigned DNA
gaaacagcacaggactggggaggtaccattggaagcacccgcaaccctaaaggcactgaccctaacctcacgtctccccactagggagagaagtcttttttcctccagccaggagagcagctggaacaaggcatccaggatgtgtatgtgctgtcggagcagcaggggctgctgctgagggccctgcagcccctggaggagggggaggatgaggagaaggtctcacaccaggctggggaccactggctcatccgcggacccctggagtatgtgccatctgccaaagtggaggtggtggaggagcgccaggccatccctctagacgagaacgagggcatctatgtgcaggatgtcaagaccggaaaggtgcgcgctgtgattggaagcacctacatgctgacccaggacgaagtcctgtgggagaaagagctgcctcccggggtggaggagctgctgaacaaggggcaggaccctctggcagacaggggtgagaaggacacagctaagagcctccagcccttggcgccccggaacaagacccgtgtggtcagctaccgcgtg

SEQ ID NO: 13150 - DNA, 2925 bp, Homo sapiens
  source 1..2925: mol_type = unassigned DNA
aactcccaagccccacccctgggcttggcctgccttgccctgccgggaagtgatccccaaggcagggtgagagttccccatctgaggcgtttgttgcagctacctgcacttctagatgctccccaggttcatcctgtgtcgtctcccccacctaccagtcatcttcttgtgagccctgggcttaggagtcaccatggcaactgaagagttcatcatccgcatccccccataccactatatccatgtgctggaccagaacagcaacgtgtcccgtgtggaggtcgggccaaagacctacatccggcaggacaatgagagggtactgtttgcccccatgcgcatggtgaccgtccccccacgtcactactgcacagtggccaaccctgtgtctcgggatgcccagggcttggtgctgtttgatgtcacagggcaagttcggcttcgccacgctgacctcgagatccggctggcccaggaccccttccccctgtacccaggggaggtgctggaaaaggacatcacacccctgcaggtggttctgcccaacactgccctccatctaaaggcgctgcttgattttgaggataaagatggagacaaggtggtggcaggagatgagtggcttttcgagggacctggcacgtacatcccccggaaggaagtggaggtcgtggagatcattcaggccaccatcatcaggcagaaccaggctctgcggctcagggcccgcaaggagtgctgggaccgggacggcaaggagagggtgacaggggaagaatggctggtcaccacagtaggggcgtacctcccagcggtgtttgaggaggttctggatttggtggacgccgtcatccttacggaaaagacagccctgcacctccgggctcggcggaacttccgggacttcaggggagtgtcccgccgcactggggaggagtggctggtaacagtgcaggacacagaggcccacgtgccagatgtccacgaggaggtgctgggggttgtgcccatcaccaccctgggcccccacaactactgcgtgattctcgaccctgtcggaccggatggcaagaatcagctggggcagaagcgcgtggtcaagggagagaagtcttttttcctccagccaggagagcagctggaacaaggcatccaggatgtgtatgtgctgtcggagcagcaggggctgctgctgagggccctgcagcccctggaggagggggaggatgaggagaaggtctcacaccaggctggggaccactggctcatccgcggacccctggagtatgtgccatctgccaaagtggaggtggtggaggagcgccaggccatccctctagacgagaacgagggcatctatgtgcaggatgtcaagaccggaaaggtgcgcgctgtgattggaagcacctacatgctgacccaggacgaagtcctgtgggagaaagagctgcctcccggggtggaggagctgctgaacaaggggcaggaccctctggcagacaggggtgagaaggacacagctaagagcctccagcccttggcgccccggaacaagacccgtgtggtcagctaccgcgtgccccacaacgctgcggtgcaggtgtacgactaccgagagaagcgagcccgcgtggtcttcgggcctgagctggtgtcgctgggtcctgaggagcagttcacagtgttgtccctctcagctgggcggcccaagcgtccccatgcccgccgtgcgctctgcctgctgctggggcctgacttcttcacagacgtcatcaccatcgaaacggcggatcatgccaggctgcaactgcagctggcctacaactggcactttgaggtgaatgaccggaaggacccccaagagacggccaagctcttttcagtgccagactttgtaggtgatgcctgcaaagccatcgcatcccgggtgcggggggccgtggcctctgtcactttcgatgacttccataagaactcagcccgcatcattcgcactgctgtctttggctttgagacctcggaagcgaagggccccgatggcatggccctgcccaggccccgggaccaggctgtcttcccccaaaacgggctggtggtcagcagtgtggacgtgcagtcagtggagcctgtggatcagaggacccgggacgccctgcaacgcagcgtccagctggccatcgagatcaccaccaactcccaggaagcggcggccaagcatgaggctcagagactggagcaggaagcccgcggccggcttgagcggcagaagatcctggaccagtcagaagccgagaaagctcgcaaggaacttttggagctggaggctctgagcatggccgtggagagcaccgggactgccaaggcggaggccgagtcccgtgcggaggcagcccggattgagggagaagggtccgtgctgcaggccaagctaaaagcacaggccttggccattgaaacggaggctgagctccagagggtccagaaggtccgagagctggaactggtctatgcccgggcccagctggagctggaggtgagcaaggctcagcagctggctgaggtggaggtgaagaagttcaagcagatgacagaggccataggccccagcaccatcagggaccttgctgtggctgggcctgagatgcaggtaaaactgctccagtccctgggcctgaaatcaaccctcatcaccgatggctccactcccatcaacctcttcaacacagcctttgggctgctggggatggggcccgagggtcagcccctgggcagaagggtggccagtgggcccagccctggggaggggatatccccccagtctgctcaggcccctcaagctcctggagacaaccacgtggtgcctgtactgcgctaactcctgattaatacaatggaagtttctgggcatttacaatttcaacactt

SEQ ID NO: 13151 - DNA, 120 bp, Homo sapiens
  source 1..120: mol_type = unassigned DNA
atggcaactgaagagttcatcatccgcatccccccataccactatatccatgtgctggaccagaacagcaacgtgtcccgtgtggagtgtcccgccgcactggggaggagtggctggtaa

SEQ ID NO: 13152 - DNA, 860 bp, Homo sapiens
  source 1..860: mol_type = unassigned DNA
aaagaagaggaagaagattatttcaggtagagggaagagctcatgaaaatgccatggtaagaaggtggatggctctgtaaatgcctatgccataaatgtctctcagaagaggaagtacaggcagtacatgaatcgaaaaggtggattcaacagacctttggatttcattgcatgagaattgaagtgttgaaggatgattttttttcccctcatcttggtcagagagtggattttgtattttgtatttaacttgcattcaaaaaacaggatctcagttctcctttcttgtaaaaagctgaacatggttatgcctccatgttaccatacaataacaaggacagagatgccttaaaacggaggaacaaatccaaaaagaataacagcagtagcagatcaactcacaatgaaatggagaagaatagacgggctcatcttcgcttgtgcctggagaagttgaaggggctggtgccacttggacccgaatcaagtcgacacactacgttgagtttattaacaaaagccaaattgcacataaagaaacttgaagattgtgacagaaaagccgttcaccaaatcgaccagcttcagcgagagcagcgacacctgaagaggcagctggagaagctgggcattgagaggatccggatggacagcatcggctccaccgtctcctcggagcgctccgactccgacagggaagaaatcgacgttgacgtggagagcacggactatctcacaggtgatctggactggagcagcagcagtgtgagcgactctgacgagcggggcagcatgcagagcctcggcagtgatgagggctattccagcaccagcatcaagagaataaagctgcaggacag

SEQ ID NO: 13153 - DNA, 5587 bp, Homo sapiens
  source 1..5587: mol_type = unassigned DNA
gagtcggggataaacactccgcggcggtggcggctgctgctctgctccgggttctgtcactgtgtcggcggtgcccagctcactggccccctccctctcttgtcgagcgtggttgccagagaggctccctcagccctgctccgcggggtccacagcgggctccacagcgggctccatagcgggctccacagcggtccggcggcggcagcgagcccgtgggcagtgggggttggtcccgtggctccggcccccggtgcagaatggcggcggcggttcggatgaacatccagatgctgctggaggcggccgactatctggagcggcgggagagagaagctgaacatggttatgcctccatgttaccatacaataacaaggacagagatgccttaaaacggaggaacaaatccaaaaagaataacagcagtagcagatcaactcacaatgaaatggagaagaatagacgggctcatcttcgcttgtgcctggagaagttgaaggggctggtgccacttggacccgaatcaagtcgacacactacgttgagtttattaacaaaagccaaattgcacataaagaaacttgaagattgtgacagaaaagccgttcaccaaatcgaccagcttcagcgagagcagcgacacctgaagaggcagctggagaagctgggcattgagaggatccggatggacagcatcggctccaccgtctcctcggagcgctccgactccgacagggaagaaatcgacgttgacgtggagagcacggactatctcacaggtgatctggactggagcagcagcagtgtgagcgactctgacgagcggggcagcatgcagagcctcggcagtgatgagggctattccagcaccagcatcaagagaataaagctgcaggacagtcacaaggcgtgtcttggtctctaagagagtgggcactgcggctgtctccttgaaggttctccctgttggttctgattaggtaacgtattggacctgcccacaactcccttgcacgtaaacttcagtgtcccaccttgaccaaaatcagctttgtaactgttttcaaggaggtgcttaggattgtgggtttctgattgcatccactagcttctctttttctcgccataaaaatttgtctctgagagactatacattccaatcaatttgaagcatccaagaattcttagaccgaataagcaatgtccacatctcagcaatccccctctttgctctcctcgtgtcctctcccagacctttcttccagttttctggcttactgtgttacttgcctaggaggaatgtccaagtgtgtcttgtacttaggaaactgaaggaaacaaacttttgaaattgagatcctgatctcagaactccaaagtaagctttgaaagcagcatttaagagcacttaaccatggacctcaccaccagtgaggaagtcaggaatacctctagaaaacacgcccttcacaccgcgcatgctcattcccccgacgcgccgcgtgtggatgggagcagtatttctcactttaaaatggacaccttgatagtgtgtctctggggttgcacagctcatcaaagttccaaattgtttgttctcacaaacaaaacggtacaatctatttttgtgcgatgttcttgggacctcgctgtgttctgctatctcgaggcacattctcccctccaactttgttaatgctacttgtctctggaacatttttttttcctacctcagagataaatgagatctccatttcccacttaacacagtgattatccttttttccccccccaaaatagtgacatttggtccaattataatctattttcctattgaactttcagcaataactgagctgtggcactagcagagctagtagccattatcagtgaaagaaaaagtccacatttctactctctgttgcaggtgaacaggagaggatggtacactgttactagaactcctctccttattgattatttttggacacacccagaaacttctttatggaggcttttgggttgatagtttaaaaggctgatttttctttttggttatgatttctcccttaagtggtctccgactttgtagcatttttatttaagctaaaacagagcacatgtatatgtacataagacacattaaatctataaatactatttattcattttatataaactaatgtaatggaaaacaaattcttatgactttgtggttttatagatgttctagaaactttgtatgtaggtatctacaaaattagttcattcccctgaatatttttgcattcatatttttgaggtcttgatgttttcagcctctggcgaatctttttcattgaatttgaaccatttgtaaaatctgtgatgctgaagcagagtgtgtcacaaagtgatgagaacattactaaaatccacggacgcactgcgacctaagggctcaacggctgactcggcagcgggcagccaccccacgctcccctgcggtcactcgcacaccacagcctgaagctcccccagcgcctgcacctcgcacacagctaaggtcaaagttcaaacgcactccacacggaagctcattctatacccgaagagcagtctcagaaagcaagattacttttgtgttttttaaaaaatgattctttaatgtatttttctaaacattctgattggaagtagtggattcctaaatgattccaaagtcacctgtaattcttctgtttttgttttgttctgtcttttcttcattttggctttgggtggggggaggggcaggtgacacaaaggattttttttttttttttttaatttttggaatcttttccaataaccagctaaagatttgcactgaaatacaacttgtatgccttttgcatttttaaagcctgcttcctggatttaagcagagtgatagtgttcaaagagccagttcagcctgtaacatatttgaaaaagatatgtctgcactttgaggtcccttttgaatgccattcactagacctctcaagcattttgtttcattgctacatccaagcgcctcacaagtccacaatgcgggacagcatcaaaagctcaagactttggaaaaagcttgtgggcttgcactgggggagggaagggaacaaaatttgtgtacttctttgtttaatttagaaataaggcatccaagagatgccattattttctgtgtttcaattgttgtgcctttgagttaaactgcatttttgtcttttggttgaaatctgaaatgtactgtcccaatataaaacagtaattatttgacctttgcactgtttgtctggtccttttcagtttgattgcatataaatgtggaacttgatagatctctatatttttaatgcacttgtgataaactggcagcagggttagacattactttcaaagcttgaggtagaccgagtcagcatgctagacaggcttctctctctaaccaaaactgtaatcttcaggaccagcaaactcagcccaaggcagctaatccccccaaccccatcctccgcgccccgtgcggctgatcggcagccctgattcgccaatttgtcctctctcattcactgatccaccagcctgactgctaagagctatagtctttttagttgttttgtctttttaagcaagatgaaaacctttctattagggattttggggttgggaggggatgggcagagatataaaccccagcctttaagactttgacaattgtacgtaaatacagatgtgtataaatataggcacatgcatatttttatgtgaaagttgattttaaaaaactaaaaaaatctaaactgcactcttattgataccatcataacgcaagtgggaaaaataagagtacgcagtctaatttaatttcatgcagtgggaaaatatatatgtgtgcttctgtaacatcctgaaaacatagctttccatcccctgttggctttgaatggtgggccgagcacccaggtcgtctgtattttggttttcttttgctaagcagagatcttgaattcttcaaggtgctgatagcaactgctggctcctttctgtagtcacacacctaatgctagtttagtgattcaaaatgcatcacatttttaggcaggacctagattttccctgtcaacctaagatgaaaataatttcagtgttgattcagaactgaacattaagtaggccctcgtcctgcagttggccacttgagtgttttgttttgtttttattttttaaggtgggcattttcctttaacctctactttttcaaaagcaacaaaggggcctcaacctgagtttcctatgggcctctcttctgcatccccaaagcggccaagagcaaatcctgggggataagaaaaaagtgtaaactaggtaggattgtgatgctcaaaataaccatctagcaatatcttggagcttgagaatagattttgtgggcttatttcttcttgcctcttccccatcctttcaagagagaacttatttttgaaaagtatctatatatacacacacacacacacacacacatattattatttaggtttttataccatactgtattggcgagaataccactatcattgtcctttacagtctatttcttcccccaagtcttggtctttttttattttctattttttcatgaaccacacaggagactttaacatcctggtcttttctgtttcttctttgtttccccaagtttgtctgtccccctttgccttccctgagtgttgaacatcaggtagtaaaaggctaaacgcaatttcttgcatgtcaatctattctttttctatgtttgactctgatgcagtgtgtttagcgtgtctagtagctggctactcctatttaaaaactcttcctggtagaagacaacccaaagacccttttcgatgaggtggtttctcattctacatcctctgatctctatagactgtaggatgctttgctttcaaagataactgggttagagggtggggtgtgcaataggtgatttatcatggtttttttcattatcaatattacatggatgattttctcagattcttctgaaagaagaaattgacaggcactgctagattcagctattgaatggctgaagagattgagtatttgaccttctctcaaaatcataaagtgagaattcataaggcacccaatgttaagatttatccagatttttacattttgatttcttctctctgtggggtggcaagttgagggagcattcttcattttagcttttacctgacaaccaaacttgcctttaccccatccctagaattggtgctcttggaatattgctgttaccatcatttttggggggccatcttcctaatgctacacacagcctgacaggggagcagcagatgaaagggtatgctattctgtttccagatgtttctttatgtaaatatgacgccaatgtaaatcctgtgtcaagatcatagagaatggtgctttttactacagttagcacatgcatttttagaaactactacatgttttagagaatctttgctgtgtatatgtaaactgtattgttcaactgttaacaaataataaattatttcattattaaagaaa

SEQ ID NO: 13154 - DNA, 982 bp, Homo sapiens
  source 1..982: mol_type = unassigned DNA
gctctgctccgggttctgtcactgtgtcggcggtgcccagctcactggccccctccctctcttgtcgagcgtggttgccagagaggctccctcagccctgctccgcggggtccacagcgggctccacagcgggctccatagcgggctccacagcggtccggcggcggcagcgagcccgtgggcagtgggggttggtcccgtggctccggcccccggtgcagaatggcggcggcggttcggatgaacatccagatgctgctggaggcggccgactatctggagcggcgggagagagaagctgaacatggttatgcctccatgttaccatacaataacaaggacagagatgccttaaaacggaggaacaaatccaaaaagaataacagcagtagcagacgggctcatcttcgcttgtgcctggagaagttgaaggggctggtgccacttggacccgaatcaagtcgacacactacgttgagtttattaacaaaagccaaattgcacataaaggacaagtacccccagcactggcgatgctgaagagtcagacgaagccaggagtcactggccagtcgacttcctgtctcagggagaagcttgatgagtggcaccgaaaggcgtctgaggaagtgtggcgcattccactgctagaagggaagatgcgggggccattgcccatttagagatctccctgtggggcccaacaactacccctttgacttgcagaaacttgaagattgtgacagaaaagccgttcaccaaatcgaccagcttcagcgagagcagcgacacctgaagaggcagctggagaagctgggcattgagaggatccggatggacagcatcggctccaccgtctcctcggagcgctccgactccgacagggaagaaatcgacgttgacgtggagagcacggactatctcacaggtgatctggactggagcagcagcagtgtgagcgactctgacgagcggggcagca

SEQ ID NO: 13155 - DNA, 598 bp, Homo sapiens
  source 1..598: mol_type = unassigned DNA
gtgtcggcggtgcccagctcactggccccctccctctcttgtcgagcgtggttgccagagaggctccctcagccctgctccgcggggtccacagcgggctccacagcgggctccatagcgggctccacagcggtccggcggcggcagcgagcccgtgggcagtgggggttggtcccgtggctccggcccccggtgcagaatggcggcggcggttcggatgaacatccagatgctgctggaggcggccgactatctggagcggcgggagagagaagctgaacatggttatgcctccatgttaccatacaataacaaggacagagatgccttaaaacggaggaacaaatccaaaaagaataacagcagtagcaggtaatttggtaaatacttctttctgtcttttagattatattgtaggtgacacaaactgctgaatgtaagttttctgttgtgattataaccctataaaattacattgtggccgtcatgattcagtaatgtacacatggacttaagccattgcaggaagctgtttctgtttgggttgagggaactgaaaagaaaaatagaaatgttttacatttctttatgaacttta

SEQ ID NO: 13156 - DNA, 490 bp, Homo sapiens
  source 1..490: mol_type = unassigned DNA
gagcagcagcagtgtgagcgactctgacgagcggggcagcatgcagagcctcggcagtgatgagggctattccagcaccagcatcaagagaataaagctgcaggacagtcacaaggcgtgtcttggtctctaagagagtgggcactgcggctgtctccttgaaggttctccctgttggttctgattagaattggtgctcttggaatattgctgttaccatcatttttggggggccatcttcctaatgctacacacagcctgacaggggagcagcagatgaaagggtatgctattctgtttccagatgtttctttatgtaaatatgacgccaatgtaaatcctgtgtcaagatcatagagaatggtgctttttactacagttagcacatgcatttttagaaactactacatgttttagagaatctttgctgtgtatatgtaaactgtattgttcaactgttaacaaataataaattatttcattattaaag

SEQ ID NO: 13157 - DNA, 5580 bp, Homo sapiens
  source 1..5580: mol_type = unassigned DNA
aagagaaggggctgggggcggggagatggtgagtcggggataaacactccgcggcggtggcggctgctgctctgctccgggttctgtcactgtgtcggcggtgcccagctcactggccccctccctctcttgtcgagcgtggttgccagagaggctccctcagccctgctccgcggggtccacagcgggctccacagcgggctccatagcgggctccacagcggtccggcggcggcagcgagcccgtgggcagtgggggttggtcccgtggctccggcccccggtgcagaatggcggcggcggttcggatgaacatccagatgctgctggaggcggccgactatctggagcggcgggagagagaagctgaacatggttatgcctccatgttaccatacaataacaaggacagagatgccttaaaacggaggaacaaatccaaaaagaataacagcagtagcagacgggctcatcttcgcttgtgcctggagaagttgaaggggctggtgccacttggacccgaatcaagtcgacacactacgttgagtttattaacaaaagccaaattgcacataaagaaacttgaagattgtgacagaaaagccgttcaccaaatcgaccagcttcagcgagagcagcgacacctgaagaggcagctggagaagctgggcattgagaggatccggatggacagcatcggctccaccgtctcctcggagcgctccgactccgacagggaagaaatcgacgttgacgtggagagcacggactatctcacaggtgatctggactggagcagcagcagtgtgagcgactctgacgagcggggcagcatgcagagcctcggcagtgatgagggctattccagcaccagcatcaagagaataaagctgcaggacagtcacaaggcgtgtcttggtctctaagagagtgggcactgcggctgtctccttgaaggttctccctgttggttctgattaggtaacgtattggacctgcccacaactcccttgcacgtaaacttcagtgtcccaccttgaccaaaatcagctttgtaactgttttcaaggaggtgcttaggattgtgggtttctgattgcatccactagcttctctttttctcgccataaaaatttgtctctgagagactatacattccaatcaatttgaagcatccaagaattcttagaccgaataagcaatgtccacatctcagcaatccccctctttgctctcctcgtgtcctctcccagacctttcttccagttttctggcttactgtgttacttgcctaggaggaatgtccaagtgtgtcttgtacttaggaaactgaaggaaacaaacttttgaaattgagatcctgatctcagaactccaaagtaagctttgaaagcagcatttaagagcacttaaccatggacctcaccaccagtgaggaagtcaggaatacctctagaaaacacgcccttcacaccgcgcatgctcattcccccgacgcgccgcgtgtggatgggagcagtatttctcactttaaaatggacaccttgatagtgtgtctctggggttgcacagctcatcaaagttccaaattgtttgttctcacaaacaaaacggtacaatctatttttgtgcgatgttcttgggacctcgctgtgttctgctatctcgaggcacattctcccctccaactttgttaatgctacttgtctctggaacatttttttttcctacctcagagataaatgagatctccatttcccacttaacacagtgattatccttttttccccccccaaaatagtgacatttggtccaattataatctattttcctattgaactttcagcaataactgagctgtggcactagcagagctagtagccattatcagtgaaagaaaaagtccacatttctactctctgttgcaggtgaacaggagaggatggtacactgttactagaactcctctccttattgattatttttggacacacccagaaacttctttatggaggcttttgggttgatagtttaaaaggctgatttttctttttggttatgatttctcccttaagtggtctccgactttgtagcatttttatttaagctaaaacagagcacatgtatatgtacataagacacattaaatctataaatactatttattcattttatataaactaatgtaatggaaaacaaattcttatgactttgtggttttatagatgttctagaaactttgtatgtaggtatctacaaaattagttcattcccctgaatatttttgcattcatatttttgaggtcttgatgttttcagcctctggcgaatctttttcattgaatttgaaccatttgtaaaatctgtgatgctgaagcagagtgtgtcacaaagtgatgagaacattactaaaatccacggacgcactgcgacctaagggctcaacggctgactcggcagcgggcagccaccccacgctcccctgcggtcactcgcacaccacagcctgaagctcccccagcgcctgcacctcgcacacagctaaggtcaaagttcaaacgcactccacacggaagctcattctatacccgaagagcagtctcagaaagcaagattacttttgtgttttttaaaaaatgattctttaatgtatttttctaaacattctgattggaagtagtggattcctaaatgattccaaagtcacctgtaattcttctgtttttgttttgttctgtcttttcttcattttggctttgggtggggggaggggcaggtgacacaaaggattttttttttttttttttaatttttggaatcttttccaataaccagctaaagatttgcactgaaatacaacttgtatgccttttgcatttttaaagcctgcttcctggatttaagcagagtgatagtgttcaaagagccagttcagcctgtaacatatttgaaaaagatatgtctgcactttgaggtcccttttgaatgccattcactagacctctcaagcattttgtttcattgctacatccaagcgcctcacaagtccacaatgcgggacagcatcaaaagctcaagactttggaaaaagcttgtgggcttgcactgggggagggaagggaacaaaatttgtgtacttctttgtttaatttagaaataaggcatccaagagatgccattattttctgtgtttcaattgttgtgcctttgagttaaactgcatttttgtcttttggttgaaatctgaaatgtactgtcccaatataaaacagtaattatttgacctttgcactgtttgtctggtccttttcagtttgattgcatataaatgtggaacttgatagatctctatatttttaatgcacttgtgataaactggcagcagggttagacattactttcaaagcttgaggtagaccgagtcagcatgctagacaggcttctctctctaaccaaaactgtaatcttcaggaccagcaaactcagcccaaggcagctaatccccccaaccccatcctccgcgccccgtgcggctgatcggcagccctgattcgccaatttgtcctctctcattcactgatccaccagcctgactgctaagagctatagtctttttagttgttttgtctttttaagcaagatgaaaacctttctattagggattttggggttgggaggggatgggcagagatataaaccccagcctttaagactttgacaattgtacgtaaatacagatgtgtataaatataggcacatgcatatttttatgtgaaagttgattttaaaaaactaaaaaaatctaaactgcactcttattgataccatcataacgcaagtgggaaaaataagagtacgcagtctaatttaatttcatgcagtgggaaaatatatatgtgtgcttctgtaacatcctgaaaacatagctttccatcccctgttggctttgaatggtgggccgagcacccaggtcgtctgtattttggttttcttttgctaagcagagatcttgaattcttcaaggtgctgatagcaactgctggctcctttctgtagtcacacacctaatgctagtttagtgattcaaaatgcatcacatttttaggcaggacctagattttccctgtcaacctaagatgaaaataatttcagtgttgattcagaactgaacattaagtaggccctcgtcctgcagttggccacttgagtgttttgttttgtttttattttttaaggtgggcattttcctttaacctctactttttcaaaagcaacaaaggggcctcaacctgagtttcctatgggcctctcttctgcatccccaaagcggccaagagcaaatcctgggggataagaaaaaagtgtaaactaggtaggattgtgatgctcaaaataaccatctagcaatatcttggagcttgagaatagattttgtgggcttatttcttcttgcctcttccccatcctttcaagagagaacttatttttgaaaagtatctatatatacacacacacacacacacacacatattattatttaggtttttataccatactgtattggcgagaataccactatcattgtcctttacagtctatttcttcccccaagtcttggtctttttttattttctattttttcatgaaccacacaggagactttaacatcctggtcttttctgtttcttctttgtttccccaagtttgtctgtccccctttgccttccctgagtgttgaacatcaggtagtaaaaggctaaacgcaatttcttgcatgtcaatctattctttttctatgtttgactctgatgcagtgtgtttagcgtgtctagtagctggctactcctatttaaaaactcttcctggtagaagacaacccaaagacccttttcgatgaggtggtttctcattctacatcctctgatctctatagactgtaggatgctttgctttcaaagataactgggttagagggtggggtgtgcaataggtgatttatcatggtttttttcattatcaatattacatggatgattttctcagattcttctgaaagaagaaattgacaggcactgctagattcagctattgaatggctgaagagattgagtatttgaccttctctcaaaatcataaagtgagaattcataaggcacccaatgttaagatttatccagatttttacattttgatttcttctctctgtggggtggcaagttgagggagcattcttcattttagcttttacctgacaaccaaacttgcctttaccccatccctagaattggtgctcttggaatattgctgttaccatcatttttggggggccatcttcctaatgctacacacagcctgacaggggagcagcagatgaaagggtatgctattctgtttccagatgtttctttatgtaaatatgacgccaatgtaaatcctgtgtcaagatcatagagaatggtgctttttactacagttagcacatgcatttttagaaactactacatgttttagagaatctttgctgtgtatatgtaaactgtattgttcaactgttaacaaataataaattatttcattatt

SEQ ID NO: 13158 - DNA, 4056 bp, Homo sapiens
  source 1..4056: mol_type = unassigned DNA
atcccagcccagctctgcatctgtcaacattctcggcccggcccgaggcgctcgacccgtccccattggccccagcccggcccggcgcccgcccccggggcgcgaacgccgcctcccattggctctgcgggccgccgctctcccttatgtgtcaatttgagggcctgaggcggagggtggcggccgagcgccggagtccgcggagtctggaagtgcggcggccgggcgcgcggggtgggcggcgagcggagccggccggagcgggccgggcagcggccgccgccgtcccggggcggacgggcgcgggcgggaggatggagctgaactccctgctgatcctgctggaggcggccgagtacctggagcgcagggatcgagaggccgagcacggctacgcctcggtgctgcccttcgacggcgacttcgccagggagaaaacaaaggcggccggcctggtgcgcaaggccccgaacaacaggtcttcacacaacgagctagaaaagcacagacgagccaaactcaggctgtaccttgagcagctcaagcaactggtgcccctgggccccgacagcacccgccacaccacgctgagcctcctgaagcgggccaaggtgcacatcaagaaactggaggagcaggaccgccgggcactgagcatcaaggagcagctgcagcaggagcatcgtttcctgaagcggcgcctggagcagctgtcggtgcagagcgtggagcgcgtgcgcacagatagcacgggctctgctgtctccacggacgactcagagcaagaagtggacatagagggcatggagtttggccctggtgagctggacagtgttggcagcagcagtgacgcggacgaccactacagcctgcagagtggcaccggcggcgacagtggcttcgggccccactgccggcggctgggccgccccgccctctcgtaggcccgtgccctctgctccttggcctgcctgcccgccagccacgcgtgtcagccctccagttctccttcagttgacgccagcctctccacaggcccactgctgtgccattctggaagctccagctgctgctgggctgcctggcactgcccgcttgccggtcagggcctgccgagctgcctgccccttccagctgggcagagtcccctgcaaggaggcagggcccagcttccacatccggagccctggtcagcatagccgcccacggtctgttctcagattcctaatcattccagaagtattaaacgtcattgctgcaaacctcggcaggtgccgtgtgaggggcttaatgaccaccacagggagctcagaccccaaccctggatcccaggagaaaggagtggaccgaggaaggaaggaaggcaaggctgtctgtccatccgtccgtctgtccacctacctgtcagtccacataggctcctggcgtggacaaggggtctgtgaagggcgggaactgggtgagcacctggggcaggtgggtggttaaggtccttcccacttcgcaggtgtcagaacctagggctgggctctcggggccaggcaggccagcccagcccacgccgagctgggcagcgtctgctctggtaggactgtcagacgcacacgcgcacgcacctagacacacccactcatgtacatgctcacacatgcagacacacctgggcgtcccgaggtcacatgttctggggatgatggccttcaggggtcatctggcaaacagcccctgggctgtgcctggatccccctctagctcctgctcacccacgcccacccagtagtcctgcctgtctgcacaggagaggggcttctcttcctggctggggctggggtgaactggaggctggttaagttgcagccgctgggtcctcgggggcttactcatctcccttttttaaacaaaaagcaaaaaagtaaaatgctgcactgcccagcagcccggttagggctcctggagccaccttaggaaagggcttctcatgagctctgctgcggcagcttcagctggcagagaggctttcccagaaaaaaaaaaaaaaccatttttaaaaagaagaaagcctaaagactctcggcctagggacgtccgtgtgtgccgcctctgtttcctgtaccagatttttgtattctattttcctagctgttgttgcgtccttgtttgctgaggggtgggagccacccagcgtctcagggacctgtccctccgtcacgtcgtcaaagtgtgccttgtgtcttgtgtcaggccttgcccttcccaccagcatgtccctcgtggctcagggtgccccaggcctgcccagctagtgctgtcctcccatctcctgtgggcagcccctcccggcagccagggcttcctggaggcgatgcagccaggcccctgtgggtggcacggaggggctgtgacctggtccccagtgttgccctccccagtggctggcaggggcctgcttgctcactagagagatggattctcacctgtcacctgactcgagccccctgcttcctggcctaggcgagggttccaggtttcagacactggcagccaatgaagactgtgctcgctgggtggtgcaggcctggcaccaggaggcttgcacccgcctttccttcctgacgtcctctgtccttggggctggcccatagcagtgcctgccgtgcctctggtacatctgtagccaattcccatatcatggggaaaattcgtgtctattttcagtcgtacgcatagacgccccaggatggggggcccactgtggcggaagggggtccctggaaacaactctggcacagaacctgccctgcaggctgtagggggcatggtgcctggagctgaggggcatccgaacgcgttgcgggtggttgtgaggaggcctgtctgcatctccttccggccccactggggtccaggggtgcccagaaaggagcttcccctgcctgcctgagtctgtccccccaggcttcatttcaaacaccgtggcacctccgagcaaggcgggccgtgtgtaaaagcttgcttccccagccagcactgcagggccctgaggtggtcgtgtccctgccctcaattcttgaagcaccagctccctgccccaccctccagtgcctgaggcagctaggggcttctgctctcatctctgaccagcagaatccacccggtgaccagtggtggcccctcagcccaccctcccggcagctcagcctgtggctcttgaggccgtggttcccacgtggactgggaggcagtctcagccacccggggtgctgttcagctgcccctccctgccatcagcaggtgggtgaggggttgcccactgggtgggggcccgtgctaggagtcaccacatgctccaacctcccactgctccctgtcaggggcccaggctgccatcactggaggctgcagggaccaagaggccatcaccgtgtctatagagagcagacagaagcagaacagagcccggggctcctgagcctctgcgtgtgccctcccagcccacaccagtgctctcggccactgagcacccagactcaggcttgggttccccagccttattggaaggcagctcccgcataccaggataacccccgcaaaccacatagcagacccccgccatcctcgcagagtgggagaggctgcagcaaggctttgcctctgcagaccccatcttagtggcacggtgcttgggcctgtgtccccgggtggtggaaccctgtaccggtctgtggccctagggtccctgctctgtctgccccggcccgtgctgtccgctgggtgaggcaggctcccccgtgccctgcctccctctgtcagggaacctgggaccccctccccactgcctgcacagaggaccctgaccctcggccagcagggtggccccaggtccatgttgggcactagggcaggttccgtgccagagtcgggggccacacgagggcctggtgccggtgaggggggcgtgcgctagagggggaaaggggcccccggccacctgtccaccgtgtgggccgtgctgtgtccttatgtcattgtaatataaatacagatttttatatctca

SEQ ID NO: 13159 - DNA, 4228 bp, Homo sapiens
  source 1..4228: mol_type = unassigned DNA
aacattgccgatgagacttggataaggaggggaccttgttctccatttcctcacttgatctttcacccgacaccacgtacgtaagtcctgtccgcctgcgtcagggcacactcctccaccttctcatccctgatgactgcacaggacacttggctgtgccaccagcgttctttgtgatgaccctctggtttacacagggacttccggacagtcctgcgatgtgccttggtgagcgcagacctttgtggatctggggggatagttttgtaggaccaaggccctagaagtagagatgctggttggcggtcagtgataactgtatcgatggcccttcagacctgtgtccccttttgctctcccaccagcaaaccatcaacgacccctcgaagtggctggcgcaggagccatcccttctcatgtcagcctgtcggagggtgcaagttgtacctccttgtttgtgtgtgcatttcctggctcgggtgagatggagccgggcgttaggttaggttggccctcgtgtcctgcagcctgtttgtgtccttcgcccgttgtgacatcgaggcattctgcttttaatttttgatgtgtatgagctcaaaataccacaaatactaaccatttgtcttttatatgtattgcaaagatttttctacttgttctttgtctctcagctgtgtttttctttcttgtgcaaacgtgtctttctctgattgtcacagcaatgtctgtgtgtgtttttttttaagcgtagaaaacctggaaaatacagaaaagcacaaagctaaagaaataaaattgccgggtgcttcgcctggagacgcacgctccctgtgccttgtttgattctgtcgtctcttgtgtgcgtctgctcttttattttttaaacaaaattgggtcacttgtcacctatgtggttccgtattctaatttttcacttaacattcatgatgtgcatatgtaacacactaaaatgataatgaggttgttttggggtggtggaattcgggggtacttttaatttttttttattttttttcctttttgttgatttgcatttttaaattgttctacagaggtcatatagtgctgatgtaattacatggtgggatggaaagccatttgctagagtggaccagggaaggagacccctggcaacgtccccacttgcaaacctcgtcccagtggtggctgcagtacagtggcgacgcgccttgggaaaggacccctccctgagcagagagagcacgctttggcctcttgcctacacagttcctggggtggggggcggcagggcgctcactcctgttggcggtggggaggctgagcttccaggcactggggtagtcacagagcggcagcctgggacccctttccctgcacctgtgcatgggagacagcgtgggagacgttgaggatcttggccctgttcaggccacctccaggcagacctcccgactggtggggctgttaccgctgcacccagcagccccctccttcttcaggctcctcctctgtccagaggaaatggctgtccctgccgacgttactcccagggggacaagatttgctgggcttgggaacggcaggagcagacatgccaaggctggggtgctcagtgttggcaccacgtggggaaagtcacgtgtgtaggcatcagctgtggcagggcagttgggcggcaggttttcaaaagacaaaaaatattcctgccccttcacctggtcattccactcgtaaggatttacccaaatcaaagtgtcctatatttggaagcagcctctgcggcctgcacgggatgggtgagtccgtggttgaacatggcagtgacaaaacctccgggtgccctgcactgccaggcaggtgcacgtgggcctggccagggtcccaggccgagttgatgcctctgggtgagctgggctccccgcaccccgtgagctccaccagcctcccccgcagacaagcaggccagcagggaaggcggtgtttccacaggggcaggcctaggatgaagccagggcccctctcctgaggtgcccgatgaatgtgtcctggaggattgtggcatgtgagcaagtacccttgagtgtgaacaagcaagcaagcaccactggatgtcatggctccagttttgtggaaagtggattcatctgtggatacggggacagaatctggaatgaggcagtttccaaagggatatgaaacttgggttggaagggcctggtccctggccctcccttgacctaggctgatcatgtttccatggtcacaaaagtgacagagagcacgttgtgcacgatgaggtagagagacgtgaatcttgtctgggtccttccagatctcggtgcagcctgaaaggcaccctcgcctcaccccacccctccctgcatgtggactccagggtggggatgggggatgggggatggcaggggggcgagctggggctcctaggaaatgcctggcggtgacgcgctgaggctttgcaggccatggtgagctgggcgcttctgccaggtgtctgggggctgtgggtgttgggctcctcctgggggtgggggacgggggttcccaaccaggccaggaggggatccttagagagggaccctcagcacatgtgcagcagtggatggtgggggtgggtctgtgcagggccctggaaactgcctgctgccctcccccaccccagcctgatggttctgtctctggctctttcagacgagccaaactcaggctgtaccttgagcagctcaagcaactggtgcccctgggccccgacagcacccgccacaccacgctgagcctcctgaagcgggccaaggtgcacatcaagaaactggaggagcaggaccgccgggcactgagcatcaaggagcagctgcagcaggagcatcgtttcctgaagcggcgcctggagcagctgtcggtgcagagcgtggagcgcgtgcgcacagatagcacgggctctgctgtctccacggacgactcagagcaagaagtggacatagagggcatggagtttggccctggtgagctggacagtgttggcagcagcagtgacgcggacgaccactacagcctgcagagtggcaccggcggcgacagtggcttcgggccccactgccggcggctgggccgccccgccctctcgtaggcccgtgccctctgctccttggcctgcctgcccgccagccacgcgtgtcagccctccagttctccttcagttgacgccagcctctccacaggcccactgctgtgccattctggaagctccagctgctgctgggctgcctggcactgcccgcttgccggtcagggcctgccgagctgcctgccccttccagctgggcagagtcccctgcaaggaggcagggcccagcttccacatccggagccctggtcagcatagccgcccacggtctgttctcagattcctaatcattccagaagtattaaacgtcattgctgcaaacctcggcaggtgccgtgtgaggggcttaatgaccaccacagggagctcagaccccaaccctggatcccaggagaaaggagtggaccgaggaaggaaggaaggcaaggctgtctgtccatccgtccgtctgtccacctacctgtcagtccacataggctcctggcgtggacaaggggtctgtgaagggcgggaactgggtgagcacctggggcaggtgggtggttaaggtccttcccacttcgcaggtgtcagaacctagggctgggctctcggggccaggcaggccagcccagcccacgccgagctgggcagcgtctgctctggtaggactgtcagacgcacacgcgcacgcacctagacacacccactcatgtacatgctcacacatgcagacacacctgggcgtcccgaggtcacatgttctggggatgatggccttcaggggtcatctggcaaacagcccctgggctgtgcctggatccccctctagctcctgctcacccacgcccacccagtagtcctgcctgtctgcacaggagaggggcttctcttcctggctggggctggggtgaactggaggctggttaagttgcagccgctgggtcctcgggggcttactcatctcccttttttaaacaaaaagcaaaaaagtaaaatgctgcactgcccagcagcccggttagggctcctggagccaccttaggaaagggcttctcatgagctctgctgcggcagcttcagctggcagagaggctttcccag

SEQ ID NO: 13160 - DNA, 624 bp, Homo sapiens
  source 1..624: mol_type = unassigned DNA
gctgcccttcgacggcgacttcgccagggagaaaacaaaggcggccggcctggtgcgcaaggccccgaacaacaggtcttcacacaacgagctagaaaagcacaggtgttccgtgatttctaaagcggtctgttcacggacctcccctgcaccccaccccagagaccgcatcccaggcactcagaggctgagccacatcctccactgctccccgcgggcactaacattgccgatgagacttggataaggaggggaccttgttctccatttcctcacttgatctttcacccgacaccacgtacacgagccaaactcaggctgtaccttgagcagctcaagcaactggtgcccctgggccccgacagcacccgccacaccacgctgagcctcctgaagcgggccaaggtgcacatcaagaaactggaggagcaggaccgccgggcactgagcatcaaggagcagctgcagcaggagcatcgtttcctgaagcggcgcctggagcagctgtcggtgcagagcgtggagcgcgtgcgcacagatagcacgggctctgctgtctccacggacgactcagagcaagaagtggacatagagggcatggagtttggccctggtgagctggac

SEQ ID NO: 13161 - DNA, 522 bp, Homo sapiens
  source 1..522: mol_type = unassigned DNA
gcggccgccgccgtcccggggcggacgggcgcgggcgggaggatggagctgaactccctgctgatcctgctggaggcggccgagtacctggagcgcagggatcgagaggccgagcacggctacgcctcggtgctgcccttcgacggcgacttcgccagggagaaaacaaaggcggccggcctggtgcgcaaggccccgaacaacaggtcttcacacaacgagctagaaaagcacagagaccgcatcccaggcactcagaggctgagccacatcctccactgctccccgcgggcactaacattgccgatgagacttggataaggaggggaccttgttctccatttcctcacttgatctttcacccgacaccacgtacgtaagtcctgtccgcctgcgtcagggcacactcctccaccttctcatccctgatgactgcacaggacacttggctgtgccaccagcgttctttgtgatgaccctctggtttacacagggacttccggacagtcctgcgatgtgcct

SEQ ID NO: 13162 - DNA, 561 bp, Homo sapiens
  source 1..561: mol_type = unassigned DNA
gcggccgccgccgtcccggggcggacgggcgcgggcgggaggatggagctgaactccctgctgatcctgctggaggcggccgagtacctggagcgcagggatcgagaggccgagcacggctacgcctcggtgctgcccttcgacggcgacttcgccagggagaaaacaaaggcggccggcctggtgcgcaaggccccgaacaacagcggcatcctgggaggcccgggagccctggctggcctgtggggtcctgcctggacacggaaggtggcctggagctgggagcgaggtccccctgcctcgttatcctccaggcagatgctgtggcacaccctgtggtgctgggaattgtgtgcccgcgtctgaatgggcaagacaggtcttcacacaacgagctagaaaagcacagagaccgcatcccaggcactcagaggctgagccacatcctccactgctccccgcgggcactaacattgccgatgagacttggataaggaggggaccttgttctccatttcctcacttgatctttcacccgacaccacgtacgtaagtcctgtc

SEQ ID NO: 13163 - DNA, 1171 bp, Homo sapiens
  source 1..1171: mol_type = unassigned DNA
ggcactgcccccaatgtgagtctccttcccaggctacgaatactcggaccagaagtcgggaaagtcaaaggggaaggatgttaacttggcggagttcgctgtggctgcaggggaccagatgctttacaggagtgaggacatccagctagattacaaaaacaacatcctgaaggagagggcggagctggcccacagccccctgcctgccaagtacatcgacctagacaaagggttccggaaggagaactgcaaatagggaggccctgggctcctggctgggccagcagctgcacctctcctgtctgtgctcctcggggcatctcctgatgctccggggctcaccccccttccagcggctggtcccgctttcctggaatttggcctgggcgtatgcagaggccgcctccacacccctctcccaggggcttggtggcagcatagcccccacccctgcggcctttgctcacgggtggccctgcccacccctggcacaaccaaaatcccactgatgcccatcatgccctcagacccttctgggctctgcccgctgggggcctgaagacattcctggaggacactcccatcagaacctggcagccccaaaactggggtcagcctcagggcaggagtcccactcctccagggctctgctcgtcgggggctgggagatgttcctggaggaggacactcccatcagaacttggcagccttgaagttggggtcagcctcggcaggagtcccactcctcctggggtgctgcctgccaccgagagctcccccacctgtaccaccatgtgggactccaggcaccatctgttctccccagggacctgctgacttgaatgccagcccttgctcctctgtgttgctttgggccacctggggctgcaccccttgccctttctctgccccatccctaccctagccttgctctcagccaccttgatagtcactgggctccctgtgacttctgaccctgacacccctcccttggactctgcctgggctggagtctagggctggggctacatttggcttctgtactggctgaggacaggggagggagtgaagttggtttggggtggcctgtgttgccactctcagcaccccacatttgcatctgctggtggacctgccaccatcacaataaagtccccatctgatttttaga

SEQ ID NO: 13164 - DNA, 2273 bp, Homo sapiens
  source 1..2273: mol_type = unassigned DNA
gtgggacaaagcctggggctgggcgggggccatggcgctgccatcccgaatcctgctttggaaacttgtgcttctgcagagctctgctgttctcctgcactcagggtcctcggtacccgccgctgctggcagctccgtggtgtccgagtccgcggtgagctgggaggcgggcgcccgggcggtgctgcgctgccagagcccgcgcatggtgtggacccaggaccggctgcacgaccgccagcgcgtgctccactgggacctgcgcggccccgggggtggccccgcgcggcgcctgctggacttgtactcggcgggcgagcagcgcgtgtacgaggcgcgggaccgcggccgcctggagctctcggcctcggccttcgacgacggcaacttctcgctgctcatccgcgcggtggaggagacggacgcggggctgtacacctgcaacctgcaccatcactactgccacctctacgagagcctggccgtccgcctggaggtcaccgacggccccccggccacccccgcctactgggacggcgagaaggaggtgctggcggtggcgcgcggcgcacccgcgcttctgacctgcgtgaaccgcgggcacgtgtggaccgaccggcacgtggaggaggctcaacaggtggtgcactgggaccggcagccgcccggggtcccgcacgaccgcgcggaccgcctgctggacctctacgcgtcgggcgagcgccgcgcctacgggcccctttttctgcgcgaccgcgtggctgtgggcgcggatgcctttgagcgcggtgacttctcactgcgtatcgagccgctggaggtcgccgacgagggcacctactcctgccacctgcaccaccattactgtggcctgcacgaacgccgcgtcttccacctgacggtcgccgaaccccacgcggagccgcccccccggggctctccgggcaacggctccagccacagcggcgccccaggcccagaccccacactggcgcgcggccacaacgtcatcaatgtcatcgtccccgagagccgagcccacttcttccagcagctgggctacgtgctggccacgctgctgctcttcatcctgctactggtcactgtcctcctggccgcccgcaggcgccgcggaggctacgaatactcggaccagaagtcgggaaagtcaaaggggaaggatgttaacttggcggagttcgctgtggctgcaggggaccagatgctttacaggagtgaggacatccagctagattacaaaaacaacatcctgaaggagagggcggagctggcccacagccccctgcctgccaagtacatcgacctagacaaagggttccggaaggagaactgcaaatagggaggccctgggctcctggctgggccagcagctgcacctctcctgtctgtgctcctcggggcatctcctgatgctccggggctcaccccccttccagcggctggtcccgctttcctggaatttggcctgggcgtatgcagaggccgcctccacacccctctcccaggggcttggtggcagcatagcccccacccctgcggcctttgctcacgggtggccctgcccacccctggcacaaccaaaatcccactgatgcccatcatgccctcagacccttctgggctctgcccgctgggggcctgaagacattcctggaggacactcccatcagaacctggcagccccaaaactggggtcagcctcagggcaggagtcccactcctccagggctctgctcgtcgggggctgggagatgttcctggaggaggacactcccatcagaacttggcagccttgaagttggggtcagcctcggcaggagtcccactcctcctggggtgctgcctgccaccgagagctcccccacctgtaccaccatgtgggactccaggcaccatctgttctccccagggacctgctgacttgaatgccagcccttgctcctctgtgttgctttgggccacctggggctgcaccccttgccctttctctgccccatccctaccctagccttgctctcagccaccttgatagtcactgggctccctgtgacttctgaccctgacacccctcccttggactctgcctgggctggagtctagggctggggctacatttggcttctgtactggctgaggacaggggagggagtgaagttggtttggggtggcctgtgttgccactctcagcaccccacatttgcatctgctggtggacctgccaccatcacaataaagtccccatctgattttta

SEQ ID NO: 13165 - DNA, 2001 bp, Homo sapiens
  source 1..2001: mol_type = unassigned DNA
agagccgagtgggacaaagcctggggctgggcgggggccatggcgctgccatcccgaatcctgctttggaaacttgtgcttctgcagagctctgctgttctcctgcactcagggtcctcggtacccgccgctgctggcagctccgtggtgtccgagtccgcggtgagctgggaggcgggcgcccgggcggtgctgcgctgccagagcccgcgcatggtgtggacccaggaccggctgcacgaccgccagcgcgtgctccactgggacctgcgcggccccgggggtggccccgcgcggcgcctgctggacttgtactcggcgggcgagcagcgcgtgtacgaggcgcgggaccgcggccgcctggagctctcggcctcggccttcgacgacggcaacttctcgctgctcatccgcgcggtggaggagacggacgcggggctgtacacctgcaacctgcaccatcactactgccacctctacgagagcctggccgtccgcctggaggtcaccgacggccccccggccacccccgcctactgggacggcgagaaggaggtgctggcggtggcgcgcggcgcacccgcgcttctgacctgcgtgaaccgcgggcacgtgtggaccgaccggcacgtggaggaggctcaacaggtggtgcactgggaccggcagccgcccggggtcccgcacgaccgcgcggaccgcctgctggacctctacgcgtcgggcgagcgccgcgcctacgggcccctttttctgcgcgaccgcgtggctgtgggcgcggatgcctttgagcgcggtgacttctcactgcgtatcgagccgctggaggtcgccgacgagggcacctactcctgccacctgcaccaccattactgtggcctgcacgaacgccgcgtcttccacctgacggtcgccgaaccccacgcggagccgcccccccggggctctccgggcaacggctccagccacagcggcgccccaggcccagaccccacactggcgcgcggccacaacgtcatcaatgtcatcgtccccgagagccgagcccacttcttccagcagctgggctacgtgctggccacgctgctgctcttcatcctgctactggtcactgtcctcctggccgcccgcaggcgccgcggaggctacgaatactcggaccagaagtcgggaaagtcaaaggggaaggatgttaacttggcggagttcgctgtggctgcaggggaccagatgctttacaggagtgaggacatccagctagcctcctctcctcccacagattacaaaaacaacatcctgaaggagagggcggagctggcccacagccccctgcctgccaagtacatcgacctagacaaagacccttctgggctctgcccgctgggggcctgaagacattcctggaggacactcccatcagaacctggcagccccaaaactggggtcagcctcagggcaggagtcccactcctccagggctctgctcgtcgggggctgggagatgttcctggaggaggacactcccatcagaacttggcagccttgaagttggggtcagcctcggcaggagtcccactcctcctggggtgctgcctgccaccgagagctcccccacctgtaccaccatgtgggactccaggcaccatctgttctccccagggacctgctgacttgaatgccagcccttgctcctctgtgttgctttgggccacctggggctgcaccccttgccctttctctgccccatccctaccctagccttgctctcagccaccttgatagtcactgggctccctgtgacttctgaccctgacacccctcccttggactctgcctgggctggagtctagggctggggctacatttggcttctgtactggctgaggacaggggagggagtgaagttggtttggggtggcctgtgttgccactctcagcaccccacatttgcatctgctggtggacctgccaccatcacaataaagtccccatctgattttt

SEQ ID NO: 13166 - DNA, 2728 bp, Homo sapiens
  source 1..2728: mol_type = unassigned DNA
aagaaggctggcggtgtttcctcttagaggggagaaactcagcctgggtaggagacccagccccacgcagggaaaactgtgctaacgcttccgatgtgcgtggcaggtgcggcggcggcgaatacggtttgtcctcgagcctaaccctgtctgtgttggtgtcagcagtggcccccctaccacacacacagggtccctggcgtcccaagaccactcctggcagccccgccactggctgcgcctggaagccgcgtcctcaggcctcgcctggcatttgctgtcacagaggttgcttccttgggtccgtccgtcctcgcccctccagcctgggcgccccccgacccctgtctcattccctccaccacatgcagcacagtccaggaggctggggtccaagagggccatggctggcacccggcttagtgctgagtccccagtgcccagcaagcctggcacccaggaggtggtcagcaaacgcttctgaacgacaggaagtgggactcttcagccatcgatgatccgctgtgcggccacaggctctgctgttctcctgcactcagggtcctcggtacccgccgctgctggcagctccgtggtgtccgagtccgcggtgagctgggaggcgggcgcccgggcggtgctgcgctgccagagcccgcgcatggtgtggacccaggaccggctgcacgaccgccagcgcgtgctccactgggacctgcgcggccccgggggtggccccgcgcggcgcctgctggacttgtactcggcgggcgagcagcgcgtgtacgaggcgcgggaccgcggccgcctggagctctcggcctcggccttcgacgacggcaacttctcgctgctcatccgcgcggtggaggagacggacgcggggctgtacacctgcaacctgcaccatcactactgccacctctacgagagcctggccgtccgcctggaggtcaccgacggccccccggccacccccgcctactgggacggcgagaaggaggtgctggcggtggcgcgcggcgcacccgcgcttctgacctgcgtgaaccgcgggcacgtgtggaccgaccggcacgtggaggaggctcaacaggtggtgcactgggaccggcagccgcccggggtcccgcacgaccgcgcggaccgcctgctggacctctacgcgtcgggcgagcgccgcgcctacgggcccctttttctgcgcgaccgcgtggctgtgggcgcggatgcctttgagcgcggtgacttctcactgcgtatcgagccgctggaggtcgccgacgagggcacctactcctgccacctgcaccaccattactgtggcctgcacgaacgccgcgtcttccacctgacggtcgccgaaccccacgcggagccgcccccccggggctctccgggcaacggctccagccacagcggcgccccaggcccagaccccacactggcgcgcggccacaacgtcatcaatgtcatcgtccccgagagccgagcccacttcttccagcagctgggctacgtgctggccacgctgctgctcttcatcctgctactggtcactgtcctcctggccgcccgcaggcgccgcggaggctacgaatactcggaccagaagtcgggaaagtcaaaggggaaggatgttaacttggcggagttcgctgtggctgcaggggaccagatgctttacaggagtgaggacatccagctagattacaaaaacaacatcctgaaggagagggcggagctggcccacagccccctgcctgccaagtacatcgacctagacaaagggttccggaaggagaactgcaaatagggaggccctgggctcctggctgggccagcagctgcacctctcctgtctgtgctcctcggggcatctcctgatgctccggggctcaccccccttccagcggctggtcccgctttcctggaatttggcctgggcgtatgcagaggccgcctccacacccctctcccaggggcttggtggcagcatagcccccacccctgcggcctttgctcacgggtggccctgcccacccctggcacaaccaaaatcccactgatgcccatcatgccctcagacccttctgggctctgcccgctgggggcctgaagacattcctggaggacactcccatcagaacctggcagccccaaaactggggtcagcctcagggcaggagtcccactcctccagggctctgctcgtcgggggctgggagatgttcctggaggaggacactcccatcagaacttggcagccttgaagttggggtcagcctcggcaggagtcccactcctcctggggtgctgcctgccaccgagagctcccccacctgtaccaccatgtgggactccaggcaccatctgttctccccagggacctgctgacttgaatgccagcccttgctcctctgtgttgctttgggccacctggggctgcaccccttgccctttctctgccccatccctaccctagccttgctctcagccaccttgatagtcactgggctccctgtgacttctgaccctgacacccctcccttggactctgcctgggctggagtctagggctggggctacatttggcttctgtactggctgaggacaggggagggagtgaagttggtttggggtggcctgtgttgccactctcagcaccccacatttgcatctgctggtggacctgccaccatcacaataaagtccccatctgattttt

SEQ ID NO: 13167 - DNA, 975 bp, Homo sapiens
  source 1..975: mol_type = unassigned DNA
gtcatcgtccccgagagccgagcccacttcttccagcagctgggctacgtgctggccacgctgctgctcttcatcctgctactggtcactgtcctcctggccgcccgcaggcgccgcggaggctacgaatactcggaccagaagtcgggaaagtcaaaggggaaggatgttaacttggcggagttcgctgtggctgcaggggaccagatgctttacaggagtgaggacatccagctagattacaaaaacaacatcctgaaggagagggcggagctggcccacagccccctgcctgccaagtacatcgacctagacaaaggtgagcggcgggggcgacctcagcccatctcagagccctgcctgtccccattccacctcacctgggaccaacgatggcaggcaccagccaggcccggggcccctgccacctcaggctcagaaatccctggggagtcctgcgggggggtctgccctgtgtctcccactgtgatgagggtggaggacagccgccaacccgttggcgcccttggcttccagggttccggaaggagaactgcaaatagggaggccctgggctcctggctgggccagcagctgcacctctcctgtctgtgctcctcggggcatctcctgatgctccggggctcaccccccttccagcggctggtcccgctttcctggaatttggcctgggcgtatgcagaggccgcctccacacccctctcccaggggcttggtggcagcatagcccccacccctgcggcctttgctcacgggtggccctgcccacccctggcacaaccaaaatcccactgatgcccatcatgccctcagacccttctgggctctgcccgctgggggcctgaagacattcctggaggacactcccatcagaacctggcagccccaaaactggggtcagcctcagggcaggagtcccactcctccagggctctgctcgtcgggggctgggag

SEQ ID NO: 13168 - DNA, 846 bp, Homo sapiens
  source 1..846: mol_type = unassigned DNA
gagtctccttcccaggctacgaatactcggaccagaagtcgggaaagtcaaaggggaaggatgttaacttggcggagttcgctgtggctgcaggggaccagatgctttacaggagtgaggacatccagctagattacaaaaacaacatcctgaaggagagggcggagctggcccacagccccctgcctgccaagtacatcgacctagacaaaggtgagcggcgggggcgacctcagcccatctcagagccctgcctgtccccattccacctcacctgggaccaacgatggcaggcaccagccaggcccggggcccctgccacctcaggctcagaaatccctggggagtcctgcgggggggtctgccctgtgtctcccactgtgatgagggtggaggacagccgccaacccgttggcgcccttggcttccagggttccggaaggagaactgcaaatagggaggccctgggctcctggctgggccagcagctgcacctctcctgtctgtgctcctcggggcatctcctgatgctccggggctcaccccccttccagcggctggtcccgctttcctggaatttggcctgggcgtatgcagaggccgcctccacacccctctcccaggggcttggtggcagcatagcccccacccctgcggcctttgctcacgggtggccctgcccacccctggcacaaccaaaatcccactgatgcccatcatgccctcagacccttctgggctctgcccgctgggggcctgaagacattcctggaggacactcccatcagaacctggcagccccaaaactggggtcagcctcagggcaggagtcccactcctccaggg

SEQ ID NO: 13169 - DNA, 1001 bp, Homo sapiens
  source 1..1001: mol_type = unassigned DNA
gcactgggaccggcagccgcccggggtcccgcacgaccgcgcggaccgcctgctggacctctacgcgtcgggcgagcgccgcgcctacgggcccctttttctgcgcgaccgcgtggctgtgggcgcggatgcctttgagcgcggtgacttctcactgcgtatcgagccgctggaggtcgccgacgagggcacctactcctgccacctgcaccaccattactgtggcctgcacgaacgccgcgtcttccacctgacggtcgccgaaccccacgcggagccgcccccccggggctctccgggcaacggctccagccacagcggcgccccaggcccagaccccacactggcgcgcggccacaacgtcatcaatgtcatcgtccccgagagccgagcccacttcttccagcagctgggctacgtgctggccacgctgctgctcttcatcctgctactggtcactgtcctcctggccgcccgcaggcgccgcggaggtgaggctgccccggcaaagccagcggccccaggagactgaggtgggcgggagggtggtcctctgggctgggggacctgcggaaggggcggcactgcccccaatgtgagtctccttcccaggctacgaatactcggaccagaagtcgggaaagtcaaaggggaaggatgttaacttggcggagttcgctgtggctgcaggggaccagatgctttacaggagtgaggacatccagctagattacaaaaacaacatcctgaaggagagggcggagctggcccacagccccctgcctgccaagtacatcgacctagacaaagggttccggaaggagaactgcaaatagggaggccctgggctcctggctgggccagcagctgcacctctcctgtctgtgctcctcggggcatctcctgatgctccggggctcaccccccttccagcggctggtcccgctttcctggaatttggcctgggcgtatgcagaggccgcctccacacccctctccca

SEQ ID NO: 13170 - DNA, 405 bp, Homo sapiens
  source 1..405: mol_type = unassigned DNA
gcggccgcctggagctctcggcctcggccttcgacgacggcaacttctcgctgctcatccgcgcggtggaggagacggacgcggggctgtacacctgcaacctgcaccatcactactgccacctctacgagagcctggccgtccgcctggaggtcaccgacggccgtgagtgcttcccccccgccccccagctcccgcccctcgaccctcgaccgccgccccggcccgcgcgccgctgaccgcgccccctccgcagccccggccacccccgcctactgggacggcgagaaggaggtgctggcggtggcgcgcggcgcacccgcgcttctgacctgcgtgaaccgcgggcacgtgtggaccgaccggcacgtggaggaggctcaacaggtggtgcactgggaccgg

SEQ ID NO: 13171 - DNA, 339 bp, Homo sapiens
  source 1..339: mol_type = unassigned DNA
gcggccgcctggagctctcggcctcggccttcgacgacggcaacttctcgctgctcatccgcggtgcggggaccggggaccggggccgcggggtcggggcaggggtccggggccgcggggtcgggggcaccgcaaggctcacgcgcggcttcctcctgggtgcgcagcggtggaggagacggacgcggggctgtacacctgcaacctgcaccatcactactgccacctctacgagagcctggccgtccgcctggaggtcaccgacggccccccggccacccccgcctactgggacggcgagaaggaggtgctggcggtggcgcgcggcgcacccgcgct

SEQ ID NO: 13172 - DNA, 2231 bp, Homo sapiens
  source 1..2231: mol_type = unassigned DNA
atgtcctcggaccttcttgtccctccaagggtgcggtcaccacccctccccaggcctgaccggtgaggggctgggcctctgctcccacactgcccctccccagcaggccagcaacgatgggggaggccaaggggcccggcaggagccagagggggcggtccccagaccgtagacaggcccaggcctccgtgatgtcaccgcgggtgctaaggagggggagggggtagggctgtttttctggagagagacttagagccgagtgggacaaagcctggggctgggcgggggccatggcgctgccatcccgaatcctgctttggaaacttgtgcttctgcagagctctgctgttctcctgcactcagcggtggaggagacggacgcggggctgtacacctgcaacctgcaccatcactactgccacctctacgagagcctggccgtccgcctggaggtcaccgacggccccccggccacccccgcctactgggacggcgagaaggaggtgctggcggtggcgcgcggcgcacccgcgcttctgacctgcgtgaaccgcgggcacgtgtggaccgaccggcacgtggaggaggctcaacaggtggtgcactgggaccggcagccgcccggggtcccgcacgaccgcgcggaccgcctgctggacctctacgcgtcgggcgagcgccgcgcctacgggcccctttttctgcgcgaccgcgtggctgtgggcgcggatgcctttgagcgcggtgacttctcactgcgtatcgagccgctggaggtcgccgacgagggcacctactcctgccacctgcaccaccattactgtggcctgcacgaacgccgcgtcttccacctgacggtcgccgaaccccacgcggagccgcccccccggggctctccgggcaacggctccagccacagcggcgccccaggcccagaccccacactggcgcgcggccacaacgtcatcaatgtcatcgtccccgagagccgagcccacttcttccagcagctgggctacgtgctggccacgctgctgctcttcatcctgctactggtcactgtcctcctggccgcccgcaggcgccgcggaggctacgaatactcggaccagaagtcgggaaagtcaaaggggaaggatgttaacttggcggagttcgctgtggctgcaggggaccagatgctttacaggagtgaggacatccagctagattacaaaaacaacatcctgaaggagagggcggagctggcccacagccccctgcctgccaagtacatcgacctagacaaagggttccggaaggagaactgcaaatagggaggccctgggctcctggctgggccagcagctgcacctctcctgtctgtgctcctcggggcatctcctgatgctccggggctcaccccccttccagcggctggtcccgctttcctggaatttggcctgggcgtatgcagaggccgcctccacacccctctcccaggggcttggtggcagcatagcccccacccctgcggcctttgctcacgggtggccctgcccacccctggcacaaccaaaatcccactgatgcccatcatgccctcagacccttctgggctctgcccgctgggggcctgaagacattcctggaggacactcccatcagaacctggcagccccaaaactggggtcagcctcagggcaggagtcccactcctccagggctctgctcgtcgggggctgggagatgttcctggaggaggacactcccatcagaacttggcagccttgaagttggggtcagcctcggcaggagtcccactcctcctggggtgctgcctgccaccgagagctcccccacctgtaccaccatgtgggactccaggcaccatctgttctccccagggacctgctgacttgaatgccagcccttgctcctctgtgttgctttgggccacctggggctgcaccccttgccctttctctgccccatccctaccctagccttgctctcagccaccttgatagtcactgggctccctgtgacttctgaccctgacacccctcccttggactctgcctgggctggagtctagggctggggctacatttggcttctgtactggctgaggacaggggagggagtgaagttggtttggggtggcctgtgttgccactctcagcaccccacatttgcatctgctggtggacctgccaccatcacaataaagtccccatctgatttttaga

SEQ ID NO: 13173 - DNA, 3834 bp, Homo sapiens
  source 1..3834: mol_type = unassigned DNA
agatgtgagaaaggtccccatagctgtcaagttcctgcatccttgtgctgaagaaagggaggtgccatcatgattgatgttcagaggcagtataaaagcactgggtttctccccaactgcttgtcacaccgacctgcaccatctctcgcctgcctgtggggtttctgtcaactagtcgtggagggaaggagactctttaaagaataacatcttattgtggccatgccagaacccactaagaaagaggactggacccttgtcgaaactcctcctggggaggaacaagccaagcagaatgccaactcccagctgtccatcttgttcattgaaaaacctcaaggaggaacagtgaaagttggtgaagatatcaccttcatagccaaagtcaaggctgaagatcttctgagaaaacccactatcaaatggttcaaaggaaaatggatggacctggccagcaaagccgggaagcaccttcagctgaaggaaacctttgagaggcacagtcgggtgtacacatttgagatgcagatcatcaaggccaaagataactttgcaggaaattacagatgcgaggtcacctataaggataagtttgacagctgttcatttgatcttgaagtgcacgaatctactgggactactccaaacattgacatcagatctgctttcaagagaagtggagaaggtcaagaggatgcaggagaacttgactttagtggtctcctgaaacgtagggaggtgaagcagcaggaggaagaaccccaggtggacgtatgggagttgctgaagaacgcgaaacccagtgagtacgagaagatcgccttccagtatggaatcaccgacctgcgcggcatgctcaagcgactcaagcgcatgcgcagagaggagaagaagagcgcagcttttgcaaaaattcttgatcctgcatatcaggttgacaaaggaggcagagtgaggtttgttgtggagctggcagatccaaagttggaggtgaaatggtataaaaatggtcaagaaattcgacccagtaccaaatacatctttgaacacaaaggatgccagagaatcctgtttatcaataactgtcagatgacagatgattcagagtattatgtgacagccggtgatgagaaatgttccactgagctcttcgtaagagagcctccaattatggtgaccaaacagctggaagatacaactgcttattgtggggagagagtggaattagaatgtgaggtgtctgaagatgatgccaatgtaaaatggtttaagaatggtgaagagattatccctggtccaaaatcaagataccgaattagagttgagggtaaaaaacacatcttgatcatagagggagcaacaaaggctgatgctgcagaatattcagtaatgacaacaggaggacaatcatctgctaaacttagtgttgacttgaaacctctgaagattttgacacctctgactgatcagactgtaaatcttggaaaagaaatctgcctgaagtgtgaaatctctgaaaacataccaggaaaatggactaaaaatggcctacctgttcaggagagtgaccgtctaaaggtggttcacaagggaaggatccacaagttagtgatagccaatgccctcactgaagatgaaggtgattatgtatttgcacctgatgcctacaatgttactctgcctgccaaagttcatgttattgatcctcctaagatcatcctggatggtcttgatgctgacaacacagtgacagtgattgcaggaaacaagcttcgtcttgagatccccatcagcggagaaccacctcctaaagccatgtggagccggggagataaggctattatggaaggcagtggccggataagaacagaatcttaccctgatagcagcactctggtcattgatatagctgaaagagatgactctggtgtttaccacatcaatctgaaaaacgaagctggagaggcacatgcaagcatcaaggttaaagttgtggacttccctgatcctccagtggcaccgactgtgacagaggtgggagatgactggtgtatcatgaactgggagcctcctgcctacgacggaggctctccaatcctaggatattttattgagaggaagaagaaacaaagctccaggtggatgaggctgaattttgatctctgcaaagaaacaacttttgagcccaagaagatgattgaaggtgtggcctatgaggtccgcatctttgcagtcaatgccattggcatctccaagcccagtatgccctccaggccttttgttcctttggctgtaacaagccctcctactcttctgactgtggactctgtcactgacacgactgtcacgatgaggtggcgccccccagaccacattggtgcagcaggtttagatggctatgtgctagagtattgctttgaaggaactgaggactggatagttgcaaacaaagatctgattgacaagacgaagttcaccatcacaggtctgccaacagatgcaaagatctttgtgcgtgtgaaggctgttaatgcagctggtgccagcgagcccaagtactattctcagcccattctcgtgaaggaaatcatagaacctccaaagattcgcattccaagacacctgaagcaaacctatatccgcagagttggagaagctgtcaatctggttatacctttccagggaaaaccaagaccagaattaacttggaagaaggatggtgcagaaattgataagaatcaaataaacattcgcaactctgagactgatacaatcatatttattagaaaagcagagaggagccactctgggaaatatgatctgcaagtcaaagtggacaaattcgtggagaccgcatcaattgacatccagatcattgaccgtccaggtccaccccaaattgtgaagattgaggatgtctggggagaaaatgtcgctctcacatggactccaccaaaggatgatggaaatgctgctatcacaggctataccattcagaaggctgacaagaagagcatggaatggtttactgtcattgagcattatcatcgaaccagtgccaccattactgaattggtcatagggaatgaatattacttccgggtcttttctgaaaacatgtgtggcctcagtgaggatgccaccatgactaaagagagtgcagtgatcgccagggatggtaaaatctacaaaaatccagtgtatgaagactttgatttctcagaggcacccatgtttactcagcctttggttaacacctatgccatagctggttacaatgccaccctaaactgcagtgtgagaggaaatcctaagcctaaaataacctggatgaaaaacaaagttgctattgtggatgatccaagatacaggatgttcagcaaccagggagtctgtaccctggaaattcgcaagcccagcccctatgatggaggcacttactgctgcaaagcagtcaatgaccttgggacagtggagattgaatgcaaactggaggtgaaagtgatatatcaaggagtaaatacccctggacaaccagtcttcctggaggggcagcaacagtcattgcacaataaggatttttgaatgtataatatcatctaaggtgggctctccttctgcagactcctcttgcaaggcgtacctccaaacataattgattcgtatctgcgagacttacactcaagcaatcctgaggaatactgagggagggcctggctactgtctctctgcactctgctgctttgaaatctggttgaaatgagaaaaagcattttctgttttcccaccaggcccccaagtgtggtctttttctttcctcctaatgttgaagag

SEQ ID NO: 13174 - DNA, 3861 bp, Homo sapiens
  source 1..3861: mol_type = unassigned DNA
ttgtcacaccgacctgcaccatctctcgcctgcctgtggggtttctgtcaactagtcgtggagggaaggagactctttaaagaataacatcttattgtggccatgccagaacccactaagaaagaggaaaatgaagtgccagccccagccccacccccggaagaaccaagtaaagagaaggaggccggaactacaccagcaaaagactggacccttgtcgaaactcctcctggggaggaacaagccaagcagaatgccaactcccagctgtccatcttgttcattgaaaaacctcaaggaggaacagtgaaagttggtgaagatatcaccttcatagccaaagtcaaggctgaagatcttctgagaaaacccactatcaaatggttcaaaggaaaatggatggacctggccagcaaagccgggaagcaccttcagctgaaggaaacctttgagaggcacagtcgggtgtacacatttgagatgcagatcatcaaggccaaagataactttgcaggaaattacagatgcgaggtcacctataaggataagtttgacagctgttcatttgatcttgaagtgcacgaatctactgggactactccaaacattgacatcagatctgctttcaagagaagtggagaaggtcaagaggatgcaggagaacttgactttagtggtctcctgaaacgtagggaggtgaagcagcaggaggaagaaccccaggtggacgtatgggagttgctgaagaacgcgaaacccagtgagtacgagaagatcgccttccagtatggaatcaccgacctgcgcggcatgctcaagcgactcaagcgcatgcgcagagaggagaagaagagcgcagcttttgcaaaaattcttgatcctgcatatcaggttgacaaaggaggcagagtgaggtttgttgtggagctggcagatccaaagttggaggtgaaatggtataaaaatggtcaagaaattcgacccagtaccaaatacatctttgaacacaaaggatgccagagaatcctgtttatcaataactgtcagatgacagatgattcagagtattatgtgacagccggtgatgagaaatgttccactgagctcttcgtaagagagcctccaattatggtgaccaaacagctggaagatacaactgcttattgtggggagagagtggaattagaatgtgaggtgtctgaagatgatgccaatgtaaaatggtttaagaatggtgaagagattatccctggtccaaaatcaagataccgaattagagttgagggtaaaaaacacatcttgatcatagagggagcaacaaaggctgatgctgcagaatattcagtaatgacaacaggaggacaatcatctgctaaacttagtgttgacttgaaacctctgaagattttgacacctctgactgatcagactgtaaatcttggaaaagaaatctgcctgaagtgtgaaatctctgaaaacataccaggaaaatggactaaaaatggcctacctgttcaggagagtgaccgtctaaaggtggttcacaagggaaggatccacaagttagtgatagccaatgccctcactgaagatgaaggtgattatgtatttgcacctgatgcctacaatgttactctgcctgccaaagttcatgttattgatcctcctaagatcatcctggatggtcttgatgctgacaacacagtgacagtgattgcaggaaacaagcttcgtcttgagatccccatcagcggagaaccacctcctaaagccatgtggagccggggagataaggctattatggaaggcagtggccggataagaacagaatcttaccctgatagcagcactctggtcattgatatagctgaaagagatgactctggtgtttaccacatcaatctgaaaaacgaagctggagaggcacatgcaagcatcaaggttaaagttgtggacttccctgatcctccagtggcaccgactgtgacagaggtgggagatgactggtgtatcatgaactgggagcctcctgcctacgacggaggctctccaatcctaggatattttattgagaggaagaagaaacaaagctccaggtggatgaggctgaattttgatctctgcaaagaaacaacttttgagcccaagaagatgattgaaggtgtggcctatgaggtccgcatctttgcagtcaatgccattggcatctccaagcccagtatgccctccaggccttttgttcctttggctgtaacaagccctcctactcttctgactgtggactctgtcactgacacgactgtcacgatgaggtggcgccccccagaccacattggtgcagcaggtttagatggctatgtgctagagtattgctttgaaggaagtacatcagcaaaacagtctgatgaaaatggggaggctgcctatgatctgccagctgaggactggatagttgcaaacaaagatctgattgacaagacgaagttcaccatcacaggtctgccaacagatgcaaagatctttgtgcgtgtgaaggctgttaatgcagctggtgccagcgagcccaagtactattctcagcccattctcgtgaaggaaatcatagaacctccaaagattcgcattccaagacacctgaagcaaacctatatccgcagagttggagaagctgtcaatctggttatacctttccagggaaaaccaagaccagaattaacttggaagaaggatggtgcagaaattgataagaatcaaataaacattcgcaactctgagactgatacaatcatatttattagaaaagcagagaggagccactctgggaaatatgatctgcaagtcaaagtggacaaattcgtggagaccgcatcaattgacatccagatcattgaccgtccaggtccaccccaaattgtgaagattgaggatgtctggggagaaaatgtcgctctcacatggactccaccaaaggatgatggaaatgctgctatcacaggctataccattcagaaggctgacaagaagagcatggaatggtttactgtcattgagcattatcatcgaaccagtgccaccattactgaattggtcatagggaatgaatattacttccgggtcttttctgaaaacatgtgtggcctcagtgaggatgccaccatgactaaagagagtgcagtgatcgccagggatggtaaaatctacaaaaatccagtgtatgaagactttgatttctcagaggcacccatgtttactcagcctttggttaacacctatgccatagctggttacaatgccaccctaaactgcagtgtgagaggaaatcctaagcctaaaataacctggatgaaaaacaaagttgctattgtggatgatccaagatacaggatgttcagcaaccagggagtctgtaccctggaaattcgcaagcccagcccctatgatggaggcacttactgctgcaaagcagtcaatgaccttgggacagtggagattgaatgcaaactggaggtgaaagtgatatatcaaggagtaaatacccctggacaaccagtcttcctggaggggcagcaacaggtgggctctccttctgcagactcctcttgcaaggcgtacctccaaacataattgattcgtatctgcgagacttacactcaagcaatcctgaggaatactgagggagggcctggctactgtctctctgcactctgctgctttgaaatctggttgaaatgagaaaaagcattttctgttttcccaccaggcccccaagtgtggtctttttctttcctcctaatgttgaagagaaaaaaaaaaaaaaaagtttgcccagattgcttaattaaaaattgcaaacaaaatctc

SEQ ID NO: 13175 - DNA, 654 bp, Homo sapiens
  source 1..654: mol_type = unassigned DNA
gtcacaccgacctgcaccatctctcgcctgcctgtggggtttctgtcaactagtcgtggagggaaggagactctttaaagaataacatcttattgtggccatgccagaacccactaagaaagaggaaaatgaagtgccagccccagccccacccccggaagaaccaagtaaagagaaggaggccggaactacaccagcaaaagatgaagaggaagtctccccgcctagcgccttgcctccaggtttgggtagtcgggccctggagagaaaagattcaggtgagcgcaagcccagagaaggcatcctgacctcatcctaatacaatcactaatgagctcatttcttgaagctgtattgattctaatccttgtcttattcagattgtagtttttacggcaatctttcattacgtttcctcttacaagaaaactaatgtattgagaaacaattaattttgcatgatacacacgcattcaaggatctagccaaaaataccacaggtttgttctatcatttttaatatttagcaaatacacagagatcaatcttcattttggggatgtactaaagttagataataattcacatttttatagaactttacatacagataataaaacattttcaaatgcatcctatcagctgtagctcctg

SEQ ID NO: 13176 - DNA, 3644 bp, Homo sapiens
  source 1..3644: mol_type = unassigned DNA
gtcacaccgacctgcaccatctctcgcctgcctgtggggtttctgtcaactagtcgtggagggaaggagactctttaaagaataacatcttattgtggccatgccagaacccactaagaaagaggatgaagaggaagtctccccgcctagcgccttgcctccagactggacccttgtcgaaactcctcctggggaggaacaagccaagcagaatgccaactcccagctgtccatcttgttcattgaaaaacctcaaggaggaacagtgaaagttggtgaagatatcaccttcatagccaaagtcaaggctgaagatcttctgagaaaacccactatcaaatggttcaaaggaaaatggatggacctggccagcaaagccgggaagcaccttcagctgaaggaaacctttgagaggcacagtcgggtgtacacatttgagatgcagatcatcaaggccaaagataactttgcaggaaattacagatgcgaggtcacctataaggataagtttgacagctgttcatttgatcttgaagtgcacgaatctactgggactactccaaacattgacatcagatctgctttcaagagaagtggagaaggtcaagaggatgcaggagaacttgactttagtggtctcctgaaacgtagggaggtgaagcagcaggaggaagaaccccaggtggacgtatgggagttgctgaagaacgcgaaacccagtgagtacgagaagatcgccttccagtatggaatcaccgacctgcgcggcatgctcaagcgactcaagcgcatgcgcagagaggagaagaagagcgcagcttttgcaaaaattcttgatcctgcatatcaggttgacaaaggaggcagagtgaggtttgttgtggagctggcagatccaaagttggaggtgaaatggtataaaaatggtcaagaaattcgacccagtaccaaatacatctttgaacacaaaggatgccagagaatcctgtttatcaataactgtcagatgacagatgattcagagtattatgtgacagccggtgatgagaaatgttccactgagctcttcgtaagagagcctccaattatggtgaccaaacagctggaagatacaactgcttattgtggggagagagtggaattagaatgtgaggtgtctgaagatgatgccaatgtaaaatggtttaagaatggtgaagagattatccctggtccaaaatcaagataccgaattagagttgagggtaaaaaacacatcttgatcatagagggagcaacaaaggctgatgctgcagaatattcagtaatgacaacaggaggacaatcatctgctaaacttagtgttgacttgaaacctctgaagattttgacacctctgactgatcagactgtaaatcttggaaaagaaatctgcctgaagtgtgaaatctctgaaaacataccaggaaaatggactaaaaatggcctacctgttcaggagagtgaccgtctaaaggtggttcacaagggaaggatccacaagttagtgatagccaatgccctcactgaagatgaaggtgattatgtatttgcacctgatgcctacaatgttactctgcctgccaaagttcatgttattgatcctcctaagatcatcctggatggtcttgatgctgacaacacagtgacagtgattgcaggaaacaagcttcgtcttgagatccccatcagcggagaaccacctcctaaagccatgtggagccggggagataaggctattatggaaggcagtggccggataagaacagaatcttaccctgatagcagcactctggtcattgatatagctgaaagagatgactctggtgtttaccacatcaatctgaaaaacgaagctggagaggcacatgcaagcatcaaggttaaagttgtggacttccctgatcctccagtggcaccgactgtgacagaggtgggagatgactggtgtatcatgaactgggagcctcctgcctacgacggaggctctccaatcctaggatattttattgagaggaagaagaaacaaagctccaggtggatgaggctgaattttgatctctgcaaagaaacaacttttgagcccaagaagatgattgaaggtgtggcctatgaggtccgcatctttgcagtcaatgccattggcatctccaagcccagtatgccctccaggccttttgttcctttggctgtaacaagccctcctactcttctgactgtggactctgtcactgacacgactgtcacgatgaggtggcgccccccagaccacattggtgcagcaggtttagatggctatgtgctagagtattgctttgaaggaactgaggactggatagttgcaaacaaagatctgattgacaagacgaagttcaccatcacaggtctgccaacagatgcaaagatctttgtgcgtgtgaaggctgttaatgcagctggtgccagcgagcccaagtactattctcagcccattctcgtgaaggaaatcatagaacctccaaagattcgcattccaagacacctgaagcaaacctatatccgcagagttggagaagctgtcaatctggttatacctttccagggaaaaccaagaccagaattaacttggaagaaggatggtgcagaaattgataagaatcaaataaacattcgcaactctgagactgatacaatcatatttattagaaaagcagagaggagccactctgggaaatatgatctgcaagtcaaagtggacaaattcgtggagaccgcatcaattgacatccagatcattgaccgtccaggtccaccccaaattgtgaagattgaggatgtctggggagaaaatgtcgctctcacatggactccaccaaaggatgatggaaatgctgctatcacaggctataccattcagaaggctgacaagaagagcatggaatggtttactgtcattgagcattatcatcgaaccagtgccaccattactgaattggtcatagggaatgaatattacttccgggtcttttctgaaaacatgtgtggcctcagtgaggatgccaccatgactaaagagagtgcagtgatcgccagggatggtaaaatctacaaaaatccagtgtatgaagactttgatttctcagaggcacccatgtttactcagcctttggttaacacctatgccatagctggttacaatgccaccctaaactgcagtgtgagaggaaatcctaagcctaaaataacctggatgaaaaacaaagttgctattgtggatgatccaagatacaggatgttcagcaaccagggagtctgtaccctggaaattcgcaagcccagcccctatgatggaggcacttactgctgcaaagcagtcaatgaccttgggacagtggagattgaatgcaaactggaggtgaaaggtgggctctccttctgcagactcctcttgcaaggcgtacctccaaacataattgattcgtatctgcgagacttacactcaagcaatcctgaggaatactgagggagggcctggctactgtctctctgcactctgctgctttgaaatctggttgaaatgagaaaaagcattttctgttttcccaccaggcccccaagtgtggtctttttctttcctcctaatgttg

SEQ ID NO: 13177 - DNA, 3749 bp, Homo sapiens
  source 1..3749: mol_type = unassigned DNA
gtcacaccgacctgcaccatctctcgcctgcctgtggggtttctgtcaactagtcgtggagggaaggagactctttaaagaataacatcttattgtggccatgccagaacccactaagaaagaggaaaatgaagtgccagccccagccccacccccggaagactggacccttgtcgaaactcctcctggggaggaacaagccaagcagaatgccaactcccagctgtccatcttgttcattgaaaaacctcaaggaggaacagtgaaagttggtgaagatatcaccttcatagccaaagtcaaggctgaagatcttctgagaaaacccactatcaaatggttcaaaggaaaatggatggacctggccagcaaagccgggaagcaccttcagctgaaggaaacctttgagaggcacagtcgggtgtacacatttgagatgcagatcatcaaggccaaagataactttgcaggaaattacagatgcgaggtcacctataaggataagtttgacagctgttcatttgatcttgaagtgcacgaatctactgggactactccaaacattgacatcagatctgctttcaagagaagtggagaaggtcaagaggatgcaggagaacttgactttagtggtctcctgaaacgtagggaggtgaagcagcaggaggaagaaccccaggtggacgtatgggagttgctgaagaacgcgaaacccagtgagtacgagaagatcgccttccagtatggaatcaccgacctgcgcggcatgctcaagcgactcaagcgcatgcgcagagaggagaagaagagcgcagcttttgcaaaaattcttgatcctgcatatcaggttgacaaaggaggcagagtgaggtttgttgtggagctggcagatccaaagttggaggtgaaatggtataaaaatggtcaagaaattcgacccagtaccaaatacatctttgaacacaaaggatgccagagaatcctgtttatcaataactgtcagatgacagatgattcagagtattatgtgacagccggtgatgagaaatgttccactgagctcttcgtaagagagcctccaattatggtgaccaaacagctggaagatacaactgcttattgtggggagagagtggaattagaatgtgaggtgtctgaagatgatgccaatgtaaaatggtttaagaatggtgaagagattatccctggtccaaaatcaagataccgaattagagttgagggtaaaaaacacatcttgatcatagagggagcaacaaaggctgatgctgcagaatattcagtaatgacaacaggaggacaatcatctgctaaacttagtgttgacttgaaacctctgaagattttgacacctctgactgatcagactgtaaatcttggaaaagaaatctgcctgaagtgtgaaatctctgaaaacataccaggaaaatggactaaaaatggcctacctgttcaggagagtgaccgtctaaaggtggttcacaagggaaggatccacaagttagtgatagccaatgccctcactgaagatgaaggtgattatgtatttgcacctgatgcctacaatgttactctgcctgccaaagttcatgttattgatcctcctaagatcatcctggatggtcttgatgctgacaacacagtgacagtgattgcaggaaacaagcttcgtcttgagatccccatcagcggagaaccacctcctaaagccatgtggagccggggagataaggctattatggaaggcagtggccggataagaacagaatcttaccctgatagcagcactctggtcattgatatagctgaaagagatgactctggtgtttaccacatcaatctgaaaaacgaagctggagaggcacatgcaagcatcaaggttaaagttgtggacttccctgatcctccagtggcaccgactgtgacagaggtgggagatgactggtgtatcatgaactgggagcctcctgcctacgacggaggctctccaatcctaggatattttattgagaggaagaagaaacaaagctccaggtggatgaggctgaattttgatctctgcaaagaaacaacttttgagcccaagaagatgattgaaggtgtggcctatgaggtccgcatctttgcagtcaatgccattggcatctccaagcccagtatgccctccaggccttttgttcctttggctgtaacaagccctcctactcttctgactgtggactctgtcactgacacgactgtcacgatgaggtggcgccccccagaccacattggtgcagcaggtttagatggctatgtgctagagtattgctttgaaggaactgaggactggatagttgcaaacaaagatctgattgacaagacgaagttcaccatcacaggtctgccaacagatgcaaagatctttgtgcgtgtgaaggctgttaatgcagctggtgccagcgagcccaagtactattctcagcccattctcgtgaaggaaatcatagaacctccaaagattcgcattccaagacacctgaagcaaacctatatccgcagagttggagaagctgtcaatctggttatacctttccagggaaaaccaagaccagaattaacttggaagaaggatggtgcagaaattgataagaatcaaataaacattcgcaactctgagactgatacaatcatatttattagaaaagcagagaggagccactctgggaaatatgatctgcaagtcaaagtggacaaattcgtggagaccgcatcaattgacatccagatcattgaccgtccaggtccaccccaaattgtgaagattgaggatgtctggggagaaaatgtcgctctcacatggactccaccaaaggatgatggaaatgctgctatcacaggctataccattcagaaggctgacaagaagagcatggaatggtttactgtcattgagcattatcatcgaaccagtgccaccattactgaattggtcatagggaatgaatattacttccgggtcttttctgaaaacatgtgtggcctcagtgaggatgccaccatgactaaagagagtgcagtgatcgccagggatggtaaaatctacaaaaatccagtgtatgaagactttgatttctcagaggcacccatgtttactcagcctttggttaacacctatgccatagctggttacaatgccaccctaaactgcagtgtgagaggaaatcctaagcctaaaataacctggatgaaaaacaaagttgctattgtggatgatccaagatacaggatgttcagcaaccagggagtctgtaccctggaaattcgcaagcccagcccctatgatggaggcacttactgctgcaaagcagtcaatgaccttgggacagtggagattgaatgcaaactggaggtgaaagtgatatatcaaggagtaaatacccctggacaaccagtcttcctggaggggcagcaacagtcattgcacaataaggatttttgaatgtataatatcatctaaggtgggctctccttctgcagactcctcttgcaaggcgtacctccaaacataattgattcgtatctgcgagacttacactcaagcaatcctgaggaatactgagggagggcctggctactgtctctctgcactctgctgctttgaaatctggttgaaatgagaaaaagcattttctgttttcccaccaggcccccaagtgtggtctttttctttcctcctaatgttgaagaga

SEQ ID NO: 13178 - DNA, 3871 bp, Homo sapiens
  source 1..3871: mol_type = unassigned DNA
gtcacaccgacctgcaccatctctcgcctgcctgtggggtttctgtcaactagtcgtggagggaaggagactctttaaagaataacatcttattgtggccatgccagaacccactaagaaagaggaaaatgaagtgccagccccagccccacccccggaagaaccaagtaaagagaaggaggccggaactacaccagcaaaagatgaagaggaagtctccccgcctagcgccttgcctccaggtttgggtagtcgggccctggagagaaaagattcagactggacccttgtcgaaactcctcctggggaggaacaagccaagcagaatgccaactcccagctgtccatcttgttcattgaaaaacctcaaggaggaacagtgaaagttggtgaagatatcaccttcatagccaaagtcaaggctgaagatcttctgagaaaacccactatcaaatggttcaaaggaaaatggatggacctggccagcaaagccgggaagcaccttcagctgaaggaaacctttgagaggcacagtcgggtgtacacatttgagatgcagatcatcaaggccaaagataactttgcaggaaattacagatgcgaggtcacctataaggataagtttgacagctgttcatttgatcttgaagtgcacgaatctactgggactactccaaacattgacatcagatctgctttcaagagaagtggagaaggtcaagaggatgcaggagaacttgactttagtggtctcctgaaacgtagggaggtgaagcagcaggaggaagaaccccaggtggacgtatgggagttgctgaagaacgcgaaacccagtgagtacgagaagatcgccttccagtatggaatcaccgacctgcgcggcatgctcaagcgactcaagcgcatgcgcagagaggagaagaagagcgcagcttttgcaaaaattcttgatcctgcatatcaggttgacaaaggaggcagagtgaggtttgttgtggagctggcagatccaaagttggaggtgaaatggtataaaaatggtcaagaaattcgacccagtaccaaatacatctttgaacacaaaggatgccagagaatcctgtttatcaataactgtcagatgacagatgattcagagtattatgtgacagccggtgatgagaaatgttccactgagctcttcgtaagagagcctccaattatggtgaccaaacagctggaagatacaactgcttattgtggggagagagtggaattagaatgtgaggtgtctgaagatgatgccaatgtaaaatggtttaagaatggtgaagagattatccctggtccaaaatcaagataccgaattagagttgagggtaaaaaacacatcttgatcatagagggagcaacaaaggctgatgctgcagaatattcagtaatgacaacaggaggacaatcatctgctaaacttagtgttgacttgaaacctctgaagattttgacacctctgactgatcagactgtaaatcttggaaaagaaatctgcctgaagtgtgaaatctctgaaaacataccaggaaaatggactaaaaatggcctacctgttcaggagagtgaccgtctaaaggtggttcacaagggaaggatccacaagttagtgatagccaatgccctcactgaagatgaaggtgattatgtatttgcacctgatgcctacaatgttactctgcctgccaaagttcatgttattgatcctcctaagatcatcctggatggtcttgatgctgacaacacagtgacagtgattgcaggaaacaagcttcgtcttgagatccccatcagcggagaaccacctcctaaagccatgtggagccggggagataaggctattatggaaggcagtggccggataagaacagaatcttaccctgatagcagcactctggtcattgatatagctgaaagagatgactctggtgtttaccacatcaatctgaaaaacgaagctggagaggcacatgcaagcatcaaggttaaagttgtggacttccctgatcctccagtggcaccgactgtgacagaggtgggagatgactggtgtatcatgaactgggagcctcctgcctacgacggaggctctccaatcctaggatattttattgagaggaagaagaaacaaagctccaggtggatgaggctgaattttgatctctgcaaagaaacaacttttgagcccaagaagatgattgaaggtgtggcctatgaggtccgcatctttgcagtcaatgccattggcatctccaagcccagtatgccctccaggccttttgttcctttggctgtaacaagccctcctactcttctgactgtggactctgtcactgacacgactgtcacgatgaggtggcgccccccagaccacattggtgcagcaggtttagatggctatgtgctagagtattgctttgaaggaactgaggactggatagttgcaaacaaagatctgattgacaagacgaagttcaccatcacaggtctgccaacagatgcaaagatctttgtgcgtgtgaaggctgttaatgcagctggtgccagcgagcccaagtactattctcagcccattctcgtgaaggaaatcatagaacctccaaagattcgcattccaagacacctgaagcaaacctatatccgcagagttggagaagctgtcaatctggttatacctttccagggaaaaccaagaccagaattaacttggaagaaggatggtgcagaaattgataagaatcaaataaacattcgcaactctgagactgatacaatcatatttattagaaaagcagagaggagccactctgggaaatatgatctgcaagtcaaagtggacaaattcgtggagaccgcatcaattgacatccagatcattgaccgtccaggtccaccccaaattgtgaagattgaggatgtctggggagaaaatgtcgctctcacatggactccaccaaaggatgatggaaatgctgctatcacaggctataccattcagaaggctgacaagaagagcatggaatggtttactgtcattgagcattatcatcgaaccagtgccaccattactgaattggtcatagggaatgaatattacttccgggtcttttctgaaaacatgtgtggcctcagtgaggatgccaccatgactaaagagagtgcagtgatcgccagggatggtaaaatctacaaaaatccagtgtatgaagactttgatttctcagaggcacccatgtttactcagcctttggttaacacctatgccatagctggttacaatgccaccctaaactgcagtgtgagaggaaatcctaagcctaaaataacctggatgaaaaacaaagttgctattgtggatgatccaagatacaggatgttcagcaaccagggagtctgtaccctggaaattcgcaagcccagcccctatgatggaggcacttactgctgcaaagcagtcaatgaccttgggacagtggagattgaatgcaaactggaggtgaaagtcattgcacaataaggatttttgaatgtataatatcatctaaggtgggctctccttctgcagactcctcttgcaaggcgtacctccaaacataattgattcgtatctgcgagacttacactcaagcaatcctgaggaatactgagggagggcctggctactgtctctctgcactctgctgctttgaaatctggttgaaatgagaaaaagcattttctgttttcccaccaggcccccaagtgtggtctttttctttcctcctaatgttgaagagaaaaaaaaaaaaaaaagtttgcccagattgcttaattaaaaattgcaaacaaaatctcatttgaa

SEQ ID NO: 13179 - DNA, 975 bp, Homo sapiens
  source 1..975: mol_type = unassigned DNA
gtcacaccgacctgcaccatctctcgcctgcctgtggggtttctgtcaactagtcgtggagggaaggagactctttaaagaataacatcttattgtggccatgccagaacccactaagaaagaggaaaatgaagtgccagccccagccccacccccggaaggtgagtaaaaacactcactcacacacgtttgggctgcaaatacagagggtccatcccagcatgatttggcctccacgggtgctgtgagctgtgagctttaacctaactcctactgagaagttggatggtgaccattgtgataagttgagaataataaaaataatacactgtgtttatataatcctcttgtgttaatctaatttggatggcacttcatatatattagggggacaattcttatgaaacctttcaaattatgtaaaagttattatgtccgcattttacagtgtggaggctgagcctccatccaaggggctgaagaatttgtgaggctttttcctatatagtgaaggtcaaacaaacccacatcttctttatgagagtggggagtggatccatctctaccctggaagtgatatatcaaggagtaaatacccctggacaaccagtcttcctggaggggcagcaacagtcattgcacaataaggatttttgaatgtataatatcatctaaggtgggctctccttctgcagactcctcttgcaaggcgtacctccaaacataattgattcgtatctgcgagacttacactcaagcaatcctgaggaatactgagggagggcctggctactgtctctctgcactctgctgctttgaaatctggttgaaatgagaaaaagcattttctgttttcccaccaggcccccaagtgtggtctttttctttcctcctaatgttgaagagaaaaaaaaaaaaaaaagtttgcccagattgcttaattaaaaattgcaaacaaaatctcatttgaagtca

SEQ ID NO: 13180 - DNA, 4031 bp, Homo sapiens
  source 1..4031: mol_type = unassigned DNA
gtcacaccgacctgcaccatctctcgcctgcctgtggggtttctgtcaactagtcgtggagggaaggagactctttaaagaataacatcttattgtggccatgccagaacccactaagaaagaggaaaatgaagtgccagccccagccccacccccggaagaaccaagtaaagagaaggaggccggaactacaccagcaaaagatgaagaggaagtctccccgcctagcgccttgcctccagactggacccttgtcgaaactcctcctggggaggaacaagccaagcagaatgccaactcccagctgtccatcttgttcattgaaaaacctcaaggaggaacagtgaaagttggtgaagatatcaccttcatagccaaagtcaaggctgaagatcttctgagaaaacccactatcaaatggttcaaaggaaaatggatggacctggccagcaaagccgggaagcaccttcagctgaaggaaacctttgagaggcacagtcgggtgtacacatttgagatgcagatcatcaaggccaaagataactttgcaggaaattacagatgcgaggtcacctataaggataagtttgacagctgttcatttgatcttgaagtgcacgaatctactgggactactccaaacattgacatcagatctgctttcaagagaagtggagaaggtcaagaggatgcaggagaacttgactttagtggtctcctgaaacgtagggaggtgaagcagcaggaggaagaaccccaggtggacgtatgggagttgctgaagaacgcgaaacccagtgagtacgagaagatcgccttccagtatggaatcaccgacctgcgcggcatgctcaagcgactcaagcgcatgcgcagagaggagaagaagagcgcagcttttgcaaaaattcttgatcctgcatatcaggttgacaaaggaggcagagtgaggtttgttgtggagctggcagatccaaagttggaggtgaaatggtataaaaatggtcaagaaattcgacccagtaccaaatacatctttgaacacaaaggatgccagagaatcctgtttatcaataactgtcagatgacagatgattcagagtattatgtgacagccggtgatgagaaatgttccactgagctcttcgtaagagagcctccaattatggtgaccaaacagctggaagatacaactgcttattgtggggagagagtggaattagaatgtgaggtgtctgaagatgatgccaatgtaaaatggtttaagaatggtgaagagattatccctggtccaaaatcaagataccgaattagagttgagggtaaaaaacacatcttgatcatagagggagcaacaaaggctgatgctgcagaatattcagtaatgacaacaggaggacaatcatctgctaaacttagtgttgacttgaaacctctgaagattttgacacctctgactgatcagactgtaaatcttggaaaagaaatctgcctgaagtgtgaaatctctgaaaacataccaggaaaatggactaaaaatggcctacctgttcaggagagtgaccgtctaaaggtggttcacaagggaaggatccacaagttagtgatagccaatgccctcactgaagatgaaggtgattatgtatttgcacctgatgcctacaatgttactctgcctgccaaagttcatgttattgatcctcctaagatcatcctggatggtcttgatgctgacaacacagtgacagtgattgcaggaaacaagcttcgtcttgagatccccatcagcggagaaccacctcctaaagccatgtggagccggggagataaggctattatggaaggcagtggccggataagaacagaatcttaccctgatagcagcactctggtcattgatatagctgaaagagatgactctggtgtttaccacatcaatctgaaaaacgaagctggagaggcacatgcaagcatcaaggttaaagttgtggacttccctgatcctccagtggcaccgactgtgacagaggtgggagatgactggtgtatcatgaactgggagcctcctgcctacgacggaggctctccaatcctaggatattttattgagaggaagaagaaacaaagctccaggtggatgaggctgaattttgatctctgcaaagaaacaacttttgagcccaagaagatgattgaaggtgtggcctatgaggtccgcatctttgcagtcaatgccattggcatctccaagcccagtatgccctccaggccttttgttcctttggctgtaacaagccctcctactcttctgactgtggactctgtcactgacacgactgtcacgatgaggtggcgccccccagaccacattggtgcagcaggtttagatggctatgtgctagagtattgctttgaaggaagtacatcagcaaaacagtctgatgaaaatggggaggctgcctatgatctgccagctgaggactggatagttgcaaacaaagatctgattgacaagacgaagttcaccatcacaggtctgccaacagatgcaaagatctttgtgcgtgtgaaggctgttaatgcagctggtgccagcgagcccaagtactattctcagcccattctcgtgaaggaaatcatagaacctccaaagattcgcattccaagacacctgaagcaaacctatatccgcagagttggagaagctgtcaatctggttatacctttccagggaaaaccaagaccagaattaacttggaagaaggatggtgcagaaattgataagaatcaaataaacattcgcaactctgagactgatacaatcatatttattagaaaagcagagaggagccactctgggaaatatgatctgcaagtcaaagtggacaaattcgtggagaccgcatcaattgacatccagatcattgaccgtccaggtccaccccaaattgtgaagattgaggatgtctggggagaaaatgtcgctctcacatggactccaccaaaggatgatggaaatgctgctatcacaggctataccattcagaaggctgacaagaagagcatggaatggtttactgtcattgagcattatcatcgaaccagtgccaccattactgaattggtcatagggaatgaatattacttccgggtcttttctgaaaacatgtgtggcctcagtgaggatgccaccatgactaaagagagtgcagtgatcgccagggatggtaaaatctacaaaaatccagtgtatgaagactttgatttctcagaggcacccatgtttactcagcctttggttaacacctatgccatagctggttacaatgccaccctaaactgcagtgtgagaggaaatcctaagcctaaaataacctggatgaaaaacaaagttgctattgtggatgatccaagatacaggatgttcagcaaccagggagtctgtaccctggaaattcgcaagcccagcccctatgatggaggcacttactgctgcaaagcagtcaatgaccttgggacagtggagattgaatgcaaactggaggtgaaagtcattgcacaataaggatttttgaatgtataatatcatctaaggtgggctctccttctgcagactcctcttgcaaggcgtacctccaaacataattgattcgtatctgcgagacttacactcaagcaatcctgaggaatactgagggagggcctggctactgtctctctgcactctgctgctttgaaatctggttgaaatgagaaaaagcattttctgttttcccaccaggcccccaagtgtggtctttttctttcctcctaatgttgaagagaaaaaaaaaaaaaaaagtttgcccagattgcttaattaaaaattgcaaacaaaatctcatttgaagtcagcactttggtcattattatctctgctcactgtattatactttacaaaaatgcaagtcatagaataagcaaaagcagttatttttgtttacatagtaggctataaatgctttttttttcctctcagagtaaaaaacata

SEQ ID NO: 13181 - DNA, 3777 bp, Homo sapiens
  source 1..3777: mol_type = unassigned DNA
gcaccatctctcgcctgcctgtggggtttctgtcaactagtcgtggagggaaggagactctttaaagaataacatcttattgtggccatgccagaacccactaagaaagaggaaaatgaagtgccagccccagccccacccccggaagaaccaagtaaagagaaggaggccggaactacaccagcaaaagactggacccttgtcgaaactcctcctggggaggaacaagccaagcagaatgccaactcccagctgtccatcttgttcattgaaaaacctcaaggaggaacagtgaaagttggtgaagatatcaccttcatagccaaagtcaaggctgaagatcttctgagaaaacccactatcaaatggttcaaaggaaaatggatggacctggccagcaaagccgggaagcaccttcagctgaaggaaacctttgagaggcacagtcgggtgtacacatttgagatgcagatcatcaaggccaaagataactttgcaggaaattacagatgcgaggtcacctataaggataagtttgacagctgttcatttgatcttgaagtgcacgaatctactgggactactccaaacattgacatcagatctgctttcaagagaagtggagaaggtcaagaggatgcaggagaacttgactttagtggtctcctgaaacgtagggaggtgaagcagcaggaggaagaaccccaggtggacgtatgggagttgctgaagaacgcgaaacccagtgagtacgagaagatcgccttccagtatggaatcaccgacctgcgcggcatgctcaagcgactcaagcgcatgcgcagagaggagaagaagagcgcagcttttgcaaaaattcttgatcctgcatatcaggttgacaaaggaggcagagtgaggtttgttgtggagctggcagatccaaagttggaggtgaaatggtataaaaatggtcaagaaattcgacccagtaccaaatacatctttgaacacaaaggatgccagagaatcctgtttatcaataactgtcagatgacagatgattcagagtattatgtgacagccggtgatgagaaatgttccactgagctcttcgtaagagagcctccaattatggtgaccaaacagctggaagatacaactgcttattgtggggagagagtggaattagaatgtgaggtgtctgaagatgatgccaatgtaaaatggtttaagaatggtgaagagattatccctggtccaaaatcaagataccgaattagagttgagggtaaaaaacacatcttgatcatagagggagcaacaaaggctgatgctgcagaatattcagtaatgacaacaggaggacaatcatctgctaaacttagtgttgacttgaaacctctgaagattttgacacctctgactgatcagactgtaaatcttggaaaagaaatctgcctgaagtgtgaaatctctgaaaacataccaggaaaatggactaaaaatggcctacctgttcaggagagtgaccgtctaaaggtggttcacaagggaaggatccacaagttagtgatagccaatgccctcactgaagatgaaggtgattatgtatttgcacctgatgcctacaatgttactctgcctgccaaagttcatgttattgatcctcctaagatcatcctggatggtcttgatgctgacaacacagtgacagtgattgcaggaaacaagcttcgtcttgagatccccatcagcggagaaccacctcctaaagccatgtggagccggggagataaggctattatggaaggcagtggccggataagaacagaatcttaccctgatagcagcactctggtcattgatatagctgaaagagatgactctggtgtttaccacatcaatctgaaaaacgaagctggagaggcacatgcaagcatcaaggttaaagttgtggacttccctgatcctccagtggcaccgactgtgacagaggtgggagatgactggtgtatcatgaactgggagcctcctgcctacgacggaggctctccaatcctaggatattttattgagaggaagaagaaacaaagctccaggtggatgaggctgaattttgatctctgcaaagaaacaacttttgagcccaagaagatgattgaaggtgtggcctatgaggtccgcatctttgcagtcaatgccattggcatctccaagcccagtatgccctccaggccttttgttcctttggctgtaacaagccctcctactcttctgactgtggactctgtcactgacacgactgtcacgatgaggtggcgccccccagaccacattggtgcagcaggtttagatggctatgtgctagagtattgctttgaaggaactgaggactggatagttgcaaacaaagatctgattgacaagacgaagttcaccatcacaggtctgccaacagatgcaaagatctttgtgcgtgtgaaggctgttaatgcagctggtgccagcgagcccaagtactattctcagcccattctcgtgaaggaaatcatagaacctccaaagattcgcattccaagacacctgaagcaaacctatatccgcagagttggagaagctgtcaatctggttatacctttccagggaaaaccaagaccagaattaacttggaagaaggatggtgcagaaattgataagaatcaaataaacattcgcaactctgagactgatacaatcatatttattagaaaagcagagaggagccactctgggaaatatgatctgcaagtcaaagtggacaaattcgtggagaccgcatcaattgacatccagatcattgaccgtccaggtccaccccaaattgtgaagattgaggatgtctggggagaaaatgtcgctctcacatggactccaccaaaggatgatggaaatgctgctatcacaggctataccattcagaaggctgacaagaagagcatggaatggtttactgtcattgagcattatcatcgaaccagtgccaccattactgaattggtcatagggaatgaatattacttccgggtcttttctgaaaacatgtgtggcctcagtgaggatgccaccatgactaaagagagtgcagtgatcgccagggatggtaaaatctacaaaaatccagtgtatgaagactttgatttctcagaggcacccatgtttactcagcctttggttaacacctatgccatagctggttacaatgccaccctaaactgcagtgtgagaggaaatcctaagcctaaaataacctggatgaaaaacaaagttgctattgtggatgatccaagatacaggatgttcagcaaccagggagtctgtaccctggaaattcgcaagcccagcccctatgatggaggcacttactgctgcaaagcagtcaatgaccttgggacagtggagattgaatgcaaactggaggtgaaagtcattgcacaataaggatttttgaatgtataatatcatctaaggtgggctctccttctgcagactcctcttgcaaggcgtacctccaaacataattgattcgtatctgcgagacttacactcaagcaatcctgaggaatactgagggagggcctggctactgtctctctgcactctgctgctttgaaatctggttgaaatgagaaaaagcattttctgttttcccaccaggcccccaagtgtggtctttttctttcctcctaatgttgaagagaaaaaaaaaaaaaaaagtttgcccagattgcttaattaaaaattgcaaacaaaatctca

SEQ ID NO: 13182 - DNA, 3569 bp, Homo sapiens
  source 1..3569: mol_type = unassigned DNA
gcctgcctgtggggtttctgtcaactagtcgtggagggaaggagactctttaaagaataacatcttattgtggccatgccagaacccactaagaaagaggaaaatgaagtgccagccccagccccacccccggaagaaccaagtaaagagaaggaggccggaactacaccagcaaaagactggacccttgtcgaaactcctcctggggaggaacaagccaagcagaatgccaactcccagctgtccatcttgttcattgaaaaacctcaaggaggaacagtgaaagttggtgaagatatcaccttcatagccaaagtcaaggctgaagatcttctgagaaaacccactatcaaatggttcaaaggaaaatggatggacctggccagcaaagccgggaagcaccttcagctgaaggaaacctttgagaggcacagtcgggtgtacacatttgagatgcagatcatcaaggccaaagataactttgcaggaaattacagatgcgaggtcacctataaggataagtttgacagctgttcatttgatcttgaagtgcacgaatctactgggactactccaaacattgacatcagatctgctttcaagagaagtggagaaggtcaagaggatgcaggagaacttgactttagtggtctcctgaaacgtagggaggtgaagcagcaggaggaagaaccccaggtggacgtatgggagttgctgaagaacgcgaaacccagtgagtacgagaagatcgccttccagtatggaatcaccgacctgcgcggcatgctcaagcgactcaagcgcatgcgcagagaggagaagaagagcgcagcttttgcaaaaattcttgatcctgcatatcaggttgacaaaggaggcagagtgaggtttgttgtggagctggcagatccaaagttggaggtgaaatggtataaaaatggtcaagaaattcgacccagtaccaaatacatctttgaacacaaaggatgccagagaatcctgtttatcaataactgtcagatgacagatgattcagagtattatgtgacagccggtgatgagaaatgttccactgagctcttcgtaagagagcctccaattatggtgaccaaacagctggaagatacaactgcttattgtggggagagagtggaattagaatgtgaggtgtctgaagatgatgccaatgtaaaatggtttaagaatggtgaagagattatccctggtccaaaatcaagataccgaattagagttgagggtaaaaaacacatcttgatcatagagggagcaacaaaggctgatgctgcagaatattcagtaatgacaacaggaggacaatcatctgctaaacttagtgttgacttgaaacctctgaagattttgacacctctgactgatcagactgtaaatcttggaaaagaaatctgcctgaagtgtgaaatctctgaaaacataccaggaaaatggactaaaaatggcctacctgttcaggagagtgaccgtctaaaggtggttcacaagggaaggatccacaagttagtgatagccaatgccctcactgaagatgaaggtgattatgtatttgcacctgatgcctacaatgttactctgcctgccaaagttcatgttattgatcctcctaagatcatcctggatggtcttgatgctgacaacacagtgacagtgattgcaggaaacaagcttcgtcttgagatccccatcagcggagaaccacctcctaaagccatgtggagccggggagataaggctattatggaaggcagtggccggataagaacagaatcttaccctgatagcagcactctggtcattgatatagctgaaagagatgactctggtgtttaccacatcaatctgaaaaacgaagctggagaggcacatgcaagcatcaaggttaaagttgtggacttccctgatcctccagtggcaccgactgtgacagaggtgggagatgactggtgtatcatgaactgggagcctcctgcctacgacggaggctctccaatcctaggatattttattgagaggaagaagaaacaaagctccaggtggatgaggctgaattttgatctctgcaaagaaacaacttttgagcccaagaagatgattgaaggtgtggcctatgaggtccgcatctttgcagtcaatgccattggcatctccaagcccagtatgccctccaggccttttgttcctttggctgtaacaagccctcctactcttctgactgtggactctgtcactgacacgactgtcacgatgaggtggcgccccccagaccacattggtgcagcaggtttagatggctatgtgctagagtattgctttgaaggaactgaggactggatagttgcaaacaaagatctgattgacaagacgaagttcaccatcacaggtctgccaacagatgcaaagatctttgtgcgtgtgaaggctgttaatgcagctggtgccagcgagcccaagtactattctcagcccattctcgtgaaggaaatcatagaacctccaaagattcgcattccaagacacctgaagcaaacctatatccgcagagttggagaagctgtcaatctggttatacctttccagggaaaaccaagaccagaattaacttggaagaaggatggtgcagaaattgataagaatcaaataaacattcgcaactctgagactgatacaatcatatttattagaaaagcagagaggagccactctgggaaatatgatctgcaagtcaaagtggacaaattcgtggagaccgcatcaattgacatccagatcattgaccgtccaggtccaccccaaattgtgaagattgaggatgtctggggagaaaatgtcgctctcacatggactccaccaaaggatgatggaaatgctgctatcacaggctataccattcagaaggctgacaagaagagcatggaatggtttactgtcattgagcattatcatcgaaccagtgccaccattactgaattggtcatagggaatgaatattacttccgggtcttttctgaaaacatgtgtggcctcagtgaggatgccaccatgactaaagagagtgcagtgatcgccagggatggtaaaatctacaaaaatccagtgtatgaagactttgatttctcagaggcacccatgtttactcagcctttggttaacacctatgccatagctggttacaatgccaccctaaactgcagtgtgagaggaaatcctaagcctaaaataacctggatgaaaaacaaagttgctattgtggatgatccaagatacaggatgttcagcaaccagggagtctgtaccctggaaattcgcaagcccagcccctatgatggaggcacttactgctgcaaagcagtcaatgaccttgggacagtggagattgaatgcaaactggaggtgaaagtgatatatcaaggagtaaatacccctggacaaccagtcttcctggaggggcagcaacagtcattgcacaataaggatttttgaatgtataatatcatctaaggtgggctctccttctgcagactcctcttgcaagg

SEQ ID NO: 13183 - DNA, 3512 bp, Homo sapiens
  source 1..3512: mol_type = unassigned DNA
gcctgcctgtggggtttctgtcaactagtcgtggagggaaggagactctttaaagaataacatcttattgtggccatgccagaacccactaagaaagaggaaaatgaagtgccagccccagccccacccccggaagaaccaagtaaagagaaggaggccggaactacaccagcaaaagactggacccttgtcgaaactcctcctggggaggaacaagccaagcagaatgccaactcccagctgtccatcttgttcattgaaaaacctcaaggaggaacagtgaaagttggtgaagatatcaccttcatagccaaagtcaaggctgaagatcttctgagaaaacccactatcaaatggttcaaaggaaaatggatggacctggccagcaaagccgggaagcaccttcagctgaaggaaacctttgagaggcacagtcgggtgtacacatttgagatgcagatcatcaaggccaaagataactttgcaggaaattacagatgcgaggtcacctataaggataagtttgacagctgttcatttgatcttgaagtgcacgaatctactgggactactccaaacattgacatcagatctgctttcaagagaagggaggtgaagcagcaggaggaagaaccccaggtggacgtatgggagttgctgaagaacgcgaaacccagtgagtacgagaagatcgccttccagtatggaatcaccgacctgcgcggcatgctcaagcgactcaagcgcatgcgcagagaggagaagaagagcgcagcttttgcaaaaattcttgatcctgcatatcaggttgacaaaggaggcagagtgaggtttgttgtggagctggcagatccaaagttggaggtgaaatggtataaaaatggtcaagaaattcgacccagtaccaaatacatctttgaacacaaaggatgccagagaatcctgtttatcaataactgtcagatgacagatgattcagagtattatgtgacagccggtgatgagaaatgttccactgagctcttcgtaagagagcctccaattatggtgaccaaacagctggaagatacaactgcttattgtggggagagagtggaattagaatgtgaggtgtctgaagatgatgccaatgtaaaatggtttaagaatggtgaagagattatccctggtccaaaatcaagataccgaattagagttgagggtaaaaaacacatcttgatcatagagggagcaacaaaggctgatgctgcagaatattcagtaatgacaacaggaggacaatcatctgctaaacttagtgttgacttgaaacctctgaagattttgacacctctgactgatcagactgtaaatcttggaaaagaaatctgcctgaagtgtgaaatctctgaaaacataccaggaaaatggactaaaaatggcctacctgttcaggagagtgaccgtctaaaggtggttcacaagggaaggatccacaagttagtgatagccaatgccctcactgaagatgaaggtgattatgtatttgcacctgatgcctacaatgttactctgcctgccaaagttcatgttattgatcctcctaagatcatcctggatggtcttgatgctgacaacacagtgacagtgattgcaggaaacaagcttcgtcttgagatccccatcagcggagaaccacctcctaaagccatgtggagccggggagataaggctattatggaaggcagtggccggataagaacagaatcttaccctgatagcagcactctggtcattgatatagctgaaagagatgactctggtgtttaccacatcaatctgaaaaacgaagctggagaggcacatgcaagcatcaaggttaaagttgtggacttccctgatcctccagtggcaccgactgtgacagaggtgggagatgactggtgtatcatgaactgggagcctcctgcctacgacggaggctctccaatcctaggatattttattgagaggaagaagaaacaaagctccaggtggatgaggctgaattttgatctctgcaaagaaacaacttttgagcccaagaagatgattgaaggtgtggcctatgaggtccgcatctttgcagtcaatgccattggcatctccaagcccagtatgccctccaggccttttgttcctttggctgtaacaagccctcctactcttctgactgtggactctgtcactgacacgactgtcacgatgaggtggcgccccccagaccacattggtgcagcaggtttagatggctatgtgctagagtattgctttgaaggaactgaggactggatagttgcaaacaaagatctgattgacaagacgaagttcaccatcacaggtctgccaacagatgcaaagatctttgtgcgtgtgaaggctgttaatgcagctggtgccagcgagcccaagtactattctcagcccattctcgtgaaggaaatcatagaacctccaaagattcgcattccaagacacctgaagcaaacctatatccgcagagttggagaagctgtcaatctggttatacctttccagggaaaaccaagaccagaattaacttggaagaaggatggtgcagaaattgataagaatcaaataaacattcgcaactctgagactgatacaatcatatttattagaaaagcagagaggagccactctgggaaatatgatctgcaagtcaaagtggacaaattcgtggagaccgcatcaattgacatccagatcattgaccgtccaggtccaccccaaattgtgaagattgaggatgtctggggagaaaatgtcgctctcacatggactccaccaaaggatgatggaaatgctgctatcacaggctataccattcagaaggctgacaagaagagcatggaatggtttactgtcattgagcattatcatcgaaccagtgccaccattactgaattggtcatagggaatgaatattacttccgggtcttttctgaaaacatgtgtggcctcagtgaggatgccaccatgactaaagagagtgcagtgatcgccagggatggtaaaatctacaaaaatccagtgtatgaagactttgatttctcagaggcacccatgtttactcagcctttggttaacacctatgccatagctggttacaatgccaccctaaactgcagtgtgagaggaaatcctaagcctaaaataacctggatgaaaaacaaagttgctattgtggatgatccaagatacaggatgttcagcaaccagggagtctgtaccctggaaattcgcaagcccagcccctatgatggaggcacttactgctgcaaagcagtcaatgaccttgggacagtggagattgaatgcaaactggaggtgaaagtgatatatcaaggagtaaatacccctggacaaccagtcttcctggaggggcagcaacagtcattgcacaataaggatttttgaatgtataatatcatctaaggtgggctctccttctgcagactcctcttgcaagg

SEQ ID NO: 13184 - DNA, 3533 bp, Homo sapiens
  source 1..3533: mol_type = unassigned DNA
gcctgcctgtggggtttctgtcaactagtcgtggagggaaggagactctttaaagaataacatcttattgtggccatgccagaacccactaagaaagaggaaccaagtaaagagaaggaggccggaactacaccagcaaaagactggacccttgtcgaaactcctcctggggaggaacaagccaagcagaatgccaactcccagctgtccatcttgttcattgaaaaacctcaaggaggaacagtgaaagttggtgaagatatcaccttcatagccaaagtcaaggctgaagatcttctgagaaaacccactatcaaatggttcaaaggaaaatggatggacctggccagcaaagccgggaagcaccttcagctgaaggaaacctttgagaggcacagtcgggtgtacacatttgagatgcagatcatcaaggccaaagataactttgcaggaaattacagatgcgaggtcacctataaggataagtttgacagctgttcatttgatcttgaagtgcacgaatctactgggactactccaaacattgacatcagatctgctttcaagagaagtggagaaggtcaagaggatgcaggagaacttgactttagtggtctcctgaaacgtagggaggtgaagcagcaggaggaagaaccccaggtggacgtatgggagttgctgaagaacgcgaaacccagtgagtacgagaagatcgccttccagtatggaatcaccgacctgcgcggcatgctcaagcgactcaagcgcatgcgcagagaggagaagaagagcgcagcttttgcaaaaattcttgatcctgcatatcaggttgacaaaggaggcagagtgaggtttgttgtggagctggcagatccaaagttggaggtgaaatggtataaaaatggtcaagaaattcgacccagtaccaaatacatctttgaacacaaaggatgccagagaatcctgtttatcaataactgtcagatgacagatgattcagagtattatgtgacagccggtgatgagaaatgttccactgagctcttcgtaagagagcctccaattatggtgaccaaacagctggaagatacaactgcttattgtggggagagagtggaattagaatgtgaggtgtctgaagatgatgccaatgtaaaatggtttaagaatggtgaagagattatccctggtccaaaatcaagataccgaattagagttgagggtaaaaaacacatcttgatcatagagggagcaacaaaggctgatgctgcagaatattcagtaatgacaacaggaggacaatcatctgctaaacttagtgttgacttgaaacctctgaagattttgacacctctgactgatcagactgtaaatcttggaaaagaaatctgcctgaagtgtgaaatctctgaaaacataccaggaaaatggactaaaaatggcctacctgttcaggagagtgaccgtctaaaggtggttcacaagggaaggatccacaagttagtgatagccaatgccctcactgaagatgaaggtgattatgtatttgcacctgatgcctacaatgttactctgcctgccaaagttcatgttattgatcctcctaagatcatcctggatggtcttgatgctgacaacacagtgacagtgattgcaggaaacaagcttcgtcttgagatccccatcagcggagaaccacctcctaaagccatgtggagccggggagataaggctattatggaaggcagtggccggataagaacagaatcttaccctgatagcagcactctggtcattgatatagctgaaagagatgactctggtgtttaccacatcaatctgaaaaacgaagctggagaggcacatgcaagcatcaaggttaaagttgtggacttccctgatcctccagtggcaccgactgtgacagaggtgggagatgactggtgtatcatgaactgggagcctcctgcctacgacggaggctctccaatcctaggatattttattgagaggaagaagaaacaaagctccaggtggatgaggctgaattttgatctctgcaaagaaacaacttttgagcccaagaagatgattgaaggtgtggcctatgaggtccgcatctttgcagtcaatgccattggcatctccaagcccagtatgccctccaggccttttgttcctttggctgtaacaagccctcctactcttctgactgtggactctgtcactgacacgactgtcacgatgaggtggcgccccccagaccacattggtgcagcaggtttagatggctatgtgctagagtattgctttgaaggaactgaggactggatagttgcaaacaaagatctgattgacaagacgaagttcaccatcacaggtctgccaacagatgcaaagatctttgtgcgtgtgaaggctgttaatgcagctggtgccagcgagcccaagtactattctcagcccattctcgtgaaggaaatcatagaacctccaaagattcgcattccaagacacctgaagcaaacctatatccgcagagttggagaagctgtcaatctggttatacctttccagggaaaaccaagaccagaattaacttggaagaaggatggtgcagaaattgataagaatcaaataaacattcgcaactctgagactgatacaatcatatttattagaaaagcagagaggagccactctgggaaatatgatctgcaagtcaaagtggacaaattcgtggagaccgcatcaattgacatccagatcattgaccgtccaggtccaccccaaattgtgaagattgaggatgtctggggagaaaatgtcgctctcacatggactccaccaaaggatgatggaaatgctgctatcacaggctataccattcagaaggctgacaagaagagcatggaatggtttactgtcattgagcattatcatcgaaccagtgccaccattactgaattggtcatagggaatgaatattacttccgggtcttttctgaaaacatgtgtggcctcagtgaggatgccaccatgactaaagagagtgcagtgatcgccagggatggtaaaatctacaaaaatccagtgtatgaagactttgatttctcagaggcacccatgtttactcagcctttggttaacacctatgccatagctggttacaatgccaccctaaactgcagtgtgagaggaaatcctaagcctaaaataacctggatgaaaaacaaagttgctattgtggatgatccaagatacaggatgttcagcaaccagggagtctgtaccctggaaattcgcaagcccagcccctatgatggaggcacttactgctgcaaagcagtcaatgaccttgggacagtggagattgaatgcaaactggaggtgaaagtgatatatcaaggagtaaatacccctggacaaccagtcttcctggaggggcagcaacagtcattgcacaataaggatttttgaatgtataatatcatctaaggtgggctctccttctgcagactcctcttgcaagg

SEQ ID NO: 13185 - DNA, 3899 bp, Homo sapiens
  source 1..3899: mol_type = unassigned DNA
gcctgcctgtggggtttctgtcaactagtcgtggagggaaggagactctttaaagaataacatcttattgtggccatgccagaacccactaagaaagaggaaaatgaagtgccagccccagccccacccccggaagaaccaagtaaagagaaggaggccggaactacaccagcaaaagatgaagaggaagtctccccgcctagcgccttgcctccaggtttgggtagtcgggccctggagagaaaagattcagactggacccttgtcgaaactcctcctggggaggaacaagccaagcagaatgccaactcccagctgtccatcttgttcattgaaaaacctcaaggaggaacagtgaaagttggtgaagatatcaccttcatagccaaagtcaaggctgaagatcttctgagaaaacccactatcaaatggttcaaaggaaaatggatggacctggccagcaaagccgggaagcaccttcagctgaaggaaacctttgagaggcacagtcgggtgtacacatttgagatgcagatcatcaaggccaaagataactttgcaggaaattacagatgcgaggtcacctataaggataagtttgacagctgttcatttgatcttgaagtgcacgaatctactgggactactccaaacattgacatcagatctgctttcaagagaagtggagaaggtcaagaggatgcaggagaacttgactttagtggtctcctgaaacgtagggaggtgaagcagcaggaggaagaaccccaggtggacgtatgggagttgctgaagaacgcgaaacccagtgagtacgagaagatcgccttccagtatggaatcaccgacctgcgcggcatgctcaagcgactcaagcgcatgcgcagagaggagaagaagagcgcagcttttgcaaaaattcttgatcctgcatatcaggttgacaaaggaggcagagtgaggtttgttgtggagctggcagatccaaagttggaggtgaaatggtataaaaatggtcaagaaattcgacccagtaccaaatacatctttgaacacaaaggatgccagagaatcctgtttatcaataactgtcagatgacagatgattcagagtattatgtgacagccggtgatgagaaatgttccactgagctcttcgtaagagagcctccaattatggtgaccaaacagctggaagatacaactgcttattgtggggagagagtggaattagaatgtgaggtgtctgaagatgatgccaatgtaaaatggtttaagaatggtgaagagattatccctggtccaaaatcaagataccgaattagagttgagggtaaaaaacacatcttgatcatagagggagcaacaaaggctgatgctgcagaatattcagtaatgacaacaggaggacaatcatctgctaaacttagtgttgacttgaaacctctgaagattttgacacctctgactgatcagactgtaaatcttggaaaagaaatctgcctgaagtgtgaaatctctgaaaacataccaggaaaatggactaaaaatggcctacctgttcaggagagtgaccgtctaaaggtggttcacaagggaaggatccacaagttagtgatagccaatgccctcactgaagatgaaggtgattatgtatttgcacctgatgcctacaatgttactctgcctgccaaagttcatgttattgatcctcctaagatcatcctggatggtcttgatgctgacaacacagtgacagtgattgcaggaaacaagcttcgtcttgagatccccatcagcggagaaccacctcctaaagccatgtggagccggggagataaggctattatggaaggcagtggccggataagaacagaatcttaccctgatagcagcactctggtcattgatatagctgaaagagatgactctggtgtttaccacatcaatctgaaaaacgaagctggagaggcacatgcaagcatcaaggttaaagttgtggacttccctgatcctccagtggcaccgactgtgacagaggtgggagatgactggtgtatcatgaactgggagcctcctgcctacgacggaggctctccaatcctaggatattttattgagaggaagaagaaacaaagctccaggtggatgaggctgaattttgatctctgcaaagaaacaacttttgagcccaagaagatgattgaaggtgtggcctatgaggtccgcatctttgcagtcaatgccattggcatctccaagcccagtatgccctccaggccttttgttcctttggctgtaacaagccctcctactcttctgactgtggactctgtcactgacacgactgtcacgatgaggtggcgccccccagaccacattggtgcagcaggtttagatggctatgtgctagagtattgctttgaaggaactgaggactggatagttgcaaacaaagatctgattgacaagacgaagttcaccatcacaggtctgccaacagatgcaaagatctttgtgcgtgtgaaggctgttaatgcagctggtgccagcgagcccaagtactattctcagcccattctcgtgaaggaaatcatagaacctccaaagattcgcattccaagacacctgaagcaaacctatatccgcagagttggagaagctgtcaatctggttatacctttccagggaaaaccaagaccagaattaacttggaagaaggatggtgcagaaattgataagaatcaaataaacattcgcaactctgagactgatacaatcatatttattagaaaagcagagaggagccactctgggaaatatgatctgcaagtcaaagtggacaaattcgtggagaccgcatcaattgacatccagatcattgaccgtccaggtccaccccaaattgtgaagattgaggatgtctggggagaaaatgtcgctctcacatggactccaccaaaggatgatggaaatgctgctatcacaggctataccattcagaaggctgacaagaagagcatggaatggtttactgtcattgagcattatcatcgaaccagtgccaccattactgaattggtcatagggaatgaatattacttccgggtcttttctgaaaacatgtgtggcctcagtgaggatgccaccatgactaaagagagtgcagtgatcgccagggatggtaaaatctacaaaaatccagtgtatgaagactttgatttctcagaggcacccatgtttactcagcctttggttaacacctatgccatagctggttacaatgccaccctaaactgcagtgtgagaggaaatcctaagcctaaaataacctggatgaaaaacaaagttgctattgtggatgatccaagatacaggatgttcagcaaccagggagtctgtaccctggaaattcgcaagcccagcccctatgatggaggcacttactgctgcaaagcagtcaatgaccttgggacagtggagattgaatgcaaactggaggtgaaagtgatatatcaaggagtaaatacccctggacaaccagtcttcctggaggggcagcaacagtcattgcacaataaggatttttgaatgtataatatcatctaaggtgggctctccttctgcagactcctcttgcaaggcgtacctccaaacataattgattcgtatctgcgagacttacactcaagcaatcctgaggaatactgagggagggcctggctactgtctctctgcactctgctgctttgaaatctggttgaaatgagaaaaagcattttctgttttcccaccaggcccccaagtgtggtctttttctttcctcctaatgttgaagagaaaaaaaaaaaaaaaagtttgcccagattgcttaattaaaaattgcaaacaaaatctca

SEQ ID NO: 13186 - DNA, 3934 bp, Homo sapiens
  source 1..3934: mol_type = unassigned DNA
cctgcctgtggggtttctgtcaactagtcgtggagggaaggagactctttaaagaataacatcttattgtggccatgccagaacccactaagaaagaggcaatttcaaagtatccccgaatcaaacatgaatgttgaagtcaactacccagactgaagttgcttttaaaaaatgcttggacacaaaaacaaataaaaaatgaagtgccagccccagccccacccccggaagaaccaagtaaagagaaggaggccggaactacaccagcaaaagatgaagaggaagtctccccgcctagcgccttgcctccaggtttgggtagtcgggccctggagagaaaagattcagactggacccttgtcgaaactcctcctggggaggaacaagccaagcagaatgccaactcccagctgtccatcttgttcattgaaaaacctcaaggaggaacagtgaaagttggtgaagatatcaccttcatagccaaagtcaaggctgaagatcttctgagaaaacccactatcaaatggttcaaaggaaaatggatggacctggccagcaaagccgggaagcaccttcagctgaaggaaacctttgagaggcacagtcgggtgtacacatttgagatgcagatcatcaaggccaaagataactttgcaggaaattacagatgcgaggtcacctataaggataagtttgacagctgttcatttgatcttgaagtgcacgaatctactgggactactccaaacattgacatcagatctgctttcaagagaagtggagaaggtcaagaggatgcaggagaacttgactttagtggtctcctgaaacgtagggaggtgaagcagcaggaggaagaaccccaggtggacgtatgggagttgctgaagaacgcgaaacccagtgagtacgagaagatcgccttccagtatggaatcaccgacctgcgcggcatgctcaagcgactcaagcgcatgcgcagagaggagaagaagagcgcagcttttgcaaaaattcttgatcctgcatatcaggttgacaaaggaggcagagtgaggtttgttgtggagctggcagatccaaagttggaggtgaaatggtataaaaatggtcaagaaattcgacccagtaccaaatacatctttgaacacaaaggatgccagagaatcctgtttatcaataactgtcagatgacagatgattcagagtattatgtgacagccggtgatgagaaatgttccactgagctcttcgtaagagagcctccaattatggtgaccaaacagctggaagatacaactgcttattgtggggagagagtggaattagaatgtgaggtgtctgaagatgatgccaatgtaaaatggtttaagaatggtgaagagattatccctggtccaaaatcaagataccgaattagagttgagggtaaaaaacacatcttgatcatagagggagcaacaaaggctgatgctgcagaatattcagtaatgacaacaggaggacaatcatctgctaaacttagtgttgacttgaaacctctgaagattttgacacctctgactgatcagactgtaaatcttggaaaagaaatctgcctgaagtgtgaaatctctgaaaacataccaggaaaatggactaaaaatggcctacctgttcaggagagtgaccgtctaaaggtggttcacaagggaaggatccacaagttagtgatagccaatgccctcactgaagatgaaggtgattatgtatttgcacctgatgcctacaatgttactctgcctgccaaagttcatgttattgatcctcctaagatcatcctggatggtcttgatgctgacaacacagtgacagtgattgcaggaaacaagcttcgtcttgagatccccatcagcggagaaccacctcctaaagccatgtggagccggggagataaggctattatggaaggcagtggccggataagaacagaatcttaccctgatagcagcactctggtcattgatatagctgaaagagatgactctggtgtttaccacatcaatctgaaaaacgaagctggagaggcacatgcaagcatcaaggttaaagttgtggacttccctgatcctccagtggcaccgactgtgacagaggtgggagatgactggtgtatcatgaactgggagcctcctgcctacgacggaggctctccaatcctaggatattttattgagaggaagaagaaacaaagctccaggtggatgaggctgaattttgatctctgcaaagaaacaacttttgagcccaagaagatgattgaaggtgtggcctatgaggtccgcatctttgcagtcaatgccattggcatctccaagcccagtatgccctccaggccttttgttcctttggctgtaacaagccctcctactcttctgactgtggactctgtcactgacacgactgtcacgatgaggtggcgccccccagaccacattggtgcagcaggtttagatggctatgtgctagagtattgctttgaaggaactgaggactggatagttgcaaacaaagatctgattgacaagacgaagttcaccatcacaggtctgccaacagatgcaaagatctttgtgcgtgtgaaggctgttaatgcagctggtgccagcgagcccaagtactattctcagcccattctcgtgaaggaaatcatagaacctccaaagattcgcattccaagacacctgaagcaaacctatatccgcagagttggagaagctgtcaatctggttatacctttccagggaaaaccaagaccagaattaacttggaagaaggatggtgcagaaattgataagaatcaaataaacattcgcaactctgagactgatacaatcatatttattagaaaagcagagaggagccactctgggaaatatgatctgcaagtcaaagtggacaaattcgtggagaccgcatcaattgacatccagatcattgaccgtccaggtccaccccaaattgtgaagattgaggatgtctggggagaaaatgtcgctctcacatggactccaccaaaggatgatggaaatgctgctatcacaggctataccattcagaaggctgacaagaagagcatggaatggtttactgtcattgagcattatcatcgaaccagtgccaccattactgaattggtcatagggaatgaatattacttccgggtcttttctgaaaacatgtgtggcctcagtgaggatgccaccatgactaaagagagtgcagtgatcgccagggatggtaaaatctacaaaaatccagtgtatgaagactttgatttctcagaggcacccatgtttactcagcctttggttaacacctatgccatagctggttacaatgccaccctaaactgcagtgtgagaggaaatcctaagcctaaaataacctggatgaaaaacaaagttgctattgtggatgatccaagatacaggatgttcagcaaccagggagtctgtaccctggaaattcgcaagcccagcccctatgatggaggcacttactgctgcaaagcagtcaatgaccttgggacagtggagattgaatgcaaactggaggtgaaagtcattgcacaataaggatttttgaatgtataatatcatctaaggtgggctctccttctgcagactcctcttgcaaggcgtacctccaaacataattgattcgtatctgcgagacttacactcaagcaatcctgaggaatactgagggagggcctggctactgtctctctgcactctgctgctttgaaatctggttgaaatgagaaaaagcattttctgttttcccaccaggcccccaagtgtggtctttttctttcctcctaatgttgaagagaaaaaaaaaaaaaaaagtttgcccagattgcttaattaaaaattgcaaacaaaatctc

SEQ ID NO: 13187 - DNA, 3426 bp, Homo sapiens
  source 1..3426: mol_type = unassigned DNA
atgccagaacccactaagaaagaggaaaatgaagtgccagccccagccccacccccggaagaaccaagtaaagagaaggaggccggaactacaccagcaaaagactggacccttgtcgaaactcctcctggggaggaacaagccaagcagaatgccaactcccagctgtccatcttgttcattgaaaaacctcaaggaggaacagtgaaagttggtgaagatatcaccttcatagccaaagtcaaggctgaagatcttctgagaaaacccactatcaaatggttcaaaggaaaatggatggacctggccagcaaagccgggaagcaccttcagctgaaggaaacctttgagaggcacagtcgggtgtacacatttgagatgcagatcatcaaggccaaagataactttgcaggaaattacagatgcgaggtcacctataaggataagtttgacagctgttcatttgatcttgaagtgcacgaatctactgggactactccaaacattgacatcagatctgctttcaagagaagtggagaaggtcaagaggatgcaggagaacttgactttagtggtctcctgaaacgtagggaggtgaagcagcaggaggaagaaccccaggtggacgtatgggagttgctgaagaacgcgaaacccagtgagtacgagaagatcgccttccagtatggaatcaccgacctgcgcggcatgctcaagcgactcaagcgcatgcgcagagaggagaagaagagcgcagcttttgcaaaaattcttgatcctgcatatcaggttgacaaaggaggcagagtgaggtttgttgtggagctggcagatccaaagttggaggtgaaatggtataaaaatggtcaagaaattcgacccagtaccaaatacatctttgaacacaaaggatgccagagaatcctgtttatcaataactgtcagatgacagatgattcagagtattatgtgacagccggtgatgagaaatgttccactgagctcttcgtaagagagcctccaattatggtgaccaaacagctggaagatacaactgcttattgtggggagagagtggaattagaatgtgaggtgtctgaagatgatgccaatgtaaaatggtttaagaatggtgaagagattatccctggtccaaaatcaagataccgaattagagttgagggtaaaaaacacatcttgatcatagagggagcaacaaaggctgatgctgcagaatattcagtaatgacaacaggaggacaatcatctgctaaacttagtgttgacttgaaacctctgaagattttgacacctctgactgatcagactgtaaatcttggaaaagaaatctgcctgaagtgtgaaatctctgaaaacataccaggaaaatggactaaaaatggcctacctgttcaggagagtgaccgtctaaaggtggttcacaagggaaggatccacaagttagtgatagccaatgccctcactgaagatgaaggtgattatgtatttgcacctgatgcctacaatgttactctgcctgccaaagttcatgttattgatcctcctaagatcatcctggatggtcttgatgctgacaacacagtgacagtgattgcaggaaacaagcttcgtcttgagatccccatcagcggagaaccacctcctaaagccatgtggagccggggagataaggctattatggaaggcagtggccggataagaacagaatcttaccctgatagcagcactctggtcattgatatagctgaaagagatgactctggtgtttaccacatcaatctgaaaaacgaagctggagaggcacatgcaagcatcaaggttaaagttgtggacttccctgatcctccagtggcaccgactgtgacagaggtgggagatgactggtgtatcatgaactgggagcctcctgcctacgacggaggctctccaatcctaggatattttattgagaggaagaagaaacaaagctccaggtggatgaggctgaattttgatctctgcaaagaaacaacttttgagcccaagaagatgattgaaggtgtggcctatgaggtccgcatctttgcagtcaatgccattggcatctccaagcccagtatgccctccaggccttttgttcctttggctgtaacaagccctcctactcttctgactgtggactctgtcactgacacgactgtcacgatgaggtggcgccccccagaccacattggtgcagcaggtttagatggctatgtgctagagtattgctttgaaggaagtacatcagcaaaacagtctgatgaaaatggggaggctgcctatgatctgccagctgaggactggatagttgcaaacaaagatctgattgacaagacgaagttcaccatcacaggtctgccaacagatgcaaagatctttgtgcgtgtgaaggctgttaatgcagctggtgccagcgagcccaagtactattctcagcccattctcgtgaaggaaatcatagaacctccaaagattcgcattccaagacacctgaagcaaacctatatccgcagagttggagaagctgtcaatctggttatacctttccagggaaaaccaagaccagaattaacttggaagaaggatggtgcagaaattgataagaatcaaataaacattcgcaactctgagactgatacaatcatatttattagaaaagcagagaggagccactctgggaaatatgatctgcaagtcaaagtggacaaattcgtggagaccgcatcaattgacatccagatcattgaccgtccaggtccaccccaaattgtgaagattgaggatgtctggggagaaaatgtcgctctcacatggactccaccaaaggatgatggaaatgctgctatcacaggctataccattcagaaggctgacaagaagagcatggaatggtttactgtcattgagcattatcatcgaaccagtgccaccattactgaattggtcatagggaatgaatattacttccgggtcttttctgaaaacatgtgtggcctcagtgaggatgccaccatgactaaagagagtgcagtgatcgccagggatggtaaaatctacaaaaatccagtgtatgaagactttgatttctcagaggcacccatgtttactcagcctttggttaacacctatgccatagctggttacaatgccaccctaaactgcagtgtgagaggaaatcctaagcctaaaataacctggatgaaaaacaaagttgctattgtggatgatccaagatacaggatgttcagcaaccagggagtctgtaccctggaaattcgcaagcccagcccctatgatggaggcacttactgctgcaaagcagtcaatgaccttgggacagtggagattgaatgcaaactggaggtgaaagtcattgcacaataa

SEQ ID NO: 13188 - DNA, 583 bp, Homo sapiens
  source 1..583: mol_type = unassigned DNA
atatgcttgtactttctacacagaaccaagtaaagagaaggaggccggaactacaccagcaaaagactggacccttgtcgaaactcctcctggggaggaacaagccaagcagaatgccaactcccagctgtccatcttgttcattgaaaaacctcaaggaggaacagtgaaagttggtgaagatatcaccttcatagccaaagtcaaggctgaagatcttctgagaaaacccactatcaaatggttcaaaggaaaatggatggacctggccagcaaagccgggaagcaccttcagctgaaggaaacctttgagaggcacagtcgggtgtacacatttgagatgcagatcatcaaggccaaagataactttgcaggaaattacagatgcgaggtcacctataaggataagtttgacagctgttcatttgatcttgaagtgcacgaatctactgggactactccaaacattgacatcagatctgctttcaagagaagtggagaaggtcaagaggatgcaggagaacttgactttagtggtctcctgaaacgtagggaggtgaagcagcaggaggaagaaccccag

SEQ ID NO: 13189 - DNA, 968 bp, Homo sapiens
  source 1..968: mol_type = unassigned DNA
actcctatttcttgtttcagatgaagaggaagtctccccgcctagcgccttgcctccagactggacccttgtcgaaactcctcctggggaggaacaagccaagcagaatgccaactcccagctgtccatcttgttcattgaaaaacctcaaggaggaacagtgaaagttggtgaagatatcaccttcatagccaaagtcaaggctgaagatcttctgagaaaacccactatcaaatggttcaaaggaaaatggatggacctggccagcaaagccgggaagcaccttcagctgaaggaaacctttgagaggcacagtcgggtgtacacatttgagatgcagatcatcaaggccaaagataactttgcaggaaattacagatgcgaggtcacctataaggataagtttgacagctgttcatttgatcttgaagtgcacgaatctactgggactactccaaacattgacatcagatctgctttcaagagaagtggagaaggtcaagaggatgcaggagaacttgactttagtggtctcctgaaacgtaggtgagaacaaagtgatggagtgagacattgtggcctggaagtctttcagacacccactcagagaagtcaagtttaaagtggatgttcttcagagaatttttcatttctgaaaatgtgttttgcttatagaatataacagagttgactagaaagagagaaacaactgcatactaatcttttaaagcctttaacagttgcttttaaactttctttttaaatgtttcatgactcttcacctatttttttttaaatggggacgaagagatatgaaaactgagacataagacaaatacctagaaacctctaagactgcacatatgatttggtagaagtctgaaggtatacacattgtaagaggcagacctactttaatgtattatttatgatgtactgtatttctgcaagtctaagacaccactgct

SEQ ID NO: 13190 - DNA, 770 bp, Homo sapiens
  source 1..770: mol_type = unassigned DNA
aatgtagttgtatcgatgtggccttatagtccatcacctagaaaaacaccaagagtactgcttgaatacactggccaccattgtttacctgttaggggacaggcaagatggggaagcaaaggaattattgccatcaaagagagaataacagcttacctggaaagttccactatttctaagaattacataatgttcatttgccccatcatggaagagatacccctgtaagaatgggaatctgttcccctctactgatggctgctgggggcagaaagaatgatgttgtatttatctaggtttattagacaaagaaaagctacagcgttggtgagaacaacaaatccaggtaagactgcctaagaagagcctggccctgaaataatccttttcctcctttctgctcatcagactggacccttgtcgaaactcctcctggggaggaacaagccaagcagaatgccaactcccagctgtccatcttgttcattgaaaaacctcaaggaggaacagtgaaagttggtgaagatatcaccttcatagccaaagtcaaggctgaagatcttctgagaaaacccactatcaaatggttcaaaggaaaatggatggacctggccagcaaagccgggaagcaccttcagctgaaggaaacctttgagaggcacagtcgggtgtacacatttgagatgcagatcatcaaggccaaagataactttgcaggaaattacagatgcgaggtcacctataaggataagtttgacagctgttcattt

SEQ ID NO: 13191 - DNA, 574 bp, Homo sapiens
  source 1..574: mol_type = unassigned DNA
agccatttggggttgctggtcattagctctccaaagtcatattcccttttggtgccctttaaacatcactgaaacacaattgctaaataacttcccacatcacaatcattacagagggattagatctgccttgtccttagacaactatcgaagtgcatttttcctaagcccaaagctgaataaaatgagtctagcagattactactgttccaaggtctgatgctctcctcttcttactttagtttctccttaaatgacatatttcaaattgaccaaaaactgaggtcatttttatcagacactgaactatacttacaagatattgtgactcgccatttttgacttggatttctaccagccaacatcttgagtcttgtaaaactctttgattcagttctgcggaagttcactttgtagttaaaaacaacaaccacaacaaccatattcaacatttagacaataatttcttggttaacattttcaagacttccctgatcctccagtggcaccgactgtgacagaggtgggagatgactggtgtatcatgaactgggagcctcctgcctacgacgga

SEQ ID NO: 13192 - DNA, 569 bp, Homo sapiens
  source 1..569: mol_type = unassigned DNA
aaacagtggcccaagacttcacctccaggaaaactctttggacaccaaactttaacacagatcctcgaagtgaaggaaggaggttacgaagcacatttgggaaatcaggaatgtgaacgcaaatgcacctcccctggaggaaactcactatggagatgaaacttcctatgaagagaaaactgctgaaaaagaaatcccaggtacatcagcaaaacagtctgatgaaaatggggaggctgcctatgatctgccagctgaggactggatagttgcaaacaaagatctgattgacaagacgaagttcaccatcacaggtctgccaacagatgcaaagatctttgtgcgtgtgaaggctgttaatgcagctggtgccagcgagcccaagtactattctcagcccattctcgtgaaggaaatcatagaacctccaaagattcgcattccaagacacctgaagcaaacctatatccgcagagttggagaagctgtcaatctggttatacctttccagggaaaaccaagaccagaattaacttggaagaaggatggtgcagaaattgataagaatc

SEQ ID NO: 13193 - DNA, 440 bp, Homo sapiens
  source 1..440: mol_type = unassigned DNA
ttcacctccaggaaaactctttggacaccaaactttaacacagatcctcgaagtgaaggaaggaggttacgaagcacatttgggaaatcaggaatgtgaacgcaaatgcacctcccctggaggaaactcactatggagatgaaacttcctatgaagagaaaactgctgaaaaagaaatcccagctgaggactggatagttgcaaacaaagatctgattgacaagacgaagttcaccatcacaggtctgccaacagatgcaaagatctttgtgcgtgtgaaggctgttaatgcagctggtgccagcgagcccaagtactattctcagcccattctcgtgaaggaaatcatagaacctccaaagattcgcattccaagacacctgaagcaaacctatatccgcagagttggagaagctgtcaatctggttatacctttccag

SEQ ID NO: 13194 - DNA, 1902 bp, Homo sapiens
  source 1..1902: mol_type = unassigned DNA
ttcagaacttggaccctggtaaaacagggctggccttatcccaagggcctgcactcccagtcttgaatgagggagccccactgtgggagcaccgtgttccctggggacccaagagaatcctcccctgctggggtggcagagacaggcacaaggatagactgtctcactgtgcgctgctcccccgcagattccaggacctgctcctctgttttcttcagggtcttgctttgttcttctctatctcttcttcccaccactggaggtgtcccagcctcctttctcctcttctctattcttttcttttttctcctcttctctgtggcaggtgcctcaggtcagaagccacagtctgcacagagcaggctgtgctctcctgaggaacccccctaacaccgtttggtctcttccgtcactgctctgaggacaaatctctttgcacactttgcatactttactaacagagaatgctgactgctgatacgatattattctggtgtgaaagtgggtgtctttaattaattttaatgacggattctcaaaggtacatcagcaaaacagtctgatgaaaatggggaggctgcctatgatctgccagctgaggactggatagttgcaaacaaagatctgattgacaagacgaagttcaccatcacaggtctgccaacagatgcaaagatctttgtgcgtgtgaaggctgttaatgcagctggtgccagcgagcccaagtactattctcagcccattctcgtgaaggaaatcatagaacctccaaagattcgcattccaagacacctgaagcaaacctatatccgcagagttggagaagctgtcaatctggttatacctttccagggaaaaccaagaccagaattaacttggaagaaggatggtgcagaaattgataagaatcaaataaacattcgcaactctgagactgatacaatcatatttattagaaaagcagagaggagccactctgggaaatatgatctgcaagtcaaagtggacaaattcgtggagaccgcatcaattgacatccagatcattgaccgtccaggtccaccccaaattgtgaagattgaggatgtctggggagaaaatgtcgctctcacatggactccaccaaaggatgatggaaatgctgctatcacaggctataccattcagaaggctgacaagaagagcatggaatggtttactgtcattgagcattatcatcgaaccagtgccaccattactgaattggtcatagggaatgaatattacttccgggtcttttctgaaaacatgtgtggcctcagtgaggatgccaccatgactaaagagagtgcagtgatcgccagggatggtaaaatctacaaaaatccagtgtatgaagactttgatttctcagaggcacccatgtttactcagcctttggttaacacctatgccatagctggttacaatgccaccctaaactgcagtgtgagaggaaatcctaagcctaaaataacctggatgaaaaacaaagttgctattgtggatgatccaagatacaggatgttcagcaaccagggagtctgtaccctggaaattcgcaagcccagcccctatgatggaggcacttactgctgcaaagcagtcaatgaccttgggacagtggagattgaatgcaaactggaggtgaaaggtgggctctccttctgcagactcctcttgcaaggcgtacctccaaacataattgattcgtatctgcgagacttacactcaagcaatcctgaggaatactgagggagggcctggctactgtctctctgcactctgctgctttgaaatctggttgaaatgagaaaaagcattttctgttttcccaccaggcccccaagtgtggtctttttctttcctcctaatgttgaagag

SEQ ID NO: 13195 - DNA, 661 bp, Homo sapiens
  source 1..661: mol_type = unassigned DNA
ctcttccaaataagctttccttgtggcttacgctgttcttcacttggatttgaacccgatcagcggctttcctttcaccaaaggatcttatttttgtaatttgtcggactttgcaagaattgtgatattctcagccagccctttcttcataagactggacccttgtcgaaactcctcctggggaggaacaagccaagcagaatgccaactcccagctgtccatcttgttcattgaaaaacctcaaggaggaacagtgaaagttggtgaagatatcaccttcatagccaaagtcaaggctgaagatcttctgagaaaacccactatcaaatggttcaaaggaaaatggatggacctggccagcaaagccgggaagcaccttcagctgaaggaaacctttgagaggcacagtcgggtgtacacatttgagatgcagatcatcaaggccaaagataactttgcaggaaattacagatgcgaggtcacctataaggataagtttgacagctgttcatttgatcttgaagtgcacgaatctactgggactactccaaacattgacatcagatctgctttcaagagaagtggagaaggtcaagaggatgcaggagaacttgactttagtggtctcctgaaacgtagggaggtgaagcagcaggagga

SEQ ID NO: 13196 - DNA, 3256 bp, Homo sapiens
  source 1..3256: mol_type = unassigned DNA
tgcgcctgcagctcgcgctcccgcgccgatcccgagagcgtccgggccgccgtgcgcgagcgagggagggcgcgcgcgcggggggggcgcgcttgtgagtgcgggccgcgctctcggcggcgcgcatgtgcgtgtgtgctggctgccgggctgccccgagccggcggggagccggtccgctccaggtggcgggcggctggagcgagggagcggacatggactacgactcgtaccagcactatttctacgactatgactgcggggaggatttctaccgctccacggcgcccagcgaggacatctggaagaaattcgagctggtgccatcgccccccacgtcgccgccctggggcttgggtcccggcgcaggggacccggcccccgggattggtcccccggagccgtggcccggagggtgcaccggagacgaagcggaatcccggggccactcgaaaggctggggcaggaactacgcctccatcatacgccgtgactgcatgtggagcggcttctcggcccgggaacggctggagagagctgtgagcgaccggctcgctcctggcgcgccccgggggaacccgcccaaggcgtccgccgccccggactgcactcccagcctcgaagccggcaacccggcgcccgccgccccctgtccgctgggcgaacccaagacccaggcctgctccgggtccgagagcccaagcgactcggagaatgaagaaattgatgttgtgacagtagagaagaggcagtctctgggtattcggaagccggtcaccatcacggtgcgagcagaccccctggatccctgcatgaagcatttccacatctccatccatcagcaacagcacaactatgctgcccgttttcctccagaaagctgctcccaagaagaggcttcagagaggggtccccaagaagaggttctggagagagatgctgcaggggaaaaggaagatgaggaggatgaagagattgtgagtcccccacctgtagaaagtgaggctgcccagtcctgccaccccaaacctgtcagttctgatactgaggatgtgaccaagaggaagaatcacaacttcctggagcgcaagaggcggaatgacctgcgttcgcgattcttggcgctgagggaccaggtgcccaccctggccagctgctccaaggcccccaaagtagtgatcctaagcaaggccttggaatacttgcaagccctggtgggggctgagaagaggatggctacagagaaaagacagctccgatgccggcagcagcagttgcagaaaagaattgcatacctcactggctactaactgaccaaaaagcctgacagttctgtcttacgaagacacaagtttattttttaacctccctctcccctttagtaatttgcacattttggttatggtgggacagtctggacagtagatcccagaatgcattgcagccggtgcacacacaataaaggcttgcattcttggaaaccttgaaacccagctctccctcttccctgactcatgggagtgctgtatgttctctggcgcctttggcttcccagcaggcagctgactgaggagccttggggtctgcctagctcactagctctgaagaaaaggctgacagatgctatgcaacaggtggtggatgttgtcaggggctccagcctgcatgaaatctcacactctgcatgagctttaggctaggaaaggatgctcccaactggtgtctctggggtgatgcaaggacagctgggcctggatgctctccctgaggctcctttttccagaagacacacgagctgtcttgggtgaagacaagcttgcagacttgatcaacattgaccattacctcactgtcagacactttacagtagccaaggagttggaaacctttatatattatgatgttagctgacccccttcctcccactcccaatgctgcgaccctgggaacacttaaaaagcttggcctctagattctttgtctcagagccctctgggctctctcctctgagggagggacctttctttcctcacaagggacttttttgttccattatgccttgttatgcaatgggctctacagcaccctttcccacaggtcagaaatatttccccaagacacagggaaatcggtcctagcctggggcctggggatagcttggagtcctggcccatgaacttgatccctgcccaggtgttttccgaggggcacttgaggcccagtcttttctcaaggcaggtgtaagacacctcagagggagaactgtactgctgcctctttcccacctgcctcatctcaatccttgagcggcaagtttgaagttcttctggaaccatgcaaatctgtcctcctcatgcaattccaaggagcttgctggctctgcagccacccttgggccccttccagcctgccatgaatcagatatctttcccagaatctgggcgtttctgaagttttggggagagctgttgggactcatccagtgctccagaaggtggacttgcttctggtgggttttaaaggagcctccaggagatatgcttagccaaccatgatggattttaccccagctggactcggcagctccaagtggaatccacgtgcagcttctagtctgggaaagtcacccaacctagcagttgtcatgtgggtaacctcaggcacctctaagcctgtcctggaagaaggaccagcagcccctccagaactctgcccaggacagcaggtgcctgctggctctgggtttggaagttggggtgggtagggggtggtaagtactatatatggctctggaaaaccagctgctacttccaaatctattgtccataatggtttctttctgaggttgcttcttggcctcagaggaccccaggggatgtttggaaatagcctctctacccttctggagcatggtttacaaaagccagctgacttctggaattgtctatggaggacagtttgggtgtaggttactgatgtctcaactgaatagcttgtgttttataagctgctgttggctattatgctgggggagtcttttttttttatattgtatttttgtatgccttttgcaaagtggtgttaactgtttttgtacaaggaaaaaaactcttggggcaatttcctgttgcaagggtctgatttattttgaaaggcaagttcacctgaaattttgtatttagttgtgattactgattgcctgattttaaaatgttgccttctgggacatcttctaataaaagatttctcaaacatg

SEQ ID NO: 13197 - DNA, 1688 bp, Homo sapiens
  source 1..1688: mol_type = unassigned DNA
gtgtgtgctggctgccgggctgccccgagccggcggggagccggtccgctccaggtggcgggcggctggagcgaggtgaggctgcgggtggccagggcacgggcgcgggtcccgcggtgcgggctggctgcaggctgccttctgggcacggcgcgcccccgcccggccccgccgggccctgggagctgcgctccgggcggcgctggcaaagtttgctttgaactcgctgcccacagtcgggtccgcgcgctgcgattggcttcccctaccactctgacccggggcccggcttcccgggacgcgaggactgggcgcaggctgcaagctggtggggttggggaggaacgagagcccggcagccgactgtgccgagggacccggggacacctccttcgcccggccggcacccggtcagcacgtccccccttccctcccgcagggagcggacatggactacgactcgtaccagcactatttctacgactatgactgcggggaggatttctaccgctccacggcgcccagcgaggacatctggaagaaattcgagctggtgccatcgccccccacgtcgccgccctggggcttgggtcccggcgcaggggacccggcccccgggattggtcccccggagccgtggcccggagggtgcaccggagacgaagcggaatcccggggccactcgaaaggctggggcaggaactacgcctccatcatacgccgtgactgcatgtggagcggcttctcggcccgggaacggctggagagagctgtgagcgaccggctcgctcctggcgcgccccgggggaacccgcccaaggcgtccgccgccccggactgcactcccagcctcgaagccggcaacccggcgcccgccgccccctgtccgctgggcgaacccaagacccaggcctgctccgggtccgagagcccaagcgactcggagaatgaagaaattgatgttgtgacagtagagaagaggcagtctctgggtattcggaagccggtcaccatcacggtgcgagcagaccccctggatccctgcatgaagcatttccacatctccatccatcagcaacagcacaactatgctgcccgttttcctccagaaagctgctcccaagaagaggcttcagagaggggtccccaagaagaggttctggagagagatgctgcaggggaaaaggaagatgaggaggatgaagagattgtgagtcccccacctgtagaaagtgaggctgcccagtcctgccaccccaaacctgtcagttctgatactgaggatgtgaccaagaggaagaatcacaacttcctggagcgcaagaggcggaatgacctgcgttcgcgattcttggcgctgagggaccaggtgcccaccctggccagctgctccaaggcccccaaagtagtgatcctaagcaaggccttggaatacttgcaagccctggtgggggctgagaagaggatggctacagagaaaagacagctccgatgccggcagcagcagttgcagaaaagaattgcatacctcactggctactaactgaccaaaaagcctgacagttctgtcttacgaagacacaagtttattttttaacctccctctcccctttagtaatttgcacattttggttatggtgggacagtctggacagtagatcccagaatgcattgcagccggtgcacac

SEQ ID NO: 13198 - DNA, 1944 bp, Homo sapiens
  source 1..1944: mol_type = unassigned DNA
gtgagtgcgggccgcgctctcggcggcgcgcatgtgcgtgtgtgctggctgccgggctgccccgagccggcggggagccggtccgctccaggtggcgggcggctggagcgagggagcggacatggactacgactcgtaccagcactatttctacgactatgactgcggggaggatttctaccgctccacggcgcccagcgaggacatctggaagaaattcgagctggtgccatcgccccccacgtcgccgccctggggcttgggtcccggcgcaggggacccggcccccgggattggtcccccggagccgtggcccggagggtgcaccggagacgaagcggaatcccggggccactcgaaaggctggggcaggaactacgcctccatcatacgccgtgactgcatgtggagcggcttctcggcccgggaacggctggagagagctgtgagcgaccggctcgctcctggcgcgccccgggggaacccgcccaaggcgtccgccgccccggactgcactcccagcctcgaagccggcaacccggcgcccgccgccccctgtccgctgggcgaacccaagacccaggcctgctccgggtccgagagcccaagcgactcgggtaaggacctccccgagccatccaagagggggccaccccatgggtggccaaagctctgcccctgcctgaggtcaggcattggctcttctcaagctcttgggccatctccgcctctctttggctgaagctgcccgtgtagtccccaaccgtgtctgtctggcacgtgggtgtgttggtaaacagtttggaaaagtggcgtgggagccagcctccctttgatgattattggagccccaggggacaagggatttgaggtgagggttggcgcttagagaggacaatactggggttggactgtaagggattgaagggggtaccttaagagacactccaaacctgaagtttttttgctgctgcctctttccctaggaaactcacactcccctagggggagaagaagccgagagccttttgtgcaaagccaaaaccttcgtccttttaaaaacctaggtctccagttggctttactttaaaatgccaataataaatgccctcttctcgtgcctccccaccaccacttaccactcgtgcatccctgagacagggagggaagaatgaacactccccattaacagatggaaaaactgaggcttagagatagacaatcactacaagtcagctccagctttctgccatctagccagcccctcttccccaatgctccatcccaaccaggcacctcttccttgatgtttggggtctttgtggtagcttatcttagaagcactacaccttgccttgctgtttgtcctgagatggaaaagtgtccttcttgctccccctcaatagatctccagcgtcagctgctccctggcattcaacaaatattcactggcccctactttgtggcaatctgtgggctacatgctggggtcaaggcagtagaactccaggccctcctctcccatccttgatgcaagtgcaacctcgctgagggcagactggggcatcctgtgccactaaactacattgttcttattctggcatcttagacctccacacccgtgagaaatcctggagagggtatttttgtagagtgtagactgtggctagtgacaaataaattaggaccaagaaagctcactgtagcttttaggaataacttttacacgaccatttgatagggaactggggaatggggtatggaagttttcctacacttgagagaaaaaataggataacaaaaattaaaagtcttttttttcctggtccactgtgttaaggtcatttttaaccagcttgctttctacaccaagagtttatgtttgtttaatggctggaaagagaatcttgagatcaaaaaaccaataaagatgtatctctacaa

SEQ ID NO: 13199 - DNA, 426 bp, Homo sapiens
  source 1..426: mol_type = unassigned DNA
gcaccgccaagcggccgccgggccgcatcagccctcctcctgtttgcgctccccagcgtgcaatttatttggggggctaccggggattgaacggagcgggcgagcgctgccaggagggagcggacatggactacgactcgtaccagcactatttctacgactatgactgcggggaggatttctaccgctccacggcgcccagcgaggacatctggaagaaattcgagctggtgccatcgccccccacgtcgccgccctggggcttgggtcccggcgcaggggacccggcccccgggattggtcccccggagccgtggcccggagggtgcaccggagacgaagcggaatcccggggccactcgaaaggctggggcaggaactacgcctccatcatacgccgtgactgcatgtggagcggcttctcgg

SEQ ID NO: 13200 - DNA, 6886 bp, Homo sapiens
  source 1..6886: mol_type = unassigned DNA
gcctgggaggtgcgtcagatccgagctcgccatccagtttcctctccactagtccccccagttggagatctgggaccaacaaggcaccatggcgcagaagggccaactcagtgacgatgagaagttcctctttgtggacaaaaacttcatcaacagcccagtggcccaggctgactgggccgccaagagactcgtctgggtcccctcggagaagcagggcttcgaggcagccagcattaaggaggagaagggggatgaggtggttgtggagctggtggagaatggcaagaaggtcacggttgggaaagatgacatccagaagatgaacccacccaagttctccaaggtggaggacatggcggagctgacgtgcctcaacgaagcctccgtgctacacaacctgagggagcggtacttctcagggctaatatatacgtactctggcctcttctgcgtggtggtcaacccctataaacacctgcccatctactcggagaagatcgtcgacatgtacaagggcaagaagaggcacgagatgccgcctcacatctacgccatcgcagacacggcctaccggagcatgcttcaagatcgggaggaccagtccattctatgcacaggcgagtctggagccgggaaaaccgaaaacaccaagaaggtcattcagtacctggccgtggtggcctcctcccacaagggcaagaaagacacaagtatcacgcaaggcccatcttttgcctacggagagctggaaaagcagcttctacaagcaaacccgattctggaggctttcggcaacgccaaaacagtgaagaacgacaactcctcacgattcggcaaattcatccgcatcaacttcgacgtcacgggttacatcgtgggagccaacattgagacctatctgctagaaaaatcacgggcaattcgccaagccagagacgagaggacattccacatcttttactacatgattgctggagccaaggagaagatgagaagtgacttgcttttggagggcttcaacaactacaccttcctctccaatggctttgtgcccatcccagcagcccaggatgatgagatgttccaggaaaccgtggaggccatggcaatcatgggtttcagcgaggaggagcagctatccatattgaaggtggtatcatcggtcctgcagcttggaaatatcgtcttcaagaaggaaagaaacacagaccaggcgtccatgccagataacacagctgctcagaaagtttgccacctcatgggaattaatgtgacagatttcaccagatccatcctcactcctcgtatcaaggttgggcgagatgtggtacagaaagctcagacaaaagaacaggctgactttgctgtagaggctttggccaaggcaacatatgagcgccttttccgctggatactcacccgcgtgaacaaagccctggacaagacccatcggcaaggggcttccttcctggggatcctggatatagctggatttgagatctttgaggtgaactccttcgagcagctgtgcatcaactacaccaacgagaagctgcagcagctcttcaaccacaccatgttcatcctggagcaggaggagtaccagcgcgagggcatcgagtggaacttcatcgactttgggctggacctacagccctgcatcgagctcatcgagcgaccgaacaaccctccaggtgtgctggccctgctggacgaggaatgctggttccccaaagccacggacaagtctttcgtggagaagctgtgcacggagcagggcagccaccccaagttccagaagcccaagcagctcaaggacaagactgagttctccatcatccattatgctgggaaggtggactataatgcgagtgcctggctgaccaagaatatggacccgctgaatgacaacgtgacttccctgctcaatgcctcctccgacaagtttgtggccgacctgtggaaggacgtggaccgcatcgtgggcctggaccagatggccaagatgacggagagctcgctgcccagcgcctccaagaccaagaagggcatgttccgcacagtggggcagctgtacaaggagcagctgggcaagctgatgaccacgctacgcaacaccacgcccaacttcgtgcgctgcatcatccccaaccacgagaagaggtccggcaagctggatgcgttcctggtgctggagcagctgcggtgcaatggggtgctggaaggcattcgcatctgccggcagggcttccccaaccggatcgtcttccaggagttccgccaacgctacgagatcctggcggcgaatgccatccccaaaggcttcatggacgggaagcaggcctgcattctcatgatcaaagccctggaacttgaccccaacttatacaggatagggcagagcaaaatcttcttccgaactggcgtcctggcccacctagaggaggagcgagatttgaagatcaccgatgtcatcatggccttccaggcgatgtgtcgtggctacttggccagaaaggcttttgccaagaggcagcagcagctgaccgccatgaaggtgattcagaggaactgcgccgcctacctcaagctgcggaactggcagtggtggaggcttttcaccaaagtgaagccactgctgcaggtgacacggcaggaggaggagatgcaggccaaggaggatgaactgcagaagaccaaggagcggcagcagaaggcagagaatgagcttaaggagctggaacagaagcactcgcagctgaccgaggagaagaacctgctacaggaacagctgcaggcagagacagagctgtatgcagaggctgaggagatgcgggtgcggctggcggccaagaagcaggagctggaggagatactgcatgagatggaggcccgcctggaggaggaggaagacaggggccagcagctacaggctgaaaggaagaagatggcccagcagatgctggaccttgaagaacagctggaggaggaggaagctgccaggcagaagctgcaacttgagaaggtcacggctgaggccaagatcaagaaactggaggatgagatcctggtcatggatgatcagaacaataaactatcaaaagaacgaaaactccttgaggagaggattagtgacttaacgacaaatcttgcagaagaggaagaaaaggccaagaatcttaccaagctgaaaaacaagcatgaatctatgatttcagaactggaagtgcggctaaagaaggaagagaagagccgacaggagctggagaagctgaaacggaagctggagggtgatgccagcgacttccacgagcagatcgctgacctccaggcgcagatcgcagagctcaagatgcagctggccaagaaggaggaggagctgcaggcggccctggccaggcttgacgatgaaatcgctcagaagaacaatgccctgaagaagatccgggagctggagggccacatctcagacctccaggaggacctggactcagagcgggccgccaggaacaaggctgaaaagcagaagcgagacctcggcgaggagctggaggccctaaagacagagctggaagacacactggacagcacagccactcagcaggagctcagggccaagagggagcaggaggtgacggtgctgaagaaggccctggatgaagagacgcggtcccatgaggctcaggtccaggagatgaggcagaaacacgcacaggcggtggaggagctcacagagcagcttgagcagttcaagagggccaaggcgaacctagacaagaataagcagacgctggagaaagagaacgcagacctggccggggagctgcgggtcctgggccaggccaagcaggaggtggaacataagaagaagaagctggaggcgcaggtgcaggagctgcagtccaagtgcagcgatggggagcgggcccgggcggagctcaatgacaaagtccacaagctgcagaatgaagttgagagcgtcacagggatgcttaacgaggccgaggggaaggccattaagctggccaaggacgtggcgtccctcagttcccagctccaggacacccaggagctgcttcaagaagaaacccggcagaagctcaacgtgtctacgaagctgcgccagctggaggaggagcggaacagcctgcaagaccagctggacgaggagatggaggccaagcagaacctggagcgccacatctccactctcaacatccagctctccgactcgaagaagaagctgcaggactttgccagcaccgtggaagctctggaagaggggaagaagaggttccagaaggagatcgagaacctcacccagcagtacgaggagaaggcggccgcttatgataaactggaaaagaccaagaacaggcttcagcaggagctggacgacctggttgttgatttggacaaccagcggcaactcgtgtccaacctggaaaagaagcagaggaaatttgatcagttgttagccgaggagaaaaacatctcttccaaatacgcggatgagagggacagagctgaggcagaagccagggagaaggaaaccaaggccctgtccctggctcgggcccttgaagaggccttggaagccaaagaggaactcgagcggaccaacaaaatgctcaaagccgaaatggaagacctggtcagctccaaggatgacgtgggcaagaacgtccatgagctggagaagtccaagcgggccctggagacccagatggaggagatgaagacgcagctggaagagctggaggacgagctgcaagccacggaggacgccaaactgcggctggaagtcaacatgcaggcgctcaagggccagttcgaaagggatctccaagcccgggacgagcagaatgaggagaagaggaggcaactgcagagacagcttcacgagtatgagacggaactggaagacgagcgaaagcaacgtgccctggcagctgcagcaaagaagaagctggaaggggacctgaaagacctggagcttcaggccgactctgccatcaaggggagggaggaagccatcaagcagctacgcaaactgcaggctcagatgaaggactttcaaagagagctggaagatgcccgtgcctccagagatgagatctttgccacagccaaagagaatgagaagaaagccaagagcttggaagcagacctcatgcagctacaagaggacctcgccgccgctgagagggctcgcaaacaagcggacctcgagaaggaggaactggcagaggagctggccagtagcctgtcgggaaggaacgcactccaggacgagaagcgccgcctggaggcccggatcgcccagctggaggaggagctggaggaggagcagggcaacatggaggccatgagcgaccgggtccgcaaagccacacagcaggccgagcagctcagcaacgagctggccacagagcgcagcacggcccagaagaatgagagtgcccggcagcagctcgagcggcagaacaaggagctccggagcaagctccacgagatggagggggccgtcaagtccaagttcaagtccaccatcgcggcgctggaggccaagattgcacagctggaggagcaggtcgagcaggaggccagagagaaacaggcggccaccaagtcgctgaagcagaaagacaagaagctgaaggaaatcttgctgcaggtggaggacgagcgcaagatggccgagcagtacaaggagcaggcagagaaaggcaatgccagggtcaagcagctcaagaggcagctggaggaggcagaggaggagtcccagcgcatcaacgccaaccgcaggaagctgcagcgggagctggatgaggccacggagagcaacgaggccatgggccgcgaggtgaacgcactcaagagcaagctcagagggccccccccacaggaaacttcgcagtgatgcaccaggcgaggaaacgagacctctttcgttccttctagaaggtctggaggacgtagagttattgaaaatgcagatggttctgaggaggaaacggacactcgagacgcagacttcaatggaaccaaggccagtgaataagcaactttctacagttttgcaccacggcaagaaaaccaaaaaccaaaacaaacaaacaaaaaaaacccaacaacaacccagaacaaagcaaaacccagcagactgtacttagcattgtctaaatccattctcaaattccaaatatcacagacacccctcacacaaggaatataaaaaccaccaccctccagcctgggcaacgtagtaaaacctcatctatacaagaatttaaaaataagctgggcgtggtggtacacacctgtggtcccagctactagggaggctgagccaggaagaacgctccagcccaggacttcgaggctgcaatgagctataattgcatcattgcactccagcctgggcaacagagaccctgtctcaaccaccaccaccaccaccacccctactacccctgtattcaaggtaaaaattgaagtttgtatgatgtaagagatgagaaaaacccaacaggaaacacagacacatcctccagttctatcaatggattgtgcagacactgagtttttagaaaaacatatccacggtaaccggtccctggcaattctgtttacatgaaatggggagaaagtcaccgaaatgggtgccgccggcccccactcccaattcattccctaacctgcaaacctttccaacttctcacgtcaggcctttgagaattctttccccctctcctggtttccacacctcagacacgcacagttcaccaagtgccttctgtagtcacatgaattgaaaaggagacgctgctcccacggaggggagcaggaatgctgcactgtttacaccctgactgtgctt

SEQ ID NO: 13201 - DNA, 6847 bp, Homo sapiens
  source 1..6847: mol_type = unassigned DNA
gcctgggaggtgcgtcagatccgagctcgccatccagtttcctctccactagtccccccagttggagatctgggaccaacaaggcaccatggcgcagaagggccaactcagtgacgatgagaagttcctctttgtggacaaaaacttcatcaacagcccagtggcccaggctgactgggccgccaagagactcgtctgggtcccctcggagaagcagggcttcgaggcagccagcattaaggaggagaagggggatgaggtggttgtggagctggtggagaatggcaagaaggtcacggttgggaaagatgacatccagaagatgaacccacccaagttctccaaggtggaggacatggcggagctgacgtgcctcaacgaagcctccgtgctacacaacctgagggagcggtacttctcagggctaatatatacgtactctggcctcttctgcgtggtggtcaacccctataaacacctgcccatctactcggagaagatcgtcgacatgtacaagggcaagaagaggcacgagatgccgcctcacatctacgccatcgcagacacggcctaccggagcatgcttcaagatcgggaggaccagtccattctatgcacaggcgagtctggagccgggaaaaccgaaaacaccaagaaggtcattcagtacctggccgtggtggcctcctcccacaagggcaagaaagacacaagtatcacgcaaggcccatcttttgcctacggagagctggaaaagcagcttctacaagcaaacccgattctggaggctttcggcaacgccaaaacagtgaagaacgacaactcctcacgattcggcaaattcatccgcatcaacttcgacgtcacgggttacatcgtgggagccaacattgagacctatctgctagaaaaatcacgggcaattcgccaagccagagacgagaggacattccacatcttttactacatgattgctggagccaaggagaagatgagaagtgacttgcttttggagggcttcaacaactacaccttcctctccaatggctttgtgcccatcccagcagcccaggatgatgagatgttccaggaaaccgtggaggccatggcaatcatgggtttcagcgaggaggagcagctatccatattgaaggtggtatcatcggtcctgcagcttggaaatatcgtcttcaagaaggaaagaaacacagaccaggcgtccatgccagataacacagctgctcagaaagtttgccacctcatgggaattaatgtgacagatttcaccagatccatcctcactcctcgtatcaaggttgggcgagatgtggtacagaaagctcagacaaaagaacaggctgactttgctgtagaggctttggccaaggcaacatatgagcgccttttccgctggatactcacccgcgtgaacaaagccctggacaagacccatcggcaaggggcttccttcctggggatcctggatatagctggatttgagatctttgaggtgaactccttcgagcagctgtgcatcaactacaccaacgagaagctgcagcagctcttcaaccacaccatgttcatcctggagcaggaggagtaccagcgcgagggcatcgagtggaacttcatcgactttgggctggacctacagccctgcatcgagctcatcgagcgaccgaacaaccctccaggtgtgctggccctgctggacgaggaatgctggttccccaaagccacggacaagtctttcgtggagaagctgtgcacggagcagggcagccaccccaagttccagaagcccaagcagctcaaggacaagactgagttctccatcatccattatgctgggaaggtggactataatgcgagtgcctggctgaccaagaatatggacccgctgaatgacaacgtgacttccctgctcaatgcctcctccgacaagtttgtggccgacctgtggaaggacgtggaccgcatcgtgggcctggaccagatggccaagatgacggagagctcgctgcccagcgcctccaagaccaagaagggcatgttccgcacagtggggcagctgtacaaggagcagctgggcaagctgatgaccacgctacgcaacaccacgcccaacttcgtgcgctgcatcatccccaaccacgagaagaggtccggcaagctggatgcgttcctggtgctggagcagctgcggtgcaatggggtgctggaaggcattcgcatctgccggcagggcttccccaaccggatcgtcttccaggagttccgccaacgctacgagatcctggcggcgaatgccatccccaaaggcttcatggacgggaagcaggcctgcattctcatgatcaaagccctggaacttgaccccaacttatacaggatagggcagagcaaaatcttcttccgaactggcgtcctggcccacctagaggaggagcgagatttgaagatcaccgatgtcatcatggccttccaggcgatgtgtcgtggctacttggccagaaaggcttttgccaagaggcagcagcagctgaccgccatgaaggtgattcagaggaactgcgccgcctacctcaagctgcggaactggcagtggtggaggcttttcaccaaagtgaagccactgctgcaggtgacacggcaggaggaggagatgcaggccaaggaggatgaactgcagaagaccaaggagcggcagcagaaggcagagaatgagcttaaggagctggaacagaagcactcgcagctgaccgaggagaagaacctgctacaggaacagctgcaggcagagacagagctgtatgcagaggctgaggagatgcgggtgcggctggcggccaagaagcaggagctggaggagatactgcatgagatggaggcccgcctggaggaggaggaagacaggggccagcagctacaggctgaaaggaagaagatggcccagcagatgctggaccttgaagaacagctggaggaggaggaagctgccaggcagaagctgcaacttgagaaggtcacggctgaggccaagatcaagaaactggaggatgagatcctggtcatggatgatcagaacaataaactatcaaaagaacgaaaactccttgaggagaggattagtgacttaacgacaaatcttgcagaagaggaagaaaaggccaagaatcttaccaagctgaaaaacaagcatgaatctatgatttcagaactggaagtgcggctaaagaaggaagagaagagccgacaggagctggagaagctgaaacggaagctggagggtgatgccagcgacttccacgagcagatcgctgacctccaggcgcagatcgcagagctcaagatgcagctggccaagaaggaggaggagctgcaggcggccctggccaggcttgacgatgaaatcgctcagaagaacaatgccctgaagaagatccgggagctggagggccacatctcagacctccaggaggacctggactcagagcgggccgccaggaacaaggctgaaaagcagaagcgagacctcggcgaggagctggaggccctaaagacagagctggaagacacactggacagcacagccactcagcaggagctcagggccaagagggagcaggaggtgacggtgctgaagaaggccctggatgaagagacgcggtcccatgaggctcaggtccaggagatgaggcagaaacacgcacaggcggtggaggagctcacagagcagcttgagcagttcaagagggccaaggcgaacctagacaagaataagcagacgctggagaaagagaacgcagacctggccggggagctgcgggtcctgggccaggccaagcaggaggtggaacataagaagaagaagctggaggcgcaggtgcaggagctgcagtccaagtgcagcgatggggagcgggcccgggcggagctcaatgacaaagtccacaagctgcagaatgaagttgagagcgtcacagggatgcttaacgaggccgaggggaaggccattaagctggccaaggacgtggcgtccctcagttcccagctccaggacacccaggagctgcttcaagaagaaacccggcagaagctcaacgtgtctacgaagctgcgccagctggaggaggagcggaacagcctgcaagaccagctggacgaggagatggaggccaagcagaacctggagcgccacatctccactctcaacatccagctctccgactcgaagaagaagctgcaggactttgccagcaccgtggaagctctggaagaggggaagaagaggttccagaaggagatcgagaacctcacccagcagtacgaggagaaggcggccgcttatgataaactggaaaagaccaagaacaggcttcagcaggagctggacgacctggttgttgatttggacaaccagcggcaactcgtgtccaacctggaaaagaagcagaggaaatttgatcagttgttagccgaggagaaaaacatctcttccaaatacgcggatgagagggacagagctgaggcagaagccagggagaaggaaaccaaggccctgtccctggctcgggcccttgaagaggccttggaagccaaagaggaactcgagcggaccaacaaaatgctcaaagccgaaatggaagacctggtcagctccaaggatgacgtgggcaagaacgtccatgagctggagaagtccaagcgggccctggagacccagatggaggagatgaagacgcagctggaagagctggaggacgagctgcaagccacggaggacgccaaactgcggctggaagtcaacatgcaggcgctcaagggccagttcgaaagggatctccaagcccgggacgagcagaatgaggagaagaggaggcaactgcagagacagcttcacgagtatgagacggaactggaagacgagcgaaagcaacgtgccctggcagctgcagcaaagaagaagctggaaggggacctgaaagacctggagcttcaggccgactctgccatcaaggggagggaggaagccatcaagcagctacgcaaactgcaggctcagatgaaggactttcaaagagagctggaagatgcccgtgcctccagagatgagatctttgccacagccaaagagaatgagaagaaagccaagagcttggaagcagacctcatgcagctacaagaggacctcgccgccgctgagagggctcgcaaacaagcggacctcgagaaggaggaactggcagaggagctggccagtagcctgtcgggaaggaacgcactccaggacgagaagcgccgcctggaggcccggatcgcccagctggaggaggagctggaggaggagcagggcaacatggaggccatgagcgaccgggtccgcaaagccacacagcaggccgagcagctcagcaacgagctggccacagagcgcagcacggcccagaagaatgagagtgcccggcagcagctcgagcggcagaacaaggagctccggagcaagctccacgagatggagggggccgtcaagtccaagttcaagtccaccatcgcggcgctggaggccaagattgcacagctggaggagcaggtcgagcaggaggccagagagaaacaggcggccaccaagtcgctgaagcagaaagacaagaagctgaaggaaatcttgctgcaggtggaggacgagcgcaagatggccgagcagtacaaggagcaggcagagaaaggcaatgccagggtcaagcagctcaagaggcagctggaggaggcagaggaggagtcccagcgcatcaacgccaaccgcaggaagctgcagcgggagctggatgaggccacggagagcaacgaggccatgggccgcgaggtgaacgcactcaagagcaagctcaggcgaggaaacgagacctctttcgttccttctagaaggtctggaggacgtagagttattgaaaatgcagatggttctgaggaggaaacggacactcgagacgcagacttcaatggaaccaaggccagtgaataagcaactttctacagttttgcaccacggcaagaaaaccaaaaaccaaaacaaacaaacaaaaaaaacccaacaacaacccagaacaaagcaaaacccagcagactgtacttagcattgtctaaatccattctcaaattccaaatatcacagacacccctcacacaaggaatataaaaaccaccaccctccagcctgggcaacgtagtaaaacctcatctatacaagaatttaaaaataagctgggcgtggtggtacacacctgtggtcccagctactagggaggctgagccaggaagaacgctccagcccaggacttcgaggctgcaatgagctataattgcatcattgcactccagcctgggcaacagagaccctgtctcaaccaccaccaccaccaccacccctactacccctgtattcaaggtaaaaattgaagtttgtatgatgtaagagatgagaaaaacccaacaggaaacacagacacatcctccagttctatcaatggattgtgcagacactgagtttttagaaaaacatatccacggtaaccggtccctggcaattctgtttacatgaaatggggagaaagtcaccgaaatgggtgccgccggcccccactcccaattcattccctaacctgcaaacctttccaacttctcacgtcaggcctttgagaattctttccccctctcctggtttccacacctcagacacgcacagttcaccaagtgccttctgtagtcacatgaattgaaaaggagacgctgctcccacggaggggagcaggaatgctgcactgtttacaccctgactgtgctt

SEQ ID NO: 13202 - DNA, 541 bp, Homo sapiens
  source 1..541: mol_type = unassigned DNA
agttagcggatggcatgcccggaagccatctgaaatcacctctagagtttggggaccactgcgtgagacagggaaaagtccaaacccctctgagaaggggaagagagcagctggcgcagggcaccaagccttcagggaaaagccccactcgctgcatggcgaggaaacgagacctctttcgttccttctagaaggtctggaggacgtagagttattgaaaatgcagatggttctgaggaggaaacggacactcgagacgcagacttcaatggaaccaaggccagtgaataagcaactttctacagttttgcaccacggcaagaaaaccaaaaaccaaaacaaacaaacaaaaaaaacccaacaacaacccagaacaaagcaaaacccagcagactgtacttagcattgtctaaatccattctcaaattccaaatatcacagacacccctcacacaaggaatataaaaaccaccaccctccagcctgggcaacgtagtaaaacctcatctatacaagaatttaaaaataagctgggcgtggt

SEQ ID NO: 13203 - DNA, 6272 bp, Homo sapiens
  source 1..6272: mol_type = unassigned DNA
gcagggagatttggacgctccggcctgggaggtgcgtcagatccgagctcgccatccagtttcctctccactagtccccccagttggagatctgggaccaacaaggcaccatggcgcagaagggccaactcagtgacgatgagaagttcctctttgtggacaaaaacttcatcaacagcccagtggcccaggctgactgggccgccaagagactcgtctgggtcccctcggagaagcagggcttcgaggcagccagcattaaggaggagaagggggatgaggtggttgtggagctggtggagaatggcaagaaggtcacggttgggaaagatgacatccagaagatgaacccacccaagttctccaaggtggaggacatggcggagctgacgtgcctcaacgaagcctccgtgctacacaacctgagggagcggtacttctcagggctaatatatacgtactctggcctcttctgcgtggtggtcaacccctataaacacctgcccatctactcggagaagatcgtcgacatgtacaagggcaagaagaggcacgagatgccgcctcacatctacgccatcgcagacacggcctaccggagcatgcttcaagatcgggaggaccagtccattctatgcacaggcgagtctggagccgggaaaaccgaaaacaccaagaaggtcattcagtacctggccgtggtggcctcctcccacaagggcaagaaagacacaagtatcacgggagagctggaaaagcagcttctacaagcaaacccgattctggaggctttcggcaacgccaaaacagtgaagaacgacaactcctcacgattcggcaaattcatccgcatcaacttcgacgtcacgggttacatcgtgggagccaacattgagacctatctgctagaaaaatcacgggcaattcgccaagccagagacgagaggacattccacatcttttactacatgattgctggagccaaggagaagatgagaagtgacttgcttttggagggcttcaacaactacaccttcctctccaatggctttgtgcccatcccagcagcccaggatgatgagatgttccaggaaaccgtggaggccatggcaatcatgggtttcagcgaggaggagcagctatccatattgaaggtggtatcatcggtcctgcagcttggaaatatcgtcttcaagaaggaaagaaacacagaccaggcgtccatgccagataacacagctgctcagaaagtttgccacctcatgggaattaatgtgacagatttcaccagatccatcctcactcctcgtatcaaggttgggcgagatgtggtacagaaagctcagacaaaagaacaggctgactttgctgtagaggctttggccaaggcaacatatgagcgccttttccgctggatactcacccgcgtgaacaaagccctggacaagacccatcggcaaggggcttccttcctggggatcctggatatagctggatttgagatctttgaggtgaactccttcgagcagctgtgcatcaactacaccaacgagaagctgcagcagctcttcaaccacaccatgttcatcctggagcaggaggagtaccagcgcgagggcatcgagtggaacttcatcgactttgggctggacctacagccctgcatcgagctcatcgagcgaccgaacaaccctccaggtgtgctggccctgctggacgaggaatgctggttccccaaagccacggacaagtctttcgtggagaagctgtgcacggagcagggcagccaccccaagttccagaagcccaagcagctcaaggacaagactgagttctccatcatccattatgctgggaaggtggactataatgcgagtgcctggctgaccaagaatatggacccgctgaatgacaacgtgacttccctgctcaatgcctcctccgacaagtttgtggccgacctgtggaaggacgtggaccgcatcgtgggcctggaccagatggccaagatgacggagagctcgctgcccagcgcctccaagaccaagaagggcatgttccgcacagtggggcagctgtacaaggagcagctgggcaagctgatgaccacgctacgcaacaccacgcccaacttcgtgcgctgcatcatccccaaccacgagaagaggtccggcaagctggatgcgttcctggtgctggagcagctgcggtgcaatggggtgctggaaggcattcgcatctgccggcagggcttccccaaccggatcgtcttccaggagttccgccaacgctacgagatcctggcggcgaatgccatccccaaaggcttcatggacgggaagcaggcctgcattctcatgatcaaagccctggaacttgaccccaacttatacaggatagggcagagcaaaatcttcttccgaactggcgtcctggcccacctagaggaggagcgagatttgaagatcaccgatgtcatcatggccttccaggcgatgtgtcgtggctacttggccagaaaggcttttgccaagaggcagcagcagctgaccgccatgaaggtgattcagaggaactgcgccgcctacctcaagctgcggaactggcagtggtggaggcttttcaccaaagtgaagccactgctgcaggtgacacggcaggaggaggagatgcaggccaaggaggatgaactgcagaagaccaaggagcggcagcagaaggcagagaatgagcttaaggagctggaacagaagcactcgcagctgaccgaggagaagaacctgctacaggaacagctgcaggcagagacagagctgtatgcagaggctgaggagatgcgggtgcggctggcggccaagaagcaggagctggaggagatactgcatgagatggaggcccgcctggaggaggaggaagacaggggccagcagctacaggctgaaaggaagaagatggcccagcagatgctggaccttgaagaacagctggaggaggaggaagctgccaggcagaagctgcaacttgagaaggtcacggctgaggccaagatcaagaaactggaggatgagatcctggtcatggatgatcagaacaataaactatcaaaagaacgaaaactccttgaggagaggattagtgacttaacgacaaatcttgcagaagaggaagaaaaggccaagaatcttaccaagctgaaaaacaagcatgaatctatgatttcagaactggaagtgcggctaaagaaggaagagaagagccgacaggagctggagaagctgaaacggaagctggagggtgatgccagcgacttccacgagcagatcgctgacctccaggcgcagatcgcagagctcaagatgcagctggccaagaaggaggaggagctgcaggcggccctggccaggcttgacgatgaaatcgctcagaagaacaatgccctgaagaagatccgggagctggagggccacatctcagacctccaggaggacctggactcagagcgggccgccaggaacaaggctgaaaagcagaagcgagacctcggcgaggagctggaggccctaaagacagagctggaagacacactggacagcacagccactcagcaggagctcagggccaagagggagcaggaggtgacggtgctgaagaaggccctggatgaagagacgcggtcccatgaggctcaggtccaggagatgaggcagaaacacgcacaggcggtggaggagctcacagagcagcttgagcagttcaagagggccaaggcgaacctagacaagaataagcagacgctggagaaagagaacgcagacctggccggggagctgcgggtcctgggccaggccaagcaggaggtggaacataagaagaagaagctggaggcgcaggtgcaggagctgcagtccaagtgcagcgatggggagcgggcccgggcggagctcaatgacaaagtccacaagctgcagaatgaagttgagagcgtcacagggatgcttaacgaggccgaggggaaggccattaagctggccaaggacgtggcgtccctcagttcccagctccaggacacccaggagctgcttcaagaagaaacccggcagaagctcaacgtgtctacgaagctgcgccagctggaggaggagcggaacagcctgcaagaccagctggacgaggagatggaggccaagcagaacctggagcgccacatctccactctcaacatccagctctccgactcgaagaagaagctgcaggactttgccagcaccgtggaagctctggaagaggggaagaagaggttccagaaggagatcgagaacctcacccagcagtacgaggagaaggcggccgcttatgataaactggaaaagaccaagaacaggcttcagcaggagctggacgacctggttgttgatttggacaaccagcggcaactcgtgtccaacctggaaaagaagcagaggaaatttgatcagttgttagccgaggagaaaaacatctcttccaaatacgcggatgagagggacagagctgaggcagaagccagggagaaggaaaccaaggccctgtccctggctcgggcccttgaagaggccttggaagccaaagaggaactcgagcggaccaacaaaatgctcaaagccgaaatggaagacctggtcagctccaaggatgacgtgggcaagaacgtccatgagctggagaagtccaagcgggccctggagacccagatggaggagatgaagacgcagctggaagagctggaggacgagctgcaagccacggaggacgccaaactgcggctggaagtcaacatgcaggcgctcaagggccagttcgaaagggatctccaagcccgggacgagcagaatgaggagaagaggaggcaactgcagagacagcttcacgagtatgagacggaactggaagacgagcgaaagcaacgtgccctggcagctgcagcaaagaagaagctggaaggggacctgaaagacctggagcttcaggccgactctgccatcaaggggagggaggaagccatcaagcagctacgcaaactgcaggctcagatgaaggactttcaaagagagctggaagatgcccgtgcctccagagatgagatctttgccacagccaaagagaatgagaagaaagccaagagcttggaagcagacctcatgcagctacaagaggacctcgccgccgctgagagggctcgcaaacaagcggacctcgagaaggaggaactggcagaggagctggccagtagcctgtcgggaaggaacgcactccaggacgagaagcgccgcctggaggcccggatcgcccagctggaggaggagctggaggaggagcagggcaacatggaggccatgagcgaccgggtccgcaaagccacacagcaggccgagcagctcagcaacgagctggccacagagcgcagcacggcccagaagaatgagagtgcccggcagcagctcgagcggcagaacaaggagctccggagcaagctccacgagatggagggggccgtcaagtccaagttcaagtccaccatcgcggcgctggaggccaagattgcacagctggaggagcaggtcgagcaggaggccagagagaaacaggcggccaccaagtcgctgaagcagaaagacaagaagctgaaggaaatcttgctgcaggtggaggacgagcgcaagatggccgagcagtacaaggagcaggcagagaaaggcaatgccagggtcaagcagctcaagaggcagctggaggaggcagaggaggagtcccagcgcatcaacgccaaccgcaggaagctgcagcgggagctggatgaggccacggagagcaacgaggccatgggccgcgaggtgaacgcactcaagagcaagctcagagggccccccccacaggaaacttcgcagtgatgcaccaggcgaggaaacgagacctctttcgttccttctagaaggtctggaggacgtagagttattgaaaatgcagatggttctgaggaggaaacggacactcgagacgcagacttcaatggaaccaaggccagtgaataagcaactttctacagttttgcaccacggcaagaaaaccaaaaaccaaaacaaacaaacaaaaaaaacccaacaacaacccagaacaaagcaaaacccagcagactgtacttagcattgtctaaatccattctcaaattccaaatatcacagacacccctcacacaaggaatataaaaaccaccaccctccagcctgggcaacgta

SEQ ID NO: 13204 - DNA, 6029 bp, Homo sapiens
  source 1..6029: mol_type = unassigned DNA
gcagggagatttggacgctccggcctgggaggtgcgtcagatccgagctcgccatccagtttcctctccactagtccccccagttggagatctgggaccaacaaggcaccatggcgcagaagggccaactcagtgacgatgagaagttcctctttgtggacaaaaacttcatcaacagcccagtggcccaggctgactgggccgccaagagactcgtctgggtcccctcggagaagcagggcttcgaggcagccagcattaaggaggagaagggggatgaggtggttgtggagctggtggagaatggcaagaaggtcacggttgggaaagatgacatccagaagatgaacccacccaagttctccaaggtggaggacatggcggagctgacgtgcctcaacgaagcctccgtgctacacaacctgagggagcggtacttctcagggctaatatatacgtactctggcctcttctgcgtggtggtcaacccctataaacacctgcccatctactcggagaagatcgtcgacatgtacaagggcaagaagaggcacgagatgccgcctcacatctacgccatcgcagacacggcctaccggagcatgcttcaagatcgggaggaccagtccattctatgcacaggcgagtctggagccgggaaaaccgaaaacaccaagaaggtcattcagtacctggccgtggtggcctcctcccacaagggcaagaaagacacaagtatcacgggagagctggaaaagcagcttctacaagcaaacccgattctggaggctttcggcaacgccaaaacagtgaagaacgacaactcctcacgattcggcaaattcatccgcatcaacttcgacgtcacgggttacatcgtgggagccaacattgagacctatctgctagaaaaatcacgggcaattcgccaagccagagacgagaggacattccacatcttttactacatgattgctggagccaaggagaagatgagaagtgacttgcttttggagggcttcaacaactacaccttcctctccaatggctttgtgcccatcccagcagcccaggatgatgagatgttccaggaaaccgtggaggccatggcaatcatgggtttcagcgaggaggagcagctatccatattgaaggtggtatcatcggtcctgcagcttggaaatatcgtcttcaagaaggaaagaaacacagaccaggcgtccatgccagataacacagctgctcagaaagtttgccacctcatgggaattaatgtgacagatttcaccagatccatcctcactcctcgtatcaaggttgggcgagatgtggtacagaaagctcagacaaaagaacaggctgactttgctgtagaggctttggccaaggcaacatatgagcgccttttccgctggatactcacccgcgtgaacaaagccctggacaagacccatcggcaaggggcttccttcctggggatcctggatatagctggatttgagatctttgaggtgaactccttcgagcagctgtgcatcaactacaccaacgagaagctgcagcagctcttcaaccacaccatgttcatcctggagcaggaggagtaccagcgcgagggcatcgagtggaacttcatcgactttgggctggacctacagccctgcatcgagctcatcgagcgaccgaacaaccctccaggtgtgctggccctgctggacgaggaatgctggttccccaaagccacggacaagtctttcgtggagaagctgtgcacggagcagggcagccaccccaagttccagaagcccaagcagctcaaggacaagactgagttctccatcatccattatgctgggaaggtggactataatgcgagtgcctggctgaccaagaatatggacccgctgaatgacaacgtgacttccctgctcaatgcctcctccgacaagtttgtggccgacctgtggaaggacgtggaccgcatcgtgggcctggaccagatggccaagatgacggagagctcgctgcccagcgcctccaagaccaagaagggcatgttccgcacagtggggcagctgtacaaggagcagctgggcaagctgatgaccacgctacgcaacaccacgcccaacttcgtgcgctgcatcatccccaaccacgagaagaggtccggcaagctggatgcgttcctggtgctggagcagctgcggtgcaatggggtgctggaaggcattcgcatctgccggcagggcttccccaaccggatcgtcttccaggagttccgccaacgctacgagatcctggcggcgaatgccatccccaaaggcttcatggacgggaagcaggcctgcattctcatgatcaaagccctggaacttgaccccaacttatacaggatagggcagagcaaaatcttcttccgaactggcgtcctggcccacctagaggaggagcgagatttgaagatcaccgatgtcatcatggccttccaggcgatgtgtcgtggctacttggccagaaaggcttttgccaagaggcagcagcagctgaccgccatgaaggtgattcagaggaactgcgccgcctacctcaagctgcggaactggcagtggtggaggcttttcaccaaagtgaagccactgctgcaggtgacacggcaggaggaggagatgcaggccaaggaggatgaactgcagaagaccaaggagcggcagcagaaggcagagaatgagcttaaggagctggaacagaagcactcgcagctgaccgaggagaagaacctgctacaggaacagctgcaggcagagacagagctgtatgcagaggctgaggagatgcgggtgcggctggcggccaagaagcaggagctggaggagatactgcatgagatggaggcccgcctggaggaggaggaagacaggggccagcagctacaggctgaaaggaagaagatggcccagcagatgctggaccttgaagaacagctggaggaggaggaagctgccaggcagaagctgcaacttgagaaggtcacggctgaggccaagatcaagaaactggaggatgagatcctggtcatggatgatcagaacaataaactatcaaaagaacgaaaactccttgaggagaggattagtgacttaacgacaaatcttgcagaagaggaagaaaaggccaagaatcttaccaagctgaaaaacaagcatgaatctatgatttcagaactggaagtgcggctaaagaaggaagagaagagccgacaggagctggagaagctgaaacggaagctggagggtgatgccagcgacttccacgagcagatcgctgacctccaggcgcagatcgcagagctcaagatgcagctggccaagaaggaggaggagctgcaggcggccctggccaggcttgacgatgaaatcgctcagaagaacaatgccctgaagaagatccgggagctggagggccacatctcagacctccaggaggacctggactcagagcgggccgccaggaacaaggctgaaaagcagaagcgagacctcggcgaggagctggaggccctaaagacagagctggaagacacactggacagcacagccactcagcaggagctcagggccaagagggagcaggaggtgacggtgctgaagaaggccctggatgaagagacgcggtcccatgaggctcaggtccaggagatgaggcagaaacacgcacaggcggtggaggagctcacagagcagcttgagcagttcaagagggccaaggcgaacctagacaagaataagcagacgctggagaaagagaacgcagacctggccggggagctgcgggtcctgggccaggccaagcaggaggtggaacataagaagaagaagctggaggcgcaggtgcaggagctgcagtccaagtgcagcgatggggagcgggcccgggcggagctcaatgacaaagtccacaagctgcagaatgaagttgagagcgtcacagggatgcttaacgaggccgaggggaaggccattaagctggccaaggacgtggcgtccctcagttcccagctccaggacacccaggagctgcttcaagaagaaacccggcagaagctcaacgtgtctacgaagctgcgccagctggaggaggagcggaacagcctgcaagaccagctggacgaggagatggaggccaagcagaacctggagcgccacatctccactctcaacatccagctctccgactcgaagaagaagctgcaggactttgccagcaccgtggaagctctggaagaggggaagaagaggttccagaaggagatcgagaacctcacccagcagtacgaggagaaggcggccgcttatgataaactggaaaagaccaagaacaggcttcagcaggagctggacgacctggttgttgatttggacaaccagcggcaactcgtgtccaacctggaaaagaagcagaggaaatttgatcagttgttagccgaggagaaaaacatctcttccaaatacgcggatgagagggacagagctgaggcagaagccagggagaaggaaaccaaggccctgtccctggctcgggcccttgaagaggccttggaagccaaagaggaactcgagcggaccaacaaaatgctcaaagccgaaatggaagacctggtcagctccaaggatgacgtgggcaagaacgtccatgagctggagaagtccaagcgggccctggagacccagatggaggagatgaagacgcagctggaagagctggaggacgagctgcaagccacggaggacgccaaactgcggctggaagtcaacatgcaggcgctcaagggccagttcgaaagggatctccaagcccgggacgagcagaatgaggagaagaggaggcaactgcagagacagcttcacgagtatgagacggaactggaagacgagcgaaagcaacgtgccctggcagctgcagcaaagaagaagctggaaggggacctgaaagacctggagcttcaggccgactctgccatcaaggggagggaggaagccatcaagcagctacgcaaactgcaggctcagatgaaggactttcaaagagagctggaagatgcccgtgcctccagagatgagatctttgccacagccaaagagaatgagaagaaagccaagagcttggaagcagacctcatgcagctacaagaggacctcgccgccgctgagagggctcgcaaacaagcggacctcgagaaggaggaactggcagaggagctggccagtagcctgtcgggaaggaacgcactccaggacgagaagcgccgcctggaggcccggatcgcccagctggaggaggagctggaggaggagcagggcaacatggaggccatgagcgaccgggtccgcaaagccacacagcaggccgagcagctcagcaacgagctggccacagagcgcagcacggcccagaagaatgagagtgcccggcagcagctcgagcggcagaacaaggagctccggagcaagctccacgagatggagggggccgtcaagtccaagttcaagtccaccatcgcggcgctggaggccaagattgcacagctggaggagcaggtcgagcaggaggccagagagaaacaggcggccaccaagtcgctgaagcagaaagacaagaagctgaaggaaatcttgctgcaggtggaggacgagcgcaagatggccgagcagtacaaggagcaggcagagaaaggcaatgccagggtcaagcagctcaagaggcagctggaggaggcagaggaggagtcccagcgcatcaacgccaaccgcaggaagctgcagcgggagctggatgaggccacggagagcaacgaggccatgggccgcgaggtgaacgcactcaagagcaagctcaggcgaggaaacgagacctctttcgttccttctagaaggtctggaggacgtagagttattgaaaatgcagatggttctgaggaggaaacggacactcgagacgcagacttcaatggaaccaaggccagtgaataa

SEQ ID NO: 13205 - DNA, 5725 bp, Homo sapiens
  source 1..5725: mol_type = unassigned DNA
gagatcgagaacctcacccagcagtacgaggagaaggcggccgcttatgataaactggaaaagaccaagaacaggcttcagcaggagctggacgacctggttgttgatttggacaaccagcggcaactcgtgtccaacctggaaaagaagcagaggaaatttgatcagttgttagccgaggagaaaaacatctcttccaaatacgcggatgagagggacagagctgaggcagaagccagggagaaggaaaccaaggccctgtccctggctcgggcccttgaagaggccttggaagccaaagaggaactcgagcggaccaacaaaatgctcaaagccgaaatggaagacctggtcagctccaaggatgacgtgggcaagaacgtaagtggctctgggtggtttttctcgtccatgtttcgcctgcccaccctctgtgctattcaccagtccatgcgaggctagctcctggcctttttcatagcgaactatcatcggaaatggaaggaggtttttggactggtgcaggggctgggaggggctgagaatggcagtcgaggatgggtctgagttggggggtccgaggataaggctggggtctgaactctcaggggtcatcttgagtcccggccatgcatcctgtgggaggccaaagccacctccctgatctcctgaggtgccgctcacggtgggtttctcaatcgtcttcatgaagttgagcctcatagaatggggctgcccgctctgccggcaggtccatgagctggagaagtccaagcgggccctggagacccagatggaggagatgaagacgcagctggaagagctggaggacgagctgcaagccacggaggacgccaaactgcggctggaagtcaacatgcaggcgctcaagggccagttcgaaagggatctccaagcccgggacgagcagaatgaggagaagaggaggcaactgcagagacagcttcacgagtatgagacggaactggaagacgagcgaaagcaacgtgccctggcagctgcagcaaagaagaagctggaaggggacctgaaagacctggagcttcaggccgactctgccatcaaggggagggaggaagccatcaagcagctacgcaaactgcaggctcagatgaaggactttcaaagagagctggaagatgcccgtgcctccagagatgagatctttgccacagccaaagagaatgagaagaaagccaagagcttggaagcagacctcatgcagctacaagaggacctcgccgccgctgagagggctcgcaaacaagcggacctcgagaaggaggaactggcagaggagctggccagtagcctgtcgggaaggtaggaaactgaatggaggaagagggctctgaagcagaggatggggggacaggcagcatcctcgacccccattttattttttaaattttttcgagacagagtttcattctgtcacccaggctggagggcagtggcacaatcttggctcactgcaacctccacctcccaggttcaagcaattctcctgcctcagccttctgagtagctgagactacaggtgtgtaccaccatgcctggctaatttttatatttttagtagaggtggggtttcaccatgttggccaggctagtcttgaactcctgaccttaggtgatcctcctaccttggcctcccaaagtgctgtgattacaggtgtgagccaccgtgcctggccctggacccccatttcaatgctgctgctgacgaagcgtcctctgagattggggacagacccatggtggttaggttttccgtcagcgctttcatgcctgtttgggggtgtggctgctttcattcattcccaataagtagctgtgtggggagaaggggaggccaggaagagtcagggaggagtgtgctggtccccatcccaatcccagctttgctgacacggacccggcctgagtcccggctgtccacttcctggctgtgtaactacagatgagtcttctaatcttctccaagcctcagtttcacccattagatgatgagggcaatacccctgaggcatgactccaaggagggggcatcttttaaggcgggggagggtagaggcccccaccatggccgcccttcccccaggaacgcactccaggacgagaagcgccgcctggaggcccggatcgcccagctggaggaggagctggaggaggagcagggcaacatggaggccatgagcgaccgggtccgcaaagccacacagcaggtgagggccgcctggacaccacagtcacgctgcctactgtctctcctgcagcaggatcctgcaccagtcaacacacgcgtggcggcttcctgtgtgcaggccctggattgagggacaagagggtggtggggcctgagagtagagatccagggcccttacaccagtgcccaggctgctgtcttcagaatactcctctccacgctgcagtgtctcattttccagccacggcgtggctggctccccgtacctcacggccatccctggagtccgggccttgggatgctctttcattgcgttttcccctagctgaagctctgaccttatccagtgagcccttggtgatgtcactgagcactagttccatggtgggcactagggaccatccagtaacctgcagccccttgtggtgtagggtgaacaggcatcattctccaggcgactccaggacagagaaagcaagggacaagtcactcgctcagcctgggtggcactgacacttgtggaagcacctcttttttttggagacagggtctctctgtggcccaggctggagtgcagtggcgcaatcttggctcactgcaacctctgcctcccaagttcaagggattctcctgcttcaacctcccaagtagctgggactacaggcacgtgccaccactgcccggctaatttttgtatttttaatagagacggggtttcaccatgttggccaggcaggtctcgaactcctgagctcaagtgatttacctgcctctgcttccaaaagtgctgggattacaggcgtgcgccaccacgcccggcctggaagaagctcttgagtggagttttacaggatgaaggagaggacagggtgcccgggatcaagggactcgtgcagaggccaaacaaggcaggaagaggcatggtctcagtgcgctctcttgggcttccctgagtccgcctcatggccttcactctcctccccaggccgagcagctcagcaacgagctggccacagagcgcagcacggcccagaagaatgagagtgcccggcagcagctcgagcggcagaacaaggagctccggagcaagctccacgagatggagggggccgtcaagtccaagttcaagtccaccatcgcggcgctggaggccaagattgcacagctggaggagcaggtcgagcaggaggccagagagaaacaggcggccaccaagtcgctgaagcagaaagacaagaagctgaaggaaatcttgctgcaggtggaggacgagcgcaagatggccgagcagtacaaggagcaggcagagaaaggcaatgccagggtcaagcagctcaagaggcagctggaggaggcagaggaggagtcccagcgcatcaacgccaaccgcaggaagctgcagcgggagctggatgaggccacggagagcaacgaggccatgggccgcgaggtgaacgcactcaagagcaagctcaggtgaggagcccgtggcccgggaggaccccgtctctcaggccagagaaaagcactgggggctcgggctcctttcggcctgcaaatgccccttgtgcccacagccgccactcccttctgtggtttattcctgcttctccttaatcactaagcttagtgtgggccaggcactgagatcagacccgggccctgccttgcctggtagcagctaaccttctagatcctttaacgatcgaccgtctcccatccggtcctccggctgaggaggaggaagaggctatccccactgtctcctccagcccctccttcattgcatcactgagtcttcacgacatccattgaagctgcaacaccaccccccgccacttcacctccttcctgacatgctctgctcctcctttctccccctcagcactgctgccatctgggctgcattattctcgggtatgggggctgtccgacattccccatcagaaggaaaaagatccctgaaaagtagcaggtgcttacatttctggcctctacccaccggctgcagtagtcccccaccaccctgcaatgtgacaaccaaaaatgtctctagatgttgccagaagtcctctagagatgggagggtacgactgccaccccgctgagaattcctgctgtcactggagtgggggctgttttctctcccatgcctctggtaccttgggggtcccccctgctcccaagggctgcttccaccaccctgtccatccatcccgattggctcccaggaggttttagctccgggcttcctgtctcccacaccactcctcacagttctccatgatttcaacatccaggtgggcgacgcagcctctcggttccttgaccctctgggtgatcctgctgcttctaccgggccaaccagtactcctaggagccctcacaatttgaccctcaggcatcccattgtctgcctggtgccacctttctttggctctgtccccaacggggtcttcactccattaatgccatcagcctctgacccagctccaaaccagctgtctagtaacccccgtcgcgcatcctcaacatccggttccccctcttgcattgctgcaatcatttggtgaaagcacaacccaaatgaaactcaagcttggctgggcacgggactcacacctataatcccagcactttgggaggccaaggcaggtgaatcgctttgagctcaggagttcaagagcagcaagaccccatctctacaacaaacaaacaaaaatcagccaggtgggatggcgcaaacctaaaatcccagctactcaggaggctgaggtgggacgatcagtggagccccagaggtcaaggctgcagtgagccatgatctagccaatgcacttaccctggatggacagagtgagaccctgtctcaaaaaacccaaaacccactctccaccttttcccacagagcaggccttgctcaggggtcctcccacacccctccctcatcttctcactctctgctgcttttcactttttctttgaacttatgatcgctcctccccattctctctcagctggggaccttacttcctacttaactcaaaagcagaaatgatcatgaaacgtgcacaagctcccactgcctcatcatcctacctccgtgcacctctgtacacttctattttttttccatttctatgctgaaccctctggcaccaaccgaggccaacacctccattggacccgaccctcttgttcactcaagcacatagctccaaaaatccttattttgcaaggttttctctttcatttgctccatcagcaaatggaataacctcttagccccatgtctaccttgctacccttactacaaaactggatgtgaatgccgaaaccctgtctctaccaaaaaatataaaaattagccaggtgtggtggtgcatgcctatagttccagctactcaggaggctgaggcacaagaatggcttaaaaccgggagagagaggttgcagtccagcctgggtgacagagtgagactcggtctcaaaaaa

SEQ ID NO: 13206 - DNA, 4087 bp, Homo sapiens
  source 1..4087: mol_type = unassigned DNA
ttttatcagagtcccatacctcacgggtattttctcaatcagtgaacacctcaagtactagcccatgtgttttgagtaaaaagggctcctttcaacgaggatccccttctagaggctttgactaaccagtctcttggcacccttagaatgaagttgagagcgtcacagggatgcttaacgaggccgaggggaaggccattaagctggccaaggacgtggcgtccctcagttcccagctccaggacacccaggagctgcttcaagaagaaacccggcagaagctcaacgtgtctacgaagctgcgccagctggaggaggagcggaacagcctgcaagaccagctggacgaggagatggaggccaagcagaacctggagcgccacatctccactctcaacatccagctctccgactcgaagaagaagctgcaggactttgccagcaccgtggaagctctggaagaggggaagaagaggttccagaaggagatcgagaacctcacccagcagtacgaggagaaggcggccgcttatgataaactggaaaagaccaagaacaggcttcagcaggagctggacgacctggttgttgatttggacaaccagcggcaactcgtgtccaacctggaaaagaagcagaggaaatttgatcagttgttagccgaggagaaaaacatctcttccaaatacgcggatgagagggacagagctgaggcagaagccagggagaaggaaaccaaggccctgtccctggctcgggcccttgaagaggccttggaagccaaagaggaactcgagcggaccaacaaaatgctcaaagccgaaatggaagacctggtcagctccaaggatgacgtgggcaagaacgtccatgagctggagaagtccaagcgggccctggagacccagatggaggagatgaagacgcagctggaagagctggaggacgagctgcaagccacggaggacgccaaactgcggctggaagtcaacatgcaggcgctcaagggccagttcgaaagggatctccaagcccgggacgagcagaatgaggagaagaggaggcaactgcagagacagcttcacgagtatgagacggaactggaagacgagcgaaagcaacgtgccctggcagctgcagcaaagaagaagctggaaggggacctgaaagacctggagcttcaggccgactctgccatcaaggggagggaggaagccatcaagcagctacgcaaactgcaggctcagatgaaggactttcaaagagagctggaagatgcccgtgcctccagagatgagatctttgccacagccaaagagaatgagaagaaagccaagagcttggaagcagacctcatgcagctacaagaggacctcgccgccgctgagagggctcgcaaacaagcggacctcgagaaggaggaactggcagaggagctggccagtagcctgtcgggaaggaacgcactccaggacgagaagcgccgcctggaggcccggatcgcccagctggaggaggagctggaggaggagcagggcaacatggaggccatgagcgaccgggtccgcaaagccacacagcaggccgagcagctcagcaacgagctggccacagagcgcagcacggcccagaagaatgagagtgcccggcagcagctcgagcggcagaacaaggagctccggagcaagctccacgagatggagggggccgtcaagtccaagttcaagtccaccatcgcggcgctggaggccaagattgcacagctggaggagcaggtcgagcaggaggccagagagaaacaggcggccaccaagtcgctgaagcagaaagacaagaagctgaaggaaatcttgctgcaggtggaggacgagcgcaagatggccgagcagtacaaggagcaggcagagaaaggcaatgccagggtcaagcagctcaagaggcagctggaggaggcagaggaggagtcccagcgcatcaacgccaaccgcaggaagctgcagcgggagctggatgaggccacggagagcaacgaggccatgggccgcgaggtgaacgcactcaagagcaagctcaggtgaggagcccgtggcccgggaggaccccgtctctcaggccagagaaaagcactgggggctcgggctcctttcggcctgcaaatgccccttgtgcccacagccgccactcccttctgtggtttattcctgcttctccttaatcactaagcttagtgtgggccaggcactgagatcagacccgggccctgccttgcctggtagcagctaaccttctagatcctttaacgatcgaccgtctcccatccggtcctccggctgaggaggaggaagaggctatccccactgtctcctccagcccctccttcattgcatcactgagtcttcacgacatccattgaagctgcaacaccaccccccgccacttcacctccttcctgacatgctctgctcctcctttctccccctcagcactgctgccatctgggctgcattattctcgggtatgggggctgtccgacattccccatcagaaggaaaaagatccctgaaaagtagcaggtgcttacatttctggcctctacccaccggctgcagtagtcccccaccaccctgcaatgtgacaaccaaaaatgtctctagatgttgccagaagtcctctagagatgggagggtacgactgccaccccgctgagaattcctgctgtcactggagtgggggctgttttctctcccatgcctctggtaccttgggggtcccccctgctcccaagggctgcttccaccaccctgtccatccatcccgattggctcccaggaggttttagctccgggcttcctgtctcccacaccactcctcacagttctccatgatttcaacatccaggtgggcgacgcagcctctcggttccttgaccctctgggtgatcctgctgcttctaccgggccaaccagtactcctaggagccctcacaatttgaccctcaggcatcccattgtctgcctggtgccacctttctttggctctgtccccaacggggtcttcactccattaatgccatcagcctctgacccagctccaaaccagctgtctagtaacccccgtcgcgcatcctcaacatccggttccccctcttgcattgctgcaatcatttggtgaaagcacaacccaaatgaaactcaagcttggctgggcacgggactcacacctataatcccagcactttgggaggccaaggcaggtgaatcgctttgagctcaggagttcaagagcagcaagaccccatctctacaacaaacaaacaaaaatcagccaggtgggatggcgcaaacctaaaatcccagctactcaggaggctgaggtgggacgatcagtggagccccagaggtcaaggctgcagtgagccatgatctagccaatgcacttaccctggatggacagagtgagaccctgtctcaaaaaacccaaaacccactctccaccttttcccacagagcaggccttgctcaggggtcctcccacacccctccctcatcttctcactctctgctgcttttcactttttctttgaacttatgatcgctcctccccattctctctcagctggggaccttacttcctacttaactcaaaagcagaaatgatcatgaaacgtgcacaagctcccactgcctcatcatcctacctccgtgcacctctgtacacttctattttttttccatttctatgctgaaccctctggcaccaaccgaggccaacacctccattggacccgaccctcttgttcactcaagcacatagctccaaaaatccttattttgcaaggttttctctttcatttgctccatcagcaaatggaataacctcttagccccatgtctaccttgctacccttactacaaaactggatgtgaatgccgaaaccctgtctctaccaaaaaatataaaaattagccaggtgtggtggtgcatgcctatagttccagctactcaggaggctgaggcacaagaatggcttaaaaccgggagagagaggttgcagtccagcctgggtgacagagtgagactcggtctc

SEQ ID NO: 13207 - DNA, 549 bp, Homo sapiens
  source 1..549: mol_type = unassigned DNA
gtgctctgatttagagctcctcagtcttgccactgttgatattttggggtgactaattctgttgtgggggctgtcctgtgcactgtagggtgtttagcagtatccctggcctctacccactggatgccagaggcaccccccaccccagctgtgacaatcagcagtgtctccagacaatatcccctagtggggatcggtgggggcaacattgtccctggctcggaaccactgatcgaatttattatgacaacatatccctttgccacaaaaacaaatgatgggctaaccgtgtgtgtgcaggtgaagccactgctgcaggtgacacggcaggaggaggagatgcaggccaaggaggatgaactgcagaagaccaaggagcggcagcagaaggcagagaatgagcttaaggagctggaacagaagcactcgcagctgaccgaggagaagaacctgctacaggaacagctgcaggcagagacagagctgtatgcagaggctgaggagatgcgggtgcggctggcggccaagaagcaggagctggaggagata

SEQ ID NO: 13208 - DNA, 3450 bp, Homo sapiens
  source 1..3450: mol_type = unassigned DNA
ttctctgggagctacaaaaaggaggatgtgtggacaaatcaaaacagaaacaaatagcagcttcctgctttgtcctgtagaccaggtaccctgatgccttcctagcatgcggaggaatgaggaggaagccatgcccatccttgtcccctctagacactttcccggctcctgtccagcccagccctgatgcctggaaaaataaggaagggaaagcaggaggggaggacaaggagaaaaactcccagaatccagggcctggaggcctcggggcccaactgcagccgccatgttttagggctaggccaagagcagctcgtttgctttcccagcttaacttaccacattggccctttcctgccatgattaatcacgtgaccgcgtttgtgcaaaggcatcccggcagagggggccggtgggctgtgtacagtctcagcttcctttaacccaatgaatggagctcaggcaacctgctttgaagctttattccgcagtccgctaagaggattcctggtgggttttgtgcattccttacttgtctgctgtagaagacttcagaaaaccagtcctgagaaagaaaaaattgcaacttaaaaaaaattgcactaaaataattagaaggaggcttgtagtggtttaacttgaagaaggctgcttgttaaacatgaacagcagcacgactgccatgtacagtgggacaggtggtgcactgcacaactccggggggcaccattcatcatgatgtaaatgacatcaccgacattgtgcaaggcagtggctttgagtggcagtgatgttgcacagatgagcaggccctggtcttgaaaaaagtgaccttcctagggagcagatgtcctagctattagagagctcagacagttgcttctcttctgaaatcctcctgtaaatctgaacattagcatcagggtctaagaggaggtaggagataggagagaacctgtgggttaagggcagagttttgtgacaacatccatccaaggtagaactgtcaggacctaggttgctttctccaataactagatgtgaatgaattttagggagagctggaaaagcagcttctacaagcaaacccgattctggaggctttcggcaacgccaaaacagtgaagaacgacaactcctcacgattcggcaaattcatccgcatcaacttcgacgtcacgggttacatcgtgggagccaacattgagacctatctgctagaaaaatcacgggcaattcgccaagccagagacgagaggacattccacatcttttactacatgattgctggagccaaggagaagatgagaagtgacttgcttttggagggcttcaacaactacaccttcctctccaatggctttgtgcccatcccagcagcccaggatgatgagatgttccaggaaaccgtggaggccatggcaatcatgggtttcagcgaggaggagcagctatccatattgaaggtggtatcatcggtcctgcagcttggaaatatcgtcttcaagaaggaaagaaacacagaccaggcgtccatgccagataacacagctgctcagaaagtttgccacctcatgggaattaatgtgacagatttcaccagatccatcctcactcctcgtatcaaggttgggcgagatgtggtacagaaagctcagacaaaagaacaggctgactttgctgtagaggctttggccaaggcaacatatgagcgccttttccgctggatactcacccgcgtgaacaaagccctggacaagacccatcggcaaggggcttccttcctggggatcctggatatagctggatttgagatctttgaggtgaactccttcgagcagctgtgcatcaactacaccaacgagaagctgcagcagctcttcaaccacaccatgttcatcctggagcaggaggagtaccagcgcgagggcatcgagtggaacttcatcgactttgggctggacctacagccctgcatcgagctcatcgagcgaccgaacaaccctccaggtgtgctggccctgctggacgaggaatgctggttccccaaagccacggacaagtctttcgtggagaagctgtgcacggagcagggcagccaccccaagttccagaagcccaagcagctcaaggacaagactgagttctccatcatccattatgctgggaaggtggactataatgcgagtgcctggctgaccaagaatatggacccgctgaatgacaacgtgacttccctgctcaatgcctcctccgacaagtttgtggccgacctgtggaaggacgtggaccgcatcgtgggcctggaccagatggccaagatgacggagagctcgctgcccagcgcctccaagaccaagaagggcatgttccgcacagtggggcagctgtacaaggagcagctgggcaagctgatgaccacgctacgcaacaccacgcccaacttcgtgcgctgcatcatccccaaccacgagaagagggtgaggcccgccgcccagaccctggggctcccagaagccagggctgtcccaagcggtcacagcgtccccagggcgccctctgcccccacctaccccgaggaccccattttccatgtggggaaggctatctgaatctcagacccattccccatccctggaggaaaaggaggaagggaggatgcatccagagacttttcagttgtggagttgctgtgcaggtcatccagccactcattcattcattatcccaggaagtattcactgggctctgccctgtcctgggtgctggggagcagtgttagaaaaattgtagcccttccctgtgggtttctcataatctggtgcaggcatcttcagcttggggcgattgtgtcctctatatggacatgctacagacatttttggttgtcacaaccaggagggggctgttagtcagcatctagtgggtaggggccagggatgccctaagcattgtacaatgcacaggatggtccctcaacccccagcacagaatccctacaagatgccagtagtgctgaggttatgggagacacggggagaggtaaacatacagctgatgatggtgatggaatgtggtcagttaggagaacaccaaagagccagggctcctcccacagcctcaggactcagagaaagcttctggtgaacttgaacgttaagaatgtgtggccatcaacttggtgacatggaaggcagggtggggcctaggataagcagggggcctaggataagcagagggcccaggctaagcaagagtgtggaggtgagaagtgaaggaactaggtaagaaaatgctagatagtgtccaggcgtgttgctcacgcctgtaatcccagctactcaggaggctgagaaacaaaaatctgttgaacccaggaggcggaggttgcagtgagctgagattgcaccacagcattccagcctgggcagcagagcgagactccatctt

SEQ ID NO: 13209 - DNA, 979 bp, Homo sapiens
  source 1..979: mol_type = unassigned DNA
actcctgtaatcccagcactttgggaggctgaggtgggaggattgcttgagtgcagcagtctgaggccaacctggacaacacagtgagatcctatctctacaaaaaaaaatttaaaaattagccagatatggtggtgcatgcctgtagtcctagctgcttgggagggtgaggtcatggggaaaaggggattgcttgagcccaggagttcaaggttacagtgagctgtgattgcaccactgcactccagccctcgctgacagagcaaaaccttgtctctaataaataaataagtttttttaaatagggatagccatgatggactacggtcattgcaaaagccgaatgaaattgatctgtgaacatgttttacacgttctgttgctgtcaggcctggggtggtttcagctcagcagatgttggttccgcctgacaacttgacctgtggggttctgagtgttcgcaagaatctccccgccccacctcccatcctctgtaccatctgcctcctgcttgcccacagcatggggttaacggctgaagttgggcagcaaagcctgaactgtgttttcctgttggcagggcaaattcatccgcatcaacttcgacgtcacgggttacatcgtgggagccaacattgagacctatctgctagaaaaatcacgggcaattcgccaagccagagacgagaggacattccacatcttttactacatgattgctggagccaaggagaagatgagaagtaagtgactagcaatgacatgtgattggatggcttgagccttccctttcatcagaatccggggttaagggattggctattaaaacagtctcagatcctgccagaaaggaccatgtctgtgagtgacatatgaacagttcttcatctcctcccaatgagtgagtgtggcttgtgttcagtcattctcatttactgagcacctactatgtgacatagtagccatcaactccaattag

SEQ ID NO: 13210 - DNA, 2353 bp, Homo sapiens
  source 1..2353: mol_type = unassigned DNA
gagatttggacgctccggcctgggaggtgcgtcagatccgagctcgccatccagtttcctctccactagtccccccagttggagatctgggaccaacaaggcaccatggcgcagaagggccaactcagtgacgatgagaagttcctctttgtggacaaaaacttcatcaacagcccagtggcccaggctgactgggccgccaagagactcgtctgggtcccctcggagaagcagggcttcgaggcagccagcattaaggaggagaagggggatgaggtggttgtggagctggtggagaatggcaagaaggtcacggttgggaaagatgacatccagaagatgaacccacccaagttctccaaggtggaggacatggcggagctgacgtgcctcaacgaagcctccgtgctacacaacctgagggagcggtacttctcagggctaatatatacgtactctggcctcttctgcgtggtggtcaacccctataaacacctgcccatctactcggagaagatcgtcgacatgtacaagggcaagaagaggcacgagatgccgcctcacatctacgccatcgcagacacggcctaccggagcatgcttcaagatcgggaggaccagtccattctatgcacaggcgagtctggagccgggaaaaccgaaaacaccaagaaggtcattcagtacctggccgtggtggcctcctcccacaagggcaagaaagacacaagtatcacggtgagtggcagttcccaatcagaggccatgatttagccaaccggtctccagcttgcagcccaaccgagatacaaacagaacatcattgcaagaactcaggccccatctgactacccctcccctgaagactcaaagagggaccgtctttttggcgagcaggcctgttgagtgtgggtgatttcttggctcagctagaagcatccctccagaagggggcccgttttgtgaaatgagaataagccctttccttccatagcgagatcttcctccacgtcggggcttctcagtggtggcactgatgtcattttggaccagataactcttccttggaggggcttccctgtggctcgtagaatgtttcacaacatccctggcctcgacccgccagatgccgacagcccccttccctccagttgtgacaaccaaaaatatctctagacattgtcagatgttccctggggtgggacagttgcccttgattgagaagcactcctttcatgaatctctgtaacgtcccaggggttaaggtaccttttgggttcccggattcctccacgtgtccccctgtccctgggatggagatgctggtatcactcggcccgtgggcttcagtgcaatgccattcagtaactgtggattgagcacctactgtatgccaggaaccacttggggtggggacctggggataagtctgagagatgctgttattctcttctctgagcttccagacctgtggaagagcatgtagttgtcaaagaatccctcaaataaacagatgatgacacggtatgactaagagcttgggaggaaaagaagagcaggtttctagagtcatcacctctagggcccatccttctcttcctcctcgtgtgtcagccctgccccatctatcccacaggagggggcacgtggtagggccgctaggactggccggtgcctccgtctgcaggtttgtgggtgggaagatggtaggatggagatctgaccacggcatggggtgtctccagtgttcgccattccagatgtcactttgcgtcctcagaggggactctggggcagccaccatggccggcttgtctggaggcccttggagatctaggatgggcgctggtcgtggctttggagaactttccttctccaaacaaatgcaggaaactcaagattcagcatcctagaattgtctctggcaagttggtttccagccatagtgagtgggaacaatggccccagaggctgtgtggcagtttaaacacagtttccactgccttccctttccctaaagagtaaacacaggagataatactttctaacaactcatcgttatcaagggcctactatgtgctgcttgttttggctgcatgcgtaaacacatctcagacattgtctcactggatactgttttaaggagcctaatgtggccccagtaattatgaaaacctttgaaatgtctggatctctaagaaattagaaaaaggagggaatggctgagcatgggggctcatgcctgtaatctgtgttttgggaggccaaggtgggaggatggtctgagcccaggagttcaggaccagcctgggtgacatagtgagaccctgtctgtaccaaaaaaaaaaaaaaa

SEQ ID NO: 13211 - DNA, 6847 bp, Homo sapiens; identical to SEQ ID NO: 13201
  source 1..6847: mol_type = unassigned DNA

SEQ ID NO: 13212 - DNA, 6886 bp, Homo sapiens; identical to SEQ ID NO: 13200
  source 1..6886: mol_type = unassigned DNA

SEQ ID NO: 13213 - DNA, 541 bp, Homo sapiens; identical to SEQ ID NO: 13202
  source 1..541: mol_type = unassigned DNA

SEQ ID NO: 13214 - DNA, 6272 bp, Homo sapiens; identical to SEQ ID NO: 13203
  source 1..6272: mol_type = unassigned DNA

SEQ ID NO: 13215 - DNA, 6029 bp, Homo sapiens; identical to SEQ ID NO: 13204
  source 1..6029: mol_type = unassigned DNA

SEQ ID NO: 13216 - DNA, 5725 bp, Homo sapiens; identical to SEQ ID NO: 13205
  source 1..5725: mol_type = unassigned DNA

SEQ ID NO: 13217 - DNA, 4087 bp, Homo sapiens; identical to SEQ ID NO: 13206
  source 1..4087: mol_type = unassigned DNA

SEQ ID NO: 13218 - DNA, 549 bp, Homo sapiens; identical to SEQ ID NO: 13207
  source 1..549: mol_type = unassigned DNA

SEQ ID NO: 13219 - DNA, 3450 bp, Homo sapiens; identical to SEQ ID NO: 13208
  source 1..3450: mol_type = unassigned DNA

SEQ ID NO: 13220 - DNA, 979 bp, Homo sapiens; identical to SEQ ID NO: 13209
  source 1..979: mol_type = unassigned DNA

SEQ ID NO: 13221 - DNA, 2353 bp, Homo sapiens; identical to SEQ ID NO: 13210
  source 1..2353: mol_type = unassigned DNA

SEQ ID NO: 13222 - DNA, 6137 bp, Homo sapiens
  source 1..6137: mol_type = unassigned DNA
gacagatgtccctgaaggcccgagggacaccagccgctatgccaggctccaaagaacccgaggcaaaccaacgctggtcccggtctttgaggactccccggcccagtgagggagaccgacagaccatggcagccgtgaccatgtcggtgcccgggcggaaggcgccccccaggccgggcccagtgcccgaggcggcccagccgttcctgttcacgccccgcgggcccagcgcgggtggcgggcctggctcgggcacctccccgcaggtggagtggacggcccggcgtctcgtgtgggtgccttcggagcttcacgggttcgaggcggcggcgctgcgggacgaaggcgaggaggaggcggaggtggagctggcggagagcgggaggcggctgcgactgccgcgggaccagatccagcgcatgaacccgcccaagttcagcaaggccgaggacatggccgagctgacctgcctcaacgaggcctcggtcctgcacaacctccgggagcggtactactccggcctcatctacacgtactccggccttttctgtgtggtcatcaacccgtacaagcagcttcccatctacacagaagccattgtggagatgtaccggggcaagaagcgccacgaggtgccaccccacgtgtacgcagtgaccgagggggcctatcggagcatgctgcaggatcgtgaggaccagtccattctctgcactggagagtctggagctgggaagacggaaaacaccaagaaggtcatccagtacctcgcccacgtggcgtcgtctccaaagggcaggaaggagccgggtgtccccgcctccgtcagcaccgtgtcttatggtgagctggagcggcagctgcttcaggccaaccccatcctagaggcctttggcaatgccaagacagtgaagaatgacaactcctcccgattcggcaaattcatccgcatcaactttgatgttgccgggtacatcgtgggcgccaacattgagacctacctgctggagaagtcgcgggccatccgccaggccaaggacgagtgcagcttccacatcttctaccagctgctggggggcgctggagagcagctcaaagccgacctcctcctcgagccctgctcccactaccggttcctgaccaacgggccgtcatcctctcccggccaggagcgggaactcttccaggagacgctggagtcgctgcgggtcctgggattcagccacgaggaaatcatctccatgctgcggatggtctcagcagttctccagtttggcaacattgccttgaagagagaacggaacaccgatcaagccaccatgcctgacaacacagctgcacagaagctctgccgcctcttgggactgggggtgacggatttctcccgagccttgctcacccctcgcatcaaagttggccgagactatgtgcagaaagcccagactaaggaacaggctgacttcgcgctggaggccctggccaaggccacctacgagcgcctcttccgctggctggttctgcgcctcaaccgggccttggaccgcagcccccgccaaggcgcctccttcctgggcatcctggacatcgcgggctttgagatcttccagctgaactccttcgagcagctctgcatcaactacaccaacgagaagctgcagcagctcttcaaccacaccatgttcgtgctggagcaggaggagtaccagcgtgagggcatcccctggaccttcctcgactttggcctcgacctgcagccctgcatcgacctcatcgagcggccggccaacccccctggactcctggccctgctggatgaggagtgctggttcccgaaggccacagacaagtcgtttgtggagaaggtagcccaggagcagggcggccaccccaagttccagcggccgaggcacctgcgggatcaggccgacttcagtgttctccactacgcgggcaaggtcgactacaaggccaacgagtggctgatgaaaaacatggaccctctgaatgacaacgtcgcagccttgctccaccagagcacagaccggctgacggcagagatctggaaagacgtggagggcatcgtggggctggaacaggtgagcagcctgggcgacggcccaccaggtggccgcccccgtcggggtatgttccggacagtgggacagctctacaaggagtccctgagccgcctcatggccacactcagcaacaccaaccccagttttgtccgctgcattgtccccaaccacgagaagagggccgggaagctggagccacggctggtgctggaccagcttcgctgcaacggggtcctggagggcatccgcatctgtcgccagggcttccccaaccgcatcctcttccaggagttccggcagcgatacgagatcctgacacccaatgccatccccaagggcttcatggatgggaagcaggcctgtgaaaagatgatccaggcgctggaactggaccccaacctctaccgcgtgggacagagcaagatcttcttccgggctggggtcctggcccagctggaagaggagcgagacctgaaggtcaccgacatcatcgtctccttccaggcagctgcccggggatacctggctcgcagggccttccagaagcgccagcagcagcagagcgccctgagggtgatgcagcggaactgcgcggcctacctcaagctgagacactggcagtggtggcggctgtttaccaaggtgaagccactgctgcaggtgacgcggcaggatgaggtgctgcaggcacgggcccaggagctgcagaaagtgcaggagctacagcagcagagcgcccgcgaagttggggagctccagggccgagtggcacagctggaagaggagcgcgcccgcctggcagagcaattgcgagcagaggcagaactgtgtgcagaggccgaggagacgcgggggaggctggcagcccgcaagcaggagctggagctggtggtgtcagagctggaggctcgcgtgggcgaggaggaggagtgcagccgtcaaatgcaaaccgagaagaagaggctgcagcagcacatacaggagctagaggcccaccttgaggctgaggagggtgcgcggcagaagctgcagctggagaaggtgacgacagaggcaaaaatgaagaaatttgaagaggacctgctgctcctggaagaccagaattccaagctgagcaaggagcggaagctgctggaagatcgtctggccgagttctcatcccaggcagctgaggaggaggagaaggtcaagagcctcaataagctacggctcaaatatgaggccacaatcgcagacatggaggaccgcctacggaaggaggagaagggtcgccaggagctggagaagctgaagcggaggctggatggggagagctcagagctgcaggagcagatggtggagcagcaacagcgggcagaggagctgcgggcccagctgggccggaaggaggaggagctgcaggctgccctggccagggcagaagacgagggtggggcccgggcccagctgctgaaatccctgcgggaggctcaagcagccctggccgaggcccaggaggacctggagtctgagcgtgtggccaggaccaaggcggagaagcagcgccgggacctgggcgaggagctggaggcgctgcggggcgagctggaggacacgctggactccaccaacgcacagcaggagctccggtccaagagggaacaggaggtgacggagctgaagaagactctggaggaggagactcgcatccacgaggcggcagtgcaggagctgaggcagcgccacggccaggccctgggggagctggcggagcagctggagcaggcccggaggggcaaaggtgcatgggagaagacccggctggccctggaggccgaggtgtccgagctgcgggcagaactgagcagcctgcagactgcacgtcaggagggtgagcagcggaggcgccgcctggagttacagctgcaggaggtgcagggccgggctggtgatggggagagggcacgagcggaggctgctgagaagctgcagcgagcccaggctgaactggagaatgtgtctggggcgctgaacgaggctgagtccaaaaccatccgtcttagcaaggagctgagcagcacagaagcccagctgcacgatgcccaggagctgctgcaggaggagaccagggcgaaattggccttggggtcccgggtgcgagccatggaggctgaggcagccgggctgcgtgagcagctggaggaggaggcagctgccagggaacgggcgggccgtgaactgcagactgcccaggcccagctttccgagtggcggcggcgccaggaggaggaggcaggggcactggaggcaggggaggaggcacggcgccgggcagcccgggaggccgaggccctgacccagcgcctggcagaaaagacagagaccgtggatcggctggagcggggccgccgccggctgcagcaggagctggacgacgccaccatggacctggagcagcagcggcagcttgtgagcaccctggagaagaagcagcgcaagtttgaccagcttctggcagaggagaaggcagctgtacttcgggcagtggaggaacgtgagcgggccgaggcagagggccgggagcgtgaggctcgggccctgtcactgacacgggcactggaggaggagcaggaggcacgtgaggagctggagcggcagaaccgggccctgcgggctgagctggaggcactgctgagcagcaaggatgacgtcggcaagagcgtgcatgagctggaacgagcctgccgggtagcagaacaggcagccaatgatctgcgagcacaggtgacagaactggaggatgagctgacagcggccgaggatgccaagctgcgtctggaggtgactgtgcaggctctcaagactcagcatgagcgtgacctgcagggccgtgatgaggctggtgaagagaggcggaggcagctggccaagcagctgagagatgcagaggtggagcgggatgaggagcggaagcagcgcactctggccgtggctgcccgcaagaagctggagggagagctggaggagctgaaggctcagatggcctctgccggccagggcaaggaggaggcggtgaagcagcttcgcaagatgcaggcccagatgaaggagctatggcgggaggtggaggagacacgcacctcccgggaggagatcttctcccagaatcgggaaagtgaaaagcgcctcaagggcctggaggctgaggtgctgcggctgcaggaggaactggccgcctcggaccgtgctcggcggcaggcccagcaggaccgggatgagatggcagatgaggtggccaatggtaaccttagcaaggcagccattctggaggagaagcgtcagctggaggggcgcctggggcagttggaggaagagctggaggaggagcagagcaactcggagctgctcaatgaccgctaccgcaagctgctcctgcaggtagagtcactgaccacagagctgtcagctgagcgcagtttctcagccaaggcagagagcgggcggcagcagctggaacggcagatccaggagctacggggacgcctgggtgaggaggatgctggggcccgtgcccgccacaagatgaccattgctgcccttgagtctaagttggcccaggctgaggagcagctagagcaagagaccagagagcgcatcctctctggaaagctggtgcgcagagctgagaagcggcttaaagaggtggtgctccaggtggaggaggagcggagggtggctgaccagctccgggaccagctggagaagggaaaccttcgagtcaagcagctgaagcggcagctggaggaggccgaggaggaggcatcccgggctcaggccggccgccggaggctgcagcgtgagctggaagatgtcacagagtcggccgagtccatgaaccgtgaagtgaccacactgaggaaccggcttcgacgcggccccctcaccttcaccacccgcacggtgcgccaggtcttccgactagaggagggcgtggcatccgacgaggaggcagaggaagcacagcctgggtctgggccatccccggagcctgaggggtccccaccagcccacccccagtga

SEQ ID NO: 13223 - DNA, 3046 bp, Homo sapiens
  source 1..3046: mol_type = unassigned DNA
cccaggccgaagcctcgggacggccctggaagccgaccatggcagccgtgaccatgtcggtgcccgggcggaaggcgccccccaggccgggcccagtgcccgaggcggcccagccgttcctgttcacgccccgcgggcccagcgcgggtggcgggcctggctcgggcacctccccgcaggtggagtggacggcccggcgtctcgtgtgggtgccttcggagcttcacgggttcgaggcggcggcgctgcgggacgaaggcgaggaggaggcggaggtggagctggcggagagcgggaggcggctgcgactgccgcgggaccagatccagcgcatgaacccgcccaagttcagcaaggccgaggacatggccgagctgacctgcctcaacgaggcctcggtcctgcacaacctccgggagcggtactactccggcctcatctacacgtactccggccttttctgtgtggtcatcaacccgtacaagcagcttcccatctacacagaagccattgtggagatgtaccggggcaagaagcgccacgaggtgccaccccacgtgtacgcagtgaccgagggggcctatcggagcatgctgcaggatcgtgaggaccagtccattctctgcactggagagtctggagctgggaagacggaaaacaccaagaaggtcatccagtacctcgcccacgtggcgtcgtctccaaagggcaggaaggagccgggtgtccccgcctccgtcagcaccgtgtcttatggtgagctggagcggcagctgcttcaggccaaccccatcctagaggcctttggcaatgccaagacagtgaagaatgacaactcctcccgattcggcaaattcatccgcatcaactttgatgttgccgggtacatcgtgggcgccaacattgagacctacctgctggagaagtcgcgggccatccgccaggccaaggacgagtgcagcttccacatcttctaccagctgctggggggcgctggagagcagctcaaagccgacctcctcctcgagccctgctcccactaccggttcctgaccaacgggccgtcatcctctcccggccaggagcgggaactcttccaggagacgctggagtcgctgcgggtcctgggattcagccacgaggaaatcatctccatgctgcggatggtctcagcagttctccagtttggcaacattgccttgaagagagaacggaacaccgatcaagccaccatgcctgacaacacagctgcacagaagctctgccgcctcttgggactgggggtgacggatttctcccgagccttgctcacccctcgcatcaaagttggccgagactatgtgcagaaagcccagactaaggaacaggctgacttcgcgctggaggccctggccaaggccacctacgagcgcctcttccgctggctggttctgcgcctcaaccgggccttggaccgcagcccccgccaaggcgcctccttcctgggcatcctggacatcgcgggctttgagatcttccagctgaactccttcgagcagctctgcatcaactacaccaacgagaagctgcagcagctcttcaaccacaccatgttcgtgctggagcaggaggagtaccagcgtgagggcatcccctggaccttcctcgactttggcctcgacctgcagccctgcatcgacctcatcgagcggccggccaacccccctggactcctggccctgctggatgaggagtgctggttcccgaaggccacagacaagtcgtttgtggagaaggtagcccaggagcagggcggccaccccaagttccagcggccgaggcacctgcgggatcaggccgacttcagtgttctccactacgcgggcaaggtcgactacaaggccaacgagtggctgatgaaaaacatggaccctctgaatgacaacgtcgcagccttgctccaccagagcacagaccggctgacggcagagatctggaaagacgtggagggcatcgtggggctggaacaggtgagcagcctgggcgacggcccaccaggtggccgcccccgtcggggtatgttccggacagtgggacagctctacaaggagtccctgagccgcctcatggccacactcagcaacaccaaccccagttttgtccgctgcattgtccccaaccacgagaagagggccgggaagctggagccacggctggtgctggaccagcttcgctgcaacggggtcctggagggcatccgcatctgtcgccagggcttccccaaccgcatcctcttccaggagttccggcagcgatacgagatcctgacacccaatgccatccccaagggcttcatggatgggaagcaggcctgtgaaaagatgatccaggcgctggaactggaccccaacctctaccgcgtgggacagagcaagatcttcttccgggctggggtcctggcccagctggaagaggagcgagacctgaaggtcaccgacatcatcgtctccttccaggcagctgcccggggatacctggctcgcagggccttccagaagcgccagcagcagcagagcgccctgagggtgatgcagcggaactgcgcggcctacctcaagctgagacactggcagtggtggcggctgtttaccaaggtgaagccactgctgcaggtgacgcggcaggatgaggtgctgcaggcacgggcccaggagctgcagaaagtgcaggagctacagcagcagagcgcccgcgaagttggggagctccagggccgagtggcacagctggaagaggagcgcgcccgcctggcagagcaattgcgagcagaggcagaactgtgtgcagaggccgaggagacgcgggggaggctggcagcccgcaagcaggagctggagctggtggtgtcagagctggaggctcgcgtgggcgaggaggaggagtgcagccgtcaaatgcaaaccgagaagaagaggctgcagcagcacatacaggagctagaggcccaccttgaggctgaggagggtgcgcggcagaagctgcagctggagaaggtgacgacagaggc

SEQ ID NO: 13224 - DNA, 6896 bp, Homo sapiens
  source 1..6896: mol_type = unassigned DNA
gaagcctcgggacggccctggaagccgaccatggcagccgtgaccatgtcggtgcccgggcggaaggcgccccccaggccgggcccagtgcccgaggcggcccagccgttcctgttcacgccccgcgggcccagcgcgggtggcgggcctggctcgggcacctccccgcaggtggagtggacggcccggcgtctcgtgtgggtgccttcggagcttcacgggttcgaggcggcggcgctgcgggacgaaggcgaggaggaggcggaggtggagctggcggagagcgggaggcggctgcgactgccgcgggaccagatccagcgcatgaacccgcccaagttcagcaaggccgaggacatggccgagctgacctgcctcaacgaggcctcggtcctgcacaacctccgggagcggtactactccggcctcatctacacgtactccggccttttctgtgtggtcatcaacccgtacaagcagcttcccatctacacagaagccattgtggagatgtaccggggcaagaagcgccacgaggtgccaccccacgtgtacgcagtgaccgagggggcctatcggagcatgctgcaggatcgtgaggaccagtccattctctgcactggagagtctggagctgggaagacggaaaacaccaagaaggtcatccagtacctcgcccacgtggcgtcgtctccaaagggcaggaaggagccgggtgtccccgcctccgtcagcaccgtgtcttatggtgagctggagcggcagctgcttcaggccaaccccatcctagaggcctttggcaatgccaagacagtgaagaatgacaactcctcccgattcggcaaattcatccgcatcaactttgatgttgccgggtacatcgtgggcgccaacattgagacctacctgctggagaagtcgcgggccatccgccaggccaaggacgagtgcagcttccacatcttctaccagctgctggggggcgctggagagcagctcaaagccgacctcctcctcgagccctgctcccactaccggttcctgaccaacgggccgtcatcctctcccggccaggagcgggaactcttccaggagacgctggagtcgctgcgggtcctgggattcagccacgaggaaatcatctccatgctgcggatggtctcagcagttctccagtttggcaacattgccttgaagagagaacggaacaccgatcaagccaccatgcctgacaacacagctgcacagaagctctgccgcctcttgggactgggggtgacggatttctcccgagccttgctcacccctcgcatcaaagttggccgagactatgtgcagaaagcccagactaaggaacaggctgacttcgcgctggaggccctggccaaggccacctacgagcgcctcttccgctggctggttctgcgcctcaaccgggccttggaccgcagcccccgccaaggcgcctccttcctgggcatcctggacatcgcgggctttgagatcttccagctgaactccttcgagcagctctgcatcaactacaccaacgagaagctgcagcagctcttcaaccacaccatgttcgtgctggagcaggaggagtaccagcgtgagggcatcccctggaccttcctcgactttggcctcgacctgcagccctgcatcgacctcatcgagcggccggccaacccccctggactcctggccctgctggatgaggagtgctggttcccgaaggccacagacaagtcgtttgtggagaaggtagcccaggagcagggcggccaccccaagttccagcggccgaggcacctgcgggatcaggccgacttcagtgttctccactacgcgggcaaggtcgactacaaggccaacgagtggctgatgaaaaacatggaccctctgaatgacaacgtcgcagccttgctccaccagagcacagaccggctgacggcagagatctggaaagacgaacatgggggcttccagcagttctctttccttggctccttcccaccgtcgcccccaggatctgcagagaggtgcagctctgctatttctccgccaggggtggagggcatcgtggggctggaacaggtgagcagcctgggcgacggcccaccaggtggccgcccccgtcggggtatgttccggacagtgggacagctctacaaggagtccctgagccgcctcatggccacactcagcaacaccaaccccagttttgtccgctgcattgtccccaaccacgagaagagggccgggaagctggagccacggctggtgctggaccagcttcgctgcaacggggtcctggagggcatccgcatctgtcgccagggcttccccaaccgcatcctcttccaggagttccggcagcgatacgagatcctgacacccaatgccatccccaagggcttcatggatgggaagcaggcctgtgaaaagatgatccaggcgctggaactggaccccaacctctaccgcgtgggacagagcaagatcttcttccgggctggggtcctggcccagctggaagaggagcgagacctgaaggtcaccgacatcatcgtctccttccaggcagctgcccggggatacctggctcgcagggccttccagaagcgccagcagcagcagagcgccctgagggtgatgcagcggaactgcgcggcctacctcaagctgagacactggcagtggtggcggctgtttaccaaggtgaagccactgctgcaggtgacgcggcaggatgaggtgctgcaggcacgggcccaggagctgcagaaagtgcaggagctacagcagcagagcgcccgcgaagttggggagctccagggccgagtggcacagctggaagaggagcgcgcccgcctggcagagcaattgcgagcagaggcagaactgtgtgcagaggccgaggagacgcgggggaggctggcagcccgcaagcaggagctggagctggtggtgtcagagctggaggctcgcgtgggcgaggaggaggagtgcagccgtcaaatgcaaaccgagaagaagaggctgcagcagcacatacaggagctagaggcccaccttgaggctgaggagggtgcgcggcagaagctgcagctggagaaggtgacgacagaggcaaaaatgaagaaatttgaagaggacctgctgctcctggaagaccagaattccaagctgagcaaggagcggaagctgctggaagatcgtctggccgagttctcatcccaggcagctgaggaggaggagaaggtcaagagcctcaataagctacggctcaaatatgaggccacaatcgcagacatggaggaccgcctacggaaggaggagaagggtcgccaggagctggagaagctgaagcggaggctggatggggagagctcagagctgcaggagcagatggtggagcagcaacagcgggcagaggagctgcgggcccagctgggccggaaggaggaggagctgcaggctgccctggccagggcagaagacgagggtggggcccgggcccagctgctgaaatccctgcgggaggctcaagcagccctggccgaggcccaggaggacctggagtctgagcgtgtggccaggaccaaggcggagaagcagcgccgggacctgggcgaggagctggaggcgctgcggggcgagctggaggacacgctggactccaccaacgcacagcaggagctccggtccaagagggaacaggaggtgacggagctgaagaagactctggaggaggagactcgcatccacgaggcggcagtgcaggagctgaggcagcgccacggccaggccctgggggagctggcggagcagctggagcaggcccggaggggcaaaggtgcatgggagaagacccggctggccctggaggccgaggtgtccgagctgcgggcagaactgagcagcctgcagactgcacgtcaggagggtgagcagcggaggcgccgcctggagttacagctgcaggaggtgcagggccgggctggtgatggggagagggcacgagcggaggctgctgagaagctgcagcgagcccaggctgaactggagaatgtgtctggggcgctgaacgaggctgagtccaaaaccatccgtcttagcaaggagctgagcagcacagaagcccagctgcacgatgcccaggagctgctgcaggaggagaccagggcgaaattggccttggggtcccgggtgcgagccatggaggctgaggcagccgggctgcgtgagcagctggaggaggaggcagctgccagggaacgggcgggccgtgaactgcagactgcccaggcccagctttccgagtggcggcggcgccaggaggaggaggcaggggcactggaggcaggggaggaggcacggcgccgggcagcccgggaggccgaggccctgacccagcgcctggcagaaaagacagagaccgtggatcggctggagcggggccgccgccggctgcagcaggagctggacgacgccaccatggacctggagcagcagcggcagcttgtgagcaccctggagaagaagcagcgcaagtttgaccagcttctggcagaggagaaggcagctgtacttcgggcagtggaggaacgtgagcgggccgaggcagagggccgggagcgtgaggctcgggccctgtcactgacacgggcactggaggaggagcaggaggcacgtgaggagctggagcggcagaaccgggccctgcgggctgagctggaggcactgctgagcagcaaggatgacgtcggcaagagcgtgcatgagctggaacgagcctgccgggtagcagaacaggcagccaatgatctgcgagcacaggtgacagaactggaggatgagctgacagcggccgaggatgccaagctgcgtctggaggtgactgtgcaggctctcaagactcagcatgagcgtgacctgcagggccgtgatgaggctggtgaagagaggcggaggcagctggccaagcagctgagagatgcagaggtggagcgggatgaggagcggaagcagcgcactctggccgtggctgcccgcaagaagctggagggagagctggaggagctgaaggctcagatggcctctgccggccagggcaaggaggaggcggtgaagcagcttcgcaagatgcaggcccagatgaaggagctatggcgggaggtggaggagacacgcacctcccgggaggagatcttctcccagaatcgggaaagtgaaaagcgcctcaagggcctggaggctgaggtgctgcggctgcaggaggaactggccgcctcggaccgtgctcggcggcaggcccagcaggaccgggatgagatggcagatgaggtggccaatggtaaccttagcaaggcagccattctggaggagaagcgtcagctggaggggcgcctggggcagttggaggaagagctggaggaggagcagagcaactcggagctgctcaatgaccgctaccgcaagctgctcctgcaggtagagtcactgaccacagagctgtcagctgagcgcagtttctcagccaaggcagagagcgggcggcagcagctggaacggcagatccaggagctacggggacgcctgggtgaggaggatgctggggcccgtgcccgccacaagatgaccattgctgcccttgagtctaagttggcccaggctgaggagcagctagagcaagagaccagagagcgcatcctctctggaaagctggtgcgcagagctgagaagcggcttaaagaggtggtgctccaggtggaggaggagcggagggtggctgaccagctccgggaccagctggagaagggaaaccttcgagtcaagcagctgaagcggcagctggaggaggccgaggaggaggcatcccgggctcaggccggccgccggaggctgcagcgtgagctggaagatgtcacagagtcggccgagtccatgaaccgtgaagtgaccacactgaggaaccggcttcgacgcggccccctcaccttcaccacccgcacggtgcgccaggtcttccgactagaggagggcgtggcatccgacgaggaggcagaggaagcacagcctgggtctgggccatccccggagcctgaggggtccccaccagcccacccccagtgaccctaccctgtccccagatgcactaacagatggggcccagcccccttcctccctggaccccacgggcccctgtcccaggaaccccgccctctgacttcttgccctttggaaatggtgcagcactctggcatttatcacccccacctgggtcccctgcaacctcccatcaaaggatgacccctaaacacagaggagcggggcaggcagggaggcaatgactggagctaccttgcttgttgggggactgggtacagttggcaagctgtgtttccatcagctccctgtcctcctttcttccctcgttattgatctatagacattaggaagggagtgagacggctcctccaccatcctcagccagtgcaacccattccctctgcttctctctctctctctctctctccctccctctccttccctaccctctcaccatctttcttggcctctctgagggtctctctgtgcatctttttaggaatctcgctctcactctctacgtagccactctccttcccccatttctgcgtccacccctgaactcctgagcgacagaagccccaggcctccaccagccttgaacccttgcaaaggggcaggacaaggggacccctctcactcctgctgctgcccatgctctgccctcccttctggttgctctgagggttcggagcttccctctgggactaaaggagtgtcctttaccctcccagcctccaggctctggcagaaataaactccaacccgactggaccatc

SEQ ID NO: 13225 - DNA, 5988 bp, Homo sapiens
  source 1..5988: mol_type = unassigned DNA
atggcagccgtgaccatgtcggtgcccgggcggaaggcgccccccaggccgggcccagtgcccgaggcggcccagccgttcctgttcacgccccgcgggcccagcgcgggtggcgggcctggctcgggcacctccccgcaggtggagtggacggcccggcgtctcgtgtgggtgccttcggagcttcacgggttcgaggcggcggcgctgcgggacgaaggcgaggaggaggcggaggtggagctggcggagagcgggaggcggctgcgactgccgcgggaccagatccagcgcatgaacccgcccaagttcagcaaggccgaggacatggccgagctgacctgcctcaacgaggcctcggtcctgcacaacctccgggagcggtactactccggcctcatctacacgtactccggccttttctgtgtggtcatcaacccgtacaagcagcttcccatctacacagaagccattgtggagatgtaccggggcaagaagcgccacgaggtgccaccccacgtgtacgcagtgaccgagggggcctatcggagcatgctgcaggatcgtgaggaccagtccattctctgcactggagagtctggagctgggaagacggaaaacaccaagaaggtcatccagtacctcgcccacgtggcgtcgtctccaaagggcaggaaggagccgggtgtccccggtgagctggagcggcagctgcttcaggccaaccccatcctagaggcctttggcaatgccaagacagtgaagaatgacaactcctcccgattcggcaaattcatccgcatcaactttgatgttgccgggtacatcgtgggcgccaacattgagacctacctgctggagaagtcgcgggccatccgccaggccaaggacgagtgcagcttccacatcttctaccagctgctggggggcgctggagagcagctcaaagccgacctcctcctcgagccctgctcccactaccggttcctgaccaacgggccgtcatcctctcccggccaggagcgggaactcttccaggagacgctggagtcgctgcgggtcctgggattcagccacgaggaaatcatctccatgctgcggatggtctcagcagttctccagtttggcaacattgccttgaagagagaacggaacaccgatcaagccaccatgcctgacaacacagctgcacagaagctctgccgcctcttgggactgggggtgacggatttctcccgagccttgctcacccctcgcatcaaagttggccgagactatgtgcagaaagcccagactaaggaacaggctgacttcgcgctggaggccctggccaaggccacctacgagcgcctcttccgctggctggttctgcgcctcaaccgggccttggaccgcagcccccgccaaggcgcctccttcctgggcatcctggacatcgcgggctttgagatcttccagctgaactccttcgagcagctctgcatcaactacaccaacgagaagctgcagcagctcttcaaccacaccatgttcgtgctggagcaggaggagtaccagcgtgagggcatcccctggaccttcctcgactttggcctcgacctgcagccctgcatcgacctcatcgagcggccggccaacccccctggactcctggccctgctggatgaggagtgctggttcccgaaggccacagacaagtcgtttgtggagaaggtagcccaggagcagggcggccaccccaagttccagcggccgaggcacctgcgggatcaggccgacttcagtgttctccactacgcgggcaaggtcgactacaaggccaacgagtggctgatgaaaaacatggaccctctgaatgacaacgtcgcagccttgctccaccagagcacagaccggctgacggcagagatctggaaagacgtggagggcatcgtggggctggaacaggtgagcagcctgggcgacggcccaccaggtggccgcccccgtcggggtatgttccggacagtgggacagctctacaaggagtccctgagccgcctcatggccacactcagcaacaccaaccccagttttgtccgctgcattgtccccaaccacgagaagagggccgggaagctggagccacggctggtgctggaccagcttcgctgcaacggggtcctggagggcatccgcatctgtcgccagggcttccccaaccgcatcctcttccaggagttccggcagcgatacgagatcctgacacccaatgccatccccaagggcttcatggatgggaagcaggcctgtgaaaagatgatccaggcgctggaactggaccccaacctctaccgcgtgggacagagcaagatcttcttccgggctggggtcctggcccagctggaagaggagcgagacctgaaggtcaccgacatcatcgtctccttccaggcagctgcccggggatacctggctcgcagggccttccagaagcgccagcagcagcagagcgccctgagggtgatgcagcggaactgcgcggcctacctcaagctgagacactggcagtggtggcggctgtttaccaaggtgaagccactgctgcaggtgacgcggcaggatgaggtgctgcaggcacgggcccaggagctgcagaaagtgcaggagctacagcagcagagcgcccgcgaagttggggagctccagggccgagtggcacagctggaagaggagcgcgcccgcctggcagagcaattgcgagcagaggcagaactgtgtgcagaggccgaggagacgcgggggaggctggcagcccgcaagcaggagctggagctggtggtgtcagagctggaggctcgcgtgggcgaggaggaggagtgcagccgtcaaatgcaaaccgagaagaagaggctgcagcagcacatacaggagctagaggcccaccttgaggctgaggagggtgcgcggcagaagctgcagctggagaaggtgacgacagaggcaaaaatgaagaaatttgaagaggacctgctgctcctggaagaccagaattccaagctgagcaaggagcggaagctgctggaagatcgtctggccgagttctcatcccaggcagctgaggaggaggagaaggtcaagagcctcaataagctacggctcaaatatgaggccacaatcgcagacatggaggaccgcctacggaaggaggagaagggtcgccaggagctggagaagctgaagcggaggctggatggggagagctcagagctgcaggagcagatggtggagcagcaacagcgggcagaggagctgcgggcccagctgggccggaaggaggaggagctgcaggctgccctggccagggcagaagacgagggtggggcccgggcccagctgctgaaatccctgcgggaggctcaagcagccctggccgaggcccaggaggacctggagtctgagcgtgtggccaggaccaaggcggagaagcagcgccgggacctgggcgaggagctggaggcgctgcggggcgagctggaggacacgctggactccaccaacgcacagcaggagctccggtccaagagggaacaggaggtgacggagctgaagaagactctggaggaggagactcgcatccacgaggcggcagtgcaggagctgaggcagcgccacggccaggccctgggggagctggcggagcagctggagcaggcccggaggggcaaaggtgcatgggagaagacccggctggccctggaggccgaggtgtccgagctgcgggcagaactgagcagcctgcagactgcacgtcaggagggtgagcagcggaggcgccgcctggagttacagctgcaggaggtgcagggccgggctggtgatggggagagggcacgagcggaggctgctgagaagctgcagcgagcccaggctgaactggagaatgtgtctggggcgctgaacgaggctgagtccaaaaccatccgtcttagcaaggagctgagcagcacagaagcccagctgcacgatgcccaggagctgctgcaggaggagaccagggcgaaattggccttggggtcccgggtgcgagccatggaggctgaggcagccgggctgcgtgagcagctggaggaggaggcagctgccagggaacgggcgggccgtgaactgcagactgcccaggcccagctttccgagtggcggcggcgccaggaggaggaggcaggggcactggaggcaggggaggaggcacggcgccgggcagcccgggaggccgaggccctgacccagcgcctggcagaaaagacagagaccgtggatcggctggagcggggccgccgccggctgcagcaggagctggacgacgccaccatggacctggagcagcagcggcagcttgtgagcaccctggagaagaagcagcgcaagtttgaccagcttctggcagaggagaaggcagctgtacttcgggcagtggaggaacgtgagcgggccgaggcagagggccgggagcgtgaggctcgggccctgtcactgacacgggcactggaggaggagcaggaggcacgtgaggagctggagcggcagaaccgggccctgcgggctgagctggaggcactgctgagcagcaaggatgacgtcggcaagagcgtgcatgagctggaacgagcctgccgggtagcagaacaggcagccaatgatctgcgagcacaggtgacagaactggaggatgagctgacagcggccgaggatgccaagctgcgtctggaggtgactgtgcaggctctcaagactcagcatgagcgtgacctgcagggccgtgatgaggctggtgaagagaggcggaggcagctggccaagcagctgagagatgcagaggtggagcgggatgaggagcggaagcagcgcactctggccgtggctgcccgcaagaagctggagggagagctggaggagctgaaggctcagatggcctctgccggccagggcaaggaggaggcggtgaagcagcttcgcaagatgcaggcccagatgaaggagctatggcgggaggtggaggagacacgcacctcccgggaggagatcttctcccagaatcgggaaagtgaaaagcgcctcaagggcctggaggctgaggtgctgcggctgcaggaggaactggccgcctcggaccgtgctcggcggcaggcccagcaggaccgggatgagatggcagatgaggtggccaatggtaaccttagcaaggcagccattctggaggagaagcgtcagctggaggggcgcctggggcagttggaggaagagctggaggaggagcagagcaactcggagctgctcaatgaccgctaccgcaagctgctcctgcaggtagagtcactgaccacagagctgtcagctgagcgcagtttctcagccaaggcagagagcgggcggcagcagctggaacggcagatccaggagctacggggacgcctgggtgaggaggatgctggggcccgtgcccgccacaagatgaccattgctgcccttgagtctaagttggcccaggctgaggagcagctagagcaagagaccagagagcgcatcctctctggaaagctggtgcgcagagctgagaagcggcttaaagaggtggtgctccaggtggaggaggagcggagggtggctgaccagctccgggaccagctggagaagggaaaccttcgagtcaagcagctgaagcggcagctggaggaggccgaggaggaggcatcccgggctcaggccggccgccggaggctgcagcgtgagctggaagatgtcacagagtcggccgagtccatgaaccgtgaagtgaccacactgaggaaccggcttcgacgcggccccctcaccttcaccacccgcacggtgcgccaggtcttccgactagaggagggcgtggcatccgacgaggaggcagaggaagcacagcctgggtctgggccatccccggagcctgaggggtccccaccagcccacccccagtga

SEQ ID NO: 13226 - DNA, 4039 bp, Homo sapiens
  source 1..4039: mol_type = unassigned DNA
ttttacatatgatgctatcatggctccatgttaatttttgtgaatataaatatccaagtattccaacactgctctccactgacttgtttttgcatatctattgaaagtcatttttcttcttcttcttctcctccttctttttcttcttcttcttctttttttttttttttttgcccaggctggagtgcagtggcgtgatcttggcttgctgcaacttctgcttcccgggttcaagcaattctcccacctcagcctcccgagtggcttggattacaggtgtgcgccaccacacctggctaatttttgtatttttagtagagatggggtttcaccatgttggccaggtggtcttgaactcctgacttcaggcgatctgcctgcctcagcctcccaatatgctggaattacaagcataagccactgcaccagccttttcttcttatttgaagttattttgcctcttctagttcctttgcatttccgtatgtattttagaatcagtttgtcaatttctaccccaaaacaaaaagccttccaatttggaactgtgttgaatctatacaacggttttggaagaactgacatcataacaatattgagttttctcaccgaggaagagggtatatacgtccattgaaataccttagaaatgttttttagttttcaatgtacatctttcacatctgctgccagatgtatttctaagtatttcatggttttatggctattttaagtgatgttgctttcatttccatttttgattgctagtatatagaaacaatagatttttgtatattgatcttgtatcctacaatcttggctaaactcacttactagtgctaatatagtttttatatatttcattggattttctacatagatgatcatgttttctgtgaacaaaggcagttttacttctttctttaccttttctttacccttctaggactccaaatgcttgtatgtatgactgcttggtacttttttcaggttgttaaagttccattaatttctgttacaatcttctttctttttctttctttgctctgtttggataatttatattgacctgctttcaagtttactgattctcctgatgtgtccagtctgctactaatttcatccagtgacttttttatttcagatatttcatttttcagttctggcatttctatgtggttctattttacagtttcaaatccctcctcaaataactgcctcttcacccattgtatctgtctcgttctgaaacttatcatgaagtccttgtgtgcacgttctaatatgtaggtcatctgtgggtctatttgtatggactgatttttctcttaactatgagttctgttctcttttcttttttgcatgttttataagtttatttgccaattactgtgtcttaaaaaaaaacagtaaaggttgaagtacatttaaaaatatatatatgtgtattttttctactgccactcttaagaggaaggaatgccctttcttctgttgaacatatagagttagggactgatcagtttgatccattcaagagttaagctggtttgggacacggttgcaactttaatccctctacctccctcttgtgtctctgcctttgtctgtctctttctctctctttctctgttcctggctgctccctcttcccgttcccttgtacactcctttcagctaatctatttccccctaccccatctccctcaaactggaagcttctggcagaggagaaggcagctgtacttcgggcagtggaggaacgtgagcgggccgaggcagagggccgggagcgtgaggctcgggccctgtcactgacacgggcactggaggaggagcaggaggcacgtgaggagctggagcggcagaaccgggccctgcgggctgagctggaggcactgctgagcagcaaggatgacgtcggcaagagcgtgcatgagctggaacgagcctgccgggtagcagaacaggcagccaatgatctgcgagcacaggtgacagaactggaggatgagctgacagcggccgaggatgccaagctgcgtctggaggtgactgtgcaggctctcaagactcagcatgagcgtgacctgcagggccgtgatgaggctggtgaagagaggcggaggcagctggccaagcagctgagagatgcagaggtggagcgggatgaggagcggaagcagcgcactctggccgtggctgcccgcaagaagctggagggagagctggaggagctgaaggctcagatggcctctgccggccagggcaaggaggaggcggtgaagcagcttcgcaagatgcaggcccagatgaaggagctatggcgggaggtggaggagacacgcacctcccgggaggagatcttctcccagaatcgggaaagtgaaaagcgcctcaagggcctggaggctgaggtgctgcggctgcaggaggaactggccgcctcggaccgtgctcggcggcaggcccagcaggaccgggatgagatggcagatgaggtggccaatggtaaccttagcaaggcagccattctggaggagaagcgtcagctggaggggcgcctggggcagttggaggaagagctggaggaggagcagagcaactcggagctgctcaatgaccgctaccgcaagctgctcctgcaggtagagtcactgaccacagagctgtcagctgagcgcagtttctcagccaaggcagagagcgggcggcagcagctggaacggcagatccaggagctacggggacgcctgggtgaggaggatgctggggcccgtgcccgccacaagatgaccattgctgcccttgagtctaagttggcccaggctgaggagcagctagagcaagagaccagagagcgcatcctctctggaaagctggtgcgcagagctgagaagcggcttaaagaggtggtgctccaggtggaggaggagcggagggtggctgaccagctccgggaccagctggagaagggaaaccttcgagtcaagcagctgaagcggcagctggaggaggccgaggaggaggcatcccgggctcaggccggccgccggaggctgcagcgtgagctggaagatgtcacagagtcggccgagtccatgaaccgtgaagtgaccacactgaggaaccggcttcgacgcggccccctcaccttcaccacccgcacggtgcgccaggtcttccgactagaggagggcgtggcatccgacgaggaggcagaggaagcacagcctgggtctgggccatccccggagcctgaggggtccccaccagcccacccccagtgaccctaccctgtccccagatgcactaacagatggggcccagcccccttcctccctggaccccacgggcccctgtcccaggaaccccgccctctgacttcttgccctttggaaatggtgcagcactctggcatttatcacccccacctgggtcccctgcaacctcccatcaaaggatgacccctaaacacagaggagcggggcaggcagggaggcaatgactggagctaccttgcttgttgggggactgggtacagttggcaagctgtgtttccatcagctccctgtcctcctttcttccctcgttattgatctatagacattaggaagggagtgagacggctcctccaccatcctcagccagtgcaacccattccctctgcttctctctctctctctctctctccctccctctccttccctaccctctcaccatctttcttggcctctctgagggtctctctgtgcatctttttaggaatctcgctctcactctctacgtagccactctccttcccccatttctgcgtccacccctgaactcctgagcgacagaagccccaggcctccaccagccttgaacccttgcaaaggggcaggacaaggggacccctctcactcctgctgctgcccatgctctgccctcccttctggttgctctgagggttcggagcttccctctgggactaaaggagtgtcctttaccctcccagcctccaggctctggcagaaataaactccaacccgactgg

SEQ ID NO: 13227 - DNA, 2225 bp, Homo sapiens
  source 1..2225: mol_type = unassigned DNA
agagtttaacttcttccctcactttggctgcctcagctccctacaagggcccttcctagatgccagaatttataaattgcgaagtcattgattccaaccctctgctgatgtgccaagtgccaggatggtatctgcactcacttccagtccagcacctgcacgttgcttcttgtgatgggagctcattgactccagaaaatgtgggataggaaggctgaacgataagaaatgaggtcagatcatgtatgttccctccctgaagagagaggtggtagggtctggggaggatctcagtgaagttggtctggacagtgggtttatgggaagagagaactggacaagaaaaagaccctgtggggcctggaatgccaggctgaggggctggaaccttgtcccgggggtactggggagccatgaaaggattgtgagcaggagggtctgggtcagctctgggtataggaagacctttctgaggccatgtaggagacaacctggaggggagagactggaggtcagggtagaggctggcatgagggatttaggagaaaagaacaaggcctaaacagagagcagaggatggggcagagagagtcagggggcagtagggatggggcagtagtgggctgttggagagggagggagtgatgacagtacctggagatataacccagtccccctgcttccatcaagctggagaagggaaaccttcgagtcaagcagctgaagcggcagctggaggaggccgaggaggaggcatcccgggctcaggccggccgccggaggctgcagcgtgagctggaagatgtcacagagtcggccgagtccatgaaccgtgaagtgaccacactgaggaaccggcttcggtatggtcatcccacgtacaggcctgacgggtggggagcaccctaactccataaaccccagggacgcgaggccgtgccaggggcaacaacagggggaaatgggatccacgggggtgtggggctgtgggagcagcggctgtgttgcgggagagccaaatccaggtaacttctttcttcccacacccatttctccctgtcatctctgtgccctcctttcccaccgtgcaccaccacctttctctcctttcctcctctctgtgtgtccttcatctctctctgccccccattgcttctgcccgtctccctccatttctcttgatctcatccctctcttcccccttattttgttctctctcttcctatctctctctctctccccctcatctctctctctcctccccctttctcctcccctcccctcccctcatttcatctctgtatcctggtctctcctccccacagacgcggccccctcaccttcaccacccgcacggtgcgccaggtcttccgactagaggagggcgtggcatccgacgaggaggcagaggaagcacagcctgggtctgggccatccccggagcctgaggggtccccaccagcccacccccagtgaccctaccctgtccccagatgcactaacagatggggcccagcccccttcctccctggaccccacgggcccctgtcccaggaaccccgccctctgacttcttgccctttggaaatggtgcagcactctggcatttatcacccccacctgggtcccctgcaacctcccatcaaaggatgacccctaaacacagaggagcggggcaggcagggaggcaatgactggagctaccttgcttgttgggggactgggtacagttggcaagctgtgtttccatcagctccctgtcctcctttcttccctcgttattgatctatagacattaggaagggagtgagacggctcctccaccatcctcagccagtgcaacccattccctctgcttctctctctctctctctctctccctccctctccttccctaccctctcaccatctttcttggcctctctgagggtctctctgtgcatctttttaggaatctcgctctcactctctacgtagccactctccttcccccatttctgcgtccacccctgaactcctgagcgacagaagccccaggcctccaccagccttgaacccttgcaaaggggcaggacaaggggacccctctcactcctgctgctgcccatgctctgccctcccttctggttgctctgagggttcggagcttccctctgggactaaaggagtgtcctttaccctcccagcctccaggctctggcagaaataaactccaacccgactgg

SEQ ID NO: 13228 - DNA, 6811 bp, Homo sapiens
  source 1..6811: mol_type = unassigned DNA
ctctttctccccaggccgaagcctcgggacggccctggaagccgaccatggcagccgtgaccatgtcggtgcccgggcggaaggcgccccccaggccgggcccagtgcccgaggcggcccagccgttcctgttcacgccccgcgggcccagcgcgggtggcgggcctggctcgggcacctccccgcaggtggagtggacggcccggcgtctcgtgtgggtgccttcggagcttcacgggttcgaggcggcggcgctgcgggacgaaggcgaggaggaggcggaggtggagctggcggagagcgggaggcggctgcgactgccgcgggaccagatccagcgcatgaacccgcccaagttcagcaaggccgaggacatggccgagctgacctgcctcaacgaggcctcggtcctgcacaacctccgggagcggtactactccggcctcatctacacgtactccggccttttctgtgtggtcatcaacccgtacaagcagcttcccatctacacagaagccattgtggagatgtaccggggcaagaagcgccacgaggtgccaccccacgtgtacgcagtgaccgagggggcctatcggagcatgctgcaggatcgtgaggaccagtccattctctgcactggagagtctggagctgggaagacggaaaacaccaagaaggtcatccagtacctcgcccacgtggcgtcgtctccaaagggcaggaaggagccgggtgtccccgcctccgtcagcaccgtgtcttatggtgagctggagcggcagctgcttcaggccaaccccatcctagaggcctttggcaatgccaagacagtgaagaatgacaactcctcccgattcggcaaattcatccgcatcaactttgatgttgccgggtacatcgtgggcgccaacattgagacctacctgctggagaagtcgcgggccatccgccaggccaaggacgagtgcagcttccacatcttctaccagctgctggggggcgctggagagcagctcaaagccgacctcctcctcgagccctgctcccactaccggttcctgaccaacgggccgtcatcctctcccggccaggagcgggaactcttccaggagacgctggagtcgctgcgggtcctgggattcagccacgaggaaatcatctccatgctgcggatggtctcagcagttctccagtttggcaacattgccttgaagagagaacggaacaccgatcaagccaccatgcctgacaacacagctgcacagaagctctgccgcctcttgggactgggggtgacggatttctcccgagccttgctcacccctcgcatcaaagttggccgagactatgtgcagaaagcccagactaaggaacaggctgacttcgcgctggaggccctggccaaggccacctacgagcgcctcttccgctggctggttctgcgcctcaaccgggccttggaccgcagcccccgccaaggcgcctccttcctgggcatcctggacatcgcgggctttgagatcttccagctgaactccttcgagcagctctgcatcaactacaccaacgagaagctgcagcagctcttcaaccacaccatgttcgtgctggagcaggaggagtaccagcgtgagggcatcccctggaccttcctcgactttggcctcgacctgcagccctgcatcgacctcatcgagcggccggccaacccccctggactcctggccctgctggatgaggagtgctggttcccgaaggccacagacaagtcgtttgtggagaaggtagcccaggagcagggcggccaccccaagttccagcggccgaggcacctgcgggatcaggccgacttcagtgttctccactacgcgggcaaggtcgactacaaggccaacgagtggctgatgaaaaacatggaccctctgaatgacaacgtcgcagccttgctccaccagagcacagaccggctgacggcagagatctggaaagacgtggagggcatcgtggggctggaacaggtgagcagcctgggcgacggcccaccaggtggccgcccccgtcggggtatgttccggacagtgggacagctctacaaggagtccctgagccgcctcatggccacactcagcaacaccaaccccagttttgtccgctgcattgtccccaaccacgagaagagggccgggaagctggagccacggctggtgctggaccagcttcgctgcaacggggtcctggagggcatccgcatctgtcgccagggcttccccaaccgcatcctcttccaggagttccggcagcgatacgagatcctgacacccaatgccatccccaagggcttcatggatgggaagcaggcctgtgaaaagatgatccaggcgctggaactggaccccaacctctaccgcgtgggacagagcaagatcttcttccgggctggggtcctggcccagctggaagaggagcgagacctgaaggtcaccgacatcatcgtctccttccaggcagctgcccggggatacctggctcgcagggccttccagaagcgccagcagcagcagagcgccctgagggtgatgcagcggaactgcgcggcctacctcaagctgagacactggcagtggtggcggctgtttaccaaggtgaagccactgctgcaggtgacgcggcaggatgaggtgctgcaggcacgggcccaggagctgcagaaagtgcaggagctacagcagcagagcgcccgcgaagttggggagctccagggccgagtggcacagctggaagaggagcgcgcccgcctggcagagcaattgcgagcagaggcagaactgtgtgcagaggccgaggagacgcgggggaggctggcagcccgcaagcaggagctggagctggtggtgtcagagctggaggctcgcgtgggcgaggaggaggagtgcagccgtcaaatgcaaaccgagaagaagaggctgcagcagcacatacaggagctagaggcccaccttgaggctgaggagggtgcgcggcagaagctgcagctggagaaggtgacgacagaggcaaaaatgaagaaatttgaagaggacctgctgctcctggaagaccagaattccaagctgagcaaggagcggaagctgctggaagatcgtctggccgagttctcatcccaggcagctgaggaggaggagaaggtcaagagcctcaataagctacggctcaaatatgaggccacaatcgcagacatggaggaccgcctacggaaggaggagaagggtcgccaggagctggagaagctgaagcggaggctggatggggagagctcagagctgcaggagcagatggtggagcagcaacagcgggcagaggagctgcgggcccagctgggccggaaggaggaggagctgcaggctgccctggccagggcagaagacgagggtggggcccgggcccagctgctgaaatccctgcgggaggctcaagcagccctggccgaggcccaggaggacctggagtctgagcgtgtggccaggaccaaggcggagaagcagcgccgggacctgggcgaggagctggaggcgctgcggggcgagctggaggacacgctggactccaccaacgcacagcaggagctccggtccaagagggaacaggaggtgacggagctgaagaagactctggaggaggagactcgcatccacgaggcggcagtgcaggagctgaggcagcgccacggccaggccctgggggagctggcggagcagctggagcaggcccggaggggcaaaggtgcatgggagaagacccggctggccctggaggccgaggtgtccgagctgcgggcagaactgagcagcctgcagactgcacgtcaggagggtgagcagcggaggcgccgcctggagttacagctgcaggaggtgcagggccgggctggtgatggggagagggcacgagcggaggctgctgagaagctgcagcgagcccaggctgaactggagaatgtgtctggggcgctgaacgaggctgagtccaaaaccatccgtcttagcaaggagctgagcagcacagaagcccagctgcacgatgcccaggagctgctgcaggaggagaccagggcgaaattggccttggggtcccgggtgcgagccatggaggctgaggcagccgggctgcgtgagcagctggaggaggaggcagctgccagggaacgggcgggccgtgaactgcagactgcccaggcccagctttccgagtggcggcggcgccaggaggaggaggcaggggcactggaggcaggggaggaggcacggcgccgggcagcccgggaggccgaggccctgacccagcgcctggcagaaaagacagagaccgtggatcggctggagcggggccgccgccggctgcagcaggagctggacgacgccaccatggacctggagcagcagcggcagcttgtgagcaccctggagaagaagcagcgcaagtttgaccagcttctggcagaggagaaggcagctgtacttcgggcagtggaggaacgtgagcgggccgaggcagagggccgggagcgtgaggctcgggccctgtcactgacacgggcactggaggaggagcaggaggcacgtgaggagctggagcggcagaaccgggccctgcgggctgagctggaggcactgctgagcagcaaggatgacgtcggcaagagcgtgcatgagctggaacgagcctgccgggtagcagaacaggcagccaatgatctgcgagcacaggtgacagaactggaggatgagctgacagcggccgaggatgccaagctgcgtctggaggtgactgtgcaggctctcaagactcagcatgagcgtgacctgcagggccgtgatgaggctggtgaagagaggcggaggcagctggccaagcagctgagagatgcagaggtggagcgggatgaggagcggaagcagcgcactctggccgtggctgcccgcaagaagctggagggagagctggaggagctgaaggctcagatggcctctgccggccagggcaaggaggaggcggtgaagcagcttcgcaagatgcaggcccagatgaaggagctatggcgggaggtggaggagacacgcacctcccgggaggagatcttctcccagaatcgggaaagtgaaaagcgcctcaagggcctggaggctgaggtgctgcggctgcaggaggaactggccgcctcggaccgtgctcggcggcaggcccagcaggaccgggatgagatggcagatgaggtggccaatggtaaccttagcaaggcagccattctggaggagaagcgtcagctggaggggcgcctggggcagttggaggaagagctggaggaggagcagagcaactcggagctgctcaatgaccgctaccgcaagctgctcctgcaggtagagtcactgaccacagagctgtcagctgagcgcagtttctcagccaaggcagagagcgggcggcagcagctggaacggcagatccaggagctacggggacgcctgggtgaggaggatgctggggcccgtgcccgccacaagatgaccattgctgcccttgagtctaagttggcccaggctgaggagcagctagagcaagagaccagagagcgcatcctctctggaaagctggtgcgcagagctgagaagcggcttaaagaggtggtgctccaggtggaggaggagcggagggtggctgaccagctccgggaccagctggagaagggaaaccttcgagtcaagcagctgaagcggcagctggaggaggccgaggaggaggcatcccgggctcaggccggccgccggaggctgcagcgtgagctggaagatgtcacagagtcggccgagtccatgaaccgtgaagtgaccacactgaggaaccggcttcgacgcggccccctcaccttcaccacccgcacggtgcgccaggtcttccgactagaggagggcgtggcatccgacgaggaggcagaggaagcacagcctgggtctgggccatccccggagcctgaggggtccccaccagcccacccccagtgaccctaccctgtccccagatgcactaacagatggggcccagcccccttcctccctggaccccacgggcccctgtcccaggaaccccgccctctgacttcttgccctttggaaatggtgcagcactctggcatttatcacccccacctgggtcccctgcaacctcccatcaaaggatgacccctaaacacagaggagcggggcaggcagggaggcaatgactggagctaccttgcttgttgggggactgggtacagttggcaagctgtgtttccatcagctccctgtcctcctttcttccctcgttattgatctatagacattaggaagggagtgagacggctcctccaccatcctcagccagtgcaacccattccctctgcttctctctctctctctctctctccctccctctccttccctaccctctcaccatctttcttggcctctctgagggtctctctgtgcatctttttaggaatctcgctctcactctctacgtagccactctccttcccccatttctgcgtccacccctgaactcctgagcgacagaagccccaggcctccaccagccttgaacccttgcaaaggggcaggacaaggggacccctctcactcctgctgctgcccatgctctgccctcccttctggttgctctgagggttcggagcttccctctgggactaaaggagtgtcctttaccctcccagcctccaggctctggcagaaataaactccaacccgactggacc

SEQ ID NO: 13229 - DNA, 6787 bp, Homo sapiens
  source 1..6787: mol_type = unassigned DNA
ctctttctccccaggccgaagcctcgggacggccctggaagccgaccatggcagccgtgaccatgtcggtgcccgggcggaaggcgccccccaggccgggcccagtgcccgaggcggcccagccgttcctgttcacgccccgcgggcccagcgcgggtggcgggcctggctcgggcacctccccgcaggtggagtggacggcccggcgtctcgtgtgggtgccttcggagcttcacgggttcgaggcggcggcgctgcgggacgaaggcgaggaggaggcggaggtggagctggcggagagcgggaggcggctgcgactgccgcgggaccagatccagcgcatgaacccgcccaagttcagcaaggccgaggacatggccgagctgacctgcctcaacgaggcctcggtcctgcacaacctccgggagcggtactactccggcctcatctacacgtactccggccttttctgtgtggtcatcaacccgtacaagcagcttcccatctacacagaagccattgtggagatgtaccggggcaagaagcgccacgaggtgccaccccacgtgtacgcagtgaccgagggggcctatcggagcatgctgcaggatcgtgaggaccagtccattctctgcactggagagtctggagctgggaagacggaaaacaccaagaaggtcatccagtacctcgcccacgtggcgtcgtctccaaagggcaggaaggagccgggtgtccccggtgagctggagcggcagctgcttcaggccaaccccatcctagaggcctttggcaatgccaagacagtgaagaatgacaactcctcccgattcggcaaattcatccgcatcaactttgatgttgccgggtacatcgtgggcgccaacattgagacctacctgctggagaagtcgcgggccatccgccaggccaaggacgagtgcagcttccacatcttctaccagctgctggggggcgctggagagcagctcaaagccgacctcctcctcgagccctgctcccactaccggttcctgaccaacgggccgtcatcctctcccggccaggagcgggaactcttccaggagacgctggagtcgctgcgggtcctgggattcagccacgaggaaatcatctccatgctgcggatggtctcagcagttctccagtttggcaacattgccttgaagagagaacggaacaccgatcaagccaccatgcctgacaacacagctgcacagaagctctgccgcctcttgggactgggggtgacggatttctcccgagccttgctcacccctcgcatcaaagttggccgagactatgtgcagaaagcccagactaaggaacaggctgacttcgcgctggaggccctggccaaggccacctacgagcgcctcttccgctggctggttctgcgcctcaaccgggccttggaccgcagcccccgccaaggcgcctccttcctgggcatcctggacatcgcgggctttgagatcttccagctgaactccttcgagcagctctgcatcaactacaccaacgagaagctgcagcagctcttcaaccacaccatgttcgtgctggagcaggaggagtaccagcgtgagggcatcccctggaccttcctcgactttggcctcgacctgcagccctgcatcgacctcatcgagcggccggccaacccccctggactcctggccctgctggatgaggagtgctggttcccgaaggccacagacaagtcgtttgtggagaaggtagcccaggagcagggcggccaccccaagttccagcggccgaggcacctgcgggatcaggccgacttcagtgttctccactacgcgggcaaggtcgactacaaggccaacgagtggctgatgaaaaacatggaccctctgaatgacaacgtcgcagccttgctccaccagagcacagaccggctgacggcagagatctggaaagacgtggagggcatcgtggggctggaacaggtgagcagcctgggcgacggcccaccaggtggccgcccccgtcggggtatgttccggacagtgggacagctctacaaggagtccctgagccgcctcatggccacactcagcaacaccaaccccagttttgtccgctgcattgtccccaaccacgagaagagggccgggaagctggagccacggctggtgctggaccagcttcgctgcaacggggtcctggagggcatccgcatctgtcgccagggcttccccaaccgcatcctcttccaggagttccggcagcgatacgagatcctgacacccaatgccatccccaagggcttcatggatgggaagcaggcctgtgaaaagatgatccaggcgctggaactggaccccaacctctaccgcgtgggacagagcaagatcttcttccgggctggggtcctggcccagctggaagaggagcgagacctgaaggtcaccgacatcatcgtctccttccaggcagctgcccggggatacctggctcgcagggccttccagaagcgccagcagcagcagagcgccctgagggtgatgcagcggaactgcgcggcctacctcaagctgagacactggcagtggtggcggctgtttaccaaggtgaagccactgctgcaggtgacgcggcaggatgaggtgctgcaggcacgggcccaggagctgcagaaagtgcaggagctacagcagcagagcgcccgcgaagttggggagctccagggccgagtggcacagctggaagaggagcgcgcccgcctggcagagcaattgcgagcagaggcagaactgtgtgcagaggccgaggagacgcgggggaggctggcagcccgcaagcaggagctggagctggtggtgtcagagctggaggctcgcgtgggcgaggaggaggagtgcagccgtcaaatgcaaaccgagaagaagaggctgcagcagcacatacaggagctagaggcccaccttgaggctgaggagggtgcgcggcagaagctgcagctggagaaggtgacgacagaggcaaaaatgaagaaatttgaagaggacctgctgctcctggaagaccagaattccaagctgagcaaggagcggaagctgctggaagatcgtctggccgagttctcatcccaggcagctgaggaggaggagaaggtcaagagcctcaataagctacggctcaaatatgaggccacaatcgcagacatggaggaccgcctacggaaggaggagaagggtcgccaggagctggagaagctgaagcggaggctggatggggagagctcagagctgcaggagcagatggtggagcagcaacagcgggcagaggagctgcgggcccagctgggccggaaggaggaggagctgcaggctgccctggccagggcagaagacgagggtggggcccgggcccagctgctgaaatccctgcgggaggctcaagcagccctggccgaggcccaggaggacctggagtctgagcgtgtggccaggaccaaggcggagaagcagcgccgggacctgggcgaggagctggaggcgctgcggggcgagctggaggacacgctggactccaccaacgcacagcaggagctccggtccaagagggaacaggaggtgacggagctgaagaagactctggaggaggagactcgcatccacgaggcggcagtgcaggagctgaggcagcgccacggccaggccctgggggagctggcggagcagctggagcaggcccggaggggcaaaggtgcatgggagaagacccggctggccctggaggccgaggtgtccgagctgcgggcagaactgagcagcctgcagactgcacgtcaggagggtgagcagcggaggcgccgcctggagttacagctgcaggaggtgcagggccgggctggtgatggggagagggcacgagcggaggctgctgagaagctgcagcgagcccaggctgaactggagaatgtgtctggggcgctgaacgaggctgagtccaaaaccatccgtcttagcaaggagctgagcagcacagaagcccagctgcacgatgcccaggagctgctgcaggaggagaccagggcgaaattggccttggggtcccgggtgcgagccatggaggctgaggcagccgggctgcgtgagcagctggaggaggaggcagctgccagggaacgggcgggccgtgaactgcagactgcccaggcccagctttccgagtggcggcggcgccaggaggaggaggcaggggcactggaggcaggggaggaggcacggcgccgggcagcccgggaggccgaggccctgacccagcgcctggcagaaaagacagagaccgtggatcggctggagcggggccgccgccggctgcagcaggagctggacgacgccaccatggacctggagcagcagcggcagcttgtgagcaccctggagaagaagcagcgcaagtttgaccagcttctggcagaggagaaggcagctgtacttcgggcagtggaggaacgtgagcgggccgaggcagagggccgggagcgtgaggctcgggccctgtcactgacacgggcactggaggaggagcaggaggcacgtgaggagctggagcggcagaaccgggccctgcgggctgagctggaggcactgctgagcagcaaggatgacgtcggcaagagcgtgcatgagctggaacgagcctgccgggtagcagaacaggcagccaatgatctgcgagcacaggtgacagaactggaggatgagctgacagcggccgaggatgccaagctgcgtctggaggtgactgtgcaggctctcaagactcagcatgagcgtgacctgcagggccgtgatgaggctggtgaagagaggcggaggcagctggccaagcagctgagagatgcagaggtggagcgggatgaggagcggaagcagcgcactctggccgtggctgcccgcaagaagctggagggagagctggaggagctgaaggctcagatggcctctgccggccagggcaaggaggaggcggtgaagcagcttcgcaagatgcaggcccagatgaaggagctatggcgggaggtggaggagacacgcacctcccgggaggagatcttctcccagaatcgggaaagtgaaaagcgcctcaagggcctggaggctgaggtgctgcggctgcaggaggaactggccgcctcggaccgtgctcggcggcaggcccagcaggaccgggatgagatggcagatgaggtggccaatggtaaccttagcaaggcagccattctggaggagaagcgtcagctggaggggcgcctggggcagttggaggaagagctggaggaggagcagagcaactcggagctgctcaatgaccgctaccgcaagctgctcctgcaggtagagtcactgaccacagagctgtcagctgagcgcagtttctcagccaaggcagagagcgggcggcagcagctggaacggcagatccaggagctacggggacgcctgggtgaggaggatgctggggcccgtgcccgccacaagatgaccattgctgcccttgagtctaagttggcccaggctgaggagcagctagagcaagagaccagagagcgcatcctctctggaaagctggtgcgcagagctgagaagcggcttaaagaggtggtgctccaggtggaggaggagcggagggtggctgaccagctccgggaccagctggagaagggaaaccttcgagtcaagcagctgaagcggcagctggaggaggccgaggaggaggcatcccgggctcaggccggccgccggaggctgcagcgtgagctggaagatgtcacagagtcggccgagtccatgaaccgtgaagtgaccacactgaggaaccggcttcgacgcggccccctcaccttcaccacccgcacggtgcgccaggtcttccgactagaggagggcgtggcatccgacgaggaggcagaggaagcacagcctgggtctgggccatccccggagcctgaggggtccccaccagcccacccccagtgaccctaccctgtccccagatgcactaacagatggggcccagcccccttcctccctggaccccacgggcccctgtcccaggaaccccgccctctgacttcttgccctttggaaatggtgcagcactctggcatttatcacccccacctgggtcccctgcaacctcccatcaaaggatgacccctaaacacagaggagcggggcaggcagggaggcaatgactggagctaccttgcttgttgggggactgggtacagttggcaagctgtgtttccatcagctccctgtcctcctttcttccctcgttattgatctatagacattaggaagggagtgagacggctcctccaccatcctcagccagtgcaacccattccctctgcttctctctctctctctctctctccctccctctccttccctaccctctcaccatctttcttggcctctctgagggtctctctgtgcatctttttaggaatctcgctctcactctctacgtagccactctccttcccccatttctgcgtccacccctgaactcctgagcgacagaagccccaggcctccaccagccttgaacccttgcaaaggggcaggacaaggggacccctctcactcctgctgctgcccatgctctgccctcccttctggttgctctgagggttcggagcttccctctgggactaaaggagtgtcctttaccctcccagcctccaggctctggcagaaataaactccaacccgactggacc

SEQ ID NO: 13230 - DNA, 3848 bp, Homo sapiens
  source 1..3848: mol_type = unassigned DNA
gaggctgcagcagcacatacaggagctagaggcccaccttgaggctgaggagggtgcgcggcagaagctgcagctggagaaggtgacgacagaggcaaaaatgaagaaatttgaagaggacctgctgctcctggaagaccagaattccaagctgagcaaggagcggaagctgctggaagatcgtctggccgagttctcatcccaggcagctgaggaggaggagaaggtcaagagcctcaataagctacggctcaaatatgaggccacaatcgcagacatggaggaccgcctacggaaggaggagaagggtcgccaggagctggagaagctgaagcggaggctggatggggagagctcagagctgcaggagcagatggtggagcagcaacagcgggcagaggagctgcgggcccagctgggccggaaggaggaggagctgcaggctgccctggccagggcagaagacgagggtggggcccgggcccagctgctgaaatccctgcgggaggctcaagcagccctggccgaggcccaggaggacctggagtctgagcgtgtggccaggaccaaggcggagaagcagcgccgggacctgggcgaggagctggaggcgctgcggggcgagctggaggacacgctggactccaccaacgcacagcaggagctccggtccaagagggaacaggaggtgacggagctgaagaagactctggaggaggagactcgcatccacgaggcggcagtgcaggagctgaggcagcgccacggccaggccctgggggagctggcggagcagctggagcaggcccggaggggcaaaggtgcatgggagaagacccggctggccctggaggccgaggtgtccgagctgcgggcagaactgagcagcctgcagactgcacgtcaggagggtgagcagcggaggcgccgcctggagttacagctgcaggaggtgcagggccgggctggtgatggggagagggcacgagcggaggctgctgagaagctgcagcgagcccaggctgaactggagaatgtgtctggggcgctgaacgaggctgagtccaaaaccatccgtcttagcaaggagctgagcagcacagaagcccagctgcacgatgcccaggagctgctgcaggaggagaccagggcgaaattggccttggggtcccgggtgcgagccatggaggctgaggcagccgggctgcgtgagcagctggaggaggaggcagctgccagggaacgggcgggccgtgaactgcagactgcccaggcccagctttccgagtggcggcggcgccaggaggaggaggcaggggcactggaggcaggggaggaggcacggcgccgggcagcccgggaggccgaggccctgacccagcgcctggcagaaaagacagagaccgtggatcggctggagcggggccgccgccggctgcagcaggagctggacgacgccaccatggacctggagcagcagcggcagcttgtgagcaccctggagaagaagcagcgcaagtttgaccagcttctggcagaggagaaggcagctgtacttcgggcagtggaggaacgtgagcggccgaggcagagggccgggagcgtgaggctcgggccctgtcactgacacgggcactggaggaggagcaggaggcacgtgaggagctggagcggcagaaccgggccctgcgggctgagctggaggcactgctgagcagcaaggatgacgtcggcaagagcgtgcatgagctggaacgagcctgccgggtagcagaacaggcagccaatgatctgcgagcacaggtgacagaactggaggatgagctgacagcggccgaggatgccaagctgcgtctggaggtgactgtgcaggctctcaagactcagcatgagcgtgacctgcagggccgtgatgaggctggtgaagagaggcggaggcagctggccaagcagctgagagatgcagaggtggagcgggatgaggagcggaagcagcgcactctggccgtggctgcccgcaagaagctggagggagagctggaggagctgaaggctcagatggcctctgccggccagggcaaggaggaggcggtgaagcagcttcgcaagatgcaggcccagatgaaggagctatggcgggaggtggaggagacacgcacctcccgggaggagatcttctcccagaatcgggaaagtgaaaagcgcctcaagggcctggaggctgaggtgctgcggctgcaggaggaactggccgcctcggaccgtgctcggcggcaggcccagcaggaccgggatgagatggcagatgaggtggccaatggtaaccttagcaaggcagccattctggaggagaagcgtcagctggaggggcgcctggggcagttggaggaagagctggaggaggagcagagcaactcggagctgctcaatgaccgctaccgcaagctgctcctgcaggtagagtcactgaccacagagctgtcagctgagcgcagtttctcagccaaggcagagagcgggcggcagcagctggaacggcagatccaggagctacggggacgcctgggtgaggaggatgctggggcccgtgcccgccacaagatgaccattgctgcccttgagtctaagttggcccaggctgaggagcagctagagcaagagaccagagagcgcatcctctctggaaagctggtgcgcagagctgagaagcggcttaaagaggtggtgctccaggtggaggaggagcggagggtggctgaccagctccgggaccagctggagaagggaaaccttcgagtcaagcagctgaagcggcagctggaggaggccgaggaggaggcatcccgggctcaggccggccgccggaggctgcagcgtgagctggaagatgtcacagagtcggccgagtccatgaaccgtgaagtgaccacactgaggaaccggcttcgacgcggccccctcaccttcaccacccgcacggtgcgccaggtcttccgactagaggagggcgtggcatccgacgaggaggcagaggaagcacagcctgggtctgggccatccccggagcctgaggggtccccaccagcccacccccagtgaccctaccctgtccccagatgcactaacagatggggcccagcccccttcctccctggaccccacgggcccctgtcccaggaaccccgccctctgacttcttgccctttggaaatggtgcagcactctggcatttatcacccccacctgggtcccctgcaacctcccatcaaaggatgacccctaaacacagaggagcggggcaggcagggaggcaatgactggagctaccttgcttgttgggggactgggtacagttggcaagctgtgtttccatcagctccctgtcctcctttcttccctcgttattgatctatagacattaggaagggagtgagacggctcctccaccatcctcagccagtgcaacccattccctctgcttctctctctctctctctctctccctccctctccttccctaccctctcaccatctttcttggcctctctgagggtctctctgtgcatctttttaggaatctcgctctcactctctacgtagccactctccttcccccatttctgcgtccacccctgaactcctgagcgacagaagccccaggcctccaccagccttgaacccttgcaaaggggcaggacaaggggacccctctcactcctgctgctgcccatgctctgccctcccttctggttgctctgagggttcggagcttccctctgggactaaaggagtgtcctttaccctcccagcctccaggctctggcagaaataaactccaacccgactgg

SEQ ID NO: 13231 - DNA, 4247 bp, Homo sapiens
  source 1..4247: mol_type = unassigned DNA
ctctttctccccaggccgaagcctcgggacggccctggaagccgaccatggcagccgtgaccatgtcggtgcccgggcggaaggcgtctcgtgtgggtgccttcggagcttcacgggttcgaggcggcggcgctgcgggacgaaggcgaggaggaggcggaggtggagctggcggagagcgggaggcggctgcgactgccgcgggaccagatccagcgcatgaacccgcccaagttcagcaaggccgaggacatggccgagctgacctgcctcaacgaggcctcggtcctgcacaacctccgggagcggtactactccggcctcatctacacgtactccggccttttctgtgtggtcatcaacccgtacaagcagcttcccatctacacagaagccattgtggagatgtaccggggcaagaagcgccacgaggtgccaccccacgtgtacgcagtgaccgagggggcctatcggagcatgctgcaggatcgtgaggaccagtccattctctgcactggagagtctggagctgggaagacggaaaacaccaagaaggtcatccagtacctcgcccacgtggcgtcgtctccaaagggcaggaaggagccgggtgtccccggtgagctggagcggcagctgcttcaggccaaccccatcctagaggcctttggcaatgccaagacagtgaagaatgacaactcctcccgattcggcaaattcatccgcatcaactttgatgttgccgggtacatcgtgggcgccaacattgagacctacctgctggagaagtcgcgggccatccgccaggccaaggacgagtgcagcttccacatcttctaccagctgctggggggcgctggagagcagctcaaagccgacctcctcctcgagccctgctcccactaccggttcctgaccaacgggccgtcatcctctcccggccaggagcgggaactcttccaggagacgctggagtcgctgcgggtcctgggattcagccacgaggaaatcatctccatgctgcggatggtctcagcagttctccagtttggcaacattgccttgaagagagaacggaacaccgatcaagccaccatgcctgacaacacagctgcacagaagctctgccgcctcttgggactgggggtgacggatttctcccgagccttgctcacccctcgcatcaaagttggccgagactatgtgcagaaagcccagactaaggaacaggctgacttcgcgctggaggccctggccaaggccacctacgagcgcctcttccgctggctggttctgcgcctcaaccgggccttggaccgcagcccccgccaaggcgcctccttcctgggcatcctggacatcgcgggctttgagatcttccagctgaactccttcgagcagctctgcatcaactacaccaacgagaagctgcagcagctcttcaaccacaccatgttcgtgctggagcaggaggagtaccagcgtgagggcagaagacgagggtggggcccgggcccagctgctgaaatccctgcgggaggctcaagcagccctggccgaggcccaggaggacctggagtctgagcgtgtggccaggaccaaggcggagaagcagcgccgggacctgggcgaggagctggaggcgctgcggggcgagctggaggacacgctggactccaccaacgcacagcaggagctccggtccaagagggaacaggaggtgacggagctgaagaagactctggaggaggagactcgcatccacgaggcggcagtgcaggagctgaggcagcgccacggccaggccctgggggagctggcggagcagctggagcaggcccggaggggcaaaggtgcatgggagaagacccggctggccctggaggccgaggtgtccgagctgcgggcagaactgagcagcctgcagactgcacgtcaggagggtgagcagcggaggcgccgcctggagttacagctgcaggaggtgcagggccgggctggtgatggggagagggcacgagcggaggctgctgagaagctgcagcgagcccaggctgaactggagaatgtgtctggggcgctgaacgaggctgagtccaaaaccatccgtcttagcaaggagctgagcagcacagaagcccagctgcacgatgcccaggagctgctgcaggaggagaccagggcgaaattggccttggggtcccgggtgcgagccatggaggctgaggcagccgggctgcgtgagcagctggaggaggaggcagctgccagggaacgggcgggccgtgaactgcagactgcccaggcccagctttccgagtggcggcggcgccaggaggaggaggcaggggcactggaggcaggggaggaggcacggcgccgggcagcccgggaggccgaggccctgacccagcgcctggcagaaaagacagagaccgtggatcggctggagcggggccgccgccggctgcagcaggagctggacgacgccaccatggacctggagcagcagcggcagcttgtgagcaccctggagaagaagcagcgcaagtttgaccagcttctggcagaggagaaggcagctgtacttcgggcagtggaggaacgtgagcgggccgaggcagagggccgggagcgtgaggctcgggccctgtcactgacacgggcactggaggaggagcaggaggcacgtgaggagctggagcggcagaaccgggccctgcgggctgagctggaggcactgctgagcagcaaggatgacgtcggcaagagcgtgcatgagctggaacgagcctgccgggtagcagaacaggcagccaatgatctgcgagcacaggtgacagaactggaggatgagctgacagcggccgaggatgccaagctgcgtctggaggtgactgtgcaggctctcaagactcagcatgagcgtgacctgcagggccgtgatgaggctggtgaagagaggcggaggcagctggccaagcagctgagagatgcagaggtggagcgggatgaggagcggaagcagcgcactctggccgtggctgcccgcaagaagctggagggagagctggaggagctgaaggctcagatggcctctgccggccagggcaaggaggaggcggtgaagcagcttcgcaagatgcaggcccagatgaaggagctatggcgggaggtggaggagacacgcacctcccgggaggagatcttctcccagaatcgggaaagtgaaaagcgcctcaagggcctggaggctgaggtgctgcggctgcaggaggaactggccgcctcggaccgtgctcggcggcaggcccagcaggaccgggatgagatggcagatgaggtggccaatggtaaccttagcaaggcagccattctggaggagaagcgtcagctggaggggcgcctggggcagttggaggaagagctggaggaggagcagagcaactcggagctgctcaatgaccgctaccgcaagctgctcctgcaggtagagtcactgaccacagagctgtcagctgagcgcagtttctcagccaaggcagagagcgggcggcagcagctggaacggcagatccaggagctacggggacgcctgggtgaggaggatgctggggcccgtgcccgccacaagatgaccattgctgcccttgagtctaagttggcccaggctgaggagcagctagagcaagagaccagagagcgcatcctctctggaaagctggtgcgcagagctgagaagcggcttaaagaggtggtgctccaggtggaggaggagcggagggtggctgaccagctccgggaccagctggagaagggaaaccttcgagtcaagcagctgaagcggcagctggaggaggccgaggaggaggcatcccgggctcaggccggccgccggaggctgcagcgtgagctggaagatgtcacagagtcggccgagtccatgaaccgtgaagtgaccacactgaggaaccggcttcgacgcggccccctcaccttcaccacccgcacggtgcgccaggtcttccgactagaggagggcgtggcatccgacgaggaggcagaggaagcacagcctgggtctgggccatccccggagcctgaggggtccccaccagcccacccccagtgaccctaccctgtccccagatgcactaacagatggggcccagcccccttcctccctggaccccacgggcccctgtcccaggaaccccgccctctgacttcttgccctttggaaatgg

SEQ ID NO: 13232 - DNA, 5871 bp, Homo sapiens
  source 1..5871: mol_type = unassigned DNA
cgtgaagggataaccaggggaagcaccaagatgaccgatgcccagatggctgactttggggcagcggcccagtacctccgcaagtcagagaaggagcgtctagaggcccagacccggccctttgacattcgcactgagtgcttcgtgcccgatgacaaggaagagtttgtcaaagccaagattttgtcccgggagggaggcaaggtcattgctgaaaccgagaatgggaagacggtgactgtgaaggaggaccaggtgttgcagcagaacccacccaagttcgacaagattgaggacatggccatgctgaccttcctgcacgagcccgcggtgcttttcaacctcaaggagcgctacgcggcctggatgatatatacctactcgggcctcttctgtgtcactgtcaacccctacaagtggctgccggtgtacaatgccgaggtggtggccgcctaccggggcaagaagaggagtgaggccccgccccacatcttctccatctccgacaacgcctatcagtacatgctgacagatcgggagaaccagtccatcctcatcacgggagaatccggggcggggaagactgtgaacaccaagcgtgtcatccagtactttgccagcattgcagccataggtgaccgtggcaagaaggacaatgccaatgcgaacaagggcaccctggaggaccagatcatccaggccaaccccgctctggaggccttcggcaatgccaagactgtccggaacgacaactcctcccgctttgggaaattcattaggatccactttggggccactggaaagctggcttctgcagacatagagacctacctgctggagaagtcccgggtgatcttccagctgaaagctgagagaaactaccacatcttctaccagattctgtccaacaagaagccggagttgctggacatgctgctggtcaccaacaatccctacgactacgccttcgtgtctcagggagaggtgtccgtggcctccattgatgactccgaggagctcatggccaccgatagtgcctttgacgtgctgggcttcacttcagaggagaaagctggcgtctacaagctgacgggagccatcatgcactacgggaacatgaagttcaagcagaagcagcgggaggagcaggcggagccagacggcaccgaagatgctgacaagtcggcctacctcatggggctgaactcagctgacctgctcaaggggctgtgccaccctcgggtgaaagtgggcaacgagtatgtcaccaaggggcagagcgtgcagcaggtgtactactccatcggggctctggccaaggcagtgtatgagaagatgttcaactggatggtgacgcgcatcaacgccaccctggagaccaagcagccacgccagtacttcataggagtcctggacatcgctggcttcgagatcttcgacttcaacagctttgagcagctctgcatcaacttcaccaacgagaagctgcagcagttcttcaaccaccacatgttcgtgctggagcaggaggagtacaagaaggagggcattgagtggacattcattgactttggcatggacctgcaggcctgcattgacctcatcgagaagcccatgggcatcatgtccatcctggaggaggagtgcatgttccccaaggccactgacatgaccttcaaggccaagctgtacgacaaccacctgggcaagtccaacaatttccagaagccacgcaacatcaaggggaagcaggaagcccacttctccctgatccactacgccggcactgtggactacaacatcctgggctggctggaaaaaaacaaggatcctctcaacgagactgttgtggccctgtaccagaagtcctccctcaagctcatggccactctcttctcctcctacgcaactgccgatactggggacagtggtaaaagcaaaggaggcaagaaaaagggctcatccttccagacggtgtcggctctccaccgggaaaatctcaacaagctaatgaccaacctgaggaccacccatcctcactttgtgcgttgcatcatccccaatgagcggaaggctccaggggtgatggacaaccccctggtcatgcaccagctgcgctgcaatggcgtgctggagggcatccgcatctgcaggaagggcttccccaaccgcatcctctacggggacttccggcagaggtatcgcatcctgaacccagtggccatccctgagggacagttcattgatagcaggaaggggacagagaagctgctcagctctctggacattgatcacaaccagtacaagtttggccacaccaaggtgttcttcaaggcagggctgcttgggctgctggaggagatgcgggatgagaggctgagccgcatcatcacgcgcatgcaggcccaagcccggggccagctcatgcgcattgagttcaagaagatagtggaacgcagggatgccctgctggtaatccagtggaacattcgggccttcatgggggtcaagaattggccctggatgaagctctacttcaagatcaagccgctgctgaagagcgcagagacggagaaggagatggccaccatgaaggaagagttcgggcgcatcaaagagacgctggagaagtccgaggctcgccgcaaggagctggaggagaagatggtgtccctgctgcaggagaagaatgacctgcagctccaagtgcaggcggaacaagacaacctcaatgatgctgaggagcgctgcgaccagctgatcaaaaacaagattcagctggaggccaaagtaaaggagatgaatgagaggctggaggatgaggaggagatgaacgcggagctcactgccaagaagcgcaagctggaagacgagtgctcagagctcaagaaggacattgatgacctggagctgacactggccaaggtggagaaggagaagcatgcaacagagaacaaggtgaagaacctaacagaggagatggctgggctggatgaaatcatcgctaagctgaccaaggagaagaaagctctacaagaggcccatcagcaggccctggatgaccttcaggttgaggaagacaaggtcaacagcctgtccaagtctaaggtcaagctggagcagcaggtggatgatctggagggatccctagagcaagagaagaaggtgcgcatggacctggagcgagcaaagcggaaactggagggcgacctgaagctgacccaggagagcatcatggacctggaaaatgataaactgcagctggaagaaaagcttaagaagaaggagtttgacattaatcagcagaacagtaagattgaggatgagcaggtgctggcccttcaactacagaagaaactgaaggaaaaccaggcacgcatcgaggagctggaggaggagctggaggccgagcgcaccgccagggctaaggtggagaagctgcgctcagacctgtctcgggagctggaggagatcagcgagcggctggaagaggccggcggggccacgtccgtgcagatcgagatgaacaagaagcgcgaggccgagttccagaagatgcggcgggacctggaggaggccacgctgcagcacgaggccactgccgcggccctgcgcaagaagcacgccgacagcgtggccgagctgggcgagcagatcgacaacctgcagcgggtgaagcagaagctggagaaggagaagagcgagttcaagctggagctggatgacgtcacctccaacatggagcagatcatcaaggccaaggcaaacctggagaaagtgtctcggacgctggaggaccaggccaatgagtaccgcgtgaagctagaagaggcccaacgctccctcaatgatttcaccacccagcgagccaagctgcagaccgagaatggagagttggcccggcagctagaggaaaaggaggcgctaatctcgcagctgacccgggggaagctctcttatacccagcaaatggaggacctcaaaaggcagctggaggaggagggcaaggcgaagaacgccctggcccatgcactgcagtcggcccggcatgactgcgacctgctgcgggagcagtacgaggaggagacagaggccaaggccgagctgcagcgcgtcctgtccaaggccaactcggaggtggcccagtggaggaccaagtatgagacggacgccattcagcggactgaggagctcgaagaggccaaaaagaagctggcccagcggctgcaggatgccgaggaggccgtggaggctgttaatgccaagtgctcctcactggagaagaccaagcaccggctacagaatgagatagaggacttgatggtggacgtagagcgctccaatgctgctgctgcagccctggacaagaagcagagaaactttgacaagatcctggccgagtggaagcagaagtatgaggagtcgcagtctgagctggagtcctcacagaaggaggctcgctccctcagcacagagctcttcaagctcaagaacgcctacgaggagtccctggagcacctagagaccttcaagcgggagaacaagaaccttcaggaggaaatctcggaccttactgagcagctaggagaaggaggaaagaatgtgcatgagctggagaaggtccgcaaacagctggaggtggagaagctggagctgcagtcagccctggaggaggcagaggcctccctggagcacgaggagggcaagatcctccgggcccagctagagttcaaccagatcaaggcagagatcgagcggaagctggcagagaaggacgaggagatggaacaggccaagcgcaaccaccagcgggtggtggactcgctgcagacctccctggatgcagagacacgcagccgcaacgaggtcctgagggtgaagaagaagatggaaggagacctcaatgagatggagatccagctcagccacgccaaccgcatggctgccgaggcccagaagcaagtcaagagcctccagagcttgctgaaggacacccagatccagctggacgatgcggtccgtgccaacgacgacctgaaggagaacatcgccatcgtggagcggcgcaacaacctgctgcaggctgagctggaggagctgcgtgccgtggtggagcagacagagcggtcccggaagctggcggagcaggagctgattgagaccagcgagcgggtgcagctgctgcattcccagaacaccagcctcatcaaccagaagaagaagatggagtcggatctgacccagctccagtcggaagtggaggaggcagtgcaggagtgcagaaacgccgaggagaaggccaagaaggccatcacggatgccgccatgatggcagaggagctgaagaaggagcaggacaccagcgcccacctggagcgcatgaagaagaacatggagcagaccattaaggacctgcagcaccggctggacgaggccgagcagatcgccctcaagggaggcaagaagcagctgcagaagctggaagcgcgggtgcgggagctggagggtgagctggaggccgagcagaagcgcaacgcagagtcggtgaagggcatgaggaagagcgagcggcgcatcaaggagctcacctaccagacagaggaagacaaaaagaacctgctgcggctacaggacctggtggacaagctgcaactgaaggtcaaggcctacaagcgccaggccgaggaggcggaggagcaagccaacaccaacctgtccaagttccgcaaggtgcagcatgagctggatgaggcagaggagcgggcggacatcgctgagtcccaggtcaacaagcttcgagccaagagccgtgacattggtgccaagcaaaaaatgcacgatgaggagtgacactgcctcgggaacctcact

SEQ ID NO: 13233 - DNA, 2179 bp, Homo sapiens
  source 1..2179: mol_type = unassigned DNA
cggtccagattcttcaggattctccgtgaagggataaccaggggaagcaccaagatgaccgatgcccagatggctgactttggggcagcggcccagtacctccgcaagtcagagaaggagcgtctagaggcccagacccggccctttgacattcgcactgagtgcttcgtgcccgatgacaaggaagagtttgtcaaagccaagattttgtcccgggagggaggcaaggtcattgctgaaaccgagaatgggaagacggtgactgtgaaggaggaccaggtgttgcagcagaacccacccaagttcgacaagattgaggacatggccatgctgaccttcctgcacgagcccgcggtgcttttcaacctcaaggagcgctacgcggcctggatgatatatacctactcgggcctcttctgtgtcactgtcaacccctacaagtggctgccggtgtacaatgccgaggtggtggccgcctaccggggcaagaagaggagtgaggccccgccccacatcttctccatctccgacaacgcctatcagtacatgctgacagatcgggagaaccagtccatcctcatcacgggagaatccggggcggggaagactgtgaacaccaagcgtgtcatccagtactttgccagcattgcagccataggtgaccgtggcaagaaggacaatgccaatgcgaacaagggcaccctggaggaccagatcatccaggccaaccccgctctggaggccttcggcaatgccaagactgtccggaacgacaactcctcccgctttgggaaattcattaggatccactttggggccactggaaagctggcttctgcagacatagagacctacctgctggagaagtcccgggtgatcttccagctgaaagctgagagaaactaccacatcttctaccagattctgtccaacaagaagccggagttgctggacatgctgctggtcaccaacaatccctacgactacgccttcgtgtctcagggagaggtgtccgtggcctccattgatgactccgaggagctcatggccaccgatagtgcctttgacgtgctgggcttcacttcagaggagaaagctggcgtctacaagctgacgggagccatcatgcactacgggaacatgaagttcaagcagaagcagcgggaggagcaggcggagccagacggcaccgaagatgctgacaagtcggcctacctcatggggctgaactcagctgacctgctcaaggggctgtgccaccctcgggtgaaagtgggcaacgagtatgtcaccaaggggcagagcgtgcagcaggtgtactactccatcggggctctggccaaggcagtgtatgagaagatgttcaactggatggtgacgcgcatcaacgccaccctggagaccaagcagccacgccagtacttcataggagtcctggacatcgctggcttcgagatcttcgacttcaacagctttgagcagctctgcatcaacttcaccaacgagaagctgcagcagttcttcaaccaccacatgttcgtgctggagcaggaggagtacaagaaggagggcattgagtggacattcattgactttggcatggacctgcaggcctgcattgacctcatcgagaaggtgcctccttggcctcaccacctatgccccctcctctgccatccagacaaagtggtggctgagtcccttctacacccaagaaactagagtcccaagaatcccaggcctttctccaggcccagcttctccccactgtgaagtcatgggcatgaacaggatgatccccccactcttcctttcccaggaccttgcactttatgcccctttgtggtggtcccctcagtgtcttaagagtgagatgtagtgaaggagaggcccctggcccctctgaccgcccatgagaagcgtcattcatggaaagatcctaggctgaaattagagatgtttggcctcccaccaccttcctgttggttgagaaataagccagtctccagccctcttgcttatgggcattcctcagaagagacaaggccgcaggcgggaggccccataggctggggctgacttgctctcagtgaacctctgctctttgtcagcataggccagagcccggattgtctgacccacacccagcccagccacggccttcatgaaatgggagctt

SEQ ID NO: 13234 - DNA, 5941 bp, Homo sapiens
  source 1..5941: mol_type = unassigned DNA
agatagagagactcctgcggcccagattcttcaggattctccgtgaagggataaccaggggaagcaccaagatgaccgatgcccagatggctgactttggggcagcggcccagtacctccgcaagtcagagaaggagcgtctagaggcccagacccggccctttgacattcgcactgagtgcttcgtgcccgatgacaaggaagagtttgtcaaagccaagattttgtcccgggagggaggcaaggtcattgctgaaaccgagaatgggaagacggtgactgtgaaggaggaccaggtgttgcagcagaacccacccaagttcgacaagattgaggacatggccatgctgaccttcctgcacgagcccgcggtgcttttcaacctcaaggagcgctacgcggcctggatgatatatacctactcgggcctcttctgtgtcactgtcaacccctacaagtggctgccggtgtacaatgccgaggtggtggccgcctaccggggcaagaagaggagtgaggccccgccccacatcttctccatctccgacaacgcctatcagtacatgctgacagatcgggagaaccagtccatcctcatcacgggagaatccggggcggggaagactgtgaacaccaagcgtgtcatccagtactttgccagcattgcagccataggtgaccgtggcaagaaggacaatgccaatgcgaacaagggcaccctggaggaccagatcatccaggccaaccccgctctggaggccttcggcaatgccaagactgtccggaacgacaactcctcccgctttgggaaattcattaggatccactttggggccactggaaagctggcttctgcagacatagagacctacctgctggagaagtcccgggtgatcttccagctgaaagctgagagaaactaccacatcttctaccagattctgtccaacaagaagccggagttgctggacatgctgctggtcaccaacaatccctacgactacgccttcgtgtctcagggagaggtgtccgtggcctccattgatgactccgaggagctcatggccaccgatagtgcctttgacgtgctgggcttcacttcagaggagaaagctggcgtctacaagctgacgggagccatcatgcactacgggaacatgaagttcaagcagaagcagcgggaggagcaggcggagccagacggcaccgaagatgctgacaagtcggcctacctcatggggctgaactcagctgacctgctcaaggggctgtgccaccctcgggtgaaagtgggcaacgagtatgtcaccaaggggcagagcgtgcagcaggtgtactactccatcggggctctggccaaggcagtgtatgagaagatgttcaactggatggtgacgcgcatcaacgccaccctggagaccaagcagccacgccagtacttcataggagtcctggacatcgctggcttcgagatcttcgacttcaacagctttgagcagctctgcatcaacttcaccaacgagaagctgcagcagttcttcaaccaccacatgttcgtgctggagcaggaggagtacaagaaggagggcattgagtggacattcattgactttggcatggacctgcaggcctgcattgacctcatcgagaagcccatgggcatcatgtccatcctggaggaggagtgcatgttccccaaggccactgacatgaccttcaaggccaagctgtacgacaaccacctgggcaagtccaacaatttccagaagccacgcaacatcaaggggaagcaggaagcccacttctccctgatccactacgccggcactgtggactacaacatcctgggctggctggaaaaaaacaaggatcctctcaacgagactgttgtggccctgtaccagaagtcctccctcaagctcatggccactctcttctcctcctacgcaactgccgatactggggacagtggtaaaagcaaaggaggcaagaaaaagggctcatccttccagacggtgtcggctctccaccgggaaaatctcaacaagctaatgaccaacctgaggaccacccatcctcactttgtgcgttgcatcatccccaatgagcggaaggctccaggggtgatggacaaccccctggtcatgcaccagctgcgctgcaatggcgtgctggagggcatccgcatctgcaggaagggcttccccaaccgcatcctctacggggacttccggcagaggtatcgcatcctgaacccagtggccatccctgagggacagttcattgatagcaggaaggggacagagaagctgctcagctctctggacattgatcacaaccagtacaagtttggccacaccaaggtgttcttcaaggcagggctgcttgggctgctggaggagatgcgggatgagaggctgagccgcatcatcacgcgcatgcaggcccaagcccggggccagctcatgcgcattgagttcaagaagatagtggaacgcagggatgccctgctggtaatccagtggaacattcgggccttcatgggggtcaagaattggccctggatgaagctctacttcaagatcaagccgctgctgaagagcgcagagacggagaaggagatggccaccatgaaggaagagttcgggcgcatcaaagagacgctggagaagtccgaggctcgccgcaaggagctggaggagaagatggtgtccctgctgcaggagaagaatgacctgcagctccaagtgcaggcggaacaagacaacctcaatgatgctgaggagcgctgcgaccagctgatcaaaaacaagattcagctggaggccaaagtaaaggagatgaatgagaggctggaggatgaggaggagatgaacgcggagctcactgccaagaagcgcaagctggaagacgagtgctcagagctcaagaaggacattgatgacctggagctgacactggccaaggtggagaaggagaagcatgcaacagagaacaaggtgaagaacctaacagaggagatggctgggctggatgaaatcatcgctaagctgaccaaggagaagaaagctctacaagaggcccatcagcaggccctggatgaccttcaggttgaggaagacaaggtcaacagcctgtccaagtctaaggtcaagctggagcagcaggtggatgatctggagggatccctagagcaagagaagaaggtgcgcatggacctggagcgagcaaagcggaaactggagggcgacctgaagctgacccaggagagcatcatggacctggaaaatgataaactgcagctggaagaaaagcttaagaagaaggagtttgacattaatcagcagaacagtaagattgaggatgagcaggtgctggcccttcaactacagaagaaactgaaggaaaaccaggcacgcatcgaggagctggaggaggagctggaggccgagcgcaccgccagggctaaggtggagaagctgcgctcagacctgtctcgggagctggaggagatcagcgagcggctggaagaggccggcggggccacgtccgtgcagatcgagatgaacaagaagcgcgaggccgagttccagaagatgcggcgggacctggaggaggccacgctgcagcacgaggccactgccgcggccctgcgcaagaagcacgccgacagcgtggccgagctgggcgagcagatcgacaacctgcagcgggtgaagcagaagctggagaaggagaagagcgagttcaagctggagctggatgacgtcacctccaacatggagcagatcatcaaggccaaggcaaacctggagaaagtgtctcggacgctggaggaccaggccaatgagtaccgcgtgaagctagaagaggcccaacgctccctcaatgatttcaccacccagcgagccaagctgcagaccgagaatggagagttggcccggcagctagaggaaaaggaggcgctaatctcgcagctgacccgggggaagctctcttatacccagcaaatggaggacctcaaaaggcagctggaggaggagggcaaggcgaagaacgccctggcccatgcactgcagtcggcccggcatgactgcgacctgctgcgggagcagtacgaggaggagacagaggccaaggccgagctgcagcgcgtcctgtccaaggccaactcggaggtggcccagtggaggaccaagtatgagacggacgccattcagcggactgaggagctcgaagaggccaaaaagaagctggcccagcggctgcaggatgccgaggaggccgtggaggctgttaatgccaagtgctcctcactggagaagaccaagcaccggctacagaatgagatagaggacttgatggtggacgtagagcgctccaatgctgctgctgcagccctggacaagaagcagagaaactttgacaagatcctggccgagtggaagcagaagtatgaggagtcgcagtctgagctggagtcctcacagaaggaggctcgctccctcagcacagagctcttcaagctcaagaacgcctacgaggagtccctggagcacctagagaccttcaagcgggagaacaagaaccttcaggaggaaatctcggaccttactgagcagctaggagaaggaggaaagaatgtgcatgagctggagaaggtccgcaaacagctggaggtggagaagctggagctgcagtcagccctggaggaggcagaggcctccctggagcacgaggagggcaagatcctccgggcccagctagagttcaaccagatcaaggcagagatcgagcggaagctggcagagaaggacgaggagatggaacaggccaagcgcaaccaccagcgggtggtggactcgctgcagacctccctggatgcagagacacgcagccgcaacgaggtcctgagggtgaagaagaagatggaaggagacctcaatgagatggagatccagctcagccacgccaaccgcatggctgccgaggcccagaagcaagtcaagagcctccagagcttgctgaaggacacccagatccagctggacgatgcggtccgtgccaacgacgacctgaaggagaacatcgccatcgtggagcggcgcaacaacctgctgcaggctgagctggaggagctgcgtgccgtggtggagcagacagagcggtcccggaagctggcggagcaggagctgattgagaccagcgagcgggtgcagctgctgcattcccagaacaccagcctcatcaaccagaagaagaagatggagtcggatctgacccagctccagtcggaagtggaggaggcagtgcaggagtgcagaaacgccgaggagaaggccaagaaggccatcacggatgccgccatgatggcagaggagctgaagaaggagcaggacaccagcgcccacctggagcgcatgaagaagaacatggagcagaccattaaggacctgcagcaccggctggacgaggccgagcagatcgccctcaagggaggcaagaagcagctgcagaagctggaagcgcgggtgcgggagctggagggtgagctggaggccgagcagaagcgcaacgcagagtcggtgaagggcatgaggaagagcgagcggcgcatcaaggagctcacctaccagacagaggaagacaaaaagaacctgctgcggctacaggacctggtggacaagctgcaactgaaggtcaaggcctacaagcgccaggccgaggaggcggaggagcaagccaacaccaacctgtccaagttccgcaaggtgcagcatgagctggatgaggcagaggagcgggcggacatcgctgagtcccaggtcaacaagcttcgagccaagagccgtgacattggtgccaagcaaaaaatgcacgatgaggagtgacactgcctcgggaacctcactcttgccaacctgtaataaatatgagtgcc

SEQ ID NO: 13235 - DNA, 1666 bp, Homo sapiens
  source 1..1666: mol_type = unassigned DNA
gggcagctggcgggcagcgggtgagggggtggcggggacgcgagtggcggccgcggggccccggacaagggtccgcagagctgcagccttcgagggccagccctctccgagtccggggctgggtcccaccagtgacaaggcggcagccccgcgcacaccaaagagaaggcggctgtggcggcagcggcagccccagccatgctgtgttatgtgacgaggccggacgcggtgctgatggaggtggaggtggaggcgaaagccaacggcgaggactgcctcaaccaggtgtgcaggcgactgggaatcatagaagttgactattttggactgcagtttacgggtagcaaaggtgaaagtttatggctaaacctgagaaaccggatctcccagcagatggatgggctagccccttacaggcttaaacttagagtcaagttcttcgtggagcctcatctcatcttacaggagcagactaggcatatctttttcttgcacatcaaggaggccctcttggcaggccacctcttgtgttccccagagcaggcagtggaactcagtgccctcctggcccagaccaagtttggagactacaaccagaacactgccaagtataactatgaggagctctgtgccaaggagctctcctctgccaccttgaacagcattgttgcaaaacataaggagttggaggggaccagccaggcttcagctgaataccaagttttgcagattgtgtcggcaatggaaaactatggcatagaatggcattctgtgcgggatagcgaagggcagaaactgctcattggggttggacctgaaggaatctcaatttgtaaagatgactttagcccaattaataggatagcttatcctgtggtgcagatggccacccagtcaggaaagaatgtatatttgacggtcaccaaggaatctgggaacagcatcgtgctcttgtttaaaatgatcagcaccagggcggccagcgggctctaccgagcgataacagagacgcacgcattctacaggtgtgacacagtgaccagcgccgtgatgatgcagtatagccgtgacttgaagggccacttggcatctctgtttctgaatgaaaacattaaccttggcaagaaatatgtctttgatattaaaagaacatcaaaggaggtgtatgaccatgccaggagggctctgtacaatgctggcgttgtggacctcgtttcaagaaacaaccagagcccttcacactcgcctctgaagtcctcagaaagcagcatgaactgcagcagctgcgagggcctcagctgccagcagacccgggtgctgcaggagaagctacgcaagctgaaggaagccatgctgtgcatggtgtgctgcgaggaggagatcaactccaccttctgtccctgtggccacactgtgtgctgtgagagctgcgccgcccagctacagtcatgtcccgtctgcaggtcgcgtgtggagcatgtccagcacgtctatctgccaacgcacaccagtcttctcaatctgactgtaatctaatctgttgtgcttttgttggacttggcatgtttccatgaactgcactattataaactattaaaatgatagattgtggagaaagtaattattccaacacccatctgccatgcgatgttaaaaaaaaaaaaaa

SEQ ID NO: 13236 - DNA, 2796 bp, Homo sapiens
  source 1..2796: mol_type = unassigned DNA
gcggccgcggggccccggacaagggtccgcagagctgcagccttcgagggccagccctctccgagtccggggctgggtcccaccagtgacaaggcggcagccccgcgcacaccaaagagaaggcggctgtggcggcagcggcagccccagccatgctgtgttatgtgacgaggccggacgcggtgctgatggaggtggaggtggaggcgaaagccaacggcgaggactgcctcaaccaggcatatctttttcttgcacatcaaggaggccctcttggcaggccacctcttgtgttccccagagcaggcagtggaactcagtgccctcctggcccagaccaagtttggagactacaaccagaacactgccaagtataactatgaggagctctgtgccaaggagctctcctctgccaccttgaacagcattgttgcaaaacataaggagttggaggggaccagccaggcttcagctgaataccaagttttgcagattgtgtcggcaatggaaaactatggcatagaatggcattctgtgcgggatagcgaagggcagaaactgctcattggggttggacctgaaggaatctcaatttgtaaagatgactttagcccaattaataggatagcttatcctgtggtgcagatggccacccagtcaggaaagaatgtatatttgacggtcaccaaggaatctgggaacagcatcgtgctcttgtttaaaatgatcagcaccagggcggccagcgggctctaccgagcgataacagagacgcacgcattctacaggtgtgacacagtgaccagcgccgtgatgatgcagtatagccgtgacttgaagggccacttggcatctctgtttctgaatgaaaacattaaccttggcaagaaatatgtctttgatattaaaagaacatcaaaggaggtgtatgaccatgccaggagggctctgtacaatgctggcgttgtggacctcgtttcaagaaacaaccagagcccttcacactcgcctctgaagtcctcagaaagcagcatgaactgcagcagctgcgagggcctcagctgccagcagacccgggtgctgcaggagaagctacgcaagctgaaggaagccatgctgtgcatggtgtgctgcgaggaggagatcaactccaccttctgtccctgtggccacactgtgtgctgtgagagctgcgccgcccagctacagtcatgtcccgtctgcaggtcgcgtgtggagcatgtccagcacgtctatctgccaacgcacaccagtcttctcaatctgactgtaatctaatctgttgtgcttttgttggacttggcatgtttccatgaactgcactattataaactattaaaatgatagattgtggagaaagtaattattccaacacccatctgccatgcgatgttaaaaaaaaaaaaaaggaagaaaaataacacagctactcctcactgcaaaaacatatccatgcgtagaatcaacaactccagtcatgggaccaggaggagctctgggacgcagacacattccttggatgttgattttttttatgatctagtaaaggaataggtaaagtctttgatgtcagtgaagtggcaacatagccaaaaagttgggtaccttttaggaaatgatgttgtaagtctccttaatgtatcctgaggtaagtttcctactggcagcagattttgtaagaattacttttaagaatttcattctttttgtatggtcatggagctccaaccatttttaataggaaagtcttttgtaaattgttgtcgttttaatgtcatttctgtctttataacttgatcaagaatgattggaaggcaaacaggtttacaaatcaattctgtgacttttaaaaagttgacaatgttgtcagatttaaaccagtgtggctagtaaaaagcagctcactcaatgtgggtggctccctattcctttacgctccccctatccctaccccacaagcctttcgattataaaatactaccaatcttgttataagattactgtggagtagtcaagtactccccgggccttctgagctggtggaatattttatttcagactgaaaacagagagcactctccttgggaagggaaagcggagcttgctgagtgagagatggagcctcatggtgtacaactgagggtagttaactcatcacttctcccaagcactcgatcccagcttcacccactggtgttgctttgcttgaactgttcaagccttttatagccttaccataagtatttagatatggtgtccttttctgtttttggggggggagttttgttgtgtttttttaaagtaagtgcttaagtattaactttgggttgtcccctctgtatgtttcgaaggggttttggttctttttgcttctgttttcttaaacatgttttccactcccacttgggcattttggaagctggtcagctagcaggttttctgggatgtcgggagacctagatgaccttatcgggtgcaatactagctaaggtaaagctagaaacctacactgtcactttactgagatttctgagtatacttttcatattgccttaatgtagcagtaatgtgtttatgcatttgtttctttgcacagacattttgtcaaatattaaaactctacttttttatggcacatattagcatataagcctttattccaagaggtatttattttttcacttgtaaaaaaataatgtttccacgtaaagaactctgttatatcctagaggactctgtcttttatattcgggataataaagactttaaagcaaa

SEQ ID NO: 13237 - DNA, 8038 bp, Homo sapiens
  source 1..8038: mol_type = unassigned DNA
gccgcggcgcgggactgctcacctccaagcgctcgcgcggggatcgcggctcctgctcactttgcggcccgctgtcctcctgcccgccccgagggcccccggccggagcgcagagggagggggccgcgctcgccagcaccccgccgccttcccccgcctgggggaagaatgtgccaccagctgttctccgcttgcgagcgctgcgcccagtagtgaggaacttggaggaagaagagacaaaggctgccgtcgggacgggcgagttagggacttgggtttgggcgaacaaaaggtgagaaggacaagaagggaccgggcgatggcagcaggggagccccgcgggcgcgcgtcctcgggagtggcgccgtgacacgcatggtttccccggacccgcggcggcgctgacttccgcgagtcggagcggcactcggcgagtccgggactgcgctggaacaatggataacttcttcaccgagggaacacgggtctggctgagagaaaatggccagcattttccaagtactgtaaattcctgtgcagaaggcatcgtcgtcttccggacagactatggtcaggtattcacttacaagcagagcacaattacccaccagaaggtgactgctatgcaccccacgaacgaggagggcgtggatgacatggcgtccttgacagagctccatggcggctccatcatgtataacttattccagcggtataagagaaatcaaatatatacctacatcggctccatcctggcctccgtgaacccctaccagcccatcgccgggctgtacgagcctgccaccatggagcagtacagccggcgccacctgggcgagctgcccccgcacatcttcgccatcgccaacgagtgctaccgctgcctgtggaagcgccacgacaaccagtgcatcctcatcagtggtgaaagtggggcaggtaaaaccgaaagcactaaattgatcctcaagtttctgtcagtcatcagtcaacagtctttggaattgtccttaaaggagaagacatcctgtgttgaacgagctattcttgaaagcagccccatcatggaagctttcggcaatgcgaagaccgtgtacaacaacaactctagtcgctttgggaagtttgttcagctgaacatctgtcagaaaggaaatattcagggcgggagaattgtagattatttattagaaaaaaaccgagtagtaaggcaaaatcccggggaaaggaattatcacatattttatgcactgctggcagggctggaacatgaagaaagagaagaattttatttatctacgccagaaaactaccactacttgaatcagtctggatgtgtagaagacaagacaatcagtgaccaggaatcctttagggaagttattacggcaatggacgtgatgcagttcagcaaggaggaagttcgggaagtgtcgaggctgcttgctggtatactgcatcttgggaacatagaatttatcactgctggtggggcacaggtttccttcaaaacagctttgggcagatctgcggagttacttgggctggacccaacacagctcacagatgctttgacccagagatcaatgttcctcaggggagaagagatcctcacgcctctcaatgttcaacaggcagtagacagcagggactccctggccatggctctgtatgcgtgctgctttgagtgggtaatcaagaagatcaacagcaggatcaaaggcaatgaggacttcaagtctattggcatcctcgacatctttggatttgaaaactttgaggttaatcactttgaacagttcaatataaactatgcaaacgagaaacttcaggagtacttcaacaagcatattttttctttagaacaactagaatatagccgggaaggattagtgtgggaagatattgactggatagacaatggagaatgcctggacttgattgagaagaaacttggcctcctagcccttatcaatgaagaaagccattttcctcaagccacagacagcaccttattggagaagctacacagtcagcatgcgaataaccacttttatgtgaagcccagagttgcagttaacaattttggagtgaagcactatgctggagaggtgcaatatgatgtccgaggtatcttggagaagaacagagatacatttcgagatgaccttctcaatttgctaagagaaagccgatttgactttatctacgatctttttgaacatgtttcaagccgcaacaaccaggataccttgaaatgtggaagcaaacatcggcggcctacagtcagctcacagttcaaggactcactgcattccttaatggcaacgctaagctcctctaatcctttctttgttcgctgtatcaagccaaacatgcagaagatgccagaccagtttgaccaggcggttgtgctgaaccagctgcggtactcagggatgctggagactgtgagaatccgcaaagctgggtatgcggtccgaagaccctttcaggacttttacaaaaggtataaagtgctgatgaggaatctggctctgcctgaggacgtccgagggaagtgcacgagcctgctgcagctctatgatgcctccaacagcgagtggcagctggggaagaccaaggtctttcttcgagaatccttggaacagaaactggagaagcggagggaagaggaagtgagccacgcggccatggtgattcgggcccatgtcttgggcttcttagcacgaaaacaatacagaaaggtcctttattgtgtggtgataatacagaagaattacagagcattccttctgaggaggagatttttgcacctgaaaaaggcagccatagttttccagaagcaactcagaggtcagattgctcggagagtttacagacaattgctggcagagaaaagggagcaagaagaaaagaagaaacaggaagaggaagaaaagaagaaacgggaggaagaagaaagagaaagagagagagagcgaagagaagccgagctccgcgcccagcaggaagaagaaacgaggaagcagcaagaactcgaagccttgcagaagagccagaaggaagctgaactgacccgtgaactggagaaacagaaggaaaataagcaggtggaagagatcctccgtctggagaaagaaatcgaggacctgcagcgcatgaaggagcagcaggagctgtcgctgaccgaggcttccctgcagaagctgcaggagcggcgggaccaggagctccgcaggctggaggaggaagcgtgcagggcggcccaggagttcctcgagtccctcaatttcgacgagatcgacgagtgtgtccggaatatcgagcggtccctgtcggtgggaagcgaattttccagcgagctggctgagagcgcatgcgaggagaagcccaacttcaacttcagccagccctacccagaggaggaggtcgatgagggcttcgaagccgacgacgacgccttcaaggactcccccaaccccagcgagcacggccactcagaccagcgaacaagtggcatccggaccagcgatgactcttcagaggaggacccatacatgaacgacacggtggtgcccaccagccccagtgcggacagcacggtgctgctcgccccatcagtgcaggactccgggagcctacacaactcctccagcggcgagtccacctactgcatgccccagaacgctggggacttgccctccccagacggcgactacgactacgaccaggatgactatgaggacggtgccatcacttccggcagcagcgtgaccttctccaactcctacggcagccagtggtcccccgactaccgctgctctgtggggacctacaacagctcgggtgcctaccggttcagctctgagggggcgcagtcctcgtttgaagatagtgaagaggactttgattccaggtttgatacagatgatgagctttcataccggcgtgactctgtgtacagctgtgtcactctgccgtatttccacagctttctgtacatgaaaggtggcctgatgaactcttggaaacgccgctggtgcgtcctcaaggatgaaaccttcttgtggttccgctccaagcaggaggccctcaagcaaggctggctccacaaaaaaggggggggctcctccacgctgtccaggagaaattggaagaagcgctggtttgtcctccgccagtccaagctgatgtactttgaaaacgacagcgaggagaagctcaagggcaccgtagaagtgcgaacggcaaaagagatcatagataacaccaccaaggagaatgggatcgacatcattatggccgataggactttccacctgattgcagagtccccagaagatgccagccagtggttcagcgtgctgagtcaggtccacgcgtccacggaccaggagatccaggagatgcatgatgagcaggcaaacccacagaatgctgtgggcaccttggatgtggggctgattgattctgtgtgtgcctctgacagccctgatagacccaactcgtttgtgatcatcacggccaaccgggtgctgcactgcaacgccgacacgccggaggagatgcaccactggataaccctgctgcagaggtccaaaggggacaccagagtggagggccaggaattcatcgtgagaggatggttgcacaaagaggtgaagaacagtccaaagatgtcttcactgaaactgaagaaacggtggtttgtactcacccacaattccctggattactacaagagttcagagaagaacgcgctcaaactggggaccctggtcctcaacagcctctgctctgtcgtccccccagatgagaagatattcaaagagacaggctactggaacgtcaccgtgtacgggcgcaagcactgttaccggctctacaccaagctgctcaacgaggccacccggtggtccagtgccattcaaaacgtgactgacaccaaggccccgatcgacacccccacccagcagctgattcaagatatcaaggagaactgcctgaactcggatgtggtggaacagatttacaagcggaacccgatccttcgatacacccatcaccccttgcactccccgctcctgccccttccgtatggggacataaatctcaacttgctcaaagacaaaggctataccacccttcaggatgaggccatcaagatattcaattccctgcagcaactggagtccatgtctgacccaattccaataatccagggcatcctacagacagggcatgacctgcgacctctgcgggacgagctgtactgccagcttatcaaacagaccaacaaagtgccccaccccggcagtgtgggcaacctgtacagctggcagatcctgacatgcctgagctgcaccttcctgccgagtcgagggattctcaagtatctcaagttccatctgaaaaggatacgggaacagtttccaggaagcgagatggaaaaatacgctctcttcacttacgaatctcttaagaaaaccaaatgccgagagtttgtgccttcccgagatgaaatagaagctctgatccacaggcaggaaatgacatccacggtctattgccatggcggcggctcctgcaagatcaccatcaactcccacaccaccgctggggaggtggtggagaagctgatccgaggcctggccatggaggacagcaggaacatgtttgctttgtttgaatacaacggccacgtcgacaaagccattgaaagtcgaaccgtcgtagctgatgtcttagccaagtttgaaaagctggctgccacatccgaggttggggacctgccatggaaattctacttcaaactttactgcttcctggacacagacaacgtgccaaaagacagtgtggagtttgcatttatgtttgaacaggcccacgaagcggttatccatggccaccatccagccccggaagaaaacctccaggttcttgctgccctgcgactccagtatctgcagggggattatactctgcacgctgccatcccacctctcgaagaggtttattccctgcagagactcaaggcccgcatcagccagtcaaccaaaaccttcaccccttgtgaacggctggagaagaggcggacgagcttcctagaggggaccctgaggcggagcttccggacaggatccgtggtccggcagaaggtcgaggaggagcagatgctggacatgtggattaaggaagaagtctcctctgctcgagccagtatcattgacaagtggaggaaatttcagggaatgaaccaggaacaggccatggccaagtacatggccttgatcaaggagtggcctggctatggctcgacgctgtttgatgtggagtgcaaggaaggtggcttccctcaggaactctggttgggtgtcagcgcggacgccgtctccgtctacaagcgtggagagggaagaccactggaagtcttccagtatgaacacatcctctcttttggggcacccctggcgaatacgtataagatcgtggtcgatgagagggagctgctctttgaaaccagtgaggtggtggatgtggccaagctcatgaaagcctacatcagcatgatcgtgaagaagcgctacagcacgacacgctccgccagcagccagggcagctccaggtgaaggcgggacagagcccacctgtctttgctacctgaacgcaccaccctctggcctaggctggctccagtgtgccatgcccagccaaaacaaacacagagctgcccaggctttctggaagcttctggtctgagggaggtgtctccgaggatccttttgcctgccgccttcattgatcctgtattaagctgtcaactttaacagtctgcacagtttccaaagctttactactcttagaggacacatgccttaaaaaaggaggggaggaaccacgctgccaccaaagcagccggaagtgccttaacttgtggaaccaacactaatcgaccgtaactgtgctactgaagggaactgcctttcccccttctgggggagacttaacagagcgtggaaggggggcattctctgtcaatgatgcactaacctcccaacctgatttccccgaatctgagggaaggtgagggagtgggaagggggatggagagctcgaggggacagtgtgtttgagctggagtgctgcgggcagcctttctcatggaatgacatgaatcaacttttttctttgtttcatcttttaagtgtacgtgcttgcctgttcgtgcatgtgttcataaactcaacactttaatcatggtttcatgagcattaaaaagcaaagggaaaaaggatgtgtaatggtgtacacagtctgtatattttaataatgcagagctatagtctcaattgttactttataaggtggttttattaacaaacccaaatcctggattttcctgtctttgctgtattttgaaaaacacgtgttgactccattgttttacatgtagcaaagtctgccatctgtgtctgctgtattataaacagataagcagcctacaagataactgtatttataaaccactcttcaacagctggctccagtgctggttttagaacaagaatgaagtcattttggagtctttcatgtctaaaagatttaagttaaaaacaaagtgttacttggaaggttagcttctatcattctggatagattacagatataataaccatgttgactatgggggagagacgctgcattccagaaacgtcttaacacttgagtgaatcttcaaaggaccctgacattaaatgctgaggctttaatacacacatattttatcccaagtttataatggtggtctgaacaaggcacctgtaaataaatcagcatttatgaccagaagaaaaataatctggtcttggactttttatttttatatggaaaagttttaaggacttgggccaactaagtctacccacacgaaaaaagaaatttgccttgtccctttgtgtacaaccatgcaaaactgtttgttggctcacagaagttctgacaataaaagatactagctaacacgctgtgtgtttcc

SEQ ID NO: 13238 - DNA, 4839 bp, Homo sapiens
  source 1..4839: mol_type = unassigned DNA
ttctttctaatgccaggcaatcaaggctgcacttgctacccttctgcaggaagcttcccagccagcacagtttctctctgccctgcctcttaatccccacccctgctcccaggcctgggacactgctaaccacccctccttcctgacacctctctgaccacccctcctcctcttgactggttcctctggaggtaggcatggcctcgggttctgcccccagtttctcactcgctgggctccaaaagaaacactggcttctctccttcagctccaggctagatgccagaccagtttgaccaggcggttgtgctgaaccagctgcggtactcagggatgctggagactgtgagaatccgcaaagctgggtatgcggtccgaagaccctttcaggacttttacaaaaggtataaagtgctgatgaggaatctggctctgcctgaggacgtccgagggaagtgcacgagcctgctgcagctctatgatgcctccaacagcgagtggcagctggggaagaccaaggtctttcttcgagaatccttggaacagaaactggagaagcggagggaagaggaagtgagccacgcggccatggtgattcgggcccatgtcttgggcttcttagcacgaaaacaatacagaaaggtcctttattgtgtggtgataatacagaagaattacagagcattccttctgaggaggagatttttgcacctgaaaaaggcagccatagttttccagaagcaactcagaggtcagattgctcggagagtttacagacaattgctggcagagaaaagggagcaagaagaaaagaagaaacaggaagaggaagaaaagaagaaacgggaggaagaagaaagagaaagagagagagagcgaagagaagccgagctccgcgcccagcaggaagaagaaacgaggaagcagcaagaactcgaagccttgcagaagagccagaaggaagctgaactgacccgtgaactggagaaacagaaggaaaataagcaggtggaagagatcctccgtctggagaaagaaatcgaggacctgcagcgcatgaaggagcagcaggagctgtcgctgaccgaggcttccctgcagaagctgcaggagcggcgggaccaggagctccgcaggctggaggaggaagcgtgcagggcggcccaggagttcctcgagtccctcaatttcgacgagatcgacgagtgtgtccggaatatcgagcggtccctgtcggtgggaagcgaattttccagcgagctggctgagagcgcatgcgaggagaagcccaacttcaacttcagccagccctacccagaggaggaggtcgatgagggcttcgaagccgacgacgacgccttcaaggactcccccaaccccagcgagcacggccactcagaccagcgaacaagtggcatccggaccagcgatgactcttcagaggaggacccatacatgaacgacacggtggtgcccaccagccccagtgcggacagcacggtgctgctcgccccatcagtgcaggactccgggagcctacacaactcctccagcggcgagtccacctactgcatgccccagaacgctggggacttgccctccccagacggcgactacgactacgaccaggatgactatgaggacggtgccatcacttccggcagcagcgtgaccttctccaactcctacggcagccagtggtcccccgactaccgctgctctgtggggacctacaacagctcgggtgcctaccggttcagctctgagggggcgcagtcctcgtttgaagatagtgaagaggactttgattccaggtttgatacagatgatgagctttcataccggcgtgactctgtgtacagctgtgtcactctgccgtatttccacagctttctgtacatgaaaggtggcctgatgaactcttggaaacgccgctggtgcgtcctcaaggatgaaaccttcttgtggttccgctccaagcaggaggccctcaagcaaggctggctccacaaaaaaggggggggctcctccacgctgtccaggagaaattggaagaagcgctggtttgtcctccgccagtccaagctgatgtactttgaaaacgacagcgaggagaagctcaagggcaccgtagaagtgcgaacggcaaaagagatcatagataacaccaccaaggagaatgggatcgacatcattatggccgataggactttccacctgattgcagagtccccagaagatgccagccagtggttcagcgtgctgagtcaggtccacgcgtccacggaccaggagatccaggagatgcatgatgagcaggcaaacccacagaatgctgtgggcaccttggatgtggggctgattgattctgtgtgtgcctctgacagccctgatagacccaactcgtttgtgatcatcacggccaaccgggtgctgcactgcaacgccgacacgccggaggagatgcaccactggataaccctgctgcagaggtccaaaggggacaccagagtggagggccaggaattcatcgtgagaggatggttgcacaaagaggtgaagaacagtccaaagatgtcttcactgaaactgaagaaacggtggtttgtactcacccacaattccctggattactacaagagttcagagaagaacgcgctcaaactggggaccctggtcctcaacagcctctgctctgtcgtccccccagatgagaagatattcaaagagacaggctactggaacgtcaccgtgtacgggcgcaagcactgttaccggctctacaccaagctgctcaacgaggccacccggtggtccagtgccattcaaaacgtgactgacaccaaggccccgatcgacacccccacccagcagctgattcaagatatcaaggagaactgcctgaactcggatgtggtggaacagatttacaagcggaacccgatccttcgatacacccatcaccccttgcactccccgctcctgccccttccgtatggggacataaatctcaacttgctcaaagacaaaggctataccacccttcaggatgaggccatcaagatattcaattccctgcagcaactggagtccatgtctgacccaattccaataatccagggcatcctacagacagggcatgacctgcgacctctgcgggacgagctgtactgccagcttatcaaacagaccaacaaagtgccccaccccggcagtgtgggcaacctgtacagctggcagatcctgacatgcctgagctgcaccttcctgccgagtcgagggattctcaagtatctcaagttccatctgaaaaggatacgggaacagtttccaggaagcgagatggaaaaatacgctctcttcacttacgaatctcttaagaaaaccaaatgccgagagtttgtgccttcccgagatgaaatagaagctctgatccacaggcaggaaatgacatccacggtctattgccatggcggcggctcctgcaagatcaccatcaactcccacaccaccgctggggaggtggtggagaagctgatccgaggcctggccatggaggacagcaggaacatgtttgctttgtttgaatacaacggccacgtcgacaaagccattgaaagtcgaaccgtcgtagctgatgtcttagccaagtttgaaaagctggctgccacatccgaggttggggacctgccatggaaattctacttcaaactttactgcttcctggacacagacaacgtgccaaaagacagtgtggagtttgcatttatgtttgaacaggcccacgaagcggttatccatggccaccatccagccccggaagaaaacctccaggttcttgctgccctgcgactccagtatctgcagggggattatactctgcacgctgccatcccacctctcgaagaggtttattccctgcagagactcaaggcccgcatcagccagtcaaccaaaaccttcaccccttgtgaacggctggagaagaggcggacgagcttcctagaggggaccctgaggcggagcttccggacaggatccgtggtccggcagaaggtcgaggaggagcagatgctggacatgtggattaaggaagaagtctcctctgctcgagccagtatcattgacaagtggaggaaatttcagggaatgaaccaggaacaggccatggccaagtacatggccttgatcaaggagtggcctggctatggctcgacgctgtttgatgtggagtgcaaggaaggtggcttccctcaggaactctggttgggtgtcagcgcggacgccgtctccgtctacaagcgtggagagggaagaccactggaagtcttccagtatgaacacatcctctcttttggggcacccctggcgaatacgtataagatcgtggtcgatgagagggagctgctctttgaaaccagtgaggtggtggatgtggccaagctcatgaaagcctacatcagcatgatcgtgaagaagcgctacagcacgacacgctccgccagcagccagggcagctccaggtgaaggcgggacagagcccacctgtctttgctacctgaacgcaccaccctctggcctaggctggctccagtgtgccatgcccagccaaaacaaacacagagctgcccaggctttctggaagcttctggtctgagggaggtgtctccgaggatccttttgcctgccgccttcattgatcctgtattaagctgtcaactttaacagtctgcacagtttccaaagctttactactcttagaggacacatgccttaaaaaaggaggggaggaaccacgctgccaccaaagcagccggaagtgccttaacttgtggaacc

SEQ ID NO: 13239 - DNA, 4803 bp, Homo sapiens
  source 1..4803: mol_type = unassigned DNA
agcaaagagtgctgttcttgttctctgggtggattttccaagatcacaactaaactgcttgattttgtcctgggactttttttaaaaaaaaattattgattggcttttaaaatcaagaatctttgggccctgaaatgtaattacacatttgttgatgcgtgcatgatggttagtttgcccctgcagtcaaaagtgtcttcagcagttcctatcacgtcagcctcgccaggctggacttcctttgagtagaatcaggaatgaattaagcagcacagcccgagacgcaccacataaaaggctgggaacaccagccagccgaagaaagcccatttttgtgtctgtcagcttagatgcccttgcccggactgctaaagatgcagctatttacagtggacagaaactgaaggggtgaaagaaaacccaagatgccagaccagtttgaccaggcggttgtgctgaaccagctgcggtactcagggatgctggagactgtgagaatccgcaaagctgggtatgcggtccgaagaccctttcaggacttttacaaaaggtataaagtgctgatgaggaatctggctctgcctgaggacgtccgagggaagtgcacgagcctgctgcagctctatgatgcctccaacagcgagtggcagctggggaagaccaaggtctttcttcgagaatccttggaacagaaactggagaagcggagggaagaggaagtgagccacgcggccatggtgattcgggcccatgtcttgggcttcttagcacgaaaacaatacagaaaggtcctttattgtgtggtgataatacagaagaattacagagcattccttctgaggaggagatttttgcacctgaaaaaggcagccatagttttccagaagcaactcagaggtcagattgctcggagagtttacagacaattgctggcagagaaaagggagcaagaagaaaagaagaaacaggaagaggaagaaaagaagaaacgggaggaagaagaaagagaaagagagagagagcgaagagaagccgagctccgcgcccagcaggaagaagaaacgaggaagcagcaagaactcgaagccttgcagaagagccagaaggaagctgaactgacccgtgaactggagaaacagaaggaaaataagcaggtggaagagatcctccgtctggagaaagaaatcgaggacctgcagcgcatgaaggagcagcaggagctgtcgctgaccgaggcttccctgcagaagctgcaggagcggcgggaccaggagctccgcaggctggaggaggaagcgtgcagggcggcccaggagttcctcgagtccctcaatttcgacgagatcgacgagtgtgtccggaatatcgagcggtccctgtcggtgggaagcgaattttccagcgagctggctgagagcgcatgcgaggagaagcccaacttcaacttcagccagccctacccagaggaggaggtcgatgagggcttcgaagccgacgacgacgccttcaaggactcccccaaccccagcgagcacggccactcagaccagcgaacaagtggcatccggaccagcgatgactcttcagaggaggacccatacatgaacgacacggtggtgcccaccagccccagtgcggacagcacggtgctgctcgccccatcagtgcaggactccgggagcctacacaactcctccagcggcgagtccacctactgcatgccccagaacgctggggacttgccctccccagacggcgactacgactacgaccaggatgactatgaggacggtgccatcacttccggcagcagcgtgaccttctccaactcctacggcagccagtggtcccccgactaccgctgctctgtggggacctacaacagctcgggtgcctaccggttcagctctgagggggcgcagtcctcgtttgaagatagtgaagaggactttgattccaggtttgatacagatgatgagctttcataccggcgtgactctgtgtacagctgtgtcactctgccgtatttccacagctttctgtacatgaaaggtggcctgatgaactcttggaaacgccgctggtgcgtcctcaaggatgaaaccttcttgtggttccgctccaagcaggaggccctcaagcaaggctggctccacaaaaaaggggggggctcctccacgctgtccaggagaaattggaagaagcgctggtttgtcctccgccagtccaagctgatgtactttgaaaacgacagcgaggagaagctcaagggcaccgtagaagtgcgaacggcaaaagagatcatagataacaccaccaaggagaatgggatcgacatcattatggccgataggactttccacctgattgcagagtccccagaagatgccagccagtggttcagcgtgctgagtcaggtccacgcgtccacggaccaggagatccaggagatgcatgatgagcaggcaaacccacagaatgctgtgggcaccttggatgtggggctgattgattctgtgtgtgcctctgacagccctgatagacccaactcgtttgtgatcatcacggccaaccgggtgctgcactgcaacgccgacacgccggaggagatgcaccactggataaccctgctgcagaggtccaaaggggacaccagagtggagggccaggaattcatcgtgagaggatggttgcacaaagaggtgaagaacagtccaaagatgtcttcactgaaactgaagaaacggtggtttgtactcacccacaattccctggattactacaagagttcagagaagaacgcgctcaaactggggaccctggtcctcaacagcctctgctctgtcgtccccccagatgagaagatattcaaagagacaggctactggaacgtcaccgtgtacgggcgcaagcactgttaccggctctacaccaagctgctcaacgaggccacccggtggtccagtgccattcaaaacgtgactgacaccaaggccccgatcgacacccccacccagcagctgattcaagatatcaaggagaactgcctgaactcggatgtggtggaacagatttacaagcggaacccgatccttcgatacacccatcaccccttgcactccccgctcctgccccttccgtatggggacataaatctcaacttgctcaaagacaaaggctataccacccttcaggatgaggccatcaagatattcaattccctgcagcaactggagtccatgtctgacccaattccaataatccagggcatcctacagacagggcatgacctgcgacctctgcgggacgagctgtactgccagcttatcaaacagaccaacaaagtgccccaccccggcagtgtgggcaacctgtacagctggcagatcctgacatgcctgagctgcaccttcctgccgagtcgagggattctcaagtatctcaagttccatctgaaaaggatacgggaacagtttccaggaagcgagatggaaaaatacgctctcttcacttacgaatctcttaagaaaaccaaatgccgagagtttgtgccttcccgagatgaaatagaagctctgatccacaggcaggaaatgacatccacggtctattgccatggcggcggctcctgcaagatcaccatcaactcccacaccaccgctggggaggtggtggagaagctgatccgaggcctggccatggaggacagcaggaacatgtttgctttgtttgaatacaacggccacgtcgacaaagccattgaaagtcgaaccgtcgtagctgatgtcttagccaagtttgaaaagctggctgccacatccgaggttggggacctgccatggaaattctacttcaaactttactgcttcctggacacagacaacgtgccaaaagacagtgtggagtttgcatttatgtttgaacaggcccacgaagcggttatccatggccaccatccagccccggaagaaaacctccaggttcttgctgccctgcgactccagtatctgcagggggattatactctgcacgctgccatcccacctctcgaagaggtttattccctgcagagactcaaggcccgcatcagccagtcaaccaaaaccttcaccccttgtgaacggctggagaagaggcggacgagcttcctagaggggaccctgaggcggagcttccggacaggatccgtggtccggcagaaggtcgaggaggagcagatgctggacatgtggattaaggaagaagtctcctctgctcgagccagtatcattgacaagtggaggaaatttcagggaatgaaccaggaacaggccatggccaagtacatggccttgatcaaggagtggcctggctatggctcgacgctgtttgatgtggagtgcaaggaaggtggcttccctcaggaactctggttgggtgtcagcgcggacgccgtctccgtctacaagcgtggagagggaagaccactggaagtcttccagtatgaacacatcctctcttttggggcacccctggcgaatacgtataagatcgtggtcgatgagagggagctgctctttgaaaccagtgaggtggtggatgtggccaagctcatgaaagcctacatcagcatgatcgtgaagaagcgctacagcacgacacgctccgccagcagccagggcagctccaggtgaaggcgggacagagcccacctgtctttgctacctgaacgcaccaccctctggcctaggctggctccagtgtgccatgcccagccaaaacaaacacagagctgcccaggctttctggaagcttctggtctga

SEQ ID NO: 13240 - DNA, 2910 bp, Homo sapiens
  source 1..2910: mol_type = unassigned DNA
aatctgtgatttaggagtgagttctttccatgcttctcctctcctcttttcccttcctagcaagaggagaaaaaaagcaagtaatttaatgtaatctgatttttttttttttttttttttttacttcatggctttttgacattggaagagaaatgagccatctttctagaggagctttagtgtcatgtgtgcttttcttattgattgggaataacttaaaaagactcctcagaactccgaatgggatatttaatttgttagaacacgagtctgcaccactatctgttgacggtgaaatgaatttactaagtggataatttgctgagcattagctgaccctgacgtggcggaacgaaggtctctggagatggttcatggtggaaatctgggcttgatgggtcggtaatgagacttcagcgatgacatctttaccaaggctgaggcttaacactcgggaccaagcgattcaactgggaacacgggtctggctgagagaaaatggccagcattttccaagtactgtaaattcctgtgcagaaggcatcgtcgtcttccggacagactatggtcaggtattcacttacaagcagagcacaattacccaccagaaggtgactgctatgcaccccacgaacgaggagggcgtggatgacatggcgtccttgacagagctccatggcggctccatcatgtataacttattccagcggtataagagaaatcaaatatatacctacatcggctccatcctggcctccgtgaacccctaccagcccatcgccgggctgtacgagcctgccaccatggagcagtacagccggcgccacctgggcgagctgcccccgcacatcttcgccatcgccaacgagtgctaccgctgcctgtggaagcgccacgacaaccagtgcatcctcatcagtggtgaaagtggggcaggtaaaaccgaaagcactaaattgatcctcaagtttctgtcagtcatcagtcaacagtctttggaattgtccttaaaggagaagacatcctgtgttgaacgagctattcttgaaagcagccccatcatggaagctttcggcaatgcgaagaccgtgtacaacaacaactctagtcgctttgggaagtttgttcagctgaacatctgtcagaaaggaaatattcagggcgggagaattgtagattatttattagaaaaaaaccgagtagtaaggcaaaatcccggggaaaggaattatcacatattttatgcactgctggcagggctggaacatgaagaaagagaagaattttatttatctacgccagaaaactaccactacttgaatcagtctggatgtgtagaagacaagacaatcagtgaccaggaatcctttagggaagttattacggcaatggacgtgatgcagttcagcaaggaggaagttcgggaagtgtcgaggctgcttgctggtatactgcatcttgggaacatagaatttatcactgctggtggggcacaggtttccttcaaaacagctttgggcagatctgcggagttacttgggctggacccaacacagctcacagatgctttgacccagagatcaatgttcctcaggggagaagagatcctcacgcctctcaatgttcaacaggcagtagacagcagggactccctggccatggctctgtatgcgtgctgctttgagtgggtaatcaagaagatcaacagcaggatcaaaggcaatgaggacttcaagtctattggcatcctcgacatctttggatttgaaaactttgaggttaatcactttgaacagttcaatataaactatgcaaacgagaaacttcaggagtacttcaacaagcatattttttctttagaacaactagaatatagccgggaaggattagtgtgggaagatattgactggatagacaatggagaatgcctggacttgattgagaagaaacttggcctcctagcccttatcaatgaagaaagccattttcctcaagccacagacagcaccttattggagaagctacacagtcagcatgcgaataaccacttttatgtgaagcccagagttgcagttaacaattttggagtgaagcactatgctggagaggtgcaatatgatgtccgaggtatcttggagaagaacagagatacatttcgagatgaccttctcaatttgctaagagaaagccgatttgactttatctacgatctttttgaacatgtttcaagccgcaacaaccaggataccttgaaatgtggaagcaaacatcggcggcctacagtcagctcacagttcaaggactcactgcattccttaatggcaacgctaagctcctctaatcctttctttgttcgctgtatcaagccaaacatgcagaagatgccagaccagtttgaccaggcggttgtgctgaaccagctgcggtactcagggatgctggagactgtgagaatccgcaaagctgggtatgcggtccgaagaccctttcaggacttttacaaaaggtataaagtgctgatgaggaatctggctctgcctgaggacgtccgagggaagtgcacgagcctgctgcagctctatgatgcctccaacagcgagtggcagctggggaagaccaaggtctttcttcgagaatccttggaacagaaactggagaagcggagggaagaggaagtgagccacgcggccatggtgattcgggcccatgtcttgggcttcttagcacgaaaacaatacagaaaggtcctttattgtgtggtgataatacagaagaattacagagcattccttctgaggaggagatttttgcacctgaaaaaggcagccatagttttccagaagcaactcagaggtcagattgctcggagagtttacagacaattgctggcagagaaaagggagcaagaag

SEQ ID NO: 13241 - DNA, 575 bp, Homo sapiens
  source 1..575: mol_type = unassigned DNA
aagaaagcccatttttgtgtctgtcagcttagatgcccttgcccggactgctaaagatgcagctatttacagtggacagaaactgaaggggtgaaagaaaacccaagatgccagaccagtttgaccaggcggttgtgctgaaccagctgcggtactcagggatgctggagactgtgagaatccgcaaagctgggtataaagtgctgatgaggaatctggctctgcctgaggacgtccgagggaagtgcacgagcctgctgcagctctatgatgcctccaacagcgagtggcagctggggaagaccaaggtctttcttcgagaatccttggaacagaaactggagaagcggagggaagaggaagtgagccacgcggccatggtgattcgggcccatgtcttgggcttcttagcacgaaaacaatacagaaaggtcctttattgtgtggtgataatacagaagaattacagagcattccttctgaggaggagatttttgcacctgaaaaaggcagccatagttttccagaagcaactcagaggtcagattgctcggagagtttacagacaattgctg

SEQ ID NO: 13242 - DNA, 807 bp, Homo sapiens
  source 1..807: mol_type = unassigned DNA
agatgcccttgcccggactgctaaagatgcagctatttacagtggacagaaactgaaggggtgaaagaaaacccaaggcaatcaaggctgcacttgctacccttctgcaggaagcttcccagccagcacagtttctctctgccctgcctcttaatccccacccctgctcccaggcctgggacactgctaaccacccctccttcctgacacctctctgaccacccctcctcctcttgactggttcctctggaggtaggcatggcctcgggttctgcccccagtttctcactcgctgggctccaaaagaaacactggcttctctccttcagctccaggctagatgccagaccagtttgaccaggcggttgtgctgaaccagctgcggtactcagggatgctggagactgtgagaatccgcaaagctgggtataaagtgctgatgaggaatctggctctgcctgaggacgtccgagggaagtgcacgagcctgctgcagctctatgatgcctccaacagcgagtggcagctggggaagaccaaggtctttcttcgagaatccttggaacagaaactggagaagcggagggaagaggaagtgagccacgcggccatggtgattcgggcccatgtcttgggcttcttagcacgaaaacaatacagaaaggtcctttattgtgtggtgataatacagaagaattacagagcattccttctgaggaggagatttttgcacctgaaaaaggcagccatagttttccagaagcaactcagaggtcagattgctcggagagtttacagacaattgct

SEQ ID NO: 13243 - DNA, 537 bp, Homo sapiens
  source 1..537: mol_type = unassigned DNA
atttgactttatctacgatctttttgaacatgtttcaagccgcaacaaccaggataccttgaaatgtggaagcaaacatcggcggcctacagtcagctcacagttcaaggactcactgcattccttaatggcaacgctaagctcctctaatcctttctttgttcgctgtatcaagccaaacatgcagaagatgccagaccagtttgaccaggcggttgtgctgaaccagctgcggtactcagggatgctggagactgtgagaatccgcaaagctgggtatgcggtccgaagaccctttcaggacttttacaaaaggtataaagtgctgatgaggaatctggctctgcctgaggacgtccgagggaagtgcacgagcctgctgcagctctatgatgcctccaacagcgagtggcagctggggaagaccaaggtctttcttcgagaatccttggaacagaaactggagaagcggagggaagaggaagtgagccacgcggccatggtgattcgggcccatgtcttgggcttcttagcacg

SEQ ID NO: 13244 - DNA, 582 bp, Homo sapiens
  source 1..582: mol_type = unassigned DNA
agaaagcccatttttgtgtctgtcagcttagatgcccttgcccggactgctaaagatgcagctatttacagtggacagaaactgaaggggtgaaagaaaacccaagatgccagaccagtttgaccaggcggttgtgctgaaccagctgcggtactcagggatgctggagactgtgagaatccgcaaagctgggtatgcggtccgaagaccctttcaggacttttacaaaaggtataaagtgctgatgaggaatctggctctgcctgaggacgtccgagggaagtgcacgagcctgctgcagctctatgatgcctccaacagcgagtggcagctggggaagaccaaggtacgatgcggagaaagagcaactcccaccgaatccctgacagatctcggggtgatgctcacagggtttagggctctatgacaccgctatacaattgttctttcacattgggaagatactcctgttgccatgcctaccataaccttttgtctcccaaacagttactattttatttgaagtgaagtccttgacttgtcagggactctgtttcattagagaacacattgaaacatctc

SEQ ID NO: 13245 - DNA, 583 bp, Homo sapiens
  source 1..583: mol_type = unassigned DNA
aaagcacaggaatggtgttcattattgttccatgtctttagctgtggggaaaaggtcagtgtggcagttgttttccatatgaattttggcccaagagccaaactgaaggtgagatgccccttggagagacaggaagatgatgccagaccagtttgaccaggcggttgtgctgaaccagctgcggtactcagggatgctggagactgtgagaatccgcaaagctgggtatgcggtccgaagaccctttcaggacttttacaaaaggtataaagtgctgatgaggaatctggctctgcctgaggacgtccgagggaagtgcacgagcctgctgcagctctatgatgcctccaacagcgagtggcagctggggaagaccaaggtacgatgcggagaaagagcaactcccaccgaatccctgacagatctcggggtgatgctcacagggtttagggctctatgacaccgctatacaattgttctttcacattgggaagatactcctgttgccatgcctaccataaccttttgtctcccaaacagttactattttatttgaagtgaagtccttgacttgtcagggact

SEQ ID NO: 13246 - DNA, 766 bp, Homo sapiens
  source 1..766: mol_type = unassigned DNA
gcaggggagccccgcgggcgcgcgtcctcgggagtggcgccgtgacacgcatggtttccccggacccgcggcggcgctgacttccgcgagtcggagcggcactcggcgagtccgggactgcgctggaacaatggataacttcttcaccgaggtattcacttacaagcagagcacaattacccaccagaaggtgactgctatgcaccccacgaacgaggagggcgtggatgacatggcgtccttgacagagctccatggcggctccatcatgtataacttattccagcggtataagagaaatcaaatatatacctacatcggctccatcctggcctccgtgaacccctaccagcccatcgccgggctgtacgagcctgccaccatggagcagtacagccggcgccacctgggcgagctgcccccgcacatcttcgccatcgccaacgagtgctaccgctgcctgtggaagcgccacgacaaccagtgcatcctcatcagtggtgaaagtggggcaggtaaaaccgaaagcactaaattgatcctcaagtttctgtcagtcatcagtcaacagtctttggaattgtccttaaaggagaagacatcctgtgttgaacgagctattcttgaaagcagccccatcatggaagctttcggcaatgcgaagaccgtgtacaacaacaactctagtcgctttgggaagtttgttcagctgaacatctgtcagaaaggaaatattcagggcgggagaattgtagattatttatta

SEQ ID NO: 13247 - DNA, 1677 bp, Homo sapiens
  source 1..1677: mol_type = unassigned DNA
cggcgcgggactgctcacctccaagcgctcgcgcggggatcgcggctcctgctcactttgcggcccgctgtcctcctgcccgccccgagggcccccggccggagcgcagagggagggggccgcgctcgccagcaccccgccgccttcccccgcctgggggaagaatgtgccaccagctgttctccgcttgcgagcgctgcgcccagtagtgaggaacttggaggaagaagagacaaaggctgccgtcgggacgggcgagttagggacttgggtttgggcgaacaaaaggtgagaaggacaagaagggaccgggcgatggcagcaggggagccccgcgggcgcgcgtcctcgggagtggcgccgtgacacgcatggtttccccggacccgcggcggcgctgacttccgcgagtcggagcggcactcggcgagtccgggactgcgctggaacaatggataacttcttcaccgagggaacacgggtctggctgagagaaaatggccagcattttccaagtactgtaaattcctgtgcagaaggcatcgtcgtcttccggacagactatggtcaggtattcacttacaagcagagcacaattacccaccagaaggtgactgctatgcaccccacgaacgaggagggcgtggatgacatggcgtccttgacagagctccatggcggctccatcatgtataacttattccagcggtataagagaaatcaaatatatgtgcagataggttgaatatacctaatccaaaaactccaaatccacaatgcttcaaaatccaagacattttgcatgctgatgtgttgctgaaaggaaatgctcattgggaatattttggattttgaatttaacttaaattatgcttaaccagtacatagtatgcaaatattccaaaatccaaaaaatattgaaatccacaacactttgtgtcccaggcatttcacacaagggatgctcaatctatattttgaaactcatactttgctgtcattagagaaaaaacacaagtttgtttttttttgtaatagtgtcttgctatgttgcccaggctagactcaaactcctgagctaaagtgatcctcctgccttagcctcctgagtacctgggattacaggcacgtgccagcatgcccacctagacacaagttgttattgtacattttcaatagtcaagaaaaagtaagtaaattagaaggaaaaaaaaactacacaagggtttaaaaggcagacccttttaaaaagttttttatttattttcctcttttcatgataataatgttaaacctgacagctaaattgccaatacatactatgaataagatcttggtcttggaataaggtcatattcttcctttctaaggggaaacccgtaggatttttgtgcatccaatttgcagttcagttcagttaattatgccattgtagaccttccgtttgaggcttgcaaaattgtatattatccataaagcagccaccatgattttttaaaattatcattgaagccattcaccggagatgtcagcgtctgttggactccgctcacatcgagacaagaccgccacctgtcagaacagccactgcttctccacatttgatcctggctcggagcaatgcctgtctatatctttaaaagagaaaaaaaataaaatgacttgaattgttccaga

SEQ ID NO: 13248 - DNA, 11456 bp, Homo sapiens
  source 1..11456: mol_type = unassigned DNA
gagagctggctgagccgcggcgcgggactgctcacctccaagcgctcgcgcggggatcgcggctcctgctcactttgcggcccgctgtcctcctgcccgccccgagggcccccggccggagcgcagagggagggggccgcgctcgccagcaccccgccgccttcccccgcctgggggaagaatgtgccaccagctgttctccgcttgcgagcgctgcgcccagtagtgaggaacttggaggaagaagagacaaaggctgccgtcgggacgggcgagttagggacttgggtttgggcgaacaaaaggtgagaaggacaagaagggaccgggcgatggcagcaggggagccccgcgggcgcgcgtcctcgggagtggcgccgtgacacgcatggtttccccggacccgcggcggcgctgacttccgcgagtcggagcggcactcggcgagtccgggactgcgctggaacaatggataacttcttcaccgagggaacacgggtctggctgagagaaaatggccagcattttccaagtactgtaaattcctgtgcagaaggcatcgtcgtcttccggacagactatggtcaggtattcacttacaagcagagcacaattacccaccagaaggtgactgctatgcaccccacgaacgaggagggcgtggatgacatggcgtccttgacagagctccatggcggctccatcatgtataacttattccagcggtataagagaaatcaaatatatacctacatcggctccatcctggcctccgtgaacccctaccagcccatcgccgggctgtacgagcctgccaccatggagcagtacagccggcgccacctgggcgagctgcccccgcacatcttcgccatcgccaacgagtgctaccgctgcctgtggaagcgccacgacaaccagtgcatcctcatcagtggtgaaagtggggcaggtaaaaccgaaagcactaaattgatcctcaagtttctgtcagtcatcagtcaacagtctttggaattgtccttaaaggagaagacatcctgtgttgaacgagctattcttgaaagcagccccatcatggaagctttcggcaatgcgaagaccgtgtacaacaacaactctagtcgctttgggaagtttgttcagctgaacatctgtcagaaaggaaatattcagggcgggagaattgtagattatttattagaaaaaaaccgagtagtaaggcaaaatcccggggaaaggaattatcacatattttatgcactgctggcagggctggaacatgaagaaagagaagaattttatttatctacgccagaaaactaccactacttgaatcagtctggatgtgtagaagacaagacaatcagtgaccaggaatcctttagggaagttattacggcaatggacgtgatgcagttcagcaaggaggaagttcgggaagtgtcgaggctgcttgctggtatactgcatcttgggaacatagaatttatcactgctggtggggcacaggtttccttcaaaacagctttgggcagatctgcggagttacttgggctggacccaacacagctcacagatgctttgacccagagatcaatgttcctcaggggagaagagatcctcacgcctctcaatgttcaacaggcagtagacagcagggactccctggccatggctctgtatgcgtgctgctttgagtgggtaatcaagaagatcaacagcaggatcaaaggcaatgaggacttcaagtctattggcatcctcgacatctttggatttgaaaactttgaggttaatcactttgaacagttcaatataaactatgcaaacgagaaacttcaggagtacttcaacaagcatattttttctttagaacaactagaatatagccgggaaggattagtgtgggaagatattgactggatagacaatggagaatgcctggacttgattgagaagaaacttggcctcctagcccttatcaatgaagaaagccattttcctcaagccacagacagcaccttattggagaagctacacagtcagcatgcgaataaccacttttatgtgaagcccagagttgcagttaacaattttggagtgaagcactatgctggagaggtgcaatatgatgtccgaggtatcttggagaagaacagagatacatttcgagatgaccttctcaatttgctaagagaaagccgatttgactttatctacgatctttttgaacatgtttcaagccgcaacaaccaggataccttgaaatgtggaagcaaacatcggcggcctacagtcagctcacagttcaaggactcactgcattccttaatggcaacgctaagctcctctaatcctttctttgttcgctgtatcaagccaaacatgcagaagatgccagaccagtttgaccaggcggttgtgctgaaccagctgcggtactcagggatgctggagactgtgagaatccgcaaagctgggtatgcggtccgaagaccctttcaggacttttacaaaaggcaagagggagctgaattggattctctttcttttcaaagggtgctgatgaggaatctggctctgcctgaggacgtccgagggaagtgcacgagcctgctgcagctctatgatgcctccaacagcgagtggcagctggggaagaccaaggtctttcttcgagaatccttggaacagaaactggagaagcggagggaagaggaagtgagccacgcggccatggtgattcgggcccatgtcttgggcttcttagcacgaaaacaatacagaaaggtcctttattgtgtggtgataatacagaagaattacagagcattccttctgaggaggagatttttgcacctgaaaaaggcagccatagttttccagaagcaactcagaggtcagattgctcggagagtttacagacaattgctggcagagaaaagggagcaagaagaaaagaagaaacaggaagaggaagaaaagaagaaacgggaggaagaagaaagagaaagagagagagagcgaagagaagccgagctccgcgcccagcaggaagaagaaacgaggaagcagcaagaactcgaagccttgcagaagagccagaaggaagctgaactgacccgtgaactggagaaacagaaggaaaataagcaggtggaagagatcctccgtctggagaaagaaatcgaggacctgcagcgcatgaaggagcagcaggagctgtcgctgaccgaggcttccctgcagaagctgcaggagcggcgggaccaggagctccgcaggctggaggaggaagcgtgcagggcggcccaggagttcctcgagtccctcaatttcgacgagatcgacgagtgtgtccggaatatcgagcggtccctgtcggtgggaagcgaattttccagcgagctggctgagagcgcatgcgaggagaagcccaacttcaacttcagccagccctacccagaggaggaggtcgatgagggcttcgaagccgacgacgacgccttcaaggactcccccaaccccagcgagcacggccactcagaccagcgaacaagtggcatccggaccagcgatgactcttcagaggaggacccatacatgaacgacacggtggtgcccaccagccccagtgcggacagcacggtgctgctcgccccatcagtgcaggactccgggagcctacacaactcctccagcggcgagtccacctactgcatgccccagaacgctggggacttgccctccccagacggcgactacgactacgaccaggatgactatgaggacggtgccatcacttccggcagcagcgtgaccttctccaactcctacggcagccagtggtcccccgactaccgctgctctgtggggacctacaacagctcgggtgcctaccggttcagctctgagggggcgcagtcctcgtttgaagatagtgaagaggactttgattccaggtttgatacagatgatgagctttcataccggcgtgactctgtgtacagctgtgtcactctgccgtatttccacagctttctgtacatgaaaggtggcctgatgaactcttggaaacgccgctggtgcgtcctcaaggatgaaaccttcttgtggttccgctccaagcaggaggccctcaagcaaggctggctccacaaaaaaggggggggctcctccacgctgtccaggagaaattggaagaagcgctggtttgtcctccgccagtccaagctgatgtactttgaaaacgacagcgaggagaagctcaagggcaccgtagaagtgcgaacggcaaaagagatcatagataacaccaccaaggagaatgggatcgacatcattatggccgataggactttccacctgattgcagagtccccagaagatgccagccagtggttcagcgtgctgagtcaggtccacgcgtccacggaccaggagatccaggagatgcatgatgagcaggcaaacccacagaatgctgtgggcaccttggatgtggggctgattgattctgtgtgtgcctctgacagccctgatagacccaactcgtttgtgatcatcacggccaaccgggtgctgcactgcaacgccgacacgccggaggagatgcaccactggataaccctgctgcagaggtccaaaggggacaccagagtggagggccaggaattcatcgtgagaggatggttgcacaaagaggtgaagaacagtccaaagatgtcttcactgaaactgaagaaacggtggtttgtactcacccacaattccctggattactacaagagttcagagaagaacgcgctcaaactggggaccctggtcctcaacagcctctgctctgtcgtccccccagatgagaagatattcaaagagacaggctactggaacgtcaccgtgtacgggcgcaagcactgttaccggctctacaccaagctgctcaacgaggccacccggtggtccagtgccattcaaaacgtgactgacaccaaggccccgatcgacacccccacccagcagctgattcaagatatcaaggagaactgcctgaactcggatgtggtggaacagatttacaagcggaacccgatccttcgatacacccatcaccccttgcactccccgctcctgccccttccgtatggggacataaatctcaacttgctcaaagacaaaggctataccacccttcaggatgaggccatcaagatattcaattccctgcagcaactggagtccatgtctgacccaattccaataatccagggcatcctacagacagggcatgacctgcgacctctgcgggacgagctgtactgccagcttatcaaacagaccaacaaagtgccccaccccggcagtgtgggcaacctgtacagctggcagatcctgacatgcctgagctgcaccttcctgccgagtcgagggattctcaagtatctcaagttccatctgaaaaggatacgggaacagtttccaggaagcgagatggaaaaatacgctctcttcacttacgaatctcttaagaaaaccaaatgccgagagtttgtgccttcccgagatgaaatagaagctctgatccacaggcaggaaatgacatccacggtctattgccatggcggcggctcctgcaagatcaccatcaactcccacaccaccgctggggaggtggtggagaagctgatccgaggcctggccatggaggacagcaggaacatgtttgctttgtttgaatacaacggccacgtcgacaaagccattgaaagtcgaaccgtcgtagctgatgtcttagccaagtttgaaaagctggctgccacatccgaggttggggacctgccatggaaattctacttcaaactttactgcttcctggacacagacaacgtgccaaaagacagtgtggagtttgcatttatgtttgaacaggcccacgaagcggttatccatggccaccatccagccccggaagaaaacctccaggttcttgctgccctgcgactccagtatctgcagggggattatactctgcacgctgccatcccacctctcgaagaggtttattccctgcagagactcaaggcccgcatcagccagtcaaccaaaaccttcaccccttgtgaacggctggagaagaggcggacgagcttcctagaggggaccctgaggcggagcttccggacaggatccgtggtccggcagaaggtcgaggaggagcagatgctggacatgtggattaaggaagaagtctcctctgctcgagccagtatcattgacaagtggaggaaatttcagggaatgaaccaggaacaggccatggccaagtacatggccttgatcaaggagtggcctggctatggctcgacgctgtttgatgtggagtgcaaggaaggtggcttccctcaggaactctggttgggtgtcagcgcggacgccgtctccgtctacaagcgtggagagggaagaccactggaagtcttccagtatgaacacatcctctcttttggggcacccctggcgaatacgtataagatcgtggtcgatgagagggagctgctctttgaaaccagtgaggtggtggatgtggccaagctcatgaaagcctacatcagcatgatcgtgaagaagcgctacagcacgacacgctccgccagcagccagggcagctccaggtgaaggcgggacagagcccacctgtctttgctacctgaacgcaccaccctctggcctaggctggctccagtgtgccatgcccagccaaaacaaacacagagctgcccaggctttctggaagcttctggtctgagggaggtgtctccgaggatccttttgcctgccgccttcattgatcctgtattaagctgtcaactttaacagtctgcacagtttccaaagctttactactcttagaggacacatgccttaaaaaaggaggggaggaaccacgctgccaccaaagcagccggaagtgccttaacttgtggaaccaacactaatcgaccgtaactgtgctactgaagggaactgcctttcccccttctgggggagacttaacagagcgtggaaggggggcattctctgtcaatgatgcactaacctcccaacctgatttccccgaatctgagggaaggtgagggagtgggaagggggatggagagctcgaggggacagtgtgtttgagctggagtgctgcgggcagcctttctcatggaatgacatgaatcaacttttttctttgtttcatcttttaagtgtacgtgcttgcctgttcgtgcatgtgttcataaactcaacactttaatcatggtttcatgagcattaaaaagcaaagggaaaaaggatgtgtaatggtgtacacagtctgtatattttaataatgcagagctatagtctcaattgttactttataaggtggttttattaacaaacccaaatcctggattttcctgtctttgctgtattttgaaaaacacgtgttgactccattgttttacatgtagcaaagtctgccatctgtgtctgctgtattataaacagataagcagcctacaagataactgtatttataaaccactcttcaacagctggctccagtgctggttttagaacaagaatgaagtcattttggagtctttcatgtctaaaagatttaagttaaaaacaaagtgttacttggaaggttagcttctatcattctggatagattacagatataataaccatgttgactatgggggagagacgctgcattccagaaacgtcttaacacttgagtgaatcttcaaaggaccctgacattaaatgctgaggctttaatacacacatattttatcccaagtttataatggtggtctgaacaaggcacctgtaaataaatcagcatttatgaccagaagaaaaataatctggtcttggactttttatttttatatggaaaagttttaaggacttgggccaactaagtctacccacacgaaaaaagaaatttgccttgtccctttgtgtacaaccatgcaaaactgtttgttggctcacagaagttctgacaataaaagatactagctaacacgctgtgtgtttcctttatcagaggaggctctaaaaaccatggaggggaggcttatttttgttttggctttttggtggttttttttttttttctttagagacagagtctcactctgttacccaggctggagtacagtggcgtgatctcggctcactgcagcctctgcctcctgggttctagcgattctcctgcctcagcctcccaaggagttgggagtacaggcatgcatcaccacgcctggctaggttttgtatttttagtagagatggggtttcaccatgttggccaggctggtctcgatccacctgcctcagcctcccaaagtgctgggattacaggtgtgagctaccgcacccggccggctttttggtgttaatgctatggtttcagtgtctgggctttgtgtttgtttcatggacttgctcatcaggtctaaacacagatctgcagctgtctccactgctcttgtagacactgagtgtgacttcaagaaagcaaaagaagggactggtaaatgaagtcacacacagctgaggacttgaaatgtgtttatgtcagacagtcccctatgtcagccccaaagtgtgcctgatcttgcaaccctggatcctagaacctgcctgcacctccctgtggaccagaacacacaggtaggcagtttggttgccaatgtacccaaaccaccaggccaggcgtctagcatgagcaagcgccacttctcttgcagaccactgactcccaccctctgctcatgctcacggatggcttcttcccattctgcagggattgggatggaacctgaagccaggtgctgcctgaagcctgtggccccgccaggcacccaaggaaagccggcaaagacttggatgtgtgttgtctttgtttttattttaggctcagaaagaatttgacagaagtcttctttctactgctcacctctcaggattccctctgtgacttaatttactctggaaggctgtcgcccgccctcaattatagatggggaaataggcaaggaaaggcatgactcagattgggggggttagagcagcaccatagttagaacatagatttacatgtgagcctttacatggcatagttgtggttttgttttagccttttatttagaaataattacagactcagagaaagttgcaacagaacgtacagggaggcctgcgtgcccttcagtttccccagtggtagcatcccccatcactgtagagcagcatcacagctgacaaagtaccgttgagcttcccctagccacagaacctattccaattttactgcttttacatgcactcattggtgtgtgtgatgtcagttgctttcaacaaggtcagtgaagtgcagtcgtcccttggtatccaagggagattggttccaggaccccctccccccacccctgaggatacaaaattcacagatgctcaagtccctgctatacagtggtataatatttgcatagaacctgcacacatctttccttaccctttaaatcatctccaggttacagatacctagcacaacataaatgctgcataaatagctgttataccgtgtgtgtctgtgttttaaacattgtttatttgagacagggtctcactctgtcaccaggctacagtgcagaggcacagtcacagctcattgcagcctcaacctcctgggctcaagcagtcctccacctcagcctcccaaagtgctaggatgacaggtgtgagccactgtgccccaccaaaaaaagttttttcaaatattttctatctgtggttggattcagaccacatgaacactgagggctgactgtagttttgaatgtctgttactgaggaggcaccagcataaagtattttatcacttcagacgctgacaatctagtatttttaatttttaaatcttttgaaagctaatacatataggtgatttgtaaaaaaaaaaaaaaaaaaaaaaaaaaaaaaaaaaaaaaacaactagaagtaaaatgttacttttttccagctgtagccctaattacccattttcctttcccagaaacagctatttttactgttttattgaatattctctcaaaaataatttaagctgtccaatcatttactcatacatacatatatatccccatcctcatttttaatagatggaaacaaactgttgtagcttacttttttctcagcatagtattttagctctaatcctacattaatacctatagaattgccttattctttttgatgattatatagtacctcagatagctctgtggaaaaacaggataaggccatctgtattagtccattctcacactgctagaaggacatgcctgagactgggtaatttataaagaaaaagaagttgaatggactcagtctcacatgcctggggaggcctcacaatcatggtggacagcaaaggaggagaaaaggcacatcttatatggcagcaggcaagagagcttgcacaggggaactcccttttataaaaccattagctcttccgagacatactcactatggacaagaacagcatgggaaaacccacccccatgattcaattacctcccatcaggtccctcccgtgacaggtggggattatgggagctataattcaagatgagatttgggtggggacagagccaaaccatatcaccacctaagttctctgtaaaaatagtttcagccaggcatgctggctcacgcctgtaatcccagcatgttggaaggccgaggcaagaggatcgcttgagctccggagttcaagaccagtctgggcaacatgacaagaccctgtctccacagaaaattaacattagccaggtgtggtggtgcgcatctgtagtcccagctactggggaggctgagatgagaaaatcgtttgaacccaggaggtcaaagctgcagggagccatgatggtgccactgcattctggtgtgggtgacagagcaagactctgtctccaaaaaaaaaaaaaaaaaaaaaaaatagttcagaaatctaagacagcactttttttagttactaagccttttattcagatagcacactaaattggggtcaaaaatctgctatagtaaagttctgtatttgtgtgtattgggtataaaaataagcgctttaattaatttgaaaatccctattcaccaaaagtttatactgtaataggggacaaaacaagtgcataaagctaaatttagccagtacatttataactgtttcattcagttgatcagagaagcatcacgattgctggaaaatatcggacctggattcaaggtttggcattgctgttttcaaagtatgtaatcttttagatcaggggtcagtgaactacagtacagagaccaaatctaccctgccacctgtttttgtgaataaagttttattg

SEQ ID NO: 13249 - DNA, 3492 bp, Homo sapiens
  source 1..3492: mol_type = unassigned DNA
caggttgctttcagctatgtaacgtttttcgatcccatgagatggaaatcgaccagtgcttgctagagtcccttccccttggccaacggcagcgtctagtgaagcgcatgcgctgtgagcaaatcaaagcctactatgagcgcgagaaggcttttcagaagcaggaagggttcctgaaaaggctgaagcatgcgaagaatccgaaagttcacttcaacctcacggacatgctacaggacgcgattatccaccacaatgacaaagaagtgcttcggctcctgaaggagggggcagacccccacaccctcgtctcctcgggagggtccctgctccatctgtgtgctcggtatgataatgccttcattgcagaaattctgattgacagaggagtcaacgtcaaccaccaggatgaagacttctggacgcccatgcacattgcctgtgcctgcgataaccctgatattgtcctgcttcttgtattagctggagccaatgtccttctccaggatgtgaatggaaatatcccattagattatgctgtagaagggacagaatccagctctatcctgttgacctatctggatgaaaatggagtggatttgacctcactgcgccagatgaagcttcagagaccaatgagtatgttaacagatgtcaaacacttcttatcatctggaggaaatgtcaatgagaaaaacgatgaaggagtaaccctgttacacatggcgtgtgcgagtggctacaaggaggtggtgtctcttatcctggaacatggtggagacctcaacatagtagatgatcagtactggactcccctccacttggcagccaaatatggccagacaaatctggtgaaacttctcctgatgcatcaggcaaacccacacctcgtgaactgtaatgaggagaaggcgtcagatattgctgcctctgagtttattgaggaaatgctgctgaaagccgaaattgcctgggaagaaaaaatgaaagagcctttatctgcttctaccttagctcaagaagagccctatgaagagatcattcacgatcttcccgtactgtcgagtaagctcagtcccctggtgttaccaattgccaagcaagacagtttgttggaaaaagacattatgttcaaagatgcaacaaaaggtctgtgtaagcagcagtctcaggacagcatccctgaaaaccccatgatgagcggttccaccaaacccgagcaggtcaagctaatgcctcctgccccaaacgatgacctggcaacgctcagcgagctcaatgatggcagcctgctctatgagattcagaagcgctttgggaacaatcagatctatacattcattggagacattcttttgcttgttaacccatacaaggagcttccaatttattcttccatggtgtcccagctgtatttcagctcctcagggaagctgtgttcctcgctgcctcctcacctcttctcctgtgtggagagagcctttcaccagctcttccgggaacagcggcctcagtgtttcatcctcagtggagaaaggggatcaggaaagtctgaagccagcaaacaaatcataagacacctcacctgcagggctggcgccagcagggccacactggattccagattcaaacatgtcgtgtgcatcttagaagcctttggacatgccaagaccacacttaatgatttgtccagttgcttcatcaagtattttgaactgcagttctgtgagaggaaacaacagctaaccggagccagaatttatacatatttgctagagaaatccagacttgtttcacaacctcttggccagagcaattttctcattttctacttgttgatggatgggttatctgctgaagaaaaatatggacttcatcttaataatttatgtgcacaccggtatttgaaccagaccatacaggatgatgcatccacaggggagcgttctctgaacagggagaaattggctgttttgaaacgagccctgaatgtagttggcttcagcagcttggaggtggagaatctgttcgtaattctagcagcaatattgcaccttggagacattcggtttactgccctgaatgaggggaactccgccttcgtttctgacctccagctcctggaacaagtggctggaatgttacaagtatcaacagatgaattggcatctgccttaacaactgatattcaatattttaaaggggatatgataatacgacgacataccatacagattgctgagtttttccgagacctcttggccaagtccctgtacagtcgtttgtttagctttttggtgaataccatgaattcttgcctccacagtcaagatgaacagaaaagcatgcagacattggatattggaatattggacatttttggttttgaagagtttcaaaagaatgaatttgaacaactttgtgtcaacatgaccaatgagaagatgcaccactatatcaatgaagtgctttttctccacgagcaagtggaatgtgtacaagagggagttaccatggaaacagcatattctcctggtaaccagaatggagttttggacttttttttccagaagccatctggatttctcaccttattggatgaagaaagtcaaatgatttggtcagtggaatcaaattttccaaaaaaactacaaagtctcctagaatcctcaaacacaaatgcggtgtactcccccatgaaggatgggaatgggaatgttgccctcaaagaccacggtacagccttcaccatcatgcactacgcaggaagggtaatgtatgatgttgttggggcgattgaaaaaaataaagactccctttcacagaatcttctatttgtaatgaaaagaggaaggtgcttctgagcaaaaggacagaatttacaatgtacccttttgtatttatacaggaggtgtcagatttttttttttgtaaagggctagagaataaatattttagaccttgtgcaccataagatccttgttgcagttactcacctctgctgttataatgtgaaaaacagctgtagacaatacaaatggatgtgactgtattctgataaaattttatttacaaaaacaggcagtgggccatgtttggctcaggagccatgattgctcactcactctatcataaaagcaaaatatttgtggttgccatcatgttttatgaatctgtgaaatactttgatgcttgtacatatttattaaaagcaagtgtaattcataaataataatttttatttgcaggtactttgcttatagtatctaattcaattttcgtagcatcaaaaagctcccagttgaggaagatggtgaggtctgttgtagaatgtacacaagcagagctgagtctctgagaccactaaccaggtacagtcagggagcttggagacagctcatagagacacacagcaaatacactcattagtgcctaagattagaagtaaagtctacttcactcaaaaggaggcagaaaaaaaaaaaaaaaaaa

SEQ ID NO: 13250 - DNA, 6779 bp, Homo sapiens
  source 1..6779: mol_type = unassigned DNA
caggttgctttcagctatgtaacgtttttcgatcccatgagatggaaatcgaccagtgcttgctagagtcccttccccttggccaacggcagcgtctagtgaagcgcatgcgctgtgagcaaatcaaagcctactatgagcgcgagaaggcttttcagaagcaggaagggttcctgaaaaggctgaagcatgcgaagaatccgaaagttcacttcaacctcacggacatgctacaggacgcgattatccaccacaatgacaaagaagtgcttcggctcctgaaggagggggcagacccccacaccctcgtctcctcgggagggtccctgctccatctgtgtgctcggtatgataatgccttcattgcagaaattctgattgacagaggagtcaacgtcaaccaccaggatgaagacttctggacgcccatgcacattgcctgtgcctgcgataaccctgatattgtcctgcttcttgtattagctggagccaatgtccttctccaggatgtgaatggaaatatcccattagattatgctgtagaagggacagaatccagctctatcctgttgacctatctggatgaaaatggagtggatttgacctcactgcgccagatgaagcttcagagaccaatgagtatgttaacagatgtcaaacacttcttatcatctggaggaaatgtcaatgagaaaaacgatgaaggagtaaccctgttacacatggcgtgtgcgagtggctacaaggaggtggtgtctcttatcctggaacatggtggagacctcaacatagtagatgatcagtactggactcccctccacttggcagccaaatatggccagacaaatctggtgaaacttctcctgatgcatcaggcaaacccacacctcgtgaactgtaatgaggagaaggcgtcagatattgctgcctctgagtttattgaggaaatgctgctgaaagccgaaattgcctgggaagaaaaaatgaaagagcctttatctgcttctaccttagctcaagaagagccctatgaagagatcattcacgatcttcccgtactgtcgagtaagctcagtcccctggtgttaccaattgccaagcaagacagtttgttggaaaaagacattatgttcaaagatgcaacaaaaggtctgtgtaagcagcagtctcaggacagcatccctgaaaaccccatgatgagcggttccaccaaacccgagcaggtcaagctaatgcctcctgccccaaacgatgacctggcaacgctcagcgagctcaatgatggcagcctgctctatgagattcagaagcgctttgggaacaatcagatctatacattcattggagacattcttttgcttgttaacccatacaaggagcttccaatttattcttccatggtgtcccagctgtatttcagctcctcagggaagctgtgttcctcgctgcctcctcacctcttctcctgtgtggagagagcctttcaccagctcttccgggaacagcggcctcagtgtttcatcctcagtggagaaaggggatcaggaaagtctgaagccagcaaacaaatcataagacacctcacctgcagggctggcgccagcagggccacactggattccagattcaaacatgtcgtgtgcatcttagaagcctttggacatgccaagaccacacttaatgatttgtccagttgcttcatcaagtattttgaactgcagttctgtgagaggaaacaacagctaaccggagccagaatttatacatatttgctagagaaatccagacttgtttcacaacctcttggccagagcaattttctcattttctacttgttgatggatgggttatctgctgaagaaaaatatggacttcatcttaataatttatgtgcacaccggtatttgaaccagaccatacaggatgatgcatccacaggggagcgttctctgaacagggagaaattggctgttttgaaacgagccctgaatgtagttggcttcagcagcttggaggtggagaatctgttcgtaattctagcagcaatattgcaccttggagacattcggtttactgccctgaatgaggggaactccgccttcgtttctgacctccagctcctggaacaagtggctggaatgttacaagtatcaacagatgaattggcatctgccttaacaactgatattcaatattttaaaggggatatgataatacgacgacataccatacagattgctgagtttttccgagacctcttggccaagtccctgtacagtcgtttgtttagctttttggtgaataccatgaattcttgcctccacagtcaagatgaacagaaaagcatgcagacattggatattggaatattggacatttttggttttgaagagtttcaaaagaatgaatttgaacaactttgtgtcaacatgaccaatgagaagatgcaccactatatcaatgaagtgctttttctccacgagcaagtggaatgtgtacaagagggagttaccatggaaacagcatattctcctggtaaccagaatggagttttggacttttttttccagaagccatctggatttctcaccttattggatgaagaaagtcaaatgatttggtcagtggaatcaaattttccaaaaaaactacaaagtctcctagaatcctcaaacacaaatgcggtgtactcccccatgaaggatgggaatgggaatgttgccctcaaagaccacggtacagccttcaccatcatgcactacgcaggaagggtaatgtatgatgttgttggggcgattgaaaaaaataaagactccctttcacagaatcttctatttgtaatgaaaactagtgaaaatgtcgtgatcaatcatttgttccagtcgaaattgtcacaaacaggatccctcgtatctgcctatccttcctttaaattccgaggacataagtctgccctgctcagtaagaaaatgacagcttcttcaattattggagaaaacaagaattatctagaacttagtaagttattaaaaaagaaaggaacttctacatttcttcaaagattggaacgaggagatccagtcaccatagcatcacaactcaggaaatcactaatggatattattggaaaacttcagaagtgcactccacacttcattcattgcatcaggcccaataactcaaagctgccagatacttttgataatttttacgtgtctgctcagctacaatatattggggtcctggagatggtgaagatcttccgatatggataccctgttcgcctttccttctcggatttcctgtcaaggtataagccactggctgatacattcctgcgtgagaagaaggaacagtcagctgccgagcgatgtcgacttgttctccagcagtgtaaattacaaggctggcagatgggagtccgaaaagtgtttctaaaatactggcatgctgaccaactcaatgatttgtgcctacagttgcagagaaaaattataacctgccaaaaagttatcagaggatttttagcacgccagcacctgcttcagagaataagcatcagacaacaagaggtgacttctatcaatagctttctgcagaacacagaggacatggggctgaaaacctacgatgccctggtcattcagaatgcttcagacattgcccgggaaaatgaccggctccgtagtgaaatgaacgctccctaccataaagagaagttagaggtcaggaacatgcaagaggaaggaagcaaaagaaccgatgacaagagtggacccaggcatttccaccccagctccatgtcagtctgcgcggccgtggatggcctgggccagtgcctcgttggcccgtccatctggtctccttcgctgcactcggtgttcagcatggatgacagcagcagcctcccgtctccacggaaacagcccccgcccaagccaaagagggaccccaacacccggctgagtgcttcctatgaggctgtgagcgcctgcctctccgcggccagggaagcggccaacgaagctctggcccggcccagaccgcacagcgacgactacagcaccatgaagaagattcctcctcgaaagcccaagcgcagccccaacaccaagctcagcggctcctacgaggagatatcggggtcccggcccggggacgcgaggcccgcgggcgccccgggggcagcagcgcgcgttctgacccccgggactccgcagtgcgcgctgcccccggcggcgcctccgggtgacgaggacgacagcgagcctgtgtacatcgagatgctggggcacgcggccaggcccgatagcccggaccccggggagtccgtgtacgaggagatgaagtgttgcctgcccgacgacggcggcccgggcgcgggctccttcctgctccacggcgcatcgccgcccctgctccaccgcgcgccggaggacgaggcggcggggcccccaggggacgcgtgcgacatcccgccgcccttccccaacctgctgccgcaccggccgcccctgctggtgttccccccgacccccgtcacctgctcccccgcctccgacgagtcgcccctgacacccctggaggtgaagaagctgccagtcctggagaccaacctcaagtaccccgtgcagccggaggggtcgagcccgctgtccccgcagtactccaagagccagaagggcgacggcgacaggcccgcgtcccccggcctggcgctgttcaacgggtccggccgagcctccccgccgtccacgccgcccccgcccccgcccccgcccgggccgccccccgcgccctacaggccctgcgcgcacttggccttcccgccggagcccgccccggtgaacgcggggaaagcggggccgagcgcagaggcgcccaaggttcacccaaagccaaactctgcccccgtggccgggccctgcagctccttccccaagatcccatattcccccgtgaaggccaccagggcggacgccaggaaggccggctccagtgcctcgccccccgcgccctacagccctcccagctccaggcctctcagcagccccctggacgagctcgccagcctcttcaactcggggaggagtgtgcttcggaaatccgcggcgggaagaaaaatcagggaagcagaaggttttgaaactaacatgaacataagtagccgagatgaccctagtacgtcagaaattacttccgagactcaagacagaaatgcaaataaccatggaattcagttatctaattcactatctagtgctataactgctgaaaatggaaattccatctcaaatggtttacctgaagaagatggatactcacggttgtctataagtggcacagggacttcgacatttcaaagacacagggacagtcacaccactcaggtaatccatcagctgaggctctcagagaatgaaagtgtggccctgcaggaactcttggactggaggagaaagctctgtgaggaaggacaagactggcagcagatcctgcaccacgctgagcccagggtgcctcccccaccaccttgcaagaagcccagccttctgaagaagccggaaggggcctcctgcaacaggctgccgtctgagctctgggacaccaccatttgatgtggcctgaactgcagacttacaaaatagaactgcctactgattccgggctgcaacaacagaaggctgccttctgacatgcgctggggcttctctccacgcatttagacaaaaaaagcacaggacacagacactaaatatatgagatcccgtgtgtgtgtgtgtgtgtttgtgtgtgtgtgtgtgggttctttcttatccatctcgtggtgatacactctgattttcaagctcctcatttacggctctgtgctacccctaggtagcaagagagaggctgggaaaagtgtggacgtggccagagcgagagagtagcggaggaaaggagcaatccatgcacactctgtacagttgtttttctacggttcaacagtctgtttattgtacttccaatggttttattataatacagtatacgggacatatattttatttctttgtagctacttgtgttttattggtattataaacctgataattatttacatgtttattactgtaattttataaatttatgcaattggtggtgcttcctttcttcaaaatacagattttaaaaaatcatttctagattatttttttcctccacagtccttttttttcacctaacgcacctaaatcttgaaactacattgttgttttagcttcgccagtgtcaccccttgcaaaactatgaattgagccccatgttttaggtgttactcatggatgaggaggctgttctttcctatgccctgtatttctggataagtggattgtgtaccctttagttaaatttcacctcccgacttcagcatagatcacaggaaatcacatggcacacggttaaacacgtatggcttcaaatccatagccggtggtgtaaaatgatcatattcattcaaaggcctacacagtacaaatgagcacgctgccatgtactggtttgagcagtaggggctgcatcgcacagcgctcgtcccccgggacttacactgcatgattccctcactgtatatcctcaaccctcccataatgcaaggccttgttcattgatgtgctttcgtcggctgtcggaaagttctgagcagtggctccagaccaccttgtcttgctacttggaactttttattcataccagcctttgaaaagttactgtgccaataaagaggtacaactgtg

SEQ ID NO: 13251 - DNA, 617 bp, Homo sapiens
  source 1..617: mol_type = unassigned DNA
agaagcttcagggaggtggctcaggcctaggctgcaagcagggaacaggtaccagcaaaatatgctaggaagcttctcgctgggaggctaatataaatgggtgggccatttgctaggatacaagagaaacttgccattgggctgctagggaaactcgcccagggacgtgcgcccctgggtctcccacacgccagtgacaaggagacctggggctctctggcaagaaccacaagaagccccttcttcctgctgtgtccctccagggccctctactgacagacccaacaccgttccagctggtaaaggaggaccctccggaggcccagccccaggatcaagaaaacagagcaaaacatgggtcgacctggagttgatccttaattgatgatgggcacaacatggagcctgaaatcatttatttcattttcaagtttcaggctttctgacagaggcaaagcacctagccataaattgcagaaatgcttcattgaccacggattaccatggtggggctggagccaatgtccttctccaggatgtgaatggaaatatcccattagattatgctgtagaagggacagaatccagctctatcctgttgacctatctggatgaaa

SEQ ID NO: 13252 - DNA, 3117 bp, Homo sapiens
  source 1..3117: mol_type = unassigned DNA
caaacacttcttatcatctggaggaaatgtcaatgagaaaaacgatgaaggagtaaccctgttacacatggcgtgtgcgagtggctacaaggaggtggtgtctcttatcctggaacatggtggagacctcaacatagtagatgatcagtactggactcccctccacttggcagccaaatatggccagacaaatctggtgaaacttctcctgatgcatcaggcaaacccacacctcgtgaactgtaatgaggagaaggcgtcagatattgctgcctctgagtttattgaggaaatgctgctgaaagccgaaattgcctgggaagaaaaaatgaaagagcctttatctgcttctaccttagctcaagaagagccctatgaagagatcattcacgatcttcccgtactgtcgagtaagctcagtcccctggtgttaccaattgccaagcaagacagtttgttggaaaaagacattatgttcaaagatgcaacaaaaggtctgtgtaagcagcagtctcaggacagcatccctgaaaaccccatgatgagcggttccaccaaacccgagcaggtcaagctaatgcctcctgccccaaacgatgacctggcaacgctcagcgagctcaatgatggcagcctgctctatgagattcagaagcgctttgggaacaatcagatctatacattcattggagacattcttttgcttgttaacccatacaaggagcttccaatttattcttccatggtgtcccagctgtatttcagctcctcagggaagctgtgttcctcgctgcctcctcacctcttctcctgtgtggagagagcctttcaccagctcttccgggaacagcggcctcagtgtttcatcctcagtggagaaaggggatcaggaaagtctgaagccagcaaacaaatcataagacacctcacctgcagggctggcgccagcagggccacactggattccagattcaaacatgtcgtgtgcatcttagaagcctttggacatgccaagaccacacttaatgatttgtccagttgcttcatcaagtattttgaactgcagttctgtgagaggaaacaacagctaaccggagccagaatttatacatatttgctagagaaatccagacttgtttcacaacctcttggccagagcaattttctcattttctacttgttgatggatgggttatctgctgaagaaaaatatggacttcatcttaataatttatgtgcacaccggtatttgaaccagaccatacaggatgatgcatccacaggggagcgttctctgaacagggagaaattggctgttttgaaacgagccctgaatgtagttggcttcagcagcttggaggtggagaatctgttcgtaattctagcagcaatattgcaccttggagacattcggtttactgccctgaatgaggggaactccgccttcgtttctgacctccagctcctggaacaagtggctggaatgttacaagtatcaacagatgaattggcatctgccttaacaactgatattcaatattttaaaggggatatgataatacgacgacataccatacagattgctgagtttttccgagacctcttggccaagtccctgtacagtcgtttgtttagctttttggtgaataccatgaattcttgcctccacagtcaagatgaacagaaaagcatgcagacattggatattggaatattggacatttttggttttgaagagtttcaaaagaatgaatttgaacaactttgtgtcaacatgaccaatgagaagatgcaccactatatcaatgaagtgctttttctccacgagcaagtggaatgtgtacaagagggagttaccatggaaacagcatattctcctggtaaccagaatggagttttggacttttttttccagaagccatctggatttctcaccttattggatgaagaaagtcaaatgatttggtcagtggaatcaaattttccaaaaaaactacaaagtctcctagaatcctcaaacacaaatgcggtgtactcccccatgaaggatgggaatgggaatgttgccctcaaagaccacggtacagccttcaccatcatgcactacgcaggaagggtaatgtatgatgttgttggggcgattgaaaaaaataaagactccctttcacagaatcttctatttgtaatgaaaactagtgaaaatgtcgtgatcaatcatttgttccagtcgaaattgtcacaaacaggatccctcgtatctgcctatccttcctttaaattccgaggacataagtctgccctgctcagtaagaaaatgacagcttcttcaattattggagaaaacaagaattatctagaacttagtaagttattaaaaaagaaaggaacttctacatttcttcaaagattggaacgaggagatccagtcaccatagcatcacaactcaggaaatcactaatggatattattggaaaacttcagaagtgcactccacacttcattcattgcatcaggcccaataactcaaagctgccagatacttttgataatttttacgtgtctgctcagctacaatatattggggtcctggagatggtgaagatcttccgatatggataccctgttcgcctttccttctcggatttcctgtcaaggtaaattcttctgctcttaaaatcgtcgttctcgctgctgttcagtgcagtgtactgacactgacactattgtagcaagggtcttctgttgtcttttttggcactgcttttgttgtttacttttttctatctccaataaacaaaatattctgggaaacaatgaaatacactgacaaagctcacataaaaaataattaaactgtactgaggacagtatcttggaaaccattctcatgttcctttcaaagtgtggctttccttggattaaagttttgtaaaatgattgcatgtgatatttactatttattatttaaaaggagaatgtatgtaagtgattatttccccttttatatatgaacaaaatattatttagatcagtggttggcaaactacactcatgggccagccaaatccagcctaccacctgtttttgtaaataaagttttattggaacatggccac

SEQ ID NO: 13253 - DNA, 475 bp, Homo sapiens
  source 1..475: mol_type = unassigned DNA
tcattgaaccatttcatctcttaataacagttcctaactcaggttgtcttcaaatgtttgacaggtcaagctaatgcctcctgccccaaacgatgacctggcaacgctcagcgagctcaatgatggcagcctgctctatgagattcagaagcgctttgggaacaatcagatctatacattcattggagacattcttttgcttgttaacccatacaaggagcttccaatttattcttccatggtgtcccagctgtatttcagctcctcagggaagctgtgttcctcgctgcctcctcacctcttctcctgtgtggagagagcctttcaccagctcttccgggaacagcggcctcagtgtttcatcctcagtggagaaaggggatcaggaaagtctgaagccagcaaacaaatcataagacacctcacctgcagggctggcgccagcagggccacactggattccagattcaaacat

SEQ ID NO: 13254 - DNA, 6874 bp, Homo sapiens
  source 1..6874: mol_type = unassigned DNA
ctgcgctcggagactttcagtgaaagcagaggagagatttccaaaggttgtattttccttctggttggagcctctcatccacattgtggttgctttcagctatgtaacgtttttcgatcccatgagatggaaatcgaccagtgcttgctagagtcccttccccttggccaacggcagcgtctagtgaagcgcatgcgctgtgagcaaatcaaagcctactatgagcgcgagaaggcttttcagaagcaggaagggttcctgaaaaggctgaagcatgcgaagaatccgaaagttcacttcaacctcacggacatgctacaggacgcgattatccaccacaatgacaaagaagtgcttcggctcctgaaggagggggcagacccccacaccctcgtctcctcgggagggtccctgctccatctgtgtgctcggtatgataatgccttcattgcagaaattctgattgacagaggagtcaacgtcaaccaccaggatgaagacttctggacgcccatgcacattgcctgtgcctgcgataaccctgatattgtcctgcttcttgtattagctggagccaatgtccttctccaggatgtgaatggaaatatcccattagattatgctgtagaagggacagaatccagctctatcctgttgacctatctggatgaaaatggagtggatttgacctcactgcgccagatgaagcttcagagaccaatgagtatgttaacagatgtcaaacacttcttatcatctggaggaaatgtcaatgagaaaaacgatgaaggagtaaccctgttacacatggcgtgtgcgagtggctacaaggaggtggtgtctcttatcctggaacatggtggagacctcaacatagtagatgatcagtactggactcccctccacttggcagccaaatatggccagacaaatctggtgaaacttctcctgatgcatcaggcaaacccacacctcgtgaactgtaatgaggagaaggcgtcagatattgctgcctctgagtttattgaggaaatgctgctgaaagccgaaattgcctgggaagaaaaaatgaaagagcctttatctgcttctaccttagctcaagaagagccctatgaagagatcattcacgatcttcccgtactgtcgagtaagctcagtcccctggtgttaccaattgccaagcaagacagtttgttggaaaaagacattatgttcaaagatgcaacaaaaggtctgtgtaagcagcagtctcaggacagcatccctgaaaaccccatgatgagcggttccaccaaacccgagcaggtcaagctaatgcctcctgccccaaacgatgacctggcaacgctcagcgagctcaatgatggcagcctgctctatgagattcagaagcgctttgggaacaatcagatctatacattcattggagacattcttttgcttgttaacccatacaaggagcttccaatttattcttccatggtgtcccagctgtatttcagctcctcagggaagctgtgttcctcgctgcctcctcacctcttctcctgtgtggagagagcctttcaccagctcttccgggaacagcggcctcagtgtttcatcctcagtggagaaaggggatcaggaaagtctgaagccagcaaacaaatcataagacacctcacctgcagggctggcgccagcagggccacactggattccagattcaaacatgtcgtgtgcatcttagaagcctttggacatgccaagaccacacttaatgatttgtccagttgcttcatcaagtattttgaactgcagttctgtgagaggaaacaacagctaaccggagccagaatttatacatatttgctagagaaatccagacttgtttcacaacctcttggccagagcaattttctcattttctacttgttgatggatgggttatctgctgaagaaaaatatggacttcatcttaataatttatgtgcacaccggtatttgaaccagaccatacaggatgatgcatccacaggggagcgttctctgaacagggagaaattggctgttttgaaacgagccctgaatgtagttggcttcagcagcttggaggtggagaatctgttcgtaattctagcagcaatattgcaccttggagacattcggtttactgccctgaatgaggggaactccgccttcgtttctgacctccagctcctggaacaagtggctggaatgttacaagtatcaacagatgaattggcatctgccttaacaactgatattcaatattttaaaggggatatgataatacgacgacataccatacagattgctgagtttttccgagacctcttggccaagtccctgtacagtcgtttgtttagctttttggtgaataccatgaattcttgcctccacagtcaagatgaacagaaaagcatgcagacattggatattggaatattggacatttttggttttgaagagtttcaaaagaatgaatttgaacaactttgtgtcaacatgaccaatgagaagatgcaccactatatcaatgaagtgctttttctccacgagcaagtggaatgtgtacaagagggagttaccatggaaacagcatattctcctggtaaccagaatggagttttggacttttttttccagaagccatctggatttctcaccttattggatgaagaaagtcaaatgatttggtcagtggaatcaaattttccaaaaaaactacaaagtctcctagaatcctcaaacacaaatgcggtgtactcccccatgaaggatgggaatgggaatgttgccctcaaagaccacggtacagccttcaccatcatgcactacgcaggaagggtaatgtatgatgttgttggggcgattgaaaaaaataaagactccctttcacagaatcttctatttgtaatgaaaactagtgaaaatgtcgtgatcaatcatttgttccagtcgaaattgtcacaaacaggatccctcgtatctgcctatccttcctttaaattccgaggacataagtctgccctgctcagtaagaaaatgacagcttcttcaattattggagaaaacaagaattatctagaacttagtaagttattaaaaaagaaaggaacttctacatttcttcaaagattggaacgaggagatccagtcaccatagcatcacaactcaggaaatcactaatggatattattggaaaacttcagaagtgcactccacacttcattcattgcatcaggcccaataactcaaagctgccagatacttttgataatttttacgtgtctgctcagctacaatatattggggtcctggagatggtgaagatcttccgatatggataccctgttcgcctttccttctcggatttcctgtcaaggtataagccactggctgatacattcctgcgtgagaagaaggaacagtcagctgccgagcgatgtcgacttgttctccagcagtgtaaattacaaggctggcagatgggagtccgaaaagtgtttctaaaatactggcatgctgaccaactcaatgatttgtgcctacagttgcagagaaaaattataacctgccaaaaagttatcagaggatttttagcacgccagcacctgcttcagagaataagcatcagacaacaagaggtgacttctatcaatagctttctgcagaacacagaggacatggggctgaaaacctacgatgccctggtcattcagaatgcttcagacattgcccgggaaaatgaccggctccgtagtgaaatgaacgctccctaccataaagagaagttagaggtcaggaacatgcaagaggaaggaagcaaaagaaccgatgacaagagtggacccaggcatttccaccccagctccatgtcagtctgcgcggccgtggatggcctgggccagtgcctcgttggcccgtccatctggtctccttcgctgcactcggtgttcagcatggatgacagcagcagcctcccgtctccacggaaacagcccccgcccaagccaaagagggaccccaacacccggctgagtgcttcctatgaggctgtgagcgcctgcctctccgcggccagggaagcggccaacgaagctctggcccggcccagaccgcacagcgacgactacagcaccatgaagaagattcctcctcgaaagcccaagcgcagccccaacaccaagctcagcggctcctacgaggagatatcggggtcccggcccggggacgcgaggcccgcgggcgccccgggggcagcagcgcgcgttctgacccccgggactccgcagtgcgcgctgcccccggcggcgcctccgggtgacgaggacgacagcgagcctgtgtacatcgagatgctggggcacgcggccaggcccgatagcccggaccccggggagtccgtgtacgaggagatgaagtgttgcctgcccgacgacggcggcccgggcgcgggctccttcctgctccacggcgcatcgccgcccctgctccaccgcgcgccggaggacgaggcggcggggcccccaggggacgcgtgcgacatcccgccgcccttccccaacctgctgccgcaccggccgcccctgctggtgttccccccgacccccgtcacctgctcccccgcctccgacgagtcgcccctgacacccctggaggtgaagaagctgccagtcctggagaccaacctcaagtaccccgtgcagccggaggggtcgagcccgctgtccccgcagtactccaagagccagaagggcgacggcgacaggcccgcgtcccccggcctggcgctgttcaacgggtccggccgagcctccccgccgtccacgccgcccccgcccccgcccccgcccgggccgccccccgcgccctacaggccctgcgcgcacttggccttcccgccggagcccgccccggtgaacgcggggaaagcggggccgagcgcagaggcgcccaaggttcacccaaagccaaactctgcccccgtggccgggccctgcagctccttccccaagatcccatattcccccgtgaaggccaccagggcggacgccaggaaggccggctccagtgcctcgccccccgcgccctacagccctcccagctccaggcctctcagcagccccctggacgagctcgccagcctcttcaactcggggaggagtgtgcttcggaaatccgcggcgggaagaaaaatcagggaagcagaaggttttgaaactaacatgaacataagtagccgagatgaccctagtacgtcagaaattacttccgagactcaagacagaaatgcaaataaccatggaattcagttatctaattcactatctagtgctataactgctgaaaatggaaattccatctcaaatggtttacctgaagaagatggatactcacggttgtctataagtggcacagggacttcgacatttcaaagacacagggacagtcacaccactcaggtaatccatcagctgaggctctcagagaatgaaagtgtggccctgcaggaactcttggactggaggagaaagctctgtgaggaaggacaagactggcagcagatcctgcaccacgctgagcccagggtgcctcccccaccaccttgcaagaagcccagccttctgaagaagccggaaggggcctcctgcaacaggctgccgtctgagctctgggacaccaccatttgatgtggcctgaactgcagacttacaaaatagaactgcctactgattccgggctgcaacaacagaaggctgccttctgacatgcgctggggcttctctccacgcatttagacaaaaaaagcacaggacacagacactaaatatatgagatcccgtgtgtgtgtgtgtgtgtttgtgtgtgtgtgtgtgggttctttcttatccatctcgtggtgatacactctgattttcaagctcctcatttacggctctgtgctacccctaggtagcaagagagaggctgggaaaagtgtggacgtggccagagcgagagagtagcggaggaaaggagcaatccatgcacactctgtacagttgtttttctacggttcaacagtctgtttattgtacttccaatggttttattataatacagtatacgggacatatattttatttctttgtagctacttgtgttttattggtattataaacctgataattatttacatgtttattactgtaattttataaatttatgcaattggtggtgcttcctttcttcaaaatacagattttaaaaaatcatttctagattatttttttcctccacagtccttttttttcacctaacgcacctaaatcttgaaactacattgttgttttagcttcgccagtgtcaccccttgcaaaactatgaattgagccccatgttttaggtgttactcatggatgaggaggctgttctttcctatgccctgtatttctggataagtggattgtgtaccctttagttaaatttcacctcccgacttcagcatagatcacaggaaatcacatggcacacggttaaacacgtatggcttcaaatccatagccggtggtgtaaaatgatcatattcattcaaaggcctacacagtacaaatgagcacgctgccatgtactggtttgagcagtaggggctgcatcgcacagcgctcgtcccccgggacttacactgcatgattccctcactgtatatcctcaaccctcccataatgcaaggccttgttcattgatgtgctttcgtcggctgtcggaaagttctgagcagtggctccagaccaccttgtcttgctacttggaactttttattcataccagcctttgaaaagttactgtgccaataaagaggtacaactgtgttcttctatt

SEQ ID NO: 13255 - DNA, 7436 bp, Homo sapiens
  source 1..7436: mol_type = unassigned DNA
acagatcaaagatctctgattctaagaggtggctattttaagctcctgctatcaatttcctattcacacacagcaactggtggcaactaaaaataatccgctttactaccagctaagaatctggtcatatgtggctgatggacagtgtgcacgaagaagatttaggatccttctatccgtggcttctctccagcccactcatcagcttagtttgctgccatttgaaagctattgaaaagccattaacaggcaggaccgggagagccgcactgcagcacacctccgtgcagcagaatgtggctgcatgtgaacaccaattagagctgactattcccgggattgtggtactcggggctgtgtcaatcaagggtgctacaatagcacgtgcaccagtggtgcctcaagacccaccggggagaggcttatcttaactccagctgccgaatgagaatgagtttgaagctttttgcaggatcatggaacagagcctccatgcaatagtgcatcctgaggtaaactgttacctgagtaagggctttaagtaatgcatttcctgggaacgacagttgtgacagaagagaatgctggaacccgtagcaagattcctgtctgagatggaaagatgtctcactatcattttatcaagtgctgttgctttcagctatgtaacgtttttcgatcccatgagatggaaatcgaccagtgcttgctagagtcccttccccttggccaacggcagcgtctagtgaagcgcatgcgctgtgagcaaatcaaagcctactatgagcgcgagaaggcttttcagaagcaggaagggttcctgaaaaggctgaagcatgcgaagaatccgaaagttcacttcaacctcacggacatgctacaggacgcgattatccaccacaatgacaaagaagtgcttcggctcctgaaggagggggcagacccccacaccctcgtctcctcgggagggtccctgctccatctgtgtgctcggtatgataatgccttcattgcagaaattctgattgacagaggagtcaacgtcaaccaccaggatgaagacttctggacgcccatgcacattgcctgtgcctgcgataaccctgatattgtcctgcttcttgtattagctggagccaatgtccttctccaggatgtgaatggaaatatcccattagattatgctgtagaagggacagaatccagctctatcctgttgacctatctggatgaaaatggagtggatttgacctcactgcgccagatgaagcttcagagaccaatgagtatgttaacagatgtcaaacacttcttatcatctggaggaaatgtcaatgagaaaaacgatgaaggagtaaccctgttacacatggcgtgtgcgagtggctacaaggaggtggtgtctcttatcctggaacatggtggagacctcaacatagtagatgatcagtactggactcccctccacttggcagccaaatatggccagacaaatctggtgaaacttctcctgatgcatcaggcaaacccacacctcgtgaactgtaatgaggagaaggcgtcagatattgctgcctctgagtttattgaggaaatgctgctgaaagccgaaattgcctgggaagaaaaaatgaaagagcctttatctgcttctaccttagctcaagaagagccctatgaagagatcattcacgatcttcccgtactgtcgagtaagctcagtcccctggtgttaccaattgccaagcaagacagtttgttggaaaaagacattatgttcaaagatgcaacaaaaggtctgtgtaagcagcagtctcaggacagcatccctgaaaaccccatgatgagcggttccaccaaacccgagcaggtcaagctaatgcctcctgccccaaacgatgacctggcaacgctcagcgagctcaatgatggcagcctgctctatgagattcagaagcgctttgggaacaatcagatctatacattcattggagacattcttttgcttgttaacccatacaaggagcttccaatttattcttccatggtgtcccagctgtatttcagctcctcagggaagctgtgttcctcgctgcctcctcacctcttctcctgtgtggagagagcctttcaccagctcttccgggaacagcggcctcagtgtttcatcctcagtggagaaaggggatcaggaaagtctgaagccagcaaacaaatcataagacacctcacctgcagggctggcgccagcagggccacactggattccagattcaaacatgtcgtgtgcatcttagaagcctttggacatgccaagaccacacttaatgatttgtccagttgcttcatcaagtattttgaactgcagttctgtgagaggaaacaacagctaaccggagccagaatttatacatatttgctagagaaatccagacttgtttcacaacctcttggccagagcaattttctcattttctacttgttgatggatgggttatctgctgaagaaaaatatggacttcatcttaataatttatgtgcacaccggtatttgaaccagaccatacaggatgatgcatccacaggggagcgttctctgaacagggagaaattggctgttttgaaacgagccctgaatgtagttggcttcagcagcttggaggtggagaatctgttcgtaattctagcagcaatattgcaccttggagacattcggtttactgccctgaatgaggggaactccgccttcgtttctgacctccagctcctggaacaagtggctggaatgttacaagtatcaacagatgaattggcatctgccttaacaactgatattcaatattttaaaggggatatgataatacgacgacataccatacagattgctgagtttttccgagacctcttggccaagtccctgtacagtcgtttgtttagctttttggtgaataccatgaattcttgcctccacagtcaagatgaacagaaaagcatgcagacattggatattggaatattggacatttttggttttgaagagtttcaaaagaatgaatttgaacaactttgtgtcaacatgaccaatgagaagatgcaccactatatcaatgaagtgctttttctccacgagcaagtggaatgtgtacaagagggagttaccatggaaacagcatattctcctggtaaccagaatggagttttggacttttttttccagaagccatctggatttctcaccttattggatgaagaaagtcaaatgatttggtcagtggaatcaaattttccaaaaaaactacaaagtctcctagaatcctcaaacacaaatgcggtgtactcccccatgaaggatgggaatgggaatgttgccctcaaagaccacggtacagccttcaccatcatgcactacgcaggaagggtaatgtatgatgttgttggggcgattgaaaaaaataaagactccctttcacagaatcttctatttgtaatgaaaactagtgaaaatgtcgtgatcaatcatttgttccagtcgaaattgtcacaaacaggatccctcgtatctgcctatccttcctttaaattccgaggacataagtctgccctgctcagtaagaaaatgacagcttcttcaattattggagaaaacaagaattatctagaacttagtaagttattaaaaaagaaaggaacttctacatttcttcaaagattggaacgaggagatccagtcaccatagcatcacaactcaggaaatcactaatggatattattggaaaacttcagaagtgcactccacacttcattcattgcatcaggcccaataactcaaagctgccagatacttttgataatttttacgtgtctgctcagctacaatatattggggtcctggagatggtgaagatcttccgatatggataccctgttcgcctttccttctcggatttcctgtcaaggtataagccactggctgatacattcctgcgtgagaagaaggaacagtcagctgccgagcgatgtcgacttgttctccagcagtgtaaattacaaggctggcagatgggagtccgaaaagtgtttctaaaatactggcatgctgaccaactcaatgatttgtgcctacagttgcagagaaaaattataacctgccaaaaagttatcagaggatttttagcacgccagcacctgcttcagagaataagcatcagacaacaagaggtgacttctatcaatagctttctgcagaacacagaggacatggggctgaaaacctacgatgccctggtcattcagaatgcttcagacattgcccgggaaaatgaccggctccgtagtgaaatgaacgctccctaccataaagagaagttagaggtcaggaacatgcaagaggaaggaagcaaaagaaccgatgacaagagtggacccaggcatttccaccccagctccatgtcagtctgcgcggccgtggatggcctgggccagtgcctcgttggcccgtccatctggtctccttcgctgcactcggtgttcagcatggatgacagcagcagcctcccgtctccacggaaacagcccccgcccaagccaaagagggaccccaacacccggctgagtgcttcctatgaggctgtgagcgcctgcctctccgcggccagggaagcggccaacgaagctctggcccggcccagaccgcacagcgacgactacagcaccatgaagaagattcctcctcgaaagcccaagcgcagccccaacaccaagctcagcggctcctacgaggagatatcggggtcccggcccggggacgcgaggcccgcgggcgccccgggggcagcagcgcgcgttctgacccccgggactccgcagtgcgcgctgcccccggcggcgcctccgggtgacgaggacgacagcgagcctgtgtacatcgagatgctggggcacgcggccaggcccgatagcccggaccccggggagtccgtgtacgaggagatgaagtgttgcctgcccgacgacggcggcccgggcgcgggctccttcctgctccacggcgcatcgccgcccctgctccaccgcgcgccggaggacgaggcggcggggcccccaggggacgcgtgcgacatcccgccgcccttccccaacctgctgccgcaccggccgcccctgctggtgttccccccgacccccgtcacctgctcccccgcctccgacgagtcgcccctgacacccctggaggtgaagaagctgccagtcctggagaccaacctcaagtaccccgtgcagccggaggggtcgagcccgctgtccccgcagtactccaagagccagaagggcgacggcgacaggcccgcgtcccccggcctggcgctgttcaacgggtccggccgagcctccccgccgtccacgccgcccccgcccccgcccccgcccgggccgccccccgcgccctacaggccctgcgcgcacttggccttcccgccggagcccgccccggtgaacgcggggaaagcggggccgagcgcagaggcgcccaaggttcacccaaagccaaactctgcccccgtggccgggccctgcagctccttccccaagatcccatattcccccgtgaaggccaccagggcggacgccaggaaggccggctccagtgcctcgccccccgcgccctacagccctcccagctccaggcctctcagcagccccctggacgagctcgccagcctcttcaactcggggaggagtgtgcttcggaaatccgcggcgggaagaaaaatcagggaagcagaaggttttgaaactaacatgaacataagtagccgagatgaccctagtacgtcagaaattacttccgagactcaagacagaaatgcaaataaccatggaattcagttatctaattcactatctagtgctataactgctgaaaatggaaattccatctcaaatggtttacctgaagaagatggatactcacggttgtctataagtggcacagggacttcgacatttcaaagacacagggacagtcacaccactcaggtaatccatcagctgaggctctcagagaatgaaagtgtggccctgcaggaactcttggactggaggagaaagctctgtgaggaaggacaagactggcagcagatcctgcaccacgctgagcccagggtgcctcccccaccaccttgcaagaagcccagccttctgaagaagccggaaggggcctcctgcaacaggctgccgtctgagctctgggacaccaccatttgatgtggcctgaactgcagacttacaaaatagaactgcctactgattccgggctgcaacaacagaaggctgccttctgacatgcgctggggcttctctccacgcatttagacaaaaaaagcacaggacacagacactaaatatatgagatcccgtgtgtgtgtgtgtgtgtttgtgtgtgtgtgtgtgggttctttcttatccatctcgtggtgatacactctgattttcaagctcctcatttacggctctgtgctacccctaggtagcaagagagaggctgggaaaagtgtggacgtggccagagcgagagagtagcggaggaaaggagcaatccatgcacactctgtacagttgtttttctacggttcaacagtctgtttattgtacttccaatggttttattataatacagtatacgggacatatattttatttctttgtagctacttgtgttttattggtattataaacctgataattatttacatgtttattactgtaattttataaatttatgcaattggtggtgcttcctttcttcaaaatacagattttaaaaaatcatttctagattatttttttcctccacagtccttttttttcacctaacgcacctaaatcttgaaactacattgttgttttagcttcgccagtgtcaccccttgcaaaactatgaattgagccccatgttttaggtgttactcatggatgaggaggctgttctttcctatgccctgtatttctggataagtggattgtgtaccctttagttaaatttcacctcccgacttcagcatagatcacaggaaatcacatggcacacggttaaacacgtatggcttcaaatccatagccggtggtgtaaaatgatcatattcattcaaaggcctacacagtacaaatgagcacgctgccatgtactggtttgagcagtaggggctgcatcgcacagcgctcgtcccccgggacttacactgcatgattccctcactgtatatcctcaaccctcccataatgcaaggccttgttcattgatgtgctttcgtcggctgtcggaaagttctgagcagtggctccagaccaccttgtcttgctacttggaactttttattcataccagcctttgaaaagttactgtgccaataaagaggtacaactgtgttcttctatt

SEQ ID NO: 13256 - DNA, 6874 bp, Homo sapiens; identical to SEQ ID NO: 13254
  source 1..6874: mol_type = unassigned DNA

SEQ ID NO: 13257 - DNA, 7436 bp, Homo sapiens; identical to SEQ ID NO: 13255
  source 1..7436: mol_type = unassigned DNA

SEQ ID NO: 13258 - DNA, 3492 bp, Homo sapiens; identical to SEQ ID NO: 13249
  source 1..3492: mol_type = unassigned DNA

SEQ ID NO: 13259 - DNA, 6779 bp, Homo sapiens; identical to SEQ ID NO: 13250
  source 1..6779: mol_type = unassigned DNA

SEQ ID NO: 13260 - DNA, 617 bp, Homo sapiens; identical to SEQ ID NO: 13251
  source 1..617: mol_type = unassigned DNA

SEQ ID NO: 13261 - DNA, 3117 bp, Homo sapiens; identical to SEQ ID NO: 13252
  source 1..3117: mol_type = unassigned DNA

SEQ ID NO: 13262 - DNA, 475 bp, Homo sapiens; identical to SEQ ID NO: 13253
  source 1..475: mol_type = unassigned DNA

SEQ ID NO: 13263 - DNA, 5563 bp, Homo sapiens
  source 1..5563: mol_type = unassigned DNA
aggctggaggcgggaccagccgctgccgtctccgtctcggtgtcccggcccctacagcgcccggcagccgcggcgggaggagcggaaactgtcgggtgcgtcccgttcggagccgcgccggccgagaaggcgccgaggagcagcgaggcggcctctgtccggcccggacccgccgagcggcgtgcgcgccccctccccgtagcctcgcggcgcggcctcgccccggcccctcccgagctcatcgcgggcccacggagcggccccggaggcccgagcgcgcccacctgagcccccgcgctggcgccatggcggagcaggagagcctggaattcggcaaggcagacttcgtgctgatggacaccgtctccatgcccgagttcatggccaacctcaggctcagatttgaaaaagggcgcatctatacgttcattggagaagtcgtcgtttctgtgaacccttacaagttgttgaacatctatggaagagacacaattgagcagtataaaggccgtgagctgtatgagagaccgcctcacctttttgctattgcggatgctgcttacaaggctatgaagaggcgatcaaaagacacttgtattgtgatatcaggggaaagtggagctggtaaaacggaagccagtaagtacattatgcagtatattgcggccatcaccaaccccagtcagagagcagaggttgaaagagtgaagaatatgttgcttaagtccaactgtgttttggaagcttttggaaatgccaaaaccaaccgtaatgacaactcaagcaggtttggaaaatacatggatatcaactttgacttcaagggtgaccctattggtgggcatatcaataactacttactagaaaagtctcgagtgattgtgcaacagccaggagaaagaagctttcattctttctatcagctactccaaggaggttcagaacaaatgctacgctctctacatctccagaaatccctttcatcctacaactatattcatgtgggagctcaattaaagtcttctatcaatgatgctgccgaattcagagttgttgctgatgccatgaaagtcattggcttcaaacctgaggagatccaaacagtgtataagattttggctgctattctgcacttgggaaatttaaaatttgtagtagatggtgacacgcctcttattgagaatggcaaagtagtatctatcatagcagaattgctctctactaagacagatatggttgagaaagcccttctttaccggactgtggccacaggccgtgacatcattgacaagcagcacacagaacaagaggccagctacggcagagacgcctttgccaaggcaatatatgagcgccttttttgttggatcgttactcgcatcaatgatattattgaggtcaagaactatgacaccacaatccatgggaaaaacactgttattggtgtcttggatatctatggctttgaaatctttgacaacaacagttttgaacaattctgtatcaattactgcaatgagaaactgcagcagctatttattcagctggttctgaagcaagaacaagaggaataccagcgggaagggatcccctggaaacatattgactacttcaacaatcagatcattgttgacctcgtggagcaacagcacaaagggatcattgcaatccttgatgatgcttgcatgaatgtcggcaaagtcaccgatgaaatgtttcttgaagcacttaacagtaaattgggcaaacacgcccatttttccagccgaaagctctgtgcctcagacaaaattctggagtttgatcgagattttcgaattcgacattatgcaggcgatgtagtctattctgtcattggttttattgacaaaaataaagatactttatttcaagatttcaagcgccttatgtataacagttcaaatcctgtgctcaagaatatgtggcctgaaggcaaactgagcattacagaggtgaccaagcgacctctgactgctgctaccttgtttaagaattctatgattgctctagtagacaaccttgcatcaaaggaaccatattacgttcgttgcatcaaacccaatgacaagaaatctccacagatatttgatgatgaacgctgccggcaccaagtagaatatcttggactactggaaaatgtgagagtgcgtcgggcaggatttgccttccgccagacatacgagaagtttcttcacaggtataagatgatctctgaattcacctggcccaaccatgaccttccttcagacaaagaggctgtcaagaaactaattgaacggtgtggttttcaggatgatgtagcttatgggaagaccaaaattttcattcgaacaccccgaacattgtttaccttggaagaactccgtgcccagatgctcataaggattgtcctctttctacaaaaggtgtggcggggcaccctggcccgcatgcggtacaaaagaaccaaggcagctctgacaataatcaggtactaccggcgctacaaagtgaagtcgtacatccacgaggtggccagacgcttccatggcgtcaagaccatgcgagactacgggaagcacgtgaagtggccaagccctcctaaagttcttcgccgttttgaggaggccctgcagacgattttcaatagatggagagcatcccagctcatcaagagcattccggcctcagacctgccccaggtcagggcaaaggttgcagccgtggaaatgttgaagggtcaaagggctgacctcgggctccagagggcctgggagggcaactatcttgcttcaaagccagatacacctcagacctcaggcacttttgtccctgttgctaatgaattgaaacggaaggacaaatacatgaatgtcctcttttcctgtcacgtccgtaaggtaaatcgatttagtaaggtggaagacagagcaatttttgtcactgaccgtcacctgtataaaatggatcccactaaacagtacaaggtgatgaagactatccctctatacaatttgactggtctgagtgtctccaatggaaaggaccaacttgtagtgttccatacgaaagacaacaaagacctcattgtctgcctcttcagcaaacagccaacccatgagagtcgaattggagaacttgttggagtgctggtgaatcatttcaagagtgagaagcgccaccttcaagtgaacgtcaccaacccagtacagtgcagcctgcacgggaagaagtgcaccgtctccgtggagacgcggctcaaccagccccagcccgacttcaccaagaatcgctcgggcttcatcctcagcgtgcccgggaactgacgccccgcggaggcctggcccggagcccggccacactccgagtcctgggtcccagtccagctgctgcctcccaacccatgcccgctagaaacctgctgcgagggcccctcccagaggagccccgcccctgtaagatttccttcctggttttctgcctttggtatcatcttcctctgtccttactgtccacggtccctgttcaataagccaaagaccctggtgccccgcccagacccctgggctgacgtccagaccaatctcaccccagaggcaactggatggtgcctttagttggtgcggatgccccgtggccaggtcaagtcagagcacctggacaggtgtcctccctgctgctgaccctgcagagggaaggggtggggatgcaggaccccactctgcgggagccccatagccacctctcttgcccaaggtgagccagccctggggacccagctcagggaggctctgctcagagttcggcggacccaccccaacccaactcccagccgccagccaaagccactgggtgagcagagtcacccacagggccagcccctcagccaggagccagtggcaggagcggaacagcccatccagcagagtgagtccatccttcccaggttctcccctgggagactccctttgccaccaaggcccccaccagggcctctgaccaccgctctggagaggacagtgtggcatgctccaaggatcatcttacttaactcgcagcctgtggctgtggtcctcttatagatactttcaccgtttgcagggttgctaatcagatacctgctgtcaccacacttgggtcaggaaccctaatgagaacggggagctgccagggtgagggcagccctcagggtcggccgctttccctctggaccacctcccgctgcgtttcctactcagagaaacagcaagggcggggtcaagacacgggatgacgggaagcaggaagcggggcagcagcacagcgtggggtcctggcactgcaggccaggccaggatgcccaccccgccctctacacggccccttggggcctgcgcccgtgaaactggtgccagggagcactgccagcttgccagtttctgcccagcaaaagcacgtatgcttcaggggccttctgagaccaccttccccactgagccccagctgctgagaaggccttgagggaagtagaggctgggagcaaatgccccatgcggtgagaggatgaggggagcctacgcctcaggcatgtggtgagaggatgagggggagggagccaacgcctcaggtggagtgggcagaggtgcaagagagggatgtactgaagcttcttcccgtcctgccacagacacttctcctgccttcccaccctgacccggcagaacccaccaagtgcctgtgtgcagcctcctgtgcctcacccagggcctgaccccagagtggtcccaacaacccggtctcatgcccactccccatccctgcttcccaaaaattgcactgtgtgcagtttgcaacaaagaatcccgctggcatcctgtccttgggaaccctttctcattctccaagcctggtcagctgcctgcacaggcagaggtgccctcagcccagattagcaacactcatagttttgccaattaccagtagacactagtggaaccatctaactggaacttcctctctccttccacttatttcctcaaacttgttgctttacactagacacatgcaaatgtatgttttaaacacaccaaaacagatcatgccaaatgagttgcctgtcaaaggctggagggcaggaggagggcctgggtttgggttctttcctcccagcctttggatggtgccttgggccccttagccccagcgccagggcctcccagctgaggccacaggacaagcacttttttatgatgtactaaaagccacagtatgtggcaactgcaaaaggatcaggaatttagggtatgatctcggtcacgtgtcccgggcgctgaggggaaaggaagcgggcatgattgtagacaatgagggggttctcttgatgtaatgaaatgcaattttatggtttggtgcaaaaactcctattttccagtaaattaactttatttctaaagcatattttgatttgccatcaagagcaataaagcattaaatcttatttttaaaggtgttctgcttatctgtcactgaaaacttggtgaaatttttgcttaaataaagtcaaccattatctgggaggatagaa

SEQ ID NO: 13264 - DNA, 5451 bp, Homo sapiens
  source 1..5451: mol_type = unassigned DNA
ttcttcaacttcttgatttaccctaggctggggttcccaaatccagctttgtgtcatgatcacccagcttttaaaatacgcagattccccggactctgtcttctggagatggtgatttattaagcctccttagtgcccagctcaaatgaagaaatattgcaccagaagaagaaagccaagaaatgaagtcacaacgtcagtcatttaatccaccacctgtggtcctaactagttcttatgtcctgtggaacacacagtctaacaaggggataaaactaattgactccatcacatggaaaccatgatttttgccaagagaagcagaaacaagatgctttcacccttgggagagattctcatctaagaactggcaagatttgaaaaagggcgcatctatacgttcattggagaagtcgtcgtttctgtgaacccttacaagttgttgaacatctatggaagagacacaattgagcagtataaaggccgtgagctgtatgagagaccgcctcacctttttgctattgcggatgctgcttacaaggctatgaagaggcgatcaaaagacacttgtattgtgatatcaggggaaagtggagctggtaaaacggaagccagtaagtacattatgcagtatattgcggccatcaccaaccccagtcagagagcagaggttgaaagagtgaagaatatgttgcttaagtccaactgtgttttggaagcttttggaaatgccaaaaccaaccgtaatgacaactcaagcaggtttggaaaatacatggatatcaactttgacttcaagggtgaccctattggtgggcatatcaataactacttactagaaaagtctcgagtgattgtgcaacagccaggagaaagaagctttcattctttctatcagctactccaaggaggttcagaacaaatgctacgctctctacatctccagaaatccctttcatcctacaactatattcatgtgggagctcaattaaagtcttctatcaatgatgctgccgaattcagagttgttgctgatgccatgaaagtcattggcttcaaacctgaggagatccaaacagtgtataagattttggctgctattctgcacttgggaaatttaaaatttgtagtagatggtgacacgcctcttattgagaatggcaaagtagtatctatcatagcagaattgctctctactaagacagatatggttgagaaagcccttctttaccggactgtggccacaggccgtgacatcattgacaagcagcacacagaacaagaggccagctacggcagagacgcctttgccaaggcaatatatgagcgccttttttgttggatcgttactcgcatcaatgatattattgaggtcaagaactatgacaccacaatccatgggaaaaacactgttattggtgtcttggatatctatggctttgaaatctttgacaacaacagttttgaacaattctgtatcaattactgcaatgagaaactgcagcagctatttattcagctggttctgaagcaagaacaagaggaataccagcgggaagggatcccctggaaacatattgactacttcaacaatcagatcattgttgacctcgtggagcaacagcacaaagggatcattgcaatccttgatgatgcttgcatgaatgtcggcaaagtcaccgatgaaatgtttcttgaagcacttaacagtaaattgggcaaacacgcccatttttccagccgaaagctctgtgcctcagacaaaattctggagtttgatcgagattttcgaattcgacattatgcaggcgatgtagtctattctgtcattggttttattgacaaaaataaagatactttatttcaagatttcaagcgccttatgtataacagttcaaatcctgtgctcaagaatatgtggcctgaaggcaaactgagcattacagaggtgaccaagcgacctctgactgctgctaccttgtttaagaattctatgattgctctagtagacaaccttgcatcaaaggaaccatattacgttcgttgcatcaaacccaatgacaagaaatctccacagatatttgatgatgaacgctgccggcaccaagtagaatatcttggactactggaaaatgtgagagtgcgtcgggcaggatttgccttccgccagacatacgagaagtttcttcacaggtataagatgatctctgaattcacctggcccaaccatgaccttccttcagacaaagaggctgtcaagaaactaattgaacggtgtggttttcaggatgatgtagcttatgggaagaccaaaattttcattcgaacaccccgaacattgtttaccttggaagaactccgtgcccagatgctcataaggattgtcctctttctacaaaaggtgtggcggggcaccctggcccgcatgcggtacaaaagaaccaaggcagctctgacaataatcaggtactaccggcgctacaaagtgaagtcgtacatccacgaggtggccagacgcttccatggcgtcaagaccatgcgagactacgggaagcacgtgaagtggccaagccctcctaaagttcttcgccgttttgaggaggccctgcagacgattttcaatagatggagagcatcccagctcatcaagagcattccggcctcagacctgccccaggtcagggcaaaggttgcagccgtggaaatgttgaagggtcaaagggctgacctcgggctccagagggcctgggagggcaactatcttgcttcaaagccagatacacctcagacctcaggcacttttgtccctgttgctaatgaattgaaacggaaggacaaatacatgaatgtcctcttttcctgtcacgtccgtaaggtaaatcgatttagtaaggtggaagacagagcaatttttgtcactgaccgtcacctgtataaaatggatcccactaaacagtacaaggtgatgaagactatccctctatacaatttgactggtctgagtgtctccaatggaaaggaccaacttgtagtgttccatacgaaagacaacaaagacctcattgtctgcctcttcagcaaacagccaacccatgagagtcgaattggagaacttgttggagtgctggtgaatcatttcaagagtgagaagcgccaccttcaagtgaacgtcaccaacccagtacagtgcagcctgcacgggaagaagtgcaccgtctccgtggagacgcggctcaaccagccccagcccgacttcaccaagaatcgctcgggcttcatcctcagcgtgcccgggaactgacgccccgcggaggcctggcccggagcccggccacactccgagtcctgggtcccagtccagctgctgcctcccaacccatgcccgctagaaacctgctgcgagggcccctcccagaggagccccgcccctgtaagatttccttcctggttttctgcctttggtatcatcttcctctgtccttactgtccacggtccctgttcaataagccaaagaccctggtgccccgcccagacccctgggctgacgtccagaccaatctcaccccagaggcaactggatggtgcctttagttggtgcggatgccccgtggccaggtcaagtcagagcacctggacaggtgtcctccctgctgctgaccctgcagagggaaggggtggggatgcaggaccccactctgcgggagccccatagccacctctcttgcccaaggtgagccagccctggggacccagctcagggaggctctgctcagagttcggcggacccaccccaacccaactcccagccgccagccaaagccactgggtgagcagagtcacccacagggccagcccctcagccaggagccagtggcaggagcggaacagcccatccagcagagtgagtccatccttcccaggttctcccctgggagactccctttgccaccaaggcccccaccagggcctctgaccaccgctctggagaggacagtgtggcatgctccaaggatcatcttacttaactcgcagcctgtggctgtggtcctcttatagatactttcaccgtttgcagggttgctaatcagatacctgctgtcaccacacttgggtcaggaaccctaatgagaacggggagctgccagggtgagggcagccctcagggtcggccgctttccctctggaccacctcccgctgcgtttcctactcagagaaacagcaagggcggggtcaagacacgggatgacgggaagcaggaagcggggcagcagcacagcgtggggtcctggcactgcaggccaggccaggatgcccaccccgccctctacacggccccttggggcctgcgcccgtgaaactggtgccagggagcactgccagcttgccagtttctgcccagcaaaagcacgtatgcttcaggggccttctgagaccaccttccccactgagccccagctgctgagaaggccttgagggaagtagaggctgggagcaaatgccccatgcggtgagaggatgaggggagcctacgcctcaggcatgtggtgagaggatgagggggagggagccaacgcctcaggtggagtgggcagaggtgcaagagagggatgtactgaagcttcttcccgtcctgccacagacacttctcctgccttcccaccctgacccggcagaacccaccaagtgcctgtgtgcagcctcctgtgcctcacccagggcctgaccccagagtggtcccaacaacccggtctcatgcccactccccatccctgcttcccaaaaattgcactgtgtgcagtttgcaacaaagaatcccgctggcatcctgtccttgggaaccctttctcattctccaagcctggtcagctgcctgcacaggcagaggtgccctcagcccagattagcaacactcatagttttgccaattaccagtagacactagtggaaccatctaactggaacttcctctctccttccacttatttcctcaaacttgttgctttacactagacacatgcaaatgtatgttttaaacacaccaaaacagatcatgccaaatgagttgcctgtcaaaggctggagggcaggaggagggcctgggtttgggttctttcctcccagcctttggatggtgccttgggccccttagccccagcgccagggcctcccagctgaggccacaggacaagcacttttttatgatgtactaaaagccacagtatgtggcaactgcaaaaggatcaggaatttagggtatgatctcggtcacgtgtcccgggcgctgaggggaaaggaagcgggcatgattgtagacaatgagggggttctcttgatgtaatgaaatgcaattttatggtttggtgcaaaaactcctattttccagtaaattaactttatttctaaagcatattttgatttgccatcaagagcaataaagcattaaatctta

SEQ ID NO: 13265 - DNA, 581 bp, Homo sapiens
  source 1..581: mol_type = unassigned DNA
tggagatacacggagcccagaggaagcagggagggtggaggcaggggccaccctgctgagcgggagtcaggagagccctgcacggaggagcatgccccgattgtctgaacacgagaggtgagaagcgccaccttcaagtgaacgtcaccaacccagtacagtgcagcctgcacgggaagaagtgcaccgtctccgtggagacgcggctcaaccagccccagcccgacttcaccaagaatcgctcgggcttcatcctcagcgtgcccgggaactgacgccccgcggaggcctggcccggagcccggccacactccgagtcctgggtcccagtccagctgctgcctcccaacccatgcccgctagaaacctgctgcgagggcccctcccagaggagccccgcccctgtaagatttccttcctggttttctgcctttggtatcatcttcctctgtccttactgtccacggtccctgttcaataagccaaagaccctggtgccccgcccagacccctgggctgacgtccagaccaatctcaccccagaggcaactggatggtgcctttagttggtgcggatgccc

SEQ ID NO: 13266 - DNA, 1008 bp, Homo sapiens
  source 1..1008: mol_type = unassigned DNA
ataatatcaaagccatccacaactcagccggtcaataacgttttcctttttctttctctattgtgaaggtgtggcggggcaccctggcccgcatgcggtacaaaagaaccaaggcagctctgacaataatcaggtactaccggcgctacaaagtgaagtcgtacatccacgaggtggccagacgcttccatggcgtcaagaccatgcgagactacgggaagcacgtgaagtggccaagccctcctaaagttcttcgccgttttgaggaggccctgcagacgattttcaatagatggagagcatcccagctcatcaagagcattccggcctcagacctgccccaggtcagggcaaaggttgcagccgtggaaatgttgaagggtcaaagggctgacctcgggctccagagggcctgggagggcaactatcttgcttcaaagccagatacacctcagacctcaggcacttttgtccctgttgctaatgaattgaaacggaaggacaaatacatgaatgtcctcttttcctgtcacgtccgtaaggtaaatcgatttagtaaggtggaagacagagcaatttttgtcactgaccgtcacctgtataaaatggatcccactaaacagtacaaggtgatgaagactatccctctatacaatttgactggtctgagtgtctccaatggaaaggaccaacttgtagtgttccatacgaaagacaacaaagacctcattgtctgcctcttcagcaaacagccaacccatgagagtcgaattggagaacttgttggagtgctggtgaatcatttcaagagtgagaagcgccaccttcaagtgaacgtcaccaacccagtacagtgcagcctgcacgggaagaagtgcaccgtctccgtggagacgcggctcaaccagccccagcccgacttcaccaagaatcgctcgggcttcatcctcagcgtgcccgggaactgacgccccgcggaggcctggcccggagcccggccacactccg

SEQ ID NO: 13267 - DNA, 3500 bp, Homo sapiens
  source 1..3500: mol_type = unassigned DNA
gtctcggtgtcccggcccctacagcgcccggcagccgcggcgggaggagcggaaactgtcgggtgcgtcccgttcggagccgcgccggccgagaaggcgccgaggagcagcgaggcggcctctgtccggcccggacccgccgagcggcgtgcgcgccccctccccgtagcctcgcggcgcggcctcgccccggcccctcccgagctcatcgcgggcccacggagcggccccggaggcccgagcgcgcccacctgagcccccgcgctggcgccatggcggagcaggagagcctggaattcggcaaggcagacttcgtgctgatggacaccgtctccatgcccgagttcatggccaacctcaggctcagatttgaaaaagggcgcatctatacgttcattggagaagtcgtcgtttctgtgaacccttacaagttgttgaacatctatggaagagacacaattgagcagtataaaggccgtgagctgtatgagagaccgcctcacctttttgctattgcggatgctgcttacaaggctatgaagaggcgatcaaaagacacttgtattgtgatatcaggggaaagtggagctggtaaaacggaagccagtaagtacattatgcagtatattgcggccatcaccaaccccagtcagagagcagaggttgaaagagtgaagaatatgttgcttaagtccaactgtgttttggaagcttttggaaatgccaaaaccaaccgtaatgacaactcaagcaggtttggaaaatacatggatatcaactttgacttcaagggtgaccctattggtgggcatatcaataactacttactagaaaagtctcgagtgattgtgcaacagccaggagaaagaagctttcattctttctatcagctactccaaggaggttcagaacaaatgctacgctctctacatctccagaaatccctttcatcctacaactatattcatgtgggagctcaattaaagtcttctatcaatgatgctgccgaattcagagttgttgctgatgccatgaaagtcattggcttcaaacctgaggagatccaaacagtgtataagattttggctgctattctgcacttgggaaatttaaaatttgtagtagatggtgacacgcctcttattgagaatggcaaagtagtatctatcatagcagaattgctctctactaagacagatatggttgagaaagcccttctttaccggactgtggccacaggccgtgacatcattgacaagcagcacacagaacaagaggccagctacggcagagacgcctttgccaaggcaatatatgagcgccttttttgttggatcgttactcgcatcaatgatattattgaggtcaagaactatgacaccacaatccatgggaaaaacactgttattggtgtcttggatatctatggctttgaaatctttgacaacaacagttttgaacaattctgtatcaattactgcaatgagaaactgcagcagctatttattcagctggttctgaagcaagaacaagaggaataccagcgggaagggatcccctggaaacatattgactacttcaacaatcagatcattgttgacctcgtggagcaacagcacaaagggatcattgcaatccttgatgatgcttgcatgaatgtcggcaaagtcaccgatgaaatgtttcttgaagcacttaacagtaaattgggcaaacacgcccatttttccagccgaaagctctgtgcctcagacaaaattctggagtttgatcgagattttcgaattcgacattatgcaggcgatgtagtctattctgtcattggttttattgacaaaaataaagatactttatttcaagatttcaagcgccttatgtataacagttcaaatcctgtgctcaagaatatgtggcctgaaggcaaactgagcattacagaggtgaccaagcgacctctgactgctgctaccttgtttaagaattctatgattgctctagtagacaaccttgcatcaaaggaaccatattacgttcgttgcatcaaacccaatgacaagaaatctccacagatatttgatgatgaacgctgccggcaccaagtagaatatcttggactactggaaaatgtgagagtgcgtcgggcaggatttgccttccgccagacatacgagaagtttcttcacaggtataagatgatctctgaattcacctggcccaaccatgaccttccttcagacaaagaggctgtcaagaaactaattgaacggtgtggttttcaggatgatgtagcttatgggaagaccaaaattttcattcgaacaccccgaacattgtttaccttggaagaactccgtgcccagatgctcataaggattgtcctctttctacaaaaggtgtggcggggcaccctggcccgcatgcggtacaaaagaaccaaggcagctctgacaataatcaggtactaccggcgctacaaagtgaagtcgtacatccacgaggtggccagacgcttccatggcgtcaagaccatgcgagactacgggaagcacgtgaagtggccaagccctcctaaagttcttcgccgttttgaggaggccctgcagacgattttcaatagatggagagcatcccagctcatcaagagcattccggcctcagacctgccccaggtcagggcaaaggttgcagccgtggaaatgttgaagggtcaaagggctgacctcgggctccagagggcctgggagggcaactatcttgcttcaaagccagatacacctcagacctcaggcacttttgtccctgttgctaatgaattgaaacggaaggacaaatacatgaatgtcctcttttcctgtcacgtccgtaaggtaaatcgatttagtaaggtggaagacagagcaatttttgtcactgaccgtcacctgtataaaatggatcccactaaacagtacaaggtgatgaagactatccctctatacaatttgactggtctgagtgtctccaatggaaaggaccaacttgtagtgttccatacgaaagacaacaaagacctcattgtctgcctcttcagcaaacagccaacccatgagagtcgaattggagaacttgttggagtgctggtgaatcatttcaagagaaaccatctgcttatactctgaataaaattcaagaaagcatagattctacataaacaggcccaagattacatggcaaactgagatgaagaggatgctggctgagaaacaaacaaaagtgttcaattatttgaatgaagtaaggaaagatattttaaaatgtaaatcaacattaaaatctgaaaatggcacagttgatattgcagaaaatagaattgatgtgaaaggaaagtttgaagtctctcagtgtgcagaatttactgttataatgggcaacatgttaactttcttagcaatatacaaaataagggtacatcttacagagaaggcatcttatattcaataaaatatggtaatttaaaacat

SEQ ID NO: 13268 - DNA, 386 bp, Homo sapiens
  source 1..386: mol_type = unassigned DNA
tgtgttcttgtcagcagttgggaggaaagggctcaaaacttcccaaggctgaggcaagaaccagctaagaggaccagagggaacagtgcccagcctcacaaagagccaggagtagtttctgatctaacaaggcagactaaagaacttcgtcattcacaggaaaccatctgcttatactctgaataaaattcaagaaagcatagattctacataaacaggcccaagattacatggcaaactgagatgaagaggatgctggctgagaaacaaacaaaagtgttcaattatttgaatgaagtaaggaaagatattttaaaatgtaaatcaacattaaaatctgaaaatggcacagttgatattgcagaaaatagaattgatgtgaaagg

SEQ ID NO: 13269 - DNA, 562 bp, Homo sapiens
  source 1..562: mol_type = unassigned DNA
acacttgcaagttgcctggttgagtttgtgtggcggggcaccctggcccgcatgcggtacaaaagaaccaaggcagctctgacaataatcaggtactaccggcgctacaaagtgaagtcgtacatccacgaggtggccagacgcttccatggcgtcaagaccatgcgagactacgggaagcacgtgaagtggccaagccctcctaaagttcttcgccgttttgaggaggccctgcagacgattttcaatagatggagagcatcccagctcatcaagagcattccggcctcagacctgccccaggtcagggcaaaggttgcagccgtggaaatgttgaagggtcaaagggctgacctcgggctccagagggcctgggagggcaactatcttgcttcaaagccagatacacctcagacctcaggcacttttgtccctgttgctaatgaattgaaacggaaggacaaatacatgaatgtcctcttttcctgtcacgtccgtaaggtaaatcgatttagtaaggtggaagacagagcaatttttgtcactgaccgtcacctgtata

SEQ ID NO: 13270 - DNA, 563 bp, Homo sapiens
  source 1..563: mol_type = unassigned DNA
ttttaaaaagatgggggaggagccaagatggccgaataggaacagctccggtctacagctcccagcgtgagctacgcagaacacgggtgatttctgcatttccatctgaggtgtggcggggcaccctggcccgcatgcggtacaaaagaaccaaggcagctctgacaataatcaggtactaccggcgctacaaagtgaagtcgtacatccacgaggtggccagacgcttccatggcgtcaagaccatgcgagactacgggaagcacgtgaagtggccaagccctcctaaagttcttcgccgttttgaggaggccctgcagacgattttcaatagatggagagcatcccagctcatcaagagcattccggcctcagacctgccccaggtcagggcaaaggttgcagccgtggaaatgttgaagggtcaaagggctgacctcgggctccagagggcctgggagggcaactatcttgcttcaaagccagatacacctcagacctcaggcacttttgtccctgttgctaatgaattgaaacggaaggacaaatacatgaatgtcctc

SEQ ID NO: 13271 - DNA, 621 bp, Homo sapiens
  source 1..621: mol_type = unassigned DNA
aggaggccctgcagacgattttcaataggtaagaacgtgctgctgtgtgctgcatccatttatggtggcacagttaatactatgcaaagtcacaagtctgagaccgtgatattgactcagctatttgctgttatgacatttacctttaccttatgttttcagttttgtagatttggctttcaaagagcatctgcttacccctcaaaataaaggaactgccaatttgtttttcctgtagcagctgacagcaatgtgccacaacccctggacacaagccatagttaagataagctactagcatgctgtttctacttacttttattagctaaaaataaaaccaccacgcataactcaaactagaaaatccattaatcctttcaaagcagtggttctcaattctgctgcaccttagaataacaaggagtttaggaaatatgccagcacccaggtcctaccaccagagagtcctgtttaatggcgctggaggggtggggcccaggcagaggtccttttttaaagtttcccacgtgattttaaagtgcagccaaaggggaaaataactgtttttagagcgagctgtcttttaaataaataaaaacccaagtaaaatttggtaccttt

SEQ ID NO: 13272 - DNA, 681 bp, Homo sapiens
  source 1..681: mol_type = unassigned DNA
tttgatgatgaacgctgccggcaccaagtagaatatcttggactactggaaaatgtgagagtgcgtcgggcaggatttgccttccgccagacatacgagaagtttcttcacaggtataagatgatctctgaattcacctggcccaaccatgaccttccttcagacaaagaggctgtcaagaaactaattgaacggtgtggttttcaggatgatgtagcttatgggaagaccaaaattttcattcgaacaccccgaacattgtttaccttggaagaactccgtgcccagatgctcataaggattgtcctctttctacaaaaggtgtggcggggcaccctggcccgcatgcggtacaaaagaaccaaggcagctctgacaataatcaggtactaccggcgctacaaagtgaagtcgtacatccacgaggtggccagacgcttccatggcgtcaagaccatgcgagactacgggaagcacgtgaagtggccaagccctcctaaagttcttcgccgttttgaggaggccctgcagacgattttcaataggtaagaacgtgctgctgtgtgctgcatccatttatggtggcacagttaatactatgcaaagtcacaagtctgagaccgtgatattgactcagctatttgctgttatgacatttacctttaccttatgttttcagtt

SEQ ID NO: 13273 - DNA, 558 bp, Homo sapiens
  source 1..558: mol_type = unassigned DNA
aaacacgcccatttttccagccgaaagctctgtgcctcagacaaaattctggagtttgatcgagattttcgaattcgacattatgcaggcgatgtagtttcttcttggaatcttttatcctaccctcaacactgagtgaaccttaggcaagtcacttgacctccctacggatgagactgttagttcctgtatgttgctgttttgcttttatcttaggaatgctggatgataaatacagctatcttttaaaaagtcatcttcttgagctattctgtcattggttttattgacaaaaataaagatactttatttcaagatttcaagcgccttatgtataacagttcaaatcctgtgctcaagaatatgtggcctgaaggcaaactgagcattacagaggtgaccaagcgacctctgactgctgctaccttgtttaagaattctatgattgctctagtagacaaccttgcatcaaaggaaccatattacgttcgttgcatcaaacccaatgacaagaaatctccacagatatttgatgatgaacgctgccggcaccaagta

SEQ ID NO: 13274 - DNA, 552 bp, Homo sapiens
  source 1..552: mol_type = unassigned DNA
tttaacctggcctggtcactgttctcttcagaattccctccttgctgtgtcctacagattgactacttcaacaatcagatcattgttgacctcgtggagcaacagcacaaagggatcattgcaatccttgatgatgcttgcatgaatgtcggcaaagtcaccgatgaaatgtttcttgaagcacttaacagtaaattgggcaaacacgcccatttttccagccgaaagctctgtgcctcagacaaaattctggagtttgatcgagattttcgaattcgacattatgcaggcgatgtagtctattctgtcattggttttattgacaaaaataaagatactttatttcaagatttcaagcgccttatgtataacagttcaaatcctgtgctcaagaatatgtggcctgaaggcaaactgagcattacagaggtgaccaagcgacctctgactgctgctaccttgtttaagaattctatgattgctctagtagacaaccttgcatcaaaggaaccatattacgttcgttgcatcaaacccaatgacaagaaatct

SEQ ID NO: 13275 - DNA, 590 bp, Homo sapiens
  source 1..590: mol_type = unassigned DNA
aattctgtatcaattactgcaatgagaaactgcagcagctatttattcagctggttctgaagcaagaacaagaggaataccagcgggaagggatcccctggaaacatattgactacttcaacaatcagatcattgttgacctcgtggagcaacagcacaaagggatcattgcaatccttgatgatgcttgcatgaatgtcggcaaagtcaccgatgaaatgtttcttgaagcacttaacagtaaattgggcaaacacgcccatttttccagccgaaagctctgtgcctcagacaaaattctggagtttgatcgagattttcgaattcgacattatgcaggcgatgtagtctattctgtcattggttttattgacaaaaataaagatactttatttcaagatttcaagcgccttatgtataacagttcaaatcctgtgctcaagaatatgtggcctgaaggcaaactgagcattacagaggtgaccaagcgacctctgactgctgctaccttgtttaagaattctatgattgctctagtagacaaccttgcatcaaagattgattattgtgggagaaaggtaaacaaaact

SEQ ID NO: 13276 - DNA, 459 bp, Homo sapiens
  source 1..459: mol_type = unassigned DNA
tctgtgcctcagacaaaattctggagtttgatcgagattttcgaattcgacattatgcaggcgatgtagtctattctgtcattggttttattgacaaaaataaagatactttatttcaagatttcaagcgccttatgtataacagttcaaatcctgtgctcaagaatatgtggcctgaaggcaaactgagcattacagaggtgaccaagcgacctctgactgctgctaccttgtttaagaattctatgattgctctagtagacaaccttgcatcaaagtacagatggggtttcaccatgttgaccaggttggtcttgaactcctgatctcaggtcatccacccacctcggcctcctaaagcgctggcattgcagatgtgagccaccatgctcagccatctcaactattttgaagaagtgcatatacagatacagttttcatcttcaaagcaagtaaaat

SEQ ID NO: 13277 - DNA, 427 bp, Homo sapiens
  source 1..427: mol_type = unassigned DNA
agtgcacagttccaccccttccatctgcatgcgtgacacattaacagtatttaaagaattccctccttgctgtgtcctacagattgactacttcaacaatcagatcattgttgacctcgtggagcaacagcacaaagggatcattgcaatccttgatgatgcttgcatgaatgtcggcaaagtcaccgatgaaatgtttcttgaagcacttaacagtaaattgggcaaacacgcccatttttccagccgaaagctctgtgcctcagacaaaattctggagtttgatcgagattttcgaattcgacattatgcaggcgatgtagtctattctgtcattggttttattgacaaaaataaagatactttatttcaagatttcaagcgccttatgtataacagttcaaatcctgtgctcaagaatatgtgg

SEQ ID NO: 13278 - DNA, 1916 bp, Homo sapiens
  source 1..1916: mol_type = unassigned DNA
aggctggaggcgggaccagccgctgccgtctccgtctcggtgtcccggcccctacagcgcccggcagccgcggcgggaggagcggaaactgtcgggtgcgtcccgttcggagccgcgccggccgagaaggcgccgaggagcagcgaggcggcctctgtccggcccggacccgccgagcggcgtgcgcgccccctccccgtagcctcgcggcgcggcctcgccccggcccctcccgagctcatcgcgggcccacggagcggccccggaggcccgagcgcgcccacctgagcccccgcgctggcgccatggcggagcaggagagcctggaattcggcaaggcagacttcgtgctgatggacaccgtctccatgcccgagttcatggccaacctcaggctcagatttgaaaaagggcgcatctatacgttcattggagaagtcgtcgtttctgtgaacccttacaagttgttgaacatctatggaagagacacaattgagcagtataaaggccgtgagctgtatgagagaccgcctcacctttttgctattgcggatgctgcttacaaggctatgaagaggcgatcaaaagacacttgtattgtgatatcaggggaaagtggagctggtaaaacggaagccagtaagtacattatgcagtatattgcggccatcaccaaccccagtcagagagcagaggttgaaagagtgaagaatatgttgcttaagtccaactgtgttttggaagcttttggaaatgccaaaaccaaccgtaatgacaactcaagcaggtttggaaaatacatggatatcaactttgacttcaagggtgaccctattggtgggcatatcaataactacttactagaaaagtctcgagtgattgtgcaacagccaggagaaagaagctttcattctttctatcagctactccaaggaggttcagaacaaatgctacgctctctacatctccagaaatccctttcatcctacaactatattcatgtgggagctcaattaaagtcttctatcaatgatgctgccgaattcagagttgttgctgatgccatgaaagtcattggcttcaaacctgaggagatccaaacagtgtataagattttggctgctattctgcacttgggaaatttaaaatttgtagtagatggtgacacgcctcttattgagaatggcaaagtagtatctatcatagcagaattgctctctactaagacagatatggttgagaaagcccttctttaccggactgtggccacaggccgtgacatcattgacaagcagcacacagaacaagaggccagctacggcagagacgcctttgccaaggcaatatatgagcgccttttttgttggatcgttactcgcatcaatgatattattgaggtcaagaactatgacaccacaatccatgggaaaaacactgttattggtgtcttggatatctatggctttgaaatctttgacaacaacagttttgaacaattctgtatcaattactgcaatgagaaactgcagcagctatttattcagctggttctgaagcaagaacaagaggaataccagcgggaagggatcccctggaaacatgtgggattgctataatttgatagactgccttgttgatgcccagaacatcctgagttagaaccagtaaacctgttttcactttatggctgctaccacgtggacttactggtttatatctgtctgttaggtttagcatactttattaagttataccttaaattggctgaactttgcttcagaatctagtttcttcttccctttttcctcctttttctcctcttctactttgtagactatatggtattttattgtcttcagttaatgttgtttatattctctgaaacctacacattaaaatacttgttttactttgca

SEQ ID NO: 13279 - DNA, 7462 bp, Homo sapiens
  source 1..7462: mol_type = unassigned DNA
gctctgggcaggagagagagggagagacaagagacacacacagagagacggcgaggaagggaaagacccagagggacgcctagaacgagacttggagccagacagaggaagaggggacgtgtgtttgcagactggctgggcccgtgacccagcttcctgagtcctccgtgcaggtggcagctgtaccaggctggcaggtcactgagagtgggcagctgggccccagaactgtgcctggcccagtgggcagcaggagctcctgacttgggaccatggtgattcttcagcagggggaccatgtgtggatggacctgagattggggcaggagttcgacgtgcccatcggggcggtggtgaagctctgcgactctgggcaggtccaggtggtggatgatgaagacaatgaacactggatctctccgcagaacgcaacgcacatcaagcctatgcaccccacgtcggtccacggcgtggaggacatgatccgcctgggggacctcaacgaggcgggcatcttgcgcaacctgcttatccgctaccgggaccacctcatctacacgtatacgggctccatcctggtggctgtgaacccctaccagctgctctccatctactcgccagagcacatccgccagtataccaacaagaagattggggagatgcccccccacatctttgccattgctgacaactgctacttcaacatgaaacgcaacagccgagaccagtgctgcatcatcagtggggaatctggggccgggaagacggagagcacaaagctgatcctgcagttcctggcagccatcagtgggcagcactcgtggattgagcagcaggtcttggaggccacccccattctggaagcatttgggaatgccaagaccatccgcaatgacaactcaagccgtttcggaaagtacatcgacatccacttcaacaagcggggcgccatcgagggcgcgaagattgagcagtacctgctggaaaagtcacgtgtctgtcgccaggccctggatgaaaggaactaccacgtgttctactgcatgctggagggtatgagtgaggatcagaagaagaagctgggcttgggccaggcctctgactacaactacttggccatgggtaactgcataacctgtgagggccgggtggacagccaggagtacgccaacatccgctccgccatgaaggtgctcatgttcactgacaccgagaactgggagatctcgaagctcctggctgccatcctgcacctgggcaacctgcagtatgaggcacgcacatttgaaaacctggatgcctgtgaggttctcttctccccatcgctggccacagctgcatccctgcttgaggtgaaccccccagacctgatgagctgcctgactagccgcaccctcatcacccgcggggagacggtgtccaccccactgagcagggaacaggcactggacgtgcgcgacgccttcgtaaaggggatctacgggcggctgttcgtgtggattgtggacaagatcaacgcagcaatttacaagcctccctcccaggatgtgaagaactctcgcaggtccatcggcctcctggacatctttgggtttgagaactttgctgtgaacagctttgagcagctctgcatcaacttcgccaatgagcacctgcagcagttctttgtgcggcacgtgttcaagctggagcaggaggaatatgacctggagagcattgactggctgcacatcgagttcactgacaaccaggatgccctggacatgattgccaacaagcccatgaacatcatctccctcatcgatgaggagagcaagttccccaagggcacagacaccaccatgttacacaagctgaactcccagcacaagctcaacgccaactacatcccccccaagaacaaccatgagacccagtttggcatcaaccattttgcaggcatcgtctactatgagacccaaggcttcctggagaagaaccgagacaccctgcatggggacattatccagctggtccactcctccaggaacaagttcatcaagcagatcttccaggccgatgtcgccatgggcgccgagaccaggaagcgctcgcccacacttagcagccagttcaagcggtcactggagctgctgatgcgcacgctgggtgcctgccagcccttctttgtgcgatgcatcaagcccaatgagttcaagaagcccatgctgttcgaccggcacctgtgcgtgcgccagctgcggtactcaggaatgatggagaccatccgaatccgccgagctggctaccccatccgctacagcttcgtagagtttgtggagcggtaccgtgtgctgctgccaggtgtgaagccggcctacaagcagggcgacctccgcgggacttgccagcgcatggctgaggctgtgctgggcacccacgatgactggcagataggcaaaaccaagatctttctgaaggaccaccatgacatgctgctggaagtggagcgggacaaagccatcaccgacagagtcatcctccttcagaaagtcatccggggattcaaagacaggtctaactttctgaagctgaagaacgctgccacactgatccagaggcactggcggggtcacaactgtaggaagaactacgggctgatgcgtctgggcttcctgcggctgcaggccctgcaccgctcccggaagctgcaccagcagtaccgcctggcccgccagcgcatcatccagttccaggcccgctgccgcgcctatctggtgcgcaaggccttccgccaccgcctctgggctgtgctcaccgtgcaggcctatgcccggggcatgatcgcccgcaggctgcaccaacgcctcagggctgagtatctgtggcgcctcgaggctgagaaaatgcggctggcggaggaagagaagcttcggaaggagatgagcgccaagaaggccaaggaggaggccgagcgcaagcatcaggagcgcctggcccagctggctcgtgaggacgctgagcgggagctgaaggagaaggaggccgctcggcggaagaaggagctcctggagcagatggaaagggcccgccatgagcctgtcaatcactcagacatggtggacaagatgtttggcttcctggggacttcaggtggcctgccaggccaggagggccaggcacctagtggctttgaggacctggagcgagggcggagggagatggtggaggaggacctggatgcagccctgcccctgcctgacgaggatgaggaggacctctctgagtataaatttgccaagttcgcggccacctacttccaggggacaaccacgcactcctacacccggcggccactcaaacagccactgctctaccatgacgacgagggtgaccagctggcagccctggcggtctggatcaccatcctccgcttcatgggggacctccctgagcccaagtaccacacagccatgagtgatggcagtgagaagatccctgtgatgaccaagatttatgagaccctgggcaagaagacgtacaagagggagctgcaggccctgcagggcgagggcgaggcccagctccccgagggccagaagaagagcagtgtgaggcacaagctggtgcatttgactctgaaaaagaagtccaagctcacagaggaggtgaccaagaggctgcatgacggggagtccacagtgcagggcaacagcatgctggaggaccggcccacctccaacctggagaagctgcacttcatcatcggcaatggcatcctgcggccagcactccgggacgagatctactgccagatcagcaagcagctgacccacaacccctccaagagcagctatgcccggggctggattctcgtgtctctctgcgtgggctgtttcgccccctccgagaagtttgtcaagtacctgcggaacttcatccacgggggcccgcccggctacgccccgtactgtgaggagcgcctgagaaggacctttgtcaatgggacacggacacagccgcccagctggctggagctgcaggccaccaagtccaagaagccaatcatgttgcccgtgacattcatggatgggaccaccaagaccctgctgacggactcggcaaccacggccaaggagctctgcaacgcgctggccgacaagatctctctcaaggaccggttcgggttctccctctacattgccctgtttgacaaggtgtcctccctgggcagcggcagtgaccacgtcatggacgccatctcccagtgcgagcagtacgccaaggagcagggcgcccaggagcgcaacgccccctggaggctcttcttccgcaaagaggtcttcacgccctggcacagcccctccgaggacaacgtggccaccaacctcatctaccagcaggtggtgcgaggagtcaagtttggggagtacaggtgtgagaaggaggacgacctggctgagctggcctcccagcagtactttgtagactatggctctgagatgatcctggagcgcctcctgaacctcgtgcccacctacatccccgaccgcgagatcacgcccctgaagacgctggagaagtgggcccagctggccatcgccgcccacaagaaggggatttatgcccagaggagaactgatgcccagaaggtcaaagaggatgtggtcagttatgcccgcttcaagtggcccttgctcttctccaggttttatgaagcctacaaattctcaggccccagtctccccaagaacgacgtcatcgtggccgtcaactggacgggtgtgtactttgtggatgagcaggagcaggtacttctggagctgtccttcccagagatcatggccgtgtccagcagcagggagtgccgtgtctggctctcactgggctgctctgatcttggctgtgctgcgcctcactcaggctgggcaggactgaccccggcggggccctgttctccgtgttggtcctgcaggggagcgaaaacgacggcccccagcttcacgctggccaccatcaagggggacgaatacaccttcacctccagcaatgctgaggacattcgtgacctggtggtcaccttcctagaggggctccggaagagatctaagtatgttgtggccctgcaggataaccccaaccccgcaggcgaggagtcaggcttcctcagctttgccaagggagacctcatcatcctggaccatgacacgggcgagcaggtcatgaactcgggctgggccaacggcatcaatgagaggaccaagcagcgtggggacttccccaccgacagtgtgtacgtcatgcccactgtcaccatgccaccgcgggagattgtggccctggtcaccatgactcccgatcagaggcaggacgttgtccggctcttgcagctgcgaacggcggagcccgaggtgcgtgccaagccctacacgctggaggagttttcctatgactacttcaggcccccacccaagcacacgctgagccgtgtcatggtgtccaaggcccgaggcaaggaccggctgtggagccacacgcgggaaccgctcaagcaggcgctgctcaagaagctcctgggcagtgaggagctctcgcaggaggcctgcctggccttcattgctgtgctcaagtacatgggcgactacccgtccaagaggacacgctccgtcaacgagctcaccgaccagatctttgagggtcccctgaaagccgagcccctgaaggacgaggcatatgtgcagatcctgaagcagctgaccgacaaccacatcaggtacagcgaggagcggggttgggagctgctctggctgtgcacgggccttttcccacccagcaacatcctcctgccccacgtgcagcgcttcctgcagtcccgaaagcactgcccactcgccatcgactgcctgcaacggctccagaaagccctgagaaacgggtcccggaagtaccctccgcacctggtggaggtggaggccatccagcacaagaccacccagattttccacaaagtctacttccctgatgacactgacgaggccttcgaagtggagtccagcaccaaggccaaggacttctgccagaacatcgccaccaggctgctcctcaagtcctcagagggattcagcctctttgtcaaaattgcagacaaggtcctcagcgttcctgagaatgacttcttctttgactttgttcgacacttgacagactggataaagaaagctcggcccatcaaggacggaattgtgccctcactcacctaccaggtgttcttcatgaagaagctgtggaccaccacggtgccagggaaggatcccatggccgattccatcttccactattaccaggagttgcccaagtatctccgaggctaccacaagtgcacgcgggaggaggtgctgcagctgggggcgctgatctacagggtcaagttcgaggaggacaagtcctacttccccagcatccccaagctgctgcgggagctggtgccccaggaccttatccggcaggtctcacctgatgactggaagcggtccatcgtcgcctacttcaacaagcacgcagggaagtccaaggaggaggccaagctggccttcctgaagctcatcttcaagtggcccacctttggctcagccttcttcgaggtgaagcaaactacggagccaaacttccctgagatcctcctaattgccatcaacaagtatggggtcagcctcatcgatcccaaaacgaaggatatcctcaccactcatcccttcaccaagatctccaactggagcagcggcaacacctacttccacatcaccattgggaacttggtgcgcgggagcaaactgctctgcgagacgtcactgggctacaagatggatgacctcctgacttcctacattagccagatgctcacagccatgagcaaacagcggggctccaggagcggcaagtgaacagtcacggggaggtgctggttccatgcctgctctcgaggcagcagtgggttcaggcccatcagctacccctgcagctggggaagacttatgccatcccggcagcgaggctgggctggccagccaccactgactataccaactgggcctctgatgttcttccagtgaggcatctctctgggatgcagaacttccctccatccacccctctggcacctgggttggtctaatcctagtttgctgtggccttcccggttgtgagagcctgtgatccttagatgtgtctcctgtttcagaccagccccaccatgcaacttcctttgactttctgtgtaccactgggatagaggaatcaagaggacaatctagctctccatactttgaacaaccaaatgtgcattgaatactctgaaaccgaagggactggatctgcaggtgggatgagggagacagaccacttttctatattgcagtgtgaatgctgggcccctgctcaagtctaccctgatcacctcagggcataaagcatgtttcattctctg

SEQ ID NO: 13280 - DNA, 4050 bp, Homo sapiens
  source 1..4050: mol_type = unassigned DNA
ggcaggagagagagggagagacaagagacacacacagagagacggcgaggaagggaaagacccagagggacgcctagaacgagacttggagccagacagaggaagaggggacgtgtgtttgcagactggctgggcccgtgacccagcttcctgagtcctccgtgcaggtggcagctgtaccaggctggcaggtcactgagagtgggcagctgggccccagaactgtgcctggcccagtgggcagcaggagctcctgacttgggaccatggtgattcttcagcagggggaccatgtgtggatggacctgagattggggcaggagttcgacgtgcccatcggggcggtggtgaagctctgcgactctgggcaggtccaggtggtggatgatgaagacaatgaacactggatctctccgcagaacgcaacgcacatcaagcctatgcaccccacgtcggtccacggcgtggaggacatgatccgcctgggggacctcaacgaggcgggcatcttgcgcaacctgcttatccgctaccgggaccacctcatctacacgtatacgggctccatcctggtggctgtgaacccctaccagctgctctccatctactcgccagagcacatccgccagtataccaacaagaagattggggagatgcccccccacatctttgccattgctgacaactgctacttcaacatgaaacgcaacagccgagaccagtgctgcatcatcagtggggaatctggggccgggaagacggagagcacaaagctgatcctgcagttcctggcagccatcagtgggcagcactcgtggattgagcagcaggtcttggaggccacccccattctggaagcatttgggaatgccaagaccatccgcaatgacaactcaagccgtttcggaaagtacatcgacatccacttcaacaagcggggcgccatcgagggcgcgaagattgagcagtacctgctggaaaagtcacgtgtctgtcgccaggccctggatgaaaggaactaccacgtgttctactgcatgctggagggtatgagtgaggatcagaagaagaagctgggcttgggccaggcctctgactacaactacttggccatgggtaactgcataacctgtgagggccgggtggacagccaggagtacgccaacatccgctccgccatgaaggtgctcatgttcactgacaccgagaactgggagatctcgaagctcctggctgccatcctgcacctgggcaacctgcagtatgaggcacgcacatttgaaaacctggatgcctgtgaggttctcttctccccatcgctggccacagctgcatccctgcttgaggtgaaccccccagacctgatgagctgcctgactagccgcaccctcatcacccgcggggagacggtgtccaccccactgagcagggaacaggcactggacgtgcgcgacgccttcgtaaaggggatctacgggcggctgttcgtgtggattgtggacaagatcaacgcagcaatttacaagcctccctcccaggatgtgaagaactctcgcaggtccatcggcctcctggacatctttgggtttgagaactttgctgtgaacagctttgagcagctctgcatcaacttcgccaatgagcacctgcagcagttctttgtgcggcacgtgttcaagctggagcaggaggaatatgacctggagagcattgactggctgcacatcgagttcactgacaaccaggatgccctggacatgattgccaacaagcccatgaacatcatctccctcatcgatgaggagagcaagttccccaagggcacagacaccaccatgttacacaagctgaactcccagcacaagctcaacgccaactacatcccccccaagaacaaccatgagacccagtttggcatcaaccattttgcaggcatcgtctactatgagacccaaggcttcctggagaagaaccgagacaccctgcatggggacattatccagctggtccactcctccaggaacaagttcatcaagcagatcttccaggccgatgtcgccatgggcgccgagaccaggaagcgctcgcccacacttagcagccagttcaagcggtcactggagctgctgatgcgcacgctgggtgcctgccagcccttctttgtgcgatgcatcaagcccaatgagttcaagaagcccatgctgttcgaccggcacctgtgcgtgcgccagctgcggtactcaggaatgatggagaccatccgaatccgccgagctggctaccccatccgctacagcttcgtagagtttgtggagcggtaccgtgtgctgctgccaggtgtgaagccggcctacaagcagggcgacctccgcgggacttgccagcgcatggctgaggctgtgctgggcacccacgatgactggcagataggcaaaaccaagatctttctgaaggaccaccatgacatgctgctggaagtggagcgggacaaagccatcaccgacagagtcatcctccttcagaaagtcatccggggattcaaagacaggtctaactttctgaagctgaagaacgctgccacactgatccagaggcactggcggggtcacaactgtaggaagaactacgggctgatgcgtctgggcttcctgcggctgcaggccctgcaccgctcccggaagctgcaccagcagtaccgcctggcccgccagcgcatcatccagttccaggcccgctgccgcgcctatctggtgcgcaaggccttccgccaccgcctctgggctgtgctcaccgtgcaggcctatgcccggggcatgatcgcccgcaggctgcaccaacgcctcagggctgagtatctgtggcgcctcgaggctgagaaaatgcggctggcggaggaagagaagcttcggaaggagatgagcgccaagaaggccaaggaggaggccgagcgcaagcatcaggagcgcctggcccagctggctcgtgaggacgctgagcgggagctgaaggagaaggaggccgctcggcggaagaaggagctcctggagcagatggaaagggcccgccatgagcctgtcaatcactcagacatggtggacaagatgtttggcttcctggggacttcaggtggcctgccaggccaggagggccaggcacctagtggctttgaggacctggagcgagggcggagggagatggtggaggaggacctggatgcagccctgcccctgcctgacgaggatgaggaggacctctctgagtataaatttgccaagttcgcggccacctacttccaggggacaaccacgcactcctacacccggcggccactcaaacagccactgctctaccatgacgacgagggtgaccagctggcagccctggcggtctggatcaccatcctccgcttcatgggggacctccctgagcccaagtaccacacagccatgagtgatggcagtgagaagatccctgtgatgaccaagatttatgagaccctgggcaagaagacgtacaagagggagctgcaggccctgcagggcgagggcgaggcccagctccccgagggccagaagaagagcagtgtgaggcacaagctggtgcatttgactctgaaaaagaagtccaagctcacagaggaggtgaccaagaggctgcatgacggggagtccacagtgcagggcaacagcatgctggaggaccggcccacctccaacctggagaagctgcacttcatcatcggcaatggcatcctgcggccagcactccggtcagtgccgggaggcggggacaccagggcctgaaagtcttttggtggctgagtggtgcctctgtcaacctagcaagagattaagccaagcaggcctgggtttggcttcgctgctagctagttggtggagttaggaccttggtggagttatttcatctttctaagcctctgattccttgtctgtaaagggggaatcctaaaacaggcatcccttggagatattgcaggttcagttgaaggccacagaaataaatatcacaataaagagagctgcagaaata

SEQ ID NO: 13281 - DNA, 7336 bp, Homo sapiens
  source 1..7336: mol_type = unassigned DNA
ggcaggagagagagggagagacaagagacacacacagagagacggcgaggaagggaaagacccagagggacgcctagaacgagacttggagccagacagaggaagaggggacgtgtgtttgcagactggctgggcccgtgacccagcttcctgagtcctccgtgcaggtggcagctgtaccaggctggcaggtcactgagagtgggcagctgggccccagaactgtgcctggcccagtgggcagcaggagctcctgacttgggaccatggtgattcttcagcagggggaccatgtgtggatggacctgagattggggcaggagttcgacgtgcccatcggggcggtggtgaagctctgcgactctgggcaggtccaggtggtggatgatgaagacaatgaacactggatctctccgcagaacgcaacgcacatcaagcctatgcaccccacgtcggtccacggcgtggaggacatgatccgcctgggggacctcaacgaggcgggcatcttgcgcaacctgcttatccgctaccgggaccacctcatctacacgtatacgggctccatcctggtggctgtgaacccctaccagctgctctccatctactcgccagagcacatccgccagtataccaacaagaagattggggagatgcccccccacatctttgccattgctgacaactgctacttcaacatgaaacgcaacagccgagaccagtgctgcatcatcagtggggaatctggggccgggaagacggagagcacaaagctgatcctgcagttcctggcagccatcagtgggcagcactcgtggattgagcagcaggtcttggaggccacccccattctggaagcatttgggaatgccaagaccatccgcaatgacaactcaagccgtttcggaaagtacatcgacatccacttcaacaagcggggcgccatcgagggcgcgaagattgagcagtacctgctggaaaagtcacgtgtctgtcgccaggccctggatgaaaggaactaccacgtgttctactgcatgctggagggtatgagtgaggatcagaagaagaagctgggcttgggccaggcctctgactacaactacttggccatgggtaactgcataacctgtgagggccgggtggacagccaggagtacgccaacatccgctccgccatgaaggtgctcatgttcactgacaccgagaactgggagatctcgaagctcctggctgccatcctgcacctgggcaacctgcagtatgaggcacgcacatttgaaaacctggatgcctgtgaggttctcttctccccatcgctggccacagctgcatccctgcttgaggtgaaccccccagacctgatgagctgcctgactagccgcaccctcatcacccgcggggagacggtgtccaccccactgagcagggaacaggcactggacgtgcgcgacgccttcgtaaaggggatctacgggcggctgttcgtgtggattgtggacaagatcaacgcagcaatttacaagcctccctcccaggatgtgaagaactctcgcaggtccatcggcctcctggacatctttgggtttgagaactttgctgtgaacagctttgagcagctctgcatcaacttcgccaatgagcacctgcagcagttctttgtgcggcacgtgttcaagctggagcaggaggaatatgacctggagagcattgactggctgcacatcgagttcactgacaaccaggatgccctggacatgattgccaacaagcccatgaacatcatctccctcatcgatgaggagagcaagttccccaagggcacagacaccaccatgttacacaagctgaactcccagcacaagctcaacgccaactacatcccccccaagaacaaccatgagacccagtttggcatcaaccattttgcaggcatcgtctactatgagacccaaggcttcctggagaagaaccgagacaccctgcatggggacattatccagctggtccactcctccaggaacaagttcatcaagcagatcttccaggccgatgtcgccatgggcgccgagaccaggaagcgctcgcccacacttagcagccagttcaagcggtcactggagctgctgatgcgcacgctgggtgcctgccagcccttctttgtgcgatgcatcaagcccaatgagttcaagaagcccatgctgttcgaccggcacctgtgcgtgcgccagctgcggtactcaggaatgatggagaccatccgaatccgccgagctggctaccccatccgctacagcttcgtagagtttgtggagcggtaccgtgtgctgctgccaggtgtgaagccggcctacaagcagggcgacctccgcgggacttgccagcgcatggctgaggctgtgctgggcacccacgatgactggcagataggcaaaaccaagatctttctgaaggaccaccatgacatgctgctggaagtggagcgggacaaagccatcaccgacagagtcatcctccttcagaaagtcatccggggattcaaagacaggtctaactttctgaagctgaagaacgctgccacactgatccagaggcactggcggggtcacaactgtaggaagaactacgggctgatgcgtctgggcttcctgcggctgcaggccctgcaccgctcccggaagctgcaccagcagtaccgcctggcccgccagcgcatcatccagttccaggcccgctgccgcgcctatctggtgcgcaaggccttccgccaccgcctctgggctgtgctcaccgtgcaggcctatgcccggggcatgatcgcccgcaggctgcaccaacgcctcagggctgagtatctgtggcgcctcgaggctgagaaaatgcggctggcggaggaagagaagcttcggaaggagatgagcgccaagaaggccaaggaggaggccgagcgcaagcatcaggagcgcctggcccagctggctcgtgaggacgctgagcgggagctgaaggagaaggaggccgctcggcggaagaaggagctcctggagcagatggaaagggcccgccatgagcctgtcaatcactcagacatggtggacaagatgtttggcttcctggggacttcaggtggcctgccaggccaggagggccaggcacctagtggctttgaggacctggagcgagggcggagggagatggtggaggaggacctggatgcagccctgcccctgcctgacgaggatgaggaggacctctctgagtataaatttgccaagttcgcggccacctacttccaggggacaaccacgcactcctacacccggcggccactcaaacagccactgctctaccatgacgacgagggtgaccagctggcagccctggcggtctggatcaccatcctccgcttcatgggggacctccctgagcccaagtaccacacagccatgagtgatggcagtgagaagatccctgtgatgaccaagatttatgagaccctgggcaagaagacgtacaagagggagctgcaggccctgcagggcgagggcgaggcccagctccccgagggccagaagaagagcagtgtgaggcacaagctggtgcatttgactctgaaaaagaagtccaagctcacagaggaggtgaccaagaggctgcatgacggggagtccacagtgcagggcaacagcatgctggaggaccggcccacctccaacctggagaagctgcacttcatcatcggcaatggcatcctgcggccagcactccgggacgagatctactgccagatcagcaagcagctgacccacaacccctccaagagcagctatgcccggggctggattctcgtgtctctctgcgtgggctgtttcgccccctccgagaagtttgtcaagtacctgcggaacttcatccacgggggcccgcccggctacgccccgtactgtgaggagcgcctgagaaggacctttgtcaatgggacacggacacagccgcccagctggctggagctgcaggccaccaagtccaagaagccaatcatgttgcccgtgacattcatggatgggaccaccaagaccctgctgacggactcggcaaccacggccaaggagctctgcaacgcgctggccgacaagatctctctcaaggaccggttcgggttctccctctacattgccctgtttgacaaggtgtcctccctgggcagcggcagtgaccacgtcatggacgccatctcccagtgcgagcagtacgccaaggagcagggcgcccaggagcgcaacgccccctggaggctcttcttccgcaaagaggtcttcacgccctggcacagcccctccgaggacaacgtggccaccaacctcatctaccagcaggtggtgcgaggagtcaagtttggggagtacaggtgtgagaaggaggacgacctggctgagctggcctcccagcagtactttgtagactatggctctgagatgatcctggagcgcctcctgaacctcgtgcccacctacatccccgaccgcgagatcacgcccctgaagacgctggagaagtgggcccagctggccatcgccgcccacaagaaggggatttatgcccagaggagaactgatgcccagaaggtcaaagaggatgtggtcagttatgcccgcttcaagtggcccttgctcttctccaggttttatgaagcctacaaattctcaggccccagtctccccaagaacgacgtcatcgtggccgtcaactggacgggtgtgtactttgtggatgagcaggagcaggtacttctggagctgtccttcccagagatcatggccgtgtccagcagcaggggagcgaaaacgacggcccccagcttcacgctggccaccatcaagggggacgaatacaccttcacctccagcaatgctgaggacattcgtgacctggtggtcaccttcctagaggggctccggaagagatctaagtatgttgtggccctgcaggataaccccaaccccgcaggcgaggagtcaggcttcctcagctttgccaagggagacctcatcatcctggaccatgacacgggcgagcaggtcatgaactcgggctgggccaacggcatcaatgagaggaccaagcagcgtggggacttccccaccgacagtgtgtacgtcatgcccactgtcaccatgccaccgcgggagattgtggccctggtcaccatgactcccgatcagaggcaggacgttgtccggctcttgcagctgcgaacggcggagcccgaggtgcgtgccaagccctacacgctggaggagttttcctatgactacttcaggcccccacccaagcacacgctgagccgtgtcatggtgtccaaggcccgaggcaaggaccggctgtggagccacacgcgggaaccgctcaagcaggcgctgctcaagaagctcctgggcagtgaggagctctcgcaggaggcctgcctggccttcattgctgtgctcaagtacatgggcgactacccgtccaagaggacacgctccgtcaacgagctcaccgaccagatctttgagggtcccctgaaagccgagcccctgaaggacgaggcatatgtgcagatcctgaagcagctgaccgacaaccacatcaggtacagcgaggagcggggttgggagctgctctggctgtgcacgggccttttcccacccagcaacatcctcctgccccacgtgcagcgcttcctgcagtcccgaaagcactgcccactcgccatcgactgcctgcaacggctccagaaagccctgagaaacgggtcccggaagtaccctccgcacctggtggaggtggaggccatccagcacaagaccacccagattttccacaaagtctacttccctgatgacactgacgaggccttcgaagtggagtccagcaccaaggccaaggacttctgccagaacatcgccaccaggctgctcctcaagtcctcagagggattcagcctctttgtcaaaattgcagacaaggtcctcagcgttcctgagaatgacttcttctttgactttgttcgacacttgacagactggataaagaaagctcggcccatcaaggacggaattgtgccctcactcacctaccaggtgttcttcatgaagaagctgtggaccaccacggtgccagggaaggatcccatggccgattccatcttccactattaccaggagttgcccaagtatctccgaggctaccacaagtgcacgcgggaggaggtgctgcagctgggggcgctgatctacagggtcaagttcgaggaggacaagtcctacttccccagcatccccaagctgctgcgggagctggtgccccaggaccttatccggcaggtctcacctgatgactggaagcggtccatcgtcgcctacttcaacaagcacgcagggaagtccaaggaggaggccaagctggccttcctgaagctcatcttcaagtggcccacctttggctcagccttcttcgagcaaactacggagccaaacttccctgagatcctcctaattgccatcaacaagtatggggtcagcctcatcgatcccaaaacgaaggatatcctcaccactcatcccttcaccaagatctccaactggagcagcggcaacacctacttccacatcaccattgggaacttggtgcgcgggagcaaactgctctgcgagacgtcactgggctacaagatggatgacctcctgacttcctacattagccagatgctcacagccatgagcaaacagcggggctccaggagcggcaagtgaacagtcacggggaggtgctggttccatgcctgctctcgaggcagcagtgggttcaggcccatcagctacccctgcagctggggaagacttatgccatcccggcagcgaggctgggctggccagccaccactgactataccaactgggcctctgatgttcttccagtgaggcatctctctgggatgcagaacttccctccatccacccctctggcacctgggttggtctaatcctagtttgctgtggccttcccggttgtgagagcctgtgatccttagatgtgtctcctgtttcagaccagccccaccatgcaacttcctttgactttctgtgtaccactgggatagaggaatcaagaggacaatctagctctccatactttgaacaaccaaatgtgcattgaatactctgaaaccgaagggactggatctgcaggtgggatgagggagacagaccacttttctatattgcagtgtgaatgctgggcccctgctcaagtctaccctgatcacctcagggcataaagcatgtttcattctctg

SEQ ID NO: 13282 - DNA, 7106 bp, Homo sapiens
  source 1..7106: mol_type = unassigned DNA
cacagagagacggcgaggaagggaaagacccagagggacgcctagaacgagacttggagccagacagaggaagaggggacgtgtgtttgcagactggctgggcccgtgacccagcttcctgagtcctccgtgcaggtggcagctgtaccaggctggcaggtcactgagagtgggcagctgggccccagaactgtgcctggcccagtgggcagcaggagctcctgacttgggaccatggtgattcttcagcaggagaaaagctgggacttgccccacgttacacagccacactgaggcatgtgtcgtgtcacaaacgagatcttccattcaagggggaccatgtgtggatggacctgagattggggcaggagttcgacgtgcccatcggggcggtggtgaagctctgcgactctgggcaggtccaggtggtggatgatgaagacaatgaacactggatctctccgcagaacgcaacgcacatcaagcctatgcaccccacgtcggtccacggcgtggaggacatgatccgcctgggggacctcaacgaggcgggcatcttgcgcaacctgcttatccgctaccgggaccacctcatctacacgtatacgggctccatcctggtggctgtgaacccctaccagctgctctccatctactcgccagagcacatccgccagtataccaacaagaagattggggagatgcccccccacatctttgccattgctgacaactgctacttcaacatgaaacgcaacagccgagaccagtgctgcatcatcagtggggaatctggggccgggaagacggagagcacaaagctgatcctgcagttcctggcagccatcagtgggcagcactcgtggattgagcagcaggtcttggaggccacccccattctggaagcatttgggaatgccaagaccatccgcaatgacaactcaagccgtttcggaaagtacatcgacatccacttcaacaagcggggcgccatcgagggcgcgaagattgagcagtacctgctggaaaagtcacgtgtctgtcgccaggccctggatgaaaggaactaccacgtgttctactgcatgctggagggtatgagtgaggatcagaagaagaagctgggcttgggccaggcctctgactacaactacttggccatgggtaactgcataacctgtgagggccgggtggacagccaggagtacgccaacatccgctccgccatgaaggtgctcatgttcactgacaccgagaactgggagatctcgaagctcctggctgccatcctgcacctgggcaacctgcagtatgaggcacgcacatttgaaaacctggatgcctgtgaggttctcttctccccatcgctggccacagctgcatccctgcttgaggtgaaccccccagacctgatgagctgcctgactagccgcaccctcatcacccgcggggagacggtgtccaccccactgagcagggaacaggcactggacgtgcgcgacgccttcgtaaaggggatctacgggcggctgttcgtgtggattgtggacaagatcaacgcagcaatttacaagcctccctcccaggatgtgaagaactctcgcaggtccatcggcctcctggacatctttgggtttgagaactttgctgtgaacagctttgagcagctctgcatcaacttcgccaatgagcacctgcagcagttctttgtgcggcacgtgttcaagctggagcaggaggaatatgacctggagagcattgactggctgcacatcgagttcactgacaaccaggatgccctggacatgattgccaacaagcccatgaacatcatctccctcatcgatgaggagagcaagttccccaagggcacagacaccaccatgttacacaagctgaactcccagcacaagctcaacgccaactacatcccccccaagaacaaccatgagacccagtttggcatcaaccattttgcaggcatcgtctactatgagacccaaggcttcctggagaagaaccgagacaccctgcatggggacattatccagctggtccactcctccaggaacaagttcatcaagcagatcttccaggccgatgtcgccatgggcgccgagaccaggaagcgctcgcccacacttagcagccagttcaagcggtcactggagctgctgatgcgcacgctgggtgcctgccagcccttctttgtgcgatgcatcaagcccaatgagttcaagaagcccatgctgttcgaccggcacctgtgcgtgcgccagctgcggtactcaggaatgatggagaccatccgaatccgccgagctggctaccccatccgctacagcttcgtagagtttgtggagcggtaccgtgtgctgctgccaggtgtgaagccggcctacaagcagggcgacctccgcgggacttgccagcgcatggctgaggctgtgctgggcacccacgatgactggcagataggcaaaaccaagatctttctgaaggaccaccatgacatgctgctggaagtggagcgggacaaagccatcaccgacagagtcatcctccttcagaaagtcatccggggattcaaagacaggtctaactttctgaagctgaagaacgctgccacactgatccagaggcactggcggggtcacaactgtaggaagaactacgggctgatgcgtctgggcttcctgcggctgcaggccctgcaccgctcccggaagctgcaccagcagtaccgcctggcccgccagcgcatcatccagttccaggcccgctgccgcgcctatctggtgcgcaaggccttccgccaccgcctctgggctgtgctcaccgtgcaggcctatgcccggggcatgatcgcccgcaggctgcaccaacgcctcagggctgagtatctgtggcgcctcgaggctgagaaaatgcggctggcggaggaagagaagcttcggaaggagatgagcgccaagaaggccaaggaggaggccgagcgcaagcatcaggagcgcctggcccagctggctcgtgaggacgctgagcgggagctgaaggagaaggaggccgctcggcggaagaaggagctcctggagcagatggaaagggcccgccatgagcctgtcaatcactcagacatggtggacaagatgtttggcttcctggggacttcaggtggcctgccaggccaggagggccaggcacctagtggctttgaggacctggagcgagggcggagggagatggtggaggaggacctggatgcagccctgcccctgcctgacgaggatgaggaggacctctctgagtataaatttgccaagttcgcggccacctacttccaggggacaaccacgcactcctacacccggcggccactcaaacagccactgctctaccatgacgacgagggtgaccagctggcagccctggcggtctggatcaccatcctccgcttcatgggggacctccctgagcccaagtaccacacagccatgagtgatggcagtgagaagatccctgtgatgaccaagatttatgagaccctgggcaagaagacgtacaagagggagctgcaggccctgcagggcgagggcgaggcccagctccccgagggccagaagaagagcagtgtgaggcacaagctggtgcatttgactctgaaaaagaagtccaagctcacagaggaggtgaccaagaggctgcatgacggggagtccacagtgcagggcaacagcatgctggaggaccggcccacctccaacctggagaagctgcacttcatcatcggcaatggcatcctgcggccagcactccgggacgagatctactgccagatcagcaagcagctgacccacaacccctccaagagcagctatgcccggggctggattctcgtgtctctctgcgtgggctgtttcgccccctccgagaagtttgtcaagtacctgcggaacttcatccacgggggcccgcccggctacgccccgtactgtgaggagcgcctgagaaggacctttgtcaatgggacacggacacagccgcccagctggctggagctgcaggccaccaagtccaagaagccaatcatgttgcccgtgacattcatggatgggaccaccaagaccctgctgacggactcggcaaccacggccaaggagctctgcaacgcgctggccgacaagatctctctcaaggaccggttcgggttctccctctacattgccctgtttgacaaggtgtcctccctgggcagcggcagtgaccacgtcatggacgccatctcccagtgcgagcagtacgccaaggagcagggcgcccaggagcgcaacgccccctggaggctcttcttccgcaaagaggtcttcacgccctggcacagcccctccgaggacaacgtggccaccaacctcatctaccagcaggtggtgcgaggagtcaagtttggggagtacaggtgtgagaaggaggacgacctggctgagctggcctcccagcagtactttgtagactatggctctgagatgatcctggagcgcctcctgaacctcgtgcccacctacatccccgaccgcgagatcacgcccctgaagacgctggagaagtgggcccagctggccatcgccgcccacaagaaggggatttatgcccagaggagaactgatgcccagaaggtcaaagaggatgtggtcagttatgcccgcttcaagtggcccttgctcttctccaggttttatgaagcctacaaattctcaggccccagtctccccaagaacgacgtcatcgtggccgtcaactggacgggtgtgtactttgtggatgagcaggagcaggtacttctggagctgtccttcccagagatcatggccgtgtccagcagcaggggagcgaaaacgacggcccccagcttcacgctggccaccatcaagggggacgaatacaccttcacctccagcaatgctgaggacattcgtgacctggtggtcaccttcctagaggggctccggaagagatctaagtatgttgtggccctgcaggataaccccaaccccgcaggcgaggagtcaggcttcctcagctttgccaagggagacctcatcatcctggaccatgacacgggcgagcaggtcatgaactcgggctgggccaacggcatcaatgagaggaccaagcagcgtggggacttccccaccgacagtgtgtacgtcatgcccactgtcaccatgccaccgcgggagattgtggccctggtcaccatgactcccgatcagaggcaggacgttgtccggctcttgcagctgcgaacggcggagcccgaggtgcgtgccaagccctacacgctggaggagttttcctatgactacttcaggcccccacccaagcacacgctgagccgtgtcatggtgtccaaggcccgaggcaaggaccggctgtggagccacacgcgggaaccgctcaagcaggcgctgctcaagaagctcctgggcagtgaggagctctcgcaggaggcctgcctggccttcattgctgtgctcaagtacatgggcgactacccgtccaagaggacacgctccgtcaacgagctcaccgaccagatctttgagggtcccctgaaagccgagcccctgaaggacgaggcatatgtgcagatcctgaagcagctgaccgacaaccacatcaggtacagcgaggagcggggttgggagctgctctggctgtgcacgggccttttcccacccagcaacatcctcctgccccacgtgcagcgcttcctgcagtcccgaaagcactgcccactcgccatcgactgcctgcaacggctccagaaagccctgagaaacgggtcccggaagtaccctccgcacctggtggaggtggaggccatccagcacaagaccacccagattttccacaaagtctacttccctgatgacactgacgaggccttcgaagtggagtccagcaccaaggccaaggacttctgccagaacatcgccaccaggctgctcctcaagtcctcagagggattcagcctctttgtcaaaattgcagacaaggtcctcagcgttcctgagaatgacttcttctttgactttgttcgacacttgacagactggataaagaaagctcggcccatcaaggacggaattgtgccctcactcacctaccaggtgttcttcatgaagaagctgtggaccaccacggtgccagggaaggatcccatggccgattccatcttccactattaccaggagttgcccaagtatctccgaggctaccacaagtgcacgcgggaggaggtgctgcagctgggggcgctgatctacagggtcaagttcgaggaggacaagtcctacttccccagcatccccaagctgctgcgggagctggtgccccaggaccttatccggcaggtctcacctgatgactggaagcggtccatcgtcgcctacttcaacaagcacgcagggaagtccaaggaggaggccaagctggccttcctgaagctcatcttcaagtggcccacctttggctcagccttcttcgaggtgaagcaaactacggagccaaacttccctgagatcctcctaattgccatcaacaagtatggggtcagcctcatcgatcccaaaacgaaggatatcctcaccactcatcccttcaccaagatctccaactggagcagcggcaacacctacttccacatcaccattgggaacttggtgcgcgggagcaaactgctctgcgagacgtcactgggctacaagatggatgacctcctgacttcctacattagccagatgctcacagccatgagcaaacagcggggctccaggagcggcaagtgaacagtcacggggaggtgctggttccatgcctgctctcgaggcagcagtgggttcaggcccatcagctacccctgcagctggggaagacttatgccatcccggcagcgaggctgggctggccagccaccactgactataccaactgggcctctgatgttcttccagtgaggcatctctctgggatgcagaacttccctccatccacccctctggcacctgggttggtctaatcctagtttgctgtggccttcccggttg

SEQ ID NO: 13283 - DNA, 5740 bp, Homo sapiens
  source 1..5740: mol_type = unassigned DNA
ttccaggcccgctgccgcgcctatctggtgcgcaaggccttccgccaccgcctctgggctgtgctcaccgtgcaggcctatgcccggggcatgatcgcccgcaggctgcaccaacgcctcagggctgagtatctgtggcgcctcgaggctgagaaaatgcggctggcggaggaagagaagcttcggaaggagatgagcgccaagaaggccaaggaggaggccgagcgcaagcatcaggagcgcctggcccagctggctcgtgaggacgctgagcgggagctgaaggagaaggaggccgctcggcggaagaaggagctcctggagcagatggaaagggcccgccatgagcctgtcaatcactcagacatggtggacaagatgtttggcttcctggggacttcaggtggcctgccaggccaggagggccaggcacctagtggctttgaggacctggagcgagggcggagggagatggtggaggaggacctggatgcagccctgcccctgcctgacgaggatgaggaggacctctctgagtataaatttgccaagttcgcggccacctacttccaggggacaaccacgcactcctacacccggcggccactcaaacagccactgctctaccatgacgacgagggtgaccagctggcagccctggcggtctggatcaccatcctccgcttcatgggggacctccctgagcccaagtaccacacagccatgagtgatggcagtgagaagatccctgtgatgaccaagatttatgagaccctgggcaagaagacgtacaagagggagctgcaggccctgcagggcgagggcgaggcccagctccccgagggccagaagaagagcagtgtgaggcacaagctggtgcatttgactctgaaaaagaagtccaagctcacagaggaggtgaccaagaggctgcatgacggggagtccacagtgcagggcaacagcatgctggaggaccggcccacctccaacctggagaagctgcacttcatcatcggcaatggcatcctgcggccagcactccgggacgagatctactgccagatcagcaagcagctgacccacaacccctccaagagcagctatgcccggggctggattctcgtgtctctctgcgtgggctgtttcgccccctccgagaagtttgtcaagtacctgcggaacttcatccacgggggcccgcccggctacgccccgtactgtgaggagcgcctgagaaggacctttgtcaatgggacacggacacagccgcccagctggctggagctgcaggccaccaagtccaagaagccaatcatgttgcccgtgacattcatggatgggaccaccaagaccctgctgacggactcggcaaccacggccaaggagctctgcaacgcgctggccgacaagatctctctcaaggaccggttcgggttctccctctacattgccctgtttgacaaggtgtcctccctgggcagcggcagtgaccacgtcatggacgccatctcccagtgcgagcagtacgccaaggagcagggcgcccaggagcgcaacgccccctggaggctcttcttccgcaaagaggtcttcacgccctggcacagcccctccgaggacaacgtggccaccaacctcatctaccagcaggtggtgcgaggagtcaagtttggggagtacaggtgtgagaagggctgagtgtgcagtggctgctcgatgggctggcttgtttctttgcatcacttcatgtgcccctgggcagagtccagctccatgccagtgccagagggatccaggagaaggaggacgacctggctgagctggcctcccagcagtactttgtagactatggctctgagatgatcctggagcgcctcctgaacctcgtgcccacctacatccccgaccgcgagatcacgcccctgaagacgctggagaagtgggcccagctggccatcgccgcccacaagaaggggatttatgcccagaggagaactgatgcccagaaggtcaaagaggatgtggtcagttatgcccgcttcaagtggcccttgctcttctccaggttttatgaagcctacaaattctcaggccccagtctccccaagaacgacgtcatcgtggccgtcaactggacgggtgtgtactttgtggatgagcaggagcaggtacttctggagctgtccttcccagagatcatggccgtgtccagcagcaggggagcgaaaacgacggcccccagcttcacgctggccaccatcaagggggacgaatacaccttcacctccagcaatgctgaggacattcgtgacctggtggtcaccttcctagaggggctccggaagagatctaagtatgttgtggccctgcaggataaccccaaccccggcgaggagtcaggcttcctcagctttgccaagggagacctcatcatcctggaccatgacacgggcgagcaggtcatgaactcgggctgggccaacggcatcaatgagaggaccaagcagcgtggggacttccccaccgacagtgtgtacgtcatgcccactgtcaccatgccaccgcgggagattgtggccctggtcaccatgactcccgatcagaggcaggacgttgtccggctcttgcagctgcgaacggcggagcccgaggtgcgtgccaagccctacacgctggaggagttttcctatgactacttcaggcccccacccaagcacacgctgagccgtgtcatggtgtccaaggcccgaggcaaggaccggctgtggagccacacgcgggaaccgctcaagcaggcgctgctcaagaagctcctgggcagtgaggagctctcgcaggaggcctgcctggccttcattgctgtgctcaagtacatgggcgactacccgtccaagaggacacgctccgtcaacgagctcaccgaccagatctttgagggtcccctgaaagccgagcccctgaaggacgaggcatatgtgcagatcctgaagcagctgaccgacaaccacatcaggtacagcgaggagcggggttgggagctgctctggctgtgcacgggccttttcccacccagcaacatcctcctgccccacgtgcagcgcttcctgcagtcccgaaagcactgcccactcgccatcgactgcctgcaacggctccagaaagccctgagaaacgggtcccggaagtaccctccgcacctggtggaggtggaggccatccagcacaagaccacccagattttccacaaagtctacttccctgatgacactgacgaggccttcgaagtggagtccagcaccaaggccaaggacttctgccagaacatcgccaccaggctgctcctcaagtcctcagagggattcagcctctttgtcaaaattgcagacaaggtcctcagcgttcctgagaatgacttcttctttgactttgttcgacacttgacagactggataaagaaagctcggcccatcaaggacggaattgtgccctcactcacctaccaggtgttcttcatgaagaagctgtggaccaccacggtgccagggaaggatcccatggccgattccatcttccactattaccaggagttgcccaagtatctccgaggctaccacaagtgcacgcgggaggaggtgctgcagctgggggcgctgatctacagggtcaagttcgaggaggacaagtcctacttccccagcatccccaagctgctgcgggagctggtgccccaggaccttatccggcaggtctcacctgatgactggaagcggtccatcgtcgcctacttcaacaagcacgcagggaagtccaaggaggaggccaagctggccttcctgaagctcatcttcaagtggcccacctttggctcagccttcttcgaggtgaaggtacaccatgggcttctcagagcagaggaggaggggaacagggcattgataaagcacagagactcctccctaggactgtgggaaagagccatggccttggacacctgccctggtgagggaaggagggcagcaccctcagccttgtcccagcttagcgtcttagctggggtaagtcctggggacagagggaccagaagaagctcagcctggcagtggaggcagacatgtaaacaggctggggtaatggaggatggcctgtgttctgacactggggagccctcgcccaggtggcagagctcgggaggctctgccgggtgtgagaaggcctcttagaggaggtgatatctgagctttccaggcagaccctggaaagagtgctcctggcaggggtcccacatagacaaaggcctggaggtgtgagaactcaggtctgggaaggaaatccaagtagtgagggcaggaggcgagagtgggctgtggagagcagcagcttggcaagcaggtgagaggctgggtttcctgcaggggtggcctgccttggagggttttgaacacaggtgacgtggccagaaagcctctcaggctgcgggtggaggaggggtctgaggggcacaacagaggcaggagtatggtgaggaggctggtgtgagaggatacgtatggtcttatcacacagctaggatgggaggccttttgaggagcttggctgtgcgaggagaacaggtaggtagctggaggcaggtgcagggtccaggaggctttttaaagatgggaggcccttgggctgagagggaggacaaagcagaggatggcctgggggacccaggaagggatgtggggcagcactgagggcccagcggaggtggaagccataggtcatggcagggccgtcagtaccacataggcaacaggagaggctgactttatcccagctggggccaggcttcattcctgtccccaaatgcttttcttgctctgggcccccatctgatgccttctcatctttttttctagcaaactacggagccaaacttccctgagatcctcctaattgccatcaacaagtatggggtcagcctcatcgatcccaaaacgaaggatatcctcaccactcatcccttcaccaagatctccaactggagcagcggcaacacctacttccacatcaccattgggaacttggtgcgcgggagcaaactgctctgcgagacgtcactgggctacaagatggatgacctcctgacttcctacattagccagatgctcacagccatgagcaaacagcggggctccaggagcggcaagtgaacagtcacggggaggtgctggttccatgcctgctctcgaggcagcagtgggttcaggcccatcagctacccctgcagctggggaagacttatgccatcccggcagcgaggctgggctggccagccaccactgactataccaactgggcctctgatgttcttccagtgaggcatctctctgggatgcagaacttccctccatccacccctctggcacctgggttggtctaatcctagtttgctgtggccttcccggttgtgagagcctgtgatccttagatgtgtctcctgtttcagaccagccccaccatgcaacttcctttgactttctgtgtaccactgggatagaggaatcaagaggacaatctagctctccatactttgaacaaccaaatgtgcattgaatactctgaaaccgaagggactggatctgcaggtgggatgagggagacagaccacttttctatattgcagtgtgaatgctgggcccctgctcaagtctaccctgatcacctcagggcataaagcatgtttcattctctg

SEQ ID NO: 13284 - DNA, 4616 bp, Homo sapiens
  source 1..4616: mol_type = unassigned DNA
ttccaggcccgctgccgcgcctatctggtgcgcaaggccttccgccaccgcctctgggctgtgctcaccgtgcaggcctatgcccggggcatgatcgcccgcaggctgcaccaacgcctcagggctgagtatctgtggcgcctcgaggctgagaaaatgcggctggcggaggaagagaagcttcggaaggagatgagcgccaagaaggccaaggaggaggccgagcgcaagcatcaggagcgcctggcccagctggctcgtgaggacgctgagcgggagctgaaggagaaggaggccgctcggcggaagaaggagctcctggagcagatggaaagggcccgccatgagcctgtcaatcactcagacatggtggacaagatgtttggcttcctggggacttcaggtggcctgccaggccaggagggccaggcacctagtggctttgaggacctggagcgagggcggagggagatggtggaggaggacctggatgcagccctgcccctgcctgacgaggatgaggaggacctctctgagtataaatttgccaagttcgcggccacctacttccaggggacaaccacgcactcctacacccggcggccactcaaacagccactgctctaccatgacgacgagggtgaccagctggcagccctggcggtctggatcaccatcctccgcttcatgggggacctccctgagcccaagtaccacacagccatgagtgatggcagtgagaagatccctgtgatgaccaagatttatgagaccctgggcaagaagacgtacaagagggagctgcaggccctgcagggcgagggcgaggcccagctccccgagggccagaagaagagcagtgtgaggcacaagctggtgcatttgactctgaaaaagaagtccaagctcacagaggaggtgaccaagaggctgcatgacggggagtccacagtgcagggcaacagcatgctggaggaccggcccacctccaacctggagaagctgcacttcatcatcggcaatggcatcctgcggccagcactccgggacgagatctactgccagatcagcaagcagctgacccacaacccctccaagagcagctatgcccggggctggattctcgtgtctctctgcgtgggctgtttcgccccctccgagaagtttgtcaagtacctgcggaacttcatccacgggggcccgcccggctacgccccgtactgtgaggagcgcctgagaaggacctttgtcaatgggacacggacacagccgcccagctggctggagctgcaggccaccaagtccaagaagccaatcatgttgcccgtgacattcatggatgggaccaccaagaccctgctgacggactcggcaaccacggccaaggagctctgcaacgcgctggccgacaagatctctctcaaggaccggttcgggttctccctctacattgccctgtttgacaaggtgtcctccctgggcagcggcagtgaccacgtcatggacgccatctcccagtgcgagcagtacgccaaggagcagggcgcccaggagcgcaacgccccctggaggctcttcttccgcaaagaggtcttcacgccctggcacagcccctccgaggacaacgtggccaccaacctcatctaccagcaggtggtgcgaggagtcaagtttggggagtacaggtgtgagaaggaggacgacctggctgagctggcctcccagcagtactttgtagactatggctctgagatgatcctggagcgcctcctgaacctcgtgcccacctacatccccgaccgcgagatcacgcccctgaagacgctggagaagtgggcccagctggccatcgccgcccacaagaaggggatttatgcccagaggagaactgatgcccagaaggtcaaagaggatgtggtcagttatgcccgcttcaagtggcccttgctcttctccaggttttatgaagcctacaaattctcaggccccagtctccccaagaacgacgtcatcgtggccgtcaactggacgggtgtgtactttgtggatgagcaggagcaggtacttctggagctgtccttcccagagatcatggccgtgtccagcagcaggggagcgaaaacgacggcccccagcttcacgctggccaccatcaagggggacgaatacaccttcacctccagcaatgctgaggacattcgtgacctggtggtcaccttcctagaggggctccggaagagatctaagtatgttgtggccctgcaggataaccccaaccccggcgaggagtcaggcttcctcagctttgccaagggagacctcatcatcctggaccatgacacgggcgagcaggtcatgaactcgggctgggccaacggcatcaatgagaggaccaagcagcgtggggacttccccaccgacagtgtgtacgtcatgcccactgtcaccatgccaccgcgggagattgtggccctggtcaccatgactcccgatcagaggcaggacgttgtccggctcttgcagctgcgaacggcggagcccgaggtgcgtgccaagccctacacgctggaggagttttcctatgactacttcaggcccccacccaagcacacgctgagccgtgtcatggtgtccaaggcccgaggcaaggaccggctgtggagccacacgcgggaaccgctcaagcaggcgctgctcaagaagctcctgggcagtgaggagctctcgcaggaggcctgcctggccttcattgctgtgctcaagtacatgggcgactacccgtccaagaggacacgctccgtcaacgagctcaccgaccagatctttgagggtcccctgaaagccgagcccctgaaggacgaggcatatgtgcagatcctgaagcagctgaccgacaaccacatcaggtacagcgaggagcggggttgggagctgctctggctgtgcacgggccttttcccacccagcaacatcctcctgccccacgtgcagcgcttcctgcagtcccgaaagcactgcccactcgccatcgactgcctgcaacggctccagaaagccctgagaaacgggtcccggaagtaccctccgcacctggtggaggtggaggccatccagcacaagaccacccagattttccacaaagtctacttccctgatgacactgacgaggccttcgaagtggagtccagcaccaaggccaaggacttctgccagaacatcgccaccaggctgctcctcaagtcctcagagggattcagcctctttgtcaaaattgcagacaaggtcctcagcgttcctgagaatgacttcttctttgactttgttcgacacttgacagactggataaagaaagctcggcccatcaaggacggaattgtgccctcactcacctaccaggtgttcttcatgaagaagctgtggaccaccacggtgccagggaaggatcccatggccgattccatcttccactattaccaggagttgcccaagtatctccgaggctaccacaagtgcacgcgggaggaggtgctgcagctgggggcgctgatctacagggtcaagttcgaggaggacaagtcctacttccccagcatccccaagctgctgcgggagctggtgccccaggaccttatccggcaggtctcacctgatgactggaagcggtccatcgtcgcctacttcaacaagcacgcagggaagtccaaggaggaggccaagctggccttcctgaagctcatcttcaagtggcccacctttggctcagccttcttcgaggtgaagcaaactacggagccaaacttccctgagatcctcctaattgccatcaacaagtatggggtcagcctcatcgatcccaaaacgaaggatatcctcaccactcatcccttcaccaagatctccaactggagcagcggcaacacctacttccacatcaccattgggaacttggtgcgcgggagcaaactgctctgcgagacgtcactgggctacaagatggatgacctcctgacttcctacattagccagatgctcacagccatgagcaaacagcggggctccaggagcggcaagtgaacagtcacggggaggtgctggttccatgcctgctctcgaggcagcagtgggttcaggcccatcagctacccctgcagctggggaagacttatgccatcccggcagcgaggctgggctggccagccaccactgactataccaactgggcctctgatgttcttccagtgaggcatctctctgggatgcagaacttccctccatccacccctctggcacctgggttggtctaatcctagtttgctgtggccttcccggttgtgagagcctgtgatccttagatgtgtctcctgtttcagaccagccccaccatgcaacttcctttgactttctgtgtaccactgggatagaggaatcaagaggacaatctagctctccatactttgaacaaccaaatgtgcattgaatactctgaaaccgaagggactggatctgcaggtgggatgagggagacagaccacttttctatattgcagtgtgaatgctgggcccctgctcaagtctaccctgatcacctcagggcataaagcatgtttcattctctg

SEQ ID NO: 13285 - DNA, 768 bp, Homo sapiens
  source 1..768: mol_type = unassigned DNA
cggcaatggcatcctgcggccagcactccgggacgagatctactgccagatcagcaagcagctgacccacaacccctccaagagcagctatgcccggggctggattctcgtgtctctctgcgtgggctgtttcgccccctccgagaagtttgtcaagtacctgcggaacttcatccacgggggcccgcccggctacgccccgtactgtgaggagcgcctgagaaggacctttgtcaatgggacacggacacagccgcccagctggctggagctgcaggccaccaagtccaagaagccaatcatgttgcccgtgacattcatggatgggaccaccaagaccctgctgacggactcggcaaccacggccaaggagctctgcaacgcgctggccgacaagatctctctcaaggaccggttcgggttctccctctacattgccctgtttgacaaggtatggccgcccggaagcacctcctcccggaagcacctcctcccggccccactccgggctgccagtgctgccacctacttgccggggctattcacccttgagcacctcggtttccccctgagcctgtgctaattggctctgcctgactcctcaggactgccgagaactcggccaggtgcggtggttcacacctgtaatcccagcactttgggaggctgaggcgggcagatcacaaagtcaggagttcgagaccagcctggctaatgtagtgaaacctcgtctctactaaaaatacaaaaattagtggagcacggtgg

SEQ ID NO: 13286 - DNA, 2705 bp, Homo sapiens
  source 1..2705: mol_type = unassigned DNA
gctctcgcaggaggcctgcctggccttcattgctgtgctcaagtacatgggcgactacccgtccaagaggacacgctccgtcaacgagctcaccgaccagatctttgagggtcccctgaaagccgagcccctgaaggacgaggcatatgtgcagatcctgaagcagctgaccgacaaccacatcagcgcttcctgcagtcccgaaagcactgcccactcgccatcgactgcctgcaacggctccagaaagccctgagaaacgggtcccggaagtaccctccgcacctggtggaggtggaggccatccagcacaagaccacccagattttccacaaagtctacttccctgatgacactgacgagtcatcctgctgtgctccctggacccctcactgtcactcaggcttgtacaccctggcccaggactctggacgccaaggccaccttctgcttggagagtcgggaggaggagacctgggaagacccagacaggagtagccctttccttttgttaaatgccatgcccagctctgtgcccacaggagggtgtctggcacgggagggggctcagtataggaggcatagccagaggggcccgggaggaccaggtcccgggaaaggccctgcaggagcccagtgctcactgcccctcccaggccttcgaagtggagtccagcaccaaggccaaggacttctgccagaacatcgccaccaggctgctcctcaagtcctcagagggattcagcctctttgtcaaaattgcagacaaggtcctcagcgttcctgagaatgacttcttctttgactttgttcgacacttgacagactggataaagaaagctcggcccatcaaggacggaattgtgccctcactcacctaccaggtgttcttcatgaagaagctgtggaccaccacggtgccagggaaggatcccatggccgattccatcttccactattaccaggtgggcacctctgcactctagttgccttcgtgcacagctagcgttgctgtactttggccctgaaagcagagacccactgaccttgccaggtgtggggcccgtaccagcctggcctcaaagggattcctgccaagaccactggagccccaagggatggcccaacccctgatccttgtatcttctgattcttcagcccttaggggcttgacagttcctcctctgagcttccgatccctacctgttcaggcccctccttcagtgcggggctatcctctgacttcgagattctgctgttgtaactgggtaattccaaggcctctgtgcaaacattttctagcataggcacctgcaggaagccgggagggaagcttgcatgttgagcctctattatgtgtctggcactcttctctcattctgtcctcccaactaaccccaagaagcaggcatgttgtccccatttgacagagggacaaagagactcaggccgcgtgctgtgattaggatcacacagctgatggaactggggtttgattccaggtcttcatgactgcaggagttgcccaagtatctccgaggctaccacaagtgcacgcgggaggaggtgctgcagctgggggcgctgatctacagggtcaagttcgaggaggacaagtcctacttccccagcatccccaagctgctgcgggagctggtgccccaggaccttatccggcaggtctcacctgatgactggaagcggtccatcgtcgcctacttcaacaagcacgcagggaagtccaaggaggaggccaagctggccttcctgaagctcatcttcaagtggcccacctttggctcagccttcttcgaggtgaagctaggatgggaggccttttgaggagcttggctgtgcgaggagaacagcaaactacggagccaaacttccctgagatcctcctaattgccatcaacaagtatggggtcagcctcatcgatcccaaaacgaaggatatcctcaccactcatcccttcaccaagatctccaactggagcagcggcaacacctacttccacatcaccattgggaacttggtgcgcgggagcaaactgctctgcgagacgtcactgggctacaagatggatgacctcctgacttcctacattagccagatgctcacagccatgagcaaacagcggggctccaggagcggcaagtgaacagtcacggggaggtgctggttccatgcctgctctcgaggcagcagtgggttcaggcccatcagctacccctgcagctggggaagacttatgccatcccggcagcgaggctgggctggccagccaccactgactataccaactgggcctctgatgttcttccagtgaggcatctctctgggatgcagaacttccctccatccacccctctggcacctgggttggtctaatcctagtttgctgtggccttcccggttgtgagagcctgtgatccttagatgtgtctcctgtttcagaccagccccaccatgcaacttcctttgactttctgtgtaccactgggatagaggaatcaagaggacaatctagctctccatactttgaacaaccaaatgtgcattgaatactctgaaaccgaagggactggatctgcaggtgggatgagggagacagaccacttttctatattgcagtgtgaatgctgggcccctgctcaagtctaccctgatcacctcagggcataaagcatgtttcattctctgg

SEQ ID NO: 13287 - DNA, 456 bp, Homo sapiens
  source 1..456: mol_type = unassigned DNA
ctggactgttatggggggacatgaggggcacaacagaggcaggagtatggtgaggaggctggtgtgagaggatacgtatggtcttatcacacagctaggatgggaggccttttgaggagcttggctgtgcgaggagaacaggtaggtagctggaggcaggtgcagggtccaggaggctttttaaagatgggaggcccttgggctgagagggaggacaaagcagaggatggcctgggggacccaggaagggatgtggggcagcactgagggcccagcggaggtggaagccataggtcatggcagggccgtcagtaccacataggcaacaggagaggctgactttatcccagctggggccaggcttcattcctgtccccaaatgcttttcttgctctgggcccccatctgatgccttctcatctttttttctagcaaactacggagccaaacttccct

SEQ ID NO: 13288 - DNA, 560 bp, Homo sapiens
  source 1..560: mol_type = unassigned DNA
ggggtctgaggggcacaacagaggcaggagtatggtgaggaggctggtgtgagaggatacgtatggtcttatcacacagctaggatgggaggccttttgaggagcttggctgtgcgaggagaacaggtaggtagctggaggcaggtgcagggtccaggaggctttttaaagatgggaggcccttgggctgagagggaggacaaagcagaggatggcctgggggacccaggaagggatgtggggcagcactgagggcccagcggaggtggaagccataggtcatggcagggccgtcagtaccacataggcaacaggagaggctgactttatcccagctggggccaggcttcattcctgtccccaaatgcttttcttgctctgggcccccatctgatgccttctcatctttttttctagcaaactacggagccaaacttccctgagatcctcctaattgccatcaacaagtatggggtcagcctcatcgatcccaaaacgaaggatatcctcaccactcatcccttcaccaagatctccaactggagcagcggcaacaccta

SEQ ID NO: 13289 - DNA, 4016 bp, Homo sapiens
  source 1..4016: mol_type = unassigned DNA
ggcaggagagagagggagagacaagagacacacacagagagacggcgaggaagggaaagacccagagggacgcctagaacgagacttggagccagacagaggaagaggggacgtgtgtttgcagactggctgggcccgtgacccagcttcctgagtcctccgtgcaggtggcagctgtaccaggctggcaggtcactgagagtgggcagctgggccccagaactgtgcctggcccagtgggcagcaggagctcctgacttgggaccatggtgattcttcagcagggggaccatgtgtggatggacctgagattggggcaggagttcgacgtgcccatcggggcggtggtgaagctctgcgactctgggcaggtccaggtggtggatgatgaagacaatgaacactggatctctccgcagaacgcaacgcacatcaagcctatgcaccccacgtcggtccacggcgtggaggacatgatccgcctgggggacctcaacgaggcgggcatcttgcgcaacctgcttatccgctaccgggaccacctcatctacacgtatacgggctccatcctggtggctgtgaacccctaccagctgctctccatctactcgccagagcacatccgccagtataccaacaagaagattggggagatgcccccccacatctttgccattgctgacaactgctacttcaacatgaaacgcaacagccgagaccagtgctgcatcatcagtggggaatctggggccgggaagacggagagcacaaagctgatcctgcagttcctggcagccatcagtgggcagcactcgtggattgagcagcaggtcttggaggccacccccattctggaagcatttgggaatgccaagaccatccgcaatgacaactcaagccgtttcggaaagtacatcgacatccacttcaacaagcggggcgccatcgagggcgcgaagattgagcagtacctgctggaaaagtcacgtgtctgtcgccaggccctggatgaaaggaactaccacgtgttctactgcatgctggagggtatgagtgaggatcagaagaagaagctgggcttgggccaggcctctgactacaactacttggccatgggtaactgcataacctgtgagggccgggtggacagccaggagtacgccaacatccgctccgccatgaaggtgctcatgttcactgacaccgagaactgggagatctcgaagctcctggctgccatcctgcacctgggcaacctgcagtatgaggcacgcacatttgaaaacctggatgcctgtgaggttctcttctccccatcgctggccacagctgcatccctgcttgaggtgaaccccccagacctgatgagctgcctgactagccgcaccctcatcacccgcggggagacggtgtccaccccactgagcagggaacaggcactggacgtgcgcgacgccttcgtaaaggggatctacgggcggctgttcgtgtggattgtggacaagatcaacgcagcaatttacaagcctccctcccaggatgtgaagaactctcgcaggtccatcggcctcctggacatctttgggtttgagaactttgctgtgaacagctttgagcagctctgcatcaacttcgccaatgagcacctgcagcagttctttgtgcggcacgtgttcaagctggagcaggaggaatatgacctggagagcattgactggctgcacatcgagttcactgacaaccaggatgccctggacatgattgccaacaagcccatgaacatcatctccctcatcgatgaggagagcaagttccccaagggcacagacaccaccatgttacacaagctgaactcccagcacaagctcaacgccaactacatcccccccaagaacaaccatgagacccagtttggcatcaaccattttgcaggcatcgtctactatgagacccaaggcttcctggagaagaaccgagacaccctgcatggggacattatccagctggtccactcctccaggaacaagttcatcaagcagatcttccaggccgatgtcgccatgggcgccgagaccaggaagcgctcgcccacacttagcagccagttcaagcggtcactggagctgctgatgcgcacgctgggtgcctgccagcccttctttgtgcgatgcatcaagcccaatgagttcaagaagcccatgctgttcgaccggcacctgtgcgtgcgccagctgcggtactcaggaatgatggagaccatccgaatccgccgagctggctaccccatccgctacagcttcgtagagtttgtggagcggtaccgtgtgctgctgccaggtgtgaagccggcctacaagcagggcgacctccgcgggacttgccagcgcatggctgaggctgtgctgggcacccacgatgactggcagataggcaaaaccaagatctttctgaaggaccaccatgacatgctgctggaagtggagcgggacaaagccatcaccgacagagtcatcctccttcagaaagtcatccggggattcaaagacaggtctaactttctgaagctgaagaacgctgccacactgatccagaggcactggcggggtcacaactgtaggaagaactacgggctgatgcgtctgggcttcctgcggctgcaggccctgcaccgctcccggaagctgcaccagcagtaccgcctggcccgccagcgcatcatccagttccaggcccgctgccgcgcctatctggtgcgcaaggccttccgccaccgcctctgggctgtgctcaccgtgcaggcctatgcccggggcatgatcgcccgcaggctgcaccaacgcctcagggctgagtatctgtggcgcctcgaggctgagaaaatgcggctggcggaggaagagaagcttcggaaggagatgagcgccaagaaggccaaggaggaggccgagcgcaagcatcaggagcgcctggcccagctggctcgtgaggacgctgagcgggagctgaaggagaaggaggccgctcggcggaagaaggagctcctggagcagatggaaagggcccgccatgagcctgtcaatcactcagacatggtggacaagatgtttggcttcctggggacttcaggtggcctgccaggccaggagggccaggcacctagtggctttgaggacctggagcgagggcggagggagatggtggaggaggacctggatgcagccctgcccctgcctgacgaggatgaggaggacctctctgagtataaatttgccaagttcgcggccacctacttccaggggacaaccacgcactcctacacccggcggccactcaaacagccactgctctaccatgacgacgagggtgaccagctggcagccctggcggtctggatcaccatcctccgcttcatgggggacctccctgagcccaagtaccacacagccatgagtgatggcagtgagaagatccctgtgatgaccaagatttatgagaccctgggcaagaagacgtacaagagggagctgcaggccctgcagggcgagggcgaggtcctgcaggcccagctccccgagggccagaagaagagcagtgtgaggcacaagctggtgcatttgactctgaaaaagaagtccaagctcacagaggaggtgaccaagaggctgcatgacggggagtccacagtgcagggcaacagcatgctggaggaccggcccacctccaacctggagaagctgcacttcatcatcggcaatggcatcctgcggacaccagggcctgaaagtcttttggtggctgagtggtgcctctgtcaacctagcaagagattaagcaggcctgggtttggcttcgctgctagctagttggtggagttaggaccttggtggagttatttcatctttctaagcctctgattccttgtctgtaaagggggaatcctaaaacaggcatcccttggagatattgcaggttcagttgaaggccacagaaataaatatcacaataaagagagctgc

SEQ ID NO: 13290 - DNA, 2337 bp, Homo sapiens
  source 1..2337: mol_type = unassigned DNA
ggacaggcaagcacatcagatgtcactgtttggcagctgataaaagtcagtggtgctataatactaagcacagagccactagattagtctgtgagggaaggagatgcctcttccttcccttcaatagtgggttaaacccagctggcaccctctggaactacgggaacaatattcttcaagagaaggtcactctaccaaagccaggagcacagtattctcaggatctcaacaaggaagagcagaccaaggttgcttctgattccttacaaccttccgtaattccaggcttgtggccccaaattcagggccccacccttccaggaacaaatcattatagtaataatttgccttcatcttccatataccaactaagcatgtttaactacgaacgtccaaaacacttcatccagtcccaaaacccatgtggctccagattgcagcctcctggaccagaaacctccagcttctctagccagaccaaacagtcttccattatcatccagccccgccagtgtacagagcaaagattttctgcctcctcaacactgagctctcacatcaccatgtcctcctctgctttccctgcttctccccagcagcatgctggctccaacccaggccaaagggttacaaccacctataaccagtccccagccagcttcctcagctccatattaccatcacagcctgattacaatagcagtaaaatcccttccgctatggattccaactatcaacagtcctcagctggccaacctataaatgcaaagccatcccaaactgcaaatgctaagcccataccaagaactcctgatcatgaaatacaaggatcaaaagaagctttgattcaagatttggaaagaaagctgaaatgcaaggacacccttcttcataatggaaatcaacgtctaacatatgaagagaagatggctcgcagattgctaggaccacagaatgcagctgctgtgtttcaagctcaggatgacagtggtgcacaagactcgcagcaacacaactcagaacatgcgcgactgcaagttcctacatcacaagtaagaagtagatcaacctcaaggggagatgtgaatgatcaggatgcaatccaggagaaattttacccaccacgtttcattcaagtgccagagaacatgtcgattgatgaaggaagattctgcagaatggacttcaaagtgagtggactgccagctcctgatgtgtcatggtatctaaatggaagaacagttcaatcagatgatttgcacaaaatgatagtgtctgagaagggtcttcattcactcatctttgaagtagtcagagcttcagatgcaggggcttatgcatgtgttgccaagaatagagcaggagaagccaccttcactgtgcagctggatgtccttgcaaaagaacataaaagagcaccaatgtttatctacaaaccacagagcaaaaaagttttagagggagattcagtgaaactagaatgccagatctcggctatacctccaccaaagcttttctggaaaagaaataatgaaatggtacaattcaacactgaccgaataagcttatatcaagataacactggaagagttactttactgataaaagatgtaaacaagaaagatgctgggtggtatactgtgtcagcagttaatgaagctggagtgactacatgtaacacaagattagacgttacggcacgtccaaaccaaactcttccagctcctaagcagttacgggttcgaccaacattcagcaaatatttagcacttaatgggaaaggtttgaatgtaaaacaagcttttaacccagaaggagaatttcagcgtttggcagctcaatctggactctatgaaagtgaagaactttaataactttaccaacattggaaaacagccaactacaccattagtaatatatttgattacatttttttgaaattaatccatagctgtattaacagattatggttttaattaggtaatatagttaatatatatttataatattatttatcctttgactcttgcacattctatgtacccctccgatttgtgaagcctacaggaaatctgggtatatggatttgtaactgcagaagactatcttaaaatacaggattttaacatttaagtcatgcacatttaacaattacaggttataaattagtatcaactttttaaacacatctaatgcttgtaataacgtttactggtactgctttctaaatactgttttacccgttttctcttgtaggaatactaacatggtatagattatctgagtgttccacagttgtatgtcaaaagaaaataaaattcaaatatttaaaacgga

SEQ ID NO: 13291 - DNA, 1474 bp, Homo sapiens
  source 1..1474: mol_type = unassigned DNA
gcacagagccactagattagtctgtgagggaaggagatgcctcttccttcccttcaatagtgggttaaacccagctggcaccctctggaactacgggaacaatattcttcaagagaaggtcactctaccaaagccaggagcacagtattctcaggatctcaacaaggaagagcagaccaagctatcaacagtcctcagctggccaacctataaatgcaaagccatcccaaactgcaaatgctaagcccataccaagaactcctgatcatgaaatacaaggatcaaaagaagctttgattcaagatttggaaagaaagctgaaatgcaaggacacccttcttcataatggaaatcaacgtctaacatatgaagagaagatggctcgcagattgctaggaccacagaatgcagctgctgtgtttcaagctcaggatgacagtggtgcacaagactcgcagcaacacaactcagaacatgcgcgactgcaagttcctacatcacaagtaagaagtagatcaacctcaaggggagatgtgaatgatcaggatgcaatccaggagaaattttacccaccacgtttcattcaagtgccagagaacatgtcgattgatgaaggaagattctgcagaatggacttcaaagtgagtggactgccagctcctgatgtgtcatggtatctaaatggaagaacagttcaatcagatgatttgcacaaaatgatagtgtctgagaagggtcttcattcactcatctttgaagtagtcagagcttcagatgcaggggcttatgcatgtgttgccaagaatagagcaggagaagccaccttcactgtgcagctggatgtccttgcaaaagaacataaaagagcaccaatgtttatctacaaaccacagagcaaaaaagttttagagggagattcagtgaaactagaatgccagatctcggctatacctccaccaaagcttttctggaaaagaaataatgaaatggtacaattcaacactgaccgaataagcttatatcaagataacactggaagagttactttactgataaaagatgtaaacaagaaagatgctgggtggtatactgtgtcagcagttaatgaagctggagtgactacatgtaacacaagattagacgttacggcacgtccaaaccaaactcttccagctcctaagcagttacgggttcgaccaacattcagcaaatatttagcacttaatgggaaaggtttgaatgtaaaacaagcttttaacccagaaggagaatttcagcgtttggcagctcaatctggactctatgaaagtgaagaactttaataactttaccaacattggaaaacagccaactacaccattagtaatatatttgattacatttttttgaaattaatccatagctgtattaacagattatggttttaattaggtaatatagttaatatatatttataatattatttatcctttga

SEQ ID NO: 13292 - DNA, 545 bp, Homo sapiens
  source 1..545: mol_type = unassigned DNA
acagagccactagattagtctgtgagggaaggagatgcctcttccttcccttcaatagtgggttaaacccagctggcaccctctggaactacgggaacaatattcttcaagagaaggtcactctaccaaagccaggagcacagtattctcaggatctcaacaaggaagagcagaccaagctatcaacagtcctcagctggccaacctataaatgcaaagccatcccaaactgcaaatgctaagcccataccaagaactcctgatcatgaaatacaaggatcaaaagaagctttgattcaagatttggaaagaaagctgaaatgcaaggacacccttcttcataatggaaatcaagtgggcaagatgtctattttgtacaaaaggccaattaaactataaaatctaattttaataaggaagttctagctcacagatctaggtccatatatcaacaaggaataagattatctaaaaagaaggaatatttgggccctattccatttctctctgcatgaaatcacctcttggtttacagtagtaaaaga

SEQ ID NO: 13293 - DNA, 563 bp, Homo sapiens
  source 1..563: mol_type = unassigned DNA
acagagccactagattagtctgtgagggaaggagatgcctcttccttcccttcaatagtgggttaaacccagctggcaccctctggaactacgggaacaatattcttcaagagaaggtcactctaccaaagccaggagcacagtattctcaggatctcaacaaggaagagcagaccaagctatcaacagtcctcagctggccaacctataaatgcaaagccatcccaaactgcaaatgctaagcccataccaagaactcctgatcatgaaatacaaggatcaaaagaagctttgattcaagatttggaaagaaagctgaaatgcaaggacacccttcttcataatggaaatcaacgtctaacatatgaagagaagatggctcgcagattgctaggaccacagaatgcagctgctgtgtttcaagctcaggatgacagtggtgcacaagactcgcagcaacacaactcagaacatgcgcgactgcaagttcctacatcacaagtaagcaaaagaacataaaagagcaccaatgtttatctacaaaccacagagcaaaaaagttt

SEQ ID NO: 13294 - DNA, 1578 bp, Homo sapiens
  source 1..1578: mol_type = unassigned DNA
agtctgtgagggaaggagatgcctcttccttcccttcaatagtgggttaaacccagctggcaccctctggaactacgggaacaatattcttcaagagaaggtcactctaccaaagccaggagcacagtattctcaggatctcaacaaggaagagcagaccaagcatgctggctccaacccaggccaaagggttacaaccacctataaccagtccccagccagcttcctcagctccatattaccatcacagcctgattacaatagcagtaaaatcccttccgctatggattccaactatcaacagtcctcagctggccaacctataaatgcaaagccatcccaaactgcaaatgctaagcccataccaagaactcctgatcatgaaatacaaggatcaaaagaagctttgattcaagatttggaaagaaagctgaaatgcaaggacacccttcttcataatggaaatcaacgtctaacatatgaagagaagatggctcgcagattgctaggaccacagaatgcagctgctgtgtttcaagctcaggatgacagtggtgcacaagactcgcagcaacacaactcagaacatgcgcgactgcaagttcctacatcacaagtaagaagtagatcaacctcaaggggagatgtgaatgatcaggatgcaatccaggagaaattttacccaccacgtttcattcaagtgccagagaacatgtcgattgatgaaggaagattctgcagaatggacttcaaagtgagtggactgccagctcctgatgtgtcatggtatctaaatggaagaacagttcaatcagatgatttgcacaaaatgatagtgtctgagaagggtcttcattcactcatctttgaagtagtcagagcttcagatgcaggggcttatgcatgtgttgccaagaatagagcaggagaagccaccttcactgtgcagctggatgtccttgcaaaagaacataaaagagcaccaatgtttatctacaaaccacagagcaaaaaagttttagagggagattcagtgaaactagaatgccagatctcggctatacctccaccaaagcttttctggaaaagaaataatgaaatggtacaattcaacactgaccgaataagcttatatcaagataacactggaagagttactttactgataaaagatgtaaacaagaaagatgctgggtggtatactgtgtcagcagttaatgaagctggagtgactacatgtaacacaagattagacgttacggcacgtccaaaccaaactcttccagctcctaagcagttacgggttcgaccaacattcagcaaatatttagcacttaatgggaaaggtttgaatgtaaaacaagcttttaacccagaaggagaatttcagcgtttggcagctcaatctggactctatgaaagtgaagaactttaataactttaccaacattggaaaacagccaactacaccattagtaatatatttgattacatttttttgaaattaatccatagctgtattaacagattatggttttaattaggtaatatagttaatatatatttataatattattt

SEQ ID NO: 13295 - DNA, 579 bp, Homo sapiens
  source 1..579: mol_type = unassigned DNA
attaattctgggcttcttgctagagtggtagtatgttagtgcactgtactttaagggcttaaaagctgaatatatagaacttaccagggctgttcaaatacagccaaaataggaatgttcctttcaactgtaactacttaattctgcttcattcaagctaacaattgcatgtaaacattcttactttgttttaatttcaagcaacacaactcagaacatgcgcgactgcaagttcctacatcacaagtaaggtgagtggactgccagctcctgatgtgtcatggtatctaaatggaagaacagttcaatcagatgatttgcacaaaatgatagtgtctgagaagggtcttcattcactcatctttgaagtagtcagagcttcagatgcaggggcttatgcatgtgttgccaagaatagagcaggagaagccaccttcactgtgcagctggatgtccttgcaaaagaacataaaagagcaccaatgtttatctacaaaccacagagcaaaaaagttttagagggagattcagtgaaactagaatgccagatctcggctatacctccaccaaagcttttct

SEQ ID NO: 13296 - DNA, 582 bp, Homo sapiens
  source 1..582: mol_type = unassigned DNA
aattctgggcttcttgctagagtggtagtatgttagtgcactgtactttaagggcttaaaagctgaatatatagaacttaccagggctgttcaaatacagccaaaataggaatgttcctttcaactgtaactacttaattctgcttcattcaagctaacaattgcatgtaaacattcttactttgttttaatttcaagcaacacaactcagaacatgcgcgactgcaagttcctacatcacaagtaagaagtagatcaacctcaaggggagatgtgaatgatcaggatgcaatccaggagaaattttacccaccacgtttcattcaagtgccagagaacatgtcgattgatgaaggaagattctgcagaatggacttcaaagtgagtggactgccagctcctgatgtgtcatggtatctaaatggaagaacagttcaatcagatgatttgcacaaaatgatagtgtctgagaagggtcttcattcactcatctttgaagtagtcagagcttcagatgcaggggcttatgcatgtgttgccaagaatagagcaggagaagccaccttcactgtgcagctggat

SEQ ID NO: 13297 - DNA, 655 bp, Homo sapiens
  source 1..655: mol_type = unassigned DNA
ggggggatgtttaattcaagaaaaccaatagctatttggcaataaatagatacagctttggaattttcaaatgtttttttcttcctagtctgactgttggtcagagacatccacttcacagaaataattcctgtactttcatttcttaaaaatttttatttcagcttatatcaagataacactggaagagttactttactgataaaagatgtaaacaagaaagatgctgggtggtatactgtgtcagcagttaatgaagctggagtgactacatgtaacacaagattagacgttacggcacgtccaaaccaaactcttccagctcctaagcagttacgggttcgaccaacattcagcaaatatttagcacttaatgggaaaggtttgaatgtaaaacaagcttttaacccagaaggagaatttcagcgtttggcagctcaatctggactctatgaaagtgaagaactttaataactttaccaacattggaaaacagccaactacaccattagtaatatatttgattacatttttttgaaattaatccatagctgtattaacagattatggttttaattaggtaatatagttaatatatatttataatattatttatcctttgactcttgcacattctatgtacccctccgatttg

SEQ ID NO: 13298 - DNA, 1392 bp, Homo sapiens
  source 1..1392: mol_type = unassigned DNA
ggagcccagccgggactgtcgcgcgggccgcgccggcgatgccgcgcccccgggccgggctgtagcggggccgcggctggagtgtgcgccgggcaggcgggacatggaggtggtggacgagacggaggcgctgcagcgcttcttcgaaggccacgacatcaacggtgccctggagccctccaacatagacaccagcatcctggaggagtacatcagcaaggaggatgcctccgacctgtgagtggccccctcgcccggcctgcacccgcccagccccagcccttcgcctcccttctgtcaccagggaggtctgagggccggacctggggtctgctgtggtcccacctctgaaagctgctcctcgtcccttcccagccactgactcctccgaaatctccatagttccctgcagggagggggcggctacttccctgctggggctggggtcctggctggagctgagccgccccccttccccgcagctgcttccctgacatctctgctccagccagctcggcctcctactcccacgggcagcctgcgatgcctggctccagcggggtccaccacctgagcccccctgggggtggaccctccccggggcgccatggtcccctcccacccccgggctacggcaccccgctgaactgcaacaacaacaacggcatgggcgctgcccccaagcccttcccggggggcaccgggccccccatcaaggctgagcccaaggctccctatgccccagggtgagtaagggcagggagtagggggatacagcggcataggggcaggcagggagcagggctgtggccgtgacctgggaggtgctagacactggcctggcatgggatgggctgggtgactggctgtgcgtgggcaggtgagggaagggaggatgagtccaggtcaaggggggactcctgggctttgttctgaggcagtgggcagccacaaagcttctaagcatgggagtgatgagggctgacgtaagtgctagaaaaatctcgatgctgtgtggagagtggacaggaagcggcgggactggaggctgtgactgtttaccttcatgggaacacctgcatacccgtgcacgcgcgccaagcccacccacttacgcatccagctgacgtgtactgtggccacaggagctggcccatggctcagatgtggcacctcagttcccccctacccaagcaagcctcatggggcccagaacccaggcccttccccccatctttctgaggagtccacaccaagggcctgacccagggctgaaccttaggcctggctttgaccaaaggttccaggcagccacccggccagccagactccagggcagctcccggggcacatgctcacagcgggaggctgggagcatgggtctgcagggga

SEQ ID NO: 13299 - DNA, 5927 bp, Homo sapiens
  source 1..5927: mol_type = unassigned DNA
agccgggactgtcgcgcgggccgcgccggcgatgccgcgcccccgggccgggctgtagcggggccgcggctggagtgtgcgccgggcaggcgggacatggaggtggtggacgagacggaggcgctgcagcgcttcttcgaaggccacgacatcaacggtgccctggagccctccaacatagacaccagcatcctggaggagtacatcagcaaggaggatgcctccgacctctgcttccctgacatctctgctccagccagctcggcctcctactcccacgggcagcctgcgatgcctggctccagcggggtccaccacctgagcccccctgggggtggaccctccccggggcgccatggtcccctcccacccccgggctacggcaccccgctgaactgcaacaacaacaacggcatgggcgctgcccccaagcccttcccggggggcaccgggccccccatcaaggctgagcccaaggctccctatgccccaggcacactgccggactctcccccagactcgggctccgaggcctactccccccagcaggtgaatgagccccacctcctgcgcacgataacccctgagacactgtgccacgtgggagtgccctcccgcctggagcatccgcccccacctccagcccacttgccaggccccccgccacccccaccacccccacctcactaccctgtcctgcagcgggatctgtacatgaaggccgagcccccgatcccccactacgctgccatggggcaggggctggtgcccactgatcttcaccacacccagcagtcccagatgctgcaccagctcctgcagcagcacggagctgagctccctacacacccctccaagaagaggaagcactctgaatccccccccagcaccctcaatgcccagatgctgaatggaatgatcaaacaggagcctgggaccgtgacagccctgcctctgcaccccactcgagccccatcgccaccctggcctccccagggtccgctctccccgggccctggttccttgcctctcagcattgcccgtgtccagacaccgccttggcacccgccaggtgccccctccccaggcctcctgcaggacagtgacagcctcagtggctcctacctggaccccaactaccagtccatcaagtggcagcctcatcagcagaacaagtgggcgaccctgtacgatgctaactacaaggagctgcccatgctcacctaccgcgtggatgcggacaagggcttcaacttttcggtgggcgacgacgcctttgtgtgccagaagaagaaccacttccaggtgacagtgtacatcggcatgctgggcgagcccaagtacgtcaagacgcccgagggcctcaagcccctcgactgcttctatctgaagctgcacggagtgaagctggaggccctgaaccagtccattaacatcgagcagtcccagtcagaccggagcaagcggcccttcaacccggtcacggtcaatctgccccctgagcaggtcacgaaggtgactgtggggcggctgcacttcagcgagaccaccgctaacaacatgcgtaagaagggcaagcccaacccggaccagaggtacttcatgctggtggtggccctccaggctcatgcacagaaccagaactacacgctggccgcccagatctcagagcgcatcattgtgcgggcctccaacccaggccagttcgagagcgacagcgatgtgttgtggcagcgggcacaggtgcccgacaccgtcttccaccacggccgcgtgggcatcaacacagaccggccggatgaggcgctggttgtgcacgggaatgtcaaggtcatgggctcgcttatgcacccctccgacctgcgcgccaaggaacacgtgcaggaggtggacaccaccgagcaattgaagaggatctcgcgcatgcggctggtgcactacagatacaagcccgagttcgccgccagcgcgggcatcgaggccaccgcgccagagacaggtgtcatcgctcaggaggtgaaggagatcttgcctgaggctgtgaaagacaccggagacatggtctttgccaatgggaaaaccatagagaacttcctggtggtgaacaaggagcgcatcttcatggagaacgtaggggccgtgaaggagctgtgcaagctgacagacaacctggagacgcgcattgatgagctggagcgctggagccacaagctggccaagctgcggcggctcgacagcctcaagtccaccggcagctcgggcgccttcagccatgcagggagccagttcagtcgggcgggcagcgtcccccacaagaagaggccccccaaggtggccagcaagtcatcgtccgtggttccggaccaggcctgcatcagccagcgcttcctgcagggaaccatcattgccctggtggtggtcatggccttcagcgtggtgtccatgtccacactgtacgtgctgagcctgcgcacagaggaggacctggtagacactgatggctcttttgccgtgtccacttcctgtctcctggccctgctccggccccagccccctggggggagtgaggccttgtgcccatggtccagccagagctttgggaccacgcagctccgacagtcccccttgaccacggggctaccaggcatacagccctctttgctgctggtgaccaccagcctcaccagctcggccccaggttctgctgtccgcaccttggacatgtgttccagccacccctgccctgtcatctgctgttcctcacccactaccaaccctaccactggtcctagtcttggccccagctttaaccctggccatgttctcagcccaagtcccagccccagcaccaaccgctcaggccccagccagatggcccttctgccagtcaccaacatcagagccaagtcctggggtctttcagtcaatggcattggccactccaagcatcacaagagtctggagcctctggccagccctgcagtccccttccctggggggcagggcaaagccaagaacagtcccagccttggtttccatggccgggcccgccgaggggccctccagtccagcgtgggccctgctgagcccacctgggcccagggccagtcagcctctctccttgcagagccagtgccctccctgacctccatccaggtgctggagaattcgatgtccatcacctcccagtactgtgctccaggggatgcctgcaggcctgggaacttcacctaccacatccctgtcagtagtggcaccccactgcacctcagcctgactctgcagatgaactcctcctcccccgtgtctgtggtgctgtgcagcctgaggtcaaaggaggaaccatgtgaggaggggagccttccacagagtctccacacccaccaggacacccagggcacctctcaccggtggccaataaccatcctgtccttccgtgaattcacctaccacttccgggtggcactgctgggtcaggccaactgcagttcagaggctctcgcccagccagccacagactaccacttccacttctaccgcctgtgtgactgagctgccctcctgaggcagcaccacaccagggaccaggggtgcccaggcaccccccaacactggatgcaatggtgttacactggagcccgctgcaggccagctctgctgttcactggccctacccgagactggtgaaactggaagtcttcacactggagttgctgttccagctggtcgcccctcacggcacagagggaacctgagagccagagacttcttgggccttcctgcctgccaccccctaggggccaggacaggaccagtttacctctttccagatatggtggttggagggctggttcaggtgccctggagggaaggggaagcctgtggccctgatttgttcagagcccattctcccttgcctccccttttgagactggagccaacccttttggagagaggacctgcccacctttgagatcagcagggggctcggatccagccctaagagacttgggtggacccccatgagtcaatggagggcagacggctctcccccttaaagctgttccctgggggatggcttggtagtggactttctggggtttgcctgttacgccagactcggacttctaagctttaagtgtggcccaggaggtttcttctccctgggagggcttggctcccaagaagtcccagggcagccgaggccagccctgcctgggttggagaaactgactttgtgccttaagtctactcagtgcctggtgaagccaccctcagcccttcacaggcctgaaccagtaggggccagtgggccaggtaagccctagagccttgaaccaggaatatccaggaagaggaaattccctttgagcccccagatggtattgcagcttcactgcctgcgttcctgggagcgtctggagctcacagtgatcagtgaccacatcattctctctgagcagaggagcaggaatccctcaagcagcagcctggtcttggctggtgggcagatgcaaatagcttttgctgttattaatgaagtaattactaaatgcacttaaaccagggcaggaaggaatggaaggatggagctagaaagctcagagtgggccagagcaggggtgtgacacttgcaaagacagggctctgactctgatccctcccagggagcctccgacacccatcccactcccaaccaccaagaccctgggttagggaagaagttgtatcttaagtgccaccttcaagtttcttagtggtgcctggtgcattccgaggctacatccaggctcatggaaggagtgtagtattcatttagccatgtctgccatgggtccagaaatgggaaagggaattgctgtccttgccctgtggtatgctgccacctctttgggaagcaggccttgcccctgtcccaccactcattctcagctttgaatgggaggcctttctatagtggaggcctttccttgaagcctatgaactgcaggcccccttttgccattgatctcaaagcacttgtcctcaggatagggaagagcagggggatgcaggaatagcagggatagcttgctcccagccccctccccaatttggttccgttgacataggaattttacgattcccaaaccatgcaggggctgagccttccttatgatgactttgttctccctcccactgggggaatcctccctatgccttaaaactgccgagccccactccatgtaataggattcctgggcttcctcaatgggggttcatgttcttggactgcgggccctcagtccttaactggaaagtgaccgtccactgccccatggagcccatctggacacagcacagccccaaaaccgttagcagctggctctgtttccaagcctggggaggggttcctcagtgcaggagttggggacaggctggggatccaagctgcttgagggggtcaaccttggaccaaagttgccttaagcctgtggtaaaagggcttcagggaaggtaagtgggccacctgctggaagctgccagctgcccggctggcaatggtgtgagtgtcttggccctgtccctgccctggggtccagcaggtcatccctcccttcttctctctcctttggcgtttgttcctgtagtcactgggctaatctccccctagcttcaagctgtacatagggcctcccagtgcaaatcctcctgcccataccgtgcacccttagaagcctgcgtgtgcatagagcgccccctacttcccagttaactcccagttcttctccctgagcttggtatttgtcatgtgccaactctgactctgaggtgggcagtgagggaagcagccccgggcctgcttgcttcctgtccccgaaatgttcgtttcttctgaagtaaatatacatatataaataaatgtataaatactgctttgtatctga

SEQ ID NO: 13300 - DNA, 5745 bp, Homo sapiens
  source 1..5745: mol_type = unassigned DNA
cacagggcctgcagagaggggacccaccgggcaggatgcactggcttccagcaggccacgacatcaacggtgccctggagccctccaacatagacaccagcatcctggaggagtacatcagcaaggaggatgcctccgacctctgcttccctgacatctctgctccagccagctcggcctcctactcccacgggcagcctgcgatgcctggctccagcggggtccaccacctgagcccccctgggggtggaccctccccggggcgccatggtcccctcccacccccgggctacggcaccccgctgaactgcaacaacaacaacggcatgggcgctgcccccaagcccttcccggggggcaccgggccccccatcaaggctgagcccaaggctccctatgccccaggcacactgccggactctcccccagactcgggctccgaggcctactccccccagcaggtgaatgagccccacctcctgcgcacgataacccctgagacactgtgccacgtgggagtgccctcccgcctggagcatccgcccccacctccagcccacttgccaggccccccgccacccccaccacccccacctcactaccctgtcctgcagcgggatctgtacatgaaggccgagcccccgatcccccactacgctgccatggggcaggggctggtgcccactgatcttcaccacacccagcagtcccagatgctgcaccagctcctgcagcagcacggagctgagctccctacacacccctccaagaagaggaagcactctgaatccccccccagcaccctcaatgcccagatgctgaatggaatgatcaaacaggagcctgggaccgtgacagccctgcctctgcaccccactcgagccccatcgccaccctggcctccccagggtccgctctccccgggccctggttccttgcctctcagcattgcccgtgtccagacaccgccttggcacccgccaggtgccccctccccaggcctcctgcaggacagtgacagcctcagtggctcctacctggaccccaactaccagtccatcaagtggcagcctcatcagcagaacaagtgggcgaccctgtacgatgctaactacaaggagctgcccatgctcacctaccgcgtggatgcggacaagggcttcaacttttcggtgggcgacgacgcctttgtgtgccagaagaagaaccacttccaggtgacagtgtacatcggcatgctgggcgagcccaagtacgtcaagacgcccgagggcctcaagcccctcgactgcttctatctgaagctgcacggagtgaagctggaggccctgaaccagtccattaacatcgagcagtcccagtcagaccggagcaagcggcccttcaacccggtcacggtcaatctgccccctgagcaggtcacgaaggtgactgtggggcggctgcacttcagcgagaccaccgctaacaacatgcgtaagaagggcaagcccaacccggaccagaggtacttcatgctggtggtggccctccaggctcatgcacagaaccagaactacacgctggccgcccagatctcagagcgcatcattgtgcgggcctccaacccaggccagttcgagagcgacagcgatgtgttgtggcagcgggcacaggtgcccgacaccgtcttccaccacggccgcgtgggcatcaacacagaccggccggatgaggcgctggttgtgcacgggaatgtcaaggtcatgggctcgcttatgcacccctccgacctgcgcgccaaggaacacgtgcaggaggtggacaccaccgagcaattgaagaggatctcgcgcatgcggctggtgcactacagatacaagcccgagttcgccgccagcgcgggcatcgaggccaccgcgccagagacaggtgtcatcgctcaggaggtgaaggagatcttgcctgaggctgtgaaagacaccggagacatggtctttgccaatgggaaaaccatagagaacttcctggtggtgaacaaggagcgcatcttcatggagaacgtaggggccgtgaaggagctgtgcaagctgacagacaacctggagacgcgcattgatgagctggagcgctggagccacaagctggccaagctgcggcggctcgacagcctcaagtccaccggcagctcgggcgccttcagccatgcagggagccagttcagtcgggcgggcagcgtcccccacaagaagaggccccccaaggtggccagcaagtcatcgtccgtggttccggaccaggcctgcatcagccagcgcttcctgcagggaaccatcattgccctggtggtggtcatggccttcagcgtggtgtccatgtccacactgtacgtgctgagcctgcgcacagaggaggacctggtagacactgatggcaggtccagccagagctttgggaccacgcagctccgacagtcccccttgaccacggggctaccaggcatacagccctctttgctgctggtgaccaccagcctcaccagctcggccccaggttctgctgtccgcaccttggacatgtgttccagccacccctgccctgtcatctgctgttcctcacccactaccaaccctaccactggtcctagtcttggccccagctttaaccctggccatgttctcagcccaagtcccagccccagcaccaaccgctcaggccccagccagatggcccttctgccagtcaccaacatcagagccaagtcctggggtctttcagtcaatggcattggccactccaagcatcacaagagtctggagcctctggccagccctgcagtccccttccctggggggcagggcaaagccaagaacagtcccagccttggtttccatggccgggcccgccgaggggccctccagtccagcgtgggccctgctgagcccacctgggcccagggccagtcagagccagtgccctccctgacctccatccaggtgctggagaattcgatgtccatcacctcccagtactgtgctccaggggatgcctgcaggcctgggaacttcacctaccacatccctgtcagtagtggcaccccactgcacctcagcctgactctgcagatgaactcctcctcccccgtgtctgtggtgctgtgcagcctgaggtcaaaggaggaaccatgtgaggaggggagccttccacagagtctccacacccaccaggacacccagggcacctctcaccggtggccaataaccatcctgtccttccgtgaattcacctaccacttccgggtggcactgctgggtcaggccaactgcagttcagaggctctcgcccagccagccacagactaccacttccacttctaccgcctgtgtgactgagctgccctcctgaggcagcaccacaccagggaccaggggtgcccaggcaccccccaacactggatgcaatggtgttacactggagcccgctgcaggccagctctgctgttcactggccctacccgagactggtgaaactggaagtcttcacactggagttgctgttccagctggtcgcccctcacggcacagagggaacctgagagccagagacttcttgggccttcctgcctgccaccccctaggggccaggacaggaccagtttacctctttccagatatggtggttggagggctggttcaggtgccctggagggaaggggaagcctgtggccctgatttgttcagagcccattctcccttgcctccccttttgagactggagccaacccttttggagagaggacctgcccacctttgagatcagcagggggctcggatccagccctaagagacttgggtggacccccatgagtcaatggagggcagacggctctcccccttaaagctgttccctgggggatggcttggtagtggactttctggggtttgcctgttacgccagactcggacttctaagctttaagtgtggcccaggaggtttcttctccctgggagggcttggctcccaagaagtcccagggcagccgaggccagccctgcctgggttggagaaactgactttgtgccttaagtctactcagtgcctggtgaagccaccctcagcccttcacaggcctgaaccagtaggggccagtgggccaggtaagccctagagccttgaaccaggaatatccaggaagaggaaattccctttgagcccccagatggtattgcagcttcactgcctgcgttcctgggagcgtctggagctcacagtgatcagtgaccacatcattctctctgagcagaggagcaggaatccctcaagcagcagcctggtcttggctggtgggcagatgcaaatagcttttgctgttattaatgaagtaattactaaatgcacttaaaccagggcaggaaggaatggaaggatggagctagaaagctcagagtgggccagagcaggggtgtgacacttgcaaagacagggctctgactctgatccctcccagggagcctccgacacccatcccactcccaaccaccaagaccctgggttagggaagaagttgtatcttaagtgccaccttcaagtttcttagtggtgcctggtgcattccgaggctacatccaggctcatggaaggagtgtagtattcatttagccatgtctgccatgggtccagaaatgggaaagggaattgctgtccttgccctgtggtatgctgccacctctttgggaagcaggccttgcccctgtcccaccactcattctcagctttgaatgggaggcctttctatagtggaggcctttccttgaagcctatgaactgcaggcccccttttgccattgatctcaaagcacttgtcctcaggatagggaagagcagggggatgcaggaatagcagggatagcttgctcccagccccctccccaatttggttccgttgacataggaattttacgattcccaaaccatgcaggggctgagccttccttatgatgactttgttctccctcccactgggggaatcctccctatgccttaaaactgccgagccccactccatgtaataggattcctgggcttcctcaatgggggttcatgttcttggactgcgggccctcagtccttaactggaaagtgaccgtccactgccccatggagcccatctggacacagcacagccccaaaaccgttagcagctggctctgtttccaagcctggggaggggttcctcagtgcaggagttggggacaggctggggatccaagctgcttgagggggtcaaccttggaccaaagttgccttaagcctgtggtaaaagggcttcagggaaggtaagtgggccacctgctggaagctgccagctgcccggctggcaatggtgtgagtgtcttggccctgtccctgccctggggtccagcaggtcatccctcccttcttctctctcctttggcgtttgttcctgtagtcactgggctaatctccccctagcttcaagctgtacatagggcctcccagtgcaaatcctcctgcccataccgtgcacccttagaagcctgcgtgtgcatagagcgccccctacttcccagttaactcccagttcttctccctgagcttggtatttgtcatgtgccaactctgactctgaggtgggcagtgagggaagcagccccgggcctgcttgcttcctgtccccgaaatgttcgtttcttctgaagtaaatatacatatataaataaatgtataaatactgctttgtatctg

SEQ ID NO: 13301 - DNA, 2052 bp, Homo sapiens
  source 1..2052: mol_type = unassigned DNA
atctaaccactccagtggtggggtctcctctccacactgcagcctccaggctgccgccctcctgggctccggggcctgctccgggacggccgcaggaggggttcattcccgggcctggctccccgcaggtggacaccaccgagcaattgaagaggatctcgcgcatgcggctggtgcactacagatacaagcccgagttcgccgccagcgcgggcatcgaggccaccgcgccagagacaggtgtcatcgctcaggaggtgaaggagatcttgcctgaggctgtgaaagacaccggagacatggtctttgccaatgggaaaaccatagagaacttcctggtggtgaacaaggagcgcatcttcatggagaacgtaggggccgtgaaggagctgtgcaagctgacagacaacctggagacgcgcattgatgagctggagcgctggagccacaagctggccaagctgcggcggctcgacagcctcaagtccaccggcagctcgggcgccttcagccatgcagggagccagttcagtcgggcgggcagcgtcccccacaagaagaggccccccaaggtggccagcaagtcatcgtccgtggttccggaccaggcctgcatcagccagcgcttcctgcagggaaccatcattgccctggtggtggtcatggccttcagcgtggtgtccatgtccacactgtacgtgctgagcctgcgcacagaggaggacctggtagacactgatggctcttttgccgtgtccacttcctgtctcctggccctgctccggccccagccccctggggggagtgaggccttgtgcccatggtccagccagagctttgggaccacgcagctccgacagtcccccttgaccacggggctaccaggcatacagccctctttgctgctggtgaccaccagcctcaccagctcggccccaggttctgctgtccgcaccttggacatgtgttccagccacccctgccctgtcatctgctgttcctcacccactaccaaccctaccactggtcctagtcttggccccagctttaaccctggccatgttctcagcccaagtcccagccccagcaccaaccgctcaggccccagccagatggcccttctgccagtcaccaacatcagagccaagtcctggggtctttcagtcaatggcattggccactccaagcatcacaagagtctggagcctctggccagccctgcagtccccttccctggggggcagggcaaagccaagaacagtcccagccttggtttccatggccgggcccgccgaggggccctccagtccagcgtgggccctgctgagcccacctgggcccagggccagtcagagccagtgccctccctgacctccatccaggtgctggagaattcgatgtccatcacctcccagtactgtgctccaggggatgcctgcaggcctgggaacttcacctaccacatccctgtcagtagtggcaccccactgcacctcagcctgactctgcagatgaactcctcctcccccgtgtctgtggtgctgtgcagcctgaggtcaaaggaggaaccatgtgaggaggggagccttccacagagtctccacacccaccaggacacccagggcacctctcaccggtggccaataaccatcctgtccttccgtgaattcacctaccacttccgggtggcactgctgggtcaggccaactgcagttcagaggctctcgcccagccagccacagactaccacttccacttctaccgcctgtgtgactgagctgccctcctgaggcagcaccacaccagggaccaggggtgcccaggcaccccccaacactggatgcaatggtgttacactggagcccgctgcaggccagctctgctgttcactggccctacccgagactggtgaaactggaagtcttcacactggagttgctgttccagctggtcgcccctcacggcacagagggaacctgagagccagagacttcttgggccttcctgcctgccaccccctaggggccaggacaggaccagtttacctcttt

SEQ ID NO: 13302 - DNA, 1067 bp, Homo sapiens
  source 1..1067: mol_type = unassigned DNA
gtgaggacgacgtttgtcacttacctgtcctgagtctgggcgccaaggaggcatgtaataggtctccaccccagctgaatagtgaagtgctgacatctgagacaccagtcatccgaggggcagatcccggggctgcagccttcaggcttaggagaggagagctctggcagggagtggggagggccattcaggcaggtgggacagcccaggtgaaggtgcagaggtggaggtgttgctcggagacaggcacaggagctgtgggagccgaggctggattggaggggcccgcccaggtagggagactttgagggcctcccagtggccaaggacagtggccgcccctcctgccccctgatgtctggcagcctggggctcccggggctgactgggccctctgtgttggcccatggcccatggcccatggcccatggcaggagcgcatcttcatggagaacgtaggggccgtgaaggagctgtgcaagctgacagacaacctggagacgcgcattgatgagctggagcgctggagccacaagctggccaagctgcggcggctcgacagcctcaagtccaccggcagctcgggcgccttcaggtaggggtgcggggtgggggaaggtgagacccttcttcccagggacacccctgatcctggccctcttgctgcagccatgcagggagccagttcagtcgggcgggcagcgtcccccacaagaagaggccccccaaggtggccagcaagtcatcgtccgtggttccggaccaggcctgcatcagccagcgcttcctgcagggaaccatcattgccctggtggtggtcatggccttcagcgtggtgtccatgtccacactgtacgtgctgagcctgcgcacagaggaggacctggtagacactgatggctcttttgccgtgtccacttcctgtctcctggccctgctccggccccagccccctggggggagtgaggccttgtgcccatggtccagccagagctttgggaccacgcagctccgacagtcccccttgaccacggggctaccaggcatacagccctctttgctgctgg

SEQ ID NO: 13303 - DNA, 1844 bp, Homo sapiens
  source 1..1844: mol_type = unassigned DNA
gtgaggacgacgtttgtcacttacctgtcctgagtctgggcgccaaggaggcatgtaataggtctccaccccagctgaatagtgaagtgctgacatctgagacaccagtcatccgaggggcagatcccggggctgcagccttcaggcttaggagaggagagctctggcagggagtggggagggccattcaggcaggtgggacagcccaggtgaaggtgcagaggtggaggtgttgctcggagacaggcacaggagctgtgggagccgaggctggattggaggggcccgcccaggtagggagactttgagggcctcccagtggccaaggacagtggccgcccctcctgccccctgatgtctggcagcctggggctcccggggctgactgggccctctgtgttggcccatggcccatggcccatggcccatggcaggagcgcatcttcatggagaacgtaggggccgtgaaggagctgtgcaagctgacagacaacctggagacgcgcattgatgagctggagcgctggagccacaagctggccaagctgcggcggctcgacagcctcaagtccaccggcagctcgggcgccttcagccatgcagggagccagttcagtcgggcgggcagcgtcccccacaagaagaggccccccaaggtggccagcaagtcatcgtccgtggttccggaccaggcctgcatcagccagcgcttcctgcagggaaccatcattgccctggtggtggtcatggccttcagcgtggtgtccatgtccacactgtacgtgctgagcctgcgcacagaggaggacctggtagacactgatgggtccagccagagctttgggaccacgcagctccgacagtcccccttgaccacggggctaccaggcatacagccctctttgctgctggtgaccaccagcctcaccagctcggccccaggttctgctgtccgcaccttggacatgtgttccagccacccctgccctgtcatctgctgttcctcacccactaccaaccctaccactggtcctagtcttggccccagctttaaccctggccatgttctcagcccaagtcccagccccagcaccaaccgctcaggccccagccagatggcccttctgccagtcaccaacatcagagccaagtcctggggtctttcagtcaatggcattggccactccaagcatcacaagagtctggagcctctggccagccctgcagtccccttccctggggggcagggcaaagccaagaacagtcccagccttggtttccatggccgggcccgccgaggggccctccagtccagcgtgggccctgctgagcccacctgggcccagggccagtcaggtacttgctgcacccctgacactacccagcccagcctggcaaggctcactggccagggcccacctcagcccagtcatgtgactgtctgggttcagacttgtcagtcaatagacgtttgctgagcacagaataaggatcaggaatcaggcctgcagccttacatagatcatcccatttagtcctcacagcactcctgcaagaaaggaattgttgttcctattgttcagctgaagaaatgggatggagactaaggtgaagtgacctgcccagggttatacagcccctccgaggcagggcttgtatttgatcccgagcctggctcctccttcgccatgccagcaccaggagggtgctatactgggtctcccctactatttcccaaaccttggatctttggttttaacaaagctacagaaccttttattgtagttttcaaactgggttcctctgaggtaccctgggggctgcgctgggggctgccctggggg

SEQ ID NO: 13304 - DNA, 645 bp, Homo sapiens
  source 1..645: mol_type = unassigned DNA
gtggctccagcgtggtgtccatgtccacactgtacgtgctgagcctgcgcacagaggaggacctggtagacactgatggcaggtccagccagagctttgggaccacgcagctccgacagtcccccttgaccacggggctaccaggcatacagccctctttgctgctggtgaccaccagcctcaccagctcggccccaggttctgctgtccgcaccttggacatgtgttccagccacccctgccctgtcatctgctgttcctcacccactaccaaccctaccactggtcctagtcttggccccagctttaaccctggccatgttctcagcccaagtcccagccccagcaccaaccgctcaggccccagccagatggcccttctgccagtcaccaacatcagagccaagtcctggggtctttcagtcaatggcattggccactccaagcatcacaagagtctggagcctctggccagccctgcagtccccttccctggggggcagggcaaagccaagaacagtcccagccttggtttccatggccgggcccgccgaggggccctccagtccagcgtgggccctgctgagcccacctgggcccagggccagtcagagccagtgccctccctgacctccatccaggtgc

SEQ ID NO: 13305 - DNA, 3324 bp, Homo sapiens
  source 1..3324: mol_type = unassigned DNA
cgtttgctgagcacagaataaggatcaggaatcaggcctgcagccttacatagatcatcccatttagtcctcacagcactcctgcaagaaaggaattgttgttcctattgttcagctgaagaaatgggatggagactaaggtgaagtgacctgcccagggttatacagcccctccgaggcagggcttgtatttgatcccgagcctggctcctccttcgccatgccagcaccaggagggtgctatactgggtctcccctactatttcccaaaccttggatctttggttttaacaaagctacagaaccttttattgtagttttcaaactgggttcctctgaggtaccctgggggctgcgctgggggctgccctgggggttgaaggggaggctgggaggcttcctggcttcaaccaggcagctctgctctcaccaactttcatctgatggattttgtggcttcaagaaaaagaaagcctggaaaatgtggcttacagagatggaaattcaatgtgatgggggaaccccatgggggagatgtttgccaggcacctgtttactgagctgcctgccactctgtggctggctctgtacaggggactgggggtgatgaagatggacacgcccctgtccccaaagacctcacagagatgaaaacacagcagtgtgatgaggctctgaggggacatgcaggtagctttgggactggggaggacacttaatccggacgaaggtggggaggatcagggaaaacttctctggagttggtgacatttgagctgactctttaaaggacctttggaatttgcccagaagggatgtgggaagggcaccttccatctcgtctgtatctgatacctgtcctgaccacacagggtgtcctggatcctgttggggtccttgggtccctgggtcatgcctcagagctgaaaacgtaccaggtccagcaaatgttcagcggccccagcttcccccttcctgggtggatagtcaggcagcagcaagactgtatgtgaactagatgagcaagaagtcctgtctcccccatctgacttgtcacacttcagtcccacccctacccagccagccagcctgcagtcggtttgttcagggaggctgcgaggagcagcgtgctggtagcggtgtaatcatcggcctcggggcagaggggagcctgatttgtgtgatgctgtcaacactgctgatttcaagctaccagtgtaactgatgtttctgaacccagaactgggagagatgcccgcagtcaggaacacaggcctcgagcgggctcctgcacacctggcaggggatgtgaagacccatccctacttctgggtgttccagttcttttgaggaggcagacgtcaggctcatgggaactgggtagtcctagggctgctgaggaaagggtgtagtgtgatgctggccattgtggaggtctggaaaaaaataacctggaacttattcatactaaggtgtgagtgactgcttcaagtctggcaaggaaagacttgccagcttctcatttgtgtcctgccttgtcaccttactcctgccccaacagcctctctccttgcagagccagtgccctccctgacctccatccaggtgctggagaattcgatgtccatcacctcccagtactgtgctccaggggatgcctgcaggcctgggaacttcacctaccacatccctgtcagtagtggcaccccactgcacctcagcctgactctgcagatgaagtgagtgccggtgtggggaagtgggaggcaggaggggagccagggagaatctcccgcagagcctcagaacagccgagtctgaggacagccggagagtctctggtatttcctgcatggtgggataagtgctgacttcattgcctacttcgtggttaactggctaaatgacctggcctcatgggctgaggaccacatgggatggtcgatgggaaaggttttgttcgagggccctggttattatgcggtgtttcaggctgggtggagattcagaggcgtgtggcaggctggctgggagggggctggggttgagggactctagaacctcatttctctgctaactgggcctgtctacagctcctcctcccccgtgtctgtggtgctgtgcagcctgaggtcaaaggaggaaccatgtgaggaggggagccttccacagagtctccacacccaccaggacacccaggtaggtgggactgggaagctgcgggccggccaggcccgagctgcttctctcctggcacaactgggccccaaaatgggcaaggagcagaagctgggagttatagagtaaagccttctccacaagggacactctggggcctgggcctctgtgtcccagggaggggcacgcgtgcccgtgtttgttcattgcactctgctgagcatctcccagccctgccgtgctggagacgtggggaagacagcagatcacaggtgctaatgtggatgagtgcaatgatggaaacaggcaggtgtctgggagcccatggcggggagggctgtggctcactggaggtgtctgcagaagcaggaaggagccgacctcatgctcaggttggggaagtggcacagctagatgtacagcatcagagggcccctcaggttccatgtttggccacctcttctgggagaactggatggtgagctcctccctggccaggtaaccggaagttatgactgtccctggggctgatggacccccagtttcttcttgagcctaagaggccatgggagaagacgctcaggacaaatgaagggaagtagtgattattttttcttgcccattcatgtgtttactcagaaaatattgattggggccccatctgtcccaggccctgtgctgggtgggcctagctgcaggggagagaggtggagtagacacaggttttgacttccaagaacgtactctatagtgagggagaaaagacgtgcagaaagcacctgcaacagaggtgggggtgcttctgagggaggcccgagccctgtcgccctgcagaagagacagggtccaagacagagggagagcccagctagacacacagcagacatggtgctcgggcctgaaaccacatcacagacgcacagccaaagcctcaggtagatgggcaagctgcctgcagccaggctgcatgccaccctgtgagggagacagccagacagacctgggtttgaatcccagctgtgtgattttgccacactgtgtgatttttaggaagtggctcagtttcctcatccagaagatggggctagtagcagcactgtgtcactggattgtactgaggatggggctaatgaaatactttgatgt

SEQ ID NO: 13306 - DNA, 2678 bp, Homo sapiens
  source 1..2678: mol_type = unassigned DNA
aacccggcggttccgcagctgtgtttgggagacttgggggcgcattagcctggacagctccctgatcggtcttgtttcatcatctgtgttgagtaaccatggggaggaagctggacctgtctggtttgactgatgatgaaacagagcatgttcttcaggtggttcaaagagacttcaatcttcgcaaaaaagaagaagaacgactaagtgagctgaagcagaagctggatgaggaaggcagcaagtgcagcatcctctcgaagcaccagcagtttgtggagcactgctgcatgcgctgctgctcgcccttcaccttcctcgtcaacaccaagcgccagtgtggagattgcaaattcaatgtctgcaagagctgctgctcctaccagaagcacgaaaaggcctgggtctgctgcgtctgccagcaagcgaggcttctgagggcccaatctctggaatggttctacaataatgtgaagagccgcttcaagcgctttggcagtgccaaggttctgaagaacctgtacaggaagcaccggctggagagtggcgcgtgcttcgacattctaggaggaagcctttttgagtcaaacctggagaatgaaggaagcatttctggcagtgattcaacattttataggcagtcagaaggacatagtgtgatggacaccttggctgtggccctacgggtggctgaagaggccattgaggaagcaatttccaaagcagaggcatatggggacagcctggacaagcaaaatgaggccagttacctgcgggaccacaaggaggagctaactgaggaactggccacgacaatcctgcagaagattatacgaaaacagaagagcaaaagtgagcagcaagtggaagaagagccaggatggccacatccccagagttgcagcacaaaggtggcagatgaggggacctcagcatcccctggaggctaccgtgctcccgctgccctctggaggtcccagtctgccttctcaatcactggagaagaagccctgaagacccctccagtggaggctccatcgaggcagccaagggaccaaggccaacacccgagagcagagtctgctctgcccagctggaagagtgtggacaggctggatgaaacaaacctggccccagttttgcagagccccgacgggaactgggtggccctgaaggatggcgctccaccccccacccgactactggccaaacctaagagcgggacgtttcaggccctggaggtggcctccagtgtggcatctgcctacgatgagatgggctccgatagcgaggaagactttgactggagtgaggccttgagcaagctgtgtcccaggtcccgggccctgcccaggaacccccagcctcagcccacacaggcccagagctctgaccaaggccccatagctgcctccccatcctctgcactctcccccaaccctgaggccatgtgctctgactcggagacctcctccgcaggctcttcccgagaagttgggcaccaggccagactgtcctggttgcagaggaaggcccccaggaaccctgcagctgagaagatgcgcttgcatggagagctggacgtgaacttcaacccccagttggccagcagggagacctcggacagcagcgagccggaggaggccccccacaccacagaccggcgggccaggaggtggagaagagcccgactgggctcagaagagccaagcaaagaaccatcttcccccagcgcccagctccgggatctagacacacatcaggtgtcggatgatttatcagagacagacatcagcaatgaggctcgggatccccagactctcacagacaccacagaggagaaacggagaaacaggctgtacgagttagcaatgaaaatgagtgaaaaggagacttcttcaggggaggatcaggagtctgagcccaagacagaatctgagaaccagaaggaaagtctgtcctctgaagacaacagccagagtgtccaggaagagctgaagaagaagttttctgctgtttctctctgcaacatctccacagaagtcctgaaagtcatcaatgccacagaggagttgatagcaggatctacagggccctgggagtccccacaagtccctcctgacagacagaaggggatgtttcctcgtgggacagaccaagtgagactggatgagcagctgacttccctggaagaaaatgtatacctggcagcaggcactgtgtatggactggagacccagctgactgagctagaagatgccgcccgctgcatccacagtggcactgatgagacccatctggcggatctggaggaccaggtggccacggctgcagcccaagtccaccatgctgaactccagatttcagatattgagagccggatttcagccctgaccattgcaggattaaacatagcaccatgtgtgcgcttcacaagaagacgggatcagaagcaaaggacccaggtacaaaccatagatacatcaaggcagcaaaggaggaaactgcctgctccaccggtgaaagctgaaaaaattgagacatcttcagtgactaccattaaaacatttaaccacaacttcattctccaaggctcctcaacaaacaggactaaggaaaggaaaggcaccaccaaggatttgatggagcctgctctggagtcagctgtgatgtactga

SEQ ID NO: 13307 - DNA, 5077 bp, Homo sapiens
  source 1..5077: mol_type = unassigned DNA
ggccaggctggccctggctgcctgcggcgcgggcgcctccctcgcagccgctgctgccgacgccgctgcgctcccgcctcctgtcggttcccgggttcccgctgcggctgcggttctggcagccgagcccccgcggtgctgcagcccagctttagcgcgcagaccgacccgcgccccttcttcgccgccggcagcctctaatccacgcggcgcgttgcggcaggtgccctgggcgtactgaggcgcggtggcctgagcccggccgccatcgatgaccccggtcgcggacttgcttcaggctggccaccccccgtcttgtttcatcatctgtgttgagtaaccatggggaggaagctggacctgtctggtttgactgatgatgaaacagagcatgttcttcaggtggttcaaagagacttcaatcttcgcaaaaaagaagaagaacgactaagtgagctgaagcagaagctggatgaggaaggcagcaagtgcagcatcctctcgaagcaccagcagtttgtggagcactgctgcatgcgctgctgctcgcccttcaccttcctcgtcaacaccaagcgccagtgtggagattgcaaattcaatgtctgcaagagctgctgctcctaccagaagcacgaaaaggcctgggtctgctgcgtctgccagcaagcgaggcttctgagggcccaatctctggaatggttctacaataatgtgaagagccgcttcaagcgctttggcagtgccaaggttctgaagaacctgtacaggaagcaccggctggagagtggcgcgtgcttcgacattctaggaggaagcctttttgagtcaaacctggagaatgaaggaagcatttctggcagtgattcaacattttataggcagtcagaaggacatagtgtgatggacaccttggctgtggccctacgggtggctgaagaggccattgaggaagcaatttccaaagcagaggcatatggggacagcctggacaagcaaaatgaggccagttacctgcgggaccacaaggaggagctaactgaggaactggccacgacaatcctgcagaagattatacgaaaacagaagagcaaaagtgagcagcaagtggaagaagagccaggatggccacatccccagagttgcagcacaaaggtggcagatgaggggacctcagcatcccctggaggctaccgtgctcccgctgccctctggaggtcccagtctgccttctcaatcactggagaagaagccctgaagacccctccagtggaggctccatcgaggcagccaagggaccaaggccaacacccgagagcagagtctgctctgcccagctggaagagtgtggacaggctggatgaaacaaacctggccccagttttgcagagccccgacgggaactgggtggccctgaaggatggcgctccaccccccacccgactactggccaaacctaagagcgggacgtttcaggccctggaggtggcctccagtgtggcatctgcctacgatgagatgggctccgatagcgaggaagactttgactggagtgaggccttgagcaagctgtgtcccaggtcccgggccctgcccaggaacccccagcctcagcccacacaggcccagagctctgaccaaggccccatagctgcctccccatcctctgcactctcccccaaccctgaggccatgtgctctgactcggagacctcctccgcaggctcttcccgagaagttgggcaccaggccagactgtcctggttgcagaggaaggcccccaggaaccctgcagctgagaagatgcgcttgcatggagagctggacgtgaacttcaacccccagttggccagcagggagacctcggacagcagcgagccggaggaggccccccacaccacagaccggcgggccaggaggtggagaagagcccgactgggctcagaagagccaagcaaagaaccatcttcccccagcgcccagctccgggatctagacacacatcaggtgtcggatgatttatcagagacagacatcagcaatgaggctcgggatccccagactctcacagacaccacagaggagaaacggagaaacaggctgtacgagttagcaatgaaaatgagtgaaaaggagacttcttcaggggaggatcaggagtctgagcccaagacagaatctgagaaccagaaggaaagtctgtcctctgaagacaacagccagagtgtccaggaagagctgaagaagaagttttctgctgtttctctctgcaacatctccacagaagtcctgaaagtcatcaatgccacagaggagttgatagcaggatctacagggccctgggagtccccacaagtccctcctgacagacagaaggggatgtttcctcgtgggacagaccaagtgagactggatgagcagctgacttccctggaagaaaatgtatacctggcagcaggcactgtgtatggactggagacccagctgactgagctagaagatgccgcccgctgcatccacagtggcactgatgagacccatctggcggatctggaggaccaggtggccacggctgcagcccaagtccaccatgctgaactccagatttcagatattgagagccggatttcagccctgaccattgcaggattaaacatagcaccatgtgtgcgcttcacaagaagacgggatcagaagcaaaggacccaggtacaaaccatagatacatcaaggcagcaaaggaggaaactgcctgctccaccggtgaaagctgaaaaaattgagacatcttcagtgactaccattaaaacatttaaccacaacttcattctccaaggctcctcaacaaacaggactaaggaaaggaaaggcaccaccaaggatttgatggagcctgctctggagtcagctgtgatgtactgacaccatggaattccactgccagtgacccactgcctccggccgtacacgacagtgccttgacccaacagccatcgagtactgtatgtatttccacctgaggagaaggcctggggaggccacagtgcaccattgcacagggctgtcctgatacctcatccagaaagccgtctcagacttcagcactgcggtcttgcccactctctgccttaggctcccaggggaatccaagacagaaaatgaagacactggcttccaacagcagcgctccatgtttaagatacatattttccctgtttgctttgctactgtatgttgactttaagatctttttttaaatacatttgattcagctagtattccatgtcaacaatttgtccaaaggaaaactgctggagggaggtggagggaggaaggtgggaattattatttaatacatcattaatgcttattaatctctcacaagcatctttgtcttgcaaatcctaagggaaaagcaagtccctgcagtgagcactagggacagtctaatttggggattgctcaaccatcaagactgcaggtctcccttcagccacctccttcctgctaaaagcttagcctaccacactaccagtcattcccatcgctttgcaatcacaagccacaggatgagaagttctgactcactcatgccatgcccagggctatctgaaacaatgtctcattaagaatttagggttcttccatgggcttactgacagttgcccagatctgaaggggaaagggtcttgagaaagaccatcactggctcaactttagggcactgtccagagtcaacatgatgtggtttagcagtgatcacatctaaacaaagtttaggtaaatgaattatcgcagagaaaaaccacatgagaaaatttttgtactccaaatttacttcccaataaatattcagcaaagtagtaaaatgaccttaaagataaaaatgattagggaatagccttagaaaatttataggtataaaaaattcaaggacaaactgtgcatttaatggacacaagaattgactctaactccatgtctgtggtttctttgaacccatatcaaatgtatgactatttagagtgtttataagagataatggaactgaactttcactcaattaattgggcattaacaaccttcttttatgtttgttcctgatatagtctgaatcttaggaagaaggtaaaagaaaggaggcaagagaatagttatgatgaatatgtgttaagtgcctgctctgaaggaggcaatgttcttctcatttgaatccttatggcaaccttattcaataggttttcccatatttcagatttaataactgaaggccagagagattaatttgccaaagccacacctttatgctaattatgattggaatgcatcacaaaagcctaactctgttgttttcaacctctacgttattttgctgctatgtgcatttccagatctgattttctgctaacttgtgtgctatgatccactcctgatgggggtctacattaatcttccagtactccttgctgatgctgtgttatgtgtcatctaacagaaatgactcctttgaaataagtaaatctttggctttttgttctgttggtgtgattcaaagcaaaacaaacaaacaaaaacaaattttaagaacacaacaaaaaagatttgacttccgaatagaatgttttctttaagaggcatgaaaagcaactattgttgtgttacagtgttaaaaatattcagttttctttgacaaaaatgtgtactgtgtaagccttgcaaacaaaaaacaacaaaaaagaagcagcagcagcagcctgctgtgtggcatctgaacttttataaaggtttccttgtgccaaataagtgcaaagatttaatttactattaaaaaccataagcatatgttatagttccagaagaattattttgtcatcaagtgattttgatctttagtgtcaatatttatatttagattaatttttataaatgaaaatattttaatggtttaagaaaatgaggacaacaggataatatctttgatgacttctgaaagttatgcttcccttcatgttatatgcacattgccaagaattactgtcaagagaaatgataagtaaaagtcatttatgaaaataaa

SEQ ID NO: 13308 - DNA, 2981 bp, Homo sapiens
  source 1..2981: mol_type = unassigned DNA
ctgcggctgcggttctggcagccgagcccccgcggtgctgcagcccagctttagcgcgcagaccgacccgcgccccttcttcgccgccggcagcctctaatccacgcggcgcgttgcggcaggtgccctgggcgtactgaggcgcggtggcctgagcccggccgccatcgatgaccccggtcgcggacttgcttcaggctggccaccccccgtcttgtttcatcatctgtgttgagtaaccatggggaggaagctggacctgtctggtttgactgatgatgaaacagagcatgttcttcaggtggttcaaagagacttcaatcttcgcaaaaaagaagaagaacgactaagtgagctgaagcagaagctggatgaggaaggcagcaagtgcagcatcctctcgaagcaccagcagtttgtggagcactgctgcatgcgctgctgctcgcccttcaccttcctcgtcaacaccaagcgccagtgtggagattgcaaattcaatgtctgcaagagctgctgctcctaccagaagcacgaaaaggcctgggtctgctgcgtctgccagcaagcgaggcttctgagggcccaatctctggaatggttctacaataatgtgaagagccgcttcaagcgctttggcagtgccaaggttctgaagaacctgtacaggaagcaccggctggagagtggcgcgtgcttcgacattctaggaggaagcctttttgagtcaaacctggagaatgaaggaagcatttctggcagtgattcaacattttataggcagtcagaaggacatagtgtgatggacaccttggctgtggccctacgggtggctgaagaggccattgaggaagcaatttccaaagcagaggcatatggggacagcctggacaagcaaaatgaggccagttacctgcgggaccacaaggaggagctaactgaggaactggccacgacaatcctgcagaagattatacgaaaacagaagagcaaaagtgagcagcaagtggaagaagagccaggatggccacatccccagagttgcagcacaaaggtggcagatgaggggacctcagcatcccctggaggctaccgtgctcccgctgccctctggaggtcccagtctgccttctcaatcactggagaagaagccctgaagacccctccagtggaggctccatcgaggcagccaagggaccaaggccaacacccgagagcagagtctgctctgcccagctggaagagtgtggacaggctggatgaaacaaacctggccccagttttgcagagccccgacgggaactgggtggccctgaaggatggcgctccaccccccacccgactactggccaaacctaagagcgggacgtttcaggccctggaggtggcctccagtgtggcatctgcctacgatgagatgggctccgatagcgaggaagactttgactggagtgaggccttgagcaagctgtgtcccaggtcccgggccctgcccaggaacccccagcctcagcccacacaggcccagagctctgaccaaggccccatagctgcctccccatcctctgcactctcccccaaccctgaggccatgtgctctgactcggagacctcctccgcaggctcttcccgagaagttgggcaccaggccagactgtcctggttgcagaggaaggcccccaggaaccctgcagctgagaagatgcgcttgcatggagagctggacgtgaacttcaacccccagttggccagcagggagacctcggacagcagcgagccggaggaggccccccacaccacagaccggcgggccaggaggtggagaagagcccgactgggctcagaagagccaagcaaagaaccatcttcccccagcgcccagctccgggatctagacacacatcaggtgtcggatgatttatcagagacagacatcagcaatgaggctcgggatccccagactctcacagacaccacagaggagaaacggagaaacaggctgtacgagttagcaatgaaaatgagtgaaaaggagacttcttcaggggaggatcaggagtctgagcccaagacagaatctgagaaccagaaggaaagtctgtcctctgaagacaacagccagagtgtccaggaagagctgaagaaggtatacctggcagcaggcactgtgtatggactggagacccagctgactgagctagaagatgccgcccgctgcatccacagtggcactgatgagacccatctggcggatctggaggaccaggtggccacggctgcagcccaagtccaccatgctgaactccagatttcagatattgagagccggatttcagccctgaccattgcaggattaaacatagcaccatgtgtgcgcttcacaagaagacgggatcagaagcaaaggacccaggtacaaaccatagatacatcaaggcagcaaaggaggaaactgcctgctccaccggtgaaagctgaaaaaattgagacatcttcagtgactaccattaaaacatttaaccacaacttcattctccaaggctcctcaacaaacaggactaaggaaaggaaaggcaccaccaaggatttgatggagcctgctctggagtcagctgtgatgtactgacaccatggaattccactgccagtgacccactgcctccggccgtacacgacagtgccttgacccaacagccatcgagtactgtatgtatttccacctgaggagaaggcctggggaggccacagtgcaccattgcacagggctgtcctgatacctcatccagaaagccgtctcagacttcagcactgcggtcttgcccactctctgccttaggctcccaggggaatccaagacagaaaatgaagacactggcttccaacagcagcgctccatgtttaagatacatattttccctgtttgctttgctactgtatgttgactttaagatctttttttaaatacatttgattcagctagt

SEQ ID NO: 13309 - DNA, 3144 bp, Homo sapiens
  source 1..3144: mol_type = unassigned DNA
cctgggcgtactgaggcgcggtggcctgagcccggccgccatcgatgaccccggtcgcggacttgcttcaggctggccaccccccgtcttgtttcatcatctgtgttgagtaaccatggggaggaagctggacctgtctggtttgactgatgatgaaacagagcatgttcttcaggtggttcaaagagacttcaatcttcgcaaaaaagaagaagaacgactaagtgagctgaagcagaagctggatgaggaaggcagcaagtgcagcatcctctcgaagcaccagcagtttgtggagcactgctgcatgcgctgctgctcgcccttcaccttcctcgtcaacaccaagcgccagtgtggagattgcaaattcaatgtctgcaagagctgctgctcctaccagaagcacgaaaaggcctgggtctgctgcgtctgccagcaagcgaggaggaagcctttttgagtcaaacctggagaatgaaggaagcatttctggcagtgattcaacattttataggcagtcagaaggacatagtgtgatggacaccttggctgtggccctacgggtggctgaagaggccattgaggaagcaatttccaaagcagaggcatatggggacagcctggacaagcaaaatgaggccagttacctgcgggaccacaaggaggagctaactgaggaactggccacgacaatcctgcagaagattatacgaaaacagaagagcaaaagtgagcagcaagtggaagaagagccaggatggccacatccccagagttgcagcacaaaggtggcagatgaggggacctcagcatcccctggaggctaccgtgctcccgctgccctctggaggtcccagtctgccttctcaatcactggagaagaagccctgaagacccctccagtggaggctccatcgaggcagccaagggaccaaggccaacacccgagagcagagtctgctctgcccagctggaagagtgtggacaggctggatgaaacaaacctggccccagttttgcagagccccgacgggaactgggtggccctgaaggatggcgctccaccccccacccgactactggccaaacctaagagcgggacgtttcaggccctggaggtggcctccagtgtggcatctgcctacgatgagatgggctccgatagcgaggaagactttgactggagtgaggccttgagcaagctgtgtcccaggtcccgggccctgcccaggaacccccagcctcagcccacacaggcccagagctctgaccaaggccccatagctgcctccccatcctctgcactctcccccaaccctgaggccatgtgctctgactcggagacctcctccgcaggctcttcccgagaagttgggcaccaggccagactgtcctggttgcagaggaaggcccccaggaaccctgcagctgagaagatgcgcttgcatggagagctggacgtgaacttcaacccccagttggccagcagggagacctcggacagcagcgagccggaggaggccccccacaccacagaccggcgggccaggaggtggagaagagcccgactgggctcagaagagccaagcaaagaaccatcttcccccagcgcccagctccgggatctagacacacatcaggtgtcggatgatttatcagagacagacatcagcaatgaggctcgggatccccagactctcacagacaccacagaggagaaacggagaaacaggctgtacgagttagcaatgaaaatgagtgaaaaggagacttcttcaggggaggatcaggagtctgagcccaagacagaatctgagaaccagaaggaaagtctgtcctctgaagacaacagccagagtgtccaggaagagctgaagaagaagttttctgctgtttctctctgcaacatctccacagaagtcctgaaagtcatcaatgccacagaggagttgatagcaggatctacagggccctgggagtccccacaagtccctcctgacagacagaaggggatgtttcctcgtgggacagaccaagtgagactggatgagcagctgacttccctggaagaaaatgtatacctggcagcaggcactgtgtatggactggagacccagctgactgagctagaagatgccgcccgctgcatccacagtggcactgatgagacccatctggcggatctggaggaccaggtggccacggctgcagcccaagtccaccatgctgaactccagatttcagatattgagagccggatttcagccctgaccattgcaggattaaacatagcaccatgtgtgcgcttcacaagaagacgggatcagaagcaaaggacccaggtacaaaccatagatacatcaaggcagcaaaggaggaaactgcctgctccaccggtgaaagctgaaaaaattgagacatcttcagtgactaccattaaaacatttaaccacaacttcattctccaaggctcctcaacaaacaggactaaggaaaggaaaggcaccaccaaggatttgatggagcctgctctggagtcagctgtgatgtactgacaccatggaattccactgccagtgacccactgcctccggccgtacacgacagtgccttgacccaacagccatcgagtactgtatgtatttccacctgaggagaaggcctggggaggccacagtgcaccattgcacagggctgtcctgatacctcatccagaaagccgtctcagacttcagcactgcggtcttgcccactctctgccttaggctcccaggggaatccaagacagaaaatgaagacactggcttccaacagcagcgctccatgtttaagatacatattttccctgtttgctttgctactgtatgttgactttaagatctttttttaaatacatttgattcagctagtattccatgtcaacaatttgtccaaaggaaaactgctggagggaggtggagggaggaaggtgggaattattatttaatacatcattaatgcttattaatctctcacaagcatctttgtcttgcaaatcctaagggaaaagcaagtccctgcagtgagcactagggacagtctaatttggggattgctcaaccatcaagactgcaggtctcccttcagccacctccttcctgc

SEQ ID NO: 13310 - DNA, 3244 bp, Homo sapiens
  source 1..3244: mol_type = unassigned DNA
cctgggcgtactgaggcgcggtggcctgagcccggccgccatcgatgaccccggtcgcggacttgcttcaggctggccaccccccgtcttgtttcatcatctgtgttgagtaaccatggggaggaagctggacctgtctggtttgactgatgatgaaacagagcatgttcttcaggtggttcaaagagacttcaatcttcgcaaaaaagaagaagaacgactaagtgagctgaagcagaagctggatgaggaaggcagcaagtgcagcatcctctcgaagcaccagcagtttgtggagcactgctgcatgcgctgctgctcgcccttcaccttcctcgtcaacaccaagcgccagtgtggagattgcaaattcaatgtctgcaagagctgctgctcctaccagaagcacgaaaaggcctgggtctgctgcgtctgccagcaagcgaggcttctgagggcccaatctctggaatggttctacaataatgtgaagagccgcttcaagcgctttggcagtgccaaggttctgaagaacctgtacaggaagcaccggctggagagtggcgcgtgcttcgacattctaggaggaagcctttttgagtcaaacctggagaatgaaggaagcatttctggcagtgattcaacattttataggcagtcagaaggacatagtgtgatggacaccttggctgtggccctacgggtggctgaagaggccattgaggaagcaatttccaaagcagaggcatatggggacagcctggacaagcaaaatgaggccagttacctgcgggaccacaaggaggagctaactgaggaactggccacgacaatcctgcagaagattatacgaaaacagaagagcaaaagtgagcagcaagtggaagaagagccaggatggccacatccccagagttgcagcacaaaggtggcagatgaggggacctcagcatcccctggaggctaccgtgctcccgctgccctctggaggtcccagtctgccttctcaatcactggagaagaagccctgaagacccctccagtggaggctccatcgaggcagccaagggaccaaggccaacacccgagagcagagtctgctctgcccagctggaagagtgtggacaggctggatgaaacaaacctggccccagttttgcagagccccgacgggaactgggtggccctgaaggatggcgctccaccccccacccgactactggccaaacctaagagcgggacgtttcaggccctggaggtggcctccagtgtggcatctgcctacgatgagatgggctccgatagcgaggaagactttgactggagtgaggccttgagcaagctgtgtcccaggtcccgggccctgcccaggaacccccagcctcagcccacacaggcccagagctctgaccaaggccccatagctgcctccccatcctctgcactctcccccaaccctgaggccatgtgctctgactcggagacctcctccgcaggctcttcccgagaagttgggcaccaggccagactgtcctggttgcagaggaaggcccccaggaaccctgcagctgagaagatgcgcttgcatggagagctggacgtgaacttcaacccccagttggccagcagggagacctcggacagcagcgagccggaggaggccccccacaccacagaccggcgggccaggaggtggagaagagcccgactgggctcagaagagccaagcaaagaaccatcttcccccagcgcccagctccgggatctagacacacatcaggtgtcggatgatttatcagagacagacatcagcaatgaggctcgggatccccagactctcacagacaccacagaggagaaacggagaaacaggctgtacgagttagcaatgaaaatgagtgaaaaggagacttcttcaggggaggatcaggagtctgagcccaagacagaatctgagaaccagaaggaaagtctgtcctctgaagacaacagccagagtgtccaggaagagctgaagaagaagtcctgaaagtcatcaatgccacagaggagttgatagcaggatctacagggccctgggagtccccacaagtccctcctgacagacagaaggggatgtttcctcgtgggacagaccaagtgagactggatgagcagctgacttccctggaagaaaatgtatacctggcagcaggcactgtgtatggactggagacccagctgactgagctagaagatgccgcccgctgcatccacagtggcactgatgagacccatctggcggatctggaggaccaggtggccacggctgcagcccaagtccaccatgctgaactccagatttcagatattgagagccggatttcagccctgaccattgcaggattaaacatagcaccatgtgtgcgcttcacaagaagacgggatcagaagcaaaggacccaggtacaaaccatagatacatcaaggcagcaaaggaggaaactgcctgctccaccggtgaaagctgaaaaaattgagacatcttcagtgactaccattaaaacatttaaccacaacttcattctccaaggctcctcaacaaacaggactaaggaaaggaaaggcaccaccaaggatttgatggagcctgctctggagtcagctgtgatgtactgacaccatggaattccactgccagtgacccactgcctccggccgtacacgacagtgccttgacccaacagccatcgagtactgtatgtatttccacctgaggagaaggcctggggaggccacagtgcaccattgcacagggctgtcctgatacctcatccagaaagccgtctcagacttcagcactgcggtcttgcccactctctgccttaggctcccaggggaatccaagacagaaaatgaagacactggcttccaacagcagcgctccatgtttaagatacatattttccctgtttgctttgctactgtatgttgactttaagatctttttttaaatacatttgattcagctagtattccatgtcaacaatttgtccaaaggaaaactgctggagggaggtggagggaggaaggtgggaattattatttaatacatcattaatgcttattaatctctcacaagcatctttgtcttgcaaatcctaagggaaaagcaagtccctgcagtgagcactagggacagtctaatttggggattgctcaaccatcaagactgcaggtctcccttcagccacctccttcctgc

SEQ ID NO: 13311 - DNA, 961 bp, Homo sapiens
  source 1..961: mol_type = unassigned DNA
agcttcatcccgggttcctcctcatactccctttccgccacagccgccagacttgaagaggtagggagccaatcccagggggctctacatagatttggaggtaacggcggaggatcttcctgatggacgcgtggagcggaaagattcagtggtgggaaccccaagacctgcggctttttggagcacttgctccccttcttgttccttaatttactgacgtcttggcagggtcttgtttcatcatctgtgttgagtaaccatggggaggaagctggacctgtctggtttgactgatgatgaaacagagcatgttcttcaggtggttcaaagagacttcaatcttcgcaaaaaagaagaagaacgactaagtgagctgaagcagaagctggatgaggaaggcagcaagtgcagcatcctctcgaagcaccagcagtttgtggagcactgctgcatgcgctgctgctcgcccttcaccttcctcgtcaacaccaagcgccagtgtggagattgcaaattcaatgtctgcaagagctgctgctcctaccagaagcacgaaaaggcctgggtctgctgcgtctgccagcaagcgaggcttctgagggcccaatctctggaatggttctacaataatgtgaagagccgcttcaagcgctttggcagtgccaaggttctgaagaacctgtacaggaagcaccggctggagagtggcgcgtgcttcgacattctaggaggaagcctttttgagtcaaacctggagaatgaaggaagcatttctggcagtgattcaacattttataggcagtcagaaggtaaagttgcttaagagtttacagctactgggaagttggagtaatagaaacacctacaggtacaggtactgccagggtcccccagatgcattgttaccccagatgcaactatctactactgtgtgtgagtctccctgggtcacttattattg

SEQ ID NO: 13312 - DNA, 4153 bp, Homo sapiens
  source 1..4153: mol_type = unassigned DNA
attttgatgtcctcaactgcagtaggagccatctccctgacttgttctgacctgacttgttccctaccgtaatctcctggatgcagaagtccctcaggcccatcgggcttctgagggcccaatctctggaatggttctacaataatgtgaagagccgcttcaagcgctttggcagtgccaaggttctgaagaacctgtacaggaagcaccggctggagagtggcgcgtgcttcgacattctaggaggaagcctttttgagtcaaacctggagaatgaaggaagcatttctggcagtgattcaacattttataggcagtcagaaggacatagtgtgatggacaccttggctgtggccctacgggtggctgaagaggccattgaggaagcaatttccaaagcagaggcatatggggacagcctggacaagcaaaatgaggccagttacctgcgggaccacaaggaggagctaactgaggaactggccacgacaatcctgcagaagattatacgaaaacagaagagcaaaagtgagcagcaagtggaagaagagccaggatggccacatccccagagttgcagcacaaaggtggcagatgaggggacctcagcatcccctggaggctaccgtgctcccgctgccctctggaggtcccagtctgccttctcaatcactggagaagaagccctgaagacccctccagtggaggctccatcgaggcagccaagggaccaaggccaacacccgagagcagagtctgctctgcccagctggaagagtgtggacaggctggatgaaacaaacctggccccagttttgcagagccccgacgggaactgggtggccctgaaggatggcgctccaccccccacccgactactggccaaacctaagagcgggacgtttcaggccctggaggtggcctccagtgtggcatctgcctacgatgagatgggctccgatagcgaggaagactttgactggagtgaggccttgagcaagctgtgtcccaggtcccgggccctgcccaggaacccccagcctcagcccacacaggcccagagctctgaccaaggccccatagctgcctccccatcctctgcactctcccccaaccctgaggccatgtgctctgactcggagacctcctccgcaggctcttcccgagaagttgggcaccaggccagactgtcctggttgcagaggaaggcccccaggaaccctgcagctgagaagatgcgcttgcatggagagctggacgtgaacttcaacccccagttggccagcagggagacctcggacagcagcgagccggaggaggccccccacaccacagaccggcgggccaggaggtggagaagagcccgactgggctcagaagagccaagcaaagaaccatcttcccccagcgcccagctccgggatctagacacacatcaggtgtcggatgatttatcagagacagacatcagcaatgaggctcgggatccccagactctcacagacaccacagaggagaaacggagaaacaggctgtacgagttagcaatgaaaatgagtgaaaaggagacttcttcaggggaggatcaggagtctgagcccaagacagaatctgagaaccagaaggaaagtctgtcctctgaagacaacagccagagtgtccaggaagagctgaagaagaagttttctgctgtttctctctgcaacatctccacagaagtcctgaaagtcatcaatgccacagaggagttgatagcaggatctacagggccctgggagtccccacaagtccctcctgacagacagaaggggatgtttcctcgtgggacagaccaagtgagactggatgagcagctgacttccctggaagaaaatgtatacctggcagcaggcactgtgtatggactggagacccagctgactgagctagaagatgccgcccgctgcatccacagtggcactgatgagacccatctggcggatctggaggaccaggtggccacggctgcagcccaagtccaccatgctgaactccagatttcagatattgagagccggatttcagccctgaccattgcaggattaaacatagcaccatgtgtgcgcttcacaagaagacgggatcagaagcaaaggacccaggtacaaaccatagatacatcaaggcagcaaaggaggaaactgcctgctccaccggtgaaagctgaaaaaattgagacatcttcagtgactaccattaaaacatttaaccacaacttcattctccaaggctcctcaacaaacaggactaaggaaaggaaaggcaccaccaaggatttgatggagcctgctctggagtcagctgtgatgtactgacaccatggaattccactgccagtgacccactgcctccggccgtacacgacagtgccttgacccaacagccatcgagtactgtatgtatttccacctgaggagaaggcctggggaggccacagtgcaccattgcacagggctgtcctgatacctcatccagaaagccgtctcagacttcagcactgcggtcttgcccactctctgccttaggctcccaggggaatccaagacagaaaatgaagacactggcttccaacagcagcgctccatgtttaagatacatattttccctgtttgctttgctactgtatgttgactttaagatctttttttaaatacatttgattcagctagtattccatgtcaacaatttgtccaaaggaaaactgctggagggaggtggagggaggaaggtgggaattattatttaatacatcattaatgcttattaatctctcacaagcatctttgtcttgcaaatcctaagggaaaagcaagtccctgcagtgagcactagggacagtctaatttggggattgctcaaccatcaagactgcaggtctcccttcagccacctccttcctgctaaaagcttagcctaccacactaccagtcattcccatcgctttgcaatcacaagccacaggatgagaagttctgactcactcatgccatgcccagggctatctgaaacaatgtctcattaagaatttagggttcttccatgggcttactgacagttgcccagatctgaaggggaaagggtcttgagaaagaccatcactggctcaactttagggcactgtccagagtcaacatgatgtggtttagcagtgatcacatctaaacaaagtttaggtaaatgaattatcgcagagaaaaaccacatgagaaaatttttgtactccaaatttacttcccaataaatattcagcaaagtagtaaaatgaccttaaagataaaaatgattagggaatagccttagaaaatttataggtataaaaaattcaaggacaaactgtgcatttaatggacacaagaattgactctaactccatgtctgtggtttctttgaacccatatcaaatgtatgactatttagagtgtttataagagataatggaactgaactttcactcaattaattgggcattaacaaccttcttttatgtttgttcctgatatagtctgaatcttaggaagaaggtaaaagaaaggaggcaagagaatagttatgatgaatatgtgttaagtgcctgctctgaaggaggcaatgttcttctcatttgaatccttatggcaaccttattcaataggttttcccatatttcagatttaataactgaaggccagagagattaatttgccaaagccacacctttatgctaattatgattggaatgcatcacaaaagcctaactctgttgttttcaacctctacgttattttgctgctatgtgcatttccagatctgattttctgctaacttgtgtgctatgatccactcctgatgggggtctacattaatcttccagtactccttgctgatgctgtgttatgtgtcatctaacagaaatgactcctttgaaataagtaaatctttggctttttgttctgttggtgtgattcaaagcaaaacaaacaaacaaaaacaaattttaagaacacaacaaaaaagatttgacttccgaatagaatgttttctttaagaggcatgaaaagcaactattgttgtgttacagtgttaaaaatattcagttttctttgacaaaaatgtgtactgtgtaagccttgcaaac

SEQ ID NO: 13313 - DNA, 622 bp, Homo sapiens
  source 1..622: mol_type = unassigned DNA
agaaacgagcagtagcactgtgctgttccttcactctggtattgctctctacccagagccctgtgtcttttcttaagaagactacctggcttatcctctgtctgggcttttctggccatgaggacatggagtgaagattttggagctctgtgccctgtgtcctggcgtttaattatttctcaagacacgtgagctaaatttgagtagaagagcttggcagaaagaaaaccaccagttacggcttctgagggcccaatctctggaatggttctacaataatgtgaagagccgcttcaagcgctttggcagtgccaaggttctgaagaacctgtacaggaagcaccggctggagagtggcgcgtgcttcgacattctaggaggaagcctttttgagtcaaacctggagaatgaaggaagcatttctggcagtgattcaacattttataggcagtcagaaggacatagtgtgatggacaccttggctgtggccctacgggtggctgaagaggccattgaggaagcaatttccaaagcagaggcatatggggacagcctggacaagcaaaatgaggccagttacctgcgggaccacaaggaggagctaactgaggaactggccacg

SEQ ID NO: 13314 - DNA, 4877 bp, Homo sapiens
  source 1..4877: mol_type = unassigned DNA
gccgacgccgctgcgctcccgcctcctgtcggttcccgggttcccgctgcggctgcggttctggcagccgagcccccgcggtgctgcagcccagctttagcgcgcagaccgacccgcgccccttcttcgccgccggcagcctctaatccacgcggcgcgttgcggcaggtgccctgggcgtactgaggcgcggtggcctgagcccggccgccatcgatgaccccggtcgcggacttgcttcaggctggccaccccccgtcttgtttcatcatctgtgttgagtaaccatggggaggaagctggacctgtctggtttgactgatgatgaaacagagcatgttcttcaggtggttcaaagagacttcaatcttcgcaaaaaagaagaagaacgactaagtgagctgaagcagaagctggatgaggaaggcagcaagtgcagcatcctctcgaagcaccagcagtttgtggagcactgctgcatgcgctgctgctcgcccttcaccttcctcgtcaacaccaagcgccagtgtggagattgcaaattcaatgtctgcaagagctgctgctcctaccagaagcacgaaaaggcctgggtctgctgcgtctgccagcaagcgaggaggaagcctttttgagtcaaacctggagaatgaaggaagcatttctggcagtgattcaacattttataggcagtcagaaggacatagtgtgatggacaccttggctgtggccctacgggtggctgaagaggccattgaggaagcaatttccaaagcagaggcatatggggacagcctggacaagcaaaatgaggccagttacctgcgggaccacaaggaggagctaactgaggaactggccacgacaatcctgcagaagattatacgaaaacagaagagcaaaagtgagcagcaagtggaagaagagccaggatggccacatccccagagttgcagcacaaaggtggcagatgaggggacctcagcatcccctggaggctaccgtgctcccgctgccctctggaggtcccagtctgccttctcaatcactggagaagaagccctgaagacccctccagtggaggctccatcgaggcagccaagggaccaaggccaacacccgagagcagagtctgctctgcccagctggaagagtgtggacaggctggatgaaacaaacctggccccagttttgcagagccccgacgggaactgggtggccctgaaggatggcgctccaccccccacccgactactggccaaacctaagagcgggacgtttcaggccctggaggtggcctccagtgtggcatctgcctacgatgagatgggctccgatagcgaggaagactttgactggagtgaggccttgagcaagctgtgtcccaggtcccgggccctgcccaggaacccccagcctcagcccacacaggcccagagctctgaccaaggccccatagctgcctccccatcctctgcactctcccccaaccctgaggccatgtgctctgactcggagacctcctccgcaggctcttcccgagaagttgggcaccaggccagactgtcctggttgcagaggaaggcccccaggaaccctgcagctgagaagatgcgcttgcatggagagctggacgtgaacttcaacccccagttggccagcagggagacctcggacagcagcgagccggaggaggccccccacaccacagaccggcgggccaggaggtggagaagagcccgactgggctcagaagagccaagcaaagaaccatcttcccccagcgcccagctccgggatctagacacacatcaggtgtcggatgatttatcagagacagacatcagcaatgaggctcgggatccccagactctcacagacaccacagaggagaaacggagaaacaggctgtacgagttagcaatgaaaatgagtgaaaaggagacttcttcaggggaggatcaggagtctgagcccaagacagaatctgagaaccagaaggaaagtctgtcctctgaagacaacagccagagtgtccaggaagagctgaagaagaagttttctgctgtttctctctgcaacatctccacagaagtcctgaaagtcatcaatgccacagaggagttgatagcaggatctacagggccctgggagtccccacaagtccctcctgacagacagaaggggatgtttcctcgtgggacagaccaagtgagactggatgagcagctgacttccctggaagaaaatgtatacctggcagcaggcactgtgtatggactggagacccagctgactgagctagaagatgccgcccgctgcatccacagtggcactgatgagacccatctggcggatctggaggaccaggtggccacggctgcagcccaagtccaccatgctgaactccagatttcagatattgagagccggatttcagccctgaccattgcaggattaaacatagcaccatgtgtgcgcttcacaagaagacgggatcagaagcaaaggacccaggtacaaaccatagatacatcaaggcagcaaaggaggaaactgcctgctccaccggtgaaagctgaaaaaattgagacatcttcagtgactaccattaaaacatttaaccacaacttcattctccaaggctcctcaacaaacaggactaaggaaaggaaaggcaccaccaaggatttgatggagcctgctctggagtcagctgtgatgtactgacaccatggaattccactgccagtgacccactgcctccggccgtacacgacagtgccttgacccaacagccatcgagtactgtatgtatttccacctgaggagaaggcctggggaggccacagtgcaccattgcacagggctgtcctgatacctcatccagaaagccgtctcagacttcagcactgcggtcttgcccactctctgccttaggctcccaggggaatccaagacagaaaatgaagacactggcttccaacagcagcgctccatgtttaagatacatattttccctgtttgctttgctactgtatgttgactttaagatctttttttaaatacatttgattcagctagtattccatgtcaacaatttgtccaaaggaaaactgctggagggaggtggagggaggaaggtgggaattattatttaatacatcattaatgcttattaatctctcacaagcatctttgtcttgcaaatcctaagggaaaagcaagtccctgcagtgagcactagggacagtctaatttggggattgctcaaccatcaagactgcaggtctcccttcagccacctccttcctgctaaaagcttagcctaccacactaccagtcattcccatcgctttgcaatcacaagccacaggatgagaagttctgactcactcatgccatgcccagggctatctgaaacaatgtctcattaagaatttagggttcttccatgggcttactgacagttgcccagatctgaaggggaaagggtcttgagaaagaccatcactggctcaactttagggcactgtccagagtcaacatgatgtggtttagcagtgatcacatctaaacaaagtttaggtaaatgaattatcgcagagaaaaaccacatgagaaaatttttgtactccaaatttacttcccaataaatattcagcaaagtagtaaaatgaccttaaagataaaaatgattagggaatagccttagaaaatttataggtataaaaaattcaaggacaaactgtgcatttaatggacacaagaattgactctaactccatgtctgtggtttctttgaacccatatcaaatgtatgactatttagagtgtttataagagataatggaactgaactttcactcaattaattgggcattaacaaccttcttttatgtttgttcctgatatagtctgaatcttaggaagaaggtaaaagaaaggaggcaagagaatagttatgatgaatatgtgttaagtgcctgctctgaaggaggcaatgttcttctcatttgaatccttatggcaaccttattcaataggttttcccatatttcagatttaataactgaaggccagagagattaatttgccaaagccacacctttatgctaattatgattggaatgcatcacaaaagcctaactctgttgttttcaacctctacgttattttgctgctatgtgcatttccagatctgattttctgctaacttgtgtgctatgatccactcctgatgggggtctacattaatcttccagtactccttgctgatgctgtgttatgtgtcatctaacagaaatgactcctttgaaataagtaaatctttggctttttgttctgttggtgtgattcaaagcaaaacaaacaaacaaaaacaaattttaagaacacaacaaaaaagatttgacttccgaatagaatgttttctttaagaggcatgaaaagcaactattgttgtgttacagtgttaaaaatattcagttttctttgacaaaaatgtgtactgtgtaagccttgcaaacaaaaaacaacaaaaaagaagcagcagcagcagcctgctgtgtggcatctgaacttttataaaggtttccttgtgccaaataagtgcaaagatttaatttactattaaaaaccataagcatatgttatagttccagaagaattattttgtcatcaagtgattttgatctttagtgtcaatatttatatttagattaatttttataaatgaaaatattttaatggtttaagaaaatgaggacaacaggataatatctttgatgacttctgaaagttatgcttcccttcatgttatatgcacattgccaagaattactgtcaagagaaatgataagtaaaagtcatttatg

SEQ ID NO: 13315 - DNA, 4635 bp, Homo sapiens
  source 1..4635: mol_type = unassigned DNA
agaaacgagcagtagcactgtgctgttccttcactctggtattgctctctacccagagccctgtgtcttttcttaagaagactacctggcttatcctctgtctgggcttttctggccatgaggacatggagtgaagattttggagctctgtgccctgtgtcctggcgtttaattatttctcaagacacgtgagctaaatttgagtagaagagcttggcagaaagaaaaccaccagttacggcttctgagggcccaatctctggaatggttctacaataatgtgaagagccgcttcaagcgctttggcagtgccaaggttctgaagaacctgtacaggaagcaccggctggagagtggcgcgtgcttcgacattctaggaggaagcctttttgagtcaaacctggagaatgaaggaagcatttctggcagtgattcaacattttataggcagtcagaaggacatagtgtgatggacaccttggctgtggccctacgggtggctgaagaggccattgaggaagcaatttccaaagcagaggcatatggggacagcctggacaagcaaaatgaggccagttacctgcgggaccacaaggaggagctaactgaggaactggccacgacaatcctgcagaagattatacgaaaacagaagagcaaaagtgagcagcaagtggaagaagagccaggatggccacatccccagagttgcagcacaaaggtggcagatgaggggacctcagcatcccctggaggctaccgtgctcccgctgccctctggaggtcccagtctgccttctcaatcactggagaagaagccctgaagacccctccagtggaggctccatcgaggcagccaagggaccaaggccaacacccgagagcagagtctgctctgcccagctggaagagtgtggacaggctggatgaaacaaacctggccccagttttgcagagccccgacgggaactgggtggccctgaaggatggcgctccaccccccacccgactactggccaaacctaagagcgggacgtttcaggccctggaggtggcctccagtgtggcatctgcctacgatgagatgggctccgatagcgaggaagactttgactggagtgaggccttgagcaagctgtgtcccaggtcccgggccctgcccaggaacccccagcctcagcccacacaggcccagagctctgaccaaggccccatagctgcctccccatcctctgcactctcccccaaccctgaggccatgtgctctgactcggagacctcctccgcaggctcttcccgagaagttgggcaccaggccagactgtcctggttgcagaggaaggcccccaggaaccctgcagctgagaagatgcgcttgcatggagagctggacgtgaacttcaacccccagttggccagcagggagacctcggacagcagcgagccggaggaggccccccacaccacagaccggcgggccaggaggtggagaagagcccgactgggctcagaagagccaagcaaagaaccatcttcccccagcgcccagctccgggatctagacacacatcaggtgtcggatgatttatcagagacagacatcagcaatgaggctcgggatccccagactctcacagacaccacagaggagaaacggagaaacaggctgtacgagttagcaatgaaaatgagtgaaaaggagacttcttcaggggaggatcaggagtctgagcccaagacagaatctgagaaccagaaggaaagtctgtcctctgaagacaacagccagagtgtccaggaagagctgaagaagaagttttctgctgtttctctctgcaacatctccacagaagtcctgaaagtcatcaatgccacagaggagttgatagcaggatctacagggccctgggagtccccacaagtccctcctgacagacagaaggggatgtttcctcgtgggacagaccaagtgagactggatgagcagctgacttccctggaagaaaatgtatacctggcagcaggcactgtgtatggactggagacccagctgactgagctagaagatgccgcccgctgcatccacagtggcactgatgagacccatctggcggatctggaggaccaggtggccacggctgcagcccaagtccaccatgctgaactccagatttcagatattgagagccggatttcagccctgaccattgcaggattaaacatagcaccatgtgtgcgcttcacaagaagacgggatcagaagcaaaggacccaggtacaaaccatagatacatcaaggcagcaaaggaggaaactgcctgctccaccggtgaaagctgaaaaaattgagacatcttcagtgactaccattaaaacatttaaccacaacttcattctccaaggctcctcaacaaacaggactaaggaaaggaaaggcaccaccaaggatttgatggagcctgctctggagtcagctgtgatgtactgacaccatggaattccactgccagtgacccactgcctccggccgtacacgacagtgccttgacccaacagccatcgagtactgtatgtatttccacctgaggagaaggcctggggaggccacagtgcaccattgcacagggctgtcctgatacctcatccagaaagccgtctcagacttcagcactgcggtcttgcccactctctgccttaggctcccaggggaatccaagacagaaaatgaagacactggcttccaacagcagcgctccatgtttaagatacatattttccctgtttgctttgctactgtatgttgactttaagatctttttttaaatacatttgattcagctagtattccatgtcaacaatttgtccaaaggaaaactgctggagggaggtggagggaggaaggtgggaattattatttaatacatcattaatgcttattaatctctcacaagcatctttgtcttgcaaatcctaagggaaaagcaagtccctgcagtgagcactagggacagtctaatttggggattgctcaaccatcaagactgcaggtctcccttcagccacctccttcctgctaaaagcttagcctaccacactaccagtcattcccatcgctttgcaatcacaagccacaggatgagaagttctgactcactcatgccatgcccagggctatctgaaacaatgtctcattaagaatttagggttcttccatgggcttactgacagttgcccagatctgaaggggaaagggtcttgagaaagaccatcactggctcaactttagggcactgtccagagtcaacatgatgtggtttagcagtgatcacatctaaacaaagtttaggtaaatgaattatcgcagagaaaaaccacatgagaaaatttttgtactccaaatttacttcccaataaatattcagcaaagtagtaaaatgaccttaaagataaaaatgattagggaatagccttagaaaatttataggtataaaaaattcaaggacaaactgtgcatttaatggacacaagaattgactctaactccatgtctgtggtttctttgaacccatatcaaatgtatgactatttagagtgtttataagagataatggaactgaactttcactcaattaattgggcattaacaaccttcttttatgtttgttcctgatatagtctgaatcttaggaagaaggtaaaagaaaggaggcaagagaatagttatgatgaatatgtgttaagtgcctgctctgaaggaggcaatgttcttctcatttgaatccttatggcaaccttattcaataggttttcccatatttcagatttaataactgaaggccagagagattaatttgccaaagccacacctttatgctaattatgattggaatgcatcacaaaagcctaactctgttgttttcaacctctacgttattttgctgctatgtgcatttccagatctgattttctgctaacttgtgtgctatgatccactcctgatgggggtctacattaatcttccagtactccttgctgatgctgtgttatgtgtcatctaacagaaatgactcctttgaaataagtaaatctttggctttttgttctgttggtgtgattcaaagcaaaacaaacaaacaaaaacaaattttaagaacacaacaaaaaagatttgacttccgaatagaatgttttctttaagaggcatgaaaagcaactattgttgtgttacagtgttaaaaatattcagttttctttgacaaaaatgtgtactgtgtaagccttgcaaacaaaaaacaacaaaaaagaagcagcagcagcagcctgctgtgtggcatctgaacttttataaaggtttccttgtgccaaataagtgcaaagatttaatttactattaaaaaccataagcatatgttatagttccagaagaattattttgtcatcaagtgattttgatctttagtgtcaatatttatatttagattaatttttataaatgaaaatattttaatggtttaagaaaatgaggacaacaggataatatctttgatgacttctgaaagttatgcttcccttcatgttatatgcacattgccaagaattactgtcaagagaaatgataagtaaaagtcatttatg

SEQ ID NO: 13316 - DNA, 2061 bp, Homo sapiens
  source 1..2061: mol_type = unassigned DNA
cggagtagcaggagtttgcaagctgcttcattaacttggagccagtggaatgtctgggatcgtctgtgatttggaaaccggtggcagaatgttcccgcgtttctggtcctcatcagtcagaaaatgagttccgaggtgagctgttaaatcagaggtggacacacggaggcaaggccagcagctgcaggacctcaagacacctgggcagacactgcaagatgagcttagaaaatgaagacaagcgagctcgcacccgatccaaggccctgcgaggacccccagagaccacagctgcagacctcagctgccccaccccaggatgcacaggctcagggcacgtccggggcaagtactccaggcaccgaagtttacagagctgccccctggccaagaagaggaagctggagggcgctgaggctgagcacctggtgtccaagaggaagtcacaccccctgaagctggctctggacgagggctatggtgtggacagcgacggcagtgaggacactgaggtgaaggacgcctctgtttcggatgaatcggaaggaactctggagggggccgaggctgagacgtcaggacaggacgagattcatcgccccgagacagctgaagatccttcaagagctgagaagcgtgagatcaagtgtccaacaccaggctgtgatggcactggccacgttaccgggttgtaccctcaccaccgcagcctttctggctgtccccacaaggataggatccccccagagatcttagccatgcatgagaacgtgctgaagtgccccactcctggctgcacaggccagggtcacgtgaacagcaaccgcaacacgcacagaagtttgtctgggtgtcccattgctgccgccgaaaaattagccaaatcccatgagaagcagcagccgcagacaggagatccttccaagagtagctccaattccgatcggatcctcaggcccatgtgcttcgtgaagcagctcgaggtccctccatatgggagctaccggcccaacgtggcccccgccacacccagggccaacttggccaaggagctggagaagttctccaaggtcacctttgactacgcaagtttcgatgctcaggtttttggcaaacgcatgcttgccccaaagattcagaccagcgaaacctcacctaaagcctttcaatgctttgactactcgcaggacgccgaggctgcacacatggctgccactgccatcctgaacctctccacgcgctgctgggagatgcctgagaacctcagcacgaagccacaggacctccccagcaagtctgtggatatcgaggtagacgaaaatggaaccctggacttgagcatgcacaaacaccgcaaacgagaaaatgctttccccagcagcagcagctgcagcagcagccccggtgtgaagtctcccgacgcctcccagcgccacagcagcaccagcgcccccagcagctccatgacctctccccagtccagccaggcctcccgccaggacgagtgggaccggcccctggactacaccaagcctagccgcctgagagaggaggaacctgaggagtcagagccagcagcccattcttttgcttcttctgaagcagatgaccaggaagtgtcggaagagaattttgaggagcggaagtatccgggggaagtcaccctgaccaactttaagctgaagtttctctccaaggacataaagaaggagctgctcacctgtcccacccctggctgtgacggcagcggccacatcaccgggaactacgcctcccaccgcaggtgccccacgcccggctgtgacggctctggccacatcacagggaactacgcttcacaccggagcttgtccggctgccctcgtgcaaagaaaagtggagtcaaggtggcacccaccaaggacgacaaggaggaccccgagctgatgaagtacgttgggccatgctggctctttcattgcattgcggaattgagattttcgtgtgttttataatgtaaaaaaactcctactagattcccttttcattaatacaacgggtcacctaactgaccaacgccaa

SEQ ID NO: 13317 - DNA, 5535 bp, Homo sapiens
  source 1..5535: mol_type = unassigned DNA
ctccgccagcccgtgccaccgctgctaatgagagcagtcattaagtaaatgagacgtcgcctttagctggcttaggagttcgcacactaaggggagaagatatttaattgaaacccgcacgcaggcttccccacatgtgaccgctgtacgggaggcagctgccttccctctcctcccccagtccaccctgcaccccccatgtaaatttcatgattgctttccgtgatgtcattttgaaagaggacagacaatagctgtggggaaagaaaatgagttccgaggtgagctgttaaatcagaggtggacacacggaggcaaggccagcagctgcaggacctcaagacacctgggcagacactgcaagatgagcttagaaaatgaagacaagcgagctcgcacccgatccaaggccctgcgaggacccccagagaccacagctgcagacctcagctgccccaccccaggatgcacaggctcagggcacgtccggggcaagtactccaggcaccgaagtttacagagctgccccctggccaagaagaggaagctggagggcgctgaggctgagcacctggtgtccaagaggaagtcacaccccctgaagctggctctggacgagggctatggtgtggacagcgacggcagtgaggacactgaggtgaaggacgcctctgtttcggatgaatcggaaggaactctggagggggccgaggctgagacgtcaggacaggacgagattcatcgccccgagacagctgaaggaaggagccccgtcaagtcccattttggatccaaccccatcggcagcgccactgcctcctccaagggcagctacagcagctaccagggaatcatcgcaacttctctcctgaacttgggtcaaattgctgaagagaccctggtggaagaggacttgggccaggcggccaagccaggtcctggcattgtgcacctgcttcaggaggctgcagagggagctgccagcgaggagggtgaaaagggcctcttcatccagccagaggatgccgaggaggtcgtcgaagtcaccaccgagcgctcccaggacctgtgtccccagtccctggaggatgcagccagtgaggagtccagcaagcagaaaggcatcctgagtcacgaagaggaggacgaggaggaggaggaggaggaagaggaggaggaggaggatgaagaagaggaagaggaagaggaggaggaagaggaagaggaggaggaggaagaggaagaggaggaggaagaggaagaggaagaggaggaggaggaggcagctcctgatgtgatctttcaggaagacacctctcacacctctgcccagaaggcccctgagctccggggcccagaatcacccagtcccaagcctgagtactctgttattgtggaggtccgctcggatgatgacaaggacgaggacacccactcccggaagtcaacagtcactgacgagtcggagatgcaggacatgatgacccggggaaacctgggcctcctggagcaggccatcgccctgaaggctgaacaggtgcgcacagtctgcgagccgggctgcccgcctgccgagcagagccagctgggcctgggagagccagggaaggcagcaaagcccctggacactgtgcggaagagttactacagtaaagatccttcaagagctgagaagcgtgagatcaagtgtccaacaccaggctgtgatggcactggccacgttaccgggttgtaccctcaccaccgcagcctttctggctgtccccacaaggataggatccccccagagatcttagccatgcatgagaacgtgctgaagtgccccactcctggctgcacaggccagggtcacgtgaacagcaaccgcaacacgcacagaagtttgtctgggtgtcccattgctgccgccgaaaaattagccaaatcccatgagaagcagcagccgcagacaggagatccttccaagagtagctccaattccgatcggatcctcaggcccatgtgcttcgtgaagcagctcgaggtccctccatatgggagctaccggcccaacgtggcccccgccacacccagggccaacttggccaaggagctggagaagttctccaaggtcacctttgactacgcaagtttcgatgctcaggtttttggcaaacgcatgcttgccccaaagattcagaccagcgaaacctcacctaaagcctttcaatgctttgactactcgcaggacgccgaggctgcacacatggctgccactgccatcctgaacctctccacgcgctgctgggagatgcctgagaacctcagcacgaagccacaggacctccccagcaagtctgtggatatcgaggtagacgaaaatggaaccctggacttgagcatgcacaaacaccgcaaacgagaaaatgctttccccagcagcagcagctgcagcagcagccccggtgtgaagtctcccgacgcctcccagcgccacagcagcaccagcgcccccagcagctccatgacctctccccagtccagccaggcctcccgccaggacgagtgggaccggcccctggactacaccaagcctagccgcctgagagaggaggaacctgaggagtcagagccagcagcccattcttttgcttcttctgaagcagatgaccaggaagtgtcggaagagaattttgaggagcggaagtatccgggggaagtcaccctgaccaactttaagctgaagtttctctccaaggacataaagaaggagctgctcacctgtcccacccctggctgtgacggcagcggccacatcaccgggaactacgcctcccaccgcagcctctctggttgccctcttgctgacaagagcctcagaaacctcatggctgcccactctgctgacctcaagtgccccacgcccggctgtgacggctctggccacatcacagggaactacgcttcacaccggagcttgtccggctgccctcgtgcaaagaaaagtggagtcaaggtggcacccaccaaggacgacaaggaggaccccgagctgatgaagtgcccagttccaggctgtgtggggctcggtcacatcagcgggaaatacgcctctcacaggagcgcatccggctgcccactggccgcccgcaggcagaaggaagggtccctcaatggctcgtcattctcctggaagtccctgaagaatgaaggaccgacctgccccaccccgggctgtgacggctctggccacgccaatgggagtttcctcacccaccggagtttgtcaggctgtcccagagcaacctttgctggaaagaagggaaaactgtcaggggatgaggtcctcagtccaaagttcaagactagcgacgtgttggagaatgatgaggagatcaagcagctgaaccaggagatccgagacctgaacgagtccaactcggagatggaggctgccatggtgcagctgcagtcccagatctcctccatggagaagaacctgaagaacatcgaggaggagaacaagctcattgaggagcagaatgaagccctgtttctggagctgtccggcctgagccaggccctcatccaaagtctcgccaatatccgccttccgcacatggagccaatatgcgaacagaatttcgatgcctatgtgagcaccctcaccgacatgtactccaaccaggacccggagaacaaggacctcctggagagcatcaagcaggctgtgaggggcatccaggtctaggccgtgtggtacccagaagtgtcccagcccaccacaccgtttacctccctcgccctgccccgcaccgtggggatgcccaactcacagtgacttcccgtttggggcccggtgtggccgcgggcgggtttatccaaagggatggctggaaattggccgctcccacgaggctccctccaggcttggggccgtggtggccctatctgtgtgcataggggcactgaagaattacaaagtgatttatttttgttttctgaaagaaatctgaagagcagctcaaagtctccagtggaagctcatggacaaggttctcagggaagttttggagtttgcaaccacagtattcctttgtctgtcgaggctgggagggtagccgtgagcgtggtgggtgggtggtgtgagtggcatcttggcctggaggacacgcctggggcagcgtgtctgtgctcagtgagggccgatgaagaaagtgcgttttctgttttcatttaattcagttttgtgttaagggtggaacaaagctctgttctagagggaaagttaggaataggcctcccagaggatactccagacagttgacaagcatcgcagcccctgtcaggtcaaggaattttaacctgggagactcctgaaaatcagcctaatgtctgggggcagctggcgctgaggctgtgcagatgtgtatggccttgggtcacagctccctactggggctgcagcctttagaccctgggtctgggatccacgtctagggaccactctggcttctgtgcatccacccaggcccccgacccatcactgccacattctccgggtcatggccgagcttgacctctgcatccatggtgacggaggtggcaatgacatcatcaaggtcagagggtaaattcctaacaggagaccacaaaggtttcacttcttttagatccatccaatatgcgaaaaaagggtacattttaatttaatgtgttaaaaacacaatgtccctaccgtgtaaatagaatccaagtcaattgtgactgcaattccaagttagtatttaaaaatagagaaattgcacttcctggaaaaaattaaaaagtagttagtttaattattctgtaaattatttaattttgtcaagatgtaagtatttatattcacagcctcttatgttaacgtttgctatttatttaacatttttatttattaattttatactatttcaactagaccccacaccagggcaccctaagaggggaaaaaagtgaattcaaagcaaaaataactatttgactataatataggccacaaaaaatcttgatataactcctagttataattttgatgcaaccaagttattttttatatattttgttatttattcttttaataatggaatttttttaaaaagtattttgtaactgaggaattttgataatttggggattttgttttcccttggtctaatggagagaaagacattttggttttctttttccattttgggttccttttgtttcaggcacggataacagcaaatggaattctgtatttattattatttaagtgtagcgcagatgtgtgtgcttgggcgtgtttctcgtgtcgcgtttgcgtgtcggctcttgcggtggagtcctgttgctgtgagggagtgctggccgcaggcagcctcgagtcaccgccaggctcacaggctgtgccacccgtccctccgacagctccaatactgtgaccctccttcctcaggaagcgcgttgaacccacagcactccgtggtgtgtttgcagggtgatttcctaataaaagtccactctgactgtgaa

SEQ ID NO: 13318 - DNA, 624 bp, Homo sapiens
  source 1..624: mol_type = unassigned DNA
gaccgctgtacgggaggcagctgccttccctctcctcccccagtccaccctgcaccccccatgtaaatttcatgattgctttccgtgatgtcattttgaaagaggacagacaatagctgtggggaaagaaaatgagttccgaggtgagctgttaaatcagaggtggacacacggaggcaaggccagcagctgcaggacctcaagacacctgggcagacactgcaagatgctctccagcaaggatccagctgtgactcagggcatggctcaaggacagtgatggcgtagggtgtaggcaaggagggctatgcagttgtagtgggaacttcatttgggggtgcttgtgttttactctcaaaacccaacctttttcttttgaatctggtggcgagaatgtacattttaatgggtctgttatagacaacttgctgagcacctccgctcatattttggctcccgcaggattatcagtgctctgctgatccatgttggagcctggggcacaaggaagagtcagtaatatggatcctgtctttatttaaggttttggtatcttgtttattaggggttttttgcatcatgttgatgtttctaaatattgaattaaaatattatttatcttga

SEQ ID NO: 13319 - DNA, 2140 bp, Homo sapiens
  source 1..2140: mol_type = unassigned DNA
ctccgccagcccgtgccaccgctgctaatgagagcagtcattaagtaaatgagacgtcgcctttagctggcttaggagttcgcacactaaggggagaagatatttaattgaaacccgcacgcaggcttccccacatgtgaccgctgtacgggaggcagctgccttccctctcctcccccagtccaccctgcaccccccatgtaaatttcatgattgctttccgtgatgtcattttgaaagaggacagacaatagctgtggggaaagaaaatgagttccgaggtgagctgttaaatcagaggtggacacacggaggcaaggccagcagctgcaggacctcaagacacctgggcagacactgcaagatgagcttagaaaatgaagacaagcgagctcgcacccgatccaaggccctgcgaggacccccagagaccacagctgcagacctcagctgccccaccccaggatgcacaggctcagggcacgtccggggcaagtactccaggcaccgaagtttacagagctgccccctggccaagaagaggaagctggagggcgctgaggctgagcacctggtgtccaagaggaagtcacaccccctgaagctggctctggacgagggctatggtgtggacagcgacggcagtgaggacactgaggtgaaggacgcctctgtttcggatgaatcggaaggaactctggagggggccgaggctgagacgtcaggacaggacgagattcatcgccccgagacagctgaagatccttcaagagctgagaagcgtgagatcaagtgtccaacaccaggctgtgatggcactggccacgttaccgggttgtaccctcaccaccgcagcctttctggctgtccccacaaggataggatccccccagagatcttagccatgcatgagaacgtgctgaagtgccccactcctggctgcacaggccagggtcacgtgaacagcaaccgcaacacgcacagaagtttgtctgggtgtcccattgctgccgccgaaaaattagccaaatcccatgagaagcagcagccgcagacaggagatccttccaagagtagctccaattccgatcggatcctcaggcccatgtgcttcgtgaagcagctcgaggtccctccatatgggagctaccggcccaacgtggcccccgccacacccagggccaacttggccaaggagctggagaagttctccaaggtcacctttgactacgcaagtttcgatgctcaggtttttggcaaacgcatgcttgccccaaagattcagaccagcgaaacctcacctaaagcctttcaatgctttgactactcgcaggacgccgaggctgcacacatggctgccactgccatcctgaacctctccacgcgctgctgggagatgcctgagaacctcagcacgaagccacaggacctccccagcaagtctgtggatatcgaggtagacgaaaatggaaccctggacttgagcatgcacaaacaccgcaaacgagaaaatgctttccccagcagcagcagctgcagcagcagccccggtgtgaagtctcccgacgcctcccagcgccacagcagcaccagcgcccccagcagctccatgacctctccccagtccagccaggcctcccgccaggacgagtgggaccggcccctggactacaccaagcctagccgcctgagagaggaggaacctgaggagtcagagccagcagcccattcttttgcttcttctgaagcagatgaccaggaagtgtcggaagagaattttgaggagcggaagtatccgggggaagtcaccctgaccaactttaagctgaagtttctctccaaggacataaagaaggagctgctcacctgtcccacccctggctgtgacggcagcggccacatcaccgggaactacgcctcccaccgcaggtgccccacgcccggctgtgacggctctggccacatcacagggaactacgcttcacaccggagcttgtccggctgccctcgtgcaaagaaaagtggagtcaaggtggcacccaccaaggacgacaaggaggaccccgagctgatgaagtacgttgggccatgctggctctttcattgcattgcggaattgagattttcgtgtgttttataa

SEQ ID NO: 13320 - DNA, 5614 bp, Homo sapiens
  source 1..5614: mol_type = unassigned DNA
ctccgccagcccgtgccaccgctgctaatgagagcagtcattaagtaaatgagacgtcgcctttagctggcttaggagttcgcacactaaggggagaagatatttaattgaaacccgcacgcaggcttccccacatgtgaccgctgtacgggaggcagctgccttccctctcctcccccagtccaccctgcaccccccatgtaaatttcatgattgctttccgtgatgtcattttgaaagaggacagacaatagctgtggggaaagaaaatgagttccgaggtgagctgttaaatcagaggtggacacacggaggcaaggccagcagctgcaggacctcaagacacctgggcagacactgcaagatgagcttagaaaatgaagacaagcgagctcgcacccgatccaaggccctgcgaggacccccagagaccacagctgcagacctcagctgccccaccccaggatgcacaggctcagggcacgtccggggcaagtactccaggcaccgaagtttacagagctgccccctggccaagaagaggaagctggagggcgctgaggctgagcacctggtgtccaagaggaagtcacaccccctgaagctggctctggacgagggctatggtgtggacagcgacggcagtgaggacactgaggtgaaggacgcctctgtttcggatgaatcggaaggaactctggagggggccgaggctgagacgtcaggacaggacgagattcatcgccccgagacagctgaaggaaggagccccgtcaagtcccattttggatccaaccccatcggcagcgccactgcctcctccaagggcagctacagcagctaccagggaatcatcgcaacttctctcctgaacttgggtcaaattgctgaagagaccctggtggaagaggacttgggccaggcggccaagccaggtcctggcattgtgcacctgcttcaggaggctgcagagggagctgccagcgaggagggtgaaaagggcctcttcatccagccagaggatgccgaggaggtcgtcgaagtcaccaccgagcgctcccaggacctgtgtccccagtccctggaggatgcagccagtgaggagtccagcaagcagaaaggcatcctgagtcacgaagaggaggacgaggaggaggaggaggaggaagaggaggaggaggaggatgaagaagaggaagaggaagaggaggaggaagaggaagaggaggaggaggaagaggaagaggaggaggaagaggaagaggaagaggaggaggaggaggcagctcctgatgtgatctttcaggaagacacctctcacacctctgcccagaaggcccctgagctccggggcccagaatcacccagtcccaagcctgagtactctgttattgtggaggtccgctcggatgatgacaaggacgaggacacccactcccggaagtcaacagtcactgacgagtcggagatgcaggacatgatgacccggggaaacctgggcctcctggagcaggccatcgccctgaaggctgaacaggtgcgcacagtctgcgagccgggctgcccgcctgccgagcagagccagctgggcctgggagagccagggaaggcagcaaagcccctggacactgtgcggaagagttactacagtaaagatccttcaagagctgagaagcgtgagatcaagtgtccaacaccaggctgtgatggcactggccacgttaccgggttgtaccctcaccaccgcagcctttctggctgtccccacaaggataggatccccccagagatcttagccatgcatgagaacgtgctgaagtgccccactcctggctgcacaggccagggtcacgtgaacagcaaccgcaacacgcacagaagtttgtctgggtgtcccattgctgccgccgaaaaattagccaaatcccatgagaagcagcagccgcagacaggagatccttccaagagtagctccaattccgatcggatcctcaggcccatgtgcttcgtgaagcagctcgaggtccctccatatgggagctaccggcccaacgtggcccccgccacacccagggccaacttggccaaggagctggagaagttctccaaggtcacctttgactacgcaagtttcgatgctcaggtttttggcaaacgcatgcttgccccaaagattcagaccagcgaaacctcacctaaagcctttcaatccaaacctttcccaaaggcctcttcccccaggcacagcccctccagtagttatgtgaggagcacttcatcctcttctgcaggctttgactactcgcaggacgccgaggctgcacacatggctgccactgccatcctgaacctctccacgcgctgctgggagatgcctgagaacctcagcacgaagccacaggacctccccagcaagtctgtggatatcgaggtagacgaaaatggaaccctggacttgagcatgcacaaacaccgcaaacgagaaaatgctttccccagcagcagcagctgcagcagcagccccggtgtgaagtctcccgacgcctcccagcgccacagcagcaccagcgcccccagcagctccatgacctctccccagtccagccaggcctcccgccaggacgagtgggaccggcccctggactacaccaagcctagccgcctgagagaggaggaacctgaggagtcagagccagcagcccattcttttgcttcttctgaagcagatgaccaggaagtgtcggaagagaattttgaggagcggaagtatccgggggaagtcaccctgaccaactttaagctgaagtttctctccaaggacataaagaaggagctgctcacctgtcccacccctggctgtgacggcagcggccacatcaccgggaactacgcctcccaccgcagcctctctggttgccctcttgctgacaagagcctcagaaacctcatggctgcccactctgctgacctcaagtgccccacgcccggctgtgacggctctggccacatcacagggaactacgcttcacaccggagcttgtccggctgccctcgtgcaaagaaaagtggagtcaaggtggcacccaccaaggacgacaaggaggaccccgagctgatgaagtgcccagttccaggctgtgtggggctcggtcacatcagcgggaaatacgcctctcacaggagcgcatccggctgcccactggccgcccgcaggcagaaggaagggtccctcaatggctcgtcattctcctggaagtccctgaagaatgaaggaccgacctgccccaccccgggctgtgacggctctggccacgccaatgggagtttcctcacccaccggagtttgtcaggctgtcccagagcaacctttgctggaaagaagggaaaactgtcaggggatgaggtcctcagtccaaagttcaagactagcgacgtgttggagaatgatgaggagatcaagcagctgaaccaggagatccgagacctgaacgagtccaactcggagatggaggctgccatggtgcagctgcagtcccagatctcctccatggagaagaacctgaagaacatcgaggaggagaacaagctcattgaggagcagaatgaagccctgtttctggagctgtccggcctgagccaggccctcatccaaagtctcgccaatatccgccttccgcacatggagccaatatgcgaacagaatttcgatgcctatgtgagcaccctcaccgacatgtactccaaccaggacccggagaacaaggacctcctggagagcatcaagcaggctgtgaggggcatccaggtctaggccgtgtggtacccagaagtgtcccagcccaccacaccgtttacctccctcgccctgccccgcaccgtggggatgcccaactcacagtgacttcccgtttggggcccggtgtggccgcgggcgggtttatccaaagggatggctggaaattggccgctcccacgaggctccctccaggcttggggccgtggtggccctatctgtgtgcataggggcactgaagaattacaaagtgatttatttttgttttctgaaagaaatctgaagagcagctcaaagtctccagtggaagctcatggacaaggttctcagggaagttttggagtttgcaaccacagtattcctttgtctgtcgaggctgggagggtagccgtgagcgtggtgggtgggtggtgtgagtggcatcttggcctggaggacacgcctggggcagcgtgtctgtgctcagtgagggccgatgaagaaagtgcgttttctgttttcatttaattcagttttgtgttaagggtggaacaaagctctgttctagagggaaagttaggaataggcctcccagaggatactccagacagttgacaagcatcgcagcccctgtcaggtcaaggaattttaacctgggagactcctgaaaatcagcctaatgtctgggggcagctggcgctgaggctgtgcagatgtgtatggccttgggtcacagctccctactggggctgcagcctttagaccctgggtctgggatccacgtctagggaccactctggcttctgtgcatccacccaggcccccgacccatcactgccacattctccgggtcatggccgagcttgacctctgcatccatggtgacggaggtggcaatgacatcatcaaggtcagagggtaaattcctaacaggagaccacaaaggtttcacttcttttagatccatccaatatgcgaaaaaagggtacattttaatttaatgtgttaaaaacacaatgtccctaccgtgtaaatagaatccaagtcaattgtgactgcaattccaagttagtatttaaaaatagagaaattgcacttcctggaaaaaattaaaaagtagttagtttaattattctgtaaattatttaattttgtcaagatgtaagtatttatattcacagcctcttatgttaacgtttgctatttatttaacatttttatttattaattttatactatttcaactagaccccacaccagggcaccctaagaggggaaaaaagtgaattcaaagcaaaaataactatttgactataatataggccacaaaaaatcttgatataactcctagttataattttgatgcaaccaagttattttttatatattttgttatttattcttttaataatggaatttttttaaaaagtattttgtaactgaggaattttgataatttggggattttgttttcccttggtctaatggagagaaagacattttggttttctttttccattttgggttccttttgtttcaggcacggataacagcaaatggaattctgtatttattattatttaagtgtagcgcagatgtgtgtgcttgggcgtgtttctcgtgtcgcgtttgcgtgtcggctcttgcggtggagtcctgttgctgtgagggagtgctggccgcaggcagcctcgagtcaccgccaggctcacaggctgtgccacccgtccctccgacagctccaatactgtgaccctccttcctcaggaagcgcgttgaacccacagcactccgtggtgtgtttgcagggtgatttcctaataaaagtccactctgactgtg

SEQ ID NO: 13321 - DNA, 2061 bp, Homo sapiens; identical to SEQ ID NO: 13316
  source 1..2061: mol_type = unassigned DNA

SEQ ID NO: 13322 - DNA, 5535 bp, Homo sapiens; identical to SEQ ID NO: 13317
  source 1..5535: mol_type = unassigned DNA

SEQ ID NO: 13323 - DNA, 624 bp, Homo sapiens; identical to SEQ ID NO: 13318
  source 1..624: mol_type = unassigned DNA

SEQ ID NO: 13324 - DNA, 2140 bp, Homo sapiens; identical to SEQ ID NO: 13319
  source 1..2140: mol_type = unassigned DNA

SEQ ID NO: 13325 - DNA, 5614 bp, Homo sapiens; identical to SEQ ID NO: 13320
  source 1..5614: mol_type = unassigned DNA

SEQ ID NO: 13326 - DNA, 7063 bp, Homo sapiens
  source 1..7063: mol_type = unassigned DNA
ggtgggtgcattttaattttttcattccctggactatgggttatgatatccatactcactgaagacaaaaagccaccttttctgcgtcttggtggcatgcatgtgtctcatcatcctttcaaacttgtggtggaacagggttttcttccctgtctgtgtattttgagccagcacagttaccaaaattgaacttgtctttcgcttgtgagcggttgtggtcattgtgagggcgggtcatgaggaggctgtagccaaggacgaggtgtgtgcggctgttgcctggacgtttgtccaatccacgttgacatttgagggatcacagcgtgtgaaaatgaactcagaggagaattggtgaattcctatccagtgggcatcttcaaaccctggtcgacggcggaagaatatcaggtcctgagatcacccacccggcgcggcaacagtgcagagtggccacatctggtggaagaagaaaaaaatgtagttattgaattcaatcaagtgtttgcatctttcaagctatcaacaaaattccatcaagaaaggttccagttggtctcacagacgtatggatatccgaggagccacctaaagatggagaaatcaaggcatagagagattaagtgactttgccacagtcacaagctggagaggaccaggagtagagcttagagcgagcccctgactctgggcctgcgtcctgccaggagtcacgctgcctccgttcctaggagagaagacttcctgtaagatggaggtggacaccgaggagaagcggcatcgcacgcggtccaaaggggttcgagttcccgtggaaccagccatacaagagctgttcagctgtcccacccctggctgtgacggcagtggtcatgtcagtggcaaatatgcaagacacagaagtgtatatggttgtcccttggcgaaaaaaagaaaaacacaagataaacagccccaggaacctgctcctaaacgaaagccatttgccgtgaaagcagacagctcctcagtggatgagtgtgacgacagtgatgggactgaggacatggatgagaaggaggaggatgagggggaggagtactccgaggacaatgatgagccaggggatgaggacgaggaggacgaggagggggaccgggaggaggaggaggagatcgaggaggaggatgaggacgatgacgaggatggagaagatgtggaggatgaagaagaggaagaggaggaggaggaggaggaggaagaggaagaagaaaacgaagaccatcaaatgaattgtcacaatactcgaataatgcaagacacagaaaaggatgataacaataatgacgaatatgacaattacgatgaactggtggccaagtcattgttaaacctcggcaaaatcgctgaggatgcagcctaccgggccaggactgagtcagaaatgaacagcaatacctccaatagtctggaagacgatagtgacaaaaacgaaaacctgggtcggaaaagtgagttgagtttagacttagacagtgatgttgttagagaaacagtggactcccttaaactattagcccaaggacacggtgttgtgctctcagaaaacatgaatgacagaaattatgcagacagcatgtcgcagcaagacagtagaaatatgaattacgtcatgttggggaagcccatgaacaacggactcatggaaaagatggtggaggagagcgatgaggaggtgtgtctgagcagtctggagtgtttgaggaatcagtgcttcgacctggccaggaagctcagtgagaccaacccgcaggagaggaatccgcagcagaacatgaacatccgtcagcatgtccggccagaagaggacttccccggaaggacgccggacagaaactactcggacatgctgaacctcatgcggctggaggagcagttgagcccccggtcgagagtgtttgccagctgtgcgaaggaggatgggtgtcatgagcgggacgacgataccacctctgtgaactcggacaggtctgaagaggtgttcgacatgaccaaggggaacctgaccctgctggagaaagccatcgctttggaaacggaaagagcaaaggccatgagggagaagatggccatggaagctgggaggagggacaatatgaggtcatatgaggaccagtctccgagacaacttcccggggaggacagaaagcctaaatccagtgacagccatgtcaaaaagccatactatggtaaagatccctcaagaacagaaaagaaagagagcaagtgtccaacccccgggtgtgatggaaccggccacgtaactgggctgtacccacatcaccgcagcctgtccggatgcccgcacaaagatagggtccctccagaaatccttgccatgcatgaaagtgtcctcaagtgccccactccgggctgcacggggcgcgggcatgtcaacagcaacaggaactcccaccgaagcctctccggatgcccgatcgctgcagcagagaaactggccaaggcacaggaaaagcaccagagctgcgacgtgtccaagtccagccaggcctcggaccgcgtgctcaggccaatgtgctttgtgaagcagctggagattcctcagtatggctacagaaacaatgtccccacaactacgccgcgttccaacctggccaaggagctcgagaaatattccaagacctcgtttgaatacaacagttacgacaaccatacttatggcaagcgagccatagctcccaaggtgcaaaccagggatatatcccccaaaggatatgatgatgcgaagcggtactgcaaggaccccagccccagcagcagcagcaccagcagctacgcgcccagcagcagcagcaacctgagctgcggcgggggcagcagcgccagcagcacgtgcagcaagagcagcttcgactacacgcacgacatggaggcggcccacatggcggccaccgccatcctcaacctgtccacgcgctgccgcgagatgccgcagaacctgagcaccaagccgcaggacctgtgcgccacgcggaaccctgacatggaggtggatgagaacgggaccctggacctcagcatgaacaagcagaggccgcgggacagctgctgccccatcctgacccctctggagcccatgtccccccagcagcaggcagtgatgaacaaccggtgtttccagctgggcgagggcgactgctgggacttgcccgtagactacaccaaaatgaaaccccggaggatagacgaggacgagtccaaagacattactccagaagacttggacccattccaggaggctctagaagaaagacggtatcccggggaggtgaccatcccaagtcccaaacccaagtaccctcagtgcaaggagagcaaaaaggacttaataactctgtctggctgccccctggcggacaaaagcattcgaagtatgctggccaccagctcccaagaactcaagtgccccacgcctggctgtgatggttctggacatatcaccggcaattatgcttctcatcggagcctttcaggttgcccaagagcaaagaaaagtggtatcaggatagcacagagcaaagaagataaagaagatcaagaacccatcaggtgtccggtccccgggtgcgacggccagggccacatcactgggaagtacgcgtcccatcgcagcgcctccgggtgccccttggcggccaagaggcagaaagacgggtacctgaatggctcccagttctcctggaagtcggtcaagacggaaggcatgtcctgccccacgccaggatgcgacggctcaggccacgtcagcggcagcttcctcacacaccgcagcttgtcaggatgcccgagagccacgtcagcgatgaagaaggcaaagctttctggagagcagatgctgaccatcaaacagcgggccagcaacggtatagaaaatgatgaagaaatcaaacagttagatgaagaaatcaaggagctaaatgaatccaattcccagatggaagccgatatgattaaactcagaactcagattaccacgatggagagcaacctgaagaccatcgaagaggagaacaaagtgattgagcagcagaacgagtctctcctccacgagctggcgaacctgagccagtctctgatccacagcctggctaacatccagctgccgcacatggatccaatcaatgaacaaaattttgatgcttacgtgactactttgacggaaatgtatacaaatcaagatcgttatcagagtccagaaaataaagccctactggaaaatataaagcaggctgtgagaggaattcaggtctgaacagctgctgtagtgatgaaactcttgcttaaaaaggatgcctcttgttttttgctgctgtaacttaccagaaagtgttctatatttatttctgtttgaatttgaaacagtgttatgcttacaagacttcataatgattttatgtcttgctttaaagatagtacctgcagaatagtttttgaatacacccacattttgtacgtttccatgtaagctgacatagtgttctgccatgtaatgtttatagctgctgatgtatgcacatttgggggtatatctatttctgaagaggtaagctgatcaaaataaatagagtgtaaattctttttaatgctttagtgattaaatgttttagtattttgaactgaaatggacacacaaacacacacacgcacacacagacccacagctttgaatgatcatgttgtggctgagcagccgctttttagacgttatcattttgcctcatgttggaggactttatggaatttaagaaatacattttgtgtgcatattgtttcatagcaagaattcgttgcaaaaatgctttatttttgaacaatgcttggaaatattatgtgacttttttgtttgtttgttttaggaggatggtgtatggtgggggcaataaatgaggttttttgcattccaaggaaatggcatatggattaactgtaagaaatgaaataagtaatttattgtaagacaacatcaagccatggaaacttggcagaagattcaaagcagcttaaacagcacttttaaattaactcctaagcgttacatggttgtgactatggaaactccagttaagacaggatcttatcagaggtggacaacgtgaagatttccttttccattttcaataaactttggaacaaccttctcgtatctcccctagagtttcgtgcccctctgaactgtctgttattgcaatgtagtttatcaacagaatttgtgtgttttcgatttaagctaaaagataatttaagaacatttatttccccttttcactttaaaaaattatgattattcctattattgttatgaaccttcttattttacatttgagggataaaggcaaatgatttgtgagtcttctagttactggaccgagttttctgctggatctggtgggaaggcagctcggtaaagtttccctcctgctccccccgcccgactttgactctgaatcagcatttggtcctattcagaggactcttaccacgacgtttctgttctacacttgggtggagaccagttgaccatagagcatttgcagagcctcattgtttgatttcttgtgactattctaagaatgaatgcaatcagattttaaaagtaactaaatatacttcagcacttttttgctttaaactagatcatcttagacttgtttataccttccagatttgattgttttactcccaatgactgcactatatgtatgcataagaccacttttgagcgctgtgttcccccttctgagtagtcctttgacgacgtgttgtgttttctgatgttgacttgagttccatttagtagcatctcttccttccatgtcttgatgttatgcaggaagtacagacgtactttaaatttttgttatgaaataaaaaaaagatgggttttgtaaaaataaaaaaaaaatatttttagcagaacaggacttacagggtcattgtccccacaatgtgccagtcgactatttgcacttaccttgtcctatatatccgtacggaggtgtgcaattcctcgtgtcagtagccttgtgacactgaacctggatggattatagaggagccctcacggctgatcaataatgttgcaaagggagactacagggatctcacgacgaatattctgatacaatactcaacctcggtatatatatatgtgtataaatatatgtatatcccagcggcactttatactgttcactgtacaaaagcttacagttttccacaaggactttaataactagctgggaaaagacgatgtaattatttcggggctctgcggaaccttctctgtacagcgccccctttctgttgtgctattggttgcagctgccatgctcagaatgcgttttgagagctgaagcaaggtgcttgcagtcacctgaggccgtccgtgtggcccagggccccagctgcctttagggcccccattgttcataacagcatatgcatttccccaccgcgttgtgtctgcagcttctttgccaatatagtaatgcttttagtagagtactagatagtatcagttttggattcttattgttatcacctatgtacaatggaaagggattttaagcacaaacctgctgctcatctaacgttggtacataatctcaaatcaaaagttatctgtgactattatatagggatcacaaaagtgtcacatattagaatgctgacctttcatatggattattgtgagtcatcagagtttattataacttattgttcatattcatttctaagttaatttaagtaatcatttattaagacagaattttgtataaactatttattgtgctctctgtggaactgaagtttgatttatttttgtactacacggcatgggtttgttgacactttaattttgctataaatgtgtggaatcacaagttgctgtgatacttcatttttaaattgtgaactttgtacaaattttgtcatgctggatgttaacacatcttactctaaataaacaaggtgttgccacatttgtagcacgaaggatctctaa

SEQ ID NO: 13327 - DNA, 3642 bp, Homo sapiens
  source 1..3642: mol_type = unassigned DNA
aagcgcctggaagcggaagctggacagacgaggagaggccttgggtgtgacatcaacggaacctgagggaagcaaaactcagcaaggacgcacccggtctgctggactggggctttggcctttcaggttgcccaagagcaaagaaaagtggtatcaggatagcacagagcaaagaagataaagaagatcaagaacccatcaggtgtccggtccccgggtgcgacggccagggccacatcactgggaagtacgcgtcccatcgcagcgcctccgggtgccccttggcggccaagaggcagaaagacgggtacctgaatggctcccagttctcctggaagtcggtcaagacggaaggcatgtcctgccccacgccaggatgcgacggctcaggccacgtcagcggcagcttcctcacacaccgcagcttgtcaggatgcccgagagccacgtcagcgatgaagaaggcaaagctttctggagagcagatgctgaccatcaaacagcgggccagcaacggtatagaaaatgatgaagaaatcaaacagttagatgaagaaatcaaggagctaaatgaatccaattcccagatggaagccgatatgattaaactcagaactcaggtaacaattaccacgatggagagcaacctgaagaccatcgaagaggagaacaaagtgattgagcagcagaacgagtctctcctccacgagctggcgaacctgagccagtctctgatccacagcctggctaacatccagctgccgcacatggatccaatcaatgaacaaaattttgatgcttacgtgactactttgacggaaatgtatacaaatcaagatcgttatcagagtccagaaaataaagccctactggaaaatataaagcaggctgtgagaggaattcaggtctgaacagctgctgtagtgatgaaactcttgcttaaaaaggatgcctcttgttttttgctgctgtaacttaccagaaagtgttctatatttatttctgtttgaatttgaaacagtgttatgcttacaagacttcataatgattttatgtcttgctttaaagatagtacctgcagaatagtttttgaatacacccacattttgtacgtttccatgtaagctgacatagtgttctgccatgtaatgtttatagctgctgatgtatgcacatttgggggtatatctatttctgaagaggtaagctgatcaaaataaatagagtgtaaattctttttaatgctttagtgattaaatgttttagtattttgaactgaaatggacacacaaacacacacacgcacacacagacccacagctttgaatgatcatgttgtggctgagcagccgctttttagacgttatcattttgcctcatgttggaggactttatggaatttaagaaatacattttgtgtgcatattgtttcatagcaagaattcgttgcaaaaatgctttatttttgaacaatgcttggaaatattatgtgacttttttgtttgtttgttttaggaggatggtgtatggtgggggcaataaatgaggttttttgcattccaaggaaatggcatatggattaactgtaagaaatgaaataagtaatttattgtaagacaacatcaagccatggaaacttggcagaagattcaaagcagcttaaacagcacttttaaattaactcctaagcgttacatggttgtgactatggaaactccagttaagacaggatcttatcagaggtggacaacgtgaagatttccttttccattttcaataaactttggaacaaccttctcgtatctcccctagagtttcgtgcccctctgaactgtctgttattgcaatgtagtttatcaacagaatttgtgtgttttcgatttaagctaaaagataatttaagaacatttatttccccttttcactttaaaaaattatgattattcctattattgttatgaaccttcttattttacatttgagggataaaggcaaatgatttgtgagtcttctagttactggaccgagttttctgctggatctggtgggaaggcagctcggtaaagtttccctcctgctccccccgcccgactttgactctgaatcagcatttggtcctattcagaggactcttaccacgacgtttctgttctacacttgggtggagaccagttgaccatagagcatttgcagagcctcattgtttgatttcttgtgactattctaagaatgaatgcaatcagattttaaaagtaactaaatatacttcagcacttttttgctttaaactagatcatcttagacttgtttataccttccagatttgattgttttactcccaatgactgcactatatgtatgcataagaccacttttgagcgctgtgttcccccttctgagtagtcctttgacgacgtgttgtgttttctgatgttgacttgagttccatttagtagcatctcttccttccatgtcttgatgttatgcaggaagtacagacgtactttaaatttttgttatgaaataaaaaaaagatgggttttgtaaaaataaaaaaaaaatatttttagcagaacaggacttacagggtcattgtccccacaatgtgccagtcgactatttgcacttaccttgtcctatatatccgtacggaggtgtgcaattcctcgtgtcagtagccttgtgacactgaacctggatggattatagaggagccctcacggctgatcaataatgttgcaaagggagactacagggatctcacgacgaatattctgatacaatactcaacctcggtatatatatatgtgtataaatatatgtatatcccagcggcactttatactgttcactgtacaaaagcttacagttttccacaaggactttaataactagctgggaaaagacgatgtaattatttcggggctctgcggaaccttctctgtacagcgccccctttctgttgtgctattggttgcagctgccatgctcagaatgcgttttgagagctgaagcaaggtgcttgcagtcacctgaggccgtccgtgtggcccagggccccagctgcctttagggcccccattgttcataacagcatatgcatttccccaccgcgttgtgtctgcagcttctttgccaatatagtaatgcttttagtagagtactagatagtatcagttttggattcttattgttatcacctatgtacaatggaaagggattttaagcacaaacctgctgctcatctaacgttggtacataatctcaaatcaaaagttatctgtgactattatatagggatcacaaaagtgtcacatattagaatgctgacctttcatatggattattgtgagtcatcagagtttattataacttattgttcatattcatttctaagttaatttaagtaatcatttattaagacagaattttgtataaactatttattgtgctctctgtggaactgaagtttgatttatttttgtactacacggcatgggtttgttgacactttaattttgctataaatgtgtggaatcacaagttgctgtgatacttcatttttaaattgtgaactttgtacaaattttgtcatgctggatgttaacacatcttactctaaataaacaaggtgttgccaca

SEQ ID NO: 13328 - DNA, 670 bp, Homo sapiens
  source 1..670: mol_type = unassigned DNA
gaagatcaagaacccatcaggtgtccggtccccgggtgcgacggccagggccacatcactgggaagtacgcgtcccatcgcagcgcctccgggtgccccttggcggccaagaggcagaaagacgggtacctgaatggctcccagttctcctggaagtcggtcaagacggaaggcatgtcctgccccacgccaggatgcgacggctcaggccacgtcagcggcagcttcctcacacaccgcagcttgtcaggatgcccgagagccacgtcagcgatgaagaaggcaaagctttctggagagcagatgctgaccatcaaacagcgggccagcaacggtatagaaaatgatgaagaaatcaaacagttagatgaagaaatcaaggagctaaatgaatccaattcccagatggaagccgatatgattaaactcagaactcagattaccacgatggagagcaacctgaagaccatcgaagaggagaacaaagtgattgagcagcagaacgagtctctcctccacgagctggcgaacctgagccagtctctgatccacagcctggctaacatccagctgccgcacatggaggatggtgtatggtgggggcaataaatgaggttttttgcattccaaggaaatggcatatggattaactgtaagaaatgaaataagt

SEQ ID NO: 13329 - DNA, 4850 bp, Homo sapiens
  source 1..4850: mol_type = unassigned DNA
tttctgcgtcttggtggcatgcatgtgtctcatcatcctttcaaacttgtggtggaacagggttttcttccctgtctgtgtattttgagccagcacagttaccaaaattgaacttgtctttcgcttgtgagcggttgtggtcattgtgagggcgggtcatgaggaggctgtagccaaggacgaggtgtgtgcggctgttgcctggacgtttgtccaatccacgttgacatttgagggatcacagcgtgtgaaaatgaactcagaggagaattggtgaattcctatccagtgggcatcttcaaaccctggtcgacggcggaagaatatcaggtcctgagatcacccacccggcgcggcaacagtgcagagtggccacatctggtggaagaagaaaaaaatgtagttattgaattcaatcaagtgtttgcatctttcaagctatcaacaaaattccatcaagaaaggttccagttggtctcacagacgtatggatatccgaggagccacctaaagatggagaaatcaaggcatagagagattaagtgactttgccacagtcacaagctggagaggaccaggagtagagcttagagcgagcccctgactctgggcctgcgtcctgccaggagtcacgctgcctccgttcctaggagagaagacttcctgtaagatggaggtggacaccgaggagaagcggcatcgcacgcggtccaaaggggttcgagttcccgtggaaccagccatacaagagctgttcagctgtcccacccctggctgtgacggcagtggtcatgtcagtggcaaatatgcaagacacagaagtgtatatggttgtcccttggcgaaaaaaagaaaaacacaagataaacagccccaggaacctgctcctaaacgaaagccatttgccgtgaaagcagacagctcctcagtggatgagtgtgacgacagtgatgggactgaggacatggatgagaaggaggaggatgagggggaggagtactccgaggacaatgatgagccaggggatgaggacgaggaggacgaggagggggaccgggaggaggaggaggagatcgaggaggaggatgaggacgatgacgaggatggagaagatgtggaggatgaagaagaggaagaggaggaggaggaggaggaggaagaggaagaagaaaacgaagaccatcaaatgaattgtcacaatactcgaataatgcaagacacagaaaaggatgataacaataatgacgaatatgacaattacgatgaactggtggccaagtcattgttaaacctcggcaaaatcgctgaggatgcagcctaccgggccaggactgagtcagaaatgaacagcaatacctccaatagtctggaagacgatagtgacaaaaacgaaaacctgggtcggaaaagtgagttgagtttagacttagacagtgatgttgttagagaaacagtggactcccttaaactattagcccaaggacacggtgttgtgctctcagaaaacatgaatgacagaaattatgcagacagcatgtcgcagcaagacagtagaaatatgaattacgtcatgttggggaagcccatgaacaacggactcatggaaaagatggtggaggagagcgatgaggaggtgtgtctgagcagtctggagtgtttgaggaatcagtgcttcgacctggccaggaagctcagtgagaccaacccgcaggagaggaatccgcagcagaacatgaacatccgtcagcatgtccggccagaagaggacttccccggaaggacgccggacagaaactactcggacatgctgaacctcatgcggctggaggagcagttgagcccccggtcgagagtgtttgccagctgtgcgaaggaggatgggtgtcatgagcgggacgacgataccacctctgtgaactcggacaggtctgaagaggtgttcgacatgaccaaggggaacctgaccctgctggagaaagccatcgctttggaaacggaaagagcaaaggccatgagggagaagatggccatggaagctgggaggagggacaatatgaggtcatatgaggaccagtctccgagacaacttcccggggaggacagaaagcctaaatccagtgacagccatgtcaaaaagccatactatgatccctcaagaacagaaaagaaagagagcaagtgtccaacccccgggtgtgatggaaccggccacgtaactgggctgtacccacatcaccgcagcctgtccggatgcccgcacaaagatagggtccctccagaaatccttgccatgcatgaaagtgtcctcaagtgccccactccgggctgcacggggcgcgggcatgtcaacagcaacaggaactcccaccgaagcctctccggatgcccgatcgctgcagcagagaaactggccaaggcacaggaaaagcaccagagctgcgacgtgtccaagtccagccaggcctcggaccgcgtgctcaggccaatgtgctttgtgaagcagctggagattcctcagtatggctacagaaacaatgtccccacaactacgccgcgttccaacctggccaaggagctcgagaaatattccaagacctcgtttgaatacaacagttacgacaaccatacttatggcaagcgagccatagctcccaaggtgcaaaccagggatatatcccccaaaggatatgatgatgcgaagcggtactgcaaggaccccagccccagcagcagcagcaccagcagctacgcgcccagcagcagcagcaacctgagctgcggcgggggcagcagcgccagcagcacgtgcagcaagagcagcttcgactacacgcacgacatggaggcggcccacatggcggccaccgccatcctcaacctgtccacgcgctgccgcgagatgccgcagaacctgagcaccaagccgcaggacctgtgcgccacgcggaaccctgacatggaggtggatgagaacgggaccctggacctcagcatgaacaagcagaggccgcgggacagctgctgccccatcctgacccctctggagcccatgtccccccagcagcaggcagtgatgaacaaccggtgtttccagctgggcgagggcgactgctgggacttgcccgtagactacaccaaaatgaaaccccggaggatagacgaggacgagtccaaagacattactccagaagacttggacccattccaggaggctctagaagaaagacggtatcccggggaggtgaccatcccaagtcccaaacccaagtaccctcagtgcaaggagagcaaaaaggacttaataactctgtctggctgccccctggcggacaaaagcattcgaagtatgctggccaccagctcccaagaactcaagtgccccacgcctggctgtgatggttctggacatatcaccggcaattatgcttctcatcggagcctttcaggttgcccaagagcaaagaaaagtggtatcaggatagcacagagcaaagaagataaagaagatcaagaacccatcaggtgtccggtccccgggtgcgacggccagggccacatcactgggaagtacgcgtcccatcgcagcgcctccgggtgccccttggcggccaagaggcagaaagacgggtacctgaatggctcccagttctcctggaagtcggtcaagacggaaggcatgtcctgccccacgccaggatgcgacggctcaggccacgtcagcggcagcttcctcacacaccgcagcttgtcaggatgcccgagagccacgtcagcgatgaagaaggcaaagctttctggagagcagatgctgaccatcaaacagcgggccagcaacggtatagaaaatgatgaagaaatcaaacagttagatgaagaaatcaaggagctaaatgaatccaattcccagatggaagccgatatgattaaactcagaactcagattaccacgatggagagcaacctgaagaccatcgaagaggagaacaaagtgattgagcagcagaacgagtctctcctccacgagctggcgaacctgagccagtctctgatccacagcctggctaacatccagctgccgcacatggatccaatcaatgaacaaaattttgatgcttacgtgactactttgacggaaatgtatacaaatcaagatcgttatcagagtccagaaaataaagccctactggaaaatataaagcaggctgtgagaggaattcaggtctgaacagctgctgtagtgatgaaactcttgcttaaaaaggatgcctcttgttttttgctgctgtaacttaccagaaagtgttctatatttatttctgtttgaatttgaaacagtgttatgcttacaagacttcataatgattttatgtcttgctttaaagatagtacctgcagaatagtttttgaatacacccacattttgtacgtttccatgtaagctgacatagtgttctgccatgtaatgtttatagctgctgatgtatgcacatttgggggtatatctatttctgaagaggtaagctgatcaaaataaatagagtgtaaattctttttaatgctttagtgattaaatgttttagtattttgaactgaaatggacacacaaacacacacacgcacacacagacccacagctttgaatgatcatgttgtggctgagcagccgctttttagacgttatcattttgcctcatgttggaggactttatggaatttaagaaatacattttgtgtgcatattgtttcatagcaagaattcgttgcaaaaatgctttatttttgaacaatgcttggaaatattatgtgacttttttgtttgtttgttttaggaggatggtgtatggtggggg

SEQ ID NO: 13330 - DNA, 3206 bp, Homo sapiens
  source 1..3206: mol_type = unassigned DNA
agcggaagcgcctggaagcggaagcgcctggaagcggaagctggacagacgaggagaggccttgggtgtgacatcaacggaacctgagggaagcaaaactcagcaaggacgcacccggtctgctggactggggctttgggttggtgacgtggacgatgagtctaattttggggcatccgcgcagttgtgcagcggtcagtggggtgcaggggtggacgtgaggtcaacccacgccggcctcagagccccagcgacctgcaggcaggtcaggagccagagggtggggcgggggcggaggaggccaagggaggaaggaaaggtcgggggaagcacaggcgggcccctctttccagattccctcctttaagagggcggggagaagaaaggccccagcaggcagcgagctcaggtgccctcgcctcgccgcctctttcctcttcctgtgaagagcgagacaggggaaggagcaggaggattccccgctggctccaggaggtggggcagcaggggcctgggagtgaaggcgctgtggggccctgacaacctcctttctgcccagacacgaaacccgaaccttcccgaaccttcccacacccgcctgtgctgaggtgctgcccccacctgaacagggaggaggatggccaaggcctgggaggcaggatggagcctccctttaggggagtgagcacttcctcctgggaatctgcgtgtttccaagaatcagaactgaccaagaaaactatccccgagctcaggaaagccagggagaagagtggcctcccacctggacccacccgtgtgccagcgccgggcccgcgatttccacaagacccaatagcatggcaggagattgcccaatttctggttcttcaattcttttccaaaaatcccatttgttttatgtattattttatgtgatgtgtatgtgtgtgtatgtttctgttccagctgaaaaaattccctttacaaacatgtccaaagcctctgtacccaagaggttgaaaattaaataaaataggcgtgtccagctcccactctcccgtctgcaggcacaacccgaagcctggaataagtcactagcccatcactgtctcccaagacacgaacctgagatggaagtgcttgggaagctgctgtgagagacagagtacccaagaatggggctgggaggctgcttttttctgccatgttcacccccgacatgcacgcatccgtgtgcgctcgctcccgcgctctctgtcaacaaaacctcccccagcgtctttcctggtgactcccgactgcttctgctccctcccggtggaccagtttctctcccgttcacagcatcctagcccaccccagtctcccaactttcttgaaaggggactgacggtgcctagagccttggagaggacacagggaaagaactctcctcctgaattttgactttgtgcccagaagcacaggttttggagagaatcaagtcacagcctcgtcggttaagaaagctcactggggcggattacgaggtcaggagatcgagaccatcctggctaacacgatgaaaccccgtctctactaaaaaatacaaaaaattagccgggcgtggtggcgggcgcctatagtcccagctacttgggaggctgaggcaggagaatggtgtgaacccaggaggtggagcttgcagtgagctgagatcgcaccactgcactccagcctgggcgacagagcaagactctgtctcaaaaaaaaaaaaaaaaaaagaggccgaggtgggcaaatcacgaggtcaggagatcgagaccatcctggctaacacggtgaaaccccgtctctactaaaaaatacaaaaaaattagccaggcgtggtggtggccgcctgtagtcccagctacttgggaggctgaggcaggagaatggcgtgaacccgggaggcggagcttgcagtgagccgagatcacaccactgcacttcagcctgggtgacagagtgagactctgtctcaaaaaaaaaaaaaaaaagaaagaaagctcactgaaatcaacggtgtggggtgctttctgaaatgtgtttcttatttagcctttcaggttgcccaagagcaaagaaaagtggtatcaggatagcacagagcaaagaagataaagaagatcaagaacccatcaggtgtccggtccccgggtgcgacggccagggccacatcactgggaagtacgcgtcccatcgcagcgcctccgggtgccccttggcggccaagaggcagaaagacgggtacctgaatggctcccagttctcctggaagtcggtcaagacggaaggcatgtcctgccccacgccaggatgcgacggctcaggccacgtcagcggcagcttcctcacacaccgcaggagctgaggcacccatggggagctgaggacaaggtggccgtgtgcagcccctctggagcacggcgtctgcagggacccctgggtgctgccgacaacaggggtccaccctgggacggaaccaactggcaggaccccggggtcctctcgtctacctctcaccctacaatgcaggccccaggcccccagccgggcagtgaggccctgtgcatacactggggcataggaacgggacagggccaccccctggggggccacagctgtcactgtgcgctcactcagtggccttgaaagaagcgcctgaagcgagagaacatgggtgacggggtttccctgaagtcaagtcaaagcagccaacgtgcaccatgtccatcctcattttatgcgccttcgtcttggcgtagcctcagcagctgcttttggctgtggcttttaagctgtgaaagtatttgctgggaatgtccttggctcctcacgcagcacctcctccccgttaggctggtttctctgctggatctaaaacaggagggaggaagcatcgtgagtggcgtgggggggcttgagcggctcctccctctctcctctgggggtgcccaccggggcccaaagcttctgggaacccggcggagagctctgctcctgagccaggaattgccaggcaccacacaactgctatccgcggggcctgtccggtttccccaagtgcttctgcttcattcgctaatccatacagcgtagctcagaatgatcgcttgccttgggtccccaaacactacctgagctggaaagtgcttgtgtgatgtgttagtaatggataatacaaaatttttaacatggga

SEQ ID NO: 13331 - DNA, 1848 bp, Homo sapiens
  source 1..1848: mol_type = unassigned DNA
caggagaggaatccgcagcagaacatgaacatccgtcagcatgtccggccagaagaggacttccccggaaggacgccggacagaaactactcggacatgctgaacctcatgcggctggaggagcagttgagcccccggtcgagagtgtttgccagctgtgcgaaggaggatgggtgtcatgagcgggacgacgataccacctctgtgaactcggacaggtctgaagaggtgttcgacatgaccaaggggaacctgaccctgctggagaaagccatcgctttggaaacggaaagagcaaaggccatgagggagaagatggccatggaagctgggaggagggacaatatgaggtcatatgaggaccagtctccgagacaacttcccggggaggacagaaagcctaaatccagtgacagccatgtcaaaaagccatactatggtaaagatccctcaagaacagaaaagaaagagagcaagtgtccaacccccgggtgtgatggaaccggccacgtaactgggctgtacccacatcaccgcagcctgtccggatgcccgcacaaagatagggtccctccagaaatccttgccatgcatgaaagtgtcctcaagtgccccactccgggctgcacggggcgcgggcatgtcaacagcaacaggaactcccaccgaagcctctccggatgcccgatcgctgcagcagagaaactggccaaggcacaggaaaagcaccagagctgcgacgtgtccaagtccagccaggcctcggaccgcgtgctcaggccaatgtgctttgtgaagcagctggagattcctcagtatggctacagaaacaatgtccccacaactacgccgcgttccaacctggccaaggagctcgagaaatattccaagacctcgtttgaatacaacagttacgacaaccatacttatggcaagcgagccatagctcccaagcgaagcggtactgcaaggaccccagccccagcagcagcagcaccagcagctacgcgcccagcagcagcagcaacctgagctgcggcgggggcagcagcgccagcagcacgtgcagcaagagcagcttcgactacacgcacgacatggaggcggcccacatggcggccaccgccatcctcaacctgtccacgcgctgccgcgagatgccgcagaacctgagcaccaagccgcaggacctgtgcgccacgcggaaccctgacatggaggtggatgagaacgggaccctggacctcagcatgaacaagcagaggccgcgggacagctgctgccccatcctgacccctctggagcccatgtccccccagcagcaggcagtgatgaacaaccggtgtttccagctgggcgagggcgactgctgggacttgcccgtagactacaccaaaatgaaaccccggaggatagacgaggacgagtccaaagacattactccagaagacttggacccattccaggaggctctagaagaaagacggtatcccggggaggtgaccatcccaagtcccaaacccaagtaccctcagtgcaaggagagcaaaaaggacttaataactctgtctggctgccccctggcggacaaaagcattcgaagtatgctggccaccagctcccaagaactcaagacattcttgatcatggacaaaacaaattttccagataaactctcgctcttggatcctctaagctcttaaacttcctgagataacactttgcctggtcttacccaaagcagcaaacatgggacgttttgaaaagaaaatccatcacttcattgtctaattatgtataatatgtaaactgaaactggattaaaatttaacgtgcacctgaatctta

SEQ ID NO: 13332 - DNA, 399 bp, Homo sapiens
  source 1..399: mol_type = unassigned DNA
caaaaaggacttaataactctgtctggctgccccctggcggacaaaagcattcgaagtatgctggccaccagctcccaagaactcaagatccctgtccaaggccctagggccctagatcacctgcttatgttcagtgacttcctgaactagctctttcgccacaagacccttggaactttcttcatggaatgtaaacgcctggagggcttcctcttacctaacggctgtaaagtctgtagcctcatccaaaacagtgcctcatggaaaagtagatttaggatctcaaaacggacagcattagcaagagcagttcaacccactttgttcaggcgtcttttgtatggctcgaaaccacatttccctcatggtcaaaacatgactaactccacttggaactt

SEQ ID NO: 13333 - DNA, 1080 bp, Homo sapiens
  source 1..1080: mol_type = unassigned DNA
ctcccaaggtgcaaaccagggatatatcccccaaaggatatgatgatgcgaagcggtactgcaaggaccccagccccagcagcagcagcaccagcagctacgcgcccagcagcagcagcaacctgagctgcggcgggggcagcagcgccagcagcacgtgcagcaagagcagcttcgactacacgcacgacatggaggcggcccacatggcggccaccgccatcctcaacctgtccacgcgctgccgcgagatgccgcagaacctgagcaccaagccgcaggacctgtgcgccacgcggaaccctgacatggaggtggatgagaacgggaccctggacctcagcatgaacaagcagaggccgcgggacagctgctgccccatcctgacccctctggagcccatgtccccccagcagcaggcagtgatgaacaaccggtgtttccagctgggcgagggcgactgctgggacttgcccgtagactacaccaaaatgaaaccccggaggatagacgaggacgagtccaaagacattactccagaagacttggacccattccaggaggctctagaagaaagacggtatcccggggaggtgaccatcccaagtcccaaacccaagtaccctcagtgcaaggagagcaaaaaggacttaataactctgtctggctgccccctggcggacaaaagcattcgaagtatgctggccaccagctcccaagaactcaagtaagatttaatgacaataattctcttttaaaaatccatgcactcagtagttcacaaaaaaaaatgatatgtcatttgcaaagaaaaatgtctgttaaaaaacatggcctgtgcaccccagtgccttgatgtagacatgggattgaatcctcggaatttcagccacttttccacacaacccattctgccttttcccctgacatacctccagcttgttcatatcatatccttcctatctgggatatcctaaagcatgggtgttttctcttcagatatgcatgcatatggaagggaaattttacagttactcaaatttttagaaaatgactgtaaataatcaaaatttaattttt

SEQ ID NO: 13334 - DNA, 734 bp, Homo sapiens
  source 1..734: mol_type = unassigned DNA
actccgggctgcacggggcgcgggcatgtcaacagcaacaggaactcccaccgaagcctctccggatgcccgatcgctgcagcagagaaactggccaaggcacaggaaaagcaccagagctgcgacgtgtccaagtccagccaggcctcggaccgcgtgctcaggccaatgtgctttgtgaagcagctggagattcctcagtatggctacagaaacaatgtccccacaactacgccgcgttccaacctggccaaggagctcgagaaatattccaagacctcgtttgaatacaacagttacgacaaccatacttatggcaagcgagccatagctcccaaggtgcaaaccagggatatatcccccaaaggatatgatgatggtaggaggtgcacactcttatacatgagagacacgttgccattgatgatgttgttgttgtgtatatcaatgtcctacaaattagttgagcggtggtggtcactcaatgggtaccaaaagaacaggactttcatagcacagcccaggagctgaaagcccctcaggtccacacagctgtaggtgagcaaaacttcaggggaaggaaggagatggtttcccctcaataattccgagacagcgcactcggctgctcgtggaatgtggagagggagaagctatggactggcttattgtcttttgtggtactgggaagacagtgcccttatgttatacgcttcctttaaataaatgcctct

SEQ ID NO: 13335 - DNA, 430 bp, Homo sapiens
  source 1..430: mol_type = unassigned DNA
cgtggaaccagccatacaagagctgttcagctgtcccacccctggctgtgacggcagtggtcatgtcagtggcaaatatgcaagacacagaaggaaccagtgagaaaggcgaaggacagagttccaggatctgataaaagcattaagtcagctccttagagacgcagacactcttggcagcgaaggaaaactgtttccatcccacacattgcccagcagggatccaagcttactcaacatttttgggccctgatacaggtcatcaggccagacctcctaggaagctaacaaatatgacaaatatttatcttcagaaacgtcattattagccagtcacctgaatttgccttttgcttttcccaactgaggtttttgtcttgtgatattagcatataaatgacaaaaacacggtgaattttataagcagggc

SEQ ID NO: 13336 - DNA, 632 bp, Homo sapiens
  source 1..632: mol_type = unassigned DNA
agtttcctgtctgaaagcattattacttttgtccatgtggcaaaataattagcatacagatgagaagtggccccttgcctgggcgccggtagagagagaagatgtgcagtggaaagttgattggatgaatggagaacaaatggtgggcgttcaaaagcattagaagagttttgtagtcgtggagcaggttggagaattttctggggcgggtcatgaggaggctgtagccaaggacgaggtgtgtgcggctgttgcctggacgtttgtccaatccacgttgacatttgagggatcacagcgtgtgaaaatgaactcagaggagaattggtgaattcctatccagtgggcatcttcaaaccctggtcgacggcggaagaatatcaggtcctgagatcacccacccggcgcggcaacagtgcagagtggccacatctggtggaagaagaaaaaaatgtagttattgaattcaatcaagtgtttgcatctttcaagctatcaacaaaattccatcaagaaaggttccagttggtctcacagacgtatggatatccgaggagccacctaaagatggagaaatcaaggcatagagagattaagtgactttgccacagtcacaagctggagaggaccag

SEQ ID NO: 13337 - DNA, 546 bp, Homo sapiens
  source 1..546: mol_type = unassigned DNA
ttttagtcttactgtaaggagtattgtgttgtgagaagatggaatggtacaggacattctcttaaagctttccttgctttcagactgcagtggtgtctagcagggctcgatgggaagggaattgcagcctctatagtaaccagtaagtctggtcccaacacatcagggaagagctcggtcttcagaggaattacctctgagagctggaagagggtgttcctggtaacttggggcttctctgtcagtctccccacggaaaccacagtcagagctgtgctctgtggaaagcctgcagtggctgctccctcgtgctgttctgctctcgactctcactcactgtggatagtgggctggtggagtgcgggcgccagagggtaggggtgaatggaatggaaacacagagggaactgtgaccagcacgtgcgatggtctctccacggcagacagagccctgcgtgggtgagaagcagactgcggaacaggatttggcttgatggccaccagctcttccacaaaaagggcgggtcatgaggaggctgtagccaa

SEQ ID NO: 13338 - DNA, 1045 bp, Homo sapiens
  source 1..1045: mol_type = unassigned DNA
actaaacagtgagagagcttttccctgcagtcttgttgaagcaccccgggttttttgctcattgttggtgggtgcattttaattttttcattccctggactatgggttatgatatccatactcactgaagacaaaaagccaccttttctgcgtcttggtggcatgcatgtgtctcatcatcctttcaaacttgtggtggaacagggttttcttccctgtctgtgtattttgagccagcacagttaccaaaattgaacttgtctttcgcttgtgagcggttgtggtcattgtgagggcaaaacctgggatgaggaaaagagtctgggcacaaaattccaggagtcttcacactcgggttcatggcaaagaaagaagcctttgaccttgctcctgttccaggatcagaaatgtcaccattcagattttaaaatgaaggggtcattgacattaagtgggacagatgaacactggctcccgaagatgccattgtccagaaataggcagccatttggggtcttcaagagacacttctaatgagaaatacaaaacagaaatcttgggattgctgacaactacccgcagctgggacaactgtggttaagtcaggacacttcgatgtgacgtgttgctcgatgtttttcaatgtgtgcagcagaagtcggggaagattcttccttgaatgtcgcgttacatacgttgtcctctgagaaggaaggtggctatccttggcaatggtttctattataacacaactatgaactgtggtcattttcagacaagctgcttccctcctcccggcccttggtttgtttggtgttaaacgtctcctcttggtttctgtgggtaaatgaattgttcttaacacggtgtcctctaagatgtgtgctctatccagtggggcctgctgagaactgcctgaacacagtccgtacgctgcctaagtgcactcctgtggctaaaataaatctcagccctaatgactagatccctcatcctgacccaagcctgattaagagagcagggagactctgtaacagtgacatgt

SEQ ID NO: 13339 - DNA, 1260 bp, Homo sapiens
  source 1..1260: mol_type = unassigned DNA
tttccttcccaggtgtcgccgcctgctttctgcagccgctgcctgggaggggttccgaggttctgggcagccacagccccggaggccttacaggagcgacctggcaattcccgccgccggccgccagaggaagctgctttgctgctgtcgttgcccagcaactcgtagcccggaagcagtaccccgtctcgctcggttccgcggcggccacgctccgggagacttccggcagggcgggcgcggggtcttggcgaacggtcttcggaagcggcggcggcgcgatgaccacgctacgggcctttacctgcgacgacctgttccgcttcaacaacattaacttggatccacttacagaaacttatgggattcctttctacctacaatacctcgcccactggccagagtatttcattgttgcagaggcacctggtggagaattaatgggttatattatgggtaaagcagaaggctcagtagctagggaagaatggcacgggcacgtcacagctctgtctgttgccccagaatttcgacgccttggtttggctgctaaacttatggagttactagaggagatttcagaaagaaagggtggattttttgtggatctctttgtaagagtatctaaccaagttgcagttaacatgtacaagcagttgggctacagtgtatataggacggtcatagagtactattcggccagcaacggggagcctgatgaggacgcttatgatatgaggaaagcactttccagggatactgagaagaaatccatcataccattacctcatcctgtgaggcctgaagacattgaataaccctgggcagtggttcttaggcagatactctagatgctttatggacaatattattttcattggatgattctggagctctattaggagaaaagtaatcattttaggtcttaaagacttcaagaaaatacaggttatcaatttattttaaatctcattgtttccagttagcaatatcatacctattaaagctgttcattgtaacaaaattcaatcaaaaaggcagctaggtcagaaggaaacataccactctcatggttcatagtattcactgtatgtatgctagggaaaagacttgctccagtctcctcctcagttctgtgcctgagaaccactgctgcatatatttgtttttaaattttgtattgaactgttaattgaagctttaaaagcatatatgaaatgtataaatctaagatgtataatacattattgactctatgaa

SEQ ID NO: 13340 - DNA, 1222 bp, Homo sapiens
  source 1..1222: mol_type = unassigned DNA
ggttccgcggcggccacgctccgggagacttccggcagggcgggcgcggggtcttggcgaacggtcttcggaagcggcggcggcgcgatgaccacgctacgggcctttacctgcgacgacctgttccgcttcaacaacattcctggatccactttaaaaaaacaacagggcggtatgtgaaaactaaggacaaagtggttccgattcaagtgtcaggaagatggaaagaactatgggataagatggctgggaacatttcaaagagggggtgagccttgaagatggataacacattgtaacttggatccacttacagaaacttatgggattcctttctacctacaatacctcgcccactggccagagtatttcattgttgcagaggcacctggtggagaattaatgggttatattatgggtaaagcagaaggctcagtagctagggaagaatggcacgggcacgtcacagctctgtctgttgccccagaatttcgacgccttggtttggctgctaaacttatggagttactagaggagatttcagaaagaaagggtggattttttgtggatctctttgtaagagtatctaaccaagttgcagttaacatgtacaagcagttgggctacagtgtatataggacggtcatagagtactattcggccagcaacggggagcctgatgaggacgcttatgatatgaggaaagcactttccagggatactgagaagaaatccatcataccattacctcatcctgtgaggcctgaagacattgaataaccctgggcagtggttcttaggcagatactctagatgctttatggacaatattattttcattggatgattctggagctctattaggagaaaagtaatcattttaggtcttaaagacttcaagaaaatacaggttatcaatttattttaaatctcattgtttccagttagcaatatcatacctattaaagctgttcattgtaacaaaattcaatcaaaaaggcagctaggtcagaaggaaacataccactctcatggttcatagtattcactgtatgtatgctagggaaaagacttgctccagtctcctcctcagttctgtgcctgagaaccactgctgcatatatttgtttttaaattttgtattgaactgttaattgaagctttaaaagcatatatgaaatgtataaatctaagatgtataatacattattgactctatgaa

SEQ ID NO: 13341 - DNA, 920 bp, Homo sapiens
  source 1..920: mol_type = unassigned DNA
ggttccgcggcggccacgctccgggagacttccggcagggcgggcgcggggtcttggcgaacggtcttcggaagcggcggcggcgcgatgaccacgctacgggcctttacctgcgacgacctgttccgcttcaacaacattaacttggatccacttacagaaacttatgggattcctttctacctacaatacctcgcccactggccagagtatttcattgttgcagaggcacctggtggagaattaatgggttatattatgggtaaagcagaaggctcagtagctagggaagaatggcacgggcacgtcacagctctgtctgttgccccagaatttcgacgccttggtttggctgctaaacttatggagttactagaggagatttcagaaagatatgaggaaagcactttccagggatactgagaagaaatccatcataccattacctcatcctgtgaggcctgaagacattgaataaccctgggcagtggttcttaggcagatactctagatgctttatggacaatattattttcattggatgattctggagctctattaggagaaaagtaatcattttaggtcttaaagacttcaagaaaatacaggttatcaatttattttaaatctcattgtttccagttagcaatatcatacctattaaagctgttcattgtaacaaaattcaatcaaaaaggcagctaggtcagaaggaaacataccactctcatggttcatagtattcactgtatgtatgctagggaaaagacttgctccagtctcctcctcagttctgtgcctgagaaccactgctgcatatatttgtttttaaattttgtattgaactgttaattgaagctttaaaagcatatatgaaatgtataaatctaagatgtataatacattattgactctatgaa

SEQ ID NO: 13342 - DNA, 1036 bp, Homo sapiens
  source 1..1036: mol_type = unassigned DNA
ggcgggcgcggggtcttggcgaacggtcttcggaagcggcggcggcgcgatgaccacgctacgggcctttacctgcgacgacctgttccgcttcaacaacattaacttggatccacttacagaaactgactctagtatgggattcctttctacctacaatacctcgcccactggccagagtatttcattgttgcagaggcacctggtggagaattaatgggttatattatgggtaaagcagaaggctcagtagctagggaagaatggcacgggcacgtcacagctctgtctgttgccccagaatttcgacgccttggtttggctgctaaacttatggagttactagaggagatttcagaaagaaagggtggattttttgtggatctctttgtaagagtatctaaccaagttgcagttaacatgtacaagcagttgggctacagtgtatataggacggtcatagagtactattcggccagcaacggggagcctgatgaggacgcttatgatatgaggaaagcactttccagggatactgagaagaaatccatcataccattacctcatcctgtgaggcctgaagacattgaataaccctgggcagtggttcttaggcagatactctagatgctttatggacaatattattttcattggatgattctggagctctattaggagaaaagtaatcattttaggtcttaaagacttcaagaaaatacaggttatcaatttattttaaatctcattgtttccagttagcaatatcatacctattaaagctgttcattgtaacaaaattcaatcaaaaaggcagctaggtcagaaggaaacataccactctcatggttcatagtattcactgtatgtatgctagggaaaagacttgctccagtctcctcctcagttctgtgcctgagaaccactgctgcatatatttgtttttaaattttgtattgaactgttaattgaagctttaaaagcatatatgaaatgtataaatctaagatgtataatacattattgactctatgaa

SEQ ID NO: 13343 - DNA, 1000 bp, Homo sapiens
  source 1..1000: mol_type = unassigned DNA
ggtcttggcgaacggtcttcggaagcggcggcggcgcgatgaccacgctacgggcctttacctgcgacgacctgttccgcttcaacaacatgactctagtatgggattcctttctacctacaatacctcgcccactggccagagtatttcattgttgcagaggcacctggtggagaattaatgggttatattatgggtaaagcagaaggctcagtagctagggaagaatggcacgggcacgtcacagctctgtctgttgccccagaatttcgacgccttggtttggctgctaaacttatggagttactagaggagatttcagaaagaaagggtggattttttgtggatctctttgtaagagtatctaaccaagttgcagttaacatgtacaagcagttgggctacagtgtatataggacggtcatagagtactattcggccagcaacggggagcctgatgaggacgcttatgatatgaggaaagcactttccagggatactgagaagaaatccatcataccattacctcatcctgtgaggcctgaagacattgaataaccctgggcagtggttcttaggcagatactctagatgctttatggacaatattattttcattggatgattctggagctctattaggagaaaagtaatcattttaggtcttaaagacttcaagaaaatacaggttatcaatttattttaaatctcattgtttccagttagcaatatcatacctattaaagctgttcattgtaacaaaattcaatcaaaaaggcagctaggtcagaaggaaacataccactctcatggttcatagtattcactgtatgtatgctagggaaaagacttgctccagtctcctcctcagttctgtgcctgagaaccactgctgcatatatttgtttttaaattttgtattgaactgttaattgaagctttaaaagcatatatgaaatgtataaatctaagatgtataatacattattgactctatgaa

SEQ ID NO: 13344 - DNA, 1604 bp, Homo sapiens
  source 1..1604: mol_type = unassigned DNA
cggcgcgatgaccacgctacgggcctttacctgcgacgacctgttccgcttcaacaacatgtgagtgacacgcgcctagggccagccgctcttggccgggcctcgcttcccggccccgccagctccggccccagccgcgccttcccggccggaccccaagcccggacggggacccgcgagaaccaccccccgccggccaacgtgggcgcctccctggggccacagggtccagggagaggtgggcctggagtcgacgcacgccggccttggcgaccttggccgaggtgctcaaactttgtctctggaccctgcgagctggcaggttctggggcagcgctcgggcctccgctcgtggtcgctgtcaggaggcgctggggtgatggggcgagctggagacgcggcctggagcccacgacctgggcttctcgccctgccctactgcttgctggttcgtggccgggccgcgcctcttctgggcagagggcaccgccgacggccaggccgcagagggggcttgcgaggatcggaagctggtcagcagctgttgggatgtgtacatcgtgaagcccacctggtggccgtggttaaattgtatccaaatgaaatgacactgatcactgcgtcccctgcagcagatgctgtctcagtcatgtaacttggatccacttacagaaacttatgggattcctttctacctacaatacctcgcccactggccagagtatttcattgttgcagaggcacctggtggagaattaatgggttatattatgggtaaagcagaaggctcagtagctagggaagaatggcacgggcacgtcacagctctgtctgttgccccagaatttcgacgccttggtttggctgctaaacttatggagttactagaggagatttcagaaagaaagggtggattttttgtggatctctttgtaagagtatctaaccaagttgcagttaacatgtacaagcagttgggctacagtgtatataggacggtcatagagtactattcggccagcaacggggagcctgatgaggacgcttatgatatgaggaaagcactttccagggatactgagaagaaatccatcataccattacctcatcctgtgaggcctgaagacattgaataaccctgggcagtggttcttaggcagatactctagatgctttatggacaatattattttcattggatgattctggagctctattaggagaaaagtaatcattttaggtcttaaagacttcaagaaaatacaggttatcaatttattttaaatctcattgtttccagttagcaatatcatacctattaaagctgttcattgtaacaaaattcaatcaaaaaggcagctaggtcagaaggaaacataccactctcatggttcatagtattcactgtatgtatgctagggaaaagacttgctccagtctcctcctcagttctgtgcctgagaaccactgctgcatatatttgtttttaaattttgtattgaactgttaattgaagctttaaaagcatatatgaaatgtataaatctaagatgtataatacattattgactctatgaatgttttctgaagtttgttagtcattt

SEQ ID NO: 13345 - DNA, 600 bp, Homo sapiens
  source 1..600: mol_type = unassigned DNA
acgacctgggcttctcgccctgccctactgcttgctggttcgtggccgggccgcgcctcttctgggcagagggcaccgccgacggccaggccgcagagggggcttgcgaggatcggaagctggtcagcagctgttgggatgtgtacatcgtgaagcccacctggtggccgtggttaaattgtatccaaatgaaatgacactgatcactgcgtcccctgcagcagatgctgtctcagtcatggttagtgtttgcaagtttagttactgtagctgcgcaccccggtgtacacacctttcctctgtgaggagtcacggcagatcttaggggaggctcgctgtgcccagagccctggatgcagtttctttggattcgagttaaggccagacctctgatttgcagtaacttggatccacttacagaaactgtatccttttttacaaaaaaaaaaaagttgaatgaagatttactgagaataaagaaaacagaaatgaaaggaaaacagaggagtactgaaaagtttaaaaacttgtaggtcaggaaacatcataagcaacactgaaagcaattttaaaaagtgaaactgagaacaagagttgtct

SEQ ID NO: 13346 - DNA, 2711 bp, Homo sapiens
  source 1..2711: mol_type = unassigned DNA
ctctcccagtctctaagccgcggcgtctccgcggccgagaggccccagcgcccgcctccccggcccccgcccccacccccgcccccggctctgcccacgccctccgcccgccagcccggcagccagcgcagctccgggcctcgctccctgtgcgtcctgcgggggcggaggcgcggagaggcggcaagcgcagccggggagggtgggggggcagaggcacagacagaggcgcggaggctcggagagagaagacgtggagggagggacagagcctggacagcggtggacacggcatcgtgcgcggggaagagggcagcacgcagcaggcgccgagcgccgggcaccgagaagggcagcccgggtgatctccggccgtccatgcacagagcgccttcccccacagccgagcagccgccgggcggaggggacagcgcccgccggaccctgcagcccagactcaagcccagtgcccgagccatggcactgcctcggacgctgggggagctgcagctgtaccgggtcctgcagcgcgccaacctcctttcctactatgagaccttcatccagcagggaggggacgacgtgcagcagctgtgtgaggcgggtgaggaggagtttctggagatcatggcacttgtgggcatggccaccaagcccctccatgtccggcgcctgcagaaggcactgagagagtgggccaccaatccagggctcttcagtcaaccagtgcctgctgttcccgtctccagcatcccgctcttcaagatctctgagactgcgggtacccggaaagggagcatgagcaatgggcatggcagcccaggggaaaaggcaggcagtgcccgcagttttagccccaagagcccccttgaacttggagagaagctatcaccactgcctgggggacctggggcaggggacccccggatctggccaggccggagcactccagagtcggacgttggggcaggaggagaagaggaggctggctcgccccccttctccccccctgcagggggaggagtccctgaggggactggggctggggggctggcagcaggtgggactgggggtggtccagaccgactggagccagagatggtacgcatggtggtggaaagtgtggagaggatcttccggagcttcccaaggggggatgctggggaggtcacatccctgctaaagctgaataagaagctggcacggagcgttgggcacatctttgagatggatgataatgacagccagaaggaagaggagatccgcaaatacagcatcatctatggccgtttcgactctaagcggcgggagggcaagcagctcagcctgcacgagctcaccatcaacgaggctgctgcccagttctgcatgagggacaacacgctcttattacggagagtggagctcttctctttgtcccgccaagtagcccgagagagcacctacttgtcctccttgaagggctccaggcttcaccctgaagaactgggaggccctccactgaagaagctgaaacaagaggttggagaacagagtcaccctgaaatccagcagcctcccccaggccctgagtcctatgtacccccataccgccccagcctggaggaggacagcgccagcctgtctggggagagtctggatggacatttgcaggctgtggggtcatgtccaaggctgacgccgccccctgctgacctgcctctggcattgccagcccatgggctatggagccgacacatcctgcagcagacactgatggacgaggggctgcggctcgcccgcctcgtctcccacgaccgcgtgggccgcctcagcccctgtgtgcctgcgaagccacctctcgcagagttcgaggaagggctgctggacagatgtcctgccccaggaccccatcccgcgctggtggagggtcgcaggagcagcgtgaaagtggaggctgaggccagccggcagtgagggttggactggtgtcttcagacccaggacctcagacttctggctcacacagacccccacgctctccatccccggaatctagtcacaaccctggatccttcctctgcccttctcctgcctccccacctgctccatgggcataagactgtggggcttcaagcaataacaagcagaggcctggagagaggacacaaggagggtgcgtggtgccctcacccctgcccagagcgagggggcaaggactctgcctccagggcatctggggttttcccctccctcacacaacacactcccattctctttaggtttgcaccagtggtgtgagcagttggactcagtttggacaagggggaaagggggacttccctgggaaggtccagctaaaagtggcaacatttgcccccagaattgggggcctgggaacactggacctgctccttctcccctctccttccccgtttttgtgcttctggtttgtttctttaattaatttaacaagtgctgcagtttgccctcccattcccatctatcccccaagtcctttgcaatttcttccctgccctacataggggcggtgggtgtgggatcccttcactggccccctcgggaggcctgggttggactcagggtctcctccagctgggggctggaccgcagcacctatctgagcagttagagcgtctttcttttcagattgtgtacagtagattatttattttgttattttggaataaaatttattttatggcttagga

SEQ ID NO: 13347 - DNA, 591 bp, Homo sapiens
  source 1..591: mol_type = unassigned DNA
gtgcgtcctgcgggggcggaggcgcggagaggcggcaagcgcagccggggagggtgggggggcagaggcacagacagaggcgcggaggctcggagagagaagacgtggagggagggacagagcctggacagcggtggacacggcatcgtgcgcggggaagagggcagcacgcagcaggcgccgagcgccgggcaccgagaagggcagcccgggtgatctccggccgtccatgcacagagcgccttcccccacagccgagcagccgccgggcggaggggacagcgcccgccggaccctgcagcccagactcaacagggaggggacgacgtgcagcagctgtgtgaggcgggtgaggaggagtttctggagatcatggcacttgtgggcatggccaccaagcccctccatgtccggcgcctgcagaaggcactgagagagtgggccaccaatccagggctcttcagtcaaccagtgcctgctgttcccgtctccagcatcccgctcttcaagatctctgagactgcgggtacccggaaagggagcatgagcaatgggcatggcagcccaggggaaaaggcaggcagtgcccgc

SEQ ID NO: 13348 - DNA, 2318 bp, Homo sapiens
  source 1..2318: mol_type = unassigned DNA
gggtgggggggcagaggcacagacagaggcgcggaggctcggagagagaagacgtggagggagggacagagcctggacagcggtggacacggcatcgtgcgcggggaagagggcagcacgcagcaggcgccgagcgccgggcaccgagaagggcagcccgggtgatctccggccgtccatgcacagagcgccttcccccacagccgagcagccgccgggcggaggggacagcgcccgccggaccctgcagcccagactcaagcccagtgcccgagccatggcactgcctcggacgctgggggagctgcagctgtaccgggtcctgcagcgcgccaacctcctttcctactatgagaccttcatccagcagggaggggacgacgtgcagcagctgtgtgaggcgggtgaggaggagtttctggagatcatggcacttgtgggcatggccaccaagcccctccatgtccggcgcctgcagaaggcactgagagagtgggccaccaatccagggctcttcagtcaaccagtgcctgctgttcccgtctccagcatcccgctcttcaagatctctgagactgcgggtacccggaaagggagcatgagcaatgggcatggcagcccaggggaaaaggcaggcagtgcccgcagttttagccccaagagcccccttgaacttggagagaagctatcaccactgcctgggggacctggggcaggggacccccggatctggccaggccggagcactccagagtcggacgttggggcaggaggagaagaggaggctggctcgccccccttctccccccctgcagggggaggagtccctgaggggactggggctggggggctggcagcaggtgggactgggggtggtccagaccgactggagccagagatggtacgcatggtggtggaaagtgtggagaggatcttccggagcttcccaaggggggatgctggggaggtcacatccctgctaaagctgaataagaagctggcacggagcgttgggcacatctttgagatggatgataatgacagccagaaggaagaggagatccgcaaatacagcatcatctatggccgtttcgactctaagcggcgggagggcaagcagctcagcctgcacgagctcaccatcaacgaggctgctgcccagttctgcatgagggacaacacgctcttattacggagagtggagctcttctctttgtcccgccaagtagcccgagagagcacctacttgtcctccttgaagggctccaggcttcaccctgaagaactgggaggccctccactgaagaagctgaaacaagaggttggagaacagagtcaccctgaaatccagcagcctcccccaggccctgagtcctatgtacccccataccgccccagcctggaggaggacagcgccagcctgtctggggagagtctggatggacatttgcaggagttcgaggaagggctgctggacagatgtcctgccccaggaccccatcccgcgctggtggagggtcgcaggagcagcgtgaaagtggaggctgaggccagccggcagtgagggttggactggtgtcttcagacccaggacctcagacttctggctcacacagacccccacgctctccatccccggaatctagtcacaaccctggatccttcctctgcccttctcctgcctccccacctgctccatgggcataagactgtggggcttcaagcaataacaagcagaggcctggagagaggacacaaggagggtgcgtggtgccctcacccctgcccagagcgagggggcaaggactctgcctccagggcatctggggttttcccctccctcacacaacacactcccattctctttaggtttgcaccagtggtgtgagcagttggactcagtttggacaagggggaaagggggacttccctgggaaggtccagctaaaagtggcaacatttgcccccagaattgggggcctgggaacactggacctgctccttctcccctctccttccccgtttttgtgcttctggtttgtttctttaattaatttaacaagtgctgcagtttgccctcccattcccatctatcccccaagtcctttgcaatttcttccctgccctacataggggcggtgggtgtgggatcccttcactggccccctcgggaggcctgggttggactcagggtctcctccagctgggggctggaccgcagcacctatctgagcagttagagcgtctttcttttcagattgtgtacagtagattatttattttgttattttggaataaaatttattttatggcttagg

SEQ ID NO: 13349 - DNA, 791 bp, Homo sapiens
  source 1..791: mol_type = unassigned DNA
gtggagggagggacagagcctggacagcggtggacacggcatcgtgcgcggggaagagggcagcacgcagcaggcgccgagcgccgggcaccgagaagggcagcccgggtgatctccggccgtccatgcacagagcgccttcccccacagccgagcagccgccgggcggaggggacagcgcccgccggaccctgcagcccagactcaaggaggggacgacgtgcagcagctgtgtgaggcgggtgaggaggagtttctggagatcatggcacttgtgggcatggccaccaagcccctccatgtccggcgcctgcagaaggcactgagagagtgggccaccaatccagggctcttcagtcaaccagtgcctgctgttcccgtctccagcatcccgctcttcaagatctctgagactgcgggtacccggaaagggagcatgagcaatgggcatggcagcccaggggaaaaggcaggcagtgcccgcagttttagccccaagagcccccttgaacttggagagaagctatcaccactgcctgggggacctggggcaggggacccccggatctggccaggccggagcactccagagtcggacgttggggcaggaggagaagaggaggctggctcgccccccttctccccccctgcagggggaggagtccctgaggggactggggctggggggctggcagcaggtgggactgggggtggtccagaccgactggagccagagatggtacgcatggtggtggaaagtgtggagaggatcttccggagcttcccaaggg

SEQ ID NO: 13350 - DNA, 569 bp, Homo sapiens
  source 1..569: mol_type = unassigned DNA
gcggccgcagtgcttccatcctcagctgagggggaagcagagatacaggcagcaccgagctgttcagctccttgtcactcaggaccccacaggagaggaggaggccccgggcattcctaggaagctgtgggtgctgacctctgtcttcccacctcagaaagctcccatgtagtgtcaaaaccaaagcaagcgtctgatggatgggcctcatttgtccaatggtgaaggggtgtgaggaggtctggtgaggcagcggggaagttcgaattctgactctcctggctgccctccctccacagctcaccatcaacgaggctgctgcccagttctgcatgagggacaacacgctcttattacggagagtggagctcttctctttgtcccgccaagtagcccgagagagcacctacttgtcctccttgaagggctccaggcttcaccctgaagaactgggaggccctccactgaagaagctgaaacaagaggttggagaacagagtcaccctgaaatccagcagcctcccccaggccctgagtcctatgtacccccataccgccccagcctggag

SEQ ID NO: 13351 - DNA, 385 bp, Homo sapiens
  source 1..385: mol_type = unassigned DNA
ggtttaattcttcagatcacattgagagtaaaggtattaaaataaaggagactatgtattttgctccatcaatgaaagatttcactcaatatatattcacagaaaaactaaaacaggataagggatcagatgcatcatggaagaatgatcaggaaccaccaccagagaccatggttgactgaaggtaactgaaaccacgaaaagtgacagcacagatgaggggagagtactgtatcctcaaatgatggtatggctggtgatggtaacagcaagtctaccagcctagtcaagcattcttatccatagaagagttgccatgggaacctcatggcaacccacagatttcaagtactgtatgttctgcctaaataaataatgaaaagct

SEQ ID NO: 13352 - DNA, 1604 bp, Homo sapiens
  source 1..1604: mol_type = unassigned DNA
gtgtcttttggctcctccgcgtgtagttacctgagaaacgcgggaagttgggcccaggcagtgttgctgcggttgcctaagttgtttttctatttctggagagagccgtgagcttgtccaggggccccaatcctgaggccgacccggtttctggcgcggtgcgatggaggtagtggaggccgccgccgctcagctggaaactctgaaattcaatggcaccgactttggagttggggaaggtccggcggctccgtctccgggctctgcccctgtgccagggacacagccgccgctacagtcgtttgaggggtccccggacgctgggcagaccgtggaggttaagcctgccggggagcagcctctgcagcccgttctgaacgccgtcgcggccgggaccccggcgccgcagccacagccaccggctgaatcgccggcctgcggagactgcgtcacctccccaggagccgcagagcctgcgcgggcgccggactccttggagacctcggactcggattcggactcggacagtgaaacagattcagatagttcaagttcatcgtcttcctcttcatcttcctcatcgtcgtcttcttcctcttgtatatcacttcctccagtgctgtcagatggagatgatgatttacaaattgagaaggaaaataagaattttcctcttaaaacaaaagatgaattacttcttaatgaactgccttctgttgaagaactcactattattctgcctgaagatattgagttaaagcctcttgggatggtttcaagtattattgaacaactagtaataattgaatctatgactaacctacctccagttaatgaggagactgtaatttttaaaagtgatcgacaagcagcaggaaagatattcgagatatttggacctgttgcacatccattttatgtgttacggtttaattcttcagatcacattgagagtaaaggtattaaaataaaggagactatgtattttgctccatcaatgaaagatttcactcaatatatattcacagaaaaactaaaacaggataagggatcagatgcatcatggaagaatgatcaggaaccaccaccagaggccttagattttagtgatgatgaaaaagagaaggaagccaaacagaggaaaaaatctcagattcaaggccggaaaaaactcaaatctgaatttaatgagcctggtacaggtatatctcacagatattgtggcctcggatccagaccattgcagtcaagtgagtcacacaaactttttggtttccaaatgcatataaaagttacgtttacatgctactttagtttattaagtatgcaatagcattgtgtctaaaaaaaccaatgtgcatatctcaattggagaatactttactgttcaaaaaataataatgaccctttgagcctgcagtgagttacagtcttttagctgttggaaggtctggactcaagtgctgttggccgctgactaatcagggtagttgttgctaaaagtggcagtttctcctaatagatagcagtgaagtgtgctacattaattggctcttcctttcaccaaagatttctgtgtagcatgtgatgctacttgatagcat

SEQ ID NO: 13353 - DNA, 1907 bp, Homo sapiens
  source 1..1907: mol_type = unassigned DNA
cggaaagcgttgctgcgtaaatggcgggggcgtgtcttttggctcctccgcgtgtagttacctgagaaacgcgggaagttgggcccaggcagtgttgctgcggttgcctaagttgtttttctatttctggagagagccgtgagcttgtccaggggccccaatcctgaggccgacccggtttctggcgcggtgcgatggaggtagtggaggccgccgccgctcagctggaaactctgaaattcaatggcaccgactttggagttggggaaggtccggcggctccgtctccgggctctgcccctgtgccagggacacagccgccgctacagtcgtttgaggggtccccggacgctgggcagaccgtggaggttaagcctgccggggagcagcctctgcagcccgttctgaacgccgtcgcggccgggaccccggcgccgcagccacagccaccggctgaatcgccggcctgcggagactgcgtcacctccccaggagccgcagagcctgcgcgggcgccggactccttggagacctcggactcggattcggactcggacagtgaaacagattcagatagttcaagttcatcgtcttcctcttcatcttcctcatcgtcgtcttcttcctcttgtatatcacttcctccagtgctgtcagatggagatgatgatttacaaattgagaaggaaaataagaattttcctcttaaaacaaaagatgaattacttcttaatgaactgccttctgttgaagaactcactattattctgcctgaagatattgagttaaagcctcttgggatggtttcaagtattattgaacaactagtaataattgaatctatgactaacctacctccagttaatgaggagactgtaatttttaaaagtgatcgacaagcagcaggaaagatattcgagatatttggacctgttgcacatccattttatgtgttacggtttaattcttcagatcacattgagagtaaaggtattaaaataaaggagactatgtattttgctccatcaatgaaagatttcactcaatatatattcacagaaaaactaaaacaggataagggatcagatgcatcatggaagaatgatcaggaaccaccaccagaggccttagattttagtgatgatgaaaaagagaaggaagccaaacagaggaaaaaatctcagattcaaggccggaaaaaactcaaatctgaatttaatgagcctggtgaagattttactgaagtacatcagaattggaatgctcatagctctgcttcagagcatgcaaaaggatatcgtaacagagaattcacacgaggattttccagggccagataccctcgatcttgccatggcaggcctccacctcagcatttctataactcagaacatatggtatctcaggagacttcaggatttccttctcagagacaaaataatcccattatgccacaatacccctttcctcttccagtgtttgacatgcataattttcccctccgccctccacccccaccaccacccccacctgtaaacatgggttgggctacaccaaacatggctgctcatccattacttaacttaccatactccctacccccaccccctccccctccaccactgcctcctccaccctcttctggagatagtaattctcattttggaccttactattaggtgactatgcatttccagagaaatgtggacttttcatattatgtggtaaggatttttttttttcaagagtgattatggagctagatttttaaaaacactgtaaaatactaaatgattccttctgttgtaagttgatatatatttgtaacctttgtgaaattgtattcatatgaaaatgtcagctcaaattcttgggagaacattaaattatgtaatatttaattaaaa

SEQ ID NO: 13354 - DNA, 718 bp, Homo sapiens
  source 1..718: mol_type = unassigned DNA
ttttgaatgaatgaattatggaacattgtcttctgttttttattggctctgataatatatataatttgcttagtccttgatactcttacctttggcacccttttgcatctgatactatgatgaattttaagtctaaactggaagtcagactcatatctgaaggctgattactggcctgtgttaattaaagtcattaagcatttatcaaaaaatgctttatttttataccatgtctaattcagatatagaaaatattaagtatcaaaaagacaactttttttagagtcattgatgcataataggcttattttcttcacctccaagtatgtactattgaattggcaaattcatgtaacataaacctattatatacttttctctgcaaggccttagattttagtgatgatgaaaaagagaaggaagccaaacagaggaaaaaatctcagattcaaggccggaaaaaactcaaatctgaatttaatgagcctggtgaagattttactgaagtacatcagaattggaatgctcatagctctgcttcagagcatgcaaaaggatatcgtaacagagaattcacacgaggattttccagggccagataccctcgatcttgccatggcaggcctccacctcagcatttctataactcagaacatatggtatctcaggagacttcaggatttccttctcagagacaaaataatcccattatgccaca

SEQ ID NO: 13355 - DNA, 2329 bp, Homo sapiens
  source 1..2329: mol_type = unassigned DNA
agtgttgctgcggttgcctaagttgtttttctatttctggagagagccgtgagcttgtccaggggccccaatcctgaggccgacccggtttctggcgcggtgcgatggaggtagtggaggccgccgccgctcagctggaaactctgaaattcaatggcaccgactttggagttggggaaggtccggcggctccgtctccgggctctgcccctgtgccagggacacagccgccgctacagtcgtttgaggggtccccggacgctgggcagaccgtggaggttaagcctgccggggagcagcctctgcagcccgttctgaacgccgtcgcggccgggaccccggcgccgcagccacagccaccggctgaatcgccggcctgcggagactgcgtcacctccccaggagccgcagagcctgcgcgggcgccggactccttggagacctcggactcggattcggactcggacagtgaaacagattcagatagttcaagttcatcgtcttcctcttcatcttcctcatcgtcgtcttcttcctcttgtatatcacttcctccagtgctgtcagatggagatgatgatttacaaattgagaaggaaaataagaattttcctcttaaaacaaaagatgaattacttcttaatgaactgccttctgttgaagaactcactattattctgcctgaagatattgagttaaagcctcttgggatggtttcaagtattattgaacaactagtaataattgaatctatgactaacctacctccagttaatgaggagactgtaatttttaaaagtgatcgacaagcagcaggaaagatattcgagatatttggacctgttgcacatccattttatgtgttacggtttaattcttcagatcacattgagagtaaaggtattaaaataaaggagactatgtattttgctccatcaatgaaagatttcactcaatatatattcacagaaaaactaaaacaggataagggatcagatgcatcatggaagaatgatcaggaaccaccaccagagacatgggggtctcagtgtgttgcccaggctggtctcaagctcttggcctcaagtgattctccagccctcaagcaagcttctgccttggctccccaaagtgctgggattacaggcatgagccccttgcccagccagtattacagatttttgatacttaccgatttaaccttggccattttagatgtttaaagcaatcgtaaatcatgatctgtgtttctaattttactgaggtatgaatcaggtttatgcccacttggagggttctatacaggtatgaatcacttaaccagtgaatgatccttgcttagtatctgaattgaaatggaattatgttttctaattaatgttatgtatttatgtgatttcagttaaggctctgaatattcacttaatgttctgaattaagttttagagtatctatagcatcttattactggaattacatgttttaaacgtgtttagagattcataaacatctcaaatcatatttcttttaaaatccagatattctttttttctttttttgggtaggggatggagttttgctctttctgcccaggctgcaatgcagtggcacggtctcagctcaccgcaaactctgcctccgggttcaagcaattctcctgcctcagcctcctgagtagctgagattacaggcgcatgccaccacgcccagctaattttgtatttttattagagacggggtttcacaatgttgtccaggctagtcttgaactcctgacctccagtaatccacccctctctgcctctcaaagtgctgagatttcaggcgtgagccaccgcacctggccaaaatccagatattctaatgaatccctcttgtttcggacctaagcattgaagttaccaattacaacaatgcgagttatttgtaaaattggtttgactaggttaattgcaaaattacatctcacctagttcatggtgtttgttttttccaggtagcttgaactggatcattaagtatcttgggatttaattttgtaatatttgttggtgaaactttgtagtctagaattattgcctggtattgatcatagattaaaattagaaatttgtgaggtttaaacttaaaaagagaaaaaggagaaacattgcgtgatgtgaaaatagaaagcttgcataaaggaaaataagagaaattatgtgctatgaaatgttgggctgcataaaggacctaaaaattacctacggttgtatcatgttcatcttcatagccatttttaatatgccaccgtatactttatggttgaataaatgtatttaatgaatgg

SEQ ID NO: 13356 - DNA, 1159 bp, Homo sapiens
  source 1..1159: mol_type = unassigned DNA
ccgacccggtttctggcgcggtgcgatggaggtagtggaggccgccgccgctcagctggaaactctgaaattcaatggcaccgactttggagttggggaaggtccggcggctccgtctccgggctctgcccctgtgccagggacacagccgccgctacagtcgtttgaggggtccccggacgctgggcagaccgtggaggttaagcctgccggggagcagcctctgcagcccgttctgaacgccgtcgcggccgggaccccggcgccgcagccacagccaccggctgaatcgccggcctgcggagactgcgtcacctccccaggagccgcagagcctgcgcgggcgccggactccttggagacctcggactcggattcggactcggacagtgaaacagattcagatagttcaagttcatcgtcttcctcttcatcttcctcatcgtcgtcttcttcctcttgtatatcacttcctccagtgctgtcagatggagatgatgatttacaaattgagaaggaaaataagaattttcctcttaaaacaaaagatgaattacttcttaatctatagagaaaaaaaaaattcagtcatggctctcagtactccagggattggatcctactttccaaccatatctgaaaagtgaaggctcacctaatagcatcaggtaagaaaaatgaaaccagaaagaaagagacttgtctgaagtcatattagtggggaggagcagatctgaactggtaatagatacattccaaactgctgtgtttttagtatttgtggagacctgcatagcaacgttggaatctggtcgtttggactttctcattatttggtttctgaataatcatgtagcatattttctcaaagtgaaggatgaatgtatcatctaatgtaagctttttaaaattgtatttgcttggattatattgcctctcaataaagcttttgacttggaactgtgtagtgtgtgggaaataaatggtggagcttctttagtatgttgaattttagtagttcatttgcgaaatgctgtggtgtttggggatgtttatttccatgcaagcttttcatttgctaatgatgtgaatgaaatagttttcttcctttcctttcctactctttgttatgtgtagaagtattgaataaatgagtcca

SEQ ID NO: 13357 - DNA, 928 bp, Homo sapiens
  source 1..928: mol_type = unassigned DNA
tttgaagacgttgttggttgtggaaactggggaagtgctaccagaatctagtgaatagaggctaaggatgctgttgctgaacagcctctgatgcacagaacagcccccacccccaacaaagaataatccagcctcaaatgatagtgttgctgttgagaaaccccgatctagagagaaagcagctttgctagggaagatttgagcagggccccatgaataaacccaccagagtgagctgcagctgtgagttccaggcttggaaccttccgtgcctgtttagtgccctcaaatttgagcccatacccttcggcacacacactaagacttccttccatgatcaagccctggcttacccttcagcctcatctcccactgagttttggtcacaccagaccatcaacatcccagatactccaaagtccttgcccttgaggaaggagattccataccctgtctggaatgctctccttccacttctgtctgacagatactcactccccattccctgttctgcatccagctgtggcatatttgagaagccttctttcattgctatcctgcatcttccttgttcctggggtagcacacagcctctctttcatagaacatcacacaagacagctgctgggatggctgacttgtgtatctgtctctcccaccagactgtgggttctctcaacagggtgaacatgaaaaatagaagcctccagtttctcctgatagtgtatagatgggcagatctggcctcaatggcagaagatacttggggaactggagaaagtacagaaggtgatgtgaaatcaattgggtcatcaaaagaagacgggtgtaccacaatttgttcctccacctgctgcccatgaacatttggagggtttctagtttttggctattacaaataaagttgtcatgaacatttgcatacaaa

SEQ ID NO: 13358 - DNA, 509 bp, Homo sapiens
  source 1..509: mol_type = unassigned DNA
gttccagggggttcctttgaaaacttcctgcggtgtccaggagcgagcagcctgctgcacacaggacgcaatgcctgctgaaatcccagatgaaaattcataatccacttaggaaaaaggaggggggatgcacggagttagcacatattaagtgcctgctgtagtcaagccctgttggacaccagggacatctggaccttgacaacggagcgaaggggtggtcctgcctgcaccaggtttcagactgtgggttctctcaacagggtgaacatgaaaaatagaagcctccagtttctcctgatagtgtatagatgggcagatctggcctcaatggcagaagatacttggggaactggagaaagtacagaaggtgatgtgaaatcaattgggtcatcaaaagaagacgggtgtaccacaatttgttcctccacctgctgcccatgaacatttggagggtttctagtttttggctattacaaataaagttgtcatgaacatttgcatacaaa

SEQ ID NO: 13359 - DNA, 458 bp, Homo sapiens
  source 1..458: mol_type = unassigned DNA
cagagccgaaatcccagagcagtgaaagaggagccagtgtcatggggcttctggtttcaggacacactggaaagggtccagccactttgtcacaagctacatctatggcgagcaacgactcccggctgcagggtgagacagataagaggataagagggagcaggagcagacggagaaagaaggtggcaagacagagcagactgtgggttctctcaacagggtgaacatgaaaaatagaagcctccagtttctcctgatagtgtatagatgggcagatctggcctcaatggcagaagatacttggggaactggagaaagtacagaaggtgatgtgaaatcaattgggtcatcaaaagaagacgggtgtaccacaatttgttcctccacctgctgcccatgaacatttggagggtttctagtttttggctattacaaataaagttgtcatgaacatttgc

SEQ ID NO: 13360 - DNA, 2133 bp, Homo sapiens
  source 1..2133: mol_type = unassigned DNA
gaatttgtcagccaggacttaccaggacttgtgatagaacaaaattgccagtggggaacttgaggctcattcctcatagagaaccaacaggctccaaatcaccaaacttctttgcctctctgggaaaactaaatgacccaccacttcagaagaaggtcatggggtctgtgcacagcttttcacatcctccctgaaacaccaacacgcccggtccaggttaaaggatatcagcactgccacacactcttctttttcccaaattaatcaagaagtaggaatttctgacaaatgccatctgctgatttttcagagagacaagttttggtggtgtgaccagcaggtgcctcggctttttctagcatgcagtaccaaaatagtcaccatggcaaccctgggagggcagacttccaaagagatgcattgtgagctcagaaactctagagcactttcaagctaaaaggaaggaggctcagcagtgggtttccaactgtgcctccttccttggttcacaatgacagtccaacttctgccagtcctgactgtcattcaagcctttttgctatttaagaattttgaggaagaaaaccgtcatgtactcaaaatcctggtaatcagaagtgtctggagatttcgagctgttaacatagagaggtggcaaaattattttctgggatatccttatgggcctgaatggcagcgggagtcgacatagctggtgcctgggcaggtttccaaagcacagccgaggtggagagtaggtgagggctgcaacaaaggtcccgacatctgaagagcactgcacagtttgtcagaggatttcagctccacactctcacttagtcctcacagcaaccccatgcagtgactgctgtcacttcttttcatggctgagaagactgttgggagaggaaaaatgaattgcccactggcaggcaggtaagaggcacagctgaaactctcacctagttcttctgactccaagcccatcatctcaggattgtacccaagtggctcttgcaccagtatcagcgccaatggcagggtcagcagaaaatagcagaggggcctgaaaacagatgggaacatctggaaaaggcagtggggagctgttgagagcattttgagtggggcagtgacactgctggctctgcattttggaaaggtggttttcagagcagtttggatgatgctggggagtagctgacaggttgaagatcagtcctgaggagcagattcataatccacttaggaaaaaggaggggggatgcacggagttagcacatattaagtgcctgctgtagtcaagccctgttggacaccagggacatctggaccttgacaacggagcgaaggggtggtcctgcctgcaccaggtttcagctgaccctccctgcatcttggtcccagtggcttctcaggcttctctgcagcatgggtgttcctgccttggccagagccgaaatcccagagcagtgaaagaggagccagtgtcatggggcttctggtttcaggacacactggaaaggctggtccctgagtgctccaaggacccatgcatctgaccataggggatgctgggagtatcctccatcctggcctgaaagagctccctttcagcttcctggattcatatctgtctttctgaaaactgacttcccatattcccaaagccatcgccagctcccagctttgtcattcaggaaaaagagtatgcacctccccttcatcctcctcatctctcaccatcattaagtacaagcccaaggagaagaatcaagggcaatgaatcttcatcaaacaataaaatcctgcctgggtccagccactttgtcacaagctacatctatggcgagcaacgactcccggctgcagggtgagacagataagaggataagagggagcaggagcagacggagaaagaaggtggcaagacagagcagactgtgggttctctcaacagggtgaacatgaaaaatagaagcctccagtttctcctgatagtgtatagatgggcagatctggcctcaatggcagaagatacttggggaactggagaaagtacagaaggtgatgtgaaatcaattgggtcatcaaaagaagacgggtgtaccacaatttgttcctccacctgct

SEQ ID NO: 13361 - DNA, 1748 bp, Homo sapiens
  source 1..1748: mol_type = unassigned DNA
taggcacaatccttgtttcagcttaaatgttttccccaacatgccactcagataacacaaggtagagccatggtttgaacagaaatgtcttccttcaaagtttcagctcttgtcctttcttccacccacccccatcccacctactcatatgactatgtgttgcatgaaagcacatacgtgtgcatatagaaaaaagattcagatggggaggggaatatagctggagaagtatagattgattatggattggtgactggtgaaaagtatttctgccagaagcccccacactacaaaatgtaatcctattaatgtgtgtcatctaaaaacatatattgtatcctagctgtaagaatttctatttaatgggctacaaagacaaattttggagatcctaagcaatttgagtctcttattcttctagtataatcaaacagtgatccactttcttggccttcccccagaatccttgctcccatggcaagtttttcagcccaactggtggaaattgttttgtcctgattgagaggtattaaagaaaaaatatctaccccagcaccttagttttctaaatcacttgtctttgcttgtttcctagcagcatgaaatactagtctggagaaatagatttagaattagtttcaattgccatttattgatcacaggtactatgcatacaattttcataaatggtcacatttgattttgattctcatcaaaatgatttctatttagcaatgaagaactgagggtctaatggattaggagacttgctcaatgtaccctgttagtaaggggacagaataggaactggagctgggctctgcagaattcatggcctggctctttccacagtattcacattctctccaggcagaagatacgatctgcctaaatacttgctttccaggccatccactagttctgctgtatcctgggaacctgcaggaccagccaagcccaggacagggccgcctggggccagggcaggtagacttacctggaagagcaccagcctggctatcagcatatccactttcttcccatttccttttgcagcctccttccttggttcacaatgacagtccaacttctgccagtcctgactgtcattcaagcctttttgctatttaagaattttgaggaagaaaaccgtcatgtactcaaaatcctggtaatcagaagtgtctggagatttcgagctgttaacatagagaggtggcaaaattattttctgggatatccttatgggcctgaatggcagcgggagtcgacatagctggtgcctgggcaggtttccaaagcacagccgaggtggagagtaggtgagggctgcaacaaaggtcccgacatctgaagagcactgcacagtttgtcagaggatttcagctccacactctcacttagtcctcacagcaaccccatgcagtgactgctgtcacttcttttcatggctgagaagactgttgggagaggaaaaatgaattgcccactggcaggcagattcataatccacttaggaaaaaggaggggggatgcacggagttagcacatattaagtgcctgctgtagtcaagccctgttggacaccagggacatctggaccttgacaacggagcgaaggggtggtcctgcctgcaccaggtttcagtggcttctcaggcttctctgcagcatgggtgttcctgccttggccagagccgaaatcccagagcagtgaaagaggagccagtgtcatggggcttctggtt

SEQ ID NO: 13362 - DNA, 701 bp, Homo sapiens
  source 1..701: mol_type = unassigned DNA
ggattcagctcattgtgctctaaggcaactttcatagcagaaatgctgtgatttggtaattctaagcatctgaaaatgttttctttggcccttggccatcccaggatgtttgataaaatctgatcatttggataagtcccagaaaaggaacagatcagagcctgcgttgggtgctgggagcccacctgatgggagaatgtgtgtacatgtggcggggaatagggagcatggtaaagtgtggagactgagaactagaaagaattaaagattattcaacttgttccaaatatagaaactgagccccagagaaggaaatgattcgttcaagttcatacagctagttaaaggcagaactgggattagaattaatccattcctgggttttttcccctacaatgaggatgacaaatacatttccttttctgccctctgatcaattagcagtggctaccttgagcactgacttctggaaggttcccaggttcttcaaaattcagcaagaagaatgctgattgattagcaatgtctgatatggccacaggaaaggagagtacccagaatttgtcagccaggacttaccaggacttgtgatagaacaaaattgccagtggggaacttgaggctcattcctcatagagaaccaacaggctccaaatcaccaaacttctttgcctctctgggaaaactaaatgacccaccac

SEQ ID NO: 13363 - DNA, 551 bp, Homo sapiens
  source 1..551: mol_type = unassigned DNA
cagtgccattttgtgggaacttagatccaatatatccctgttcacgggtcccacaatgcttagaatgatgcactgccctgaggagtttgacagacgtggcagaggagagaggcaggagggaggaggagaagagacacttaacaagtgtctgtgaggtggcgtttacatttagaattccctttcctttcaaaggaatctccaggatagccaaagagtccagcttaaaggtagccagccagaaaaagtgcccaaaccacgcagtgagatcacacctttgaagaccccaccttggcatagactctacggctttcacgaatgatgctgagctctcagcagcaccagaacctcaggctctgacacccacaaagctgcaggtctccagggctgcttgggccaaaaggacattggcactggatttagagcccaccagataatttgggatgatcttcttcatatcaagatccttcacatctgcaaagatcctttttccatataaggctccaaatcaccaaacttctttgcctctctgggaaaactaaatgacccaccac

SEQ ID NO: 13364 - DNA, 4582 bp, Homo sapiens
  source 1..4582: mol_type = unassigned DNA
gctgccgcgccccgccctttctcggcccccggagggtgacggggtgaaggcgggggaaccgaggtggggagtccgccagagctcccagactgcgagcacgcgagccgccgcagccgtcacccgcgccgcgtcacggctcccgggcccgccctcctctgacccctcccctctctccgtttccccctctccccctcctccgccgaccgagcagtgacttaagcaacggagcgcggtgaagctcatttttctccttcctcgcagccgcgccagggagctcgcggcgcgcggcccctgtcctccggcccgagatgaatcctgcggcagaagccgagttcaacatcctcctggccaccgactcctacaaggttactcactataaacaatatccacccaacacaagcaaagtttattcctactttgaatgccgtgaaaagaagacagaaaactccaaattaaggaaggtgaaatatgaggaaacagtattttatgggttgcagtacattcttaataagtacttaaaaggtaaagtagtaaccaaagagaaaatccaggaagccaaagatgtctacaaagaacatttccaagatgatgtctttaatgaaaagggatggaactacattcttgagaagtatgatgggcatcttccaatagaaataaaagctgttcctgagggctttgtcattcccagaggaaatgttctcttcacggtggaaaacacagatccagagtgttactggcttacaaattggattgagactattcttgttcagtcctggtatccaatcacagtggccacaaattctagagagcagaagaaaatattggccaaatatttgttagaaacttctggtaacttagatggtctggaatacaagttacatgattttggctacagaggagtctcttcccaagagactgctggcataggagcatctgctcacttggttaacttcaaaggaacagatacagtagcaggacttgctctaattaaaaaatattatggaacgaaagatcctgttccaggctattctgttccagcagcagaacacagtaccataacagcttgggggaaagaccatgaaaaagatgcttttgaacatattgtaacacagttttcatcagtgcctgtatctgtggtcagcgatagctatgacatttataatgcgtgtgagaaaatatggggtgaagatctaagacatttaatagtatcaagaagtacacaggcaccactaataatcagacctgattctggaaaccctcttgacactgtgttaaaggttttggagattttaggtaagaagtttcctgttactgagaactcaaagggttacaagttgctgccaccttatcttagagttattcaaggggatggagtagatattaataccttacaagagattgtagaaggcatgaaacaaaaaatgtggagtattgaaaatattgccttcggttctggtggaggtttgctacagaagttgacaagagatctcttgaattgttccttcaagtgtagctatgttgtaactaatggccttgggattaacgtcttcaaggacccagttgctgatcccaacaaaaggtccaaaaagggccgattatctttacataggacgccagcagggaattttgttacactggaggaaggaaaaggagaccttgaggaatatggtcaggatcttctccatactgtcttcaagaatggcaaggtgacaaaaagctattcatttgatgaaataagaaaaaatgcacagctgaatattgaactggaagcagcacatcattaggctttatgactgggtgtgtgttgtgtgtatgtaatacataatgtttattgtacagatgtgtggggtttgtgttttatgatacattacagccaaattatttgttggtttatggacatactgccctttcattttttttcttttccagtgtttaggtgatctcaaattaggaaatgcatttaaccatgtaaaagatgagtgctaaagtaagctttttagggccctttgccaataggtagtcattcaatctggtattgatcttttcacaaataacagaactgagaaacttttatatataactgatgatcacataaaacagatttgcataaaattaccatgattgctttatgtttatatttaacttgtatttttgtacaaacaagattgtgtaagatatatttgaagtttcagtgatttaacagtctttccaacttttcatgatttttatgagcacagactttcaagaaaatacttgaaaataaattacattgccttttgtccattaatcagcaaataaaacatggccttaacaaagttgtttgtgttattgtacaatttgaaaattatgtcgggacataccctatagaattactaaccttactgccccttgtagaatatgtattaatcattctacattaaagaaaataatggttcttactggaatgtctaggcactgtacagttattatatatcttggttgttgtattgtaccagtgaaatgccaaatttgaaaggcctgtactgcaattttatatgtcagagattgcctgtggctctaatatgcacctcaagattttaaggagataatgtttttagagagaatttctgcttccactatagaatatatacataaatgtaaaatacttacaaaagtggaagtagtgtattttaaagtaattacacttctgaatttatttttcatattctatagttggtatgacttaaatgaattactggagtgggtagtgagtgtacttaaatgtttcaattctgttatattttttattaagtttttaaaaaattaaattggatattaaattgtatggacatcatttattaattttaaactgaatgccctcaataagtaatactgaagcacattcttaaatgaagataaattatctccaatgaaaagcatgacatgtgtttcaatagaagaatcttaagttggctaaattcaaagtgcttgacatcaaaatgttctagagtgattagctactagattctgaatcatacatcacatctgactagagaccagtttctttcgaatgattcttttatgtatgtagatctgttcttctgaggcagcggttggccaactatagcccaaaggccaaatttggacttctttttataaatgcagattgtctatggctgctttcccactactccagcctaaggtaaacagctgcaatagaagccaaatgagaatcgcaaagcccaaaatgtttattaacctgccctttacacaaaattacacaaaaagtttcctgatctctgttctaagaaaaggagtgtgccttgcatttaaaaggaaatgttggtttctagggaagggaggaggctaaataattgatacggaattttcctcttttgtcttcttttttctcacttaagaatccgatactggaagactgatttagaaaagtttttaacatgacattaaatgtgaaattttaaaaattgaaaagccataaatcatctgttttaaatagttacatgagaaaatgatcactagaataacctaattagaagtgttatcttcattaaatgttttttgtaagtggtattagaaagaatatgtttttcagatggttctttaaacatgtagtgagaacaataagcattattcacttttagtaagtcttctgtaatccatgatataaaataattttaaaatgattttttaatgtatttgagtaaagatgagtagtattaagaaaaacacacatttcttcacaaaatgtgctaaggggcgtgtaaagaatcaaaagaaactattaccaataatagttttgataatcacccataattttgtgtttaaacattgaaattatagtacagacagtattctctgtgttctgtgaatttcagcagcttcagaatagagtttaatttagaaatttgcagtgaaaaaagctatctctttgttcacaaccataaatcaggagatggagattaattctattggctcttagtcacttggaactgattaattctgactttctgtcactaagcacttggtatttggccatctccattctgagcaccaaacggttaacacgaatgtccactagaactctgctgtgtgtcacccttaaatcagtctaaatcttccagacaaaagcaaatggcatttatggatttaagtcattagattttcaactgacattaattaatccctcttgattgattatatcatcaagtatttatatcttaaataggaggtaggatttctgtgttaagactcttatttgtaccctataattaaagtaaaatgttttttatgagtatcccttgttttcccttcttaaattgttatcaaacaatttttataatgaaatctatcttggaaaattagaaagaaaaatggcaaggtatttattgttctgtttgccataatttagaactcacacttaagtattttgtagttttacattcctttttaacccattcagtggagaatgtcagcttttctcccaagttgtatgttaagtctattctaatatgtactcaacatcaagttataaacatgtaataaacatggaaataaagtttagctctattagtgaagtgttaaa

SEQ ID NO: 13365 - DNA, 671 bp, Homo sapiens
  source 1..671: mol_type = unassigned DNA
agggatacgttatgaaataggaaagcctttaccttagtaatactcttgttccctctccaaagattgtgtgtgtggttttggcgtagttggtatagttgggcttttcttcaacagcatgtacatgctgtgcttactgtcagtttaaaggcagtttgtaatataaagagataccttaagggtcacatgttagaatgctcacagacttcctacaaatggagtattaggtgttcttcagtggcaaaaaggatatccaagatgtcatactttttctttattacaaacgactatccttcaaaacaggctaaagtgttatgtttctgaaagccagatgtggattggttcagttatacctattaagtgcttaaaacttaaatgtaaattatgtatgtgcttttttgtaagggagtgtttagacatttctgatgattagtcttctacttgtctaactttcttaatttggatttcagattaacgtcttcaaggacccagttgctgatcccaacaaaaggtccaaaaagggccgattatctttacataggacgccagcagggaattttgttacactggaggaaggaaaaggagaccttgaggaatatggtcaggatcttctccatactgtcttcaagaatggcaaggtgacaaaaagctattcatttgatgaaataagaaaa

SEQ ID NO: 13366 - DNA, 1213 bp, Homo sapiens
  source 1..1213: mol_type = unassigned DNA
gagctcgcggcgcgcggcccctgtcctccggcccgagatgaatcctgcggcagaagccgagttcaacatcctcctggccaccgactcctacaaggttactcactataaacaatatccacccaacacaagcaaagtttattcctactttgaatgccgtgaaaagaagacagaaaactccaaattaaggaaggtgaaatatgaggaaacagtattttatgggttgcagtacattcttaataagtacttaaaaggtaaagtagtaaccaaagagaaaatccaggaagccaaagatgtctacaaagaacatttccaagatgatgtctttaatgaaaagggatggaactacattcttgagaagtatgatgggcatcttccaatagaaataaaagctgttcctgagggctttgtcattcccagaggaaatgttctcttcacggtggaaaacacagatccagagtgttactggcttacaaattggattgagactattcttgttcagtcctggtatccaatcacagtggccacaaattctagagagcagaagaaaatattggccaaatatttgttagaaacttctggtaacttagatggtctggaatacaagttacatgattttggctacagaggagtctcttcccaagagactgctggcataggagcatctgctcacttggttaacttcaaaggaacagatacagtagcaggacttgctctaattaaaaaatattatggaacgaaagatcctgttccaggctattctgttccagcagcagaacacagtaccataacagcttgggggaaagaccatgaaaaagatgcttttgaacatattgtaacacagttttcatcagtgcctgtatctgtggtcagcgatagctatgacatttataatgcgtgtgagaaaatatggggtgaagatctaagacatttaatagtatcaagaagtacacaggcaccactaataatcagacctgattctggaaaccctcttgacactgtgttaaaggttttggagattttaggtaagaagtttcctgttactgagaactcaaagggttacaagttgctgccaccttatcttagagttattcaaggggatggagtagatattaataccttacaagaggtatgtgttttatattaaaagtttcaataaggcatttcttataattaagtttgtttatgtttgataaagaacacaatataaatacaa

SEQ ID NO: 13367 - DNA, 1009 bp, Homo sapiens
  source 1..1009: mol_type = unassigned DNA
atttttctccttcctcgcagccgcgccagggagctcgcggcgcgcggcccctgtcctccggcccgagatgaatcctgcggcagaagccgagttcaacatcctcctggccaccgactcctacaagaagtatgatgggcatcttccaatagaaataaaagctgttcctgagggctttgtcattcccagaggaaatgttctcttcacggtggaaaacacagatccagagtgttactggcttacaaattggattgagactattcttgttcagtcctggtatccaatcacagtggccacaaattctagagagcagaagaaaatattggccaaatatttgttagaaacttctggtaacttagatggtctggaatacaagttacatgattttggctacagaggagtctcttcccaagagactgctggcataggagcatctgctcacttggttaacttcaaaggaacagatacagtagcaggacttgctctaattaaaaaatattatggaacgaaagatcctgttccaggctattctgttccagcagcagaacacagtaccataacagcttgggggaaagaccatgaaaaagatgcttttgaacatattgtaacacagttttcatcagtgcctgtatctgtggtcagcgatagctatgacatttataatgcgtgtgagaaaatatggggtgaagatctaagacatttaatagtatcaagaagtacacaggcaccactaataatcagacctgattctggaaaccctcttgacactgtgttaaaggtaaattttcatatgtaactttattattagaatccctctgtaggccagctgcatcaatactacttttcatttatatacacacaatttcagagctgtgtggaccagtcccctttattttagagttgcagcccagagagagtaatagatttgcctgaggtcacacagtaatagcacagaaggataccaagacttatggattgttttactgtcaattagacatttgaatagatattt

SEQ ID NO: 13368 - DNA, 318 bp, Homo sapiens
  source 1..318: mol_type = unassigned DNA
tctggaatacaagttacatgattttggctacagaggagtctcttcccaagagactgctggcataggagcatctgctcacttggttaacttcaaaggaacagatacagtagcaggacttgctctaattaaaaaatattatggaacgaaagatcctgttccaggctattctgttccagcagcagaacacaggtaaaaaattctgttcattttttaaaactactaattttttcactcttgtatttgtaactcagtgacattttacctaactgcagagccaggtacctacagtacatcttcatgaacttgagcaacacaaat

SEQ ID NO: 13369 - DNA, 833 bp, Homo sapiens
  source 1..833: mol_type = unassigned DNA
cttgaggaggatggagggctgggcggtggaggcggggcctgggggcgcgcggcggcggcggcgcggcggggggctgaggcgggccccagcggactcccgggcgccggtgctcggggctcggggctcggggcttgggcgtcgccggcgagcgcatgcccttccctgaagcgcggcctcttggcctggagctgggaccagttaggtaacggccccggggacccgcagtggagagtgagcggggctttcccccgggccagcccggcgcgctcgcccctggctgggcaggttactcactataaacaatatccacccaacacaagcaaagtttattcctactttgaatgccgtgaaaagaagacagaaaactccaaattaaggaaggtgaaatatgaggaaacagtattttatgggttgcagtacattcttaataagtacttaaaaggtaaagtagtaaccaaagagaaaatccaggaagccaaagatgtctacaaagaacatttccaagatgatgtctttaatgaaaagggatggaactacattcttgagaagtatgatgggcatcttccaatagaaataaaagctgttcctgagggctttgtcattcccagaggaaatgttctcttcacggtggaaaacacagatccagagtgttactggcttacaaattggattgagactattcttgttcagtcctggtatccaatcacagtggccacaaattctagagagcagaagaaaatattggccaaatatttgttagaaacttctggtaacttagatggtctggaatacaagttacatgattttggctacagaggagtctcttcccaaga

SEQ ID NO: 13370 - DNA, 592 bp, Homo sapiens
  source 1..592: mol_type = unassigned DNA
atttttctccttcctcgcagccgcgccagggagctcgcggcgcgcggcccctgtcctccggcccgagatgaatcctgcggcagaagccgagttcaacatcctcctggccaccgactcctacaaggttactcactataaacaatatccacccaacacaagcaaagtttattcctactttgaatgccgtgaaaagaagacagaaaactccaaattaaggaaggtgaaatatgaggaaacagtattttatgggttgcagtacattcttaataagtacttaaaaggtaaagtagtaaccaaagagaaaatccaggaagccaaagatgtctacaaagaacatttccaagatgatgtctttaatgaaaagggatggaactacattcttgagaagtatgatgggcatcttccaatagaaataaaagctgttcctgagggctttgtcattcccagaggaaatgttctcttcacggtggaaaacacagatccagagtgttactggcttacaaattggattgagatttgaagctgcttcaaataacaatctggtttataaaatgaaaatagaaaattatgatcttagaatgaagaagtgaat

SEQ ID NO: 13371 - DNA, 589 bp, Homo sapiens
  source 1..589: mol_type = unassigned DNA
atttttctccttcctcgcagccgcgccagggagctcgcggcgcgcggcccctgtcctccggcccgagatgaatcctgcggcagaagccgagttcaacatcctcctggccaccgactcctacaaggttactcactataaacaatatccacccaacacaagcaaagtttattcctactttgaatgccgtgaaaagaagacagaaaactccaaattaaggaaggtgaaatatgaggaaacagtattttatgggttgcagtacattcttaataagtacttaaaaggtaaagtagtaaccaaagagaaaatccaggaagccaaagatgtctacaaagaacatttccaagatgatgtctttaatgaaaagggatggaactacattcttgagaagtatgatgggcatcttccaatagaaataaaagctgttcctgagggctttgtcattcccagaggaaatgttctcttcacggtggaaaacacagatccagagtgttactggcttacaaattggattgagcacagacattgcatcatcttagcagctctttttcaaacagatttgaagctgcttcaaataacaatctggtttata

SEQ ID NO: 13372 - DNA, 1115 bp, Homo sapiens
  source 1..1115: mol_type = unassigned DNA
gagatgaatcctgcggcagaagccgagttcaacatcctcctggccaccgactcctacaaggttactcactataaacaatatccacccaacacaagcaaagtttattcctactttgaatgccgtgaaaagaagacagaaaactccaaattaaggaaggtgaaatatgaggaaacagtattttatgggttgcagtacattcttaataagtacttaaaaggtaaagtagtaaccaaagagaaaatccaggaagccaaagatgtctacaaagaacatttccaagatgatgtctttaatgaaaagggatggaactacattcttgagaagtatgatgggcatcttccaatagaaataaaagctgttcctgagggctttgtcattcccagaggaaatgttctcttcacggtggaaaacacagatccagagtgttactggcttacaaattggattgaggtaaattgtttttttaattcttatttaacattaattgaataaagaccattgaactgagattacagtttagaatttgttactaataaagctatataatctcctataatttacttaacctttccaggcttcaatttcctcatctataaaatgacagactaaataatctttaaggtttcttctagtagaatagaatgttctgagattttgtttaaatcaaattattgagagtgattgtttttaaaacctagttggctttcatctaattcattgccattttaagtgtgtattattttagagcaaacttagaaaaacagcacatttctagtaacttacgacattcgatgaatgataaatgttcaagttagactaaaggaactttattccaacttctagtaactactttcttcatttttctctcatcagtttaggtcttaggatctaccatctgttacttttcagtttctcatctaaataaaacaagatctgctgttcatattgtttaatttctcaggaagggtacattttgggctttgggtttatactgcgagccttttttttgtttttcttgtatgtatacctaagtagtcatatgttttcacatggtcagagttttgataataatactctacctagcttctgaacagtttaataatagatttaatccg

SEQ ID NO: 13373 - DNA, 581 bp, Homo sapiens
  source 1..581: mol_type = unassigned DNA
tttttctccttcctcgcagccgcgccagggagctcgcggcgcgcggcccctgtcctccggcccgagatgaatcctgcggcagaagccgagttcaacatcctcctggccaccgactcctacaaggttactcactataaacaatatccacccaacacaagcaaagtttattcctactttgaatgccgtgaaaagaagacagaaaactccaaattaaggaaggtgaaatatgaggaaacagtattttatgggttgcagtacattcttaataagtacttaaaaggtaaagtagtaaccaaagagaaaatccaggaagccaaagatgtctacaaagaacatttccaagatgatgtctttaatgaaaagggatggaactacattcttgagaagtatgatgggcatcttccaatagaaataaaagctgttcctgagggctttgtcattcccagaggaaatgttctcttcacggtggaaaacacagatccagagtgttactggcttacaaattggattgagtttaggtcttaggatctaccatctgttacttttcagtttctcatctaaataaaacaagatctgctgtt

SEQ ID NO: 13374 - DNA, 1147 bp, Homo sapiens
  source 1..1147: mol_type = unassigned DNA
tagtgttgactgaggttgtctttattagaagtctcagccatgcctccagtttcgagatgaatctcaattcacaagttccactatgaatctcaattcacaagttccactaccaccaccaccatcactgcccccagatagaatgagacttctaataacttgaaagacaagtctataaatatcctgtaatcgttttcactgtatcactttttcctggctacttttatccgataaaaacctcaatttatttttaagctattaaacatgcggacaaagggaatcttagttttatgcaaaaacgcaaccacgcatgagaactgcgcaagtctttcttggaatggtctgtatttgggtgaagtcatcagacgtcattacacttctttattttggggttgccaactcgtttcccaggatttaaagactataacgatgataaaagtcagtgtcgcaccctgtcaaaggcttggcccgttgccttttccttcccggcaatactcggttcaattaggtcttgtcccctcattatctgtgaggactgaattccacccccgcttttcaacgcaggctctttgctcgggaaaagtcaaaccatctctcaaaggatcaaagagctcagccatagacagagccgccggaggaaagcggagtcgctgcatcagatgaaaggggcccctcagcctcactcctcaccgcagctcctgggatcttaaagacagggtcaggaggatcaggagggacaagagggatggaggcgaaaggctggatccttaatccaggccggagacaaagtgacttaagcaacggagcgcggtgaagctcatttttctccttcctcgcagccgcgccagggagctcgcggcgcgcggcccctgtcctccggcccgagatgaatcctgcggcagaagccgagttcaacatcctcctggccaccgactcctacaaggttactcactataaacaatatccacccaacacaagcaaagtttattcctactttgaatgccgtgaaaagaagacagaaaactccaaattaaggaaggtgaaatatgaggaaacagtattttatgggttgcagtacattcttaataagtacttaaaaggtaaagtagtaaccaaagagaaaatccaggaagccaaagatgtctacaaa

SEQ ID NO: 13375 - DNA, 1976 bp, Homo sapiens
  source 1..1976: mol_type = unassigned DNA
tttttctccttcctcgcagccgcgccagggagctcgcggcgcgcggcccctgtcctccggcccgagatgaatcctgcggcagaagccgagttcaacatcctcctggccaccgactcctacaaggttactcactataaacaatatccacccaacacaagcaaagtttattcctactttgaatgccgtgaaaagaagacagaaaactccaaattaaggaaggtgaaatatgaggaaacagtattttatgggttgcagtacattcttaataagtacttaaaaggtattacttttcctagtatattttaaacactgcttattactcttaactcctttaggagttcttttagaatttttaacaaatctgttaatttggatgcattaaatcatataatttggtgtgtgtttgatgttctaagtatgagaaaagttttctgaaataaaaggtttttttttttttttggaaaccgagtttcgctcttgttggccaggctggagtgcaatggcatgatctcaactcagcgcaacctccgcctcctggtttcaggcaattctcctgcctctgcctcccgagtagatgggattacaggcatgcaccaccacacccaactaattttgtgtttttagtgaagacgggctttctccatgttggtcaggctggtcttgaactctcgacctcaggtgatccacctgtctcggcccaccaaagtgctgtgattacaggcgtgagccaccactcctggccgaactaaaagttttgaaataagtttagaaaagtcattaatttttggaggctaatcttgtttgttatactttagtcattaattcaaagtaaaggagttgttaatgaactggaaactccttttgaattatggtagcaatcagaatatttttatattagccagttttaccttgaagacctatttttaaaaactacctgtgtctctggacttagttgcaaatgcatattaaaacaaaaatcccccaatttctgtgctttcttatttgaaaggccatttctagggggaaaacagttcccaaacacattatacatgttggaaaagtttatctctaaccttttgaattaaacaatttcagaattgaaaacagtaaggtgaattttaggccaataactcttttctataatcttgactcttttaagattaggcagttcagatagtcttatactactgaaaacctagctagatatcagaagtaattattagtggcaagaataccaaagttaataccaaagtttttttgttttgttttgtttttagacagggtctcactcagtcacccaggctggagtgcagtggtgcaatcttggctcactgcaacctctgcctcccaggctccagagatccttcctgctcagcctctcaagtaactgggaccacaggctcgcaccaccatgcctggctacttttttatagtgacagggtctcaccatgttgaccaggctggtctcaaacttttgagctctcaagcgacccgcccgccttggcctcccaaaatgctgggattacagacatgagccaccacgcctggccccaagatactttaaacgagtttactagttatcttgtattaagttaccagcaactgatagcacactttaatttagtcatacaacttaagaactttgtaaaatattactcatttttaattataactaaaatgtattgattacctattctaggccagcattattgtaagtggttcgtatgtcttaactcattttgtcctcacaaacatcatataagtgggtactcgacttttatcctcatttacggataagaaaagttaattaaaagtgtgttgtttggggggcagacatttagtaattgtggaaattactgacttaccaaccctaaagatgccacattctttacgaacgaagtgagacgtttcatttggatgtaagaagcttttgagtcatctcaaagttgaaaagtaccaaaattaatcgagagaaa

SEQ ID NO: 13376 - DNA, 300 bp, Homo sapiens
  source 1..300: mol_type = unassigned DNA
gtcaggaggatcaggagggacaagagggatggaggcgaaaggctggatccttaatccaggccggagacaaagccgcgccagggagctcgcggcgcgcggcccctgtcctccggcccgagatgaatcctgcggcagaagccgagttcaacatcctcctggccaccgactcctacaaggttactcactataaacaatatccacccaacacaagcaaagtttattcctactttgaatgccgtgaaaagaagacagaaaactccaaattaaggaaggtgaaatatgaggaaacagtattttatg

SEQ ID NO: 13377 - DNA, 1839 bp, Homo sapiens
  source 1..1839: mol_type = unassigned DNA
tggagcgccgttcgccggtatgtgcgcatgcgttgaggtctcttgacgccgattggggggtcacgagtcacgggcggcgtgcggcggctggtgggggcgtgtccggcggagcgggcgcggcgttacgaggccgctggttggccagcgctagtcacgtggttcctggccgcaagcgacgcgcgccggtgcgacgtcaacgcagccgggcgagttttaccgatctgtgttccgcggcccggccgcggctgagtcttcccagggtcagggtcaggcgctttgctgagtccctttgtggccgccatggacaattccgggaaggaagcggaggcgatggcgctgttggccgaggcggagcgcaaagtgaagaactcgcagtccttcttctctggcctctttggaggctcatccaaaatagaggaagcatgcgaaatctacgccagagcagcaaacatgttcaaaatggccaaaaactggagtgctgctggaaacgcgttctgccaggctgcacagctgcacctgcagctccagagcaagcacgacgcagccacctgctttgtggacgctggcaacgcattcaagaaagccgacccccaagaggccattaactgtttgatgcgagcaatcgagatctacacagacatgggccgattcacgattgcggccaagcaccacatctccattgctgagatctatgagacagagttggtggacatcgagaaggccattgcccactacgagcagtctgcagactactacaaaggcgaggagtccaacagctcagccaacaagtgtctgctgaaggtggctggttacgctgcgctgctggagcagtatcagaaggccattgacatctacgaacaggtggggaccaatgccatggacagccccctcctcaagtacagcgccaaagactacttcttcaaggcggccctctgccacttctgcatcgacatgctcaacgccaagctggctgtccaaaagtatgaggagctgttcccagctttctctgattcccgggaatgcaagttgatgaaaaaattgctagaggcccacgaggagcagaatgtggacagctacaccgagtcggtgaaggaatacgactccatctcccggctggaccagtggctcaccaccatgctgctgcgcatcaagaagaccatccagggcgatgaggaggacctgcgctaagccccacccagccccccagtgcccgtcttcctgtcccatctgctcagagagaggtggggccgagacttgctggagagcttccctcctttcccatctggggagtgccgcgggccacagtgggcaggtggcaccgggggtcagcatgcaggggcgccagaggcccaggctgctggccggacagtcaccctctgttctcgctacatcccttgccccctgtccatttatttaagcccccataggtgcccttcacccccaaaaccagctgtacagaatctttgatacagacctatttgctaggggtgctgccggggatttggggtcagcatctggccccctatctcctgaccagctgagtcatgaggccggtttctctctctctcccacttttgtcccccagccaagctctaaagcacatgtagccgctgagacctgctgtttctgctgggggcaggctcctcttcccccagccccgggagcctcccccagcttcctgcagccccgacctctcaggttagaccctgggccctggagcttaggggattctccccaccccagccccacacctgctccttccctaatgctttgaggttttcttggttggaagctgcagctggcccaagaaagaaaataaaaaacaacacttttgcatga

SEQ ID NO: 13378 - DNA, 3898 bp, Homo sapiens
  source 1..3898: mol_type = unassigned DNA
tagccgttgcttctgggtccgccgattacaggatgtatgtgtcttcaaactgccggatttaggttgtgttctctccccttcctcctcatctgccccctttttgccaccgtttccactgtctgctgccacagtctcggtctgtcagccctagaacctggactgagtgctgtaccttctctcagtcccttttagatccccagaggtctttctgaattggacaaaacctacagaccccactccccagaggagtgcttatggaccccactgtttacatgtcagaaggaggggttggactccctgaaagcccagccacagacctgagacaaagagcctctgtccagatgcctccccacggagggagtttggagtcccatccagaccgtgagccccttgagaggagcccagccccggcgcttcttggtagcaccctcttctcaggcgaacatggcctgggtgaccatggagacccccacggtgaccaggaactttcagatgcccaggctgaagctcagagcccatgccctgtggcctgtccaagctccctgcctttccctctccccaacccaggcctccctccccacaacacccctgtcctcctgagatgtgctaaaatggtgttcttaaaaaataccccctgagagctcatttctgtctgctagaaaatgcctcccactcatgcttttctctctcctccaaataacttgtcaaaaaaaagcctttcccaaatttaaaatcttgcaagagatagtacaacaaaggtagcccagttcttcctcagtgccatcctggtgtgttcaggttttttggcaaaacctttgaggagctggtgggtggcaggactaggttaaagggactgagcagagggctcccgactgctgagctacgaggaagagggggcagtggagagcacactgagggctcagtgttgatgacatccagcctcctcgtgccagaggtccaggtcctcctggtgcaggagcagaagctgctcaggatcctgcagagatggtggcagagcccaggtagaacctggcaccctgttgcctccaagaccacctcagatgctggtttggccgcctcccatgcctccttcccctttgccagcagctcagtccttcaagagcagggccttggcaggtctgtcttaaaacaccgtgggagtctggccatcatcctggcctagcactgctgtgccctgtccctggggttgtgggaagctggtagcatcctggcagcccgaggagagaagggctcccccagaagcatgtgcccagcaagtcacagtctgcagagtcagccctctcaccagatttcctggggctcagggattccgtccccttcttcccagccccttgagagtgtgtggcagcgctggcagctctgagcgcctattgatctctctgctggcagccaggtgcgcctgcgtccgcctcctctcctcagcttctgctgaaacgacttcactttctcatgtctcctcccacctccctttctctccagaggccattaactgtttgatgcgagcaatcgagatctacacagacatgggccgattcacgattgcggccaagcaccacatctccattgctgagatctatgagacagagttggtggacatcgagaaggtgagtggcagcagggccctgcatgggctggcagccaggaccagtgctgctctctcttcttcccaccaggggagtcctctggtgtctgagtgccgagaagggggcatggggcgccggcagagcttggagaatggggtctggctgtgtcccaggcaggcagggcggagggtgtggaagcttcacggaggcctcctctcccttccctgccctcccctggaacccatcccccgtgtctccccaggccattgcccactacgagcagtctgcagactactacaaaggcgaggagtccaacaggtagcccccttcctgcctgccccagccccgcagggaccgccaccacttcccctcactactcctccccacacagctcagccaacaagtgtctgctgaaggtggctggttacgctgcgctgctggagcagtatcagaaggccattgacatctacgaacaggtggggacaggtggggatggcggcttccaccctgccccctctcagggcctgtgcctcctcctaagccccggcaccttgttctggaaccacccctcccccggctcaccctctgcctctcccccgacatcccttgccatgtcatccccccaccctgtcttcagcctggctgaatgttctccacctacgactccatgccgtgccagcaccgtctctctccctggctgtgcccctcccacacccctcgcagagcttcctggaggggcccagagtgaggctggctaaagaacccagagggagggaatgggaagaagtgccaagaggcccagggtggccgtgggcaccccaccccatggcccgatggtcctcatccacagtgggagggagggagtgtcacatggggtccccccagcgtgcacggagccctgggtgatggccgagaaaaaggcaggcagctggccccctgggagagaggggcgggcgccgcctctcatgttcccaccgcctgccgccgctctgcccaccgccatgccagcctcccgttggtcctgacagccaggctgcctccttcccactgtctcaggctctcagaaggcccacgaacacctggctacagcctccacccccacccagccaccatcacaccctgatcttggtcgctcacgcactggccgctgacctctccaagctggtccctggctccctgcccttggggtcctgggttaacagggcctcacctcgggacatgaaccagctcccagctggccccccagtgcctggcagtggctctggccctctggctgcttgccctgagctcaccagtgccacttctccatggctacaggtggggaccaatgccatggacagccccctcctcaagtacagcgccaaagactacttcttcaaggcggccctctgccacttctgcatcgacatgctcaacgccaagctggctgtccaaaagtatgaggagctgttcccagctttctctgattcccgggaatgcaagttgatgaaaaaattgctagaggcccacgaggagcagaatgtggacagctacaccgagtcggtgaaggaatacgactccatctcccggctggaccagtggctcaccaccatgctgctgcgcatcaagaagaccatccagggcgatgaggaggacctgcgctaagccccacccagccccccagtgcccgtcttcctgtcccatctgctcagagagaggtggggccgagacttgctggagagcttccctcctttcccatctggggagtgccgcgggccacagtgggcaggtggcaccgggggtcagcatgcaggggcgccagaggcccaggctgctggccggacagtcaccctctgttctcgctacatcccttgccccctgtccatttatttaagcccccataggtgcccttcacccccaaaaccagctgtacagaatctttgatacagacctatttgctaggggtgctgccggggatttggggtcagcatctggccccctatctcctgaccagctgagtcatgaggccggtttctctctctctcccacttttgtcccccagccaagctctaaagcacatgtagccgctgagacctgctgtttctgctgggggcaggctcctcttcccccagccccgggagcctcccccagcttcctgcagccccgacctctcaggttagaccctgggccctggagcttaggggattctccccaccccagccccacacctgctccttccctaatgctttgaggttttcttggttggaagctgcagctggcccaagaaagaaaataaaaaacaacacttttgcatg

SEQ ID NO: 13379 - DNA, 554 bp, Homo sapiens
  source 1..554: mol_type = unassigned DNA
cacttctgcatcgacatgctcaacgccaagctggctgtccaaaagtatgaggagctgttcccagctttctctgattcccgggaatgcaagttgatgaaaaaattgctagaggcccacgaggagcagaatgtggacagctacaccgagtcggtgaaggaatacgactccatctcccggctggaccagtggctcaccaccatgctgctgcgcatcaagaagaccatccagggcgatgaggaggacctgcgctaagccccacccagccccccagtgcccgtcttcctgtcccatctgctcagagagagccaagctctaaagcacatgtagccgctgagacctgctgtttctgctgggggcaggctcctcttcccccagccccgggagcctcccccagcttcctgcagccccgacctctcaggttagaccctgggccctggagcttaggggattctccccaccccagccccacacctgctccttccctaatgctttgaggttttcttggttggaagctgcagctggcccaagaaagaaaataaaaaacaacacttttg

SEQ ID NO: 13380 - DNA, 1467 bp, Homo sapiens
  source 1..1467: mol_type = unassigned DNA
ggagtttttttaccattgcctggcagaagcacggagtccaggatttcctggtgtccctggctcacggcctggggtggtggccccacacaccccacacacacacaccccacagagccctgccctgctgtgggcaccggtggtgggcaaaagcttgggctttgtcagaccaggttcccattcccaccccatgtctcaccgtgccctgggcaggtcactgcccctctctggatctgtttcctcactttgaaaagggggctcaccgtcatttgaccctctcagggtcctcaagaagcaccagccccaggcctggcatggaggatgtgctcatttgtcccctgccccagctgagccaggtgggaggaggcagtgggtgcctatctggggaaccttccccctccacccacctctccctgcagccatctctgcagccaggctggtgctgagctcagctacgggaaggtactgacagacacagagccaggtgacacctgaggctgggggaggggtgcaagagctgactcaatatcacccgacatccccaagtcccctcagctgctaggccagtagctctgaggaccctcttgttactaactcatcttctcccttccctgctgcccagctggctgtccaaaagtatgaggagctgttcccagctttctctgattcccgggaatgcaagttgatgaaaaaattgctagaggcccacgaggagcagaatgtggacagctacaccgagtcggtgaaggaatacgactccatctcccggctggaccagtggctcaccaccatgctgctgcgcatcaagaagaccatccagggcgatgaggaggacctgcgctaagccccacccagccccccagtgcccgtcttcctgtcccatctgctcagagagaggtggggccgagacttgctggagagcttccctcctttcccatctggggagtgccgcgggccacagtgggcaggtggcaccgggggtcagcatgcaggggcgccagaggcccaggctgctggccggacagtcaccctctgttctcgctacatcccttgccccctgtccatttatttaagcccccataggtgcccttcacccccaaaaccagctgtacagaatctttgatacagacctatttgctaggggtgctgccggggatttggggtcagcatctggccccctatctcctgaccagctgagtcatgaggccggtttctctctctctcccacttttgtcccccagccaagctctaaagcacatgtagccgctgagacctgctgtttctgctgggggcaggctcctcttcccccagccccgggagcctcccccagcttcctgcagccccgacctctcaggttagaccctgggccctggagcttaggggattctccccaccccagccccacacctgctccttccctaatgctttgaggttttcttggttggaagctgcagctggcccaagaaagaa

SEQ ID NO: 13381 - DNA, 1460 bp, Homo sapiens
  source 1..1460: mol_type = unassigned DNA
tctgtgttccgcggcccggccgcggctgagtcttcccagggtcagggtcaggcgctttgctgagtccctttgtggccgccatggacaattccgggaaggaagcggaggcgatggcgctgttggccgaggcggagcgcaaagtgaagaactcgcagtccttcttctctggcctctttggaggctcatccaaaatagaggaagcatgcgaaatctacgccagagcagcaaacatgttcaaaatggccaaaaactggagtgaggccattaactgtttgatgcgagcaatcgagatctacacagacatgggccgattcacgattgcggccaagcaccacatctccattgctgagatctatgagacagagttggtggacatcgagaaggccattgcccactacgagcagtctgcagactactacaaaggcgaggagtccaacagctcagccaacaagtgtctgctgaaggtggctggttacgctgcgctgctggagcagtatcagaaggccattgacatctacgaacaggtggggaccaatgccatggacagccccctcctcaagtacagcgccaaagactacttcttcaaggcggccctctgccacttctgcatcgacatgctcaacgccaagctggctgtccaaaagtatgaggagctgttcccagctttctctgattcccgggaatgcaagttgatgaaaaaattgctagaggcccacgaggagcagaatgtggacagctacaccgagtcggtgaaggaatacgactccatctcccggctggaccagtggctcaccaccatgctgctgcgcatcaagaagaccatccagggcgatgaggaggacctgcgctaagccccacccagccccccagtgcccgtcttcctgtcccatctgctcagagagaggtggggccgagacttgctggagagcttccctcctttcccatctggggagtgccgcgggccacagtgggcaggtggcaccgggggtcagcatgcaggggcgccagaggcccaggctgctggccggacagtcaccctctgttctcgctacatcccttgccccctgtccatttatttaagcccccataggtgcccttcacccccaaaaccagctgtacagaatctttgatacagacctatttgctaggggtgctgccggggatttggggtcagcatctggccccctatctcctgaccagctgagtcatgaggccggtttctctctctctcccacttttgtcccccagccaagctctaaagcacatgtagccgctgagacctgctgtttctgctgggggcaggctcctcttcccccagccccgggagcctcccccagcttcctgcagccccgacctctcaggttagaccctgggccctggagcttaggggattctccccaccccagccccacacctgctccttccctaatgctttgaggttttcttggttggaagctgca

SEQ ID NO: 13382 - DNA, 1417 bp, Homo sapiens
  source 1..1417: mol_type = unassigned DNA
ccggtgcgacgtcaacgcagccgggcgagttttaccgatctgtgttccgcggcccggccgcggctgagtcttcccagggtcagggtcaggcgctttgctgagtccctttgtggccgccatggacaattccgggaaggaagcggaggcgatggcgctgttggccgaggcggagcgcaaagtgaagaactcgcagtccttcttctctggcctctttggaggccattaactgtttgatgcgagcaatcgagatctacacagacatgggccgattcacgattgcggccaagcaccacatctccattgctgagatctatgagacagagttggtggacatcgagaaggccattgcccactacgagcagtctgcagactactacaaaggcgaggagtccaacagctcagccaacaagtgtctgctgaaggtggctggttacgctgcgctgctggagcagtatcagaaggccattgacatctacgaacaggtggggaccaatgccatggacagccccctcctcaagtacagcgccaaagactacttcttcaaggcggccctctgccacttctgcatcgacatgctcaacgccaagctggctgtccaaaagtatgaggagctgttcccagctttctctgattcccgggaatgcaagttgatgaaaaaattgctagaggcccacgaggagcagaatgtggacagctacaccgagtcggtgaaggaatacgactccatctcccggctggaccagtggctcaccaccatgctgctgcgcatcaagaagaccatccagggcgatgaggaggacctgcgctaagccccacccagccccccagtgcccgtcttcctgtcccatctgctcagagagaggtggggccgagacttgctggagagcttccctcctttcccatctggggagtgccgcgggccacagtgggcaggtggcaccgggggtcagcatgcaggggcgccagaggcccaggctgctggccggacagtcaccctctgttctcgctacatcccttgccccctgtccatttatttaagcccccataggtgcccttcacccccaaaaccagctgtacagaatctttgatacagacctatttgctaggggtgctgccggggatttggggtcagcatctggccccctatctcctgaccagctgagtcatgaggccggtttctctctctctcccacttttgtcccccagccaagctctaaagcacatgtagccgctgagacctgctgtttctgctgggggcaggctcctcttcccccagccccgggagcctcccccagcttcctgcagccccgacctctcaggttagaccctgggccctggagcttaggggattctccccaccccagccccacacctgctccttccctaatgctttgaggttttcttggttggaagctgc

SEQ ID NO: 13383 - DNA, 891 bp, Homo sapiens
  source 1..891: mol_type = unassigned DNA
taccgatctgtgttccgcggcccggccgcggctgagtcttcccagggtcagggtcaggcgctttgctgagtccctttgtggccgccatggacaattccgggaaggaagcggaggcgatggcgctgttggccgaggcggagcgcaaagtgaagaactcgcagtccttcttctctggcctctttggaggctcatccaaaatagaggaagcatgcgaaatctacgccagagcagcaaacatgttcaaaatggccaaaaactggagtggtatgtcatctccgctagagctcctccaagctgctggaaacgcgttctgccaggctgcacagctgcacctgcagctccagagcaagcacgacgcagccacctgctttgtggacgctggcaacgcattcaagaaagccgacccccaagaggccattaactgtttgatgcgagcaatcgagatctacacagacatgggccgattcacgattgcggccaagcaccacatctccattgctgagatctatgagacagagttggtggacatcgagaaggccattgcccactacgagcagtctgcagactactacaaaggcgaggagtccaacagctcagccaacaagtgtctgctgaaggtggctggttacgctgcgctgctggagcagtatcagaaggccattgacatctacgaacaggtggggaccaatgccatggacagccccctcctcaagtacagcgccaaagactacttcttcaaggcggccctctgccacttctgcatcgacatgctcaacgccaagctggctgtccaaaagtatgaggagctgttcccagctttctctgattcccgggaatgcaagttgatgaaaaaattgctagaggcccacgaggagcagaatgtggacagct

SEQ ID NO: 13384 - DNA, 548 bp, Homo sapiens
  source 1..548: mol_type = unassigned DNA
acctctcgatcttcttcacacctcaggtcttcttcatacctcctcacaggcgtggctgaggggtgggaacttgaagggtcataggtcagcaggcaggcacgcaggaggtcatgagtcgcaggcagccccttcctgtgtcccctccagggccgattcacgattgcggccaagcaccacatctccattgctgagatctatgagacagagttggtggacatcgagaaggccattgcccactacgagcagtctgcagactactacaaaggcgaggagtccaacagctcagccaacaagtgtctgctgaaggtggctggttacgctgcgctgctggagcagtatcagaaggccattgacatctacgaacaggtggggaccaatgccatggacagccccctcctcaagtacagcgccaaagactacttcttcaaggcggccctctgccacttctgcatcgacatgctcaacgccaagctggctgtccaaaagtatgaggagctgttcccagctttctctgattcccgggaatgcaagttgatgaaaaaattgct

SEQ ID NO: 13385 - DNA, 416 bp, Homo sapiens
  source 1..416: mol_type = unassigned DNA
ctgctggaaacgcgttctgccaggctgcacagctgcacctgcagctccagagcaagcacgacgcagccacctgctttgtggacgctggcaacgcattcaagaaagccgacccccaagaggccattaactgtttgatgcgagcaatcgagatctacacagacatgggccgattcacgattgcggccaagcaccacatctccattgctgagatctatgagacagagttggtggacatcgagaaggtggggaccaatgccatggacagccccctcctcaagtacagcgccaaagactacttcttcaaggcggccctctgccacttctgcatcgacatgctcaacgccaagctggctgtccaaaagtatgaggagctgttcccagctttctctgattcccgggaatgcaagttgatgaaa

SEQ ID NO: 13386 - DNA, 989 bp, Homo sapiens
  source 1..989: mol_type = unassigned DNA
cgcagccgggcgagttttaccgatctgtgttccgcggcccggccgcggctgagtcttcccagggtcagggtcaggcgctttgctgagtccctttgtggccgccatggacaattccgggaaggaagcggaggcgatggcgctgttggccgaggcggagcgcaaagtgaagaactcgcagtccttcttctctggcctctttgggccccatccagaccctactgagcgaatcccaaagtgtgtggctgtgggactctggtttgatgaaatgagcacttcatgtggctgaaagggatgggcaggttggacacactgaatccgcagtgcagagggaaggaatgctcacatcccagctcccaaaattacctttgagcccctccacagctggggttggtgtggacaagttcccagaggctcatccaaaatagaggaagcatgcgaaatctacgccagagcagcaaacatgttcaaaatggccaaaaactggagtgctgctggaaacgcgttctgccaggctgcacagctgcacctgcagctccagagcaagcacgacgcagccacctgctttgtggacgctggcaacgcattcaagaaagccgacccccaagaggccattaactgtttgatgcgagcaatcgagatctacacagacatgggccgattcacgattgcggccaagcaccacatctccattgctgagatctatgagacagagttggtggacatcgagaaggccattgcccactacgagcagtctgcagactactacaaaggcgaggagtccaacagctcagccaacaagtgtctgctgaaggtggctggttacgctgcgctgctggagcagtatcagaaggccattgacatctacgaacaggtggggaccaatgccatggacagccccctcctcaagtacagcgccaaagactacttcttcaaggcggccctctgccacttctgcatcgacatgctcaacgccaagctggctgtccaaa

SEQ ID NO: 13387 - DNA, 379 bp, Homo sapiens
  source 1..379: mol_type = unassigned DNA
ggcgaattgcctggtgtggagaaacatccggggctgatggactggattgattagaggccattaactgtttgatgcgagcaatcgagatctacacagacatgggccgattcacgattgcggccaagcaccacatctccattgctgagatctatgagacagagttggtggacatcgagaaggccattgcccactacgagcagtctgcagactactacaaaggcgaggagtccaacagctcagccaacaagtgtctgctgaaggtggctggttacgctgcgctgctggagcagtatcagaaggccattgacatctacgaacaggtggggaccaatgccatggacagccccctcctcaagtacagcgccaaagactacttctt

SEQ ID NO: 13388 - DNA, 894 bp, Homo sapiens
  source 1..894: mol_type = unassigned DNA
gatctgtgttccgcggcccggccgcggctgagtcttcccagggtcagggtcaggcgctttgctgagtccctttgtggccgccatggacaattccgggaaggaagcggaggcgatggcgctgttggccgaggcggagcgcaaagtgaagaactcgcagtccttcttctctggcctctttggaggccattaactgtttgatgcgagcaatcgagatctacacagacatgggccgattcacgattgcggccaagcaccacatctccattgctgagatctatgagacagagttggtggacatcgagaaggccattgcccactacgagcagtctgcagactactacaaaggcgaggagtccaacaggtagcccccttcctgcctgccccagccccgcagggaccgccaccacttcccctcactactcctccccacacagctcagccaacaagtgtctgctgaaggtggctggttacgctgcgctgctggagcagtatcagaaggccattgacatctacgaacaggtggggacaggtggggatggcggcttccaccctgccccctctcagggcctgtgcctcctcctaagccccggcaccttgttctggaaccacccctcccccggctcaccctctgcctctcccccgacatcccttgccatgtcatccccccaccctgtcttcagcctggctgaatgttctccacctacgactccatgccgtgccagcaccgtctctctccctggctgtgcccctcccacacccctcgcagagcttcctggaggggcccagagtgaggctggctaaagaacccagagggagggaatgggaagaagtgccaagaggcccagggtggccgtgggcaccccaccccatggcccgatggtcctcatccacagt

SEQ ID NO: 13389 - DNA, 643 bp, Homo sapiens
  source 1..643: mol_type = unassigned DNA
ccgccatggacaattccgggaaggaagcggaggcgatggcgctgttggccgaggcggagcgcaaagtgaagaactcgcagtccttcttctctggcctctttggctgctggaaacgcgttctgccaggctgcacagctgcacctgcagctccagagcaagcacgacgcagccacctgctttgtggacgctggcaacgcattcaagaaagccgacccccaagaggccattaactgtttgatgcgagcaatcgagatctacacagacatgggccgattcacgattgcggccaagcaccacatctccattgctgagatctatgagacagagttggtggacatcgagaaggccattgcccactacgagcagtctgcagactactacaaaggcgaggagtccaacaggtagcccccttcctgcctgccccagccccgcagggaccgccaccacttcccctcactactcctccccacacagctcagccaacaagtgtctgctgaaggtggctggttacgctgcgctgctggagcagtatcagaaggccattgacatctacgaacaggtggggacaggtggggatggcggcttccaccctgccccctctcagggcctgtgcctcctcctaagccccggcaccttgttctgg

SEQ ID NO: 13390 - DNA, 853 bp, Homo sapiens
  source 1..853: mol_type = unassigned DNA
ccggccgcggctgagtcttcccagggtcagggtcaggcgctttgctgagtccctttgtggccgccatggacaattccgggaaggaagcggaggcgatggcgctgttggccgaggcggagcgcaaagtgaagaactcgcagtccttcttctctggcctctttgggtgaataaatgtgtatgtgaatggcttcttcaggatcttccactggaacctaggcacgtcactttccccctttggggacttcactcccatttctaaaagaagaggatgggaccctggagatctcctgtcatcccctggccatgaggctcatccaaaatagaggaagcatgcgaaatctacgccagagcagcaaacatgttcaaaatggccaaaaactggagtgctgctggaaacgcgttctgccaggctgcacagctgcacctgcagctccagagcaagcacgacgcagccacctgctttgtggacgctggcaacgcattcaagaaagccgacccccaagaggccattaactgtttgatgcgagcaatcgagatctacacagacatgggccgattcacgattgcggccaagcaccacatctccattgctgagatctatgagacagagttggtggacatcgagaaggccattgcccactacgagcagtctgcagactactacaaaggcgaggagtccaacaggtagcccccttcctgcctgccccagccccgcagggaccgccaccacttcccctcactactcctccccacacagctcagccaacaagtgtctgctgaaggtggctggttacgctgcgctgctggagcagtatcagaaggccattgacatctacgaacaggtggggacagg

SEQ ID NO: 13391 - DNA, 553 bp, Homo sapiens
  source 1..553: mol_type = unassigned DNA
ggataatgtttagcaaaataacttgaagaacatgatggcgaattgcctggtgtggagaaacatccggggctgatggactggattgattagaggctcatccaaaatagaggaagcatgcgaaatctacgccagagcagcaaacatgttcaaaatggccaaaaactggagtgctgctggaaacgcgttctgccaggctgcacagctgcacctgcagctccagagcaagcacgacgcagccacctgctttgtggacgctggcaacgcattcaagaaagccgacccccaagaggccattaactgtttgatgcgagcaatcgagatctacacagacatgggccgattcacgattgcggccaagcaccacatctccattgctgagatctatgagacagagttggtggacatcgagaaggccattgcccactacgagcagtctgcagactactacaaaggcgaggagtccaacagctcagccaacaagtgtctgctgaaggtggctggttacgctgcgctgctggagcagtatcagaaggccattgacatctacgaacag

SEQ ID NO: 13392 - DNA, 415 bp, Homo sapiens
  source 1..415: mol_type = unassigned DNA
tgtcagaagctcgtccaggagccagctgtcccaggtgtctgctggtggcccgccgctttccagacatggaggggacttaaccccgtgagtccatgttgctgcctgggggaggccattaactgtttgatgcgagcaatcgagatctacacagacatgggccgattcacgattgcggccaagcaccacatctccattgctgagatctatgagacagagttggtggacatcgagaaggccattgcccactacgagcagtctgcagactactacaaaggcgaggagtccaacaggtagcccccttcctgcctgccccagccccgcagggaccgccaccacttcccctcactactcctccccacacagctcagccaacaagtgtctgctgaaggtggctggttacgctgcgctgctggag

SEQ ID NO: 13393 - DNA, 562 bp, Homo sapiens
  source 1..562: mol_type = unassigned DNA
gtttagcaaaataacttgaagaacatgatggcgaattgcctggtgtggagaaacatccggggctgatggactggattgattagaggctcatccaaaatagaggaagcatgcgaaatctacgccagagcagcaaacatgttcaaaatggccaaaaactggagtgctgctggaaacgcgttctgccaggctgcacagctgcacctgcagctccagagcaagcacgacgcagccacctgctttgtggacgctggcaacgcattcaagaaagccgacccccaagaggccattaactgtttgatgcgagcaatcgagatctacacagacatgggccgattcacgattgcggccaagcaccacatctccattgctgagatctatgagacagagttggtggacatcgagaaggccattgcccactacgagcagtctgcagactactacaaaggcgaggagtccaacaggtagcccccttcctgcctgccccagccccgcagggaccgccaccacttcccctcactactcctccccacacagctcagccaacaagtgtctgctgaaggtg

SEQ ID NO: 13394 - DNA, 857 bp, Homo sapiens
  source 1..857: mol_type = unassigned DNA
gagttttaccgatctgtgttccgcggcccggccgcggctgagtcttcccagggtcagggtcaggcgctttgctgagtccctttgtggccgccatggacaattccgggaaggaagcggaggcgatggcgctgttggccgaggcggagcgcaaagtgaagaactcgcagtccttcttctctggcctctttggaggctcatccaaaatagaggaagcatgcgaaatctacgccagagcagcaaacatgttcaaaatggccaaaaactggagtgctgctggaaacgcgttctgccaggctgcacagctgcacctgcagctccagagcaagcacgacgcagccacctgctttgtggacgctggcaacgcattcaagaaagccgacccccaagaggccattaactgtttgatgcgagcaatcgagatctacacagacatgggccgattcacgattgcggccaagcaccacatctccattgctgagatctatgagacagagttggtggacatcgagaaggtgagtggcagcagggccctgcatgggctggcagccaggaccagtgctgctctctcttcttcccaccaggggagtcctctggtgtctgagtgccgagaagggggcatggggcgccggcagagcttggagaatggggtctggctgtgtcccaggcaggcagggcggagggtgtggaagcttcacggaggcctcctctcccttccctgccctcccctggaacccatcccccgtgtctccccaggccattgcccactacgagcagtctgcagactactacaaaggcgaggagtccaacaggtagcccccttcctgcctgccccagccccgcagggaccgccaccactt

SEQ ID NO: 13395 - DNA, 583 bp, Homo sapiens
  source 1..583: mol_type = unassigned DNA
agtcacgtggttcctggccgcaagcgacgcgcgccggtgcgacgtcaacgcagccgggcgagttttaccgatctgtgttccgcggcccggccgcggctgagtcttcccagggtcagggtcaggcgctttgctgagtccctttgtggccgccatggacaattccgggaaggaagcggaggcgatggcgctgttggccgaggcggagcgcaaagtgaagaactcgcagtccttcttctctggcctctttggctgctggaaacgcgttctgccaggctgcacagctgcacctgcagctccagagcaagcacgacgcagccacctgctttgtggacgctggcaacgcattcaagaaagccgacccccaagaggccattaactgtttgatgcgagcaatcgagatctacacagacatgggccgattcacgattgcggccaagcaccacatctccattgctgagatctatgagacagagttggtggacatcgagaaggccattgcccactacgagcagtctgcagactactacaaaggcgaggagtccaacaggtagcccccttcctgcctgccccagccccgcaggga

SEQ ID NO: 13396 - DNA, 429 bp, Homo sapiens
  source 1..429: mol_type = unassigned DNA
ccagcaagtcacagtctgcagagtcagccctctcaccagatttcctggggctcagggattccgtccccttcttcccagccccttgagagtgtgtggcagcgctggcagctctgagcgcctattgatctctctgctggcagccaggtgcgcctgcgtccgcctcctctcctcagcttctgctgaaacgacttcactttctcatgtctcctcccacctccctttctctccagaggccattaactgtttgatgcgagcaatcgagatctacacagacatgggccgattcacgattgcggccaagcaccacatctccattgctgagatctatgagacagagttggtggacatcgagaaggccattgcccactacgagcagtctgcagactactacaaaggcgaggagtccaacaggtagcccccttcctgcct

SEQ ID NO: 13397 - DNA, 1536 bp, Homo sapiens
  source 1..1536: mol_type = unassigned DNA
gccgggcgagttttaccgatctgtgttccgcggcccggccgcggctgagtcttcccagggtcagggtcaggcgctttgctgagtccctttgtggccgccatggacaattccgggaaggaagcggaggcgatggcgctgttggccgaggcggagcgcaaagtgaagaactcgcagtccttcttctctggcctctttggaggctcatccaaaatagaggaagcatgcgaaatctacgccagagcagcaaacatgttcaaaatggccaaaaactggagtgctgctggaaacgcgttctgccaggctgcacagctgcacctgcagctccagagcaagcacgacgcagccacctgctttgtggacgctggcaacgcattcaagaaagccgacccccaagtcccttttagatccccagaggtctttctgaattggacaaaacctacagaccccactccccagaggagtgcttatggaccccactgtttacatgtcagaaggaggggttggactccctgaaagcccagccacagacctgagacaaagagcctctgtccagatgcctccccacggagggagtttggagtcccatccagaccgtgagccccttgagaggagcccagccccggcgcttcttggtagcaccctcttctcaggcgaacatggcctgggtgaccatggagacccccacggtgaccaggaactttcagatgcccaggctgaagctcagagcccatgccctgtggcctgtccaagctccctgcctttccctctccccaacccaggcctccctccccacaacacccctgtcctcctgagatgtgctaaaatggtgttcttaaaaaataccccctgagagctcatttctgtctgctagaaaatgcctcccactcatgcttttctctctcctccaaataacttgtcaaaaaaaagcctttcccaaatttaaaatcttgcaagagatagtacaacaaaggtagcccagttcttcctcagtgccatcctggtgtgttcaggttttttggcaaaacctttgaggagctggtgggtggcaggactaggttaaagggactgagcagagggctcccgactgctgagctacgaggaagagggggcagtggagagcacactgagggctcagtgttgatgacatccagcctcctcgtgccagaggtccaggtcctcctggtgcaggagcagaagctgctcaggatcctgcagagatggtggcagagcccaggtagaacctggcaccctgttgcctccaagaccacctcagatgctggtttggccgcctcccatgcctccttcccctttgccagcagctcagtccttcaagagcagggccttggcaggtctgtcttaaaacaccgtgggagtctggccatcatcctggcctagcactgctgtgccctgtccctggggttgtgggaagctggtagcatcctggcagcccgaggagagaagggctcccccagaagcatgtgcccagcaagtcacagtctgcagagtcagccctctcaccagatttcctggggctca

SEQ ID NO: 13398 - DNA, 516 bp, Homo sapiens
  source 1..516: mol_type = unassigned DNA
gccgggcgagttttaccgatctgtgttccgcggcccggccgcggctgagtcttcccagggtcagggtcaggcgctttgctgagtccctttgtggccgccatggacaattccgggaaggaagcggaggcgatggcgctgttggccgaggcggagcgcaaagtgaagaactcgcagtccttcttctctggcctctttggtcccttttagatccccagaggtctttctgaattggacaaaacctacagaccccactccccagaggagtgcttatggaccccactgtttacatgtcagaaggaggggttggactccctgaaagcccagccacagacctgagacaaagagcctctgtccagatgcctccccacggagggagtttggagtcccatccagaccgtgagccccttgagaggagcccagccccggcgcttcttggtagcaccctcttctcaggcgaacatggcctgggtgaccatggagacccccacggtgaccaggaactttcagatgcccagg

SEQ ID NO: 13399 - DNA, 2519 bp, Homo sapiens
  source 1..2519: mol_type = unassigned DNA
gtagcgtgatgacgtaagcggcgttggcgtggtgtggtaggagtggttgcgcgtgttgcggcccgggttctgttcgtaggtttacaattgtcgcgggtagtggggcgccccagctgccaactgcacgtggtttctttctggcgtttgcctagtgtcctgtccattccgccccgttgggaagtgggaagcggagaggttctgtggggacagagctgggagtcctgaaggagaaagcgcgcagccgaggggctctggagtgccttagagcagagctgcggccgcggaaggggagcagctgagaaaggagggccgctgcaggcggggttcgaaccgtggggtctgggctgctcccgcggagggcctgggcggacgcgggatgctgggggtccgctgcctgctgcggtccgtgcgcttctgttcctccgcccccttccccaagcacaaaccttcagccaaactgagcgtgcgggacgctctcggggctcagaacgcgagtggggagcgcattaagatccagggatggattcgttctgtccgatcccagaaggaagtcttgttcctgcatgtaaatgatgggtcatctttggaaagccttcaggttgttgcagattcaggccttgacagtagagaattaaattttgggagttctgtggaagtacaagggcagctgataaaaagtccatccaaaaggcaaaatgtggaactgaaggcagaaaaaattaaagttattggaaattgtgatgccaaggatttccccatcaaatataaagagaggcatcctctggagtatctgcgacaatatcctcactttaggtgtaggactaacgttctgggttctatattgaggattcgcagtgaagcgacagctgctattcattctttctttaaggacagtggctttgtacatattcatactccaataatcacatccaatgactctgagggagctggagaactttttcaacttgaaccttcaggcaaacttaaggtacctgaggagaatttcttcaatgttcctgctttcttaactgtctcaggacaacttcatctagaagtgatgtcaggagcttttactcaagtgtttacctttggtccgaccttccgagctgaaaattctcagagccggaggcacctggcagagttttatatgatagaagcagagatttcttttgttgacagccttcaagatcttatgcaggttatagaggaactgttcaaggctacaacaatgatggttctctcaaaatgtcctgaagatgttgaactctgtcacaaattcatagcacctggccaaaaggacagattagaacatatgctaaaaaacaactttttaatcatttcttatactgaagcagtggagatcttaaagcaagcatcccagaacttcacctttaccccagagtggggtgctgacctacggactgaacatgaaaagtacctggtgaagcactgtggcaacatacctgtcttcgttattaattatccattaacactcaagcctttctacatgagggataatgaagatggccctcagcacacggttgctgctgttgatcttctggttcctggagttggggaactctttggaggaggcctcagagaagaacgataccatttcttagaggagcgcttagccagatcgggacttacagaagtctaccaatggtatctggaccttcgtcgatttggatctgtgccacatggaggttttgggatgggatttgaacgctacctgcagtgcatcttgggtgttgacaatatcaaagatgttatccctttcccaaggtttcctcattcatgccttttatagctggaagattggttaaggaaaagcaccccccatggcagagacactgcacatgattgtgcatacagcagaatgcatgtttggattttagaaatgcagatttcaatatgtaattgttgtgccataagatatcatagaaaaaatataagtggttgtgattttcttagaaagttgagggtatttcacgtaaggatgagctcccgcaagaagaggtacttatagcaaggggactctcaaatccattacctcaattaagaaatgaagaaattgaattagtctcaaagtttcttttaaactctaaaacagaatgagataatgtattttacgttgtctataatcattaaatcactccctgtgtaatttgtgagaaccatctagtagctcgaaataaaataatgttgcatcttttctcccttgccatatactttgtgataaatccttatctcattttcagtacttcattaaacattgcagaaaaaaatattccttaaggtcttaattgatttaaagaagtagctattctgaattgaaatctcctttcattgaactggatgaaaaaatcatgtttaataactgttgcttttcaattttcaaagctgttgagatattacattaagtatttcaactctttaatcactgttgttataatttgtttatatttgatgtttataatttgtctaataaaatagatttttttaatagacacctatgg

SEQ ID NO: 13400 - DNA, 725 bp, Homo sapiens
  source 1..725: mol_type = unassigned DNA
ggttgctgctgttgatcttctggttcctggagttggggaactctttggaggaggcctcagagaagaacgataccatttcttagaggagcgcttagccaggtatctggaccttcgtcgatttggatctgtgccacatggaggttttgggatgggatttgaacgctacctgcagtgcatcttgggtgttgacaatatcaaagatgttatccctttcccaaggtttcctcattcatgccttttatagctggaagattggttaaggaaaagcaccccccatggcagagacactgcacatgattgtgcatacagcagaatgcatgtttggattttagaaatgcagatttcaatatgtaattgttgtgccataagatatcatagaaaaaatataagtggttgtgattttcttagaaagttgagggtatttcacgtaaggatgagctcccgcaagaagaggtacttatagcaaggggactctcaaatccattacctcaattaagaaatgaagaaattgaattagtctcaaagtttcttttaaactctaaaacagaatgagataatgtattttacgttgtctataatcattaaatcactccctgtgtaatttgtgagaaccatctagtagctcgaaataaaataatgttgcatcttttctcccttgccatatactttgtgataaatccttatctcattttcagtacttcattaaacattgcagaaaaaaatat

SEQ ID NO: 13401 - DNA, 2137 bp, Homo sapiens
  source 1..2137: mol_type = unassigned DNA
agggtctagctctgtcacccagactggagcgcagtgatgtgatctcagatgactacaacctccatctcccaggctcaagcaatcctcctgcctcggcctccagagtagctgaaactataggcatgcaccaccacactctataattttttaagttttttgtgaagatgagtctcactgtattgcccaggctggtctcaaactcctggactcaagcagtcctcctccttcggcatcccaaaatgctgggattacaggcataagcctggtagatgttgttataataaatacttattttttgagtaggttcttgctttgtcacccatgattgtactgacacagtcatggcttgccgttgcagtgatttctgttgtcctcacatatcctttactttttagcgggatggattcgttctgtccgatcccagaaggaagtcttgttcctgcatgtaaatgatgggtcatctttggaaagccttcaggttgttgcagattcaggccttgacagtagagaattaaattttgggagttctgtggaagtacaagggcagctgataaaaagtccatccaaaaggcaaaatgtggaactgaaggcagaaaaaattaaagttattggaaattgtgatgccaaggatttccccatcaaatataaagagaggcatcctctggagtatctgcgacaatatcctcactttaggtgtaggactaacgttctgggttctatattgaggattcgcagtgaagcgacagctgctattcattctttctttaaggacagtggctttgtacatattcatactccaataatcacatccaatgactctgagggagctggagaactttttcaacttgaaccttcaggcaaacttaaggtacctgaggagaatttcttcaatgttcctgctttcttaactgtctcaggacaacttcatctagaagtgatgtcaggagcttttactcaagtgtttacctttggtccgaccttccgagctgaaaattctcagagccggaggcacctggcagagttttatatgatagaagcagagatttcttttgttgacagccttcaagatcttatgcaggttatagaggaactgttcaaggctacaacaatgatggttctctcaaaatgtcctgaagatgttgaactctgtcacaaattcatagcacctggccaaaaggacagattagaacatatgctaaaaaacaactttttaatcatttcttatactgaagcagtggagatcttaaagcaagcatcccagaacttcacctttaccccagagtggggtgctgacctacggactgaacatgaaaagtacctggtgaagcactgtggcaacatacctgtcttcgttattaattatccattaacactcaagcctttctacatgagggataatgaagatggccctcagcacacggttgctgctgttgatcttctggttcctggagttggggaactctttggaggaggcctcagagaagaacgataccatttcttagaggagcgcttagccagatcgggacttacagaagtctaccaatggtatctggaccttcgtcgatttggatctgtgccacatggaggttttgggatgggatttgaacgctacctgcagtgcatcttgggtgttgacaatatcaaagatgttatccctttcccaaggtttcctcattcatgccttttatagctggaagattggttaaggaaaagcaccccccatggcagagacactgcacatgattgtgcatacagcagaatgcatgtttggattttagaaatgcagatttcaatatgtaattgttgtgccataagatatcatagaaaaaatataagtggttgtgattttcttagaaagttgagggtatttcacgtaaggatgagctcccgcaagaagaggtacttatagcaaggggactctcaaatccattacctcaattaagaaatgaagaaattgaattagtctcaaagtttcttttaaactctaaaacagaatgagataatgtattttacgttgtctataatcattaaatcactccctgtgtaatttgtgagaaccatctagtagctcgaaataaaataatgttgcatcttttctcccttgccatatactttgtgataaatccttatctcattt

SEQ ID NO: 13402 - DNA, 861 bp, Homo sapiens
  source 1..861: mol_type = unassigned DNA
ccccatcaaatataaagagaggcatcctctggagtatctgcgacaatatcctcactttaggtgtaggactaacgttctgggttctatattgaggattcgcagtgaagcgacagctgctattcattctttctttaaggacagtggctttgtacatattcatactccaataatcacatccaatgactctgagggagctggagaactttttcaacttgaaccttcaggcaaacttaaggtacctgaggagaatttcttcaatgttcctgctttcttaactgtctcaggacaacttcatctagaagtgatgtcagggttatagaggaactgttcaaggctacaacaatgatggttctctcaaaatgtcctgaagatgttgaactctgtcacaaattcatagcacctggccaaaaggacagattagaacatatgctaaaaaacaactttttaatcatttcttatactgaagcagtggagatcttaaagcaagcatcccagaacttcacctttaccccagagtggggtgctgacctacggactgaacatgaaaagtacctggtgaagcactgtggcaacatacctgtcttcgttattaattatccattaacactcaagcctttctacatgagggataatgaagatggccctcagcacacggttgctgctgttgatcttctggttcctggagttggggaactctttggaggaggcctcagagaagaacgataccatttcttagaggagcgcttagccagatcgggacttacagaagtctaccaatggtatctggaccttcgtcgatttggatctgtgccacatggaggttttgggatgggatttgaacgctacctgcagtgcatcttg

SEQ ID NO: 13403 - DNA, 755 bp, Homo sapiens
  source 1..755: mol_type = unassigned DNA
gctcccgcggagggcctgggcggacgcgggatgctgggggtccgctgcctgctgcggtccgtgcgcttctgttcctccgcccccttccccaagcacaaaccttcagccaaactgagcgtgcgggacgctctcggggctcagaacgcgagtggggagcgcattaagatccagggatggattcgttctgtccgatcccagaaggaagtcttgttcctgcatgtaaatgatgggtcatctttggaaagccttcaggttgttgcagattcaggccttgacagtagagaattaaattttgggagttctgtggaagtacaagggcagctgataaaaagtccatccaaaaggcaaaatgtggaactgaaggcagaaaaaattaaagttattggaaattgtgatgccaaggatttccccatcaaatataaagagaggcatcctctggagtatctgcgacaatatcctcactttaggtgtaggactaacgttctgggttctatattgaggattcgcagtgaagcgacagctgctattcattctttctttaaggacagtggctttgtacatattcatactccaataatcacatccaatgactctgagggagctggagaactttttcaacttgaatggggtgctgacctacggactgaacatgaaaagtacctggtgaagcactgtggcaacatacctgtcttcgttattaattatccattaacactcaagcctttctacatgagggataatgaagatggccctca

SEQ ID NO: 13404 - DNA, 594 bp, Homo sapiens
  source 1..594: mol_type = unassigned DNA
cttcttccccgtagcgtgatgacgtaagcggcgttggcgtggtgtgggatggattcgttctgtccgatcccagaaggaagtcttgttcctgcatgtaaatgatgggtcatctttggaaagccttcaggttgttgcagattcaggccttgacagtagagaattaaattttgggagttctgtggaagtacaagggcagctgataaaaagtccatccaaaaggcaaaatgtggaactgaaggcagaaaaaattaaagttattggaaattgtgatgccaaggatttccccatcaaatataaagagaggcatcctctggagtatctgcgacaatatcctcactttaggtgtaggactaacgttctgggttctatattgaggattcgcagtgaagcgacagctgctattcattctttctttaaggacagtggctttgtacatattcatactccaataatcacatccaatgactctgagggagctggagaactttttcaacttgaaccttcaggcaaacttaaggtacctgaggagaatttcttcaatgttcctgctttcttaactgtctcaggacaacttcatctagaagtgatgtcagg

SEQ ID NO: 13405 - DNA, 374 bp, Homo sapiens
  source 1..374: mol_type = unassigned DNA
gaaatgttgtgcattattacgaaaacaaaagatagaataccaaagtgtgtatcctattgtgattggaacatataaaattaagtatgcatattggtgaactaaaagaagttgatttgttgaggcaggattgtgagtacatgttttactttcatttagtctgtgtgtgtatgtgtaatgaaaacgtaaaatgttttacgctcacattggaaatatttctcttccttagggatggattcgttctgtccgatcccagaaggaagtcttgttcctgcatgtaaatgatgggtcatctttggaaagccttcaggttgttgcagattcaggccttgacagtagagaattaaattttgggagttctgtggaagtacaagggc

SEQ ID NO: 13406 - DNA, 10667 bp, Homo sapiens
  source 1..10667: mol_type = unassigned DNA
tctcatgatgccggcagcagtcaccctcattgcaaaggcagtggtgccgagtgaggttcccgagtggattttaagaagacaggaagacctttgaagaggtggtgctgatttccttggctggcgggaactctgtctggctgttgcatgcatcacttttgtgtgggttattttgttcctctgtggatttggaagcatcgctgaaggagagagaggattttatttctgggaaatggaatcggtttctgagtccagccaacagcagaagagaaagccagttatccacggactggaagatcaaaagaggatctacacagactgggccaatcattacctagccaaatccggccacaagcgtctcatcagggatctccagcaagatgtgacagatggcgtcctcctggcccagattatccaggttgtggcaaatgaaaagattgaagacatcaatggctgtccgaagaacagatcccaaatgattgaaaacatagatgcctgcttgaatttcctggcagctaagggaataaacatccaggggctgtctgcagaagagatcaggaatggaaacctcaaggccattctaggcctcttcttcagcctctcccgatacaagcagcagcagcagcagccccagaagcagcacctctcctcacctctgccgcccgccgtatcccaggtggccggggccccctcccagtgccaggctggcacccctcagcagcaggtgccagtcactccccaagccccgtgccagcctcaccagccagcgccacatcagcagtcaaaagcacaagctgaaatgcagtccagacttccaggtcctaccgcgagggtatccgctgcaggcagcgaggccaaaacacgcggagggtcaactactgctaacaaccgacgcagccagagctttaacaactatgataaatccaaaccagtcacctccccacccccaccgccaagcagccacgagaaagagcctttggcaagttcagcctcctcccaccccggaatgagtgacaatgcacctgcttccttggagagcggcagcagctccacccctactaattgcagtacctcctcggccatcccgcagcccggtgcagccaccaagccttggcgcagcaaatccctcagcgtgaagcacagtgccacggtatccatgctctcggtcaagcctcctgggcctgaggcccccaggcccacacctgaagccatgaagccggcccccaacaatcagaagtccatgctggaaaagctgaaacttttcaacagtaaagggggctcaaaggcaggtgaggggccggggtcccgggacacaagctgtgagcggctggagactctgcccagcttcgaagagagcgaggagctggaggccgccagtcgcatgctcaccaccgtgggccctgcttccagcagccccaagattgcactcaagggcattgcccagaggacttttagccgggcactgaccaacaagaagagttctctgaaaggcaatgagaaagagaaggagaaacaacagcgggagaaggataaggagaaaagcaaggaccttgccaagagagcctctgtgacggagaggctggacctcaaggaggagccaaaagaagaccccagtggagcagctgtgcccgagatgccaaaaaagtcctccaagattgccagcttcatccccaaaggggggaagctcaacagtgccaagaaggagcccatggccccttcccacagtggaataccaaaaccaggaatgaaaagcatgcccgggaaatccccaagtgccccagcgccttccaaggaaggggagcggagccggagtgggaagctgagctcaggactcccccagcagaagccccagctggacggcagacactccagttcctcttccagcctggcgtcctcagaaggaaaaggcccaggagggaccaccctgaaccacagcatcagcagccagactgtcagtgggtctgtcgggaccacccagaccacaggaagcaataccgtcagtgttcagctacctcagccccagcagcaatacaaccatcccaacactgccacggttgcacctttcctgtacaggtctcagacggacactgaagggaatgttactgccgagtcaagctcaacaggtgtgagcgtggagcccagccacttcaccaagactggacagcctgctctggaagaactcactggggaagatcctgaggctcggcggctgcggacagtgaagaacatcgctgatctgcggcagaatttggaggaaaccatgtccagtttaaggggaactcaggttacacacagcacattggaaaccacgtttgacaccaatgtcaccacggagatgagtggccgtagcatactcagcttgacagggaggcccacacctctgtcctggagactgggccagtccagccctcggctccaagcaggagacgccccctcaatgggcaatgggtatccccctcgagccaacgccagcaggttcatcaacactgagtcaggtcgctatgtgtactccgcccctctgagaaggcagctggcctcccggggcagtagtgtctgccatgtggacgtctcagacaaggcaggagatgagatggacctggaaggcatcagcatggatgcccccggctacatgagcgacggggatgttctgagcaagaacatccggaccgatgacattacaagcggatacatgactgatggtggacttggcctctatacccgtcgcctgaaccggctccctgatgggatggctgtggtacgggagaccctgcaacgaaatacctccctgggcctcggagacgctgacagctgggacgacagcagctccgtcagcagcggcatcagcgacaccatagacaacctcagcactgatgacatcaacaccagctcctccatcagctcttatgccaacacacctgcctcctctcgaaaaaacctggatgtgcagactgatgctgagaagcactcacaggtggagaggaattccctgtggtctggtgatgatgtcaagaaatcagacggaggctcagacagcggcataaaaatggagccaggttccaagtggaggcggaatccttctgatgtgtctgacgagtccgacaaaagcacgtcgggcaagaagaatcctgtcatctcccagacaggctcatggcggcgaggcatgacagctcaggtgggcatcaccatgccaaggacgaagccttcagccccggcaggcgcactgaagaccccaggaactggaaaaacagacgacgcaaaggtgtctgagaaaggaaggctttctcctaaagcctcccaggtgaagcgctccccatcagatgcaggccggagcagtggtgacgaatccaaaaagcccctccccagcagctctaggacacctactgccaatgccaacagctttgggttcaagaagcagagtggttccgccgccggcctggccatgatcacagccagcggggtgactgtcaccagcaggtcagccacactgggcaaaatcccaaagtcatctgcactcgtcagtcggtctgctggtcggaagtcaagtatggatggggctcagaatcaggatgacgggtatctagccctaagctcccggacaaaccttcagtaccggagtttgccgaggcccagtaagtccaacagccggaacggggctgggaacaggtctagcaccagcagcatagattccaacattagcagcaagtccgcaggcctgccagtgcccaaactgagggagccttccaaaacagccctaggcagctctctaccaggtctggtcaaccaaacagacaaggagaaaggcatctcatcagacaacgagagtgtggcttcctgtaactcggtgaaagtgaatccggcagcccagcctgtgtccagtccggctcagaccagtctccagcctggagccaagtacccagatgtggcctctcccacactccgcagactctttggtgggaagcctaccaagcaagtgcccatcgccacagctgaaaacatgaaaaattcggtggtcatctccaatcctcatgccaccatgactcagcaaggtaacctagactccccgtcaggcagtggcgtcctgagcagtgggagcagcagtcctctctacagcaagaatgtggacctcaaccagtctccgctagcctccagccccagctcagcccactcggccccttccaacagcctcacctggggcaccaacgccagcagctcctccgcagttagcaaggatggcctgggctttcagtctgtcagcagcctccacaccagctgtgagtccatcgacatctccctcagcagtggaggggtccccagccacaattcttccactggcctcatcgcctcctccaaggacgactccttgactccctttgtcagaactaacagtgtgaagaccacactgtcagaaagccctctctcttcccctgctgctagccctaagttctgcagaagtactctgcccaggaaacaggacagtgacccgcaccttgataggaacactttgcctaagaaaggactcaggtatactcccacctcccagcttcgcacgcaagaagatgcaaaagaatggttacggtcccattctgcaggaggccttcaggacaccgctgccaattcccccttttcctctggctccagcgtgacttctccctccggaacaagattcaacttttcccagcttgcgagtcccaccactgtcacccagatgagcttgtccaacccgaccatgctgaggactcacagcctctccaatgctgatgggcagtatgatccatacactgacagccgcttccggaatagctccatgtccctggatgagaagagcagaaccatgagccgttcaggctcattccgggatgggtttgaagaagttcatggatcctcactctccttggtttccagcacatcgtcagtttattctacaccagaagaaaaatgccagtcagagattcgcaagctgcggcgggaactggatgcctcccaggagaaagtttcagctttgaccacccagctgacagcaaatgctcaccttgtggcagcctttgaacagagtcttggtaacatgacaatcaggctccagagtctgaccatgacagctgagcagaaggactcagaactgaatgagttaagaaaaaccattgagctgctaaagaaacagaacgcagctgcccaggctgccattaatggagtaattaacacacctgagctcaactgcaaaggaaacggcactgcccagtctgcagacctccgcatccgcaggcagcactcctcagacagcgtctccagcatcaacagtgccaccagccactccagcgtgggcagcaacatagagagtgactcaaagaagaagaagcggaagaactggttacgcagctccttcaagcaagctttcgggaagaagaagtccccaaaatctgcgtcctctcattcagatattgaggagatgacggattcttctttgccttcctcaccaaagttaccgcacaatgggtccacaggttccaccccactgctgaggaattctcactccaactctctaatttcagaatgcatggatagtgaagctgagaccgtcatgcagctccgaaatgagttaagagacaaggagatgaagctgacggatatccgcttagaagctctcagttctgcccaccagctggaccagctccgggaggccatgaacaggatgcagagtgaaatagagaagctgaaagctgagaatgatcggctgaagtcagagtctcaaggcagtggctgcagccgggctccttcccaagtgtccatctctgcctccccgaggcagtccatgggcctctcccagcacagcttgaacctcactgagtcaaccagcctggacatgttgctggatgacactggtgaatgctcggctcggaaggaaggaggcaggcatgttaagatagttgtcagctttcaggaggaaatgaagtggaaggaggattccagaccacatctctttcttattggctgcattggagttagtggcaagacgaagtgggatgtgctcgatggggtggttagacggctgttcaaagaatacatcattcatgtcgacccagtgagtcagctagggctgaattcagacagcgttcttggctacagcattggagaaatcaagcgcagcaacacttccgaaacaccggagctgcttccttgtggctatctggttggagagaacacgaccatctcagtgactgtgaaagggctcgcagaaaacagcctggactcactggtgtttgagtccttgattcccaagcccatcctgcagcgctacgtctccctcctgatagagcaccgtcggatcattctctctggccccagcggcactgggaaaacctacctggccaaccggctgtctgagtatatagtgcttcgagagggacgggagttgacagacggggttatcgccacctttaacgtggaccataagtccagcaaggaattgcgccagtacctgtccaaccttgctgaccagtgcaacagtgagaacaatgctgtggacatgcccctcgtcatcatcctggacaacctacaccacgtgagctctctgggagagatcttcaatgggctgctcaactgcaagtaccacaaatgcccttacataattggcacaatgaaccaggctacctcttcgactcccaacctgcagcttcaccataacttcagatgggtgctttgtgccaaccacacggagcctgtgaagggtttccttggccgattcctgaggaggaagctcatggaaacagagatcagtgggcgggtgcgcaatatggagctggtaaaaatcattgactggattcccaaggtctggcatcacctcaaccgcttcctggaggctcacagttcctcggacgtcaccatcggcccccggctcttcctgtcatgccccatcgatgtggacggctcgagagtgtggttcaccgacttgtggaactattccattatcccctatctcctggaagccgtcagagaaggactccagctctatggaaggcgcgccccctgggaggatcctgccaagtgggtgatggacacatatccatgggcagccagcccacaacagcacgagtggcctcccctgctgcagttacggcctgaggatgtcggcttcgacggctactccatgcctcgggagggatcgacaagcaagcagatgccccccagtgatgctgaaggtgacccgctgatgaacatgctgatgaggctgcaggaggcagccaactactccagcccccagagctatgacagcgactccaacagcaacagccatcacgatgacatcttggactcctctttggagtccactctgtgacaggggcccggagcccagcgccctcctcttctcctcaccgcattccacctgcatcccccacatcaccctgaagatgacttcctgagccagcccccagccacagccttagagctgcgggaacaccgagaccccccgtccttcagcctcgacctgggtgcaggcatcccgggccagctgcctgcggaccgcttccttccacagcgagaactgcactaccttctgttgtactttaattattgttttgccttgttgctgtgacctccctaagacactgaagatacttctcgggaaaggatcatcgccgttgaaatgaaaagagagacagagagaaaaaaaaaaagagaacccacatgaagctctgaaaccaaacagcatcctgccatgagcttcccagagacagaagagactggagcaaagtcggaaacacagagaagcacggcttcccctcagcacagaccctccagactgggtctcagagccgtgccacccaccctcccacacagccggccacagggagaactggtgctaaccagggtgcttgctttggtcacgttcaacgcactacagagctacgacacagggaaaccttaggagcaaataaaccgtgctttcatgttttttaaatggtgctttccttacccgagaggtattttgcctgttccaatcaaaccaccccattcaggtccatcagcctctgattaatatccgtgagagtgagtgacggagtgagagtgtgagcgagtggatgtggctgtcagtgcagaacagcatgtgtctctttccttctgatatatgaatgaatcaggtttttttttttttttttctgcaaacactgtgtatagtgagacttgttctactttggagaacaggttaccttttgaaaatgaggttgagtttcttcctttctgatgcattgatttttgaagatttttttttcccccttcccctcttggtcagaatcaatcctttggtgaaagtaagaaccgcaggagttgagttttggtttggtcctgctcagttttggtttttagttgtccatcctcacagtcctacacactcgcctcctcctgctagggctgggggtatctgtgtcctttaaaatggatgaggacctggtcctcgacatgtgggtgagccatggaccttgccttcccttctcgtccttgagggtttagaacacacaccaacacctccagcgtccccgccccagcttccggtggggtgatgcggtcaccctgcaaaagacttgcactttcctcagaaccaacatgacgcagctcaataagggtgagggtcactccctcccagaagccccgtctggacgagccttgcctgacctcttcggtgctgaccttcccaaagtgatgccttactggttttgtactaactgtgttcattttacataagtgtcgtgcctgcctggggtttgttttttttgtcattgttttccccattgaaacaaacagggctaaaaagtcatctgttcattaggagaactcaagttgctgtgacttttctcatccaaaagactcatttgtgtggatgcgtgaccatgggaaaaagaaaaaaaaaaagatccattttttaggttcttttcggtctccagctgacaacccaactggacaatgatctgtctggtgcaggagaaggcaaaagtttctacaagtctacatgaccttgctgatacttgttctaatagaaacccagtctgctgtgtcttcaacatactggtattttcattacaaagtatggtaaatttttgagttgtttgtttctgttttgtaaagagaatccttattggacaccagtgaaggtgtctctgttttaatgatcagggtttttattccatcttttgcatttcttctatttctgaaggtttgtctcttggcatctttttttagtttcttaccataagagtttgacccgaaactgctcacttcacattggatgacaccatgttcttcctctttgaaaagaaaaggggaatgtgtcccactagtgaaaggaaaacttttcaacactatccctgctttagtctcagcaaactcagactattctgcttagccttcattagtcatctgggtgtgagtgtgtcttgttctgtttttctttttaataaaacttttaaaccatatatttagcctgtgaccaggggggccaaaccctaagatttctggtaaacctgaagggtggccctcctcagacaatttatctcccagcaatgaccctactacactcgcgtactgtgaatttgggaggaggtaaagttgacttctcctcgtgggcagttttccaatcaccttgtgagtagacacctgccaatattgtttgaaacctttttttaatatgacatcctctcttgtcattctcttctcccctttcccacagacttccctcctgggtccaggttcagaaccaagacttctgtacctagtgctgcctgattggtgaacattgacttcaagtagcatagcccttgtgtgactcacaactccgtgtccttcctaaagtttcgggaagcagggttgtctaatatgcacatttcttattttggtcatatttttactttagtgtcactcaccttttacaaagtgactttgtactcatttagggctctatcggaaatgcttccattttgccttttctacagttaggccaattttgaaatatataaattctatgcaacatttatgttgagttaccaatggaagccaaaagttctcttcccaaactgccaagaatgatacaggccataattgaaatgggaataccttttaagtttcattaggggtggggtgggagtgggacaggaacaagacttgcctagatctttgttgtatcttggggacttttactttgttgtttgatgcttaaacttcaaaattctctgtattcaaatttgattgtggcgaatctacttcaaaaaggaaaaataatccaactttgtggatattaaatggaaggtttgctgttttgatctagttgtttccagtggagcagttttatgaaatatgttctataagatgtacattttttcattgtaacatagaaattgtaaataattgattaaagtgctgcattttgatgaattttttctagccatttttaaagagaaaactaggaattgagtattttgtgtacggtatgtttccatcctccctccccttcctcctcccctcctctctctctcttcctacctatttaattttcatttgtcatgaggtttttggatttgccaatgatctgctggacatcatgccccatgtcatagagaataaagctgatgattgtaccagtcttaaattattcatgattcaataaaattgatgcttatttattc

SEQ ID NO: 13407 - DNA, 11000 bp, Homo sapiens
  source 1..11000: mol_type = unassigned DNA
gttaatatgggcgtccaagcctctgtttcccaggaggaaatttgcaagaggcggcagcccctgagcgcccagagctcttgaaaggccacccaggagaggtgtgagacccggcggcagcatccgtccaggtgggacccgctgagcgccgtggccagtcccccattcccatcccggcaccccaaaggcgcgctcgcccgattgcttcgagttccccgacctggggattttttttttagccgctggtggtgggcgcctcgtgggctaaggcccggcgcctgctctgctacccgcgctgcctttagcggtcgcccccgccgccgctgccagggacgtgctgggaaagcccaagccccgggagaagatgccggccatcctggtcgcctccaaaatgaagtcgggactgcccaaacccgtgcacagcgccgcgcccatcctgcacgtgcccccggcccgggcgggcccccagccctgctacctgaagttgggaagcaaggtggaggtgagcaagaccacctatcctagccagatccccctgaaatcgcaggtgctgcaggggctgcaggagccagcgggggaggggctcccgctgcggaagagcggctcggtggaaaacgggttcgatacccagatctacacagactgggccaatcattacctagccaaatccggccacaagcgtctcatcagggatctccagcaagatgtgacagatggcgtcctcctggcccagattatccaggttgtggcaaatgaaaagattgaagacatcaatggctgtccgaagaacagatcccaaatgattgaaaacatagatgcctgcttgaatttcctggcagctaagggaataaacatccaggggctgtctgcagaagagatcaggaatggaaacctcaaggccattctaggcctcttcttcagcctctcccgatacaagcagcagcagcagcagccccagaagcagcacctctcctcacctctgccgcccgccgtatcccaggtggccggggccccctcccagtgccaggctggcacccctcagcagcaggtgccagtcactccccaagccccgtgccagcctcaccagccagcgccacatcagcagtcaaaagcacaagctgaaatgcagtccagacttccaggtcctaccgcgagggtatccgctgcaggcagcgaggccaaaacacgcggagggtcaactactgctaacaaccgacgcagccagagctttaacaactatgataaatccaaaccagtcacctccccacccccaccgccaagcagccacgagaaagagcctttggcaagttcagcctcctcccaccccggaatgagtgacaatgcacctgcttccttggagagcggcagcagctccacccctactaattgcagtacctcctcggccatcccgcagcccggtgcagccaccaagccttggcgcagcaaatccctcagcgtgaagcacagtgccacggtatccatgctctcggtcaagcctcctgggcctgaggcccccaggcccacacctgaagccatgaagccggcccccaacaatcagaagtccatgctggaaaagctgaaacttttcaacagtaaagggggctcaaaggcaggtgaggggccggggtcccgggacacaagctgtgagcggctggagactctgcccagcttcgaagagagcgaggagctggaggccgccagtcgcatgctcaccaccgtgggccctgcttccagcagccccaagattgcactcaagggcattgcccagaggacttttagccgggcactgaccaacaagaagagttctctgaaaggcaatgagaaagagaaggagaaacaacagcgggagaaggataaggagaaaagcaaggaccttgccaagagagcctctgtgacggagaggctggacctcaaggaggagccaaaagaagaccccagtggagcagctgtgcccgagatgccaaaaaagtcctccaagattgccagcttcatccccaaaggggggaagctcaacagtgccaagaaggagcccatggccccttcccacagtggaataccaaaaccaggaatgaaaagcatgcccgggaaatccccaagtgccccagcgccttccaaggaaggggagcggagccggagtgggaagctgagctcaggactcccccagcagaagccccagctggacggcagacactccagttcctcttccagcctggcgtcctcagaaggaaaaggcccaggagggaccaccctgaaccacagcatcagcagccagactgtcagtgggtctgtcgggaccacccagaccacaggaagcaataccgtcagtgttcagctacctcagccccagcagcaatacaaccatcccaacactgccacggttgcacctttcctgtacaggtctcagacggacactgaagggaatgttactgccgagtcaagctcaacaggtgtgagcgtggagcccagccacttcaccaagactggacagcctgctctggaagaactcactggggaagatcctgaggctcggcggctgcggacagtgaagaacatcgctgatctgcggcagaatttggaggaaaccatgtccagtttaaggggaactcaggttacacacagcacattggaaaccacgtttgacaccaatgtcaccacggagatgagtggccgtagcatactcagcttgacagggaggcccacacctctgtcctggagactgggccagtccagccctcggctccaagcaggagacgccccctcaatgggcaatgggtatccccctcgagccaacgccagcaggttcatcaacactgagtcaggtcgctatgtgtactccgcccctctgagaaggcagctggcctcccggggcagtagtgtctgccatgtggacgtctcagacaaggcaggagatgagatggacctggaaggcatcagcatggatgcccccggctacatgagcgacggggatgttctgagcaagaacatccggaccgatgacattacaagcggatacatgactgatggtggacttggcctctatacccgtcgcctgaaccggctccctgatgggatggctgtggtacgggagaccctgcaacgaaatacctccctgggcctcggagacgctgacagctgggacgacagcagctccgtcagcagcggcatcagcgacaccatagacaacctcagcactgatgacatcaacaccagctcctccatcagctcttatgccaacacacctgcctcctctcgaaaaaacctggatgtgcagactgatgctgagaagcactcacaggtggagaggaattccctgtggtctggtgatgatgtcaagaaatcagacggaggctcagacagcggcataaaaatggagccaggttccaagtggaggcggaatccttctgatgtgtctgacgagtccgacaaaagcacgtcgggcaagaagaatcctgtcatctcccagacaggctcatggcggcgaggcatgacagctcaggtgggcatcaccatgccaaggacgaagccttcagccccggcaggcgcactgaagaccccaggaactggaaaaacagacgacgcaaaggtgtctgagaaaggaaggctttctcctaaagcctcccaggtgaagcgctccccatcagatgcaggccggagcagtggtgacgaatccaaaaagcccctccccagcagctctaggacacctactgccaatgccaacagctttgggttcaagaagcagagtggttccgccgccggcctggccatgatcacagccagcggggtgactgtcaccagcaggtcagccacactgggcaaaatcccaaagtcatctgcactcgtcagtcggtctgctggtcggaagtcaagtatggatggggctcagaatcaggatgacgggtatctagccctaagctcccggacaaaccttcagtaccggagtttgccgaggcccagtaagtccaacagccggaacggggctgggaacaggtctagcaccagcagcatagattccaacattagcagcaagtccgcaggcctgccagtgcccaaactgagggagccttccaaaacagccctaggcagctctctaccaggtctggtcaaccaaacagacaaggagaaaggcatctcatcagacaacgagagtgtggcttcctgtaactcggtgaaagtgaatccggcagcccagcctgtgtccagtccggctcagaccagtctccagcctggagccaagtacccagatgtggcctctcccacactccgcagactctttggtgggaagcctaccaagcaagtgcccatcgccacagctgaaaacatgaaaaattcggtggtcatctccaatcctcatgccaccatgactcagcaaggtaacctagactccccgtcaggcagtggcgtcctgagcagtgggagcagcagtcctctctacagcaagaatgtggacctcaaccagtctccgctagcctccagccccagctcagcccactcggccccttccaacagcctcacctggggcaccaacgccagcagctcctccgcagttagcaaggatggcctgggctttcagtctgtcagcagcctccacaccagctgtgagtccatcgacatctccctcagcagtggaggggtccccagccacaattcttccactggcctcatcgcctcctccaaggacgactccttgactccctttgtcagaactaacagtgtgaagaccacactgtcagaaagccctctctcttcccctgctgctagccctaagttctgcagaagtactctgcccaggaaacaggacagtgacccgcaccttgataggaacactttgcctaagaaaggactcaggtatactcccacctcccagcttcgcacgcaagaagatgcaaaagaatggttacggtcccattctgcaggaggccttcaggacaccgctgccaattcccccttttcctctggctccagcgtgacttctccctccggaacaagattcaacttttcccagcttgcgagtcccaccactgtcacccagatgagcttgtccaacccgaccatgctgaggactcacagcctctccaatgctgatgggcagtatgatccatacactgacagccgcttccggaatagctccatgtccctggatgagaagagcagaaccatgagccgttcaggctcattccgggatgggtttgaagaagttcatggatcctcactctccttggtttccagcacatcgtcagtttattctacaccagaagaaaaatgccagtcagagattcgcaagctgcggcgggaactggatgcctcccaggagaaagtttcagctttgaccacccagctgacagcaaatgctcaccttgtggcagcctttgaacagagtcttggtaacatgacaatcaggctccagagtctgaccatgacagctgagcagaaggactcagaactgaatgagttaagaaaaaccattgagctgctaaagaaacagaacgcagctgcccaggctgccattaatggagtaattaacacacctgagctcaactgcaaaggaaacggcactgcccagtctgcagacctccgcatccgcaggcagcactcctcagacagcgtctccagcatcaacagtgccaccagccactccagcgtgggcagcaacatagagagtgactcaaagaagaagaagcggaagaactgggtcaatgagttacgcagctccttcaagcaagctttcgggaagaagaagtccccaaaatctgcgtcctctcattcagatattgaggagatgacggattcttctttgccttcctcaccaaagttaccgcacaatgggtccacaggttccaccccactgctgaggaattctcactccaactctctaatttcagaatgcatggatagtgaagctgagaccgtcatgcagctccgaaatgagttaagagacaaggagatgaagctgacggatatccgcttagaagctctcagttctgcccaccagctggaccagctccgggaggccatgaacaggatgcagagtgaaatagagaagctgaaagctgagaatgatcggctgaagtcagagtctcaaggcagtggctgcagccgggctccttcccaagtgtccatctctgcctccccgaggcagtccatgggcctctcccagcacagcttgaacctcactgagtcaaccagcctggacatgttgctggatgacactggtgaatgctcggctcggaaggaaggaggcaggcatgttaagatagttgtcagctttcaggaggaaatgaagtggaaggaggattccagaccacatctctttcttattggctgcattggagttagtggcaagacgaagtgggatgtgctcgatggggtggttagacggctgttcaaagaatacatcattcatgtcgacccagtgagtcagctagggctgaattcagacagcgttcttggctacagcattggagaaatcaagcgcagcaacacttccgaaacaccggagctgcttccttgtggctatctggttggagagaacacgaccatctcagtgactgtgaaagggctcgcagaaaacagcctggactcactggtgtttgagtccttgattcccaagcccatcctgcagcgctacgtctccctcctgatagagcaccgtcggatcattctctctggccccagcggcactgggaaaacctacctggccaaccggctgtctgagtatatagtgcttcgagagggacgggagttgacagacggggttatcgccacctttaacgtggaccataagtccagcaaggaattgcgccagtacctgtccaaccttgctgaccagtgcaacagtgagaacaatgctgtggacatgcccctcgtcatcatcctggacaacctacaccacgtgagctctctgggagagatcttcaatgggctgctcaactgcaagtaccacaaatgcccttacataattggcacaatgaaccaggctacctcttcgactcccaacctgcagcttcaccataacttcagatgggtgctttgtgccaaccacacggagcctgtgaagggtttccttggccgattcctgaggaggaagctcatggaaacagagatcagtgggcgggtgcgcaatatggagctggtaaaaatcattgactggattcccaaggtctggcatcacctcaaccgcttcctggaggctcacagttcctcggacgtcaccatcggcccccggctcttcctgtcatgccccatcgatgtggacggctcgagagtgtggttcaccgacttgtggaactattccattatcccctatctcctggaagccgtcagagaaggactccagctctatggaaggcgcgccccctgggaggatcctgccaagtgggtgatggacacatatccatgggcagccagcccacaacagcacgagtggcctcccctgctgcagttacggcctgaggatgtcggcttcgacggctactccatgcctcgggagggatcgacaagcaagcagatgccccccagtgatgctgaaggtgacccgctgatgaacatgctgatgaggctgcaggaggcagccaactactccagcccccagagctatgacagcgactccaacagcaacagccatcacgatgacatcttggactcctctttggagtccactctgtgacaggggcccggagcccagcgccctcctcttctcctcaccgcattccacctgcatcccccacatcaccctgaagatgacttcctgagccagcccccagccacagccttagagctgcgggaacaccgagaccccccgtccttcagcctcgacctgggtgcaggcatcccgggccagctgcctgcggaccgcttccttccacagcgagaactgcactaccttctgttgtactttaattattgttttgccttgttgctgtgacctccctaagacactgaagatacttctcgggaaaggatcatcgccgttgaaatgaaaagagagacagagagaaaaaaaaaaagagaacccacatgaagctctgaaaccaaacagcatcctgccatgagcttcccagagacagaagagactggagcaaagtcggaaacacagagaagcacggcttcccctcagcacagaccctccagactgggtctcagagccgtgccacccaccctcccacacagccggccacagggagaactggtgctaaccagggtgcttgctttggtcacgttcaacgcactacagagctacgacacagggaaaccttaggagcaaataaaccgtgctttcatgttttttaaatggtgctttccttacccgagaggtattttgcctgttccaatcaaaccaccccattcaggtccatcagcctctgattaatatccgtgagagtgagtgacggagtgagagtgtgagcgagtggatgtggctgtcagtgcagaacagcatgtgtctctttccttctgatatatgaatgaatcaggtttttttttttttttttctgcaaacactgtgtatagtgagacttgttctactttggagaacaggttaccttttgaaaatgaggttgagtttcttcctttctgatgcattgatttttgaagatttttttttcccccttcccctcttggtcagaatcaatcctttggtgaaagtaagaaccgcaggagttgagttttggtttggtcctgctcagttttggtttttagttgtccatcctcacagtcctacacactcgcctcctcctgctagggctgggggtatctgtgtcctttaaaatggatgaggacctggtcctcgacatgtgggtgagccatggaccttgccttcccttctcgtccttgagggtttagaacacacaccaacacctccagcgtccccgccccagcttccggtggggtgatgcggtcaccctgcaaaagacttgcactttcctcagaaccaacatgacgcagctcaataagggtgagggtcactccctcccagaagccccgtctggacgagccttgcctgacctcttcggtgctgaccttcccaaagtgatgccttactggttttgtactaactgtgttcattttacataagtgtcgtgcctgcctggggtttgttttttttgtcattgttttccccattgaaacaaacagggctaaaaagtcatctgttcattaggagaactcaagttgctgtgacttttctcatccaaaagactcatttgtgtggatgcgtgaccatgggaaaaagaaaaaaaaaaagatccattttttaggttcttttcggtctccagctgacaacccaactggacaatgatctgtctggtgcaggagaaggcaaaagtttctacaagtctacatgaccttgctgatacttgttctaatagaaacccagtctgctgtgtcttcaacatactggtattttcattacaaagtatggtaaatttttgagttgtttgtttctgttttgtaaagagaatccttattggacaccagtgaaggtgtctctgttttaatgatcagggtttttattccatcttttgcatttcttctatttctgaaggtttgtctcttggcatctttttttagtttcttaccataagagtttgacccgaaactgctcacttcacattggatgacaccatgttcttcctctttgaaaagaaaaggggaatgtgtcccactagtgaaaggaaaacttttcaacactatccctgctttagtctcagcaaactcagactattctgcttagccttcattagtcatctgggtgtgagtgtgtcttgttctgtttttctttttaataaaacttttaaaccatatatttagcctgtgaccaggggggccaaaccctaagatttctggtaaacctgaagggtggccctcctcagacaatttatctcccagcaatgaccctactacactcgcgtactgtgaatttgggaggaggtaaagttgacttctcctcgtgggcagttttccaatcaccttgtgagtagacacctgccaatattgtttgaaacctttttttaatatgacatcctctcttgtcattctcttctcccctttcccacagacttccctcctgggtccaggttcagaaccaagacttctgtacctagtgctgcctgattggtgaacattgacttcaagtagcatagcccttgtgtgactcacaactccgtgtccttcctaaagtttcgggaagcagggttgtctaatatgcacatttcttattttggtcatatttttactttagtgtcactcaccttttacaaagtgactttgtactcatttagggctctatcggaaatgcttccattttgccttttctacagttaggccaattttgaaatatataaattctatgcaacatttatgttgagttaccaatggaagccaaaagttctcttcccaaactgccaagaatgatacaggccataattgaaatgggaataccttttaagtttcattaggggtggggtgggagtgggacaggaacaagacttgcctagatctttgttgtatcttggggacttttactttgttgtttgatgcttaaacttcaaaattctctgtattcaaatttgattgtggcgaatctacttcaaaaaggaaaaataatccaactttgtggatattaaatggaaggtttgctgttttgatctagttgtttccagtggagcagttttatgaaatatgttctataagatgtacattttttcattgtaacatagaaattgtaaataattgattaaagtgctgcattttgatgaattttttctagccatttttaaagagaaaactaggaattgagtattttgtgtacggtatgtttccatcctccctccccttcctcctcccctcctctctctctcttcctacctatttaattttcatttgtcatgaggtttttggatttgccaatgatctgctggacatcatgccccatgtcatagagaataaagctgatgattgtaccagtcttaaattattcatgattcaataaaattgatgcttatttattc

SEQ ID NO: 13408 - DNA, 10960 bp, Homo sapiens
  source 1..10960: mol_type = unassigned DNA
aggaggaaatttgcaagaggcggcagcccctgagcgcccagagctcttgaaaggccacccaggagaggtgtgagacccggcggcagcatccgtccaggtgggacccgctgagcgccgtggccagtcccccattcccatcccggcaccccaaaggcgcgctcgcccgattgcttcgagttccccgacctggggattttttttttagccgctggtggtgggcgcctcgtgggctaaggcccggcgcctgctctgctacccgcgctgcctttagcggtcgcccccgccgccgctgccagggacgtgctgggaaagcccaagccccgggagaagatgccggccatcctggtcgcctccaaaatgaagtcgggactgcccaaacccgtgcacagcgccgcgcccatcctgcacgtgcccccggcccgggcgggcccccagccctgctacctgaagttgggaagcaaggtggaggtgagcaagaccacctatcctagccagatccccctgaaatcgcaggtgctgcaggggctgcaggagccagcgggggaggggctcccgctgcggaagagcggctcggtggaaaacgggttcgatacccagatctacacagactgggccaatcattacctagccaaatccggccacaagcgtctcatcagggatctccagcaagatgtgacagatggcgtcctcctggcccagattatccaggttgtggcaaatgaaaagattgaagacatcaatggctgtccgaagaacagatcccaaatgattgaaaacatagatgcctgcttgaatttcctggcagctaagggaataaacatccaggggctgtctgcagaagagatcaggaatggaaacctcaaggccattctaggcctcttcttcagcctctcccgatacaagcagcagcagcagcagccccagaagcagcacctctcctcacctctgccgcccgccgtatcccaggtggccggggccccctcccagtgccaggctggcacccctcagcagcaggtgccagtcactccccaagccccgtgccagcctcaccagccagcgccacatcagcagtcaaaagcacaagctgaaatgcagtccagacttccaggtcctaccgcgagggtatccgctgcaggcagcgaggccaaaacacgcggagggtcaactactgctaacaaccgacgcagccagagctttaacaactatgataaatccaaaccagtcacctccccacccccaccgccaagcagccacgagaaagagcctttggcaagttcagcctcctcccaccccggaatgagtgacaatgcacctgcttccttggagagcggcagcagctccacccctactaattgcagtacctcctcggccatcccgcagcccggtgcagccaccaagccttggcgcagcaaatccctcagcgtgaagcacagtgccacggtatccatgctctcggtcaagcctcctgggcctgaggcccccaggcccacacctgaagccatgaagccggcccccaacaatcagaagtccatgctggaaaagctgaaacttttcaacagtaaagggggctcaaaggcaggtgaggggccggggtcccgggacacaagctgtgagcggctggagactctgcccagcttcgaagagagcgaggagctggaggccgccagtcgcatgctcaccaccgtgggccctgcttccagcagccccaagattgcactcaagggcattgcccagaggacttttagccgggcactgaccaacaagaagagttctctgaaaggcaatgagaaagagaaggagaaacaacagcgggagaaggataaggagaaaagcaaggaccttgccaagagagcctctgtgacggagaggctggacctcaaggaggagccaaaagaagaccccagtggagcagctgtgcccgagatgccaaaaaagtcctccaagattgccagcttcatccccaaaggggggaagctcaacagtgccaagaaggagcccatggccccttcccacagtggaataccaaaaccaggaatgaaaagcatgcccgggaaatccccaagtgccccagcgccttccaaggaaggggagcggagccggagtgggaagctgagctcaggactcccccagcagaagccccagctggacggcagacactccagttcctcttccagcctggcgtcctcagaaggaaaaggcccaggagggaccaccctgaaccacagcatcagcagccagactgtcagtgggtctgtcgggaccacccagaccacaggaagcaataccgtcagtgttcagctacctcagccccagcagcaatacaaccatcccaacactgccacggttgcacctttcctgtacaggtctcagacggacactgaagggaatgttactgccgagtcaagctcaacaggtgtgagcgtggagcccagccacttcaccaagactggacagcctgctctggaagaactcactggggaagatcctgaggctcggcggctgcggacagtgaagaacatcgctgatctgcggcagaatttggaggaaaccatgtccagtttaaggggaactcaggttacacacagcacattggaaaccacgtttgacaccaatgtcaccacggagatgagtggccgtagcatactcagcttgacagggaggcccacacctctgtcctggagactgggccagtccagccctcggctccaagcaggagacgccccctcaatgggcaatgggtatccccctcgagccaacgccagcaggttcatcaacactgagtcaggtcgctatgtgtactccgcccctctgagaaggcagctggcctcccggggcagtagtgtctgccatgtggacgtctcagacaaggcaggagatgagatggacctggaaggcatcagcatggatgcccccggctacatgagcgacggggatgttctgagcaagaacatccggaccgatgacattacaagcggatacatgactgatggtggacttggcctctatacccgtcgcctgaaccggctccctgatgggatggctgtggtacgggagaccctgcaacgaaatacctccctgggcctcggagacgctgacagctgggacgacagcagctccgtcagcagcggcatcagcgacaccatagacaacctcagcactgatgacatcaacaccagctcctccatcagctcttatgccaacacacctgcctcctctcgaaaaaacctggatgtgcagactgatgctgagaagcactcacaggtggagaggaattccctgtggtctggtgatgatgtcaagaaatcagacggaggctcagacagcggcataaaaatggagccaggttccaagtggaggcggaatccttctgatgtgtctgacgagtccgacaaaagcacgtcgggcaagaagaatcctgtcatctcccagacaggctcatggcggcgaggcatgacagctcaggtgggcatcaccatgccaaggacgaagccttcagccccggcaggcgcactgaagaccccaggaactggaaaaacagacgacgcaaaggtgtctgagaaaggaaggctttctcctaaagcctcccaggtgaagcgctccccatcagatgcaggccggagcagtggtgacgaatccaaaaagcccctccccagcagctctaggacacctactgccaatgccaacagctttgggttcaagaagcagagtggttccgccgccggcctggccatgatcacagccagcggggtgactgtcaccagcaggtcagccacactgggcaaaatcccaaagtcatctgcactcgtcagtcggtctgctggtcggaagtcaagtatggatggggctcagaatcaggatgacgggtatctagccctaagctcccggacaaaccttcagtaccggagtttgccgaggcccagtaagtccaacagccggaacggggctgggaacaggtctagcaccagcagcatagattccaacattagcagcaagtccgcaggcctgccagtgcccaaactgagggagccttccaaaacagccctaggcagctctctaccaggtctggtcaaccaaacagacaaggagaaaggcatctcatcagacaacgagagtgtggcttcctgtaactcggtgaaagtgaatccggcagcccagcctgtgtccagtccggctcagaccagtctccagcctggagccaagtacccagatgtggcctctcccacactccgcagactctttggtgggaagcctaccaagcaagtgcccatcgccacagctgaaaacatgaaaaattcggtggtcatctccaatcctcatgccaccatgactcagcaaggtaacctagactccccgtcaggcagtggcgtcctgagcagtgggagcagcagtcctctctacagcaagaatgtggacctcaaccagtctccgctagcctccagccccagctcagcccactcggccccttccaacagcctcacctggggcaccaacgccagcagctcctccgcagttagcaaggatggcctgggctttcagtctgtcagcagcctccacaccagctgtgagtccatcgacatctccctcagcagtggaggggtccccagccacaattcttccactggcctcatcgcctcctccaaggacgactccttgactccctttgtcagaactaacagtgtgaagaccacactgtcagaaagccctctctcttcccctgctgctagccctaagttctgcagaagtactctgcccaggaaacaggacagtgacccgcaccttgataggaacactttgcctaagaaaggactcaggtatactcccacctcccagcttcgcacgcaagaagatgcaaaagaatggttacggtcccattctgcaggaggccttcaggacaccgctgccaattcccccttttcctctggctccagcgtgacttctccctccggaacaagattcaacttttcccagcttgcgagtcccaccactgtcacccagatgagcttgtccaacccgaccatgctgaggactcacagcctctccaatgctgatgggcagtatgatccatacactgacagccgcttccggaatagctccatgtccctggatgagaagagcagaaccatgagccgttcaggctcattccgggatgggtttgaagaagttcatggatcctcactctccttggtttccagcacatcgtcagtttattctacaccagaagaaaaatgccagtcagagattcgcaagctgcggcgggaactggatgcctcccaggagaaagtttcagctttgaccacccagctgacagcaaatgctcaccttgtggcagcctttgaacagagtcttggtaacatgacaatcaggctccagagtctgaccatgacagctgagcagaaggactcagaactgaatgagttaagaaaaaccattgagctgctaaagaaacagaacgcagctgcccaggctgccattaatggagtaattaacacacctgagctcaactgcaaaggaaacggcactgcccagtctgcagacctccgcatccgcaggcagcactcctcagacagcgtctccagcatcaacagtgccaccagccactccagcgtgggcagcaacatagagagtgactcaaagaagaagaagcggaagaactggttacgcagctccttcaagcaagctttcgggaagaagaagtccccaaaatctgcgtcctctcattcagatattgaggagatgacggattcttctttgccttcctcaccaaagttaccgcacaatgggtccacaggttccaccccactgctgaggaattctcactccaactctctaatttcagaatgcatggatagtgaagctgagaccgtcatgcagctccgaaatgagttaagagacaaggagatgaagctgacggatatccgcttagaagctctcagttctgcccaccagctggaccagctccgggaggccatgaacaggatgcagagtgaaatagagaagctgaaagctgagaatgatcggctgaagtcagagtctcaaggcagtggctgcagccgggctccttcccaagtgtccatctctgcctccccgaggcagtccatgggcctctcccagcacagcttgaacctcactgagtcaaccagcctggacatgttgctggatgacactggtgaatgctcggctcggaaggaaggaggcaggcatgttaagatagttgtcagctttcaggaggaaatgaagtggaaggaggattccagaccacatctctttcttattggctgcattggagttagtggcaagacgaagtgggatgtgctcgatggggtggttagacggctgttcaaagaatacatcattcatgtcgacccagtgagtcagctagggctgaattcagacagcgttcttggctacagcattggagaaatcaagcgcagcaacacttccgaaacaccggagctgcttccttgtggctatctggttggagagaacacgaccatctcagtgactgtgaaagggctcgcagaaaacagcctggactcactggtgtttgagtccttgattcccaagcccatcctgcagcgctacgtctccctcctgatagagcaccgtcggatcattctctctggccccagcggcactgggaaaacctacctggccaaccggctgtctgagtatatagtgcttcgagagggacgggagttgacagacggggttatcgccacctttaacgtggaccataagtccagcaaggaattgcgccagtacctgtccaaccttgctgaccagtgcaacagtgagaacaatgctgtggacatgcccctcgtcatcatcctggacaacctacaccacgtgagctctctgggagagatcttcaatgggctgctcaactgcaagtaccacaaatgcccttacataattggcacaatgaaccaggctacctcttcgactcccaacctgcagcttcaccataacttcagatgggtgctttgtgccaaccacacggagcctgtgaagggtttccttggccgattcctgaggaggaagctcatggaaacagagatcagtgggcgggtgcgcaatatggagctggtaaaaatcattgactggattcccaaggtctggcatcacctcaaccgcttcctggaggctcacagttcctcggacgtcaccatcggcccccggctcttcctgtcatgccccatcgatgtggacggctcgagagtgtggttcaccgacttgtggaactattccattatcccctatctcctggaagccgtcagagaaggactccagctctatggaaggcgcgccccctgggaggatcctgccaagtgggtgatggacacatatccatgggcagccagcccacaacagcacgagtggcctcccctgctgcagttacggcctgaggatgtcggcttcgacggctactccatgcctcgggagggatcgacaagcaagcagatgccccccagtgatgctgaaggtgacccgctgatgaacatgctgatgaggctgcaggaggcagccaactactccagcccccagagctatgacagcgactccaacagcaacagccatcacgatgacatcttggactcctctttggagtccactctgtgacaggggcccggagcccagcgccctcctcttctcctcaccgcattccacctgcatcccccacatcaccctgaagatgacttcctgagccagcccccagccacagccttagagctgcgggaacaccgagaccccccgtccttcagcctcgacctgggtgcaggcatcccgggccagctgcctgcggaccgcttccttccacagcgagaactgcactaccttctgttgtactttaattattgttttgccttgttgctgtgacctccctaagacactgaagatacttctcgggaaaggatcatcgccgttgaaatgaaaagagagacagagagaaaaaaaaaaagagaacccacatgaagctctgaaaccaaacagcatcctgccatgagcttcccagagacagaagagactggagcaaagtcggaaacacagagaagcacggcttcccctcagcacagaccctccagactgggtctcagagccgtgccacccaccctcccacacagccggccacagggagaactggtgctaaccagggtgcttgctttggtcacgttcaacgcactacagagctacgacacagggaaaccttaggagcaaataaaccgtgctttcatgttttttaaatggtgctttccttacccgagaggtattttgcctgttccaatcaaaccaccccattcaggtccatcagcctctgattaatatccgtgagagtgagtgacggagtgagagtgtgagcgagtggatgtggctgtcagtgcagaacagcatgtgtctctttccttctgatatatgaatgaatcaggtttttttttttttttttctgcaaacactgtgtatagtgagacttgttctactttggagaacaggttaccttttgaaaatgaggttgagtttcttcctttctgatgcattgatttttgaagatttttttttcccccttcccctcttggtcagaatcaatcctttggtgaaagtaagaaccgcaggagttgagttttggtttggtcctgctcagttttggtttttagttgtccatcctcacagtcctacacactcgcctcctcctgctagggctgggggtatctgtgtcctttaaaatggatgaggacctggtcctcgacatgtgggtgagccatggaccttgccttcccttctcgtccttgagggtttagaacacacaccaacacctccagcgtccccgccccagcttccggtggggtgatgcggtcaccctgcaaaagacttgcactttcctcagaaccaacatgacgcagctcaataagggtgagggtcactccctcccagaagccccgtctggacgagccttgcctgacctcttcggtgctgaccttcccaaagtgatgccttactggttttgtactaactgtgttcattttacataagtgtcgtgcctgcctggggtttgttttttttgtcattgttttccccattgaaacaaacagggctaaaaagtcatctgttcattaggagaactcaagttgctgtgacttttctcatccaaaagactcatttgtgtggatgcgtgaccatgggaaaaagaaaaaaaaaaagatccattttttaggttcttttcggtctccagctgacaacccaactggacaatgatctgtctggtgcaggagaaggcaaaagtttctacaagtctacatgaccttgctgatacttgttctaatagaaacccagtctgctgtgtcttcaacatactggtattttcattacaaagtatggtaaatttttgagttgtttgtttctgttttgtaaagagaatccttattggacaccagtgaaggtgtctctgttttaatgatcagggtttttattccatcttttgcatttcttctatttctgaaggtttgtctcttggcatctttttttagtttcttaccataagagtttgacccgaaactgctcacttcacattggatgacaccatgttcttcctctttgaaaagaaaaggggaatgtgtcccactagtgaaaggaaaacttttcaacactatccctgctttagtctcagcaaactcagactattctgcttagccttcattagtcatctgggtgtgagtgtgtcttgttctgtttttctttttaataaaacttttaaaccatatatttagcctgtgaccaggggggccaaaccctaagatttctggtaaacctgaagggtggccctcctcagacaatttatctcccagcaatgaccctactacactcgcgtactgtgaatttgggaggaggtaaagttgacttctcctcgtgggcagttttccaatcaccttgtgagtagacacctgccaatattgtttgaaacctttttttaatatgacatcctctcttgtcattctcttctcccctttcccacagacttccctcctgggtccaggttcagaaccaagacttctgtacctagtgctgcctgattggtgaacattgacttcaagtagcatagcccttgtgtgactcacaactccgtgtccttcctaaagtttcgggaagcagggttgtctaatatgcacatttcttattttggtcatatttttactttagtgtcactcaccttttacaaagtgactttgtactcatttagggctctatcggaaatgcttccattttgccttttctacagttaggccaattttgaaatatataaattctatgcaacatttatgttgagttaccaatggaagccaaaagttctcttcccaaactgccaagaatgatacaggccataattgaaatgggaataccttttaagtttcattaggggtggggtgggagtgggacaggaacaagacttgcctagatctttgttgtatcttggggacttttactttgttgtttgatgcttaaacttcaaaattctctgtattcaaatttgattgtggcgaatctacttcaaaaaggaaaaataatccaactttgtggatattaaatggaaggtttgctgttttgatctagttgtttccagtggagcagttttatgaaatatgttctataagatgtacattttttcattgtaacatagaaattgtaaataattgattaaagtgctgcattttgatgaattttttctagccatttttaaagagaaaactaggaattgagtattttgtgtacggtatgtttccatcctccctccccttcctcctcccctcctctctctctcttcctacctatttaattttcatttgtcatgaggtttttggatttgccaatgatctgctggacatcatgccccatgtcatagagaataaagctgatgattgtaccagtcttaaattattcatgattcaataaaattgatgcttatttattc

SEQ ID NO: 13409 - DNA, 7882 bp, Homo sapiens
  source 1..7882: mol_type = unassigned DNA
taaggcccggcgcctgctctgctacccgcgctgcctttagcggtcgcccccgccgccgctgccagggacgtgctgggaaagcccaagccccgggagaagatgccggccatcctggtcgcctccaaaatgaagtcgggactgcccaaacccgtgcacagcgccgcgcccatcctgcacgtgcccccggcccgggcgggcccccagccctgctacctgaagttgggaagcaaggtggaggtgagcaagaccacctatcctagccagatccccctgaaatcgcaggtgctgcaggggctgcaggagccagcgggggaggggctcccgctgcggaagagcggctcggtggaaaacgggttcgatacccagatctacacagactgggccaatcattacctagccaaatccggccacaagcgtctcatcagggatctccagcaagatgtgacagatggcgtcctcctggcccagattatccaggttgtggcaaatgaaaagattgaagacatcaatggctgtccgaagaacagatcccaaatgattgaaaacatagatgcctgcttgaatttcctggcagctaagggaataaacatccaggggctgtctgcagaagagatcaggaatggaaacctcaaggccattctaggcctcttcttcagcctctcccgatacaagcagcagcagcagcagccccagaagcagcacctctcctcacctctgccgcccgccgtatcccaggtggccggggccccctcccagtgccaggctggcacccctcagcagcaggtgccagtcactccccaagccccgtgccagcctcaccagccagcgccacatcagcagtcaaaagcacaagctgaaatgcagtccagtgcatcatccaaggactcatctcaaagcaaaatcatccgcttcactctgggtcagaaaaagatctctagacttccaggtcctaccgcgagggtatccgctgcaggcagcgaggccaaaacacgcggagggtcaactactgctaacaaccgacgcagccagagctttaacaactatgataaatccaaaccagtcacctccccacccccaccgccaagcagccacgagaaagagcctttggcaagttcagcctcctcccaccccggaatgagtgacaatgcacctgcttccttggagagcggcagcagctccacccctactaattgcagtacctcctcggccatcccgcagcccggtgcagccaccaagccttggcgcagcaaatccctcagcgtgaagcacagtgccacggtatccatgctctcggtcaagcctcctgggcctgaggcccccaggcccacacctgaagccatgaagccggcccccaacaatcagaagtccatgctggaaaagctgaaacttttcaacagtaaagggggctcaaaggcaggtgaggggccggggtcccgggacacaagctgtgagcggctggagactctgcccagcttcgaagagagcgaggagctggaggccgccagtcgcatgctcaccaccgtgggccctgcttccagcagccccaagattgcactcaagggcattgcccagaggacttttagccgggcactgaccaacaagaagagttctctgaaaggcaatgagaaagagaaggagaaacaacagcgggagaaggataaggagaaaagcaaggaccttgccaagagagcctctgtgacggagaggctggacctcaaggaggagccaaaagaagaccccagtggagcagctgtgcccgagatgccaaaaaagtcctccaagattgccagcttcatccccaaaggggggaagctcaacagtgccaagaaggagcccatggccccttcccacagtggaataccaaaaccaggaatgaaaagcatgcccgggaaatccccaagtgccccagcgccttccaaggaaggggagcggagccggagtgggaagctgagctcaggactcccccagcagaagccccagctggacggcagacactccagttcctcttccagcctggcgtcctcagaaggaaaaggcccaggagggaccaccctgaaccacagcatcagcagccagactgtcagtgggtctgtcgggaccacccagaccacaggaagcaataccgtcagtgttcagctacctcagccccagcagcaatacaaccatcccaacactgccacggttgcacctttcctgtacaggtctcagacggacactgaagggaatgttactgccgagtcaagctcaacaggtgtgagcgtggagcccagccacttcaccaagactggacagcctgctctggaagaactcactggggaagatcctgaggctcggcggctgcggacagtgaagaacatcgctgatctgcggcagaatttggaggaaaccatgtccagtttaaggggaactcaggttacacacagcacattggaaaccacgtttgacaccaatgtcaccacggagatgagtggccgtagcatactcagcttgacagggaggcccacacctctgtcctggagactgggccagtccagccctcggctccaagcaggagacgccccctcaatgggcaatgggtatccccctcgagccaacgccagcaggttcatcaacactgagtcaggtcgctatgtgtactccgcccctctgagaaggcagctggcctcccggggcagtagtgtctgccatgtggacgtctcagacaaggcaggagatgagatggacctggaaggcatcagcatggatgcccccggctacatgagcgacggggatgttctgagcaagaacatccggaccgatgacattacaagcggatacatgactgatggtggacttggcctctatacccgtcgcctgaaccggctccctgatgggatggctgtggtacgggagaccctgcaacgaaatacctccctgggcctcggagacgctgacagctgggacgacagcagctccgtcagcagcggcatcagcgacaccatagacaacctcagcactgatgacatcaacaccagctcctccatcagctcttatgccaacacacctgcctcctctcgaaaaaacctggatgtgcagactgatgctgagaagcactcacaggtggagaggaattccctgtggtctggtgatgatgtcaagaaatcagacggaggctcagacagcggcataaaaatggagccaggttccaagtggaggcggaatccttctgatgtgtctgacgagtccgacaaaagcacgtcgggcaagaagaatcctgtcatctcccagacaggctcatggcggcgaggcatgacagctcaggtgggcatcaccatgccaaggacgaagccttcagccccggcaggcgcactgaagaccccaggaactggaaaaacagacgacgcaaaggtgtctgagaaaggaaggctttctcctaaagcctcccaggtgaagcgctccccatcagatgcaggccggagcagtggtgacgaatccaaaaagcccctccccagcagctctaggacacctactgccaatgccaacagctttgggttcaagaagcagagtggttccgccgccggcctggccatgatcacagccagcggggtgactgtcaccagcaggtcagccacactgggcaaaatcccaaagtcatctgcactcgtcagtcggtctgctggtcggaagtcaagtatggatggggctcagaatcaggatgacgggtatctagccctaagctcccggacaaaccttcagtaccggagtttgccgaggcccagtaagtccaacagccggaacggggctgggaacaggtctagcaccagcagcatagattccaacattagcagcaagtccgcaggcctgccagtgcccaaactgagggagccttccaaaacagccctaggcagctctctaccaggtctggtcaaccaaacagacaaggagaaaggcatctcatcagacaacgagagtgtggcttcctgtaactcggtgaaagtgaatccggcagcccagcctgtgtccagtccggctcagaccagtctccagcctggagccaagtacccagatgtggcctctcccacactccgcagactctttggtgggaagcctaccaagcaagtgcccatcgccacagctgaaaacatgaaaaattcggtggtcatctccaatcctcatgccaccatgactcagcaaggtaacctagactccccgtcaggcagtggcgtcctgagcagtgggagcagcagtcctctctacagcaagaatgtggacctcaaccagtctccgctagcctccagccccagctcagcccactcggccccttccaacagcctcacctggggcaccaacgccagcagctcctccgcagttagcaaggatggcctgggctttcagtctgtcagcagcctccacaccagctgtgagtccatcgacatctccctcagcagtggaggggtccccagccacaattcttccactggcctcatcgcctcctccaaggacgactccttgactccctttgtcagaactaacagtgtgaagaccacactgtcagaaagccctctctcttcccctgctgctagccctaagttctgcagaagtactctgcccaggaaacaggacagtgacccgcaccttgataggaacactttgcctaagaaaggactcaggtatactcccacctcccagcttcgcacgcaagaagatgcaaaagaatggttacggtcccattctgcaggaggccttcaggacaccgctgccaattcccccttttcctctggctccagcgtgacttctccctccggaacaagattcaacttttcccagcttgcgagtcccaccactgtcacccagatgagcttgtccaacccgaccatgctgaggactcacagcctctccaatgctgatgggcagtatgatccatacactgacagccgcttccggaatagctccatgtccctggatgagaagagcagaaccatgagccgttcaggctcattccgggatgggtttgaagaagaatcatgggagaaaagttctgtggacaactttgtcagccgtcttcacagctcacttcatttctctcttcctttgttccatcacgcaaggtatgagttagttcatggatcctcactctccttggtttccagcacatcgtcagtttattctacaccagaagaaaaatgccagtcagagattcgcaagctgcggcgggaactggatgcctcccaggagaaagtttcagctttgaccacccagctgacagcaaatgctcaccttgtggcagcctttgaacagagtcttggtaacatgacaatcaggctccagagtctgaccatgacagctgagcagaaggactcagaactgaatgagttaagaaaaaccattgagctgctaaagaaacagaacgcagctgcccaggctgccattaatggagtaattaacacacctgagctcaactgcaaaggaaacggcactgcccagtctgcagacctccgcatccgcaggcagcactcctcagacagcgtctccagcatcaacagtgccaccagccactccagcgtgggcagcaacatagagagtgactcaaagaagaagaagcggaagaactgggtcaatgagttacgcagctccttcaagcaagctttcgggaagaagaagtccccaaaatctgcgtcctctcattcagatattgaggagatgacggattcttctttgccttcctcaccaaagttaccgcacaatgggtccacaggttccaccccactgctgaggaattctcactccaactctctaatttcagaatgcatggatagtgaagctgagaccgtcatgcagctccgaaatgagttaagagacaaggagatgaagctgacggatatccgcttagaagctctcagttctgcccaccagctggaccagctccgggaggccatgaacaggatgcagagtgaaatagagaagctgaaagctgagaatgatcggctgaagtcagagtctcaaggcagtggctgcagccgggctccttcccaagtgtccatctctgcctccccgaggcagtccatgggcctctcccagcacagcttgaacctcactgagtcaaccagcctggacatgttgctggatgacactggtgaatgctcggctcggaaggaaggaggcaggcatgttaagatagttgtcagctttcaggaggaaatgaagtggaaggaggattccagaccacatctctttcttattggctgcattggagttagtggcaagacgaagtgggatgtgctcgatggggtggttagacggctgttcaaagaatacatcattcatgtcgacccagtgagtcagctagggctgaattcagacagcgttcttggctacagcattggagaaatcaagcgcagcaacacttccgaaacaccggagctgcttccttgtggctatctggttggagagaacacgaccatctcagtgactgtgaaagggctcgcagaaaacagcctggactcactggtgtttgagtccttgattcccaagcccatcctgcagcgctacgtctccctcctgatagagcaccgtcggatcattctctctggccccagcggcactgggaaaacctacctggccaaccggctgtctgagtatatagtgcttcgagagggacgggagttgacagacggggttatcgccacctttaacgtggaccataagtccagcaaggaattgcgccagtacctgtccaaccttgctgaccagtgcaacagtgagaacaatgctgtggacatgcccctcgtcatcatcctggacaacctacaccacgtgagctctctgggagagatcttcaatgggctgctcaactgcaagtaccacaaatgcccttacataattggcacaatgaaccaggctacctcttcgactcccaacctgcagcttcaccataacttcagatgggtgctttgtgccaaccacacggagcctgtgaagggtttccttggccgattcctgaggaggaagctcatggaaacagagatcagtgggcgggtgcgcaatatggagctggtaaaaatcattgactggattcccaaggtctggcatcacctcaaccgcttcctggaggctcacagttcctcggacgtcaccatcggcccccggctcttcctgtcatgccccatcgatgtggacggctcgagagtgtggttcaccgacttgtggaactattccattatcccctatctcctggaagccgtcagagaaggactccagctctatggaaggcgcgccccctgggaggatcctgccaagtgggtgatggacacatatccatgggcagccagcccacaacagcacgagtggcctcccctgctgcagttacggcctgaggatgtcggcttcgacggctactccatgcctcgggagggatcgacaagcaagcagatgccccccagtgatgctgaaggtgacccgctgatgaacatgctgatgaggctgcaggaggcagccaactactccagcccccagagctatgacagcgactccaacagcaacagccatcacgatgacatcttggactcctctttggagtccactctgtgacaggggcccggagcccagcgccctcctcttctcctcaccgcattccacctgcatcccccacatcaccctgaagatgacttcctgagccagcccccagccacagccttagagctgcgggaacaccgagaccccccgtccttcagcctcgacctgggtgcaggcatcccgggccagctgcctgcggaccgcttccttccacagcgagaactgcactaccttctgttgtactttaattattgttttgccttgttgctgtgacctccctaagacactgaagatacttctcgggaaaggatcatcgccgttgaaatgaaaa

SEQ ID NO: 13410 - DNA, 684 bp, Homo sapiens
  source 1..684: mol_type = unassigned DNA
tctcttggattgcacacgctgggattgtctcctacgagcatgtctgcgccctcacagcctgtcccgggacagcgtggtccgcgtcccccgagcccccattgtgtcttgatactttggggtgcacatggctattgatctctactgcggtttggcttgtctgtggggaatacatgagccccgaatctacacagactgggccaatcattacctagccaaatccggccacaagcgtctcatcagggatctccagcaagatgtgacagatggcgtcctcctggcccagattatccaggttgtggcaaatgaaaagattgaagacatcaatggctgtccgaagaacagatcccaaatgattgaaaacatagatgcctgcttgaatttcctggcagctaagggaataaacatccaggggctgtctgcagaagagatcaggaatggaaacctcaaggccattctaggcctcttcttcagcctctcccgatacaagcagcagcagcagcagccccagaagcagcacctctcctcacctctgccgcccgccgtatcccaggtggccggggccccctcccagtgccaggctggcacccctcagcagcaggtgccagtcactccccaagccccgtgccagcctcaccagccagcgccacatcagcagtcaaaagcacaagctgaaatgcagtccag

SEQ ID NO: 13411 - DNA, 570 bp, Homo sapiens
  source 1..570: mol_type = unassigned DNA
ttgcaggagaaagtggctgctgctagagcctttggcaagttcagcctcctcccaccccggaatgagtgacaatgcacctgcttccttggagagcggcagcagctccacccctactaattgcagtacctcctcggccatcccgcagcccggtgcagccaccaagccttggcgcagcaaatccctcagcgtgaagcacagtgccacggtatccatgctctcggtcaagcctcctgggcctgaggcccccaggcccacacctgaagccatgaagccggcccccaacaatcagaagtccatgctggaaaagctgaaacttttcaacagtaaagggggctcaaaggcaggtgaggggccggggtcccgggacacaagctgtgagcggctggagactctgcccagcttcgaagagagcgaggagctggaggccgccagtcgcatgctcaccaccgtgggccctgcttccagcagccccaagattgcactcaagggcattgcccagaggacttttagccgggcactgaccaacaagaagagttctctgaaaggcaatgagaaagagaaggagaaaca

SEQ ID NO: 13412 - DNA, 5084 bp, Homo sapiens
  source 1..5084: mol_type = unassigned DNA
aatcttttcaatcgaatgctttgccttcagacgtcaatggaatgagctaagaaatgttatagtcaatgatttttgcatcattaaaagtagcacttagggctggaaagactttctgcaatgtttctgtgcagtctgtgaggatttaaagtagtttttcattcttagattttcttcaatttgacccgctgttgcaaactcccctgggaccacatggagggcccttccattcagtgctttacgggccgcaatgtagtgaaatgctctggcctaggaaccttacaagctgggacgacagcagctccgtcagcagcggcatcagcgacaccatagacaacctcagcactgatgacatcaacaccagctcctccatcagctcttatgccaacacacctgcctcctctcgaaaaaacctggatgtgcagactgatgctgagaagcactcacaggtggagaggaattccctgtggtctggtgatgatgtcaagaaatcagacggaggctcagacagcggcataaaaatggagccaggttccaagtggaggcggaatccttctgatgtgtctgacgagtccgacaaaagcacgtcgggcaagaagaatcctgtcatctcccagacaggctcatggcggcgaggcatgacagctcaggtgggcatcaccatgccaaggacgaagccttcagccccggcaggcgcactgaagaccccaggaactggaaaaacagacgacgcaaaggtgtctgagaaaggaaggctttctcctaaagcctcccaggtgaagcgctccccatcagatgcaggccggagcagtggtgacgaatccaaaaagcccctccccagcagctctaggacacctactgccaatgccaacagctttgggttcaagaagcagagtggttccgccgccggcctggccatgatcacagccagcggggtgactgtcaccagcaggtcagccacactgggcaaaatcccaaagtcatctgcactcgtcagtcggtctgctggtcggaagtcaagtatggatggggctcagaatcaggatgacgggtatctagccctaagctcccggacaaaccttcagtaccggagtttgccgaggcccagtaagtccaacagccggaacggggctgggaacaggtctagcaccagcagcatagattccaacattagcagcaagtccgcaggcctgccagtgcccaaactgagggagccttccaaaacagccctaggcagctctctaccaggtctggtcaaccaaacagacaaggagaaaggcatctcatcagacaacgagagtgtggcttcctgtaactcggtgaaagtgaatccggcagcccagcctgtgtccagtccggctcagaccagtctccagcctggagccaagtacccagatgtggcctctcccacactccgcagactctttggtgggaagcctaccaagcaagtgcccatcgccacagctgaaaacatgaaaaattcggtggtcatctccaatcctcatgccaccatgactcagcaaggtaacctagactccccgtcaggcagtggcgtcctgagcagtgggagcagcagtcctctctacagcaagaatgtggacctcaaccagtctccgctagcctccagccccagctcagcccactcggccccttccaacagcctcacctggggcaccaacgccagcagctcctccgcagttagcaaggatggcctgggctttcagtctgtcagcagcctccacaccagctgtgagtccatcgacatctccctcagcagtggaggggtccccagccacaattcttccactggcctcatcgcctcctccaaggacgactccttgactccctttgtcagaactaacagtgtgaagaccacactgtcagaaagtgacccgcaccttgataggaacactttgcctaagaaaggactcaggtatactcccacctcccagcttcgcacgcaagaagatgcaaaagaatggttacggtcccattctgcaggaggccttcaggacaccgctgccaattcccccttttcctctggctccagcgtgacttctccctccggaacaagattcaacttttcccagcttgcgagtcccaccactgtcacccagatgagcttgtccaacccgaccatgctgaggactcacagcctctccaatgctgatgggcagtatgatccatacactgacagccgcttccggaatagctccatgtccctggatgagaagagcagaaccatgagccgttcaggctcattccgggatgggtttgaagaagttcatggatcctcactctccttggtttccagcacatcgtcagtttattctacaccagaagaaaaatgccagtcagagattcgcaagctgcggcgggaactggatgcctcccaggagaaagtttcagctttgaccacccagctgacagcaaatgctcaccttgtggcagcctttgaacagagtcttggtaacatgacaatcaggctccagagtctgaccatgacagctgagcagaaggactcagaactgaatgagttaagaaaaaccattgagctgctaaagaaacagaacgcagctgcccaggctgccattaatggagtaattaacacacctgagctcaactgcaaaggaaacggcactgcccagtctgcagacctccgcatccgcaggcagcactcctcagacagcgtctccagcatcaacagtgccaccagccactccagcgtgggcagcaacatagagagtgactcaaagaagaagaagcggaagaactggttacgcagctccttcaagcaagctttcgggaagaagaagtccccaaaatctgcgtcctctcattcagatattgaggagatgacggattcttctttgccttcctcaccaaagttaccgcacaatgggtccacaggttccaccccactgctgaggaattctcactccaactctctaatttcagaatgcatggatagtgaagctgagaccgtcatgcagctccgaaatgagttaagagacaaggagatgaagctgacggatatccgcttagaagctctcagttctgcccaccagctggaccagctccgggaggccatgaacaggatgcagagtgaaatagagaagctgaaagctgagaatgatcggctgaagtcagagtctcaaggcagtggctgcagccgggctccttcccaagtgtccatctctgcctccccgaggcagtccatgggcctctcccagcacagcttgaacctcactgagtcaaccagcctggacatgttgctggatgacactggtgaatgctcggctcggaaggaaggaggcaggcatgttaagatagttgtcagctttcaggaggaaatgaagtggaaggaggattccagaccacatctctttcttattggctgcattggagttagtggcaagacgaagtgggatgtgctcgatggggtggttagacggctgttcaaagaatacatcattcatgtcgacccagtgagtcagctagggctgaattcagacagcgttcttggctacagcattggagaaatcaagcgcagcaacacttccgaaacaccggagctgcttccttgtggctatctggttggagagaacacgaccatctcagtgactgtgaaagggctcgcagaaaacagcctggactcactggtgtttgagtccttgattcccaagcccatcctgcagcgctacgtctccctcctgatagagcaccgtcggatcattctctctggccccagcggcactgggaaaacctacctggccaaccggctgtctgagtatatagtgcttcgagagggacgggagttgacagacggggttatcgccacctttaacgtggaccataagtccagcaaggaattgcgccagtacctgtccaaccttgctgaccagtgcaacagtgagaacaatgctgtggacatgcccctcgtcatcatcctggacaacctacaccacgtgagctctctgggagagatcttcaatgggctgctcaactgcaagtaccacaaatgcccttacataattggcacaatgaaccaggctacctcttcgactcccaacctgcagcttcaccataacttcagatgggtgctttgtgccaaccacacggagcctgtgaagggtttccttggccgattcctgaggaggaagctcatggaaacagagatcagtgggcgggtgcgcaatatggagctggtaaaaatcattgactggattcccaaggtctggcatcacctcaaccgcttcctggaggctcacagttcctcggacgtcaccatcggcccccggctcttcctgtcatgccccatcgatgtggacggctcgagagtgtggttcaccgacttgtggaactattccattatcccctatctcctggaagccgtcagagaaggactccagctctatggaaggcgcgccccctgggaggatcctgccaagtgggtgatggacacatatccatgggcagccagcccacaacagcacgagtggcctcccctgctgcagttacggcctgaggatgtcggcttcgacggctactccatgcctcgggagggatcgacaagcaagcagatgccccccagtgatgctgaaggtgacccgctgatgaacatgctgatgaggctgcaggaggcagccaactactccagcccccagagctatgacagcgactccaacagcaacagccatcacgatgacatcttggactcctctttggagtccactctgtgacaggggcccggagcccagcgccctcctcttctcctcaccgcattccacctgcatcccccacatcaccctgaagatgacttcctgagccagcccccagccacagccttagagctgcgggaacaccgagaccccccgtccttcagcctcgacctgggtgcaggcatcccgggccagctgcctgcggaccgcttccttccacagcgagaactgcactaccttctgttgtactttaattattgttttgccttgttgctgtgacctccctaagacactgaagatacttctcgggaaaggatcatcgccgttgaaatgaaaagagagacagagagaaaaaaaaaaagagaa

SEQ ID NO: 13413 - DNA, 2716 bp, Homo sapiens
  source 1..2716: mol_type = unassigned DNA
acttttcacagctgacttgataccagcactgaggcctgacctctcgatccttcagcacttcagaggttaattttgttgggggatcggatttctttcctggcctggggaatggtgatccctgctagctagtcctttagttacagagttgctgggtgcctgggattccctggcccagtgtgggctggctcagctggctaaaggacttgccatcctgtgagattcattcagcttctttgtccgctgttctccaagggccgcaatgtagtgaaatgctctggcctaggaaccttacaagctgggacgacagcagctccgtcagcagcggcatcagcgacaccatagacaacctcagcactgatgacatcaacaccagctcctccatcagctcttatgccaacacacctgcctcctctcgaaaaaacctggatgtgcagactgatgctgagaagcactcacaggtggagaggaattccctgtggtctggtgatgatgtcaagaaatcagacggaggctcagacagcggcataaaaatggagccaggttccaagtggaggcggaatccttctgatgtgtctgacgagtccgacaaaagcacgtcgggcaagaagaatcctgtcatctcccagacaggctcatggcggcgaggcatgacagctcaggtgggcatcaccatgccaaggacgaagccttcagccccggcaggcgcactgaagaccccaggaactggaaaaacagacgacgcaaaggtgtctgagaaaggaaggctttctcctaaagcctcccaggtgaagcgctccccatcagatgcaggccggagcagtggtgacgaatccaaaaagcccctccccagcagctctaggacacctactgccaatgccaacagctttgggttcaagaagcagagtggttccgccgccggcctggccatgatcacagccagcggggtgactgtcaccagcaggtcagccacactgggcaaaatcccaaagtcatctgcactcgtcagtcggtctgctggtcggaagtcaagtatggatggggctcagaatcaggatgacgggtatctagccctaagctcccggacaaaccttcagtaccggagtttgccgaggcccagtaagtccaacagccggaacggggctgggaacaggtctagcaccagcagcatagattccaacattagcagcaagtccgcaggcctgccagtgcccaaactgagggagccttccaaaacagccctaggcagctctctaccaggtctggtcaaccaaacagacaaggagaaaggcatctcatcagacaacgagagtgtggcttcctgtaactcggtgaaagtgaatccggcagcccagcctgtgtccagtccggctcagaccagtctccagcctggagccaagtacccagatgtggcctctcccacactccgcagactctttggtgggaagcctaccaagcaagtgcccatcgccacagctgaaaacatgaaaaattcggtggtcatctccaatcctcatgccaccatgactcagcaaggtaacctagactccccgtcaggcagtggcgtcctgagcagtgggagcagcagtcctctctacagcaagaatgtggacctcaaccagtctccgctagcctccagccccagctcagcccactcggccccttccaacagcctcacctggggcaccaacgccagcagctcctccgcagttagcaaggatggcctgggctttcagtctgtcagcagcctccacaccagctgtgagtccatcgacatctccctcagcagtggaggggtccccagccacaattcttccactggcctcatcgcctcctccaaggacgactccttgactccctttgtcagaactaacagtgtgaagaccacactgtcagaaaggtatactcccacctcccagcttcgcacgcaagaagatgcaaaagaatggttacggtcccattctgcaggaggccttcaggacaccgctgccaattcccccttttcctctggctccagcgtgacttctccctccggaacaagattcaacttttcccagcttgcgagtcccaccactgtcacccagatgagcttgtccaacccgaccatgctgaggactcacagcctctccaatgctgatgggcagtatgatccatacactgacagccgcttccggaatagctccatgtccctggatgagaagagcagaaccatgagccgttcaggctcattccgggatgggtttgaagaagttcatggatcctcactctccttggtttccagcacatcgtcagtttattctacaccagaagaaaaatgccagtcagagattcgcaagctgcggcgggaactggatgcctcccaggagaaagtttcagctttgaccacccagctgacagcaaatgctcaccttgtggcagcctttgaacagagtcttggtaacatgacaatcaggctccagagtctgaccatgacagctgagcagaaggactcagaactgaatgagttaagaaaaaccattgagctgctaaagaaacagaacgcagctgcccaggctgccattaatggagtaattaacacacctgagctcaactgcaaaggaaacggcactgcccagtctgcagacctccgcatccgcaggcagcactcctcagacagcgtctccagcatcaacagtgccaccagccactccagcgtgggcagcaacatagagagtgactc

SEQ ID NO: 13414 - DNA, 556 bp, Homo sapiens
  source 1..556: mol_type = unassigned DNA
acagctgacttgataccagcactgaggcctgacctctcgatccttcagcacttcagagggccgcaatgtagtgaaatgctctggcctaggaaccttacaagctgggacgacagcagctccgtcagcagcggcatcagcgacaccatagacaacctcagcactgatgacatcaacaccagctcctccatcagctcttatgccaacacacctgcctcctctcgaaaaaacctggatgtgcagactgatgctgagaagcactcacaggtggagaggaattccctgtggtctggtgatgatgtcaagaaatcagacggaggctcagacagcggcataaaaatggagccaggttccaagtggaggcggaatccttctgatgtgtctgacgagtccgacaaaagcacgtcgggcaagaagaatcctgtcatctcccagacaggctcatggcggcgaggcatgacagctcaggtgggcatcaccatgccaaggacgaagccttcagccccggcaggcgcactgaagaccccaggaactggaaaaacagacgacgcaaaggtgt

SEQ ID NO: 13415 - DNA, 668 bp, Homo sapiens
  source 1..668: mol_type = unassigned DNA
agttaggcttgctcactcatccacaccaaaggatctcgttccgctcgggccccggggtttcacgggaacaattgccttgaacaatagccagaaaacgagttccaccagtctggacttttttgcaactgaatgcagctgtctggcggggggcatgggccagccctgtaaatgggctgtgccttgattctggagcagaactggaaaattgagcagctgggacgacagcagctccgtcagcagcggcatcagcgacaccatagacaacctcagcactgatgacatcaacaccagctcctccatcagctcttatgccaacacacctgcctcctctcgaaaaaacctggatgtgcagactgatgctgagaagcactcacaggtggagaggaattccctgtggtctggtgatgatgtcaagaaatcagacggaggctcagacagcggcataaaaatggagccaggttccaagtggaggcggaatccttctgatgtgtctgacgagtccgacaaaagcacgtcgggcaagaagaatcctgtcatctcccagacaggctcatggcggcgaggcatgacagctcaggtgggcatcaccatgccaaggacgaagccttcagccccggcaggcgcactgaagaccccaggaactggaaaaacagacgacgcaaaggtgt

SEQ ID NO: 13416 - DNA, 607 bp, Homo sapiens
  source 1..607: mol_type = unassigned DNA
agactgtttccaaggacagtaagggcctcctggaagcagacccagcctttggagtttggggaggattaggatccttgctttgtgaagactgcttttcagaaccgtagttagagaacctcatctctgctcaccggctgtggttttattactgggacgacagcagctccgtcagcagcggcatcagcgacaccatagacaacctcagcactgatgacatcaacaccagctcctccatcagctcttatgccaacacacctgcctcctctcgaaaaaacctggatgtgcagactgatgctgagaagcactcacaggtggagaggaattccctgtggtctggtgatgatgtcaagaaatcagacggaggctcagacagcggcataaaaatggagccaggttccaagtggaggcggaatccttctgatgtgtctgacgagtccgacaaaagcacgtcgggcaagaagaatcctgtcatctcccagacaggctcatggcggcgaggcatgacagctcaggtgggcatcaccatgccaaggacgaagccttcagccccggcaggcgcactgaagaccccaggaactggaaaaacagacgacgcaaaggtgtctga

SEQ ID NO: 13417 - DNA, 2289 bp, Homo sapiens
  source 1..2289: mol_type = unassigned DNA
cccgctgccatagcaccacgctggtgctctctcatggccaggatgtgggaggggctgttcacctcggttgtgctagattgcattgctgcctgattgacatcaccaaacaccccttgccccatattgaatctcagttgactccacctctcctgcctgggcccttagaggtggatgtgaaggtgtctcctgggctaggacccccggctcatttccactggccattctatgggcatctctgagggagatctattgaaagtgggtctgtatgtaattaccagagaaatgttgactcctccagcacactgagagcatggctcacctctgcatttaggctgtcctggtcttgttcatgctttcccctaattatccctcaagtccatcgtcctcctctttccccctatcactgccccatcatcacccagcacaccattgccatcacctagctggtacgtctgcttgcagctttccccctgcactctgtagccaatcctctgcactgtggcagccagaccagagtgagcattctagagtacacatctgaccatagaactctcgtgcttaaagtccttcagtagctccagctccctatggcctgcaggatgaaatccagactccgttggttggcaggtcaagtatgaacttcagctacactaaacctctggtagtttccccaaacatccatgctatttcccatgcctttgcaaaggctgcagcatcaccccactcctgaccccaacaactgctcctgcctttccttatgttgctgcccattatctgtccagtctcagcccagacatcccctcctctaaggagccttccctgattcccttaggcttcatcatatttcatttctttctttgcctgtctgcctcctccaccagactgtgagctcctgggaaccaggacggtgtcttagtcatagtgatagttccatagcctagcaccgggcctgacatcaagcacaagaggcagtttgtctcagtggttagagcctagcctctggagccaggcttcttggttctcatcttagctcttcaattaactagctgtttgatcctggaaaagttacatgacctgtctgttcctcagcatttctgtccgtaaaacggaggtggagataatatctatgttagagggttggtatcaggaactgtgagttaatacatagttacaatgtttagaagagtgttcggtgcatagctaatccaatttgttgcattagcatatacaccttctgtttctaacgtgctttggttcctgaggtcagccatcatttggatcaccatcatcagcttgaaaagtgtttctgacttcctccagatgggtgctttgtgccaaccacacggagcctgtgaagggtttccttggccgattcctgaggaggaagctcatggaaacagagatcagtgggcgggtgcgcaatatggagctggtaaaaatcattgactggattcccaaggtctggcatcacctcaaccgcttcctggaggctcacagttcctcggacgtcaccatcggcccccggctcttcctgtcatgccccatcgatgtggacggctcgagagtgtggttcaccgacttgtggaactattccattatcccctatctcctggaagccgtcagagaaggactccagctctatggaaggcgcgccccctgggaggatcctgccaagtgggtgatggacacatatccatgggcagccagcccacaacagcacgagtggcctcccctgctgcagttacggcctgaggatgtcggcttcgacggctactccatgcctcgggagggatcgacaagcaagcagatgccccccagtgatgctgaaggtgacccgctgatgaacatgctgatgaggctgcaggaggcagccaactactccagcccccagagctatgacagcgactccaacagcaacagccatcacgatgacatcttggactcctctttggagtccactctgtgacaggggcccggagcccagcgccctcctcttctcctcaccgcattccacctgcatcccccacatcaccctgaagatgacttcctgagccagcccccagccacagccttagagctgcgggaacaccgagaccccccgtccttcagcctcgacctgggtgcaggcatcccgggccagctgcctgcggaccgcttccttccacagcgagaactgcactaccttctgttgtactttaattattgttttgccttgttgctgtgacctccctaagacactgaagatacttctcgggaaaggatcatcgccgttgaaatgaaaagagagac

SEQ ID NO: 13418 - DNA, 627 bp, Homo sapiens
  source 1..627: mol_type = unassigned DNA
tttttttttttttttgtatttttagtagatacggtgtttcaccgtgttagccaggatggtctcgatctcctgaccttgtgatccacccgcctcagcctcccaaagtgctgggattataggcgtgagccactgcgcatgggcttccatttttaaaaatcaagattagtgatgccacagtgagcatcttccccataaagcctttcctggaggagggagacccccaggtggaatcagggatcagagtgtccttctctgtggccaccatccagggctagtatacctgcgttcaggcctcagccctgccatccctcagaacgtctagggtccctcctgtgaagggtgctcggaccatggcttcacctgatgccccatcacccatgcccatttgagtgctaatgtattttcactgtggtctccaggcccccggctcttcctgtcatgccccatcgatgtggacggctcgagagtgtggttcaccgacttgtggaactattccattatcccctatctcctggaagccgtcagagaaggactccagctctatggaaggcgcgccccctgggaggatcctgccaagtgggtgatggacacatatccatgggcagccagcccacaacagcacgagtg

SEQ ID NO: 13419 - DNA, 563 bp, Homo sapiens
  source 1..563: mol_type = unassigned DNA
tctagaccactgggtcatgctgccttcagccttagcacctcgaactgtctgcatcttggatgacttcctgagcatggaatagaagtggaattactccatcagggaaggcatgatgctggatttggggagtttttcagaaagctgcaaaactggggctacgagagagatctgggccacttccagactgttccttctttgcctgttttcagctctatggaaggcgcgccccctgggaggatcctgccaagtgggtgatggacacatatccatgggcagccagcccacaacagcacgagtggcctcccctgctgcagttacggcctgaggatgtcggcttcgacggctactccatgcctcgggagggatcgacaagcaagcagatgccccccagtgatgctgaaggtgacccgctgatgaacatgctgatgaggctgcaggaggcagccaactactccagcccccagagctatgacagcgactccaacagcaacagccatcacgatgacatcttggactcctctttggagtccactctgtgacaggggcccggagcccagcgccct

SEQ ID NO: 13420 - DNA, 11003 bp, Homo sapiens
  source 1..11003: mol_type = unassigned DNA
gttaatatgggcgtccaagcctctgtttcccaggaggaaatttgcaagaggcggcagcccctgagcgcccagagctcttgaaaggccacccaggagaggtgtgagacccggcggcagcatccgtccaggtgggacccgctgagcgccgtggccagtcccccattcccatcccggcaccccaaaggcgcgctcgcccgattgcttcgagttccccgacctggggattttttttttagccgctggtggtgggcgcctcgtgggctaaggcccggcgcctgctctgctacccgcgctgcctttagcggtcgcccccgccgccgctgccagggacgtgctgggaaagcccaagccccgggagaagatgccggccatcctggtcgcctccaaaatgaagtcgggactgcccaaacccgtgcacagcgccgcgcccatcctgcacgtgcccccggcccgggcgggcccccagccctgctacctgaagttgggaagcaaggtggaggtgagcaagaccacctatcctagccagatccccctgaaatcgcaggtgctgcaggggctgcaggagccagcgggggaggggctcccgctgcggaagagcggctcggtggaaaacgggttcgatacccagatctacacagactgggccaatcattacctagccaaatccggccacaagcgtctcatcagggatctccagcaagatgtgacagatggcgtcctcctggcccagattatccaggttgtggcaaatgaaaagattgaagacatcaatggctgtccgaagaacagatcccaaatgattgaaaacatagatgcctgcttgaatttcctggcagctaagggaataaacatccaggggctgtctgcagaagagatcaggaatggaaacctcaaggccattctaggcctcttcttcagcctctcccgatacaagcagcagcagcagcagccccagaagcagcacctctcctcacctctgccgcccgccgtatcccaggtggccggggccccctcccagtgccaggctggcacccctcagcagcaggtgccagtcactccccaagccccgtgccagcctcaccagccagcgccacatcagcagtcaaaagcacaagctgaaatgcagtccagacttccaggtcctaccgcgagggtatccgctgcaggcagcgaggccaaaacacgcggagggtcaactactgctaacaaccgacgcagccagagctttaacaactatgataaatccaaaccagtcacctccccacccccaccgccaagcagccacgagaaagagcctttggcaagttcagcctcctcccaccccggaatgagtgacaatgcacctgcttccttggagagcggcagcagctccacccctactaattgcagtacctcctcggccatcccgcagcccggtgcagccaccaagccttggcgcagcaaatccctcagcgtgaagcacagtgccacggtatccatgctctcggtcaagcctcctgggcctgaggcccccaggcccacacctgaagccatgaagccggcccccaacaatcagaagtccatgctggaaaagctgaaacttttcaacagtaaagggggctcaaaggcaggtgaggggccggggtcccgggacacaagctgtgagcggctggagactctgcccagcttcgaagagagcgaggagctggaggccgccagtcgcatgctcaccaccgtgggccctgcttccagcagccccaagattgcactcaagggcattgcccagaggacttttagccgggcactgaccaacaagaagagttctctgaaaggcaatgagaaagagaaggagaaacaacagcgggagaaggataaggagaaaagcaaggaccttgccaagagagcctctgtgacggagaggctggacctcaaggaggagccaaaagaagaccccagtggagcagctgtgcccgagatgccaaaaaagtcctccaagattgccagcttcatccccaaaggggggaagctcaacagtgccaagaaggagcccatggccccttcccacagtggaataccaaaaccaggaatgaaaagcatgcccgggaaatccccaagtgccccagcgccttccaaggaaggggagcggagccggagtgggaagctgagctcaggactcccccagcagaagccccagctggacggcagacactccagttcctcttccagcctggcgtcctcagaaggaaaaggcccaggagggaccaccctgaaccacagcatcagcagccagactgtcagtgggtctgtcgggaccacccagaccacaggaagcaataccgtcagtgttcagctacctcagccccagcagcaatacaaccatcccaacactgccacggttgcacctttcctgtacaggtctcagacggacactgaagggaatgttactgccgagtcaagctcaacaggtgtgagcgtggagcccagccacttcaccaagactggacagcctgctctggaagaactcactggggaagatcctgaggctcggcggctgcggacagtgaagaacatcgctgatctgcggcagaatttggaggaaaccatgtccagtttaaggggaactcaggttacacacagcacattggaaaccacgtttgacaccaatgtcaccacggagatgagtggccgtagcatactcagcttgacagggaggcccacacctctgtcctggagactgggccagtccagccctcggctccaagcaggagacgccccctcaatgggcaatgggtatccccctcgagccaacgccagcaggttcatcaacactgagtcaggtcgctatgtgtactccgcccctctgagaaggcagctggcctcccggggcagtagtgtctgccatgtggacgtctcagacaaggcaggagatgagatggacctggaaggcatcagcatggatgcccccggctacatgagcgacggggatgttctgagcaagaacatccggaccgatgacattacaagcggatacatgactgatggtggacttggcctctatacccgtcgcctgaaccggctccctgatgggatggctgtggtacgggagaccctgcaacgaaatacctccctgggcctcggagacgctgacagctgggacgacagcagctccgtcagcagcggcatcagcgacaccatagacaacctcagcactgatgacatcaacaccagctcctccatcagctcttatgccaacacacctgcctcctctcgaaaaaacctggatgtgcagactgatgctgagaagcactcacaggtggagaggaattccctgtggtctggtgatgatgtcaagaaatcagacggaggctcagacagcggcataaaaatggagccaggttccaagtggaggcggaatccttctgatgtgtctgacgagtccgacaaaagcacgtcgggcaagaagaatcctgtcatctcccagacaggctcatggcggcgaggcatgacagctcaggtgggcatcaccatgccaaggacgaagccttcagccccggcaggcgcactgaagaccccaggaactggaaaaacagacgacgcaaaggtgtctgagaaaggaaggctttctcctaaagcctcccaggtgaagcgctccccatcagatgcaggccggagcagtggtgacgaatccaaaaagcccctccccagcagctctaggacacctactgccaatgccaacagctttgggttcaagaagcagagtggttccgccgccggcctggccatgatcacagccagcggggtgactgtcaccagcaggtcagccacactgggcaaaatcccaaagtcatctgcactcgtcagtcggtctgctggtcggaagtcaagtatggatggggctcagaatcaggatgacgggtatctagccctaagctcccggacaaaccttcagtaccggagtttgccgaggcccagtaagtccaacagccggaacggggctgggaacaggtctagcaccagcagcatagattccaacattagcagcaagtccgcaggcctgccagtgcccaaactgagggagccttccaaaacagccctaggcagctctctaccaggtctggtcaaccaaacagacaaggagaaaggcatctcatcagacaacgagagtgtggcttcctgtaactcggtgaaagtgaatccggcagcccagcctgtgtccagtccggctcagaccagtctccagcctggagccaagtacccagatgtggcctctcccacactccgcagactctttggtgggaagcctaccaagcaagtgcccatcgccacagctgaaaacatgaaaaattcggtggtcatctccaatcctcatgccaccatgactcagcaaggtaacctagactccccgtcaggcagtggcgtcctgagcagtgggagcagcagtcctctctacagcaagaatgtggacctcaaccagtctccgctagcctccagccccagctcagcccactcggccccttccaacagcctcacctggggcaccaacgccagcagctcctccgcagttagcaaggatggcctgggctttcagtctgtcagcagcctccacaccagctgtgagtccatcgacatctccctcagcagtggaggggtccccagccacaattcttccactggcctcatcgcctcctccaaggacgactccttgactccctttgtcagaactaacagtgtgaagaccacactgtcagaaagccctctctcttcccctgctgctagccctaagttctgcagaagtactctgcccaggaaacaggacagtgacccgcaccttgataggaacactttgcctaagaaaggactcaggtatactcccacctcccagcttcgcacgcaagaagatgcaaaagaatggttacggtcccattctgcaggaggccttcaggacaccgctgccaattcccccttttcctctggctccagcgtgacttctccctccggaacaagattcaacttttcccagcttgcgagtcccaccactgtcacccagatgagcttgtccaacccgaccatgctgaggactcacagcctctccaatgctgatgggcagtatgatccatacactgacagccgcttccggaatagctccatgtccctggatgagaagagcagaaccatgagccgttcaggctcattccgggatgggtttgaagaagttcatggatcctcactctccttggtttccagcacatcgtcagtttattctacaccagaagaaaaatgccagtcagagattcgcaagctgcggcgggaactggatgcctcccaggagaaagtttcagctttgaccacccagctgacagcaaatgctcaccttgtggcagcctttgaacagagtcttggtaacatgacaatcaggctccagagtctgaccatgacagctgagcagaaggactcagaactgaatgagttaagaaaaaccattgagctgctaaagaaacagaacgcagctgcccaggctgccattaatggagtaattaacacacctgagctcaactgcaaaggaaacggcactgcccagtctgcagacctccgcatccgcaggcagcactcctcagacagcgtctccagcatcaacagtgccaccagccactccagcgtgggcagcaacatagagagtgactcaaagaagaagaagcggaagaactgggtgaatattcagttacgcagctccttcaagcaagctttcgggaagaagaagtccccaaaatctgcgtcctctcattcagatattgaggagatgacggattcttctttgccttcctcaccaaagttaccgcacaatgggtccacaggttccaccccactgctgaggaattctcactccaactctctaatttcagaatgcatggatagtgaagctgagaccgtcatgcagctccgaaatgagttaagagacaaggagatgaagctgacggatatccgcttagaagctctcagttctgcccaccagctggaccagctccgggaggccatgaacaggatgcagagtgaaatagagaagctgaaagctgagaatgatcggctgaagtcagagtctcaaggcagtggctgcagccgggctccttcccaagtgtccatctctgcctccccgaggcagtccatgggcctctcccagcacagcttgaacctcactgagtcaaccagcctggacatgttgctggatgacactggtgaatgctcggctcggaaggaaggaggcaggcatgttaagatagttgtcagctttcaggaggaaatgaagtggaaggaggattccagaccacatctctttcttattggctgcattggagttagtggcaagacgaagtgggatgtgctcgatggggtggttagacggctgttcaaagaatacatcattcatgtcgacccagtgagtcagctagggctgaattcagacagcgttcttggctacagcattggagaaatcaagcgcagcaacacttccgaaacaccggagctgcttccttgtggctatctggttggagagaacacgaccatctcagtgactgtgaaagggctcgcagaaaacagcctggactcactggtgtttgagtccttgattcccaagcccatcctgcagcgctacgtctccctcctgatagagcaccgtcggatcattctctctggccccagcggcactgggaaaacctacctggccaaccggctgtctgagtatatagtgcttcgagagggacgggagttgacagacggggttatcgccacctttaacgtggaccataagtccagcaaggaattgcgccagtacctgtccaaccttgctgaccagtgcaacagtgagaacaatgctgtggacatgcccctcgtcatcatcctggacaacctacaccacgtgagctctctgggagagatcttcaatgggctgctcaactgcaagtaccacaaatgcccttacataattggcacaatgaaccaggctacctcttcgactcccaacctgcagcttcaccataacttcagatgggtgctttgtgccaaccacacggagcctgtgaagggtttccttggccgattcctgaggaggaagctcatggaaacagagatcagtgggcgggtgcgcaatatggagctggtaaaaatcattgactggattcccaaggtctggcatcacctcaaccgcttcctggaggctcacagttcctcggacgtcaccatcggcccccggctcttcctgtcatgccccatcgatgtggacggctcgagagtgtggttcaccgacttgtggaactattccattatcccctatctcctggaagccgtcagagaaggactccagctctatggaaggcgcgccccctgggaggatcctgccaagtgggtgatggacacatatccatgggcagccagcccacaacagcacgagtggcctcccctgctgcagttacggcctgaggatgtcggcttcgacggctactccatgcctcgggagggatcgacaagcaagcagatgccccccagtgatgctgaaggtgacccgctgatgaacatgctgatgaggctgcaggaggcagccaactactccagcccccagagctatgacagcgactccaacagcaacagccatcacgatgacatcttggactcctctttggagtccactctgtgacaggggcccggagcccagcgccctcctcttctcctcaccgcattccacctgcatcccccacatcaccctgaagatgacttcctgagccagcccccagccacagccttagagctgcgggaacaccgagaccccccgtccttcagcctcgacctgggtgcaggcatcccgggccagctgcctgcggaccgcttccttccacagcgagaactgcactaccttctgttgtactttaattattgttttgccttgttgctgtgacctccctaagacactgaagatacttctcgggaaaggatcatcgccgttgaaatgaaaagagagacagagagaaaaaaaaaaagagaacccacatgaagctctgaaaccaaacagcatcctgccatgagcttcccagagacagaagagactggagcaaagtcggaaacacagagaagcacggcttcccctcagcacagaccctccagactgggtctcagagccgtgccacccaccctcccacacagccggccacagggagaactggtgctaaccagggtgcttgctttggtcacgttcaacgcactacagagctacgacacagggaaaccttaggagcaaataaaccgtgctttcatgttttttaaatggtgctttccttacccgagaggtattttgcctgttccaatcaaaccaccccattcaggtccatcagcctctgattaatatccgtgagagtgagtgacggagtgagagtgtgagcgagtggatgtggctgtcagtgcagaacagcatgtgtctctttccttctgatatatgaatgaatcaggtttttttttttttttttctgcaaacactgtgtatagtgagacttgttctactttggagaacaggttaccttttgaaaatgaggttgagtttcttcctttctgatgcattgatttttgaagatttttttttcccccttcccctcttggtcagaatcaatcctttggtgaaagtaagaaccgcaggagttgagttttggtttggtcctgctcagttttggtttttagttgtccatcctcacagtcctacacactcgcctcctcctgctagggctgggggtatctgtgtcctttaaaatggatgaggacctggtcctcgacatgtgggtgagccatggaccttgccttcccttctcgtccttgagggtttagaacacacaccaacacctccagcgtccccgccccagcttccggtggggtgatgcggtcaccctgcaaaagacttgcactttcctcagaaccaacatgacgcagctcaataagggtgagggtcactccctcccagaagccccgtctggacgagccttgcctgacctcttcggtgctgaccttcccaaagtgatgccttactggttttgtactaactgtgttcattttacataagtgtcgtgcctgcctggggtttgttttttttgtcattgttttccccattgaaacaaacagggctaaaaagtcatctgttcattaggagaactcaagttgctgtgacttttctcatccaaaagactcatttgtgtggatgcgtgaccatgggaaaaagaaaaaaaaaaagatccattttttaggttcttttcggtctccagctgacaacccaactggacaatgatctgtctggtgcaggagaaggcaaaagtttctacaagtctacatgaccttgctgatacttgttctaatagaaacccagtctgctgtgtcttcaacatactggtattttcattacaaagtatggtaaatttttgagttgtttgtttctgttttgtaaagagaatccttattggacaccagtgaaggtgtctctgttttaatgatcagggtttttattccatcttttgcatttcttctatttctgaaggtttgtctcttggcatctttttttagtttcttaccataagagtttgacccgaaactgctcacttcacattggatgacaccatgttcttcctctttgaaaagaaaaggggaatgtgtcccactagtgaaaggaaaacttttcaacactatccctgctttagtctcagcaaactcagactattctgcttagccttcattagtcatctgggtgtgagtgtgtcttgttctgtttttctttttaataaaacttttaaaccatatatttagcctgtgaccaggggggccaaaccctaagatttctggtaaacctgaagggtggccctcctcagacaatttatctcccagcaatgaccctactacactcgcgtactgtgaatttgggaggaggtaaagttgacttctcctcgtgggcagttttccaatcaccttgtgagtagacacctgccaatattgtttgaaacctttttttaatatgacatcctctcttgtcattctcttctcccctttcccacagacttccctcctgggtccaggttcagaaccaagacttctgtacctagtgctgcctgattggtgaacattgacttcaagtagcatagcccttgtgtgactcacaactccgtgtccttcctaaagtttcgggaagcagggttgtctaatatgcacatttcttattttggtcatatttttactttagtgtcactcaccttttacaaagtgactttgtactcatttagggctctatcggaaatgcttccattttgccttttctacagttaggccaattttgaaatatataaattctatgcaacatttatgttgagttaccaatggaagccaaaagttctcttcccaaactgccaagaatgatacaggccataattgaaatgggaataccttttaagtttcattaggggtggggtgggagtgggacaggaacaagacttgcctagatctttgttgtatcttggggacttttactttgttgtttgatgcttaaacttcaaaattctctgtattcaaatttgattgtggcgaatctacttcaaaaaggaaaaataatccaactttgtggatattaaatggaaggtttgctgttttgatctagttgtttccagtggagcagttttatgaaatatgttctataagatgtacattttttcattgtaacatagaaattgtaaataattgattaaagtgctgcattttgatgaattttttctagccatttttaaagagaaaactaggaattgagtattttgtgtacggtatgtttccatcctccctccccttcctcctcccctcctctctctctcttcctacctatttaattttcatttgtcatgaggtttttggatttgccaatgatctgctggacatcatgccccatgtcatagagaataaagctgatgattgtaccagtcttaaattattcatgattcaataaaattgatgcttatttattc

SEQ ID NO: 13421 - DNA, 11171 bp, Homo sapiens
  source 1..11171: mol_type = unassigned DNA
gttaatatgggcgtccaagcctctgtttcccaggaggaaatttgcaagaggcggcagcccctgagcgcccagagctcttgaaaggccacccaggagaggtgtgagacccggcggcagcatccgtccaggtgggacccgctgagcgccgtggccagtcccccattcccatcccggcaccccaaaggcgcgctcgcccgattgcttcgagttccccgacctggggattttttttttagccgctggtggtgggcgcctcgtgggctaaggcccggcgcctgctctgctacccgcgctgcctttagcggtcgcccccgccgccgctgccagggacgtgctgggaaagcccaagccccgggagaagatgccggccatcctggtcgcctccaaaatgaagtcgggactgcccaaacccgtgcacagcgccgcgcccatcctgcacgtgcccccggcccgggcgggcccccagccctgctacctgaagttgggaagcaaggtggaggtgagcaagaccacctatcctagccagatccccctgaaatcgcaggtgctgcaggggctgcaggagccagcgggggaggggctcccgctgcggaagagcggctcggtggaaaacgggttcgatacccagatctacacagactgggccaatcattacctagccaaatccggccacaagcgtctcatcagggatctccagcaagatgtgacagatggcgtcctcctggcccagattatccaggttgtggcaaatgaaaagattgaagacatcaatggctgtccgaagaacagatcccaaatgattgaaaacatagatgcctgcttgaatttcctggcagctaagggaataaacatccaggggctgtctgcagaagagatcaggaatggaaacctcaaggccattctaggcctcttcttcagcctctcccgatacaagcagcagcagcagcagccccagaagcagcacctctcctcacctctgccgcccgccgtatcccaggtggccggggccccctcccagtgccaggctggcacccctcagcagcaggtgccagtcactccccaagccccgtgccagcctcaccagccagcgccacatcagcagtcaaaagcacaagctgaaatgcagtccagtgcatcatccaaggactcatctcaaagcaaaatcatccgcttcactctgggtcagaaaaagatctctagacttccaggtcctaccgcgagggtatccgctgcaggcagcgaggccaaaacacgcggagggtcaactactgctaacaaccgacgcagccagagctttaacaactatgataaatccaaaccagtcacctccccacccccaccgccaagcagccacgagaaagagcctttggcaagttcagcctcctcccaccccggaatgagtgacaatgcacctgcttccttggagagcggcagcagctccacccctactaattgcagtacctcctcggccatcccgcagcccggtgcagccaccaagccttggcgcagcaaatccctcagcgtgaagcacagtgccacggtatccatgctctcggtcaagcctcctgggcctgaggcccccaggcccacacctgaagccatgaagccggcccccaacaatcagaagtccatgctggaaaagctgaaacttttcaacagtaaagggggctcaaaggcaggtgaggggccggggtcccgggacacaagctgtgagcggctggagactctgcccagcttcgaagagagcgaggagctggaggccgccagtcgcatgctcaccaccgtgggccctgcttccagcagccccaagattgcactcaagggcattgcccagaggacttttagccgggcactgaccaacaagaagagttctctgaaaggcaatgagaaagagaaggagaaacaacagcgggagaaggataaggagaaaagcaaggaccttgccaagagagcctctgtgacggagaggctggacctcaaggaggagccaaaagaagaccccagtggagcagctgtgcccgagatgccaaaaaagtcctccaagattgccagcttcatccccaaaggggggaagctcaacagtgccaagaaggagcccatggccccttcccacagtggaataccaaaaccaggaatgaaaagcatgcccgggaaatccccaagtgccccagcgccttccaaggaaggggagcggagccggagtgggaagctgagctcaggactcccccagcagaagccccagctggacggcagacactccagttcctcttccagcctggcgtcctcagaaggaaaaggcccaggagggaccaccctgaaccacagcatcagcagccagactgtcagtgggtctgtcgggaccacccagaccacaggaagcaataccgtcagtgttcagctacctcagccccagcagcaatacaaccatcccaacactgccacggttgcacctttcctgtacaggtctcagacggacactgaagggaatgttactgccgagtcaagctcaacaggtgtgagcgtggagcccagccacttcaccaagactggacagcctgctctggaagaactcactggggaagatcctgaggctcggcggctgcggacagtgaagaacatcgctgatctgcggcagaatttggaggaaaccatgtccagtttaaggggaactcaggttacacacagcacattggaaaccacgtttgacaccaatgtcaccacggagatgagtggccgtagcatactcagcttgacagggaggcccacacctctgtcctggagactgggccagtccagccctcggctccaagcaggagacgccccctcaatgggcaatgggtatccccctcgagccaacgccagcaggttcatcaacactgagtcaggtcgctatgtgtactccgcccctctgagaaggcagctggcctcccggggcagtagtgtctgccatgtggacgtctcagacaaggcaggagatgagatggacctggaaggcatcagcatggatgcccccggctacatgagcgacggggatgttctgagcaagaacatccggaccgatgacattacaagcggatacatgactgatggtggacttggcctctatacccgtcgcctgaaccggctccctgatgggatggctgtggtacgggagaccctgcaacgaaatacctccctgggcctcggagacgctgacagctgggacgacagcagctccgtcagcagcggcatcagcgacaccatagacaacctcagcactgatgacatcaacaccagctcctccatcagctcttatgccaacacacctgcctcctctcgaaaaaacctggatgtgcagactgatgctgagaagcactcacaggtggagaggaattccctgtggtctggtgatgatgtcaagaaatcagacggaggctcagacagcggcataaaaatggagccaggttccaagtggaggcggaatccttctgatgtgtctgacgagtccgacaaaagcacgtcgggcaagaagaatcctgtcatctcccagacaggctcatggcggcgaggcatgacagctcaggtgggcatcaccatgccaaggacgaagccttcagccccggcaggcgcactgaagaccccaggaactggaaaaacagacgacgcaaaggtgtctgagaaaggaaggctttctcctaaagcctcccaggtgaagcgctccccatcagatgcaggccggagcagtggtgacgaatccaaaaagcccctccccagcagctctaggacacctactgccaatgccaacagctttgggttcaagaagcagagtggttccgccgccggcctggccatgatcacagccagcggggtgactgtcaccagcaggtcagccacactgggcaaaatcccaaagtcatctgcactcgtcagtcggtctgctggtcggaagtcaagtatggatggggctcagaatcaggatgacgggtatctagccctaagctcccggacaaaccttcagtaccggagtttgccgaggcccagtaagtccaacagccggaacggggctgggaacaggtctagcaccagcagcatagattccaacattagcagcaagtccgcaggcctgccagtgcccaaactgagggagccttccaaaacagccctaggcagctctctaccaggtctggtcaaccaaacagacaaggagaaaggcatctcatcagacaacgagagtgtggcttcctgtaactcggtgaaagtgaatccggcagcccagcctgtgtccagtccggctcagaccagtctccagcctggagccaagtacccagatgtggcctctcccacactccgcagactctttggtgggaagcctaccaagcaagtgcccatcgccacagctgaaaacatgaaaaattcggtggtcatctccaatcctcatgccaccatgactcagcaaggtaacctagactccccgtcaggcagtggcgtcctgagcagtgggagcagcagtcctctctacagcaagaatgtggacctcaaccagtctccgctagcctccagccccagctcagcccactcggccccttccaacagcctcacctggggcaccaacgccagcagctcctccgcagttagcaaggatggcctgggctttcagtctgtcagcagcctccacaccagctgtgagtccatcgacatctccctcagcagtggaggggtccccagccacaattcttccactggcctcatcgcctcctccaaggacgactccttgactccctttgtcagaactaacagtgtgaagaccacactgtcagaaagccctctctcttcccctgctgctagccctaagttctgcagaagtactctgcccaggaaacaggacagtgacccgcaccttgataggaacactttgcctaagaaaggactcaggtatactcccacctcccagcttcgcacgcaagaagatgcaaaagaatggttacggtcccattctgcaggaggccttcaggacaccgctgccaattcccccttttcctctggctccagcgtgacttctccctccggaacaagattcaacttttcccagcttgcgagtcccaccactgtcacccagatgagcttgtccaacccgaccatgctgaggactcacagcctctccaatgctgatgggcagtatgatccatacactgacagccgcttccggaatagctccatgtccctggatgagaagagcagaaccatgagccgttcaggctcattccgggatgggtttgaagaagaatcatgggagaaaagttctgtggacaactttgtcagccgtcttcacagctcacttcatttctctcttcctttgttccatcacgcaaggtatgagttagttcatggatcctcactctccttggtttccagcacatcgtcagtttattctacaccagaagaaaaatgccagtcagagattcgcaagctgcggcgggaactggatgcctcccaggagaaagtttcagctttgaccacccagctgacagcaaatgctcaccttgtggcagcctttgaacagagtcttggtaacatgacaatcaggctccagagtctgaccatgacagctgagcagaaggactcagaactgaatgagttaagaaaaaccattgagctgctaaagaaacagaacgcagctgcccaggctgccattaatggagtaattaacacacctgagctcaactgcaaaggaaacggcactgcccagtctgcagacctccgcatccgcaggcagcactcctcagacagcgtctccagcatcaacagtgccaccagccactccagcgtgggcagcaacatagagagtgactcaaagaagaagaagcggaagaactgggtgaatattcagttacgcagctccttcaagcaagctttcgggaagaagaagtccccaaaatctgcgtcctctcattcagatattgaggagatgacggattcttctttgccttcctcaccaaagttaccgcacaatgggtccacaggttccaccccactgctgaggaattctcactccaactctctaatttcagaatgcatggatagtgaagctgagaccgtcatgcagctccgaaatgagttaagagacaaggagatgaagctgacggatatccgcttagaagctctcagttctgcccaccagctggaccagctccgggaggccatgaacaggatgcagagtgaaatagagaagctgaaagctgagaatgatcggctgaagtcagagtctcaaggcagtggctgcagccgggctccttcccaagtgtccatctctgcctccccgaggcagtccatgggcctctcccagcacagcttgaacctcactgagtcaaccagcctggacatgttgctggatgacactggtgaatgctcggctcggaaggaaggaggcaggcatgttaagatagttgtcagctttcaggaggaaatgaagtggaaggaggattccagaccacatctctttcttattggctgcattggagttagtggcaagacgaagtgggatgtgctcgatggggtggttagacggctgttcaaagaatacatcattcatgtcgacccagtgagtcagctagggctgaattcagacagcgttcttggctacagcattggagaaatcaagcgcagcaacacttccgaaacaccggagctgcttccttgtggctatctggttggagagaacacgaccatctcagtgactgtgaaagggctcgcagaaaacagcctggactcactggtgtttgagtccttgattcccaagcccatcctgcagcgctacgtctccctcctgatagagcaccgtcggatcattctctctggccccagcggcactgggaaaacctacctggccaaccggctgtctgagtatatagtgcttcgagagggacgggagttgacagacggggttatcgccacctttaacgtggaccataagtccagcaaggaattgcgccagtacctgtccaaccttgctgaccagtgcaacagtgagaacaatgctgtggacatgcccctcgtcatcatcctggacaacctacaccacgtgagctctctgggagagatcttcaatgggctgctcaactgcaagtaccacaaatgcccttacataattggcacaatgaaccaggctacctcttcgactcccaacctgcagcttcaccataacttcagatgggtgctttgtgccaaccacacggagcctgtgaagggtttccttggccgattcctgaggaggaagctcatggaaacagagatcagtgggcgggtgcgcaatatggagctggtaaaaatcattgactggattcccaaggtctggcatcacctcaaccgcttcctggaggctcacagttcctcggacgtcaccatcggcccccggctcttcctgtcatgccccatcgatgtggacggctcgagagtgtggttcaccgacttgtggaactattccattatcccctatctcctggaagccgtcagagaaggactccagctctatggaaggcgcgccccctgggaggatcctgccaagtgggtgatggacacatatccatgggcagccagcccacaacagcacgagtggcctcccctgctgcagttacggcctgaggatgtcggcttcgacggctactccatgcctcgggagggatcgacaagcaagcagatgccccccagtgatgctgaaggtgacccgctgatgaacatgctgatgaggctgcaggaggcagccaactactccagcccccagagctatgacagcgactccaacagcaacagccatcacgatgacatcttggactcctctttggagtccactctgtgacaggggcccggagcccagcgccctcctcttctcctcaccgcattccacctgcatcccccacatcaccctgaagatgacttcctgagccagcccccagccacagccttagagctgcgggaacaccgagaccccccgtccttcagcctcgacctgggtgcaggcatcccgggccagctgcctgcggaccgcttccttccacagcgagaactgcactaccttctgttgtactttaattattgttttgccttgttgctgtgacctccctaagacactgaagatacttctcgggaaaggatcatcgccgttgaaatgaaaagagagacagagagaaaaaaaaaaagagaacccacatgaagctctgaaaccaaacagcatcctgccatgagcttcccagagacagaagagactggagcaaagtcggaaacacagagaagcacggcttcccctcagcacagaccctccagactgggtctcagagccgtgccacccaccctcccacacagccggccacagggagaactggtgctaaccagggtgcttgctttggtcacgttcaacgcactacagagctacgacacagggaaaccttaggagcaaataaaccgtgctttcatgttttttaaatggtgctttccttacccgagaggtattttgcctgttccaatcaaaccaccccattcaggtccatcagcctctgattaatatccgtgagagtgagtgacggagtgagagtgtgagcgagtggatgtggctgtcagtgcagaacagcatgtgtctctttccttctgatatatgaatgaatcaggtttttttttttttttttctgcaaacactgtgtatagtgagacttgttctactttggagaacaggttaccttttgaaaatgaggttgagtttcttcctttctgatgcattgatttttgaagatttttttttcccccttcccctcttggtcagaatcaatcctttggtgaaagtaagaaccgcaggagttgagttttggtttggtcctgctcagttttggtttttagttgtccatcctcacagtcctacacactcgcctcctcctgctagggctgggggtatctgtgtcctttaaaatggatgaggacctggtcctcgacatgtgggtgagccatggaccttgccttcccttctcgtccttgagggtttagaacacacaccaacacctccagcgtccccgccccagcttccggtggggtgatgcggtcaccctgcaaaagacttgcactttcctcagaaccaacatgacgcagctcaataagggtgagggtcactccctcccagaagccccgtctggacgagccttgcctgacctcttcggtgctgaccttcccaaagtgatgccttactggttttgtactaactgtgttcattttacataagtgtcgtgcctgcctggggtttgttttttttgtcattgttttccccattgaaacaaacagggctaaaaagtcatctgttcattaggagaactcaagttgctgtgacttttctcatccaaaagactcatttgtgtggatgcgtgaccatgggaaaaagaaaaaaaaaaagatccattttttaggttcttttcggtctccagctgacaacccaactggacaatgatctgtctggtgcaggagaaggcaaaagtttctacaagtctacatgaccttgctgatacttgttctaatagaaacccagtctgctgtgtcttcaacatactggtattttcattacaaagtatggtaaatttttgagttgtttgtttctgttttgtaaagagaatccttattggacaccagtgaaggtgtctctgttttaatgatcagggtttttattccatcttttgcatttcttctatttctgaaggtttgtctcttggcatctttttttagtttcttaccataagagtttgacccgaaactgctcacttcacattggatgacaccatgttcttcctctttgaaaagaaaaggggaatgtgtcccactagtgaaaggaaaacttttcaacactatccctgctttagtctcagcaaactcagactattctgcttagccttcattagtcatctgggtgtgagtgtgtcttgttctgtttttctttttaataaaacttttaaaccatatatttagcctgtgaccaggggggccaaaccctaagatttctggtaaacctgaagggtggccctcctcagacaatttatctcccagcaatgaccctactacactcgcgtactgtgaatttgggaggaggtaaagttgacttctcctcgtgggcagttttccaatcaccttgtgagtagacacctgccaatattgtttgaaacctttttttaatatgacatcctctcttgtcattctcttctcccctttcccacagacttccctcctgggtccaggttcagaaccaagacttctgtacctagtgctgcctgattggtgaacattgacttcaagtagcatagcccttgtgtgactcacaactccgtgtccttcctaaagtttcgggaagcagggttgtctaatatgcacatttcttattttggtcatatttttactttagtgtcactcaccttttacaaagtgactttgtactcatttagggctctatcggaaatgcttccattttgccttttctacagttaggccaattttgaaatatataaattctatgcaacatttatgttgagttaccaatggaagccaaaagttctcttcccaaactgccaagaatgatacaggccataattgaaatgggaataccttttaagtttcattaggggtggggtgggagtgggacaggaacaagacttgcctagatctttgttgtatcttggggacttttactttgttgtttgatgcttaaacttcaaaattctctgtattcaaatttgattgtggcgaatctacttcaaaaaggaaaaataatccaactttgtggatattaaatggaaggtttgctgttttgatctagttgtttccagtggagcagttttatgaaatatgttctataagatgtacattttttcattgtaacatagaaattgtaaataattgattaaagtgctgcattttgatgaattttttctagccatttttaaagagaaaactaggaattgagtattttgtgtacggtatgtttccatcctccctccccttcctcctcccctcctctctctctcttcctacctatttaattttcatttgtcatgaggtttttggatttgccaatgatctgctggacatcatgccccatgtcatagagaataaagctgatgattgtaccagtcttaaattattcatgattcaataaaattgatgcttatttattc

SEQ ID NO: 13422 - DNA, 3283 bp, Homo sapiens
  source 1..3283: mol_type = unassigned DNA
gtgagaatctggtggatgctggaccttgctgctgctgctactgctgtttccaggggctgcagagcatggactgttaaatcttgcacttcttctgagtgagctgaattcttgccgccaggatggggaaacagaacagcaagctgcgcccggaggtcatgcaggacttgctggaaagcacagactttacagagcatgagatccaggaatggtataaaggcttcttgagagactgccccagtggacatttgtcaatggaagagtttaagaaaatatatgggaactttttcccttatggggatgcttccaaatttgcagagcatgtcttccgcaccttcgatgcaaatggagatgggacaatagactttagagaattcatcatcgccttgagtgtaacttcgagggggaagctggagcagaagctgaaatgggccttcagcatgtacgacctggacggaaatggctatatcagcaaggcagagatgctagagatcgtgcaggcaatctataagatggtttcctctgtaatgaaaatgcctgaagatgagtcaaccccagagaaaagaacagaaaagatcttccgccagatggacaccaatagagacggaaaactctccctggaagagttcatccgaggagccaaaagcgacccgtccattgtgcgcctcctgcagtgcgacccgagcagtgccggccagttctgagccctgcgcccaccaatcgaattgtagagctgcttgtgttcccttttgattcttctttttaacaatttttttttttttttgccaaacaatatcaatggtgatgccgtcccctgtgcggtctgatgcgccttcctccgtgacgccttcagcttcttttgtcgtggatgcttcgtgggaatgcccagagccccagtgtgcttgtggagagcatggacagacttcgtggtgttcattgtttgatgatttttaatcgttactattatttttttttattctaatgtctctgttctaaaacgtaagactcgggggttggggcaaaagaagggaaacccatccagtcctgtgattctattgcaagcttcaaggggcttttgtttgaaagacaaaactccccacctgaatctgttgtcacacgtgccgtaggggtgatggatggcaccggatgctggattccccaagaacaagttaccctctggggtgaggctattccagcgagctgggacatttccccatgggggcccactcccctctcttccccagcaggctgtagtttctaagctgtgaacatttcaagataaattaacagaggagaggaaaaagatggctcagctattttttcacaggtttacactagttgagctaatatgcgtgtctttggaaattaaacacaaatggtaacatattccaaaaccagacccatcttgttgcctattgtgataaaataaaaagacggctgtatataacatattgggtaatgcagaccaaattaagtgttttgccttgtttaaatgaaatgcatgtttagtgagcactaatacaatcttattccagaagactgtttttagtagcttattgtgaagtaagacaactataatgaatgtctgtcttgtttggaagtcatatctgtctttgcacaaatgtaccaatcgacaagtatattttatatattccataaaaatacaaagtaaccctgactagggcccaactttaattttgaatgcatttccagagtggccatgcctagagggcagatgcagagcaggtggtagtgggacaggacaattggagcacaggaatgttaacatgtatgacaggggaccagtagggtggtttccctctcaggcccagcagcccattgacagcattagactggcggcatggtgcttttctgagcagatcaatactctgcagactcgaaaaaacatcacatacattcttggaacttcccagtggtttaatctatgtgcatggttagggagccaggtctggaatattcagtttccctgcccctgttaaagaatcagaggttgggcagtcatcaaattcatcataaagacatgggcaagtgtgtctgtggtttccaaggcccccctatggagaatccaaaagtattttccattgccgtgctctttgaatgcagacttctatttccagaagtgacagcacaagtctgagttgctgtttggtctggtgacctcagacacactaatttgaattgaaagctaagagtaaaaatttgctggttacaggcgagtcatactcttgcaagtagttagcaaagggaggcccaaattctcaaggttgttgatggggaacttgccactaagagaaggcagagaggtccctagtgggtatatttgctgccaagccacttgccaaagaagaggaaccacagaaagagagacatcatgaccaggagaaaaatgtgactagacatgctaacctccaggtttttatatatgacttgagtctgctgtaattggcagcagaaatccaaatttgtatggtagaccaaaaagaaccaaatccatagggtgaaattttgagacctagactctgtaaaaataatcctagtcttcctccaggggtcagttcctcacagtggttctgtaccaaaacttgccaaattcctccatggccaagtgttaaaatctgtgtttggaaaatagcgaattaacctaagacacagaaggcagactgggtgaggagacctagcatgccctattggcagtgctcaggagctgcatcccacttttccctgctctgaatcgaagtcctagttccttcctttgattctcctttggtaggtggaatcagttaatgttttgagaaacctgcctgggctctgcccttagtcatgacatctcgctgagccagacccactctgttccttggaacctagagctggagtgaggagtagaggtctccggctattccagaaagaaaagtgagccacatgcaggctgatgaatgccgacacttccagaatgtatagaaatagtccctgtcctggcctgccactgaccctgtctgtattttctcggaggttgtttttctccttctccttcccaggaaggtctttgtatgtcgaatccagtgcactcaagtttggccaagggactccacagcacccagaagactgcatgcctcaaggtttatgtcactcctctgctgggctgttcattgtcattgctgtgttcagggacctttggaaataaaacctgttctgtcccaaataaaaccagcctgtgatgttcaagggactggaataaagtggcttacgacctgaaggattctacaga

SEQ ID NO: 13423 - DNA, 2289 bp, Homo sapiens
  source 1..2289: mol_type = unassigned DNA
gggggaggcgggcggagggaaggcgctgccgctgctgccgccgcctcgcccgaagcgacacagacgctgggagcggccgaggcgagatcctatcattattttaaaattcctcctcctccacgaagtccttcctgattccttcaaagaaatatcactcctccgaattcccagagtgatttcttctgacttgagcctgcagtgtgctgtgagagatctaccactagattatctcaactttggtctcctgggaccactcgttgctgacagtcagaaactgaattcttgccgccaggatggggaaacagaacagcaagctgcgcccggaggtcatgcaggacttgctggaaagcacagactttacagagcatgagatccaggaatggtataaaggcttcttgagagactgccccagtggacatttgtcaatggaagagtttaagaaaatatatgggaactttttcccttatggggatgcttccaaatttgcagagcatgtcttccgcaccttcgatgcaaatggagatgggacaatagactttagagaattcatcatcgccttgagtgtaacttcgagggggaagctggagcagaagctgaaatgggccttcagcatgtacgacctggacggaaatggctatatcagcaaggcagagatgctagagatcgtgcaggcaatctataagatggtttcctctgtaatgaaaatgcctgaagatgagtcaaccccagagaaaagaacagaaaagatcttccgccagatggacaccaatagagacggaaaactctccctggaagagttcatccgaggagccaaaagcgacccgtccattgtgcgcctcctgcagtgcgacccgagcagtgccggccagttctgagccctgcgcccaccaatcgaattgtagagctgcttgtgttcccttttgattcttctttttaacaatttttttttttttttgccaaacaatatcaatggtgatgccgtcccctgtgcggtctgatgcgccttcctccgtgacgccttcagcttcttttgtcgtggatgcttcgtgggaatgcccagagccccagtgtgcttgtggagagcatggacagacttcgtggtgttcattgtttgatgatttttaatcgttactattatttttttttattctaatgtctctgttctaaaacgtaagactcgggggttggggcaaaagaagggaaacccatccagtcctgtgattctattgcaagcttcaaggggcttttgtttgaaagacaaaactccccacctgaatctgttgtcacacgtgccgtaggggtgatggatggcaccggatgctggattccccaagaacaagttaccctctggggtgaggctattccagcgagctgggacatttccccatgggggcccactcccctctcttccccagcaggctgtagtttctaagctgtgaacatttcaagataaattaacagaggagaggaaaaagatggctcagctattttttcacaggtttacactagttgagctaatatgcgtgtctttggaaattaaacacaaatggtaacatattccaaaaccagacccatcttgttgcctattgtgataaaataaaaagacggctgtatataacatattgggtaatgcagaccaaattaagtgttttgccttgtttaaatgaaatgcatgtttagtgagcactaatacaatcttattccagaagactgtttttagtagcttattgtgaagtaagacaactataatgaatgtctgtcttgtttggaagtcatatctgtctttgcacaaatgtaccaatcgacaagtatattttatatattccataaaaatacaaagtaaccctgactagggcccaactttaattttgaatgcatttccagagtggccatgcctagagggcagatgcagagcaggtggtagtgggacaggacaattggagcacaggaatgttaacatgtatgacaggggaccagtagggtggtttccctctcaggcccagcagcccattgacagcattagactggcggcatggtgcttttctgagcagatcaatactctgcagactcgaaaaaacatcacatacattcttggaacttcccagtggtttaatctatgtgcatggttagggagccaggtctggaatattcagtttccctgcccctgttaaagaatcagaggttgggcagtcatcaaattcatcataaagacatgggcaagtgtgtctgtggtttccaaggcccccctatggagaatccaaaagtattttccattgccgtgctctttga

SEQ ID NO: 13424 - DNA, 1805 bp, Homo sapiens
  source 1..1805: mol_type = unassigned DNA
ctgaattcttgccgccaggatggggaaacagaacagcaagctgcgcccggaggtcatgcaggacttgctggaaagcacagactttacagagcatgagatccaggaatggtataaaggcttcttgagagactgccccagtggacatttgtcaatggaagagtttaagaaaatatatgggaactttttcccttatggggatgcttccaaatttgcagagcatgtcttccgcaccttcgatgcaaatggagatgggacaatagactttagagaattcatcatcgccttgagtgtaacttcgagggggaagctggagcagaagctgaaatgggccttcagcatgtacgacctggacggaaatggctatatcagcaaggcagagatgctagagatcgtgcaggcaatctataagatggtttcctctgtaatgaaaatgcctgaagatgagtcaaccccagagaaaagaacagaaaagatcttccgccagatggacaccaatagagacggaaaactctccctggaagagttcatccgaggagccaaaagcgacccgtccattgtgcgcctcctgcagtgcgacccgagcagtgccggccagttctgagccctgcgcccaccaatcgaattgtagagctgcttgtgttcccttttgattcttctttttaacaatttttttttttttttgccaaacaatatcaatggtgatgccgtcccctgtgcggtctgatgcgccttcctccgtgacgccttcagcttcttttgtcgtggatgcttcgtgggaatgcccagagccccagtgtgcttgtggagagcatggacagacttcgtggtgttcattgtttgatgatttttaatcgttactattatttttttttattctaatgtctctgttctaaaacgtaagactcgggggttggggcaaaagaagggaaacccatccagtcctgtgattctattgcaagcttcaaggggcttttgtttgaaagacaaaactccccacctgaatctgttgtcacacgtgccgtaggggtgatggatggcaccggatgctggattccccaagaacaagttaccctctggggtgaggctattccagcgagctgggacatttccccatgggggcccactcccctctcttccccagcaggctgtagtttctaagctgtgaacatttcaagataaattaacagaggagaggaaaaagatggctcagctattttttcacaggtttacactagttgagctaatatgcgtgtctttggaaattaaacacaaatggtaacatattccaaaaccagacccatcttgttgcctattgtgataaaataaaaagacggctgtatataacatattgggtaatgcagaccaaattaagtgttttgccttgtttaaatgaaatgcatgtttagtgagcactaatacaatcttattccagaagactgtttttagtagcttattgtgaagtaagacaactataatgaatgtctgtcttgtttggaagtcatatctgtctttgcacaaatgtaccaatcgacaagtatattttatatattccataaaaatacaaagtaaccctgactagggcccaactttaattttgaatgcatttccagagtggccatgcctagagggcagatgcagagcaggtggtagtgggacaggacaattggagcacaggaatgttaacatgtatgacaggggaccagtagggtggtttccctctcaggcccagcagcccattgacagcattagactggcggcatggtgcttttctgagcagatcaatactctgcagactcgaaaaaaca

SEQ ID NO: 13425 - DNA, 1315 bp, Homo sapiens
  source 1..1315: mol_type = unassigned DNA
acacagtcaaaggcttgtgagaatctggtggatgctggaccttgctgctgctgctactgctgtttccaggggctgcagagcatggactgttaaatcttgcacttcttctgagtgagctgaattcttgccgccaggatggggaaacagaacagcaagctgcgcccggaggtcatgcaggacttgctggaaagcacagactttacagagcatgagatccaggaatggtataaaggcttcttgagagactgccccagtggacatttgtcaatggaagagtttaagaaaatatatgggaactttttcccttatggggatgcttccaaatttgcagagcatgtcttccgcaccttcgatgcaaatggagatgggacaatagactttagagaattcatcatcgccttgagtgtaacttcgagggggaagctggagcagaagctgaaatgggccttcagcatgtacgacctggacggaaatggctatatcagcaaggcagagatgctagagatcgtgcaggcaatctataagatggtttcctctgtaatgaaaatgcctgaagatgagtcaaccccagagaaaagaacagaaaagatcttccgccagatggacaccaatagagacgcttcttttgtcgtggatgcttcgtgggaatgcccagagccccagtgtgcttgtggagagcatggacagacttcgtggtgttcattgtttgatgatttttaatcgttactattatttttttttattctaatgtctctgttctaaaacgtaagactcgggggttggggcaaaagaagggaaacccatccagtcctgtgattctattgcaagcttcaaggggcttttgtttgaaagacaaaactccccacctgaatctgttgtcacacgtgccgtaggggtgatggatggcaccggatgctggattccccaagaacaagttaccctctggggtgaggctattccagcgagctgggacatttccccatgggggcccactcccctctcttccccagcaggctgtagtttctaagctgtgaacatttcaagataaattaacagaggagaggaaaaagatggctcagctattttttcacaggtttacactagttgagctaatatgcgtgtctttggaaattaaacacaaatggtaacatattccaaaaccagacccatcttgttgcctattgtgataaaataaaaagacggctgtatataacatattgggtaatgcagaccaaattaagtgttttgccttgtttaaatgaaatgcatgtttagtgagcactaatacaatcttattccagaagactgtttttag

SEQ ID NO: 13426 - DNA, 2528 bp, Homo sapiens
  source 1..2528: mol_type = unassigned DNA
tgttaggaacttctggcagggttggtcctgagcaagactgtaaagcagctcaggtgaagcttcagtgtctttttctgctctcacctttcccatttggaggcgactcccctcagctgctttcctttctctgtcctctgcacctgccttgctgcccctagagctccagaactctctgaaattttctgcctactccctggcaaaatctattttttctaaaaattgtccccagggccaagatgcccaaagtgactctgattagcaaagtcatgatctggggataaaaacaatgacttttcattcctcttcccaaataaaaactacctttgaccacagaggtcaaagggcccttactgagtcccatgtggaggtcacaggcatggggtgatagtttcagtagtgcttacaaaactccacagaatcctctttcgcccatcagatctcatagctgtacccagtttagctcaggcctgaggatgcataataattcagagctctgatggcaggtggtttccatctcaggactgcctggaagcttgctgagaaggaacttgagaccattgtcacacacagggagaaaagcactggaatggactagaagtctgcctggggaaacatgtggcatgcacttacagagtgttacatgtctgtcatccttgaggagtcattgtggactctcaagggtccatgataggcatccacttgcctctctagcctgaagaatgtcatctgcagccttgctcctcaaagtgggaaccttgcttttcaaagcagcgtcttcagaacagcagcatcagcatcacaccggagcttattaaaaatacagactctcagccccacccctttcccccacactacccaatcagattctgcattttaacaagattcccaggggatttgtatgcacataaacaatggagacggctaggagaggtggcgcatgtctgtaatcccagcactttgggaggctgagggaggagaagcttgagcccaggagttcgagaccagcttgggcaacataatgagaccttgtctgtacagaaaaaaaaaaaaaaaaaaaaaaaaaaaaaaaaacgccctgtgtggtggggagtacctctagtcccagctgctgctcaggagactgaggtgggaggattgcttgagcctatgaaatggagcctgcagtgagccgtaagcgtgccactacactccagcctgggtgacagaatgagaccctgtctcaaaaaacaatcaaaaaacattggagacacaggggtctactgggtcttcctgctggttgtccctcctgaaggtcctcactggaggagaacaagctttgtgggcccggcttcttctacctgtgcctccacatcttataccaatcaataggggtaggactaggtccaatgcggatggggacattcccttcagcccgcatttgggaggtttaatgataggtctattgtgtgccatactgtttttctgtcttaccaccatgtcgcttctgtccccaggcaatctataagatggtttcctctgtaatgaaaatgcctgaagatgagtcaaccccagagaaaagaacagaaaagatcttccgccagatggacaccaatagagacggaaaactctccctggaagagttcatccgaggagccaaaagcgacccgtccattgtgcgcctcctgcagtgcgacccgagcagtgccggccagttctgagccctgcgcccaccaatcgaattgtagagctgcttgtgttcccttttgattcttctttttaacaatttttttttttttttgccaaacaatatcaatggtgatgccgtcccctgtgcggtctgatgcgccttcctccgtgacgccttcagcttcttttgtcgtggatgcttcgtgggaatgcccagagccccagtgtgcttgtggagagcatggacagacttcgtggtgttcattgtttgatgatttttaatcgttactattatttttttttattctaatgtctctgttctaaaacgtaagactcgggggttggggcaaaagaagggaaacccatccagtcctgtgattctattgcaagcttcaaggggcttttgtttgaaagacaaaactccccacctgaatctgttgtcacacgtgccgtaggggtgatggatggcaccggatgctggattccccaagaacaagttaccctctggggtgaggctattccagcgagctgggacatttccccatgggggcccactcccctctcttccccagcaggctgtagtttctaagctgtgaacatttcaagataaattaacagaggagaggaaaaagatggctcagctattttttcacaggtttacactagttgagctaatatgcgtgtctttggaaattaaacacaaatggtaacatattccaaaaccagacccatcttgttgcctattgtgataaaataaaaagacggctgtatataacatattgggtaatgcagaccaaattaagtgttttgccttgtttaaatgaaatgcatgtttagtgagcactaatacaatcttattccag

SEQ ID NO: 13427 - DNA, 583 bp, Homo sapiens
  source 1..583: mol_type = unassigned DNA
aaaggcttgtgagaatctggtggatgctggaccttgctgctgctgctactgctgtttccaggggctgcagagcatggactgttaaatcttgcacttcttctgagtgagctgaattcttgccgccaggatggggaaacagaacagcaagctgcgcccggaggtcatgcaggacttgctggaaagcacagactttacagagcatgagatccaggaatggtataaaggcttcttgagagactgccccagtggacatttgtcaatggaagagtttaagaaaatatatgggaactttttcccttatggggatgcttccaaatttgcagagcatgtcttccgcaccttcgatgcaaatggagatgggacaatagactttagagaattcatcatcgccttgagtgtaacttcgagggggaagctggagcagaagctgaaatgggccttcagcatgtacgacctggacggaaatggctatatcagcaaggcagagatgctagagatcgtgcaggagaggaaaaagatggctcagctattttttcacaggtttacactagttgagctaatatgcgtgtctttggaaattaaa

SEQ ID NO: 13428 - DNA, 548 bp, Homo sapiens
  source 1..548: mol_type = unassigned DNA
acacactgaagtttgagaagcactgcctttgcagctatggcaaacttctggaacacgaagaaataaagctattatctcaactttggtctcctgggaccactcgttgctgacagtcagaaactgaattcttgccgccaggatggggaaacagaacagcaagctgcgcccggaggtcatgcaggacttgctggaaagcacagactttacagagcatgagatccaggaatggtataaaggcttcttgagagactgccccagtggacatttgtcaatggaagagtttaagaaaatatatgggaactttttcccttatggggatgcttccaaatttgcagagcatgtcttccgcaccttcgatgcaaatggagatgggacaatagactttagagaattcatcatcgccttgagtgtaacttcgagggggaagctggagcagaagctgaaatgggccttcagcatgtacgacctggacggaaatggctatatcagcaaggcagagatgctagagatcgtgcaggcaatctataagatggtttcctctgtaatga

SEQ ID NO: 13429 - DNA, 574 bp, Homo sapiens
  source 1..574: mol_type = unassigned DNA
tgactttgcaagatggctgactgaacaaaagacacagaaatgcctggtcctgctaattcctgagccatttggggattatgcaacgtaaatctggttgcttcttggctttccggctaccgccttaggattcatattttcagattatctcaactttggtctcctgggaccactcgttgctgacagtcagaaactgaattcttgccgccaggatggggaaacagaacagcaagctgcgcccggaggtcatgcaggacttgctggaaagcacagactttacagagcatgagatccaggaatggtataaaggcttcttgagagactgccccagtggacatttgtcaatggaagagtttaagaaaatatatgggaactttttcccttatggggatgcttccaaatttgcagagcatgtcttccgcaccttcgatgcaaatggagatgggacaatagactttagagaattcatcatcgccttgagtgtaacttcgagggggaagctggagcagaagctgaaatgggccttcagcatgtacgacctggacggaaatggctatatcagcaaggcagagatgct

SEQ ID NO: 13430 - DNA, 580 bp, Homo sapiens
  source 1..580: mol_type = unassigned DNA
agatgacagctgcaagtgttgagtgctgtacgagtttaaatggagagcgggattgctggcagctgcggtgggcagggattttctcctttttaaaattgagatcaggtttgaacatgactttgcaagatggctgactgaacaaaagacacagattatctcaactttggtctcctgggaccactcgttgctgacagtcagaaactgaattcttgccgccaggatggggaaacagaacagcaagctgcgcccggaggtcatgcaggacttgctggaaagcacagactttacagagcatgagatccaggaatggtataaaggcttcttgagagactgccccagtggacatttgtcaatggaagagtttaagaaaatatatgggaactttttcccttatggggatgcttccaaatttgcagagcatgtcttccgcaccttcgatgcaaatggagatgggacaatagactttagagaattcatcatcgccttgagtgtaacttcgagggggaagctggagcagaagctgaaatgggccttcagcatgtacgacctggacggaaatggctatatcagcaaggcagag

SEQ ID NO: 13431 - DNA, 570 bp, Homo sapiens
  source 1..570: mol_type = unassigned DNA
gacggtgctgtccagggggaggcgggcggagggaaggcgctgccgctgctgccgccgcctcgcccgaagcgacacagacgctgggagcggccgaggcgagtgatttcttctgacttgagcctgcagtgtgctgtgagagatctaccactagattatctcaactttggtctcctgggaccactcgttgctgacagtcagaaactgaattcttgccgccaggatggggaaacagaacagcaagctgcgcccggaggtcatgcaggacttgctggaaagcacagactttacagagcatgagatccaggaatggtataaaggcttcttgagagactgccccagtggacatttgtcaatggaagagtttaagaaaatatatgggaactttttcccttatggggatgcttccaaatttgcagagcatgtcttccgcaccttcgatgcaaatggagatgggacaatagactttagagaattcatcatcgccttgagtgtaacttcgagggggaagctggagcagaagctgaaatgggccttcagcatgtacgacctggacggaaatggctatatcag

SEQ ID NO: 13432 - DNA, 562 bp, Homo sapiens
  source 1..562: mol_type = unassigned DNA
acacagtcaaaggcttgtgagaatctggtggatgctggaccttgctgctgctgctactgctgtttccaggggctgcagagcatggactgttaaatcttgcacttcttctgagtgagggagaaaagggaatttttaaaaggagaatgaaagtgtccttgtctctagaactgaagcaacttggaggaatgagtggagtctttgtttagctgaattcttgccgccaggatggggaaacagaacagcaagctgcgcccggaggtcatgcaggacttgctggaaagcacagactttacagagcatgagatccaggaatggtataaaggcttcttgagagactgccccagtggacatttgtcaatggaagagtttaagaaaatatatgggaactttttcccttatggggatgcttccaaatttgcagagcatgtcttccgcaccttcgatgcaaatggagatgggacaatagactttagagaattcatcatcgccttgagtgtaacttcgagggggaagctggagcagaagctgaaatgggccttcagcatgtacgacctggacggaa

SEQ ID NO: 13433 - DNA, 583 bp, Homo sapiens
  source 1..583: mol_type = unassigned DNA
acacagacgctgggagcggccgaggcgagtgatttcttctgacttgagcctgcagtgtgctgtgagagatctaccactagattatctcaactttggtctcctgggaccactcgttgctgacagtcagaaactgctctatgaatggacgctgccccagtacagcgaggacctgctgcaaaatgcatttcttagtcttcaatacttattcctccttgtaactggatttctgctgaattcttgccgccaggatggggaaacagaacagcaagctgcgcccggaggtcatgcaggacttgctggaaagcacagactttacagagcatgagatccaggaatggtataaaggcttcttgagagactgccccagtggacatttgtcaatggaagagtttaagaaaatatatgggaactttttcccttatggggatgcttccaaatttgcagagcatgtcttccgcaccttcgatgcaaatggagatgggacaatagactttagagaattcatcatcgccttgagtgtaacttcgagggggaagctggagcagaagctgaaatgggccttcagcatgtacgacctggacgg

SEQ ID NO: 13434 - DNA, 553 bp, Homo sapiens
  source 1..553: mol_type = unassigned DNA
acagacgctgggagcggccgaggcgagtgatttcttctgacttgagcctgcagtgtgctgtgagagatctaccactagattatctcaactttggtctcctgggaccactcgttgctgacagtcagaaaggagaaaagggaatttttaaaaggagaatgaaagtgtccttgtctctagaactgaagcaacttggaggaatgagtggagtctttgtttagctgaattcttgccgccaggatggggaaacagaacagcaagctgcgcccggaggtcatgcaggacttgctggaaagcacagactttacagagcatgagatccaggaatggtataaaggcttcttgagagactgccccagtggacatttgtcaatggaagagtttaagaaaatatatgggaactttttcccttatggggatgcttccaaatttgcagagcatgtcttccgcaccttcgatgcaaatggagatgggacaatagactttagagaattcatcatcgccttgagtgtaacttcgagggggaagctggagcagaagctgaaatgggccttca

SEQ ID NO: 13435 - DNA, 629 bp, Homo sapiens
  source 1..629: mol_type = unassigned DNA
actttgcagagggccgcgcagaggcgcgtggggccggcgggatggggcgcgctgggcagaagggggcgttggtgagcctggcggcccggggacctctggagcatcccgccccgggggccggggccggggccgggggccggggcacccgctggatcccgggcctgcggagtctgcccggaaaggccacaggagagtgatttcttctgacttgagcctgcagtgtgctgtgagagatctaccactagattatctcaactttggtctcctgggaccactcgttgctgacagtcagaaactgaattcttgccgccaggatggggaaacagaacagcaagctgcgcccggaggtcatgcaggacttgctggaaagcacagactttacagagcatgagatccaggaatggtataaaggcttcttgagagactgccccagtggacatttgtcaatggaagagtttaagaaaatatatgggaactttttcccttatggggatgcttccaaatttgcagagcatgtcttccgcaccttcgatgcaaatggagatgggacaatagactttagagaattcatcatcgccttgagtgtaacttcgagggggaagctggagcagaagctgaaatgggccttc

SEQ ID NO: 13436 - DNA, 565 bp, Homo sapiens
  source 1..565: mol_type = unassigned DNA
ggtgctgtccagggggaggcgggcggagggaaggcgctgccgctgctgccgccgcctcgcccgaagcgacacagacgctgggagcggccgaggcgagtgatttcttctgacttgagcctgcagtgtgctgtgagagatctaccactagattatctcaactttggtctcctgggaccactcgttgctgacagtcagaaattgcaaggcatctgatctcctggtgttaaaatctgtcgtgataccgaggaaggccccgagatcccaggcactgagtgactgcatactctgaattcttgccgccaggatggggaaacagaacagcaagctgcgcccggaggtcatgcaggacttgctggaaagcacagactttacagagcatgagatccaggaatggtataaaggcttcttgagagactgccccagtggacatttgtcaatggaagagtttaagaaaatatatgggaactttttcccttatggggatgcttccaaatttgcagagcatgtcttccgcaccttcgatgcaaatggagatgggacaatagactttagagaattcatcatc

SEQ ID NO: 13437 - DNA, 538 bp, Homo sapiens
  source 1..538: mol_type = unassigned DNA
acacagtcaaaggcttgtgagaatctggtggatgctggaccttgctgctgctgctactgctgtttccaggggctgcagagcatggactgttaaatcttgcacttcttctgagtgagaagaaaaagaactctgaaatgaaattgaggatttgaacttcacacagctgtttgaaggagaaaagggaatttttaaaaggagaatgaaagtgtccttgtctctagaactgaagcaacttggaggaatgagtggagtctttgtttagctgaattcttgccgccaggatggggaaacagaacagcaagctgcgcccggaggtcatgcaggacttgctggaaagcacagactttacagagcatgagatccaggaatggtataaaggcttcttgagagactgccccagtggacatttgtcaatggaagagtttaagaaaatatatgggaactttttcccttatggggatgcttccaaatttgcagagcatgtcttccgcaccttcgatgcaaatggagatgggacaatagactttagagaattcat

SEQ ID NO: 13438 - DNA, 549 bp, Homo sapiens
  source 1..549: mol_type = unassigned DNA
gacacagacgctgggagcggccgaggcgagtgatttcttctgacttgagcctgcagtgtgctgtgagagatctaccactagattatctcaactttggtctcctgggaccactcgttgctgacagtcagaaactgctctatgaatggacgctgccccagtacagcgaggacctgctgcaaaatgcatttcttagtcttcaatacttattcctccttgtaactggatttctgaagaaaaagaactctgaaatgaaattgaggatttgaacttcacacagctgtttgaactgaattcttgccgccaggatggggaaacagaacagcaagctgcgcccggaggtcatgcaggacttgctggaaagcacagactttacagagcatgagatccaggaatggtataaaggcttcttgagagactgccccagtggacatttgtcaatggaagagtttaagaaaatatatgggaactttttcccttatggggatgcttccaaatttgcagagcatgtcttccgcaccttcgatgcaaatggagatgggacaatagact

SEQ ID NO: 13439 - DNA, 488 bp, Homo sapiens
  source 1..488: mol_type = unassigned DNA
agaatctggtggatgctggaccttgctgctgctgctactgctgtttccaggggctgcagagcatggactgttaaatcttgcacttcttctgagtgaggaagacgaagcaaccccagtggagactctgcctcaagggcctgactgtgtagcaggagggagacagaaacaaaccccagaatgcgtgaaatcgcaaagaagattggcaatcattaaaatggggatatgctgtctttcagctgaattcttgccgccaggatggggaaacagaacagcaagctgcgcccggaggtcatgcaggacttgctggaaagcacagactttacagagcatgagatccaggaatggtataaaggcttcttgagagactgccccagtggacatttgtcaatggaagagtttaagaaaatatatgggaactttttcccttatggggatgcttccaaatttgcagagcatgtcttccgcaccttcgatgcaaatggagatgg

SEQ ID NO: 13440 - DNA, 548 bp, Homo sapiens
  source 1..548: mol_type = unassigned DNA
aatttgtattttatgtatattaacagatctataaatacatctattagatgtatttagactttttaattattcttcctagttcctgataagctaagacaatacttttatttttgacagagtgatttcttctgacttgagcctgcagtgtgctgtgagagatctaccactagattatctcaactttggtctcctgggaccactcgttgctgacagtcagaaattgcaaggcatctgatctcctggtgttaaaatctgtcgtgataccgaggaaggccccgagatcccaggcactgagtgactgcatactctgaattcttgccgccaggatggggaaacagaacagcaagctgcgcccggaggtcatgcaggacttgctggaaagcacagactttacagagcatgagatccaggaatggtataaaggcttcttgagagactgccccagtggacatttgtcaatggaagagtttaagaaaatatatgggaactttttcccttatggggatgcttccaaatttgcagagcatgtcttccgcaccttcgatgca

SEQ ID NO: 13441 - DNA, 585 bp, Homo sapiens
  source 1..585: mol_type = unassigned DNA
aaaagcagcccccctcccaccttgtgggcatgaagagtccagaggacaccacctgagaagcttttcaactgccttccaaggctcccttgaacttcactgcggtagagcagggaccccagaccccccctcaaatcgaagcttggaaggaggtgctctaggctgaatctgacctcccaggacccgaggagagtctggctctctcacccacgctggagtgcagtggtgccatattggctcactgcagcctccatctcctgggttcaagcaattctggtgcctcagcctcctgagtagctgggattacagagtgatttcttctgacttgagcctgcagtgtgctgtgagagatctaccactagattatctcaactttggtctcctgggaccactcgttgctgacagtcagaaactgaattcttgccgccaggatggggaaacagaacagcaagctgcgcccggaggtcatgcaggacttgctggaaagcacagactttacagagcatgagatccaggaatggtataaaggcttcttgagagactgccccagtggacatttgtcaatggaagagtttaagaaaatatatg

SEQ ID NO: 13442 - DNA, 552 bp, Homo sapiens
  source 1..552: mol_type = unassigned DNA
ataattcagcgttgatggcaaaatctcaatgatgaagtttatcactaaaagaaaacaacctatgctgtgaaagcagagatgctctagaatctacaggtcttttcctatgggaaaataagagaaaaaaagactgtcatcagaatcattttacagcattgagactatgttgatttcaaggtcatgtttgttgcagcttcaaaagatgctggcaaggaacgagaagaaaaagaactctgaaatgaaattgaggatttgaacttcacacagctgtttgaaggagaaaagggaatttttaaaaggagaatgaaagtgtccttgtctctagaactgaagcaacttggaggaatgagtggagtctttgtttagtgagtgagttctcatgagatctgatggttttgtaaggggcttttaccccttttgctcagcacttctccttcctgccatcatgtgaagaagggcatgtttgcttccccttctaccatgattctgaattcttgccgccaggatggggaaacagaacagcaagctgcgcccggaggtcatgcaggactt

SEQ ID NO: 13443 - DNA, 540 bp, Homo sapiens
  source 1..540: mol_type = unassigned DNA
acagtttacagaaggctttgggtagagaaagcactagttagacaaaagcagcccccctcccaccttgtgggcatgaagagtccagaggacaccacctgagaagcttttcaactgccttccaaggctcccttgaacttcactgcggtagagcagggaccccagaccccccctcaaatcgaagcttggaaggaggtgctctaggctgaatctgacctcccaggacccgaggaggcaagcagatggcaccccttggaaagtagcagtgcaggctggctagaggcctgggcgagtgatttcttctgacttgagcctgcagtgtgctgtgagagatctaccactagattatctcaactttggtctcctgggaccactcgttgctgacagtcagaaattgcaaggcatctgatctcctggtgttaaaatctgtcgtgataccgaggaaggccccgagatcccaggcactgagtgactgcatactctgaattcttgccgccaggatggggaaacagaacagcaagctgcgcccggaggtcatgcagg

SEQ ID NO: 13444 - DNA, 543 bp, Homo sapiens
  source 1..543: mol_type = unassigned DNA
gatgctggaccttgctgctgctgctactgctgtttccaggggctgcagagcatggactgttaaatcttgcacttcttctgagtgagaagaaaaagaactctgaaatgaaattgaggatttgaacttcacacagctgtttgaaggagaaaagggaatttttaaaaggagaatgaaagtgtccttgtctctagaactgaagcaacttggaggaatgagtggagtctttgtttagtgagtgagttctcatgagatctgatggttttgtaaggggcttttaccccttttgctcagcacttctccttcctgccatcatgtgaagaagggcatgtttgcttccccttctaccatgattctctctttctttaaatgagatatggtggtgcgtaatgatcgaagcagagacttggagtctggtgtgcctgtattcaaatctgactgcaccacttactgtctgccagatcttggataaattatttaatctccctaaacctcagtgtcctcatctgtgaagtgagctgaattcttgccgccaggatggggaaa

SEQ ID NO: 13445 - DNA, 543 bp, Homo sapiens
  source 1..543: mol_type = unassigned DNA
acagacgctgggagcggccgaggcgagtgatttcttctgacttgagcctgcagtgtgctgtgagagatctaccactagattatctcaactttggtctcctgggaccactcgttgctgacagtcagaaaggagaaaagggaatttttaaaaggagaatgaaagtgtccttgtctctagaactgaagcaacttggaggaatgagtggagtctttgtttagtgagtgagttctcatgagatctgatggttttgtaaggggcttttaccccttttgctcagcacttctccttcctgccatcatgtgaagaagggcatgtttgcttccccttctaccatgattgtaagtttcctgaggcctccccagccatgctgaactctctctttctttaaatgagatatggtggtgcgtaatgatcgaagcagagacttggagtctggtgtgcctgtattcaaatctgactgcaccacttactgtctgccagatcttggataaattatttaatctccctaaacctcagtgtcctcatctgtgaagtgaggtgagt

SEQ ID NO: 13446 - DNA, 372 bp, Homo sapiens
  source 1..372: mol_type = unassigned DNA
acacagtcaaaggcttgtgagaatctggtggatgctggaccttgctgctgctgctactgctgtttccaggggctgcagagcatggactgttaaatcttgcacttcttctgagtgagccacactggccactgcagtccaaaagagaattctaaaaggaaacagtacaaaacagaacatcaaaacaaaacagacaaacaacctgggaaccattaggttttacaccagagtgaaaccccagaagagacattctgcagctggtgaacagccggcctcatttgtgagcaatctgttcccatcagtgtcagggattccagaagaaaaagaactctgaaatgaaattgaggatttgaacttcacacagctgtttgaagt

SEQ ID NO: 13447 - DNA, 556 bp, Homo sapiens
  source 1..556: mol_type = unassigned DNA
aaaggcttgtgagaatctggtggatgctggaccttgctgctgctgctactgctgtttccaggggctgcagagcatggactgttaaatcttgcacttcttctgagtgagactatatttcagcggtatgaaatacaagagaataattcagcgttgatggcaaaatctcaatgatgaagtttatcactaaaagaaaacaacctatgctgtgaaagcagagatgctctagaatctacaggtcttttcctatgggaaaataagagaaaaaaagactgtcatcagaatcattttacagcattgagactatgttgatttcaaggtcatgtttgttgcagcttcaaaagatgctggcaaggaacgagccacactggccactgcagtccaaaagagaattctaaaaggaaacagtacaaaacagaacatcaaaacaaaacagacaaacaacctgggaaccattaggttttacaccagagtgaaaccccagaagagacattctgcagctggtgaacagccggcctcatttgtgagcaatctgttcccatcagtgtcagggattcca

SEQ ID NO: 13448 - DNA, 469 bp, Homo sapiens
  source 1..469: mol_type = unassigned DNA
gctgctgctgctactgctgtttccaggggctgcagagcatggactgttaaatcttgcacttcttctgagtgagactatatttcagcggtatgaaatacaagagaataattcagcgttgatggcaaaatctcaatgatgaagtttatcactaaaagaaaacaacctatgctgtgaaagcagagatgctctagaatctacaggtcttttcctatgggaaaataagagaaaaaaagactgtcatcagaatcattttacagcattgagactatgttgatttcaaggtcatgtttgttgcagcttcaaaagatgctggcaaggaacgaggtactctagaaacctggctgttgcattattaaatattttgtgtatagtttcggacattcttaacccgtttggtgctgtggacctctttggcagcctggtgaagcctatgtacttttctcagaattatgtttttacatgcataaaa

SEQ ID NO: 13449 - DNA, 425 bp, Homo sapiens
  source 1..425: mol_type = unassigned DNA
acagacgctgggagcggccgaggcgagtgatttcttctgacttgagcctgcagtgtgctgtgagagatctaccactagattatctcaactttggtctcctgggaccactcgttgctgacagtcagaaagtaagtgtatatttaaaatgttcttcttagctataaatggaaatctcagttttgttcagtagttttcacaagagacagttctgttcaaatgttttatcaagaatagtagcataatgaatgggagttttgtatatataaaagatactaaagcccatttaaaaaatttatggaaatgataaataaatagaaatgaagtaaataaggtactgcctgcttatcacctttgaatattacttacagcataataaagtatatttgcaaccactcagtggagtagtttttatatgacatcttcat

SEQ ID NO: 13450 - DNA, 3808 bp, Homo sapiens
  source 1..3808: mol_type = unassigned DNA
aggggccccttagatgtcttcctccggattttttgttaagcttttcctagacagtttacagaaggctttgggtagagaaagcactagttagacaaaagcagcccccctcccaccttgtgggcatgaagagtccagaggacaccacctgagaagcttttcaactgccttccaaggctcccttgaacttcactgcggtagagcagggaccccagaccccccctcaaatcgaagcttggaaggaggtgctctaggctgaatctgacctcccaggacccgaggaggcaagcagatggcaccccttggaaagtagcagtgcaggctggctagaggcctgggcgagtgatttcttctgacttgagcctgcagtgtgctgtgagagatctaccactagattatctcaactttggtctcctgggaccactcgttgctgacagtcagaaactgaattcttgccgccaggatggggaaacagaacagcaagctgcgcccggaggtcatgcaggacttgctggaaagcacagactttacagagcatgagatccaggaatggtataaaggcttcttgagagactgccccagtggacatttgtcaatggaagagtttaagaaaatatatgggaactttttcccttatggggatgcttccaaatttgcagagcatgtcttccgcaccttcgatgcaaatggagatgggacaatagactttagagaattcatcatcgccttgagtgtaacttcgagggggaagctggagcagaagctgaaatgggccttcagcatgtacgacctggacggaaatggctatatcagcaaggcagagatgctagagatcgtgcaggcaatctataagatggtttcctctgtaatgaaaatgcctgaagatgagtcaaccccagagaaaagaacagaaaagatcttccgccagatggacaccaatagagacggaaaactctccctggaagagttcatccgaggagccaaaagcgacccgtccattgtgcgcctcctgcagtgcgacccgagcagtgccggccagttctgagccctgcgcccaccaatcgaattgtagagctgcttgtgttcccttttgattcttctttttaacaatttttttttttttttgccaaacaatatcaatggtgatgccgtcccctgtgcggtctgatgcgccttcctccgtgacgccttcagcttcttttgtcgtggatgcttcgtgggaatgcccagagccccagtgtgcttgtggagagcatggacagacttcgtggtgttcattgtttgatgatttttaatcgttactattatttttttttattctaatgtctctgttctaaaacgtaagactcgggggttggggcaaaagaagggaaacccatccagtcctgtgattctattgcaagcttcaaggggcttttgtttgaaagacaaaactccccacctgaatctgttgtcacacgtgccgtaggggtgatggatggcaccggatgctggattccccaagaacaagttaccctctggggtgaggctattccagcgagctgggacatttccccatgggggcccactcccctctcttccccagcaggctgtagtttctaagctgtgaacatttcaagataaattaacagaggagaggaaaaagatggctcagctattttttcacaggtttacactagttgagctaatatgcgtgtctttggaaattaaacacaaatggtaacatattccaaaaccagacccatcttgttgcctattgtgataaaataaaaagacggctgtatataacatattgggtaatgcagaccaaattaagtgttttgccttgtttaaatgaaatgcatgtttagtgagcactaatacaatcttattccagaagactgtttttagtagcttattgtgaagtaagacaactataatgaatgtctgtcttgtttggaagtcatatctgtctttgcacaaatgtaccaatcgacaagtatattttatatattccataaaaatacaaagtaaccctgactagggcccaactttaattttgaatgcatttccagagtggccatgcctagagggcagatgcagagcaggtggtagtgggacaggacaattggagcacaggaatgttaacatgtatgacaggggaccagtagggtggtttccctctcaggcccagcagcccattgacagcattagactggcggcatggtgcttttctgagcagatcaatactctgcagactcgaaaaaacatcacatacattcttggaacttcccagtggtttaatctatgtgcatggttagggagccaggtctggaatattcagtttccctgcccctgttaaagaatcagaggttgggcagtcatcaaattcatcataaagacatgggcaagtgtgtctgtggtttccaaggcccccctatggagaatccaaaagtattttccattgccgtgctctttgaatgcagacttctatttccagaagtgacagcacaagtctgagttgctgtttggtctggtgacctcagacacactaatttgaattgaaagctaagagtaaaaatttgctggttacaggcgagtcatactcttgcaagtagttagcaaagggaggcccaaattctcaaggttgttgatggggaacttgccactaagagaaggcagagaggtccctagtgggtatatttgctgccaagccacttgccaaagaagaggaaccacagaaagagagacatcatgaccaggagaaaaatgtgactagacatgctaacctccaggtttttatatatgacttgagtctgctgtaattggcagcagaaatccaaatttgtatggtagaccaaaaagaaccaaatccatagggtgaaattttgagacctagactctgtaaaaataatcctagtcttcctccaggggtcagttcctcacagtggttctgtaccaaaacttgccaaattcctccatggccaagtgttaaaatctgtgtttggaaaatagcgaattaacctaagacacagaaggcagactgggtgaggagacctagcatgccctattggcagtgctcaggagctgcatcccacttttccctgctctgaatcgaagtcctagttccttcctttgattctcctttggtaggtggaatcagttaatgttttgagaaacctgcctgggctctgcccttagtcatgacatctcgctgagccagacccactctgttccttggaacctagagctggagtgaggagtagaggtctccggctattccagaaagaaaagtgagccacatgcaggctgatgaatgccgacacttccagaatgtatagaaatagtccctgtcctggcctgccactgaccctgtctgtattttctcggaggttgtttttctccttctccttcccaggaaggtctttgtatgtcgaatccagtgcactcaagtttggccaagggactccacagcacccagaagactgcatgcctcaaggtttatgtcactcctctgctgggctgttcattgtcattgctgtgttcagggacctttggaaataaaacctgttctgtcccaaataaaaccagcctgtgatgttcaagggactggaataaagtggcttacgacctgaaggattctacagagtgctcaactgttcatacatcattcagagtgggagggagctgggggtgctgtcccatcccatctgtatgcccacggtggatttaataatatataatttataaatcatagcctatggagtggcccgtaaatcagttgactgtgtagctcttgcctggcattaaagcatgtttttggtttaacatg

SEQ ID NO: 13451 - DNA, 3655 bp, Homo sapiens
  source 1..3655: mol_type = unassigned DNA
gacggtgctgtccagggggaggcgggcggagggaaggcgctgccgctgctgccgccgcctcgcccgaagcgacacagacgctgggagcggccgaggcgagtgatttcttctgacttgagcctgcagtgtgctgtgagagatctaccactagattatctcaactttggtctcctgggaccactcgttgctgacagtcagaaattgcaaggcatctgatctcctggtgttaaaatctgtcgtgataccgaggaaggccccgagatcccaggcactgagtgactgcatactctgaattcttgccgccaggatggggaaacagaacagcaagctgcgcccggaggtcatgcaggacttgctggaaagcacagactttacagagcatgagatccaggaatggtataaaggcttcttgagagactgccccagtggacatttgtcaatggaagagtttaagaaaatatatgggaactttttcccttatggggatgcttccaaatttgcagagcatgtcttccgcaccttcgatgcaaatggagatgggacaatagactttagagaattcatcatcgccttgagtgtaacttcgagggggaagctggagcagaagctgaaatgggccttcagcatgtacgacctggacggaaatggctatatcagcaaggcagagatgctagagatcgtgcaggcaatctataagatggtttcctctgtaatgaaaatgcctgaagatgagtcaaccccagagaaaagaacagaaaagatcttccgccagatggacaccaatagagacggaaaactctccctggaagagttcatccgaggagccaaaagcgacccgtccattgtgcgcctcctgcagtgcgacccgagcagtgccggccagttctgagccctgcgcccaccaatcgaattgtagagctgcttgtgttcccttttgattcttctttttaacaatttttttttttttttgccaaacaatatcaatggtgatgccgtcccctgtgcggtctgatgcgccttcctccgtgacgccttcagcttcttttgtcgtggatgcttcgtgggaatgcccagagccccagtgtgcttgtggagagcatggacagacttcgtggtgttcattgtttgatgatttttaatcgttactattatttttttttattctaatgtctctgttctaaaacgtaagactcgggggttggggcaaaagaagggaaacccatccagtcctgtgattctattgcaagcttcaaggggcttttgtttgaaagacaaaactccccacctgaatctgttgtcacacgtgccgtaggggtgatggatggcaccggatgctggattccccaagaacaagttaccctctggggtgaggctattccagcgagctgggacatttccccatgggggcccactcccctctcttccccagcaggctgtagtttctaagctgtgaacatttcaagataaattaacagaggagaggaaaaagatggctcagctattttttcacaggtttacactagttgagctaatatgcgtgtctttggaaattaaacacaaatggtaacatattccaaaaccagacccatcttgttgcctattgtgataaaataaaaagacggctgtatataacatattgggtaatgcagaccaaattaagtgttttgccttgtttaaatgaaatgcatgtttagtgagcactaatacaatcttattccagaagactgtttttagtagcttattgtgaagtaagacaactataatgaatgtctgtcttgtttggaagtcatatctgtctttgcacaaatgtaccaatcgacaagtatattttatatattccataaaaatacaaagtaaccctgactagggcccaactttaattttgaatgcatttccagagtggccatgcctagagggcagatgcagagcaggtggtagtgggacaggacaattggagcacaggaatgttaacatgtatgacaggggaccagtagggtggtttccctctcaggcccagcagcccattgacagcattagactggcggcatggtgcttttctgagcagatcaatactctgcagactcgaaaaaacatcacatacattcttggaacttcccagtggtttaatctatgtgcatggttagggagccaggtctggaatattcagtttccctgcccctgttaaagaatcagaggttgggcagtcatcaaattcatcataaagacatgggcaagtgtgtctgtggtttccaaggcccccctatggagaatccaaaagtattttccattgccgtgctctttgaatgcagacttctatttccagaagtgacagcacaagtctgagttgctgtttggtctggtgacctcagacacactaatttgaattgaaagctaagagtaaaaatttgctggttacaggcgagtcatactcttgcaagtagttagcaaagggaggcccaaattctcaaggttgttgatggggaacttgccactaagagaaggcagagaggtccctagtgggtatatttgctgccaagccacttgccaaagaagaggaaccacagaaagagagacatcatgaccaggagaaaaatgtgactagacatgctaacctccaggtttttatatatgacttgagtctgctgtaattggcagcagaaatccaaatttgtatggtagaccaaaaagaaccaaatccatagggtgaaattttgagacctagactctgtaaaaataatcctagtcttcctccaggggtcagttcctcacagtggttctgtaccaaaacttgccaaattcctccatggccaagtgttaaaatctgtgtttggaaaatagcgaattaacctaagacacagaaggcagactgggtgaggagacctagcatgccctattggcagtgctcaggagctgcatcccacttttccctgctctgaatcgaagtcctagttccttcctttgattctcctttggtaggtggaatcagttaatgttttgagaaacctgcctgggctctgcccttagtcatgacatctcgctgagccagacccactctgttccttggaacctagagctggagtgaggagtagaggtctccggctattccagaaagaaaagtgagccacatgcaggctgatgaatgccgacacttccagaatgtatagaaatagtccctgtcctggcctgccactgaccctgtctgtattttctcggaggttgtttttctccttctccttcccaggaaggtctttgtatgtcgaatccagtgcactcaagtttggccaagggactccacagcacccagaagactgcatgcctcaaggtttatgtcactcctctgctgggctgttcattgtcattgctgtgttcagggacctttggaaataaaacctgttctgtcccaaataaaaccagcctgtgatgttcaagggactggaataaagtggcttacgacctgaaggattctacagagtgctcaactgttcatacatcattcagagtgggagggagctgggggtgctgtcccatcccatctgtatgcccacggtggatttaataatatataatttataaatcatagcctatggagtggcccgtaaatcagttgactgtgtagctcttgcctggcattaaagcatgtttttggtttaacatg

SEQ ID NO: 13452 - DNA, 8135 bp, Homo sapiens
  source 1..8135: mol_type = unassigned DNA
gctgccgccgcggcggccgctgctgctgctgcttctgccgccgctgccgccgccgctgcctggatatagtgcggcaagagcggagcttgcagtcactttgcgaggaggagcgcgcgggctgcgggcggctggggcaccgcgggagcggcggcggcggctctagcagaggcggccggggcagcgaaaggttctctctccagggctggacttaataactttgaaactgtccaccggtgtcacgtcctgaacatgagcctcctcctctccttctacctgctggggttgcttgtcagtagcgggcaagctcttcttcaagtgacaatttcacttagcaaagtagagcttagtgttggagaatctaaattcttcacatgtacagcgattggtgaacctgaaagtatagattggtataatcctcaaggagagaagataatttcaacacagagggtagtagtgcaaaaggaaggtgttaggtcacggttaaccatctacaatgcaaatatagaagatgcagggatatatcgttgtcaagcaacagatgccaaaggacaaacacaagaagctacagtagttttggaaatttaccaaaaactcactttcagagaagtggtatctccacaagaattcaaacaaggagaagatgcagaagtggtttgccgagttagcagttcacctgcacctgctgtcagctggttgtatcataatgaggaagtcaccactatttccgacaatcggttcgctatgttagcaaacaataacctgcagattctcaacatcaataaaagtgatgaaggtatatacagatgtgaaggaagagtggaggccaggggagaaattgacttccgtgatatcattgttattgttaatgtgccgccagcaatctcaatgcctcagaaatcttttaatgccacagcagagagaggagaagaaatgacattttcctgcagggcctcaggctctccagaacccgccatctcctggttcaggaatggcaagctcattgaagaaaatgagaagtacatattgaaagggagcaatacagaactcactgtcaggaacataatcaatagtgatggtggtccttatgtctgcagggccacaaataaggcaggagaagatgaaaagcaagctttcctccaagtctttgtacagcctcacataatacagcttaaaaatgaaactacatatgagaatggtcaagtcacactcgtatgtgatgcggaaggggagcctattccagaaatcacttggaaaagagctgtggatggcttcacgttcactgaaggcgataagagcctggacggccgtatcgaagtcaaagggcagcatggaagctcatcactgcatattaaagatgtgaagttgtcagattcagggagatatgactgtgaagctgcaagcagaattggagggcatcaaaagagcatgtaccttgatattgaatatgcccccaagtttatatcaaaccaaacaatttattactcttgggaaggaaatcctatcaatataagttgtgatgtgaaatcgaatccaccagcatcaattcactggagaagagataaattagtcttacctgctaaaaacacgaccaatttaaagacttatagtacaggaagaaagatgatattagagattgcacctacatctgacaatgactttggacgctataattgcacagccactaatcatataggaacaagatttcaagaatatattcttgctttggctgacgtgccatccagtccctatggagtgaagatcatagagctgtcgcagaccacggccaaggtttccttcaacaaaccggactcccatggaggtgtacctattcatcactatcaggtggatgtcaaagaagtagcgtcagaaatctggaaaattgtacgctcccatggagttcaaacaatggttgttttgaacaacctggaaccaaatacaacttatgaaatcagggttgcagctgtaaatggaaagggacaaggagactacagtaaaatagaaatcttccaaacattaccagttcgtgaaccaagtcctccatccatacatggacagccaagcagtggaaagagctttaaactcagcatcaccaaacaggacgatggaggggcccctattttggaatacattgtgaaatatagaagtaaagataaggaagaccaatggctagagaaaaaagtgcaaggaaataaagaccacatcattttggagcatctccagtggaccatggggtatgaagttcagattacagctgccaatagattgggatattctgaaccgacagtttatgaattcagcatgccaccaaagcccaacattattaaagacacgctgtttaatggtcttgggcttggagcagtaattggcctgggagttgctgcactgctgctaattcttgtggtaacagacgtcagctgcttctttattcggcaatgtgggttgctgatgtgcatcactaggagaatgtgtggaaagaaaagtggctccagtggcaaaagtaaagaactcgaagaaggaaaagctgcatacctgaaagatggatcaaaagaaccaatagtggagatgagaacagaggatgaaagagttactaatcacgaagatgggagcccagtaaatgagccaaatgaaaccacaccactgacagaacctgaaaaattgcctttaaaggaagaagatgggaaagaagctctaaatccagaaactatagaaattaaagtttctaacgacatcattcaatcaaaagaagacgacagcaaagcataacaacaatattacaggggcttgaacaacactacgaagagtatttggattgcgtgaccctatgaccaaaactattccattgaccttaatttcttgggaaacttctagcttggaatagcttgtacacatatacatatgatcaaatactcctgcccatgatccattcccttttgttattgttgttgttgttgctgttgttgttaattttgttaagaatttcaatatcaagactgactggcaccaacactttggtattcaatttgattctatgactgaagtactggaatttattatgtggctaaagtgctctatttattaagaactatatttaataccaccaacaaatataggggttaaggaaaaaaaacgtgagctacatgtgtaagaaggccctgcatgtgtatgagtcctattctgggcaaatagattcttaaagtggctttcaacttcaagatgaaggagcttaataatggttactcattttatcaggggaatttcagggaacgtaggcgtcaaagagccagttatctttagcagatattaaaaattgaaaactttggagaactcatttcaagttatgattcagtgcattttcaacattgatttttgatagactgaagtgccagatcaaaattgttacccatttgaaagaatattagttgtatataaaattagattagaaagactttctaaatctctatctctttatatatgtcctattcattcacaatggattatacaaaaaaaagtgtattgcaagtgaaataatattgatttctgccctcagcttcaaataaagtaaattgaaatgggaacaatatcaatatggtgtcttgatatatttataaatatgtgattatcatttatttttaaaataatttatcaaaaaacaagtctttagtgttcaaatacttcaaatcatatcctcagatatatttttagcccatggttttatataatctttaagaactaattttaccactgttataggttcaccattaaatataattggctaataaaaattttaaggttgactaaattaagaagaaattatttaacattttaatgtgccataaaagagtaaatgataaataattaaatgccactatgtgttctattccggatgttctagctagaagtcattttaagattttgataaacaactttggttgaagaaattccttaagtattcaacacaaactttctaatatcttttgttagggttataccagaataaaatgcttctttacttccaagctatgcaagctcccagaggtaatagagtgacacatgatttaacttatatgtaaggtttaaaaaagtatttatcattataaacatacataccatttgggagcaggtttattaaccttgagagccaaaggtttccttaggccctgtaacattcagaacctttggtgtttcaggtggtattatagctcaaatagtgacaggacagggaatgcgttccaaaggaatattggagcaattttaacattgcagaaacctgctctgggtgtgtctctctgtagagataacctgatgattattaaatgtaaaattaaggcaactcatgaatatttttatttacaaagtgcttgaaactcagccaaggagagaaaactaagtacttttatataattcatcacttttctggctacagcaggacagaatatgaccatcttcgtttgaaggcaccaaatcgtcgcagtgtctttgccataagttgcagggttaaatgcgggaatctctccttgcgttcctgtctggcgtattctgaagaaaagaacagaattcttgtgcctacctaagaatttgagtagtgtctaaacaaacaaagcagttaggtcattttaactgacttgattatccaactggtctttgacagatttgactgttcatatttagtttatgtttgtctgatcatccagtttgctttattttgctgtgttttattttgttgtttgttttgttttgtaccagtgtactaaaactagtcaaaatacttgaattagtttgtttgtgcaaagtgtacaagcttagtaaagtgtccatgaagcaatagccatgaatgctaattatttctaaatagggccacatggttttaaactaatgatggtgaaagaaatacgatgactgagaaagtcatttcgcatgtttactattgttatattcgtgctttacttcaagagtgcagaaatcataataaataacaaactatttttgtgttttctcaatgtgacatttctgtttctctcatttattcggattttccttgtaaagaaattgacatatatttcatatatatatacacatatatatatatacacatatatatacatatatatatatgatgttaaatttcctgccactcatgtggagtaatgatctgaaattaacagataatctgaagctaattatattcagactatttcaagtgcactgtttcagttgcccgggtggtccttacctcttgtccttgaaatccatgccatgctgaagcaaggcaatactgtgataaagtattttttttaatatttcaatggaatgctccaaatgatttataaaaatttcaaaataaaagatggcttgtagtaaattgtaaaatatgagtagaactgaaataacctgtttcattcttattctagattaaacaaacatatacatataaccatataaatgttatttttattgtctgagagtactcttaaatattagtataaagtgtcaaaagaattgactgaatataagtactgttaaaataatttgaaccctatgatattttaaaccaagaggcaaagatatcacctaaaacttggtatttcttgataggttaggtgcaattaggcagtgacaatctgtattcaacaacatataagaggaaagagtaatatcagaattttgacacaaattaatgtgtcaacatattttacaatgattgtcaaaggaatttaagaattgtatttttaaagatttatttattatttttgtgggctaagacattgccattctattgatactaatgtctaacattaatgtttcttgttttcttttatttttaatattaataactataaaagcatttttcaaaggctatttgatccagcacacttcatatggatcttagtctttgaattaaatatttatataaatagattttattaatcaaattatttatttgtgtgccaacaattaattgtaactttatgatcatatctttgtttatgcttcttattttaaataattaagatgtatctgtgccttttaattagcatgacagtctgctttattaaaagaaaaaaactacaattaacatcattactagtatattttgcttagatttgagatactcaaatgatgctgtcttatttacagtcagtaattaagttcaattcaaactattttaccttgaatataaaatctaaatataataaactatactgtataatttactttaattcatgtcaaaacaattctttttatacacacacatgaaatattcttaatctgttctgtattgtttttctaaacaataaatacattctagatattgttgaaattaaattttgccagttgtaagacaaagacaacagataacttttgaaaatcaagcaaattactatggtgtttcttgggtcttcattattccatttatatatattttttatttcgaataataaatcaacctttatttttggcaataagattatcactgacgaaaatatgtacagttcaagaagtagaaataatattttccattagttaatttaggaaatattggaatagcatattataattatttatgaggttcccaatgttgtttttcacagaaaataaggtaaacattcaacttaaatcccccatgaagttttttcatgctcatactcataatcattatcacataatgtgcttattcaacaaactttgtatctggatatatttttaacaataagtttgttagcattatttatttatctttagagagaaaatatttgcatctgtttatttaccctttgaagcattaatacttagtcactcacattgaaattgcatatggatgtatcaacataggctaaaattaaattatggatgtcgcagaaatgaaatacttcatcttagaaggtaaaattttcaagaaagtattttattcatggacttaataatgtcttaagatgaaacaattttatgtccaaatgagaaatttataaaaagacccacatatagtagttgctgaacaaacataattttcttccagctcccatccttcctttttgaaaaattgaatttacccatgtagatgcagctatttacaattatacaagaatgcgaatagattaattatatcttctcatataaaggcaaagaattttatattatatataatgctaaatatttatttgataacacaatattcttagaaaaatagtttattactttaggattttatctataacataaatatattatttgttattacctctttaaattttcattttatacaatttttgagattctggccacacaacattcagaattattgctcatgtaaatttaaatattgctacttattttttttcttttctgaaatgaaaacatgaatcttttggcatctgtttttagcctcccatggaagacagtaagcaaaaccatcactgttggagaatttcaaatcacaacccgacataggagagtagagaaacaaagaaatgagtggatctagaaaggcaaactgaattgctatatttggaatagctaagaaggacctgactttgagaagtgctagaccagggactaggaacgttgcttagataaaaattatggccgattacactgatgcgaaggagaaaacagtgtaacacagaggagaaagttaacagagatagaatctatgatttaattttgcaaatagtttttttagagaacaacatgcatactataaaagaaatgatactattaagaacaaacctacttgttccaactcttaaagaaatattcatggtttagcatttgcctctaaaccctgttagaaatatgtgaagttagaaataaaggtttttttaaaaaaaaagcttttttggtatgtgaactgtatgctgtgctcagtatgtactgaaacatactatcttttattttctttaatttatatattccattcaaattctatattcttaagttagctaccacaacgttttcttattgtttcaatatggtatgtcccaatgaaatgctgtatatatatgtctaaactgtaaaaattatactgcaaatgttgaagttttgtatttatgagagacattgaaagtatggcttacagtatatcaaacttgtcacacttcaccatttgtatattaatagtaaagatacttttactttaa

SEQ ID NO: 13453 - DNA, 583 bp, Homo sapiens
  source 1..583: mol_type = unassigned DNA
aaagggaaaatatgtggcggatgcaggagacaggatgcaagcagtctgatgcccatcatctatatataggctcttcttcaagtgacaatttcacttagcaaagtagagcttagtgttggagaatctaaattcttcacatgtacagcgattggtgaacctgaaagtatagattggtataatcctcaaggagagaagataatttcaacacagagggtagtagtgcaaaaggaaggtgttaggtcacggttaaccatctacaatgcaaatatagaagatgcagggatatatcgttgtcaagcaacagatgccaaaggacaaacacaagaagctacagtagttttggaaatttaccaaaaactcactttcagagaagtggtatctccacaagaattcaaacaaggagaagatgcagaagtggtttgccgagttagcagttcacctgcacctgctgtcagctggttgtatcataatgaggaagtcaccactatttccgacaatcggttcgctatgttagcaaacaataacctgcagattctcaacatcaataaaagtgatgaaggtatatacagatgtgaaggaagag

SEQ ID NO: 13454 - DNA, 582 bp, Homo sapiens
  source 1..582: mol_type = unassigned DNA
atattcctttggcaactagttccatgtaaaggcatgtgaagacagaactggagaatgccaggtgataaatttcagatcggttcgctatgttagcaaacaataacctgcagattctcaacatcaataaaagtgatgaaggtatatacagatgtgaaggaagagtggaggccaggggagaaattgacttccgtgatatcattgttattgttaatgtgccgccagcaatctcaatgcctcagaaatcttttaatgccacagcagagagaggagaagaaatgacattttcctgcagggcctcaggctctccagaacccgccatctcctggttcaggaatggcaagctcattgaagaaaatgagaagtacatattgaaagggagcaatacagaactcactgtcaggaacataatcaatagtgatggtggtccttatgtctgcagggccacaaataaggcaggagaagatgaaaagcaagctttcctccaagtctttgtacagcctcacataatacagcttaaaaatgaaactacatatgagaatggtcaagtcacactcgtatgtgatgcggaaggggagcctattc

SEQ ID NO: 13455 - DNA, 340 bp, Homo sapiens
  source 1..340: mol_type = unassigned DNA
gcaaaactcctcatagcgcctgtgaaatgttgaaggaaggggattgctgacaatacaagccagaaagagcttttgcctgaaatactcagataattcaacaatggttgttttgaacaacctggaaccaaatacaacttatgaaatcagggttgcagctgtaaatggaaagggacaaggagactacagtaaaatagaaatcttccaaacattaccagttcgtgaaccaagtcctccatccatacatggacagccaagcagtggaaagagctttaaactcagcatcaccaaacaggacgatggaggggcccctattttggaatacattgtgaaatatagaagt

SEQ ID NO: 13456 - DNA, 4699 bp, Homo sapiens
  source 1..4699: mol_type = unassigned DNA
agctcttcttcaagtgacaatttcacttagcaaagtagagcttagtgttggagaatctaaattcttcacatgtacagcgattggtgaacctgaaagtatagattggtataatcctcaaggagagaagataatttcaacacagagggtagtagtgcaaaaggaaggtgttaggtcacggttaaccatctacaatgcaaatatagaagatgcagggatatatcgttgtcaagcaacagatgccaaaggacaaacacaagaagctacagtagttttggaaatttaccaaaaactcactttcagagaagtggtatctccacaagaattcaaacaaggagaagatgcagaagtggtttgccgagttagcagttcacctgcacctgctgtcagctggttgtatcataatgaggaagtcaccactatttccgacaatcggttcgctatgttagcaaacaataacctgcagattctcaacatcaataaaagtgatgaaggtatatacagatgtgaaggaagagtggaggccaggggagaaattgacttccgtgatatcattgttattgttaatgtgccgccagcaatctcaatgcctcagaaatcttttaatgccacagcagagagaggagaagaaatgacattttcctgcagggcctcaggctctccagaacccgccatctcctggttcaggaatggcaagctcattgaagaaaatgagaagtacatattgaaagggagcaatacagaactcactgtcaggaacataatcaatagtgatggtggtccttatgtctgcagggccacaaataaggcaggagaagatgaaaagcaagctttcctccaagtctttgtacagcctcacataatacagcttaaaaatgaaactacatatgagaatggtcaagtcacactcgtatgtgatgcggaaggggagcctattccagaaatcacttggaaaagagctgtggatggcttcacgttcactgaaggcgataagagcctggacggccgtatcgaagtcaaagggcagcatggaagctcatcactgcatattaaagatgtgaagttgtcagattcagggagatatgactgtgaagctgcaagcagaattggagggcatcaaaagagcatgtaccttgatattgaatatgcccccaagtttatatcaaaccaaacaatttattactcttgggaaggaaatcctatcaatataagttgtgatgtgaaatcgaatccaccagcatcaattcactggagaagagataaattagtcttacctgctaaaaacacgaccaatttaaagacttatagtacaggaagaaagatgatattagagattgcacctacatctgacaatgactttggacgctataattgcacagccactaatcatataggaacaagatttcaagaatatattcttgctttggctgacgtgccatccagtccctatggagtgaagatcatagagctgtcgcagaccacggccaaggtttccttcaacaaaccggactcccatggaggtgtacctattcatcactatcaggtggatgtcaaagaagtagcgtcagaaatctggaaaattgtacgctcccatggagttcaaacaatggttgttttgaacaacctggaaccaaatacaacttatgaaatcagggttgcagctgtaaatggaaagggacaaggagactacagtaaaatagaaatcttccaaacattaccagttcgtgaaccaagtcctccatccatacatggacagccaagcagtggaaagagctttaaactcagcatcaccaaacaggacgatggaggggcccctattttggaatacattgtgaaatatagaagtaaagataaggaagaccaatggctagagaaaaaagtgcaaggaaataaagaccacatcattttggagcatctccagtggaccatggggtatgaagttcagattacagctgccaatagattgggatattctgaaccgacagtttatgaattcagcatgccaccaaagcccaacattattaaagacacgctgtttaatggtcttgggcttggagcagtaattggcctgggagttgctgcactgctgctaattcttgtggtaacagacgtcagctgcttctttattcggcaatgtgggttgctgatgtgcatcactaggagaatgtgtggaaagaaaagtggctccagtggcaaaagtaaagaactcgaagaaggaaaagctgcatacctgaaagatggatcaaaagaaccaatagtggagatgagaacagaggatgaaagagttactaatcacgaagatgggagcccagtaaatgagccaaatgaaaccacaccactgacagaacctgaaaaattgcctttaaaggaagaagatgggaaagaagctctaaatccagaaactatagaaattaaagtttctaacgacatcattcaatcaaaagaagacgacagcaaagcataacaacaatattacaggggcttgaacaacactacgaagagtatttggattgcgtgaccctatgaccaaaactattccattgaccttaatttcttgggaaacttctagcttggaatagcttgtacacatatacatatgatcaaatactcctgcccatgatccattcccttttgttattgttgttgttgttgctgttgttgttaattttgttaagaatttcaatatcaagactgactggcaccaacactttggtattcaatttgattctatgactgaagtactggaatttattatgtggctaaagtgctctatttattaagaactatatttaataccaccaacaaatataggggttaaggaaaaaaaacgtgagctacatgtgtaagaaggccctgcatgtgtatgagtcctattctgggcaaatagattcttaaagtggctttcaacttcaagatgaaggagcttaataatggttactcattttatcaggggaatttcagggaacgtaggcgtcaaagagccagttatctttagcagatattaaaaattgaaaactttggagaactcatttcaagttatgattcagtgcattttcaacattgatttttgatagactgaagtgccagatcaaaattgttacccatttgaaagaatattagttgtatataaaattagattagaaagactttctaaatctctatctctttatatatgtcctattcattcacaatggattatacaaaaaaaagtgtattgcaagtgaaataatattgatttctgccctcagcttcaaataaagtaaattgaaatgggaacaatatcaatatggtgtcttgatatatttataaatatgtgattatcatttatttttaaaataatttatcaaaaaacaagtctttagtgttcaaatacttcaaatcatatcctcagatatatttttagcccatggttttatataatctttaagaactaattttaccactgttataggttcaccattaaatataattggctaataaaaattttaaggttgactaaattaagaagaaattatttaacattttaatgtgccataaaagagtaaatgataaataattaaatgccactatgtgttctattccggatgttctagctagaagtcattttaagattttgataaacaactttggttgaagaaattccttaagtattcaacacaaactttctaatatcttttgttagggttataccagaataaaatgcttctttacttccaagctatgcaagctcccagaggtaatagagtgacacatgatttaacttatatgtaaggtttaaaaaagtatttatcattataaacatacataccatttgggagcaggtttattaaccttgagagccaaaggtttccttaggccctgtaacattcagaacctttggtgtttcaggtggtattatagctcaaatagtgacaggacagggaatgcgttccaaaggaatattggagcaattttaacattgcagaaacctgctctgggtgtgtctctctgtagagataacctgatgattattaaatgtaaaattaaggcaactcatgaatatttttatttacaaagtgcttgaaactcagccaaggagagaaaactaagtacttttatataattcatcacttttctggctacagcaggacagaatatgaccatcttcgtttgaaggcaccaaatcgtcgcagtgtctttgccataagttgcagggttaaatgcgggaatctctccttgcgttcctgtctggcgtattctgaagaaaagaacagaattcttgtgcctacctaagaatttgagtagtgtctaaacaaacaaagcagttaggtcattttaactgacttgattatccaactggtctttgacagatttgactgttcatatttagtttatgtttgtctgatcatccagtttgctttattttgctgtgttttattttgttgtttgttttgttttgtaccagtgtactaaaactagtcaaaatacttgaattagtttgtttgtgcaaagtgtacaagcttagtaaagtgtccatgaagcaatagccatgaatgctaattatttctaaatagggccacatggttttaaactaatgatggtgaaagaaatacgatgactgagaaagtcatttcgcatgtttactattgttatattcgtgctttacttcaagagtgcagaaatcataataaataacaaactatttttgtgttttctcaatgtg

SEQ ID NO: 13457 - DNA, 6387 bp, Homo sapiens
  source 1..6387: mol_type = unassigned DNA
ggggctggacccggcgcggagctggctgagtcggagcgcagcgtcctttgtgcccggcggccgccccgggatgcgtccgagctaggagccagatccaggatgggggccccgtttgtctgggccttgggccttttgatgctgcagatgctgctctttgtggctggggaacagggcacacaggatatcaccgatgccagcgaaagggggctccacatgcagaagctggggtctgggtcagtgcaggctgcgctggcggagctggtggccctgccctgtctctttaccctgcagccacggccaagcgcagcccgagatgcccctcggataaagtggaccaaggtgcggactgcgtcgggccagcgacaggacttgcccatcctggtggccaaggacaatgtcgtgagggtggccaaaagctggcagggacgagtgtcactgccttcctacccccggcgccgagccaacgccacgctacttctggggccactgagggccagtgactctgggctgtaccgctgccaggtggtgaggggcatcgaggatgagcaggacctggtgcccttggaggtgacaggtgttgtgttccactaccgatcagcccgggaccgctatgcactgaccttcgctgaggcccaggaggcctgccgtctcagctcagccatcattgcagcccctcggcatctacaggctgcctttgaggatggctttgacaactgtgatgctggctggctctctgaccgcactgttcggtatcctatcacccagtcccgtcctggttgctatggcgaccgtagcagccttccaggggttcggagctatgggaggcgcaacccacaggaactctacgatgtgtattgctttgcccgggagctggggggcgaggtcttctacgtgggcccggcccgccgcctgacactggccggcgcgcgtgcacagtgccgccgccagggtgccgcgctggcctcggtgggacagctgcacctggcctggcatgagggcctggaccagtgcgacccgggctggctggccgacggcagcgtgcgctacccgatccagacgccgcgccggcgctgcgggggcccagccccgggcgtgcgcaccgtctaccgcttcgctaaccggaccggcttcccctcacccgccgagcgcttcgacgcctactgcttccgagctcatcaccccacgtcacaacatggagacctagagaccccatcctctggggatgagggggagattctgtcagcagaggggcccccagttagagaactggagcccaccctggaggaggaagaggtggtcacccctgacttccaggagcctctggtgtccagtggggaagaagaaaccctgattttggaggagaagcaggagtctcaacagaccctcagccctacccctggggaccccatgctggcctcatggcccactggggaagtgtggctaagcacggtggcccccagccctagcgacatgggggcaggcactgcagcaagttcacacacggaggtggccccaactgaccctatgcctaggagaagggggcgcttcaaagggttgaatgggcgctacttccagcagcaggaaccggagccggggctgcaaggggggatggaggccagcgcccagccccccacctcagaggctgcagtgaaccaaatggagcctccgttggccatggcagtcacagagatgttgggcagtggccagagccggagcccctgggctgatctgaccaatgaggtggatatgcctggagctggttctgctggtggcaagagctccccagagccctggctgtggccccctaccatggtcccacccagcatctcaggccacagcagggcccctgtcctggagctagagaaagccgagggccccagtgccaggccagccaccccagacctgttttggtcccccttggaggccactgtctcagctcccagccctgccccctgggaggcattccctgtggccacctccccagatctccctatgatggccatgctgcgtggtcccaaagagtggatgctaccacaccccacccccatctccaccgaggccaatagagttgaggcacatggtgaggccaccgccacggctccaccctcccctgctgcagagaccaaggtgtattccctgcctctctctttgaccccaacaggacagggtggagaggccatgcccacaacacctgagtcccccagggcagacttcagagaaactggggagaccagccctgctcaggtcaacaaagctgagcactccagctccagcccatggccttctgtaaacaggaatgtggctgtaggttttgtccccactgagactgccactgagccaacgggcctcaggggtatcccggggtctgagtctggggtcttcgacacagcagaaagccccacttctggcttgcaggccactgtagatgaggtgcaggacccctggccctcagtgtacagcaaagggctggatgcaagttccccatctgcccccctggggagccctggagtcttcttggtacccaaagtcaccccaaatttggagccttgggttgctacagatgaaggacccactgtgaatcccatggattccacagtcacgccggcccccagtgatgctagtggaatttgggaacctggatcccaggtgtttgaagaagccgaaagcaccaccttgagccctcaggtggccctggatacaagcattgtgacgcccctcacgaccctggagcagggggacaaggttggagttccagccatgtctacactgggctcctcaagctcccaaccccacccagagccagaggatcaggtggagacccagggaacatcaggagcttcagtgcctccgcatcagagcagtcccctagggaaaccggctgttcctcctgggacaccgactgcagccagtgtgggcgagtctgcctcagtttcctcaggggagcctacggtaccgtgggacccctccagcaccctgctgcctgtcaccctgggcatagaggacttcgaactggaggtcctggcagggagcccgggtgtagagagcttctgggaggaggtggcaagtggagaggagccagccctgccagggacccctatgaatgcaggtgcggaggaggtgcactcagatccctgtgagaacaacccttgtcttcatggagggacatgtaatgccaatggcaccatgtatggctgtagctgtgatcagggcttcgccggggagaactgtgagattgacattgatgactgcctctgcagcccctgtgagaatggaggcacctgtattgatgaggtcaatggctttgtctgcctttgcctccccagctatgggggcagcttttgtgagaaagacaccgagggctgtgaccgcggctggcataagttccagggccactgttaccgctattttgcccaccggagggcatgggaagatgccgagaaggactgccgccgccgctccggccacctgaccagcgtccactcaccggaggaacacagcttcattaatagctttgggcatgaaaacacgtggatcggcctgaacgacaggatcgtggagagagatttccagtggacggacaacaccgggctgcaatttgagaactggcgagagaaccagccggacaatttcttcgcgggtggcgaggactgtgtggtgatggtggcgcatgaaagcgggcgctggaacgatgtcccctgcaactacaacctaccctatgtctgcaagaagggcacagtgctctgtggtccccctccggcagtggagaatgcctcactcatcggtgcccgcaaggccaagtacaatgtccatgccactgtaaggtaccagtgcaatgaaggatttgcccagcaccatgtggccaccattcgatgccggagcaatggcaagtgggacaggccccaaattgtctgcaccaaacccagacgttcacatcggatgcggcgacaccaccaccaccaccaacaccaccaccagcatcaccaccacaaatcccgcaaggagcgcagaaaacacaagaaacacccaacggaggactgggagaaggacgaagggaatttctgctgaagaaccagaaaaaagaaagcacaacacctttcccatgcctcctctggagccttcgcctggggagacagaacccagagagaaacaagagagtccagaagtccctgaaccccaaaccacatcccccacacacataatcctttgtacaaagctcctcttttccctttttttacatacacaagatcctcttggcaggtggagccaggtgtctgaaaagttcattctcgtctggctgaactctgggagtgtgtcccagctgagggaagcacaagtagcaaagctcattggtctggtctcttgtttgccaggctgattgaagcaggccttgatgagggtgcatgagtgtatgtttgcattcacatgaaggaattgcttttcacaccagaaattcagacttagtcaatgttggctgaattcctaaatccaggaagaagcctggacgtagggtcattagctttgggaatagaaggctacacagaagcacactgtttttgaacttgacaacagctctccctttaccctggacttcagcccaagttccgtctttggtcttggtggataaacacacagtgtggagatcccacgtactgcattttagggatgtttttaggacaacctccctccatgccttcagagttaggagtgagaatgatcaaagcaatatgtaggtgatggagggagagtgtattgctaacccttccaggtctagtccagcgctgagatttggtggttctgcatgtgtgatgaatctctttcacacaaatagacgagaggatatttagggctagatgagcccagatttcttccccctccatctctcagggagacaaagaacctccttcctggaccaaggaggtgctgccaagttttctagcccagtgcacatacccagtccttaagcagacattggtagtgcccctgccctgggtcccactcctgccccaccccacccttgtccctggccattgcctggtggtctagaaacacttaaaacttgaagtagtgacacctacctgcggtcatattgtagagagatgctcagtgttaaaactgaaacacacaaacacacacacacacacatttttctcttgtagattttaattttttaagtgggaaagaactcaccttgccttcctcccccaaatgtgcaacctgtaaaaggtctctccacaccaggggccaggatccagttccctcatctctggcaggaaagatccacagcttttcctccatgtctgttactcactttcagcagtccgggtaaaatctgtggatcagggttaaaaaagcaccgtggagaatggccctcttcaggaaagaaaaataagcaaatgaatggtccacctaggggttcagtaaagaaagaaatgtgttaactgagcctgaatcccttctgggaagtaataatgaccattgacaactaagaagtagacaccatgctaaagacttacatacaatctccttgaatcttctcaatagcccattgacttagaaactgttactttcccattttacacacagtgaaactgaggctcagatataaaggaaaggtactggcttgaagtcacaaccacgacaggagtaaggatttggaataaggatttggtcctgttttctggaccaaatccttactctggctctgcttacactttctctccatcaccaaatccttactccaaatccagaagtcagagccaactcccatcttggttctgacccaaatcctgctctggactctggagaggagattgaaatataattgcaccctcatacacatttaggaaatggttaagaagtgtaaactgaacccttatccttgtcttcaatcttcctccctgtagacatctatcttattatggttattattcagaaaacccagggatacaggtttgtcttcttactttgataactcttcttagtttaaaataataataataacacatctttggtcatctatgtcacacaaaaattttcctttgtttgcggggggctggggatgcagtgttttttggggggtcttggtttatgctccctgcccttgagcccctcagccgtttgccctgcccccacctcggctccatggtgggagggggctctggtcttttctaaagtgggcggtttgtcttttgatctttcccttttggatgtgcgtgtgtgtctgcgtgtgccatgtgcgtggcacgcatatgagtgtgtgtgcgtgtgaacggctttgggtcctgctggttttgctgtgagctgcagtgttctgtgggtctgtggtatctgacactgtggacattaatgtacttcttggacattttaataaattttttaacagttcaa

SEQ ID NO: 13458 - DNA, 2361 bp, Homo sapiens
  source 1..2361: mol_type = unassigned DNA
ctaggagaagggggcgcttcaaagggttgaatgggcgctacttccagcagcaggaaccggagccggggctgcaaggggggatggaggccagcgcccagccccccacctcagaggctgcagtgaaccaaatggagcctccgttggccatggcagtcacagagatgttgggcagtggccagagccggagcccctgggctgatctgaccaatgaggtggatatgcctggagctggttctgctggtggcaagagctccccagagccctggctgtggccccctaccatggtcccacccagcatctcaggccacagcagggcccctgtcctggagctagagaaagccgagggccccagtgccaggccagccaccccagacctgttttggtcccccttggaggccactgtctcagctcccagccctgccccctgggaggcattccctgtggccacctccccagatctccctatgatggccatgctgcgtggtcccaaagagtggatgctaccacaccccacccccatctccaccgaggccaatagagttgaggcacatggtgaggccaccgccacggctccaccctcccctgctgcagagaccaaggtgtattccctgcctctctctttgaccccaacaggacagggtggagaggccatgcccacaacacctgagtcccccagggcagacttcagagaaactggggagaccagccctgctcaggtcaacaaagctgagcactccagctccagcccatggccttctgtaaacaggaatgtggctgtaggttttgtccccactgagactgccactgagccaacgggcctcaggggtatcccggggtctgagtctggggtcttcgacacagcagaaagccccacttctggcttgcaggccactgtagatgaggtgcaggacccctggccctcagtgtacagcaaagggctggatgcaagttccccatctgcccccctggggagccctggagtcttcttggtacccaaagtcaccccaaatttggagccttgggttgctacagatgaaggacccactgtgaatcccatggattccacagtcacgccggcccccagtgatgctagtggaatttgggaacctggatcccaggtgtttgaagaagccgaaagcaccaccttgagccctcaggtggccctggatacaagcattgtgacgcccctcacgaccctggagcagggggacaaggttggagttccagccatgtctacactgggctcctcaagctcccaaccccacccagagccagaggatcaggtggagacccagggaacatcaggagcttcagtgcctccgcatcagagcagtcccctagggaaaccggctgttcctcctgggacaccgactgcagccagtgtgggcgagtctgcctcagtttcctcaggggagcctacggtaccgtgggacccctccagcaccctgctgcctgtcaccctgggcatagaggacttcgaactggaggtcctggcagggagcccgggtgtagagagcttctgggaggaggtggcaagtggagaggagccagccctgccagggacccctatgaatgcaggtgcggaggaggtgcactcagatccctgtgagaacaacccttgtcttcatggagggacatgtaatgccaatggcaccatgtatggctgtagctgtgatcagggcttcgccggggagaactgtgagattgacattgatgactgcctctgcagcccctgtgagaatggaggcacctgtattgatgaggtcaatggctttgtctgcctttgcctccccagctatgggggcagcttttgtgagaaagacaccgagggctgtgaccgcggctggcataagttccagggccactgttaccgctattttgcccaccggagggcatgggaagatgccgagaaggactgccgccgccgctccggccacctgaccagcgtccactcaccggaggaacacagcttcattaatagtaggggctctggggagggggccacctgcctggagggtgggcaggggtggcacttgtagcccttttgccagggcatcgcatccctcccctggttttcaagacgtcatctttccaaagctgtgttcattaacgcaagccctgactgcttcttaatgcatgaaatctgtcaattcacttgttaattcatacattcacttcattcattcattcaccaaatatttactgagcacctgctatatgccaggcaccattccaggaatattgacacagcacagcagcaatcaaggctgactttgctttgtccccagggagtgaccatttcttggggaggatatagacaaacaagtaaatatctaagtaaataagtctatactgtaattc

SEQ ID NO: 13459 - DNA, 545 bp, Homo sapiens
  source 1..545: mol_type = unassigned DNA
agggctgtgaccgcggctggcataagttccagggccactgttaccgctattttgcccaccggagggcatgggaagatgccgagaaggactgccgccgccgctccggccacctgaccagcgtccactcaccggaggaacacagcttcattaatagctttgggcatgaaaacacgtggatcggcctgaacgacaggatcgtggagagagatttccagtggacggacaacaccgggctgcaatttgagaactggcgagagaaccagccggacaatttcttcgcgggtggcgaggactgtgtggtgatggtggcgcatgaaagcgggcgctggaacgatgtcccctgcaactacaacctaccctatgtctgcaagaagggcacagccagacgttcacatcggatgcggcgacaccaccaccaccaccaacaccaccaccagcatcaccaccacaaatcccgcaaggagcgcagaaaacacaagaaacacccaacggaggactgggagaaggacgaagggaatttctgctgaagaaccagaaaaaagaaa

SEQ ID NO: 13460 - DNA, 568 bp, Homo sapiens
  source 1..568: mol_type = unassigned DNA
ggaacacagcttcattaatagctttgggcatgaaaacacgtggatcggcctgaacgacaggatcgtggagagagatttccagtggacggacaacaccgggctgcaatttgagaactggcgagagaaccagccggacaatttcttcgcgggtggcgaggactgtgtggtgatggtggcgcatgaaagcgggcgctggaacgatgtcccctgcaactacaacctaccctatgtctgcaagaagggcacagtgctctgtggtccccctccggcagtggagaatgcctcactcatcggtgcccgcaaggccaagtacaatgtccatgccactgtaaggtaccagtgcaatgaaggatttgcccagcaccatgtggccaccattcgatgccggagcaatggcaagtgggacaggccccaaattgtctgcaccaaacgtaagtagcttctcccagagatctcaacataggtttttggtatttctagtttccaagtaagacatcctatttctccacacattgatctggcttaatgtctgcctgataatacagccttgcagataagtgagaactta

SEQ ID NO: 13461 - DNA, 4687 bp, Homo sapiens
  source 1..4687: mol_type = unassigned DNA
agagcagcgacagagccttcctcaaacctgtagtgactgccacactttgcaaggacaccgtagagggggcatgtccgcgctccaacttcctcccgacgcagcctctgattggctcctgggcttataagaaacgcgtgaatgagcagctgccgcgggcagaaagttgccggaggtctccgggtggtatcgccctttcctctttgccagcccgctggcgagccgagccagggcaagatgaggtcgtcctgtgtcctgctcaccgccctggtggcgctggccgcctattacgtctacatcccgctgcctggctccgtgtccgacccctggaagctgatgctgctggacgccactttccggggtgcacagcaagtgagtaacctgatccactacctgggactgagccatcacctgctggcactgaattttatcattgtttcttttggcaaaaaaagcgcgtggtcttctgcccaagtgaaggtgaccgacacagactttgatggtgtggaagtcagagtgtttgaaggccctccgaagcccgaagagccactgaaacgcagcgtcgtttatatccacggaggaggctgggccttggcaagtgcaaaaatcaggtattatgatgagctgtgtacagcaatggctgaggaattgaatgctgtcattgtttccattgaatacaggctagttccaaaggtttattttcctgagcaaattcatgatgttgtacgggccacaaagtatttcctgaagccagaagtcttacagaagtatatggttgatccaggcagaatttgcatttctggtgacagtgctggtggaaatctggctgctgcccttggacaacagtttactcaagatgccagcctaaaaaataagctcaaactacaagctttaatttatccagttcttcaagctttagattttaacacaccatcttatcagcaaaatgtgaacaccccaatcctgccccgctatgtcatggtgaagtattgggtggactacttcaaaggcaactatgactttgtgcaggcaatgatcgttaacaatcacacttcacttgatgtggaagaggctgctgctgtcagggcccgtctaaactggacatccctcttgcctgcatccttcacaaagaactacaagcctgttgtacagaccacaggcaatgccaggattgtccaggagcttcctcagttgctggatgcccgctccgccccactcattgcagaccaggcagtgctgcagctcctcccaaagacctacattctgacgtgtgagcatgatgtcctcagagacgatggcatcatgtatgccaagcgtttggagagtgccggtgtggaggtgaccctggatcactttgaggatggctttcacggatgtatgattttcactagctggcccaccaacttctcagtgggaatccggactaggaatagttacatcaagtggctagatcaaaacctgtaaaggagcaaaacttccagaagcctcgagcccctcttgacctcctacacctgctttggaaagacatgcactttttagttgactaattcttcctcccattcccctctacttgcgagttatggaatttctattccataactgaagtctttatgataacctaatttttaaaaatgaatttgactaacttaagtgcaaaacatgtaaatttggttcccagagtgggccaatctctctgttcttgttatcttagccaactatactgatacctacagctacagaaagcaggactaggaactggaaataactttgggtcctgccttcattaggacgttctttttagaagcagttcttccagctctggatcatagagtgacctttaataagttaaaaaaacgaggactccttaattctgctagagttaaccttgagttcagagcagtattaaatgcgtgcactttcaggtcagtactggggaccaagtaccctctggtcttttgtgaatggatggttttgtttcctatgggaattttggcaaaggttttctggaaagaacaagtttctcaaaggactttcttcctctagaatgttcattttatgagatcgctatctgtaagtccagttggattacaggaatacttgaaagttactttctaccactattagaaaatatgaagtcgcatgcactggatatctatatatcattaggtttttgttgtgtttttggttatgctgtcccccttctccttggggagatatttgggagcaaacttatttagatttagagtaaacttttcattatagagcaagtaaaaacagacaaatgaaacaacctagtgtttcacataaaaatacttctgacataaagtaccaagagcagtgtgaatatacttggcatagtcaaaaaagaaaatacatttaatattagttcaaaattgttaaaaatacctttagaaggtctagtctattattgaaaactcaattttttcacttatatggctttaaaatggagctattttgctacaatataatgtattgtttatttttttaagttatttaatgttaatatacatagctagacttaaggtttttcagaaagatgtccataataaatattaaaaacaatggtattttttaaaaaactgccttagggttttaaaaccttccctacagttataaccacgtgtaattttgtggaaatgatataacagctattaatactactataacataggcataaatattttcgtgtttatatgcatatacaagttaaaataattagaaactatgactgcgcctagtaaagtcatctaggtttatagttcagtagcttaggcaaggcacacactgctcatctccgctttttagggtcagaggaacacaagctcatgttctgagtgaagggcgtacactggcacctggtgttgcctagatcccccatctcctccttccagccaggtctggaagtttcaacagcccaagcttaacttcatgtaaagtcttcactgccagtgggaacatctttgacacaacaagacactccaattgtgatttgagttgaggatctctgcctgccttcctgccgtccttccttcttccccgatccatgctacttttaggggctgcggagagcagcagcagagctgagtaatgatacagggcaccacggagagaaagtagaaccatttcactcctgggaagatggggtatttcccacttccagcaacgaaataacaaatgaaaagttgcatacttattgatgtattgtatgagccagtagcattttatgtacaaaacagaagtcaatgcaacagtatgtatgtgtgcctgtgtgtgtataaaaataaccattgaagctaacttgctaatgtacttaggcaagccacttcccatctctgggcctcgtctttcctccctctaaaatcaaagagctgaattatgtgatccttgaggtctcttccacttataataccaactgtcttgtcagactggcaaattatattggcctctccttatgtggtggtttttttggtaggtcatagttccttatacacagacacctgcatcatcgaaggtctttttttcctaaaaaaaaaaaatgggattttagttcttattctgtgataactatcctcctcatataatactattctttttgacaccatttgaaggaaccaatatttggaccttattttgaggttgtctgtctcgaagaaaaagaaaataaaatgtataggcagggttccttcaattggcattttccccagaattgtgagccaaagcctatagtaattgcagacagcaaatgattccggatctctaaaaggctctctcagatgaaaagggagtaaaggaaaaaagaggtcaaccactgtttctgataatgtacttgagtttcattgttcttttagtttgtattcttataaaaaatgtttacactctgcagattgattttttttttttagtactgtggctttcttttcctattttatgaaaaaaatgataatctttttgtaaaattgtctgtgaaatataaacattaatatataaagaaaaaccttgaagtgctgtatagtgaagtataaattaatgttttattgatttgtgaagaatttaagactattatataattatcttggtggatctattttatgcatgaccttttaacctttgactttgcttatttcccactacgaaggggaaggtagattttatgaatgattttaatagcaaatatattttataaagtgaaaatccagtgtggaggtagcaaagcatctatctattctgaatcatgtttggaaataaaattgctccatctgggaatgtgctttcattttcccgtctcattttctgtttcccatttgaaaacagtgttctcttctcttctttctgtatgccaaattgccagccacaattctttcccaatcttctgcccagtggagtactccagctgtctttcctttagagaggtggttcagtggcctccttgatgacatttgtttcatgtctggatacagtatgtgttgccctcctttggactggctagaatattcataaaagccaggcaggccctgggactattttgggaccttcaatacacatgttaggaaaaggatgatcataatgccaagagtttgagctgaattgtttcagccaaagcatcactatcactgaaggcaggttctcaaactgaccttgtcattacaaataaatctaatttcacacttga

SEQ ID NO: 13462 - DNA, 587 bp, Homo sapiens
  source 1..587: mol_type = unassigned DNA
ctatttccagatttaaaagaaccagtttccatctaaactttaaatgtcccccaaaattggagaaggccttaaatgaatacaacttttgtttttacagatacaggctagttccaaaggtttattttcctgagcaaattcatgatgttgtacgggccacaaagtatttcctgaagccagaagtcttacagaagtatatggttgatccaggcagaatttgcatttctggtgacagtgctggtggaaatctggctgctgcccttggacaacagtttactcaagatgccagcctaaaaaataagctcaaactacaagctttaatttatccagttcttcaagctttagattttaacacaccatcttatcagcaaaatgtgaacaccccaatcctgccccgctatgtcatggtgaagtattgggtggactacttcaaaggcaactatgactttgtgcaggcaatgatcgttaacaatcacacttcacttgatgtggaagaggctgctgctgtcagggcccgtctaaactggacatccctcttgcctgcatccttcacaaagaactacaagcctgttgtacagaccacaggcaat

SEQ ID NO: 13463 - DNA, 921 bp, Homo sapiens
  source 1..921: mol_type = unassigned DNA
ccggaggtctccgggtggtatcgccctttcctctttgccagcccgctggcgagccgagccagggcaagatgaggtcgtcctgtgtcctgctcaccgccctggtggcgctggccgcctattacgtctacatcccgctgcctggctccgtgtccgacccctggaagctgatgctgctggacgccactttccggggtgcacagcaagtgagtaacctgatccactacctgggactgagccatcacctgctggcactgaattttatcattgtttcttttggcaaaaaaagcgcgtggtcttctgcccaagtgaaggtgaccgacacagactttgatggtgtggaagtcagagtgtttgaaggccctccgaagcccgaagagccactgaaacgcagcgtcgtttatatccacggaggaggctgggccttggcaagtgcaagtgcgtcctggtcaccttcagatgaaatcaggtattatgatgagctgtgtacagcaatggctgaggaattgaatgctgtcattgtttccattgaatacaggctagttccaaaggtttattttcctgagcaaattcatgatgttgtacgggccacaaagtatttcctgaagccagaagtcttacagaagtatatggttgatccaggcagaatttgcatttctggtgacagtgctggtggaaatctggctgctgcccttggacaacagtttactcaagatgccagcctaaaaaataagctcaaactacaagctttaatttatccagttcttcaagctttagattttaacacaccatcttatcagcaaaatgtgaacaccccaatcctgccccgctatgtcatggtgaagtattgggtggactacttcaaaggcaactatgactttgtgcaggcaatgatcgttaacaatcacacttcacttgatgtgg

SEQ ID NO: 13464 - DNA, 602 bp, Homo sapiens
  source 1..602: mol_type = unassigned DNA
gattggctcctgggcttataagaaacgcgtgaatgagcagctgccgcgggcagaaagttgccggaggtctccgggtggtatcgccctttcctctttgccagcccgctggcgagccgagccagggcaagatgaggtcgtcctgtgtcctgctcaccgccctggtggcgctggccgcctattacgtctacatcccgctgcctggctccgtgtccgacccctggaagctgatgctgctggacgccactttccggggtgcacagcaagtgaaatcaggtattatgatgagctgtgtacagcaatggctgaggaattgaatgctgtcattgtttccattgaatacaggctagttccaaaggtttattttcctgagcaaattcatgatgttgtacgggccacaaagtatttcctgaagccagaagtcttacagaagtatatggttgatccaggcagaatttgcatttctggtgacagtgctggtggaaatctggctgctgcccttggacaacagtttactcaagatgccagcctaaaaaataagctcaaactacaagctttaatttatccagttcttcaagctttagattttaacacaccatcttatc

SEQ ID NO: 13465 - DNA, 4315 bp, Homo sapiens
  source 1..4315: mol_type = unassigned DNA
agagcagcgacagagccttcctcaaacctgtagtgactgccacactttgcaaggacaccgtagagggggcatgtccgcgctccaacttcctcccgacgcagcctctgattggctcctgggcttataagaaacgcgtgaatgagcagctgccgcgggcagaaagttgccggaggtctccgggtggtatcgccctttcctctttgccagcccgctggcgagccgagccagggcaagatgaggtcgtcctgtgtcctgctcaccgccctggtggcgctggccgcctattacgtctacatcccgctgcctggctccgtgtccgacccctggaagctgatgctgctggacgccactttccggggtgcacagcaagtgagtaacctgatccactacctgggactgagccatcacctgctggcactgaattttatcattgtttcttttggcaaaaaaagcgcgtggtcttctgcccaagtgaaggtgaccgacacagactttgatggtgtggaagtcagagtgtttgaaggccctccgaagcccgaagagccactgaaacgcagcgtcgtttatatccacggaggaggctgggccttggcaagtgcaagtgcgtcctggtcaccttcagatgaaatcaggtattatgatgagctgtgtacagcaatggctgaggaattgaatgctgtcattgtttccattgaatacaggctagttccaaaggtttattttcctgagcaaattcatgatgttgtacgggccacaaagtatttcctgaagccagaagtcttacagaagtatatggttgatccaggcagaatttgcatttctggtgacagtgctggtggaaatctggctgctgcccttggacaacagtttactcaagatgccagcctaaaaaataagctcaaactacaagctttaatttatccagttcttcaagctttagattttaacacaccatcttatcagcaaaatgtgaacaccccaatcctgccccgctatgtcatggtgaagtattgggtggactacttcaaaggcaactatgactttgtgcaggcaatgatcgttaacaatcacacttcacttgatgtggaagaggctgctgctgtcagggcccgtctaaactggacatccctcttgcctgcatccttcacaaagaactacaagcctgttgtacagaccacaggcaatgccaggattgtccaggagcttcctcagttgctggatgcccgctccgccccactcattgcagaccaggcagtgctgcagctcctcccaaagacctacattctgacgtgtgagcatgatgtcctcagagacgatggcatcatgtatgccaagcgtttggagagtgccggtgtggaggtgaccctggatcactttgaggatggctttcacggatgtatgattttcactagctggcccaccaacttctcagtgggaatccggactaggaatagttacatcaagtggctagatcaaaacctgtaaaggagcaaaacttccagaagcctcgagcccctcttgacctcctacacctgctttggaaagacatgcactttttagttgactaattcttcctcccattcccctctacttgcgagttatggaatttctattccataactgaagtctttatgataacctaatttttaaaaatgaatttgactaacttaagtgcaaaacatgtaaatttggttcccagagtgggccaatctctctgttcttgttatcttagccaactatactgatacctacagctacagaaagcaggactaggaactggaaataactttgggtcctgccttcattaggacgttctttttagaagcagttcttccagctctggatcatagagtgacctttaataagttaaaaaaacgaggactccttaattctgctagagttaaccttgagttcagagcagtattaaatgcgtgcactttcaggtcagtactggggaccaagtaccctctggtcttttgtgaatggatggttttgtttcctatgggaattttggcaaaggttttctggaaagaacaagtttctcaaaggactttcttcctctagaatgttcattttatgagatcgctatctgtaagtccagttggattacaggaatacttgaaagttactttctaccactattagaaaatatgaagtcgcatgcactggatatctatatatcattaggtttttgttgtgtttttggttatgctgtcccccttctccttggggagatatttgggagcaaacttatttagatttagagtaaacttttcattatagagcaagtaaaaacagacaaatgaaacaacctagtgtttcacataaaaatacttctgacataaagtaccaagagcagtgtgaatatacttggcatagtcaaaaaagaaaatacatttaatattagttcaaaattgttaaaaatacctttagaaggtctagtctattattgaaaactcaattttttcacttatatggctttaaaatggagctattttgctacaatataatgtattgtttatttttttaagttatttaatgttaatatacatagctagacttaaggtttttcagaaagatgtccataataaatattaaaaacaatggtattttttaaaaaactgccttagggttttaaaaccttccctacagttataaccacgtgtaattttgtggaaatgatataacagctattaatactactataacataggcataaatattttcgtgtttatatgcatatacaagttaaaataattagaaactatgactgcgcctagtaaagtcatctaggtttatagttcagtagcttaggcaaggcacacactgctcatctccgctttttagggtcagaggaacacaagctcatgttctgagtgaagggcgtacactggcacctggtgttgcctagatcccccatctcctccttccagccaggtctggaagtttcaacagcccaagcttaacttcatgtaaagtcttcactgccagtgggaacatctttgacacaacaagacactccaattgtgatttgagttgaggatctctgcctgccttcctgccgtccttccttcttccccgatccatgctacttttaggggctgcggagagcagcagcagagctgagtaatgatacagggcaccacggagagaaagtagaaccatttcactcctgggaagatggggtatttcccacttccagcaacgaaataacaaatgaaaagttgcatacttattgatgtattgtatgagccagtagcattttatgtacaaaacagaagtcaatgcaacagtatgtatgtgtgcctgtgtgtgtataaaaataaccattgaagctaacttgctaatgtacttaggcaagccacttcccatctctgggcctcgtctttcctccctctaaaatcaaagagctgaattatgtgatccttgaggtctcttccacttataataccaactgtcttgtcagactggcaaattatattggcctctccttatgtggtggtttttttggtaggtcatagttccttatacacagacacctgcatcatcgaaggtctttttttcctaaaaaaaaaaaatgggattttagttcttattctgtgataactatcctcctcatataatactattctttttgacaccatttgaaggaaccaatatttggaccttattttgaggttgtctgtctcgaagaaaaagaaaataaaatgtataggcagggttccttcaattggcattttccccagaattgtgagccaaagcctatagtaattgcagacagcaaatgattccggatctctaaaaggctctctcagatgaaaagggagtaaaggaaaaaagaggtcaaccactgtttctgataatgtacttgagtttcattgttcttttagtttgtattcttataaaaaatgtttacactctgcagattgattttttttttttagtactgtggctttcttttcctattttatgaaaaaaatgataatctttttgtaaaattgtctgtgaaatataaacattaatatataaagaaaaaccttgaagtgctgtatagtgaagtataaattaatgttttattgatttgtgaagaatttaagactattatataattatcttggtggatctattttatgcatgaccttttaacctttgactttgcttatttcccactacgaaggggaaggtagattttatgaatgattttaatagcaaatatattttataaagtgaaaatccagtgtggaggtagcaaagcatctatctattctgaatcatgtttggaaataaaattgctccatctgggaatgtgctttca

SEQ ID NO: 13466 - DNA, 4062 bp, Homo sapiens
  source 1..4062: mol_type = unassigned DNA
agagcagcgacagagccttcctcaaacctgtagtgactgccacactttgcaaggacaccgtagagggggcatgtccgcgctccaacttcctcccgacgcagcctctgattggctcctgggcttataagaaacgcgtgaatgagcagctgccgcgggcagaaagttgccggaggtctccgggtggtatcgccctttcctctttgccagcccgctggcgagccgagccagggcaagatgaggtcgtcctgtgtcctgctcaccgccctggtggcgctggccgcctattacgtctacatcccgctgcctggctccgtgtccgacccctggaagctgatgctgctggacgccactttccggggtgcacagcaagtgaaatcaggtattatgatgagctgtgtacagcaatggctgaggaattgaatgctgtcattgtttccattgaatacaggctagttccaaaggtttattttcctgagcaaattcatgatgttgtacgggccacaaagtatttcctgaagccagaagtcttacagaagtatatggttgatccaggcagaatttgcatttctggtgacagtgctggtggaaatctggctgctgcccttggacaacagtttactcaagatgccagcctaaaaaataagctcaaactacaagctttaatttatccagttcttcaagctttagattttaacacaccatcttatcagcaaaatgtgaacaccccaatcctgccccgctatgtcatggtgaagtattgggtggactacttcaaaggcaactatgactttgtgcaggcaatgatcgttaacaatcacacttcacttgatgtggaagaggctgctgctgtcagggcccgtctaaactggacatccctcttgcctgcatccttcacaaagaactacaagcctgttgtacagaccacaggcaatgccaggattgtccaggagcttcctcagttgctggatgcccgctccgccccactcattgcagaccaggcagtgctgcagctcctcccaaagacctacattctgacgtgtgagcatgatgtcctcagagacgatggcatcatgtatgccaagcgtttggagagtgccggtgtggaggtgaccctggatcactttgaggatggctttcacggatgtatgattttcactagctggcccaccaacttctcagtgggaatccggactaggaatagttacatcaagtggctagatcaaaacctgtaaaggagcaaaacttccagaagcctcgagcccctcttgacctcctacacctgctttggaaagacatgcactttttagttgactaattcttcctcccattcccctctacttgcgagttatggaatttctattccataactgaagtctttatgataacctaatttttaaaaatgaatttgactaacttaagtgcaaaacatgtaaatttggttcccagagtgggccaatctctctgttcttgttatcttagccaactatactgatacctacagctacagaaagcaggactaggaactggaaataactttgggtcctgccttcattaggacgttctttttagaagcagttcttccagctctggatcatagagtgacctttaataagttaaaaaaacgaggactccttaattctgctagagttaaccttgagttcagagcagtattaaatgcgtgcactttcaggtcagtactggggaccaagtaccctctggtcttttgtgaatggatggttttgtttcctatgggaattttggcaaaggttttctggaaagaacaagtttctcaaaggactttcttcctctagaatgttcattttatgagatcgctatctgtaagtccagttggattacaggaatacttgaaagttactttctaccactattagaaaatatgaagtcgcatgcactggatatctatatatcattaggtttttgttgtgtttttggttatgctgtcccccttctccttggggagatatttgggagcaaacttatttagatttagagtaaacttttcattatagagcaagtaaaaacagacaaatgaaacaacctagtgtttcacataaaaatacttctgacataaagtaccaagagcagtgtgaatatacttggcatagtcaaaaaagaaaatacatttaatattagttcaaaattgttaaaaatacctttagaaggtctagtctattattgaaaactcaattttttcacttatatggctttaaaatggagctattttgctacaatataatgtattgtttatttttttaagttatttaatgttaatatacatagctagacttaaggtttttcagaaagatgtccataataaatattaaaaacaatggtattttttaaaaaactgccttagggttttaaaaccttccctacagttataaccacgtgtaattttgtggaaatgatataacagctattaatactactataacataggcataaatattttcgtgtttatatgcatatacaagttaaaataattagaaactatgactgcgcctagtaaagtcatctaggtttatagttcagtagcttaggcaaggcacacactgctcatctccgctttttagggtcagaggaacacaagctcatgttctgagtgaagggcgtacactggcacctggtgttgcctagatcccccatctcctccttccagccaggtctggaagtttcaacagcccaagcttaacttcatgtaaagtcttcactgccagtgggaacatctttgacacaacaagacactccaattgtgatttgagttgaggatctctgcctgccttcctgccgtccttccttcttccccgatccatgctacttttaggggctgcggagagcagcagcagagctgagtaatgatacagggcaccacggagagaaagtagaaccatttcactcctgggaagatggggtatttcccacttccagcaacgaaataacaaatgaaaagttgcatacttattgatgtattgtatgagccagtagcattttatgtacaaaacagaagtcaatgcaacagtatgtatgtgtgcctgtgtgtgtataaaaataaccattgaagctaacttgctaatgtacttaggcaagccacttcccatctctgggcctcgtctttcctccctctaaaatcaaagagctgaattatgtgatccttgaggtctcttccacttataataccaactgtcttgtcagactggcaaattatattggcctctccttatgtggtggtttttttggtaggtcatagttccttatacacagacacctgcatcatcgaaggtctttttttcctaaaaaaaaaaaatgggattttagttcttattctgtgataactatcctcctcatataatactattctttttgacaccatttgaaggaaccaatatttggaccttattttgaggttgtctgtctcgaagaaaaagaaaataaaatgtataggcagggttccttcaattggcattttccccagaattgtgagccaaagcctatagtaattgcagacagcaaatgattccggatctctaaaaggctctctcagatgaaaagggagtaaaggaaaaaagaggtcaaccactgtttctgataatgtacttgagtttcattgttcttttagtttgtattcttataaaaaatgtttacactctgcagattgattttttttttttagtactgtggctttcttttcctattttatgaaaaaaatgataatctttttgtaaaattgtctgtgaaatataaacattaatatataaagaaaaaccttgaagtgctgtatagtgaagtataaattaatgttttattgatttgtgaagaatttaagactattatataattatcttggtggatctattttatgcatgaccttttaacctttgactttgcttatttcccactacgaaggggaaggtagattttatgaatgattttaatagcaaatatattttataaagtgaaaatccagtgtggaggtagcaaagcatctatctattctgaatcatgtttggaaataaaattgctccatctgggaatgtgctttca

SEQ ID NO: 13467 - DNA, 1959 bp, Homo sapiens
  source 1..1959: mol_type = unassigned DNA
aatccaactgccagatgagaacattggacagtgggatcggaacctttccactcccagactcgggaaatcgctcgacaggacgctacctatgccagccagactccccagaggacgctgagcctctcctgcctctccagtcagccctttctgcagtttcttccatgagagcccaaacccttgaacgtgaagtgccttcctccacagacggccagcgccctgcagatagcgccattgttcattccacatccgaccccatcatgaccgccagagggatgaggcctcttcagagccgcctccccaaaccagcttcctcaggaaaagtcagttcccaaaagcagaatgaagcagagccaaggcctcagacatgctcatcattcggatatgctgaagacccaatggcaagccagccgcttccagactgggggagtgaagttgctgccaccgggacccagaaattgagacaacttgaagaaacaaaagacgatcccgagaatagattatcgaaaatttccctagagtcattcaataaatttaacagcaatactgtgattttattagaaaaagagaagaactctctgaacaaggttgaaggacagaaggaagaaaaagaaaaaaatgaagagacatctttgagtagttcagataggcctggggtagacaacttggaatctttgagtgattctttatatgatagcttctcttcctgtgccagtcaaggttcaaatgatgtataaaggacatctcttcccttagtgagctgggactggagcgcttaagaaatgatgggtggggggtggggggtgcaccgcttgatagagataacaataaactattgcagtaccagagccttccttgtcaaattcacagcaggcaacccaccagagcttatttctctgacagggcaataaagatagactccatttattgtgtttcaagaggattaagcgtaaacacatctatgatacagaatccttaattttgcactttttttgaatatttgtacagaagttgtaaattttttggaagagaaattatatttgtagcaaaaaaagacagcaataaatggaatcagtgccatgctcttgaaataatgtactaagtcttagaagttgatgataatatatattttttaaaatcccaactgaagtttttgtgaagttcgttgtcctggtcctcaaattgtttgtgggtacactctgtaaacctacaacagggcctgccaaaaaatcggagggttcctcctcatctccatctcacaaatctcaatttgatggaaatgttcattttagtgtaatttcagattcgttgccagagattcaggtgatagtaataagtgtcattctgcttctgctgaaaaatgaaaagggtcctgaagtgtggacactgattgggagtgtgacattgtatcagaaatgaccgaattctattcccaataccagtttttccttccagacatttctttagattgtcttttacttagtgcttctctatgatcctgaatattatttgatttttatcttcttgctctttttattaaaatctgggcactctaaaaatgaaaacaaatttctatttgcaatgttcacttttaaaaataaaattaatggtgctacgaagaattctttttaatatccttttttttctacaaagactgtttatatgtaaggataaattctattttaaaggttatgtgtattttttctagatgtgaactatttataattacttatgtacaggagcttgtaaactaggcccaatagaaatatttttaggatctatatggctactttagcacataattgtttctttaaagagtattgtatgatcagtgttatttggttaatttgtgcaatttgttttattttatcttaaatgaaaattatgtaaaatgtccttgtctttcagactttaaaaaatctttttgtttcctttctgaataaaagttatatcacatttgca

SEQ ID NO: 13468 - DNA, 7594 bp, Homo sapiens
  source 1..7594: mol_type = unassigned DNA
gcaactacggagccgcagcccagggagcaagtctccgcaaacttgctccgcattcacggcaggacttcccagccgctgtggatgttcaggaaaaccgagtctgttctgttagcgtggcctttgaatgcttcaaaaataaacagaggataaccaaccgcgggaggaaatttttagctggagagagttgtagttcctgtgtctgtctccaggactgtgatatgtgttgactgaagagctaactacaagttcatcgtgaagaataaatgagataagctacctcaagtgcctgtaccaaaatagactcacaatacattgaccctggaaacagacgggggattcttataagtcacaaaagaaaataaataacttcatccatggagggaaagagacagcttgagaaaagggactttggaaaaaggctgtctctagacagcagtcttgtggaatacatggactccaataaatacattgagcatctgctgactcagcttgaggagcaacacaggagtctctggagggagaagttggcagtggcccgactacagcgagaagttgcccaaagaacaagtgagggggccatgcatgagaagctgatacatgaactggaagaggagagacacttacgtcttcaaagcgagaagcggttgcaggaggtgaccctagagtctgaacgcaacagaattcagatgcgtagcttgcagcagcagttctccaggatggaagaaacagtacgaaatctattgcagagtcaaggatctccagagcagaaaaaagaagaaactgttaatataatggtctatcaggaaaagctgtcagaggaagagagaaaacataaggaagctttggaagatcttcacatggtggttgatgaggattcgaggagtgaaagcagcagtacagatgagggaaaagaaaagaccaaattgctattagagagattgaaagctctagaggcagagaattcagcgttggctttggagaatgaaaatcaaagggaacaatatgagcgatgtcttgatgaggtagccaaccaagttgttcaagctctgcttactcaaaaggatctaagagaggaatgtgtgaagttgaaaacaagagtgtttgatttggaacagcagaatcgaacactaagcatcctattccaacagcgagtcagacccacttctgatctgctcctccagaaacttcactcacgtctcttggatctttcatctggagatttgctttcagaggtggaaagaaaccgaagtctgacacagtcacgaactgatgctgaggtgcacgaacaccaactaaatacaaaatcggccttgaaatgccctggcttgggggctgtcatccctggtcatctctgtcctcgaaacagctacagtagcagcagtgaactgtctctttcaagcacctgcagcgagtactccagtggctcctcctacacgtggcacgatgggaagaacctcaggaaaaggcaatcatcacaaaactgggataaaaggctaagtattgattcttcgctcccaagtggctttgctagtcctacaaatgaactacctccaactcgtatcaaggaaagccacattttggaagggctaagaaagctacagaagcgaaaagtgttacttgaacccccatcagtgataaccaaatggggttataaagattgcatgaactcgaatgaaggaatatattctcctggaattaaaagtagcagcctcaaggagtatcccccctgcaaaacagctgacctggggagcccctgcaaggaaccccacaagacatttgtttatgatctagattcccacgttgatgcggacgatgacccttccaccttagcattgctccaagcagttccaaaccagagctgcaggccacatggcagtaaattaacccacagtgtttccgacagtctgtttggctgggagacaaacagaaaacactttctggaaggcacatcctcagtttatcccaaggaaaggcctgaaaagctgacaagttgcgccagcagctgtcccttagagatgaagctgtgcccaagtgtgcagacgcctcaggtacagagggagaggggcccacagggccaaggccatggccgcatggctctcaacctccagctttcagacactgatgacaatgaaacgtttgatgagctgcacatagagagcagtgatgagaaaagtccttcagacgtgtcattggctgccgacaccgataagtccgtggagaacctggatgtccttgtggggtttggaaaatctctatgtgggtctcctgaagaggaggaaaaacaagtgcccatcccttcagagactaggccaaagacttttagtttcattaagcagcaaagagttgtaaaaaggacttcttcagaagaatgtgtgactgtgatatttgatgcggaagacggtgagcccattgaattcagctctcaccagactggggttgtcactgttaccagaaatgagatttccatcaattcaactcctgctggacccaaggcagaacatactgagcttttacctcagggaattgcttgtttacagccaagagctgctgcaagagactatactttctttaaaaggtctgaagaggacactgagaaaaacattccaaaagataatgtagataatgttcccagggtgtccactgaatctttcagctccaggacagtgacacaaaatcctcagcagcaaaagctggtcaaaccaacacacaatatatcatgccagagtaattccaggtcttcggcacccatgggcatctatcaaaagcaaaatctgacaaaaatacctcccaggggcaagtcttcacctcagaaatcaaaactaatggagcccgaagccaccacactactcccttcatctggcctggtgactcttgaaaaatcaccagccttagctcctgggaaactctcacgattcatgaagactgagagctcagggcccctctttgaattacgatcagatccacacattccaaaacattccgcccaacttccgcacagctccaggatgcccagcaggagggactgggtccagtgccccaagagtcagactccagggtcacggtcaaggcctgccattgagtctagtgacagtggagagccccccacgagggatgaacactgtggctctgggccggaggcaggggtgaaatccccttcccctccgccccctccaggcaggtccgtctccctgctggccaggcccagctatgactattcaccagcaccttcatccaccaagtccgaaaccagggtccccagtgaaacagcaaggaccccattcaaatccccgctgctgaaaggaatttctgctccagttatttcttctaatccggccacgacagaagtgcagaggaagaaaccttctgtggccttcaaaaagcctatcttcactcaccctatgccctccccagaagcagtcattcaaacccgatgccctgctcatgccccctccagctccttcaccgtaatggctctggggcctccaaaggtctctccgaagagaggtgtccccaaaacctctcctcgccaaacacttgggaccccacaaagggacataggattacagactcccaggatctctccttcaacccatgagccactggaaatgacgtcctccaaaagtgtatctccagggagaaaaggacaattgaatgatagcgcctccacaccccccaagccttccttcttaggggtaaatgagtcaccatcatctcaggtcagcagttcctcatcatcctcatcacccgccaaaagccataacagccctcatggttgtcaaagtgctcatgagaaaggactgaaaactcgccttccagtgggactcaaagtgctcatgaagtctccccagctgctcaggaaaagttccaccgtgccagggaaacatgaaaaagacagtttaaatgaagcctccaaaagttccgtggctgtgaacaagtctaagccagaggactccaagaatccagcaagcatggagatcacagcgggtgaaagaaatgtgaccctaccggattcacaagcacagggcagtttagctgatgggcttcccctggaaacagcactacaagagccattggaaagtagcatccctgggagtgatggaagggatggggtagataatagatccatgagaagatccctttcctccagcaaaccacacctaaaaccagctctgggtatgaatggcgccaaagcccgcagccacagcttcagtacacactcaggagacaagccttctacgccccccatcgaagggtcaggcaaagtccgcactcagatcattaccaataccgccgagagaggcaattctcttacccggcagaactcttccacggaaagctctcccaacaaggccccttctgctcccatgttggagagtctccccagtgttgggaggccctcggggcacccctcctccgggaagggctccctggggagctcaggcagcttcagcagtcagcatgggagcccaagtaagttgcctttgaggatccctccaaagtctgagggactcctcatcccacctggaaaggaagaccagcaggccttcacccagggagagtgccccagtgccaatgtggctgtacttggggaaccaggcagtgaccgccgcagttgcccacccaccccaacagactgccctgaagccctgcagagcccagggaggactcagcatccaagcacttttgaaacaagcagtacatccaagctagaaacttctggaaggcatccagatgcctctgcaaccgcgactgatgctgtgagttcagaagcccccctctcacccacaatcgaagaaaaggtcatgttgtgcattcaggaaaatgtggaaaagggccaagtgcaaacaaagcccacctctgtggaagcaaagcagaagcctgggccttcttttgccagctggtttggttttcggaagagtagacttccagctctgagtagcaggaaaatggacatctccaaaaccaaagtagaaaagaaagatgcaaaagtcttggggtttggaaacagacaactaaaatcagaaagaaaaaaagagaaaaagaagcctgaactacagtgtgagacagaaaatgagcttatcaaggacaccaagtcagcagataatccagatggcggtttacaaagcaaaaataatcggagaacaccacaagacatttacaaccaactgaagattgaaccaaggaatagacacagccctgttgcatgttcaacgaaagacaccttcatgacggaactcttgaacagagttgataagaaagcagctccacagacagaaagtggatcaagtaatgcttcctgcaggaatgtgttaaagggcagttctcagggctcctgtctcatcggcagctctatcagtactcaaggaaaccacaagaaaaacatgaaaatcaaagccgatatggaagtaccaaaagactccctggtaaaagaggcaaatgaaaacttgcaagaggatgaagacgatgcagttgcagattctgtatttcagagccacatcatagaatccaactgccagatgagaacattggacagtgggatcggaacctttccactcccagactcgggaaatcgctcgacaggacgctacctatgccagccagactccccagaggacgctgagcctctcctgcctctccagtcagccctttctgcagtttcttccatgagagcccaaacccttgaacgtgaagtgccttcctccacagacggccagcgccctgcagatagcgccattgttcattccacatccgaccccatcatgaccgccagagggatgaggcctcttcagagccgcctccccaaaccagcttcctcaggaaaagtcagttcccaaaagcagaatgaagcagagccaaggcctcagacatgctcatcattcggatatgctgaagacccaatggcaagccagccgcttccagactgggggagtgaagttgctgccaccgggacccaggacaaggcacccagaatgtgtacgtactctgccagcggtggcagtaatagtgacagtgacctggactatggagataatggttttggagctggaaggggacagttagtgaaagcactgaagagcgctgccccagaaattgagacaacttgaagaaacaaaagacgatcccgagaatagattatcgaaaatttccctagagtcattcaataaatttaacagcaatactgtgattttattagaaaaagagaagaactctctgaacaaggttgaaggacagaaggaagaaaaagaaaaaaatgaagagacatctttgagtagttcagataggcctggggtagacaacttggaatctttgagtgattctttatatgatagcttctcttcctgtgccagtcaaggttcaaatgatgtataaaggacatctcttcccttagtgagctgggactggagcgcttaagaaatgatgggtggggggtggggggtgcaccgcttgatagagataacaataaactattgcagtaccagagccttccttgtcaaattcacagcaggcaacccaccagagcttatttctctgacagggcaataaagatagactccatttattgtgtttcaagaggattaagcgtaaacacatctatgatacagaatccttaattttgcactttttttgaatatttgtacagaagttgtaaattttttggaagagaaattatatttgtagcaaaaaaagacagcaataaatggaatcagtgccatgctcttgaaataatgtactaagtcttagaagttgatgataatatatattttttaaaatcccaactgaagtttttgtgaagttcgttgtcctggtcctcaaattgtttgtgggtacactctgtaaacctacaacagggcctgccaaaaaatcggagggttcctcctcatctccatctcacaaatctcaatttgatggaaatgttcattttagtgtaatttcagattcgttgccagagattcaggtgatagtaataagtgtcattctgcttctgctgaaaaatgaaaagggtcctgaagtgtggacactgattgggagtgtgacattgtatcagaaatgaccgaattctattcccaataccagtttttccttccagacatttctttagattgtcttttacttagtgcttctctatgatcctgaatattatttgatttttatcttcttgctctttttattaaaatctgggcactctaaaaatgaaaacaaatttctatttgcaatgttcacttttaaaaataaaattaatggtgctacgaagaattctttttaatatccttttttttctacaaagactgtttatatgtaaggataaattctattttaaaggttatgtgtattttttctagatgtgaactatttataattacttatgtacaggagcttgtaaactaggcccaatagaaatatttttaggatctatatggctactttagcacataattgtttctttaaagagtattgtatgatcagtgttatttggttaatttgtgcaatttgttttattttatcttaaatgaaaattatgtaaaatgtccttgtctttcagactttaaaaaatctttttgtttcctttctgaataaaagttatatcacatttgca

SEQ ID NO: 13469 - DNA, 1815 bp, Homo sapiens
  source 1..1815: mol_type = unassigned DNA
aatccaactgccagatgagaacattggacagtgggatcggaacctttccactcccagactcgggaaatcgctcgacaggacgctacctatgccagccagactccccagaggacgctgagcctctcctgcctctccagtcagccctttctgcagtttcttccatgagagcccaaacccttgaacgtgaagtgccttcctccacagacggccagcgccctgcagatagcgccattgttcattccacatccgaccccatcatgaccgccagagggatgaggcctcttcagagccgcctccccaaaccagcttcctcagaaattgagacaacttgaagaaacaaaagacgatcccgagaatagattatcgaaaatttccctagagtcattcaataaatttaacagcaatactgtgattttattagaaaaagagaagaactctctgaacaaggttgaaggacagaaggaagaaaaagaaaaaaatgaagagacatctttgagtagttcagataggcctggggtagacaacttggaatctttgagtgattctttatatgatagcttctcttcctgtgccagtcaaggttcaaatgatgtataaaggacatctcttcccttagtgagctgggactggagcgcttaagaaatgatgggtggggggtggggggtgcaccgcttgatagagataacaataaactattgcagtaccagagccttccttgtcaaattcacagcaggcaacccaccagagcttatttctctgacagggcaataaagatagactccatttattgtgtttcaagaggattaagcgtaaacacatctatgatacagaatccttaattttgcactttttttgaatatttgtacagaagttgtaaattttttggaagagaaattatatttgtagcaaaaaaagacagcaataaatggaatcagtgccatgctcttgaaataatgtactaagtcttagaagttgatgataatatatattttttaaaatcccaactgaagtttttgtgaagttcgttgtcctggtcctcaaattgtttgtgggtacactctgtaaacctacaacagggcctgccaaaaaatcggagggttcctcctcatctccatctcacaaatctcaatttgatggaaatgttcattttagtgtaatttcagattcgttgccagagattcaggtgatagtaataagtgtcattctgcttctgctgaaaaatgaaaagggtcctgaagtgtggacactgattgggagtgtgacattgtatcagaaatgaccgaattctattcccaataccagtttttccttccagacatttctttagattgtcttttacttagtgcttctctatgatcctgaatattatttgatttttatcttcttgctctttttattaaaatctgggcactctaaaaatgaaaacaaatttctatttgcaatgttcacttttaaaaataaaattaatggtgctacgaagaattctttttaatatccttttttttctacaaagactgtttatatgtaaggataaattctattttaaaggttatgtgtattttttctagatgtgaactatttataattacttatgtacaggagcttgtaaactaggcccaatagaaatatttttaggatctatatggctactttagcacataattgtttctttaaagagtattgtatgatcagtgttatttggttaatttgtgcaatttgttttattttatcttaaatgaaaattatgtaaaatgtccttgtctttcagactttaaaaaatctttttgtttcctttctgaataaaagttatatcac

SEQ ID NO: 13470 - DNA, 2390 bp, Homo sapiens
  source 1..2390: mol_type = unassigned DNA
gaagcaactacggagccgcagcccagggagcaagtctccgcaaacttgctccgcattcacggcaggacttcccagccgctgtggatgttcaggaaaaccgagtctgttctgttagcgtggcctttgaatgcttcaaaaataaacagaggataaccaaccgcgggaggaaatttttagctggagagagttgtagttcctgtgtctgtctccaggactgtgatatgtgttgactgaagagctaactacaagttcatcgtgaagaataaatgagataagctacctcaagtgcctgtaccaaaatagactcacaatacattgaccctggaaacagacgggggattcttataagtcacaaaagaaaataaataacttcatccatggagggaaagagacagcttgagaaaagggactttggaaaaaggctgtctctagacagcagtcttgtggaatacatggactccaataaatacattgagcatctgctgactcagcttgaggagcaacacaggagtctctggagggagaagttggcagtggcccgactacagcgagaagttgcccaaagaacaagtgagggggccatgcatgagaagctgatacatgaactggaagaggagagacacttacgtcttcaaagcgagaagcggttgcaggaggtgaccctagagtctgaacgcaacagaattcagatgcgtagcttgcagcagcagttctccaggatggaagaaacagtacgaaatctattgcagagtcaaggatctccagagcagaaaaaagaagaaactgttaatataatggtctatcaggaaaagctgtcagaggaagagagaaaacataaggaagctttggaagatcttcacatggtggttgatgaggattcgaggagtgaaagcagcagtacagatgagggaaaagaaaagaccaaattgctattagagagattgaaagctctagaggcagagaattcagcgttggctttggagaatgaaaatcaaagggaacaatatgagcgatgtcttgatgaggtagccaaccaagttgttcaagctctgcttactcaaaaggatctaagagaggaatgtgtgaagttgaaaacaagagtgtttgatttggaacagcagaatcgaacactaagcatcctattccaacagcgagtcagacccacttctgatctgctcctccagaaacttcactcacgtctcttggatctttcatctggagatttgctttcagaggtggaaagaaaccgaagtctgacacagtcacgaactgatgctgaggtgcacgaacaccaactaaatacaaaatcggccttgaaatgccctggcttgggggctgtcatccctggtcatctctgtcctcgaaacagctacagtagcagcagtgaactgtctctttcaagcacctgcagcgagtactccagtggctcctcctacacgtggcacgatgggaagaacctcaggaaaagggtaaaagaggcaaatgaaaacttgcaagaggatgaagacgatgcagttgcagattctgtatttcagagccacatcatagaatccaactgccagatgagaacattggacagtgggatcggaacctttccactcccagactcgggaaatcgctcgacaggacgctacctatgccagccagactccccagaggacgctgagcctctcctgcctctccagtcagccctttctgcagtttcttccatgagagcccaaacccttgaacgtgaagtgccttcctccacagacggccagcgccctgcagatagcgccattgttcattccacatccgaccccatcatgaccgccagagggatgaggcctcttcagagccgcctccccaaaccagcttcctcaggaaaagtcagttcccaaaagcagaatgaagcagagccaaggcctcagacatgctcatcattcggatatgctgaagacccaatggcaagccagccgcttccagactgggggagtgaagttgctgccaccgggacccaggacaaggcacccagaatgtgtacgtactctgccagcggtggcagtaatagtgacagtgacctggactatggagataatggttttggagctggaaggggacagttagtgaaagcactgaagagcgctgccccagaaattgagacaacttgaagaaacaaaagacgatcccgagaatagattatcgaaaatttccctagagtcattcaataaatttaacagcaatactgtgattttattagaaaaagagaagaactctctgaacaaggttgaaggacagaaggaagaaaaagaaaaaaatgaagagacatctttgagtagttcagataggcctggggtagacaacttggaatctttgagtgattctttatatgatagcttctcttcctgtgc

SEQ ID NO: 13471 - DNA, 365 bp, Homo sapiens
  source 1..365: mol_type = unassigned DNA
ccaactgaagattgaaccaaggaatagacacagccctgttgcatgttcaacgaaagacaccttcatgacggaactcttgaacagagttgataagaaagcagctccacagacagaaagtggatcaagtaatgcttcctgcaggaatgtgttaaagggcagttctcagggctcctgtctcatcggcagctctatcagtactcaaggaaaccacaagaaaaacatgaaaatcaaagccgatatggaagtaccaaaagactccctgaatccaactgccagatgagaacattggacagtgggatcggaacctttccactcccagactcgggaaatcgctcgacaggacgctacctatgccagccagactc

SEQ ID NO: 13472 - DNA, 2158 bp, Homo sapiens
  source 1..2158: mol_type = unassigned DNA
gacagcttgagaaaagggactttggaaaaaggctgtctctagacagcagtcttgtggaatacatggactccaataaatacattgagcatctgctgactcagcttgaggagcaacacaggagtctctggagggagaagttggcagtggcccgactacagcgagaagttgcccaaagaacaagtgagggggccatgcatgagaagctgatacatgaactggaagaggagagacacttacgtcttcaaagcgagaagcggttgcaggaggtgaccctagagtctgaacgcaacagaattcagatgcgtagcttgcagcagcagttctccagaaggaggaaaatgtaacaagatgagaaaagctgtcaattgacctttggacaagcatcagcacagagctcttctcctcttctgcacttgttcccatgtctgactgttcgtcaactttgacctgtctcagaggctggctctcctgagtgccttgctcctcctgatgaatacagagggcaattttctgttgatttggaattgctatttccacatcatcagcaatatttctgcctgagacttttcataaaaattggggcctctcatctgctgctctgtgtgaatctaccagaagttgaagatggtaaagcaacattggttcaaggataaattttcttcaaattacaacagatggaagaaaagattttaaatgacctcttttaaaatgcctggataacataatatggatcatattttggtgtcagaagtttgtatcttagtgatctagcatgtaagctctcccttaagcaatgcaaaggaaagccaaaaccaattatgtagcaaactggaaagaaaggctgttttcggctccttgggcaaatactaacttactgaaagctgaacattactttattgttttgtatttctctttctgcctaataaatgatgaaatggtcacatgtttcttcttaaatttttttaaagaggtatatgtttttgagtagacaacgtgaaagtcatgttgcctattattcatccctgtagagaaaacagtattaacacagagtatagttccaatttcattgcaaagagcactatcttatttaatgggttgtccaggacctggtgtcagtgtacctctaagtagcttaataactctggttaagtaatttgacccttttgggtctcaatttgctcatctgtaacatgagtaaattcaattgcattatagttttataatgctttttatgctttttaaaaggccctgcattagaaatgaaatgtacttacttattgggtgaagtaataatttcacatttgtaaccaggccttcttgaagattctaacaatgagttttatgttgaggtcttggaggagactgtcttattgtccatgctgtaatcacagggaggctctgtgggactgggttttggccatgtctattttggttacttgactctggagaagttgagattagaaaactgccgagcctagatgaaaaatttctgttgggaacagccaaaattaaatactggggaacttggctggcaaaaggaagttaagatactctgctgtgaacatataaccaagattgctcttggctctgatgttgtccactttaggatttatttgaactggtttggtaaaaagtctaaacagagataactttatgacaaccagaattgttttcactttttaacaatttctctgaagaaagagccatcaataaaaataccaatgatttagtctctcctctaaatatgttttaataacatattataacttctgatacattactgttcctactccaacacattttttcctttaagaaaatgtgtgagatacagaataatgttttaaaactgaaaactgaattgatttctactttcaataataaatgttttattttttggtgtggtttatagaaaatccacttttcttacgtttatagtttagataagtttggacaatcattgaccctcatgtaactaccaccacaattaaaatacagaatattttcatgtcctggaccagttctctccctccctctttgttctcatttccctcccaagcccctggtaactactagtcttatttctctccttatagttttgccttttccagaaaggcttataaatgacgaagtcataaagtatggaactttttggtctggc

SEQ ID NO: 13473 - DNA, 388 bp, Homo sapiens
  source 1..388: mol_type = unassigned DNA
caggctttgcagagtttagagcatattctacccaactggccccagatggaaaatactgtcttgaaattggatggctttttaagtgtagctctccacagcctgctcaaagaaaaaaaaaaatgaccctggaaacagacgggggattcttataagtcacaaaagaaaataaataacttcatccatggagggaaagagacagcttgagaaaagggactttggaaaaaggctgtctctagacagcagtcttgtggaatacatggactccaataaatacattgagcatctgctgactcagcttgaggagcaacacaggagtctctggagggagaagttggcagtggcccgactacagcgagaagttgcccaaagaacaagtgagggggccatg

SEQ ID NO: 13474 - DNA, 7593 bp, Homo sapiens
  source 1..7593: mol_type = unassigned DNA
gcaactacggagccgcagcccagggagcaagtctccgcaaacttgctccgcattcacggcaggacttcccagccgctgtggatgttcaggaaaaccgagtctgttctgttagcgtggcctttgaatgcttcaaaaataaacagaggataaccaaccgcgggaggaaatttttagctggagagagttgtagttcctgtgtctgtctccaggactgtgatatgtgttgactgaagagctaactacaagttcatcgtgaagaataaatgagataagctacctcaagtgcctgtaccaaaatagactcacaatacattgaccctggaaacagacgggggattcttataagtcacaaaagaaaataaataacttcatccatggagggaaagagacagcttgagaaaagggactttggaaaaaggctgtctctagacagcagtcttgtggaatgcatggactccaataaatacattgagcatctgctgactcagcttgaggagcaacacaggagtctctggagggagaagttggcagtggcccgactacagcgagaagttgcccaaagaacaagtgagggggccatgcatgagaagctgatacatgaactggaagaggagagacacttacgtcttcaaagcgagaagcggttgcaggaggtgaccctagagtctgaacgcaacagaattcagatgcgtagcttgcagcagcagttctccaggatggaagaaacagtacgaaatctattgcagagtcaaggatctccagagcagaaaaaagaagaaactgttaatataatggtctatcaggaaaagctgtcagaggaagagagaaaacataaggaagctttggaagatcttcacatggtggttgatgaggattcgaggagtgaaagcagcagtacagatgagggaaaagaaaagaccaaattgctattagagagattgaaagctctagaggcagagaattcagcgttggctttggagaatgaaaatcaaagggaacaatatgagcgatgtcttgatgaggtagccaaccaagttgttcaagctctgcttactcaaaaggatctaagagaggaatgtgtgaagttgaaaacaagagtgtttgatttggaacagcagaatcgaacactaagcatcctattccaacagcgagtcagacccacttctgatctgctcctccagaaacttcactcacgtctcttggatctttcatctggagatttgctttcagaggtggaaagaaaccgaagtctgacacagtcacgaactgatgctgaggtgcacgaacaccaactaaatacaaaatcggccttgaaatgccctggcttgggggctgtcatccctggtcatctctgtcctcgaaacagctacagtagcagcagtgaactgtctctttcaagcacctgcagcgagtactccagtggctcctcctacacgtggcacgatgggaagaacctcaggaaaaggcaatcatcacaaaactgggataaaaggctaagtattgattcttcgctcccaagtggctttgctagtcctacaaatgaactacctccaactcgtatcaaggaaagccacattttggaagggctaagaaagctacagaagcgaaaagtgttacttgaacccccatcagtgataaccaaatggggttataaagattgcatgaactcgaatgaaggaatatattctcctggaattaaaagtagcagcctcaaggagtatcccccctgcaaaacagctgacctggggagcccctgcaaggaaccccacaagacatttgtttatgatctagattcccacgttgatgcggacgatgacccttccaccttagcattgctccaagcagttccaaaccagagctgcaggccacatggcagtaaattaacccacagtgtttccgacagtctgtttggctgggagacaaacagaaaacactttctggaaggcacatcctcagtttatcccaaggaaaggcctgaaaagctgacaagttgcgccagcagctgtcccttagagatgaagctgtgcccaagtgtgcagacgcctcaggtacagagggagaggggcccacagggccaaggccatggccgcatggctctcaacctccagctttcagacactgatgacaatgaaacgtttgatgagctgcacatagagagcagtgatgagaaaagtccttcagacgtgtcattggctgccgacaccgataagtccgtggagaacctggatgtccttgtggggtttggaaaatctctatgtgggtctcctgaagaggaggaaaaacaagtgcccatcccttcagagactaggccaaagacttttagtttcattaagcagcaaagagttgtaaaaaggacttcttcagaagaatgtgtgactgtgatatttgatgcggaagacggtgagcccattgaattcagctctcaccagactggggttgtcactgttaccagaaatgagatttccatcaattcaactcctgctggacccaaggcagaacatactgagcttttacctcagggaattgcttgtttacagccaagagctgctgcaagagactatactttctttaaaaggtctgaagaggacactgagaaaaacattccaaaagataatgtagataatgttcccagggtgtccactgaatctttcagctccaggacagtgacacaaaatcctcagcagcaaaagctggtcaaaccaacacacaatatatcatgccagagtaattccaggtcttcggcacccatgggcatctatcaaaagcaaaatctgacaaaaatacctcccaggggcaagtcttcacctcagaaatcaaaactaatggagcccgaagccaccacactactcccttcatctggcctggtgactcttgaaaaatcaccagccttagctcctgggaaactctcacgattcatgaagactgagagctcagggcccctctttgaattacgatcagatccacacattccaaaacattccgcccaacttccgcacagctccaggatgcccagcaggagggactgggtccagtgccccaagagtcagactccagggtcacggtcaaggcctgccattgagtctagtgacagtggagagccccccacgagggatgaacactgtggctctgggccggaggcaggggtgaaatccccttcccctccgccccctccaggcaggtccgtctccctgctggccaggcccagctatgactattcaccagcaccttcatccaccaagtccgaaaccagggtccccagtgaaacagcaaggaccccattcaaatccccgctgctgaaaggaatttctgctccagttatttcttctaatccggccacgacagaagtgcagaggaagaaaccttctgtggccttcaaaaagcctatcttcactcaccctatgccctccccagaagcagtcattcaaacccgatgccctgctcatgccccctccagctccttcaccgtaatggctctggggcctccaaaggtctctccgaagagaggtgtccccaaaacctctcctcgccaaacacttgggaccccacaaagggacataggattacagactcccaggatctctccttcaacccatgagccactggaaatgacgtcctccaaaagtgtatctccagggagaaaaggacaattgaatgatagcgcctccacaccccccaagccttccttcttaggggtaaatgagtcaccatcatctcaggtcagcagttcctcatcatcctcatcacccgccaaaagccataacagccctcatggttgtcaaagtgctcatgagaaaggactgaaaactcgccttccagtgggactcaaagtgctcatgaagtctccccagctgctcaggaaaagttccaccgtgccagggaaacatgaaaaagacagtttaaatgaagcctccaaaagttccgtggctgtgaacaagtctaagccagaggactccaagaatccagcaagcatggagatcacagcgggtgaaagaaatgtgaccctaccggattcacaagcacagggcagtttagctgatgggcttcccctggaaacagcactacaagagccattggaaagtagcatccctgggagtgatggaagggatggggtagataatagatccatgagaagatccctttcctccagcaaaccacacctaaaaccagctctgggtatgaatggcgccaaagcccgcagccacagcttcagtacacactcaggagacaagccttctacgccccccatcgaagggtcaggcaaagtccgcactcagatcattaccaataccgccgagagaggcaattctcttacccggcagaactcttccacggaaagctctcccaacaaggccccttctgctcccatgttggagagtctccccagtgttgggaggccctcggggcacccctcctccgggaagggctccctggggagctcaggcagcttcagcagtcagcatgggagcccaagtaagttgcctttgaggatccctccaaagtctgagggactcctcatcccacctggaaaggaagaccagcaggccttcacccagggagagtgccccagtgccaatgtggctgtacttggggaaccaggcagtgaccgccgcagttgcccacccaccccaacagactgccctgaagccctgcagagcccagggaggactcagcatccaagcacttttgaaacaagcagtacatccaagctagaaacttctggaaggcatccagatgcctctgcaaccgcgactgatgctgtgagttcagaagcccccctctcacccacaatcgaagaaaaggtcatgttgtgcattcaggaaaatgtggaaaagggccaagtgcaaacaaagcccacctctgtggaagcaaagcagaagcctgggccttcttttgccagctggtttggttttcggaagagtagacttccagctctgagtagcaggaaaatggacatctccaaaaccaaagtagaaaagaaagatgcaaaagtcttggggtttggaaacagacaactaaaatcagaaagaaaaaaagagaaaaagaagcctgaactacagtgtgagacagaaaatgagcttatcaaggacaccaagtcagcagataatccagatggcggtttacaaagcaaaaataatcggagaacaccacaagacatttacaaccaactgaagattgaaccaaggaatagacacagccctgttgcatgttcaacgaaagacaccttcatgacggaactcttgaacagagttgataagaaagcagctccacagacagaaagtggatcaagtaatgcttcctgcaggaatgtgttaaagggcagttctcagggctcctgtctcatcggcagctctatcagtactcaaggaaaccacaagaaaaacatgaaaatcaaagccgatatggaagtaccaaaagactccctggtaaaagaggcaaatgaaaacttgcaagaggatgaagacgatgcagttgcagattctgtatttcagagccacatcatagaatccaactgccagatgagaacattggacagtgggatcggaacctttccactcccagactcgggaaatcgctcgacaggacgctacctatgccagccagactccccagaggacgctgagcctctcctgcctctccagtcagccctttctgcagtttcttccatgagagcccaaacccttgaacgtgaagtgccttcctccacagacggccagcgccctgcagatagcgccattgttcattccacatccgaccccatcatgaccgccagagggatgaggcctcttcagagccgcctccccaaaccagcttcctcaggaaaagtcagttcccaaaagcagaatgaagcagagccaaggcctcagacatgctcatcattcggatatgctgaagacccaatggcaagccagccgcttccagactgggggagtgaagttgctgccaccgggacccaggacaaggcacccagaatgtgtacgtactctgccagcggtggcagtaatagtgacagtgacctggactatggagataatggttttggagctggaaggggacagttagtgaaagcactgaagagcgctgccccagaaattgagacaacttgaagaaacaaaagacgatcccgagaatagattatcgaaaatttccctagagtcattcaataaatttaacagcaatactgtgattttattagaaaaagagaagaactctctgaacaaggttgaaggacagaaggaagaaaaagaaaaaaatgaagagacatctttgagtagttcagataggcctggggtagacaacttggaatctttgagtgattctttatatgatagcttctcttcctgtgccagtcaaggttcaaatgatgtataaaggacatctcttcccttagtgagctgggactggagcgcttaagaaatgatgggtggggggtggggggtgcaccgcttgatagagataacaataaactattgcagtaccagagccttccttgtcaaattcacagcaggcaacccaccagagcttatttctctgacagggcaataaagatagactccatttattgtgtttcaagaggattaagcgtaaacacatctatgatacagaatccttaattttgcactttttttgaatatttgtacagaagttgtaaattttttggaagagaaattatatttgtagcaaaaaaagacagcaataaatggaatcagtgccatgctcttgaaataatgtactaagtcttagaagttgatgataatatatattttttaaaatcccaactgaagtttttgtgaagttcgttgtcctggtcctcaaattgtttgtgggtacactctgtaaacctacaacagggcctgccaaaaaatcggagggttcctcctcatctccatctcacaaatctcaatttgatggaaatgttcattttagtgtaatttcagattcgttgccagagattcaggtgatagtaataagtgtcattctgcttctgctgaaaaatgaaaagggtcctgaagtgtggacactgattgggagtgtgacattgtatcagaaatgaccgaattctattcccaataccagtttttccttccagacatttctttagattgtcttttacttagtgcttctctatgatcctgaatattatttgatttttatcttcttgctctttttattaaaatctgggcactctaaaaatgaaaacaaatttctatttgcaatgttcacttttaaaaataaaattaatggtgctacgaagaattctttttaatatccttttttttctacaaagactgtttatatgtaaggataaattctattttaaaggttatgtgtattttttctagatgtgaactatttataattacttatgtacaggagcttgtaaactaggcccaatagaaatatttttaggatctatatggctactttagcacataattgtttctttaaagagtattgtatgatcagtgttatttggttaatttgtgcaatttgttttattttatcttaaatgaaaattatgtaaaatgtccttgtctttcagactttaaaaaatctttttgtttcctttctgaataaaagttatatcacatttgc

SEQ ID NO: 13475 - DNA, 3636 bp, Homo sapiens
  source 1..3636: mol_type = unassigned DNA
gcaactacggagccgcagcccagggagcaagtctccgcaaacttgctccgcattcacggcaggacttcccagccgctgtggatgttcaggaaaaccgagtctgttctgttagcgtggcctttgaatgcttcaaaaataaacagaggataaccaaccgcgggaggaaatttttagctggagagagttgtagttcctgtgtctgtctccaggactgtgatatgtgttgactgaagagctaactacaagttcatcgtgaagaataaatgagataagctacctcaagtgcctgtaccaaaatagactcacaatacattgaccctggaaacagacgggggattcttataagtcacaaaagaaaataaataacttcatccatggagggaaagagacagcttgagaaaagggactttggaaaaaggctgtctctagacagcagtcttgtggaatgcatggactccaataaatacattgagcatctgctgactcagcttgaggagcaacacaggagtctctggagggagaagttggcagtggcccgactacagcgagaagttgcccaaagaacaagtgagggggccatgcatgagaagctgatacatgaactggaagaggagagacacttacgtcttcaaagcgagaagcggttgcaggaggtgaccctagagtctgaacgcaacagaattcagatgcgtagcttgcagcagcagttctccaggatggaagaaacagtacgaaatctattgcagagtcaaggatctccagagcagaaaaaagaagaaactgttaatataatggtctatcaggaaaagctgtcagaggaagagagaaaacataaggaagctttggaagatcttcacatggtggttgatgaggattcgaggagtgaaagcagcagtacagatgagggaaaagaaaagaccaaattgctattagagagattgaaagctctagaggcagagaattcagcgttggctttggagaatgaaaatcaaagggaacaatatgagcgatgtcttgatgaggtagccaaccaagttgttcaagctctgcttactcaaaaggatctaagagaggaatgtgtgaagttgaaaacaagagtgtttgatttggaacagcagaatcgaacactaagcatcctattccaacagcgagtcagacccacttctgatctgctcctccagaaacttcactcacgtctcttggatctttcatctggagatttgctttcagaggtggaaagaaaccgaagtctgacacagtcacgaactgatgctgaggtgcacgaacaccaactaaatacaaaatcggccttgaaatgccctggcttgggggctgtcatccctggtcatctctgtcctcgaaacagctacagtagcagcagtgaactgtctctttcaagcacctgcagcgagtactccagtggctcctcctacacgtggcacgatgggaagaacctcaggaaaagggtaaaagaggcaaatgaaaacttgcaagaggatgaagacgatgcagttgcagattctgtatttcagagccacatcatagaatccaactgccagatgagaacattggacagtgggatcggaacctttccactcccagactcgggaaatcgctcgacaggacgctacctatgccagccagactccccagaggacgctgagcctctcctgcctctccagtcagccctttctgcagtttcttccatgagagcccaaacccttgaacgtgaagtgccttcctccacagacggccagcgccctgcagatagcgccattgttcattccacatccgaccccatcatgaccgccagagggatgaggcctcttcagagccgcctccccaaaccagcttcctcaggaaaagtcagttcccaaaagcagaatgaagcagagccaaggcctcagacatgctcatcattcggatatgctgaagacccaatggcaagccagccgcttccagactgggggagtgaagttgctgccaccgggacccaggacaaggcacccagaatgtgtacgtactctgccagcggtggcagtaatagtgacagtgacctggactatggagataatggttttggagctggaaggggacagttagtgaaagcactgaagagcgctgccccagaaattgagacaacttgaagaaacaaaagacgatcccgagaatagattatcgaaaatttccctagagtcattcaataaatttaacagcaatactgtgattttattagaaaaagagaagaactctctgaacaaggttgaaggacagaaggaagaaaaagaaaaaaatgaagagacatctttgagtagttcagataggcctggggtagacaacttggaatctttgagtgattctttatatgatagcttctcttcctgtgccagtcaaggttcaaatgatgtataaaggacatctcttcccttagtgagctgggactggagcgcttaagaaatgatgggtggggggtggggggtgcaccgcttgatagagataacaataaactattgcagtaccagagccttccttgtcaaattcacagcaggcaacccaccagagcttatttctctgacagggcaataaagatagactccatttattgtgtttcaagaggattaagcgtaaacacatctatgatacagaatccttaattttgcactttttttgaatatttgtacagaagttgtaaattttttggaagagaaattatatttgtagcaaaaaaagacagcaataaatggaatcagtgccatgctcttgaaataatgtactaagtcttagaagttgatgataatatatattttttaaaatcccaactgaagtttttgtgaagttcgttgtcctggtcctcaaattgtttgtgggtacactctgtaaacctacaacagggcctgccaaaaaatcggagggttcctcctcatctccatctcacaaatctcaatttgatggaaatgttcattttagtgtaatttcagattcgttgccagagattcaggtgatagtaataagtgtcattctgcttctgctgaaaaatgaaaagggtcctgaagtgtggacactgattgggagtgtgacattgtatcagaaatgaccgaattctattcccaataccagtttttccttccagacatttctttagattgtcttttacttagtgcttctctatgatcctgaatattatttgatttttatcttcttgctctttttattaaaatctgggcactctaaaaatgaaaacaaatttctatttgcaatgttcacttttaaaaataaaattaatggtgctacgaagaattctttttaatatccttttttttctacaaagactgtttatatgtaaggataaattctattttaaaggttatgtgtattttttctagatgtgaactatttataattacttatgtacaggagcttgtaaactaggcccaatagaaatatttttaggatctatatggctactttagcacataattgtttctttaaagagtattgtatgatcagtgttatttggttaatttgtgcaatttgttttattttatcttaaatgaaaattatgtaaaatgtccttgtctttcagactttaaaaaatctttttgtttcctttctgaataaaagttatatcacatttgc

SEQ ID NO: 13476 - DNA, 588 bp, Homo sapiens
  source 1..588: mol_type = unassigned DNA
atttcccatccttgcgtatctttggtcggacggtgattctcactcttcctattgacttctactttgtgtcagcaagttcagcgtgggccccgtatgctgccgtggatctgatcagctgaggcctgagacacaggaccaggctttcttgatcatggatggtgaagatataccagatttttcaagtttaaaggaggaaactgcttattggaaggaactttccttgaagtataagcaaagcttccaggaagctcgggatgagctagttgaattccaggaaggaagcagagaattagaagcagagttggaggcacaattagtacaggctgaacaaagaaatagagacttgcaggctgataaccaaagactgaaatatgaagtggaggcattaaaggagaagctagagcatcaatatgcacagagctataagcaggtctcagtgttagaagatgatttaagtcagactcgggccattaaggagcagttgcataagtatgtgagagagctggagcaggccaacgacgacctggagcgagccaaaagggcaacaatagtttcactggaagactttgaacaaaggctaaaccaggc

SEQ ID NO: 13477 - DNA, 565 bp, Homo sapiens
  source 1..565: mol_type = unassigned DNA
tttcccatccttgcgtatctttggtcggacggtgattctcactcttcctattgacttctactttgtgtcagcaagttcagcgtgggccccgtatgctgccgtggatctgatcagctgaggcctgagacacaggaccaggactgttttgtcttggcaccaggtccacaggaaagccttcattcatcccctccctgtctgtgatctcatcagccagagcacagcttcacccagggaagcagagccccagagcctgaacgagctgtaccagtccattgtcccaggccactggccttgaagcttgctctgtcacccagtggcatgatcttggctcactgcaacttccacctcccaggttcaagcggttctcaagcttcacccacctgagtagctgggattacaggcacatgccatcacattcagctaatttttctatatttttagtagagacggggtttcaccatgttggccaggctagtcttggactcctggcctcaagtgatctacccgccccaggtctcccaaagtgctgagattacaggtgtgagccactgtgcccagccaaggt

SEQ ID NO: 13478 - DNA, 577 bp, Homo sapiens
  source 1..577: mol_type = unassigned DNA
tgtgtcagcaagttcagcgtgggccccgtatgctgccgtggatctgatcagctgaggcctgagacacaggaccaggctttcttgatcatggatggtgaagatataccagatttttcaagtttaaaggaggaaactgcttattggaaggaactttccttgaagtataagcaaagtaggcggggccatctttggcccgttttgcatgcactgattctgcctcatcattttggtcatttggagattctgataagctgtctggggctccatagaacagactttacgttctcctcagcttccaggaagctcgggatgagctagttgaattccaggaaggaagcagagaattagaagcagagttggaggcacaattagtacaggctgaacaaagaaatagagacttgcaggctgataaccaaagactgaaatatgaagtggaggcattaaaggagaagctagagcatcaatatgcacagagctataagcaggtctcagtgttagaagatgatttaagtcagactcgggccattaaggagcagttgcataagtatgtgagagagctggagcaggccaacgacga

SEQ ID NO: 13479 - DNA, 555 bp, Homo sapiens
  source 1..555: mol_type = unassigned DNA
gtgcgtcacagaatggcctcggacacccaggcagtccctgacgtgtcggggaggagccgggcgcggaggctttcttgatcatggatggtgaagatataccagatttttcaagtttaaaggaggaaactgcttattggaaggaactttccttgaagtataagcaaagcttccaggaagctcgggatgagctagttgaattccaggaaggaagcagagaattagaagcagagttggaggcacaattagtacaggctgaacaaagaaatagagacttgcaggctgataaccaaagactgaaatatgaagtggaggcattaaaggagaagctagagcatcaatatgcacagagctataagcaggtctcagtgttagaagatgatttaagtcagactcgggccattaaggagcagttgcataagtatgtgagagagctggagcaggccaacgacgacctggagcgagccaaaagggcaacaatagtttcactggaagactttgaacaaaggctaaaccaggccattgaacgaaatgcatttttagaaagtgaacttgatg

SEQ ID NO: 13480 - DNA, 551 bp, Homo sapiens
  source 1..551: mol_type = unassigned DNA
agaatggcctcggacacccaggcagtccctgacgtgtcggggaggagccgggcgcggaggtacgctgagtggagctcggggctgcgtaggggagctgagccgagcggctgggcgggcctggccgggccggcggaggggagacgtcggttgagcggcggcgaacatgcgcttttgacacattggaggctttcttgatcatggatggtgaagatataccagatttttcaagtttaaaggaggaaactgcttattggaaggaactttccttgaagtataagcaaagagtttactaagtcttatcaaaccttttactgccctttcattattatcaccgaagtcagttattctattgtgccagtggatatgaaagcttccaggaagctcgggatgagctagttgaattccaggaaggaagcagagaattagaagcagagttggaggcacaattagtacaggctgaacaaagaaatagagacttgcaggctgataaccaaagactgaaatatgaagtggaggcattaaaggagaagctagagcatcaatatgcacag

SEQ ID NO: 13481 - DNA, 2372 bp, Homo sapiens
  source 1..2372: mol_type = unassigned DNA
agaatggcctcggacacccaggcagtccctgacgtgtcggggaggagccgggcgcggaggtacgctgagtggagctcggggctgcgtaggggagctgagccgagcggctgggcgggcctggccgggccggcggaggggagacgtcggttgagcggcggcgaacatgcgcttttgacacattggaggctttcttgatcatggatggtgaagatataccagatttttcaagtttaaaggaggaaactgcttattggaaggaactttccttgaagtataagcaaagcttccaggaagctcgggatgagctagttgaattccaggaaggaagcagagaattagaagcagagttggaggcacaattagtacaggctgaacaaagaaatagagacttgcaggctgataaccaaagactgaaatatgaagtggaggcattaaaggagaagctagagcatcaatatgcacagagctataagcaggtctcagtgttagaagatgatttaagtcagactcgggccattaaggagcagttgcataagtatgtgagagagctggagcaggccaacgacgacctggagcgagccaaaagggcaacaatagtttcactggaagactttgaacaaaggctaaaccaggccattgaacgaaatgcatttttagaaagtgaacttgatgaaaaggaatctttgttggtctctgtacagaggttaaaggatgaagcaagagatttaaggcaagaactagcagttcgggaaagacaacaggaagtaactagaaagtcggctcctagctctccaactctagactgtgaaaagatggactccgccgtccaagcatcactttctttgccagctacccctgttggcaaaggaacggagaacacttttccttcaccgaaagctataccaaatggttttggtaccagtccactaactccctctgctaggatatcagcactaaacatcgtgggggatctcttacggaaagtaggggctttagaatccaaattagcagcttgcaggaattttgcaaaggaccaagcatcacgaaaatcctatatttcagggaatgttaactgtggggtgctgaatggcaatggcacaaagttctctcgatcagggcatacatctttcttcgacaaaggggcagtaaacggctttgaccccgctcctcctcctcctggtctgggctcctcgcgtccatcgtcagcgccgggtatgctgcctctcagtgtgtgagtgcctagcctccaggtgggggctcctgccctcctccaacaacccaggacacccacgcctcacccctcggtgcctgggcccagccccgtgcccctccgtctgcctccgcacggctggcagagggcaggctgcatgcagtggcggctactgggccctgcccagccccggaactctgcgcgatatcaatactggctattttctcttctcgccgtagtgccgttggtttcacatgattgcacttttgtgggtcgcaaggtgatacatacgtgtattacttggtcactggatgcagaagtacccattcatcacacctgccccatagcccccactctgctgtactgataggatttagttgtgttttaggacattgcaaatcttctagaagttctcccccaaatcaggtcaatgtgtgccctcctgagctcccacccaggcatctccagtgctcatgatcatgtgtcccccaactccacccctcacagtttgggcctgtttctggcaaagagtcaggaaggttactgaattagggaacattttctgcaccttctgattttacttaagcagctaccattccatggacttgcctcccagagcagcacaatgcccgtctgagccccacgtggcaggagcctctgggacggggcacacacaggcccagcctctgtgctgtctcctcctccgtgcgcctcagactcggggtgagggaggcgggcagcctctcgccagccttcccgtccttcagttcaacgacatctttggagtgtttttgttttctcttccaagggccgtcccgttgtgttaggaagggtgagtggctggttccagggtgggccggtgccagctccggggtggactgaacagcggcggctgtccctgtgcatcctttgattactctcatgctgcatttactgtttacatttgttttattgtacataggtttgtaaacattattgcctgagatatttgtatataacttgggctttgtagcttttatttattcagaacgcatacggcatgttaatgactctgatggtgtcctcctctgggcagctgtataggatcatcatgtggttacaaaaaatacttccctcaaaaaaattcttttaatgtggaaacaataaatttcacagaaaaaaa

SEQ ID NO: 13482 - DNA, 454 bp, Homo sapiens
  source 1..454: mol_type = unassigned DNA
gtgtcggggaggagccgggcgcggaggtacgctgagtggagctcggggctgcgtaggggagctgagccgagcggctgggcgggcctggccgggccggcggaggggagacgtcggttgagcggcggcgaacatgcgcttttgacacattggaggctttcttgatcatggatggtgaagatataccagatttttcaagtttaaaggaggaaactgcttattggaaggaactttccttgaagtataagcaaagcttccaggaagctcgggatgagctagttgaattccaggaaggaagcagagaattagaagcagagttggaggcacaattagtacaggctgcatgcagtggcggctactgggccctgcccagccccggaactctgcgcgatatcaatactggctattttctcttctcgccgtagtgccgttggtttcacatgattgcacttttgtg

SEQ ID NO: 13483 - DNA, 2181 bp, Homo sapiens
  source 1..2181: mol_type = unassigned DNA
gggaggagccgggcgcggaggtacgctgagtggagctcggggctgcgtaggggagctgagccgagcggctgggcgggcctggccgggccggcggaggggagacgtcggttgagcggcggcgaacatgcgcttttgacacattggaggctttcttgatcatggatggtgaagatataccagatttttcaagtttaaaggaggaaactgcttattggaaggaactttccttgaagtataagcaaagcttccaggaagctcgggatgagctagttgaattccaggaaggaagcagagaattagaagcagagttggaggcacaattagtacaggctgaacaaagaaatagagacttgcaggctgataaccaaagactgaaatatgaagtggaggcattaaaggagaagctagagcatcaatatgcacagagctataagcaggtctcagtgttagaagatgatttaagtcagactcgggccattaaggagcagttgcataagtatgtgagagagctggagcaggccaacgacgacctggagcgagccaaaagggcaacaatagtttcactggaagactttgaacaaaggctaaaccaggccattgaacgaaatgcatttttagaaagtgaacttgatgaaaaggaatctttgttggtctctgtacagaggttaaaggatgaagcaagagatttaaggcaagaactagcagttcgggaaagacaacaggaagtaactagaaagtcggctcctagctctccaactctagactgtgaaaagatggactccgccgtccaagcatcactttctttgccagctacccctgttggcaaaggaacggagaacacttttccttcaccgaaagctataccaaatggttttggtaccagtccactaactccctctgctaggatatcagcactaaacatcgtgggggatctcttacggaaagtagggggcagtaaacggctttgaccccgctcctcctcctcctggtctgggctcctcgcgtccatcgtcagcgccgggtatgctgcctctcagtgtgtgagtgcctagcctccaggtgggggctcctgccctcctccaacaacccaggacacccacgcctcacccctcggtgcctgggcccagccccgtgcccctccgtctgcctccgcacggctggcagagggcaggctgcatgcagtggcggctactgggccctgcccagccccggaactctgcgcgatatcaatactggctattttctcttctcgccgtagtgccgttggtttcacatgattgcacttttgtgggtcgcaaggtgatacatacgtgtattacttggtcactggatgcagaagtacccattcatcacacctgccccatagcccccactctgctgtactgataggatttagttgtgttttaggacattgcaaatcttctagaagttctcccccaaatcaggtcaatgtgtgccctcctgagctcccacccaggcatctccagtgctcatgatcatgtgtcccccaactccacccctcacagtttgggcctgtttctggcaaagagtcaggaaggttactgaattagggaacattttctgcaccttctgattttacttaagcagctaccattccatggacttgcctcccagagcagcacaatgcccgtctgagccccacgtggcaggagcctctgggacggggcacacacaggcccagcctctgtgctgtctcctcctccgtgcgcctcagactcggggtgagggaggcgggcagcctctcgccagccttcccgtccttcagttcaacgacatctttggagtgtttttgttttctcttccaagggccgtcccgttgtgttaggaagggtgagtggctggttccagggtgggccggtgccagctccggggtggactgaacagcggcggctgtccctgtgcatcctttgattactctcatgctgcatttactgtttacatttgttttattgtacataggtttgtaaacattattgcctgagatatttgtatataacttgggctttgtagcttttatttattcagaacgcatacggcatgttaatgactctgatggtgtcctcctctgggcagctgtataggatcatcatgtggttacaaaaaatacttccctcaaaaaaattcttttaatgtggaaacaataaatttcacagaaaaaaa

SEQ ID NO: 13484 - DNA, 1858 bp, Homo sapiens
  source 1..1858: mol_type = unassigned DNA
ccgggcgcggaggtacgctgagtggagctcggggctgcgtaggggagctgagccgagcggctgggcgggcctggccgggccggcggaggggagacgtcggttgagcggcggcgaacatgcgcttttgacacattggaggctttcttgatcatggatggtgaagatataccagatttttcaagtttaaaggaggaaactgcttattggaaggaactttccttgaagtataagcaaagcttccaggaagctcgggatgagctagttgaattccaggaaggaagcagagaattagaagcagagttggaggcacaattagtacaggctgaacaaagaaatagagacttgcaggctgataaccaaagactgaaatatgaagtggaggcattaaaggagaagctagagcatcaatatgcacagagctataagcaggtctcagtgttagaagatgatttaagtcagactcgggccattaaggagcagttgcataagtatgtgagagagctggagcaggccaacgacgacctggagcgagccaaaagggcaacaatagtttcactggaagactttgaacaaaggctaaaccaggccattgaacgaaatgcatttttagaaagtgaacttgatgaaaaggaatctttgttggtctctgtacagaggttaaaggatgaagcaagagatttaaggcaagaactagcagttcgggaaagacaacaggaagtaactagaaagtcggctcctagctctccaactctagactgtgaaaagatggactccgccgtccaagcatcactttctttgccagctacccctgttggcaaaggaacggagaacacttttccttcaccgaaagctataccaaatggttttggtaccagtccactaactccctctgctaggatatcagcactaaacatcgtgggggatctcttacggaaagtaggggctttagaatccaaattagcagcttgcaggaattttgcaaaggaccaagcatcacgaaaatcctatatttcagggaatgttaactgtggggtgctgaatggcaatggcacaaagttctctcgatcagggcatacatctttcttcgacaaagggcaagaaaaagtcatatttcccacgttgttcatggggcagtaaacggctttgaccccgctcctcctcctcctggtctgggctcctcgcgtccatcgtcagcgccgggtatgctgcctctcagtgtgtgagtgcctagcctccaggtgggggctcctgccctcctccaacaacccaggacacccacgcctcacccctcggtgcctgggcccagccccgtgcccctccgtctgcctccgcacggctggcagagggcaggctgcatgcagtggcggctactgggccctgcccagccccggaactctgcgcgatatcaatactggctattttctcttctcgccgtagtgccgttggtttcacatgattgcacttttgtgggtcgcaaggtgatacatacgtgtattacttggtcactggatgcagaagtacccattcatcacacctgccccatagcccccactctgctgtactgataggatttagttgtgttttaggacattgcaaatcttctagaagttctcccccaaatcaggtcaatgtgtgccctcctgagctcccacccaggcatctccagtgctcatgatcatgtgtcccccaactccacccctcacagtttgggcctgtttctggcaaagagtcaggaaggttactgaattagggaacattttctgcaccttctgattttacttaagcagctaccattccatggacttgcctcccagagcagcacaatgcccgtctgagccccacgtggcaggagcctctg

SEQ ID NO: 13485 - DNA, 577 bp, Homo sapiens
  source 1..577: mol_type = unassigned DNA
gcggaggtacgctgagtggagctcggggctgcgtaggggagctgagccgagcggctgggcgggcctggccgggccggcggaggggagacgtcggttgagcggcggcgaacatgcgcttttgacacattggagaagaccacgtggccttaaaccaactgctgcaactctgtgtgcaggatgattctgtgggcccaagtcacccagcgcctatgctgcaaccaaaagtgcctcctgtcgctttgtatcaaaggacctttgtcatgatctcattcacaatattggtggtccctgagagtggagcagtggagtgattgacgtgcctgagtttgaagagagttaaccactggaatctctcatgttttattccctccaaaatgctgcagttcagtgttgtcccagattttatgcttgtgcttagatttctctgttctctaatttgttaagtttgtctttaatatttcacaggctttcttgatcatggatggtgaagatataccagatttttcaagtttaaaggaggaaactgcttattggaaggaactttccttgaagtataagcaaagcttccaggaagctc

SEQ ID NO: 13486 - DNA, 602 bp, Homo sapiens
  source 1..602: mol_type = unassigned DNA
acgctgagtggagctcggggctgcgtaggggagctgagccgagcggctgggcgggcctggccgggccggcggaggggagacgtcggttgagcggcggcgaacatgcgcttttgacacattggagaagaccacgtggccttaaaccaactgctgcaactctgtgtgcaggatgattctgtgggcccaagtcacccagcgcctatgctgcaaccaaaagtgcctcctgtcgctttgtatcaaaggacctttgtcatgatctcattcacaatattggtggtccctgagagtggagcagtggagtgattgacgtgcctgagtttgaagagagttaaccactggaatctctcatgttttattccctccaaaatgctgcagctttcttgatcatggatggtgaagatataccagatttttcaagtttaaaggaggaaactgcttattggaaggaactttccttgaagtataagcaaagcttccaggaagctcgggatgagctagttgaattccaggaaggaagcagagaattagaagcagagttggaggcacaattagtacaggctgaacaaagaaatagagacttgcaggctgataaccaaagactg

SEQ ID NO: 13487 - DNA, 552 bp, Homo sapiens
  source 1..552: mol_type = unassigned DNA
gagtggagctcggggctgcgtaggggagctgagccgagcggctgggcgggcctggccgggccggcggaggggagacgtcggttgagcggcggcgaacatgcgcttttgacacattggaggctttcttgatcatggatggtgaagatataccagatttttcaagtttaaaggaggaaactgcttattggaaggaactttccttgaagtataagcaaagcttccaggaagctcgggatgagctagttgaattccaggaaggaagcagagaattagaagcagagttggaggcacaattagtacaggctgaacaaagaaatagagacttgcaggctgataaccaaagactgaaatatgaagtggaggcattaaaggtaattgcagcagtagacgctggggtctaatgtgttgagttttattaaaatgagaaatatgtttttcaggtgcttaagagcagctggcgacaaaaaatagtttgaaaaaaacgcttaaagtgaatttttgaataaaatgttttctttcacggaaccaggggaaaaggtggtttagagttta

SEQ ID NO: 13488 - DNA, 567 bp, Homo sapiens
  source 1..567: mol_type = unassigned DNA
gacacattggagaagaccacgtggccttaaaccaactgctgcaactctgtgtgcaggatgattctgtgggcccaagtcacccagcgcctatgctgcaaccaaaagtgcctcctgtcgctttgtatcaaaggacctttgtcatgatctcattcacaatattggtggtccctgagagtggagcagtggagtgattgacgtgcctgagtttgaagagagttaaccactggaatctctcatgttttattccctccaaaatgctgcagttcagtgttgtcccagattttatgcttgtgcttagatttctctgttctctaatttgttaagtttgtctttaatatttcacaggctttcttgatcatggatggtgaagatataccagatttttcaagtttaaaggaggaaactgcttattggaaggaactttccttgaagtataagcaaagagtttactaagtcttatcaaaccttttactgccctttcattattatcaccgaagtcagttattctattgtgccagtggatatgaaagcttccaggaagctcgggatgagctagttgaattccag

SEQ ID NO: 13489 - DNA, 790 bp, Homo sapiens
  source 1..790: mol_type = unassigned DNA
cggcgccgaggcctgcccttggggagccttcccggcccggggccgtgtctgaggctccgccggggcgggccgggccgggttccggggcggccagcctgggggcaactgttccaaccgctctaactgtcccctcccttccctggtccgatgtgtggccccccaggggcgcctgcaagggaacgattccggtggcctccggaagatgtgccccgttccgggtagggtgagggctggcggtgacggaggccgggacgtggcaccgtgggctggggcgctggcggcgcaaggagtggcccagtcggaggtggcagcggcgcgcccagcccgcctcctcctaccccctcttcgaaattccttcatttgcgagggtggcttggagcggggttgcattttgatctctcagtgcctctctcccatggggggcgagagcgcgagcagcccacgttgggctcggattggcattctcctgactcccgcccggaactgctaatcatcctccccctggagttcggcaaagtgtcaccaacgggctcgggttacttgtgctcgactcttttcttgctgtaagccatgagatgaccctttaagttttgcaaaggaggctttcttgatcatggatggtgaagatataccagatttttcaagtttaaaggaggaaactgcttattggaaggaactttccttgaagtataagcaaagcttccaggaagctcgggatgagctagttgaattccaggaaggaagcagagaattagaagcagagttggaggcacaattagtacaggctgaa

SEQ ID NO: 13490 - DNA, 560 bp, Homo sapiens
  source 1..560: mol_type = unassigned DNA
cttgctgtaagccatgagatgaccctttaagttttgcaaaggaggctttcttgatcatggatggtgaagatataccagatttttcaagtttaaaggaggaaactgcttattggaaggaactttccttgaagtataagcaaagagtttactaagtcttatcaaaccttttactgccctttcattattatcaccgaagtcagttattctattgtgccagtggatatgaaagcttccaggaagctcgggatgagctagttgaattccaggaaggaagcagagaattagaagcagagttggaggcacaattagtacaggctgaacaaagaaatagagacttgcaggctgataaccaaagactgaaatatgaagtggaggcattaaaggagaagctagagcatcaatatgcacagagctataagcaggtctcagtgttagaagatgatttaagtcagactcgggccattaaggagcagttgcataagtatgtgagagagctggagcaggccaacgacgacctggagcgagccaaaagggcaacaatagtttcactggaagacttt

SEQ ID NO: 13491 - DNA, 749 bp, Homo sapiens
  source 1..749: mol_type = unassigned DNA
acgaaatgcatttttagaaagtgaacttgatgaaaaggaatctttgttggtctctgtacagaggttaaaggatgaagcaagagatttaaggcaagaactagcagttcgggaaagacaacaggaagtaactagaaagtcggctcctagctctccaactctagactgtgaaaagatggactccgccgtccaagcatcactttctttgccagctacccctgttggcaaaggaacggagaacacttttccttcaccgaaagctataccaaatggttttggtaccagtccactaactccctctgctaggatatcagcactaaacatcgtgggggatctcttacggaaagtaggggctttagaatccaaattagcagcttgcaggaattttgcaaaggaccaagcatcacgaaaatcctatatttcagggaatgttaactgtggggtgctgaatggcaatggcacaaagttctctcgatcagggcatacatctttcttcgacaaaggcagagcaggtacaactctagaaacgctcacaatctctgaaagcagctgggattttctgccgtcctcaataattatggcacatgtgtaaaggagcagattcgacacacggtgcactctgaataggctcttatccttgcagtggagtgttttggttgatctctgtccctgattttaccctggagaatatacatttcattaaggattttgtattaaaagcacatcctaaaacatcactatacaaattagaa

SEQ ID NO: 13492 - DNA, 582 bp, Homo sapiens
  source 1..582: mol_type = unassigned DNA
tttaaggcaagaactagcagttcgggaaagacaacaggaagtaactagaaagtcggctcctagctctccaactctagactgtgaaaagatggactccgccgtccaagcatcactttctttgccagctacccctgttggcaaaggaacggagaacacttttccttcaccgaaagctataccaaatggttttggtaccagtccactaactccctctgctaggatatcagcactaaacatcgtgggggatctcttacggaaagtaggggctttagaatccaaattagcagcttgcaggaattttgcaaaggaccaagcatcacgaaaatcctatatttcagggaatgttaactgtggggtgctgaatggcaatggcacaaagttctctcgatcagggcatacatctttcttcgacaaaggatgtgttctaacacgaatgaacaggatactgacccagagctgggctttgagagcctgcaccccttgttgtggaggccgcaccctctgccctacctgtttgatcagcagccgcttcttctcttcattctgctcatccctggtttgcaggtctctctcgaactgcgc

SEQ ID NO: 13493 - DNA, 1802 bp, Homo sapiens
  source 1..1802: mol_type = unassigned DNA
tttgggggagagacatcatcaaagtaggtttgtgtgtgtgtgcatgtgtgcgggtgtacatgtgttcaccttcccacccgctgaaacttcagatgcagtgaagccttctcacataaaacaatataccttaactgggcgtattgctctgtgggattcaaaagtattttgtaaattctggtcacttgagggcttcttggaatcaggtttttgtctagtctgtgagcacttctgccagttcctgaaacatgggctgccgtgcctgcttcccaggtgccgagctgtttccttcaaccatggtcaccctttgtctcaccatctgaaaggacacacatttcatgtggagtgtggtcgcttggagtctctcaaaaacactcttttttttcccataactttatgtagtttcttaggtaacatgtgctctatttttgtaagccactctgagttcttttgggctgtgtgtaggtgggcatggactaattttagggcgtgatgtggaaatagtattcgtattactgtttaatatgttctcctttcttttattaggcaagaaaaagtcatatttcccacgttgttcatggggcagtaaacggctttgaccccgctcctcctcctcctggtctgggctcctcgcgtccatcgtcagcgccgggtatgctgcctctcagtgtgtgagtgcctagcctccaggtgggggctcctgccctcctccaacaacccaggacacccacgcctcacccctcggtgcctgggcccagccccgtgcccctccgtctgcctccgcacggctggcagagggcaggctgcatgcagtggcggctactgggccctgcccagccccggaactctgcgcgatatcaatactggctattttctcttctcgccgtagtgccgttggtttcacatgattgcacttttgtgggtcgcaaggtgatacatacgtgtattacttggtcactggatgcagaagtacccattcatcacacctgccccatagcccccactctgctgtactgataggatttagttgtgttttaggacattgcaaatcttctagaagttctcccccaaatcaggtcaatgtgtgccctcctgagctcccacccaggcatctccagtgctcatgatcatgtgtcccccaactccacccctcacagtttgggcctgtttctggcaaagagtcaggaaggttactgaattagggaacattttctgcaccttctgattttacttaagcagctaccattccatggacttgcctcccagagcagcacaatgcccgtctgagccccacgtggcaggagcctctgggacggggcacacacaggcccagcctctgtgctgtctcctcctccgtgcgcctcagactcggggtgagggaggcgggcagcctctcgccagccttcccgtccttcagttcaacgacatctttggagtgtttttgttttctcttccaagggccgtcccgttgtgttaggaagggtgagtggctggttccagggtgggccggtgccagctccggggtggactgaacagcggcggctgtccctgtgcatcctttgattactctcatgctgcatttactgtttacatttgttttattgtacataggtttgtaaacattattgcctgagatatttgtatataacttgggctttgtagcttttatttattcagaacgcatacggcatgttaatgactctgatggtgtcctcctctgggcagctgtataggatcatcatgtggttacaaaaaatacttccctcaaaaaaattcttttaatgtggaaacaataaatttcacag

SEQ ID NO: 13494 - DNA, 3927 bp, Homo sapiens
  source 1..3927: mol_type = unassigned DNA
tatagctctggaaccttttttttacatatatgattcccagatctgtatcttcaagcctgccccatcactcttccttcagtcctgtcttgtgcactgggacattgccctgtggctctttgctgctccctgaaactgaatctgttgaatatagagtctcttctcttgcaaatcttttccccatgcacagctttgcaggcctctgaaggacttcactagacctgtcatcccatctagaaggccagctttcttctctctctgttctttaactttctactttttgagtcaggagagaggcgctaggtgagaccctggtggattgatgttccctctctactccacccaccttcacattaagcgttccatttctgcccatgtagaaatttaccggttctctctttatagtctgggctgcaccacttacttttcccattagagccggcctgcattggagtgccgaagtggttgcttctgagggctgctaggtggcctctgaccaggaggagactagaaaagggtcctggcctgggcatctggaggcagctgtggccccgacttccccatcagtggctcactaggtgagcctaggctaatggctggaccttctcttgctttggttgtcttggcagtggaacagtgggatgaacctgttgttccttacggtgcacttgaaaatgccagaatcccatcctcaacctgcttgaggagccatctcctagttgctgcttttgtacacccccgtggcccaggtgccagattcttcttggcatccaatggtgctccctttctgctgggttccgggcactgtctgcagtacaggtttaggggcttgcctgccactgtgatgtgtgaggccaggaatctgaggttcacacgtgctgagagctgcaggcatttgtggggcctgcctggttgtccctgaggtttctaggagaagcaggtgtcagggactctgggactagccagacagatggagcctattatatgagggctaccgtggcaaataggatatggccttggccccagaagaggcacaggcctgtgaccttgggagagtgggaaggatgatttcaaacttgcaaatgtgttgaagctcaaaaatcagacctaacccagtgaggaaagagacaatctggctgtttgtcgtcgaagtaggacagtgtgcaacagggagaaatgacatttgtcagagcctttctcctggggctcttggtctctgtatgcgtggttggaatttaaactccacatatgtactctgagtttagtttctttagacatgaactttgtttcttccaagtaggcagggactatttgtcaagtctctgcatgcctgtttgtctgtgaggttatcctcaccccgtcagtgtacgaaacagctgtctctgcagggagtgtgtgtcggcattttttttttttaaggagaacctctctccatgagtctgtatttagctccctggagccgtctgatgagtaggtgggggcagtagtgggcaggtgtggtgcagtgtggccccttgtcgtagttggctttatctcccaaattgctagtgggacaaattttcctaggaagcgtttcaaggtggaaaggctgaagtggctcctgagagaggttccaggctgcacactccctccccctcttgctgcttcctgtggctgcgctgcatggtgcgtgagggggatgcttggggggctccctgcatcgctgggctctgggtgcgtgatggggacgctggggggctccctgtgtcgctgggctccgggtgctgggtcctggctgcaggctattgggttgggctgggctgtctgcacacgagtctgcgttgaaaagcctactcatctggcgttgcttgctaaacaatttttaaaaggttatttttctccaccttattaagatattcgtgtattaatacattatatttggaaaatgtaaggagatttggaaaatgattaaaaaaggataaagtagtaaacaaaattcacccacagcccagagggaagaaaagtaacgattcttaaattttctttttatgatatatatgatcctatgtacatatatgttggtgtgtgtatatatatatgtgtatgcgtatatataatgtatgtatatatacatttatttatacacactccccctctgtccctgctttgtggatttagctgcatggatagtaatgtctatctaaggggctatagtctagaatctagaatatatactatttgcttttttttctttcatatcattgaatctacagagtttggtaacctgcatctttttccacttagtgttagttacattctgaatattttcccatgctattaaaaaacttgtggaatgtgtttttaatggctgtgcaatatcttattgttcagttgtaccattatttatttaactagttccctattgccaggcatttagacctgctttatggggaaagaatcaggactgtggcttccgtggccagtgtgcggcagttgccaaacaggtcatgtggtcctggttccccaggattcccaaaggctcaattctctaaccagctggtgctttccaggcagccagtgccccttgggccatcaggaccctacagcctgcgaggaatagttttagaaagcagattaatttcctattgtgtgtgagtgattttaaatgagtttttcgtttcccctttcttcccttctgtgctctggttgctcccacagggcagtaaacggctttgaccccgctcctcctcctcctggtctgggctcctcgcgtccatcgtcagcgccgggtatgctgcctctcagtgtgtgagtgcctagcctccaggtgggggctcctgccctcctccaacaacccaggacacccacgcctcacccctcggtgcctgggcccagccccgtgcccctccgtctgcctccgcacggctggcagagggcaggctgcatgcagtggcggctactgggccctgcccagccccggaactctgcgcgatatcaatactggctattttctcttctcgccgtagtgccgttggtttcacatgattgcacttttgtgggtcgcaaggtgatacatacgtgtattacttggtcactggatgcagaagtacccattcatcacacctgccccatagcccccactctgctgtactgataggatttagttgtgttttaggacattgcaaatcttctagaagttctcccccaaatcaggtcaatgtgtgccctcctgagctcccacccaggcatctccagtgctcatgatcatgtgtcccccaactccacccctcacagtttgggcctgtttctggcaaagagtcaggaaggttactgaattagggaacattttctgcaccttctgattttacttaagcagctaccattccatggacttgcctcccagagcagcacaatgcccgtctgagccccacgtggcaggagcctctgggacggggcacacacaggcccagcctctgtgctgtctcctcctccgtgcgcctcagactcggggtgagggaggcgggcagcctctcgccagccttcccgtccttcagttcaacgacatctttggagtgtttttgttttctcttccaagggccgtcccgttgtgttaggaagggtgagtggctggttccagggtgggccggtgccagctccggggtggactgaacagcggcggctgtccctgtgcatcctttgattactctcatgctgcatttactgtttacatttgttttattgtacataggtttgtaaacattattgcctgagatatttgtatataacttgggctttgtagcttttatttattcagaacgcatacggcatgttaatgactctgatggtgtcctcctctgggcagctgtataggatcatcatgtggttacaaaaaatacttccctcaaaaaaattcttttaatgtggaaacaataaatttcacagaaaaaaagg

SEQ ID NO: 13495 - DNA, 2885 bp, Homo sapiens
  source 1..2885: mol_type = unassigned DNA
ccgcgagagagtggagctaactgagcagcgcacccgccacggccgctgccgccccgtgcgcccggctctcccagcaccccgcgcggcgctccagccaggcgcctgtgcgactagcggcggccggcgaagcccgcgccagccccgcgggtcgctgcggcatcctcccgccgcccagcccccgcacgctccctgcagtttaaaaggacctcccgccgcttctcggcgctgccccgggattccccagccccgcgcggctccctactccacttcgcagcaacttcggcgaccgcgcgccgcccgccctcgcccgcctttgaagtttgctgtgccgaccgcaaagttgggacacttcagcggattgaatttttctcttttatctgcctccgtccccgccctccaggcttctcgttcctggatattggtgcttagcatcttggcagggtccggggacgtggactatttcgcacaccacaccacggggagggatttttttctattttccctacgaaaaacagatctttttaaggatggtgctgctccactggtgcctgctgtggctcctgtttccactcagctcaaggacccagaagttacccacccgggatgaggaactttttcagatgcagatccgggacaaggcattttttcatgattcgtcagtaattccagatggagctgaaattagcagttatctctttagagatacacctaagaggtatttctttgtggttgaagaagacaatactccattatcagtcacagtgacgccctgtgatgcgcctttggagtggaagctgagcctccaggagctgccagaggacaggagcggggaaggctcaggtgatctggaacctcttgagcagcagaagcagcagatcattaatgaggaaggcactgagttattctcctacaaaggcaatgatgttgagtattttatatcgtctagttccccatccggtttatatcagttggatcttctttcaacagagaaagacacacatttcaaagtatatgccaccacaactccagaatctgatcagccataccctgagttaccctatgacccaagagtagatgtgacctcactggggcgcaccacggtcactttggcctggaaaccaagccccactgcctctttgctgaaacaacccattcagtactgtgtggtcatcaacaaagagcacaatttcaaaagtctctgtgcagtggaagcaaaactgagtgcagatgatgcttttatgatggcaccgaaacctggtctggacttcagcccctttgactttgcccactttggatttccttctgataattcaggtaaagaacgcagtttccaggcaaagccttctccaaaactggggcgtcatgtctactccaggcccaaggttgatattcagaaaatctgcataggaaacaagaacatcttcaccgtctctgatctgaaacccgacacgcagtactactttgatgtatttgtggtcaacatcaacagcaacatgagcaccgcttatgtaggtacctttgccaggaccaaggaagaagccaaacagaagacagtcgagctaaaagatgggaagataacagatgtatttgttaaaaggaagggagcaaagtttctacggtttgctccagtctcttctcaccaaaaagtcaccttctttattcactcttgtctggatgctgtccaaatccaagtgagaagagatgggaaacttcttctgtctcagaatgtggaaggcattcagcagtttcagcttagaggaaaacctaaagctaaatacctcgttcgactgaaaggaaacaagaaaggagcatctatgttgaaaattctagctaccacaaggcctactaagcagtcatttccctctcttcctgaagacacaagaatcaaagcctttgacaagctccgtacctgttcctcagccaccgtggcttggctaggcactcaggaaaggaacaagttttgcatctacaaaaaagaagtggatgataactacaatgaagaccagaagaaaagagagcaaaaccaatgtctaggaccagatataaggaagaagtcagaaaaggtcctctgtaaatatttccacagtcaaaacctgcagaaagcagtgaccacagaaacaattaaaggtcttcagcctggcaaatcttacctgctggatgtttatgtcataggacatggggggcactctgtaaagtatcagagtaaggttgtgaaaactagaaagttctgttagttaccttcttatagagatatattatgtagaactccaggagggacattaaatcactttaagtataaactgactactcccacagttgagagaagttgtgacctgtacttgtactatggaaggaaggatatcaacgtgtgtatattgatgtttatataagtaactcttgaaggagacttgttctagcgtgccccatggtacctagtgtgtgtctgatgccggttggtgtcaaagatagagggcttcttgaaggaacttgccattccttgctttgaccactgcatgaactgcttctaaattattttattacctaaaaatttaaaatatgccattcattgcacacacccacaaatgcaaatcattcctctctgtagatgctaggatatatataaattattttataaattcttgttttaaatgtcagtgtttctatgattgtaaactattaaattcttttcctattaaagtacagatctaatctaagtattattaagttgatagccctctagtcagttatattgctattgtaaattcttgtttgttgagtaaaatgtttaaatactatatgtatctcatgtacaaagttgacatacattatattcatgtacataaaattaaagagattagattatatactgttcattttcccaagca

SEQ ID NO: 13496 - DNA, 917 bp, Homo sapiens
  source 1..917: mol_type = unassigned DNA
tcaggacagggtcttgctctgtcgcttaggagtgcaatggtgtaatcttggctcactgcaacctccacctcctgggcttaagcaattctcctgcctcagcctcccaagtagctgggaccagagagacagggtctctctttgttgtccaggttcagcttcaagtaatcttacagcctcagcatcccaaagtgctaggataacaggcatgagccatgacacccagccaaatattcttactggtactttatattgtgtattttaatcagattgtctagtccttctaacagccgtgaaattagcaaaatggctggccatccaaatgcaaactgatacaattcttttggtgatctggaacctcttgagcagcagaagcagcagatcattaatgaggaaggcactgagttattctcctacaaaggcaatgatgttgagtattttatatcgtctagttccccatccggtttatatcagttggatcttctttcaacagagaaagacacacatttcaaagtatatgccaccacaactccagaatctgatcagccataccctgagttaccctatgacccaagagtagatgtgacctcactggggcgcaccacggtcactttggcctggaaaccaagccccactgcctctttgctgaaacaacccattcagtactgtgtggtcatcaacaaagagcacaatttcaaaagtctctgtgcagtggaagcaaaactgagtgcagatgatgcttttatgatggcaccgaaacctggtctggacttcagcccctttgactttgcccactttggatttccttctgataattcaggtaaagaacgcagtttccaggcaaagccttctccaaaactggggcgtcatgtctactccaggcccaaggttgatattcagaaaatctgcataggaaacaa

SEQ ID NO: 13497 - DNA, 564 bp, Homo sapiens
  source 1..564: mol_type = unassigned DNA
agagtttccctctattgtgcaccccggtctgcttgacagtgtgatggtcccgcgtgcgcgtctcctgggttttgcagctttgtcgggggctcggtgggcctccttcattctccccgagtggcgctaaggatggtgctgctccactggtgcctgctgtggctcctgtttccactcagctcaaggacccagaagttacccacccgggatgaggaactttttcagatgcagatccgggacaaggcattttttcatgattcgtcagtaattccagatggagctgaaattagcagttatctctttagagatacacctaagaggtatttctttgtggttgaagaagacaatactccattatcagtcacagtgacgccctgtgatgcgcctttggagtggaagctgagcctccaggagctgccagaggacaggagcggggaaggctcaggtgatctggaacctcttgagcagcagaagcagcagatcattaatgaggaaggcactgagttattctcctacaaaggcaatgatgttgagtattttatatcgtctagttccccatccggttta

SEQ ID NO: 13498 - DNA, 560 bp, Homo sapiens
  source 1..560: mol_type = unassigned DNA
ctttttaaggtaagtggggagaggaaagcaatgccccagagacccgacgccttagcccgccaccctgagacctagcacaaggagcgttcacgcccgaagggtcatccgagatgggggctcgaggcacgcgcccccaaatcttcaaggcccaagaagcttctcaagggcgccctatccgtaggagctgagggcatgaggggcaggagcaggatggtgctgctccactggtgcctgctgtggctcctgtttccactcagctcaaggacccagaagttacccacccgggatgaggaactttttcagatgcagatccgggacaaggcattttttcatgattcgtcagtaattccagatggagctgaaattagcagttatctctttagagatacacctaagaggtatttctttgtggttgaagaagacaatactccattatcagtcacagtgacgccctgtgatgcgcctttggagtggaagctgagcctccaggagctgccagaggacaggagcggggaaggctcaggtgatctggaacctcttgagcagcagaagcagcagat

SEQ ID NO: 13499 - DNA, 3014 bp, Homo sapiens
  source 1..3014: mol_type = unassigned DNA
cccagctggtgctgaagctcgtcagttcaccatccgccctcggcttccgcggggcgctgggccgccagcctcggcaccgtcctttcctttctccctcgcgttaggcaggtgacagcagggacatgtctcgggagatgcaggatgtagacctcgctgaggtgaagcctttggtggagaaaggggagaccatcaccggcctcctgcaagagtttgatgtccaggagcaggacatcgagactttacatggctctgttcacgtcacgctgtgtgggactcccaagggaaaccggcctgtcatcctcacctaccatgacatcggcatgaaccacaaaacctgctacaaccccctcttcaactacgaggacatgcaggagatcacccagcactttgccgtctgccacgtggacgcccctggccagcaggacggcgcagcctccttccccgcagggtacatgtacccctccatggatcagctggctgaaatgcttcctggagtccttcaacagtttgggctgaaaagcattattggcatgggaacaggagcaggcgcctacatcctaactcgatttgctctaaacaaccctgagatggtggagggccttgtccttatcaacgtgaacccttgtgcggaaggctggatggactgggccgcctccaagatctcaggatggacccaagctctgccggacatggtggtgtcccacctttttgggaaggaagaaatgcagagtaacgtggaagtggtccacacctaccgccagcacattgtgaatgacatgaaccccggcaacctgcacctgttcatcaatgcctacaacagccggcgcgacctggagattgagcgaccaatgccgggaacccacacagtcaccctgcagtgccctgctctgttggtggttggggacagctcgcctgcagtggatgccgtggtggagtgcaactcaaaattggacccaacaaagaccactctcctcaagatggcggactgtggcggcctcccgcagatctcccagccggccaagctcgctgaggccttcaagtacttcgtgcagggcatgggatacatgccctcggctagcatgacccgcctgatgcggtcccgcacagcctctggttccagcgtcacttctctggatggcacccgcagccgctcccacaccagcgagggcacccgaagccgctcccacaccagcgagggcacccgcagccgctcgcacaccagcgagggggcccacctggacatcacccccaactcgggtgctgctgggaacagcgccgggcccaagtccatggaggtctcctgctaggcggcctgcccagctgccgcccccggactctgatctctgtagtggccccctcctccccggccccttttcgccccctgcctgccatactgcgcctaactcggtattaatccaaagcttattttgtaagagtgagctctggtggagacaaatgaggtctattacgtgggtgccctctccaaaggcggggtggcggtggaccaaaggaaggaagcaagcatctccgcatcgcatcctcttccattaaccagtggccggttgccactctcctcccctccctcagagacaccaaactgccaaaaacaagacgcgtagcagcacacacttcacaaagccaagcctaggccgccctgagcatcctggttcaaacgggtgcctggtcagaaggccagccgcccacttcccgtttcctctttaactgaggagaagctgatccagtttccggaaacaaaatccttttctcatttggggaggggggtaatagtgacatgcaggcacctcttttaaacaggcaaaacaggaagggggaaaaggtgggattcatgtcgaggctagaggcatttggaacaacaaatctacgtagttaacttgaagaaaccgatttttaaagttggtgcatctagaaagctttgaatgcagaagcaaacaagcttgatttttctagcatcctcttaatgtgcagcaaaagcaggcgacaaaatctcctggctttacagacaaaaatatttcagcaaacgttgggcatcatggtttttgaaggctttagttctgctttctgcctctcctccacagccccaacctcccacccctgatacatgagccagtgattattcttgttcagggagaagatcatttagatttgttttgcattccttagaatggagggcaacattccacagctgccctggctgtgatgagtgtccttgcaggggccggagtaggagcactggggtgggggtggaattggggttactcgatgtaagggattccttgttgttgtgttgagatccagtgcagttgtgatttctgtggatcccagcttggttccaggaattttgtgtgattggcttaaatccagttttcaatcttcgacagctgggctggaacgtgaactcagtagctgaacctgtctgacccggtcacgttcttggatcctcagaactctttgctcttgtcggggtgggggtgggaactcacgtggggagcggtggctgagaaaatgtaaggattctggaatacatattccatgggactttccttccctctcctgcttcctcttttcctgctccctaacctttcgccgaatggggcagcaccactgacgtttctgggcggccagtgcggctgccaggttcctgtactactgccttgtacttttcattttggctcaccgtggattttctcataggaagtttggtcagagtgaattgaatattgtaagtcagccactgggacccgaggatttctgggaccccgcagttgggaggaggaagtagtccagccttccaggtggcgtgagaggcaatgactcgttacctgccgcccatcaccttggaggccttccctggccttgagtagaaaagtcggggatcggggcaagagaggctgagtacggatgggaaactattgtgcacaagtctttccagaggagtttcttaatgagatatttgtatttatttccagaccaataaatttgtaactttgcagcgg

SEQ ID NO: 13500 - DNA, 2810 bp, Homo sapiens
  source 1..2810: mol_type = unassigned DNA
cagagggcggatctgtggaaattctttgaagactgtgaagctctgtggaagtggctaacaaagttgcttacattcaaggtggagcatgccatagtcaagtcatgagctttgggaagtggaggatacattggaagcatcattcaggaactcactcgttcttattttgcagttatagtttgttagacacatacagccttttttccagaagtgctgtcccaggactaggacagaccctggcgagttgtaactcggctgaacagcagccacactcagtgctgtgggcctgtcagccatggtccggccctgacatgactagtggctcttctgaccctactgcttggaactataattcgtgtgtcctcccttactaggaagttattgaacttctgatcccttttatcatttccttaaactgtttgcccatgtatagtaagagtatgcttggtaagctgactgcagtcctagcattggccttagccatgattagctctagcaaggcgaggctggcaggtttgatttccatgcctcaggctcaggcaggatccacatccccaggtgccctcttccaacagaagctatctgctagtggggctcctgcctttctagcctgctttccccgacggaagttgcaggcaaaggttgtcattggagacagccatggagacagccgcggggcagtcctgctttaccctgcacggtgtgaattgtggctcccatttgtcttggtcccgccagggtttggatttctgctttgagagtgtgttctggagagaaaggaagtgaatgctagacctcatctttctccccaaatcggcttctattaccagaaagctgaagcctcctgcaggtcttggggggaaaataacaggaagagctatggtctcaaaggcatcagccaaagagaaggaaaggaaccggtcactggccttctgcacaccacggggtgctggcttgatgaaccctttgcacacctggcatcagtgctcactgtacgcttctcatcctgctcagtagacatcccagatttgtgggtgagaagtaggggctcagagaaatatgtgagctgcggatgtggcattgaccccaattctttctgaattcaaaactagctctttaagacaattcagcaaggattaattctgtttgggagtgcctgacatcaaaagcccctccctgtgcctatcaaggagataacataagccctgcatgcttggtgtggatcaactgcccctgtttctgatgtctgactcagtgtggcctcctagccatgatgcttcagttgggtggagtactagtttcctaaagctgccgtaacaaatctccacaaactgggtggctgaaaacaatagaaatccattctctcaaagttcaggaggcctaaagtccaaaatcaaggtgtgggcagggccttgctccctccaacgctgctgtggaagaaccttccatgcctcttcctggcttctggtggccccagcaatccttggctttatgtggcttgtggctgcatcactccaatctcagcctctgtctttgcgtggacttctcccctgcatatccctgtgtgctgtttctataaggacatcacagtcattgggtttagggttccctctcaacccaggatgatttcatctcaagatccttaactaattacatatgcaaagaccctatttccaaataaggttcccttctgaagtttcaggtaggtgtgaatcttccgggacactgtcccacccggtacaggtgggcaggattgttcctcctcattccaccccatcagcacgtgctaccccatcagcatgtgccacttgcacgtgccatgtgcaagagcatttgaggtctcagagaagatcccaaagaatagacagcgcccttgttagcacctgggctgacaggcttctttgggagagatgacaacgaatagccatgccgggaacttgccgtgtggcccctctccctttccccacctgtgatgtgcagggccactgaccccaggtgtcctccctgctccagtgatcatggacagcatggggtcatgggcgtacacacaggtgctgataccaggggtcagtatttaacatacttgctttacagatgggaacagggaggctcagggggacactctcaaaattacacagcttttaacaggtggcagaattggggttcagacccagatctgggttcaagtcactcatggtgtgattgcggcagttccttcccgcatctgggccttgccatctctctctccgagtggacatggagaggacgggggcccagcagctggatggctgcagggatcaagtcttctctggggctggcacgtagaagagcatgtggctggtggacgggcatgcctggctcctcacctggcagtctcctgccctctaaccggctgtctcttgttcccctagtgccctcggctagcatgacccgcctgatgcggtcccgcacagcctctggttcctgtactactgccttgtacttttcattttggctcaccgtggattttctcataggaagtttggtcagagtgaattgaatattgtaagtcagccactgggacccgaggatttctgggaccccgcagttgggaggaggaagtagtccagccttccaggtggcgtgagaggcaatgactcgttacctgccgcccatcaccttggaggccttccctggccttgagtagaaaagtcggggatcggggcaagagaggctgagtacggatgggaaactattgtgcacaagtctttccagaggagtttcttaatgagatatttgtatttatttccagaccaataaatttgtaactttgc

SEQ ID NO: 13501 - DNA, 2145 bp, Homo sapiens
  source 1..2145: mol_type = unassigned DNA
ggacaaggcagggcagggcagcgggcggatgggcatcctttcggaaaaaattcatagagcgcagagggccttggctgtggtgtttggcactaacgagcttccctctctcctagatggcggactgtggcggcctcccgcagatctcccagccggccaagctcgctgaggccttcaagtacttcgtgcagggcatgggatacatgccctcggctagcatgacccgcctgatgcggtcccgcacagcctctggttccagcgtcacttctctggatggcacccgcagccgctcccacaccagcgagggcacccgaagccgctcccacaccagcgagggcacccgcagccgctcgcacaccagcgagggggcccacctggacatcacccccaactcgggtgctgctgggaacagcgccgggcccaagtccatggaggtctcctgctaggcggcctgcccagctgccgcccccggactctgatctctgtagtggccccctcctccccggccccttttcgccccctgcctgccatactgcgcctaactcggtattaatccaaagcttattttgtaagagtgagctctggtggagacaaatgaggtctattacgtgggtgccctctccaaaggcggggtggcggtggaccaaaggaaggaagcaagcatctccgcatcgcatcctcttccattaaccagtggccggttgccactctcctcccctccctcagagacaccaaactgccaaaaacaagacgcgtagcagcacacacttcacaaagccaagcctaggccgccctgagcatcctggttcaaacgggtgcctggtcagaaggccagccgcccacttcccgtttcctctttaactgaggagaagctgatccagtttccggaaacaaaatccttttctcatttggggaggggggtaatagtgacatgcaggcacctcttttaaacaggcaaaacaggaagggggaaaaggtgggattcatgtcgaggctagaggcatttggaacaacaaatctacgtagttaacttgaagaaaccgatttttaaagttggtgcatctagaaagctttgaatgcagaagcaaacaagcttgatttttctagcatcctcttaatgtgcagcaaaagcaggcgacaaaatctcctggctttacagacaaaaatatttcagcaaacgttgggcatcatggtttttgaaggctttagttctgctttctgcctctcctccacagccccaacctcccacccctgatacatgagccagtgattattcttgttcagggagaagatcatttagatttgttttgcattccttagaatggagggcaacattccacagctgccctggctgtgatgagtgtccttgcaggggccggagtaggagcactggggtgggggtggaattggggttactcgatgtaagggattccttgttgttgtgttgagatccagtgcagttgtgatttctgtggatcccagcttggttccaggaattttgtgtgattggcttaaatccagttttcaatcttcgacagctgggctggaacgtgaactcagtagctgaacctgtctgacccggtcacgttcttggatcctcagaactctttgctcttgtcggggtgggggtgggaactcacgtggggagcggtggctgagaaaatgtaaggattctggaatacatattccatgggactttccttccctctcctgcttcctcttttcctgctccctaacctttcgccgaatggggcagcaccactgacgtttctgggcggccagtgcggctgccaggttcctgtactactgccttgtacttttcattttggctcaccgtggattttctcataggaagtttggtcagagtgaattgaatattgtaagtcagccactgggacccgaggatttctgggaccccgcagttgggaggaggaagtagtccagccttccaggtggcgtgagaggcaatgactcgttacctgccgcccatcaccttggaggccttccctggccttgagtagaaaagtcggggatcggggcaagagaggctgagtacggatgggaaactattgtgcacaagtctttccagaggagtttcttaatgagatatttgtatttatttccagaccaataaatttgtaactttgc

SEQ ID NO: 13502 - DNA, 2349 bp, Homo sapiens
  source 1..2349: mol_type = unassigned DNA
tttcctgttgaggaagcaaaggcgcaaagagatcctgtgttctccccaaggccacacagctagaaagtggcagagcatgatttggatcctgcttgtctaactccaggctgtgagctgggaaagagcttctcatgttgggagctgcaagatagcagagaggccggcgcgacctggagattgagcgaccaatgccgggaacccacacagtcaccctgcagtgccctgctctgttggtggttggggacagctcgcctgcagtggatgccgtggtggagtgcaactcaaaattggacccaacaaagaccactctcctcaagatggcggactgtggcggcctcccgcagatctcccagccggccaagctcgctgaggccttcaagtacttcgtgcagggcatgggatacatgccctcggctagcatgacccgcctgatgcggtcccgcacagcctctggttccagcgtcacttctctggatggcacccgcagccgctcccacaccagcgagggcacccgaagccgctcccacaccagcgagggcacccgcagccgctcgcacaccagcgagggggcccacctggacatcacccccaactcgggtgctgctgggaacagcgccgggcccaagtccatggaggtctcctgctaggcggcctgcccagctgccgcccccggactctgatctctgtagtggccccctcctccccggccccttttcgccccctgcctgccatactgcgcctaactcggtattaatccaaagcttattttgtaagagtgagctctggtggagacaaatgaggtctattacgtgggtgccctctccaaaggcggggtggcggtggaccaaaggaaggaagcaagcatctccgcatcgcatcctcttccattaaccagtggccggttgccactctcctcccctccctcagagacaccaaactgccaaaaacaagacgcgtagcagcacacacttcacaaagccaagcctaggccgccctgagcatcctggttcaaacgggtgcctggtcagaaggccagccgcccacttcccgtttcctctttaactgaggagaagctgatccagtttccggaaacaaaatccttttctcatttggggaggggggtaatagtgacatgcaggcacctcttttaaacaggcaaaacaggaagggggaaaaggtgggattcatgtcgaggctagaggcatttggaacaacaaatctacgtagttaacttgaagaaaccgatttttaaagttggtgcatctagaaagctttgaatgcagaagcaaacaagcttgatttttctagcatcctcttaatgtgcagcaaaagcaggcgacaaaatctcctggctttacagacaaaaatatttcagcaaacgttgggcatcatggtttttgaaggctttagttctgctttctgcctctcctccacagccccaacctcccacccctgatacatgagccagtgattattcttgttcagggagaagatcatttagatttgttttgcattccttagaatggagggcaacattccacagctgccctggctgtgatgagtgtccttgcaggggccggagtaggagcactggggtgggggtggaattggggttactcgatgtaagggattccttgttgttgtgttgagatccagtgcagttgtgatttctgtggatcccagcttggttccaggaattttgtgtgattggcttaaatccagttttcaatcttcgacagctgggctggaacgtgaactcagtagctgaacctgtctgacccggtcacgttcttggatcctcagaactctttgctcttgtcggggtgggggtgggaactcacgtggggagcggtggctgagaaaatgtaaggattctggaatacatattccatgggactttccttccctctcctgcttcctcttttcctgctccctaacctttcgccgaatggggcagcaccactgacgtttctgggcggccagtgcggctgccaggttcctgtactactgccttgtacttttcattttggctcaccgtggattttctcataggaagtttggtcagagtgaattgaatattgtaagtcagccactgggacccgaggatttctgggaccccgcagttgggaggaggaagtagtccagccttccaggtggcgtgagaggcaatgactcgttacctgccgcccatcaccttggaggccttccctggccttgagtagaaaagtcggggatcggggcaagagaggctgagtacggatgggaaactattgtgcacaagtctttccagaggagtttcttaatgagatatttgtatttatttccagaccaataaatttgtaactttgc

SEQ ID NO: 13503 - DNA, 3983 bp, Homo sapiens
  source 1..3983: mol_type = unassigned DNA
tcttcatagtaactctaggaggtgagaatttttatcaccgtttcagaggtaaggactcggtgtggctaaggggattgtccagggtcacataaagctaggcagtagaacggggactggatgcagcttgctttgactttgtggttcgtggacctgaccacccgtgcccctggggctcctgtccagggtgggagacaggcaggcctggcaagcagggtaggctgcctggaggagaagggacctgtgctgtcttgggaagctctgtcctggctggtgtcctaaggttccttgtttatcttttaaaaattatcattgtggtgtttttgtttttgtttttttccctgtaaaggcctcagtgttggccaaggagagggggaggtcattccagttgaaataggacagagtctttcaagctgaggtgatcgcagcttctcattctgcaagtgcatttttgcccaattttgggtggctgccagggaccgatggtttgaaggggccctgcctcttgccccatcccctgccctgtaccagccactgtgattttgcatttgttctttgaacattcctccagaatgcaggagcccttccgtccagcctgtatgacgttctggagtggaacacactccctgttttttatttgattttccagcaaaggaagtgacattccagtcaacccgctgggcttcatgatagctgtcctgagtgagactcgaaggtctggggatgtcgaccactggctaatgtgaagcctgaggattgtctttaatagctgtactattcccttcagtacagctttaatagctgtactattcccttctttttcaactccagcctttcgattaccaggcattggtattagatactgtgatgtgtgcagttacttcttgcagtccttcccttgaccttgtggccttgaagttcctggcactcccagttccagattagaagtctgagacccagaggtatgcagactgcccagtgccacacagctaggctgtggcaggcaagggccagccaaagacccttaggtctagagcttctctcctactcatttttgcctaatgcttaggtcagcacacatttatggagcttctgctgtatactaggacttatagagctcctgctgcaaacctagtcactggggagaggtaggaaaagaagattgtcagtgtctttggtaatatcagtatacttagaaaggggaaactggcttggagatgagagaggagggatagttgggagccaagcatatcttggggtatagactggggagctcagtgtgtttttagaagaggtgaatggatggccctctttgctgaggacttggtgaatgtttggagcagggtaagctagcagtagctgggtctttattcagcacttatttgctgtgcatcttgtgcatgggcctctgaaaataaggaactggatatagtcccaggccctgcatttgggggatcaggtccaggagggaactggagacaggaactgagtttctatcaagggggatgtccttgaggcctgcatgtaggggggagtccagcaatgccaccctgcacccagggaagtggggttttgctgaccttgttaactactgttagctcctggtttctcatccacccactttactcctttccagatctcaggatggacccaagctctgccggacatggtggtgtcccacctttttgggaaggaagaaatgcagagtaacgtggaagtggtccacacctaccgccagcacattgtgaatgacatgaaccccggcaacctgcacctgttcatcaatgcctacaacagccggcgcgacctggagattgagcgaccaatgccgggaacccacacagtcaccctgcagtgccctgctctgttggtggttggggacagctcgcctgcagtggatgccgtggtggagtgcaactcaaaattggacccaacaaagaccactctcctcaagatggcggactgtggcggcctcccgcagatctcccagccggccaagctcgctgaggccttcaagtacttcgtgcagggcatgggatacatgccctcggctagcatgacccgcctgatgcggtcccgcacagcctctggttccagcgtcacttctctggatggcacccgcagccgctcccacaccagcgagggcacccgaagccgctcccacaccagcgagggcacccgcagccgctcgcacaccagcgagggggcccacctggacatcacccccaactcgggtgctgctgggaacagcgccgggcccaagtccatggaggtctcctgctaggcggcctgcccagctgccgcccccggactctgatctctgtagtggccccctcctccccggccccttttcgccccctgcctgccatactgcgcctaactcggtattaatccaaagcttattttgtaagagtgagctctggtggagacaaatgaggtctattacgtgggtgccctctccaaaggcggggtggcggtggaccaaaggaaggaagcaagcatctccgcatcgcatcctcttccattaaccagtggccggttgccactctcctcccctccctcagagacaccaaactgccaaaaacaagacgcgtagcagcacacacttcacaaagccaagcctaggccgccctgagcatcctggttcaaacgggtgcctggtcagaaggccagccgcccacttcccgtttcctctttaactgaggagaagctgatccagtttccggaaacaaaatccttttctcatttggggaggggggtaatagtgacatgcaggcacctcttttaaacaggcaaaacaggaagggggaaaaggtgggattcatgtcgaggctagaggcatttggaacaacaaatctacgtagttaacttgaagaaaccgatttttaaagttggtgcatctagaaagctttgaatgcagaagcaaacaagcttgatttttctagcatcctcttaatgtgcagcaaaagcaggcgacaaaatctcctggctttacagacaaaaatatttcagcaaacgttgggcatcatggtttttgaaggctttagttctgctttctgcctctcctccacagccccaacctcccacccctgatacatgagccagtgattattcttgttcagggagaagatcatttagatttgttttgcattccttagaatggagggcaacattccacagctgccctggctgtgatgagtgtccttgcaggggccggagtaggagcactggggtgggggtggaattggggttactcgatgtaagggattccttgttgttgtgttgagatccagtgcagttgtgatttctgtggatcccagcttggttccaggaattttgtgtgattggcttaaatccagttttcaatcttcgacagctgggctggaacgtgaactcagtagctgaacctgtctgacccggtcacgttcttggatcctcagaactctttgctcttgtcggggtgggggtgggaactcacgtggggagcggtggctgagaaaatgtaaggattctggaatacatattccatgggactttccttccctctcctgcttcctcttttcctgctccctaacctttcgccgaatggggcagcaccactgacgtttctgggcggccagtgcggctgccaggttcctgtactactgccttgtacttttcattttggctcaccgtggattttctcataggaagtttggtcagagtgaattgaatattgtaagtcagccactgggacccgaggatttctgggaccccgcagttgggaggaggaagtagtccagccttccaggtggcgtgagaggcaatgactcgttacctgccgcccatcaccttggaggccttccctggccttgagtagaaaagtcggggatcggggcaagagaggctgagtacggatgggaaactattgtgcacaagtctttccagaggagtttcttaatgagatatttgtatttatttccagaccaataaatttgtaactttgc

SEQ ID NO: 13504 - DNA, 2918 bp, Homo sapiens
  source 1..2918: mol_type = unassigned DNA
aaacctcgcctggctcccagctggtgctgaagctcgtcagttcaccatccgccctcggcttccgcggggcgctgggccgccagcctcggcaccgtcctttcctttctccctcgcgttaggcaggtgacagcagggacatgtctcgggagatgcaggatgtagacctcgctgaggtgaagcctttggtggagaaaggggagaccatcaccggcctcctgcaagagtttgatgtccagacaaaacctgctacaaccccctcttcaactacgaggacatgcaggagatcacccagcactttgccgtctgccacgtggacgcccctggccagcaggacggcgcagcctccttccccgcagggtacatgtacccctccatggatcagctggctgaaatgcttcctggagtccttcaacagtttgggctgaaaagcattattggcatgggaacaggagcaggcgcctacatcctaactcgatttgctctaaacaaccctgagatggtggagggccttgtccttatcaacgtgaacccttgtgcggaaggctggatggactgggccgcctccaagatctcaggatggacccaagctctgccggacatggtggtgtcccacctttttgggaaggaagaaatgcagagtaacgtggaagtggtccacacctaccgccagcacattgtgaatgacatgaaccccggcaacctgcacctgttcatcaatgcctacaacagccggcgcgacctggagattgagcgaccaatgccgggaacccacacagtcaccctgcagtgccctgctctgttggtggttggggacagctcgcctgcagtggatgccgtggtggagtgcaactcaaaattggacccaacaaagaccactctcctcaagatggcggactgtggcggcctcccgcagatctcccagccggccaagctcgctgaggccttcaagtacttcgtgcagggcatgggatacatgccctcggctagcatgacccgcctgatgcggtcccgcacagcctctggttccagcgtcacttctctggatggcacccgcagccgctcccacaccagcgagggcacccgaagccgctcccacaccagcgagggcacccgcagccgctcgcacaccagcgagggggcccacctggacatcacccccaactcgggtgctgctgggaacagcgccgggcccaagtccatggaggtctcctgctaggcggcctgcccagctgccgcccccggactctgatctctgtagtggccccctcctccccggccccttttcgccccctgcctgccatactgcgcctaactcggtattaatccaaagcttattttgtaagagtgagctctggtggagacaaatgaggtctattacgtgggtgccctctccaaaggcggggtggcggtggaccaaaggaaggaagcaagcatctccgcatcgcatcctcttccattaaccagtggccggttgccactctcctcccctccctcagagacaccaaactgccaaaaacaagacgcgtagcagcacacacttcacaaagccaagcctaggccgccctgagcatcctggttcaaacgggtgcctggtcagaaggccagccgcccacttcccgtttcctctttaactgaggagaagctgatccagtttccggaaacaaaatccttttctcatttggggaggggggtaatagtgacatgcaggcacctcttttaaacaggcaaaacaggaagggggaaaaggtgggattcatgtcgaggctagaggcatttggaacaacaaatctacgtagttaacttgaagaaaccgatttttaaagttggtgcatctagaaagctttgaatgcagaagcaaacaagcttgatttttctagcatcctcttaatgtgcagcaaaagcaggcgacaaaatctcctggctttacagacaaaaatatttcagcaaacgttgggcatcatggtttttgaaggctttagttctgctttctgcctctcctccacagccccaacctcccacccctgatacatgagccagtgattattcttgttcagggagaagatcatttagatttgttttgcattccttagaatggagggcaacattccacagctgccctggctgtgatgagtgtccttgcaggggccggagtaggagcactggggtgggggtggaattggggttactcgatgtaagggattccttgttgttgtgttgagatccagtgcagttgtgatttctgtggatcccagcttggttccaggaattttgtgtgattggcttaaatccagttttcaatcttcgacagctgggctggaacgtgaactcagtagctgaacctgtctgacccggtcacgttcttggatcctcagaactctttgctcttgtcggggtgggggtgggaactcacgtggggagcggtggctgagaaaatgtaaggattctggaatacatattccatgggactttccttccctctcctgcttcctcttttcctgctccctaacctttcgccgaatggggcagcaccactgacgtttctgggcggccagtgcggctgccaggttcctgtactactgccttgtacttttcattttggctcaccgtggattttctcataggaagtttggtcagagtgaattgaatattgtaagtcagccactgggacccgaggatttctgggaccccgcagttgggaggaggaagtagtccagccttccaggtggcgtgagaggcaatgactcgttacctgccgcccatcaccttggaggccttccctggccttgagtagaaaagtcggggatcggggcaagagaggctgagtacggatgggaaactattgtgcacaagtctttccagaggagtttcttaatgagatatttgtatttatttccagaccaataaatttgtaactttgc

SEQ ID NO: 13505 - DNA, 3755 bp, Homo sapiens
  source 1..3755: mol_type = unassigned DNA
acacaaacgcctcctccgggcagggcacacgcgcccgctgcacaggccgaggccctggactcggaggggactgcagagccgacccacaacccgggccccgatgcccctcccggccgcgcccctacgactgcttgcgcaacaggcggcggctccagtgggcgcccgccgcgcgctgccggagcccagcccagcccggcgcgcccgggaggagggagcagggagcggggaaggggtgtgtcccggctgcgtgctgggactgcgagggtctgggaggggcgaggcgcgggggcggggccgcggcgcctataaagtcgccctccgcccggacgtaaacaaacctcgcctggctcccagctggtgctgaagctcgtcagttcaccatccgccctcggcttccgcggggcgctgggccgccagcctcggcaccgtcctttcctttctccctcgcgttaggtaagcccgcgccctcttctcccaggcgcgacgcggagcagaaaggggccgcccgtgcggtgccgctggagcgccaggaccgccctttgtagccccgcgtactccaggagtaagcgccccggagctgcaagtgcgcggtcaccccggggcgcgggcgcgagggggctttgggtgcagacaccgctgaagtggggggttcaattacggaaagggaggaaaaaaagacagggtcccattcatctcccccctagctggggattggggttctggaggtcgggaagggggcgatgagacggtccgaaaaaataccaggatagcgtttcctggcgtcgtctccgaatcccagctggcgccgctggcaggggtgcgcgctggacgtgggtgcagaagggactaggcaggtgacagcagggacatgtctcgggagatgcaggatgtagacctcgctgaggtgaagcctttggtggagaaaggggagaccatcaccggcctcctgcaagagtttgatgtccaggagcaggacatcgagactttacatggctctgttcacgtcacgctgtgtgggactcccaagggaaaccggcctgtcatcctcacctaccatgacatcggcatgaaccacaaaacctgctacaaccccctcttcaactacgaggacatgcaggagatcacccagcactttgccgtctgccacgtggacgcccctggccagcaggacggcgcagcctccttccccgcagggtacatgtacccctccatggatcagctggctgaaatgcttcctggagtccttcaacagtttgggctgaaaagcattattggcatgggaacaggagcaggcgcctacatcctaactcgatttgctctaaacaaccctgagatggtggagggccttgtccttatcaacgtgaacccttgtgcggaaggctggatggactgggccgcctccaagatctcaggatggacccaagctctgccggacatggtggtgtcccacctttttgggaaggaagaaatgcagagtaacgtggaagtggtccacacctaccgccagcacattgtgaatgacatgaaccccggcaacctgcacctgttcatcaatgcctacaacagccggcgcgacctggagattgagcgaccaatgccgggaacccacacagtcaccctgcagtgccctgctctgttggtggttggggacagctcgcctgcagtggatgccgtggtggagtgcaactcaaaattggacccaacaaagaccactctcctcaagatggcggactgtggcggcctcccgcagatctcccagccggccaagctcgctgaggccttcaagtacttcgtgcagggcatgggatacatgccctcggctagcatgacccgcctgatgcggtcccgcacagcctctggttccagcgtcacttctctggatggcacccgcagccgctcccacaccagcgagggcacccgaagccgctcccacaccagcgagggcacccgcagccgctcgcacaccagcgagggggcccacctggacatcacccccaactcgggtgctgctgggaacagcgccgggcccaagtccatggaggtctcctgctaggcggcctgcccagctgccgcccccggactctgatctctgtagtggccccctcctccccggccccttttcgccccctgcctgccatactgcgcctaactcggtattaatccaaagcttattttgtaagagtgagctctggtggagacaaatgaggtctattacgtgggtgccctctccaaaggcggggtggcggtggaccaaaggaaggaagcaagcatctccgcatcgcatcctcttccattaaccagtggccggttgccactctcctcccctccctcagagacaccaaactgccaaaaacaagacgcgtagcagcacacacttcacaaagccaagcctaggccgccctgagcatcctggttcaaacgggtgcctggtcagaaggccagccgcccacttcccgtttcctctttaactgaggagaagctgatccagtttccggaaacaaaatccttttctcatttggggaggggggtaatagtgacatgcaggcacctcttttaaacaggcaaaacaggaagggggaaaaggtgggattcatgtcgaggctagaggcatttggaacaacaaatctacgtagttaacttgaagaaaccgatttttaaagttggtgcatctagaaagctttgaatgcagaagcaaacaagcttgatttttctagcatcctcttaatgtgcagcaaaagcaggcgacaaaatctcctggctttacagacaaaaatatttcagcaaacgttgggcatcatggtttttgaaggctttagttctgctttctgcctctcctccacagccccaacctcccacccctgatacatgagccagtgattattcttgttcagggagaagatcatttagatttgttttgcattccttagaatggagggcaacattccacagctgccctggctgtgatgagtgtccttgcaggggccggagtaggagcactggggtgggggtggaattggggttactcgatgtaagggattccttgttgttgtgttgagatccagtgcagttgtgatttctgtggatcccagcttggttccaggaattttgtgtgattggcttaaatccagttttcaatcttcgacagctgggctggaacgtgaactcagtagctgaacctgtctgacccggtcacgttcttggatcctcagaactctttgctcttgtcggggtgggggtgggaactcacgtggggagcggtggctgagaaaatgtaaggattctggaatacatattccatgggactttccttccctctcctgcttcctcttttcctgctccctaacctttcgccgaatggggcagcaccactgacgtttctgggcggccagtgcggctgccaggttcctgtactactgccttgtacttttcattttggctcaccgtggattttctcataggaagtttggtcagagtgaattgaatattgtaagtcagccactgggacccgaggatttctgggaccccgcagttgggaggaggaagtagtccagccttccaggtggcgtgagaggcaatgactcgttacctgccgcccatcaccttggaggccttccctggccttgagtagaaaagtcggggatcggggcaagagaggctgagtacggatgggaaactattgtgcacaagtctttccagaggagtttcttaatgagatatttgtatttatttccagaccaataaatttgtaactttgc

SEQ ID NO: 13506 - DNA, 888 bp, Homo sapiens
  source 1..888: mol_type = unassigned DNA
cccagctggtgctgaagctcgtcagttcaccatccgccctcggcttccgcggggcgctgggccgccagcctcggcaccgtcctttcctttctccctcgcgttaggcaggtgacagcagggacatgtctcgggagatgcaggatgtagacctcgctgaggtgaagcctttggtggagtgcaactcaaaattggacccaacaaagaccactctcctcaagatggcggactgtggcggcctcccgcagatctcccagccggccaagctcgctgaggccttcaagtacttcgtgcagggcatgggatacatgccctcggctagcatgacccgcctgatgcggtcccgcacagcctctggttccagcgtcacttctctggatggcacccgcagccgctcccacaccagcgagggcacccgaagccgctcccacaccagcgagggcacccgcagccgctcgcacaccagcgagggggcccacctggacatcacccccaactcgggtgctgctgggaacagcgccgggcccaagtccatggaggtctcctgctaggcggcctgcccagctgccgcccccggactctgatctctgtagtggccccctcctccccggccccttttcgccccctgcctgccatactgcgcctaactcggtattaatccaaagcttattttgtaagagtgagctctggtggagacaaatgaggtctattacgtgggtgccctctccaaaggcggggtggcggtggaccaaaggaaggaagcaagcatctccgcatcgcatcctcttccattaaccagtggccggttgccactctcctcccctccctcagagacaccaaactgccaaaaacaagacgcgtagcagcacacacttcacaaagccaagccta

SEQ ID NO: 13507 - DNA, 1385 bp, Homo sapiens
  source 1..1385: mol_type = unassigned DNA
aaacctcgcctggctcccagctggtgctgaagctcgtcagttcaccatccgccctcggcttccgcggggcgctgggccgccagcctcggcaccgtcctttcctttctccctcgcgttaggagcaggacatcgagactttacatggctctgttcacgtcacgctgtgtgggactcccaagggaaaccggcctgtcatcctcacctaccatgacatcggcatgaaccacaaaacctgctacaaccccctcttcaactacgaggacatgcaggagatcacccagcactttgccgtctgccacgtggacgcccctggccagcaggacggcgcagcctccttccccgcagggtacatgtacccctccatggatcagctggctgaaatgcttcctggagtccttcaacagtttgggctgaaaagcattattggcatgggaacaggagcaggcgcctacatcctaactcgatttgctctaaacaaccctgagatggtggagggccttgtccttatcaacgtgaacccttgtgcggaaggctggatggactgggccgcctccaagatctcaggatggacccaagctctgccggacatggtggtgtcccacctttttgggaaggaagaaatgcagagtaacgtggaagtggtccacacctaccgccagcacattgtgaatgacatgaaccccggcaacctgcacctgttcatcaatgcctacaacagccggcgcgacctggagattgagcgaccaatgccgggaacccacacagtcaccctgcagtgccctgctctgttggtggttggggacagctcgcctgcagtggatgccgtggtggagtgcaactcaaaattggacccaacaaagaccactctcctcaagatggcggactgtggcggcctcccgcagatctcccagccggccaagctcgctgaggccttcaagtacttcgtgcagggcatgggatacatgccctcggctagcatgacccgcctgatgcggtcccgcacagcctctggttccagcgtcacttctctggatggcacccgcagccgctcccacaccagcgagggcacccgaagccgctcccacaccagcgagggcacccgcagccgctcgcacaccagcgagggggcccacctggacatcacccccaactcgggtgctgctgggaacagcgccgggcccaagtccatggaggtctcctgctaggcggcctgcccagctgccgcccccggactctgatctctgtagtggccccctcctccccggccccttttcgccccctgcctgccatactgcgcctaactcggtattaatccaaagcttattttgtaagagtgagctctggtggagacaaatgaggtctattacgtgggtgccctctccaaa

SEQ ID NO: 13508 - DNA, 560 bp, Homo sapiens
  source 1..560: mol_type = unassigned DNA
aaacctcgcctggctcccagctggtgctgaagctcgtcagttcaccatccgccctcggcttccgcggggcgctgggccgccagcctcggcaccgtcctttcctttctccctcgcgttaggcaggtgacagcagggacatgtctcgggagatgcaggatgtagacctcgctgaggccttcaagtacttcgtgcagggcatgggatacatgccctcggctagcatgacccgcctgatgcggtcccgcacagcctctggttccagcgtcacttctctggatggcacccgcagccgctcccacaccagcgagggcacccgaagccgctcccacaccagcgagggcacccgcagccgctcgcacaccagcgagggggcccacctggacatcacccccaactcgggtgctgctgggaacagcgccgggcccaagtccatggaggtctcctgctaggcggcctgcccagctgccgcccccggactctgatctctgtagtggccccctcctccccggccccttttcgccccctgcctgccatactgcgcctaactcggtattaatcca

SEQ ID NO: 13509 - DNA, 507 bp, Homo sapiens
  source 1..507: mol_type = unassigned DNA
cttggggaatggagtgaaattatctgtagggcctagcatagtgcctggcacgtagcaagctgcaagtgatggttgccacggagacaccagcagccttgcctggtggggctggagtgttccctacccacggtccaccctgttcctcctttgtaaggcaggacaaggcagggcagggcagcgggcggatgggcatcctttcggaaaaaattcatagagcgcagagggccttggctgtggtgtttggcactaacgagcttccctctctcctagatggcggactgtggcggcctcccgcagatctcccagccggccaagctcgctgaggccttcaagtacttcgtgcagggcatgggatacagtgagtatggcattccccgtgtgcagtgggtcggggcatgtgtcggaattggaagtgctctgtcctgagccaggtttggatgagcaattctgtgtccccctggccagcttcagctttctgggaggaaacagttaggtgtgtggagggca

SEQ ID NO: 13510 - DNA, 411 bp, Homo sapiens
  source 1..411: mol_type = unassigned DNA
gttcatcaatgcctacaacagccggcgcgacctggagattgagcgaccaatgccgggaacccacacagtcaccctgcagtgccctgctctgttggtggttggggacagctcgcctgcagtggatgccgtggtggagtgcaactcaaaattggacccaacaaagaccactctcctcaagatggcggactgtggcggcctcccgcagatctcccagccggccaagctcgctgaggccttcaagtacttcgtgcagggcatgggatacagtgagtatggcattccccgtgtgcagtgggtcggggcatgtgtcggaattggaagtgctctgtcctgagccaggtttggatgagcaattctgtgtccccctggccagcttcagctttctgggaggaaacagttaggtgtgtggag

SEQ ID NO: 13511 - DNA, 584 bp, Homo sapiens
  source 1..584: mol_type = unassigned DNA
agaatgtgtccatgggacctggagcgtaggaagcaattgatagagtacatgtacccctccatggatcagctggctgaaatgcttcctggagtccttcaacagtttgggctgaaaagcattattggcatgggaacaggagcaggcgcctacatcctaactcgatttgctctaaacaaccctgagatggtggagggccttgtccttatcaacgtgaacccttgtgcggaaggctggatggactgggccgcctccaagatctcaggatggacccaagctctgccggacatggtggtgtcccacctttttgggaaggaagaaatgcagagtaacgtggaagtggtccacacctaccgccagcacattgtgaatgacatgaaccccggcaacctgcacctgttcatcaatgcctacaacagccggcgcgacctggagattgagcgaccaatgccgggaacccacacagtcaccctgcagtgccctgctctgttggtggttggggacagctcgcctgcagtggatgccgtggtggagtgcaactcaaaattggacccaacaaagaccactctcctcaagatggcggactg

SEQ ID NO: 13512 - DNA, 1103 bp, Homo sapiens
  source 1..1103: mol_type = unassigned DNA
ctcccagctggtgctgaagctcgtcagttcaccatccgccctcggcttccgcggggcgctgggccgccagcctcggcaccgtcctttcctttctccctcgcgttaggcaggtgacagcagggacatgtctcgggagatgcaggatgtagacctcgctgaggtgaagcctttggtggagaaaggggagaccatcaccggcctcctgcaagagtttgatgtccaggagcaggacatcgagactttacatggctctgttcacgtcacgctgtgtgggactcccaagggaaaccggcctgtcatcctcacctaccatgacatcggcatgaaccacaaaacctgctacaaccccctcttcaactacgaggacatgcaggagatcacccagcactttgccgtctgccacgtggacgcccctggccagcaggacggcgcagcctccttccccgcagggtacatgtacccctccatggatcagctggctgaaatgcttcctggagtccttcaacagtttgggctgaaaagcattattggcatgggaacaggagcaggcgcctacatcctaactcgatttgctctaaacaaccctgagatggtggagggccttgtccttatcaacgtgaacccttgtgcggaaggctggatggactgggccgcctccaagcctttcgattaccaggcattggtattagatactgtgatgtgtgcagttacttcttgcagtccttcccttgaccttgtggccttgaagttcctggcactcccagttccagattagaagtctgagacccagagatctcaggatggacccaagctctgccggacatggtggtgtcccacctttttgggaaggaagaaatgcagagtaacgtggaagtggtccacacctaccgccagcacattgtgaatgacatgaaccccggcaacctgcacctgttcatcaatgcctacaacagccggcgcgacctggagattgagcgaccaatgccgggaacccacacagtcaccctgcagtgccctgctctgttggtggttggggacagctcgcctgcagtggatgccgtggtggagtgcaactcaaaattggacccaacaaagaccactct

SEQ ID NO: 13513 - DNA, 594 bp, Homo sapiens
  source 1..594: mol_type = unassigned DNA
ctagcagtagctgggtctttattcagcacttatttgctgtgcatcttgtgcatgggcctctgaaaataaggaactggatatagtcccaggccctgcatttgggggatcaggtccaggagggaactggagacaggaactgagtttctatcaagggggatgtccttgaggcctgcatgtaggggggagtccagcaatgccaccctgcacccagggaagtggggttttgctgaccttgttaactactgttagctcctggtttctcatccacccactttactcctttccagatctcaggatggacccaagctctgccggacatggtggtgtcccacctttttgggaaggaagaaatgcagagtaacgtggaagtggtccacacctaccgccagcacattgtgaatgacatgaaccccggcaacctgcacctgttcatcaatgcctacaacagccggcgcgacctggagattgagcgaccaatgccgggaacccacacagtcaccctgcagtgccctgctctgttggtggttggggacagctcgcctgcagtggatgccgtggtggagtgcaactcaaaattggacccaacaaagacca

SEQ ID NO: 13514 - DNA, 582 bp, Homo sapiens
  source 1..582: mol_type = unassigned DNA
agatggcagtccctccacctgggatcatgaagcaggcaggtgacagcagggacatgtctcgggagatgcaggatgtagacctcgctgaggtgaagcctttggtggagaaaggggagaccatcaccggcctcctgcaagagtttgatgtccaggagcaggacatcgagactttacatggctctgttcacgtcacgctgtgtgggactcccaagggaaaccggcctgtcatcctcacctaccatgacatcggcatgaaccacaaaacctgctacaaccccctcttcaactacgaggacatgcaggagatcacccagcactttgccgtctgccacgtggacgcccctggccagcaggacggcgcagcctccttccccgcagggtacatgtacccctccatggatcagctggctgaaatgcttcctggagtccttcaacagtttgggctgaaaagcattattggcatgggaacaggagcaggcgcctacatcctaactcgatttgctctaaacaaccctgagatggtggagggccttgtccttatcaacgtgaacccttgtgcggaaggctggatggactgggccg

SEQ ID NO: 13515 - DNA, 581 bp, Homo sapiens
  source 1..581: mol_type = unassigned DNA
aaacctcgcctggctcccagctggtgctgaagctcgtcagttcaccatccgccctcggcttccgcggggcgctgggccgccagcctcggcaccgtcctttcctttctccctcgcgttaggcaggtgacagcagggacatgtctcgggagatgcaggatgtagacctcgctgaggtgaagcctttggtggagaaaggggagaccatcaccggcctcctgcaagagtttgatgtccaggagcaggacatcgagactttacatggctctgttcacgtcacgctgtgtgggactcccaagggaaaccggcctgtcatcctcacctaccatgacatcggcatgaaccacaaaacctgctacaaccccctcttcaactacgaggacatgcaggagatcacccagcactttgccgtctgccacgtggacgcccctggccagcaggacggcgcagcctccttccccgcagggtacatgtacccctccatggatcagctggctgaaatgcttcctggagtccttcaacagtttggctaaacaaccctgagatggtggagggccttgtccttatcaacgtgaacccttgtg

SEQ ID NO: 13516 - DNA, 558 bp, Homo sapiens
  source 1..558: mol_type = unassigned DNA
aaacaaacctcgcctggctcccagctggtgctgaagctcgtcagttcaccatccgccctcggcttccgcggggcgctgggccgccagcctcggcaccgtcctttcctttctccctcgcgttagaccatcaccggcctcctgcaagagtttgatgtccaggagcaggacatcgagactttacatggctctgttcacgtcacgctgtgtgggactcccaagggaaaccggcctgtcatcctcacctaccatgacatcggcatgaaccacaaaacctgctacaaccccctcttcaactacgaggacatgcaggagatcacccagcactttgccgtctgccacgtggacgcccctggccagcaggacggcgcagcctccttccccgcagggtacatgtacccctccatggatcagctggctgaaatgcttcctggagtccttcaacagtttgggctgaaaagcattattggcatgggaacaggagcaggcgcctacatcctaactcgatttgctctaaacaaccctgagatggtggagggccttgtccttatcaacgtgaac

SEQ ID NO: 13517 - DNA, 729 bp, Homo sapiens
  source 1..729: mol_type = unassigned DNA
agtgggcaaggtccagtgagtgtgcttagaactgggaagatgaggggaagggtaagcgctgggcggcggtgggcaagatggacgagattaaacgggagcgaggatttcagcgagagctttggcgacacggaaggctgagaatcggagggagcctgtcgggcgaaagcgaaggcggctgctgggcaggcagccgaatccggctggagagccgagctggcaggtgacagcagggacatgtctcgggagatgcaggatgtagacctcgctgaggtgaagcctttggtggagaaaggggagaccatcaccggcctcctgcaagagtttgatgtccaggagcaggacatcgagactttacatggctctgttcacgtcacgctgtgtgggactcccaagggaaaccggcctgtcatcctcacctaccatgacatcggcatgaaccacaaaacctgctacaaccccctcttcaactacgaggacatgcaggagatcacccagcactttgccgtctgccacgtggacgcccctggccagcaggacggcgcagcctccttccccgcagggtacatgtacccctccatggatcagctggctgaaatgcttcctggagtccttcaacagtttgggctgaaaagcattattggcatgggaacaggagcaggcgcctacatcctaactcgatttgctctaaacaaccctgagatggtggagggccttgtccttatcaacgtg

SEQ ID NO: 13518 - DNA, 550 bp, Homo sapiens
  source 1..550: mol_type = unassigned DNA
gagaggctggtggcgcttcagtcccgtagcacacacagggcggtgtgcatgtgtgagtgcaggtgacagcagggacatgtctcgggagatgcaggatgtagacctcgctgaggtgaagcctttggtggagaaaggggagaccatcaccggcctcctgcaagagtttgatgtccaggagcaggacatcgagactttacatggctctgttcacgtcacgctgtgtgggactcccaagggaaaccggcctgtcatcctcacctaccatgacatcggcatgaaccacaaaacctgctacaaccccctcttcaactacgaggacatgcaggagatcacccagcactttgccgtctgccacgtggacgcccctggccagcaggacggcgcagcctccttccccgcagggtacatgtacccctccatggatcagctggctgaaatgcttcctggagtccttcaacagtttgggctgaaaagcattattggcatgggaacaggagcaggcgcctacatcctaactcgatttgctctaaacaaccctgagatggtggag

SEQ ID NO: 13519 - DNA, 581 bp, Homo sapiens
  source 1..581: mol_type = unassigned DNA
aaaggggccgcccgtgcggtgccgctggagcgccaggaccgccctttgtagccccgcgtactccaggagtaagcgccccggagctgcaagcaggtgacagcagggacatgtctcgggagatgcaggatgtagacctcgctgaggtgaagcctttggtggagaaaggggagaccatcaccggcctcctgcaagagtttgatgtccaggagcaggacatcgagactttacatggctctgttcacgtcacgctgtgtgggactcccaagggaaaccggcctgtcatcctcacctaccatgacatcggcatgaaccacaaaacctgctacaaccccctcttcaactacgaggacatgcaggagatcacccagcactttgccgtctgccacgtggacgcccctggccagcaggacggcgcagcctccttccccgcagggtacatgtacccctccatggatcagctggctgaaatgcttcctggagtccttcaacagtttgggctgaaaagcattattggcatgggaacaggagcaggcgcctacatcctaactcgatttgctctaaacaaccctgagatggtggag

SEQ ID NO: 13520 - DNA, 536 bp, Homo sapiens
  source 1..536: mol_type = unassigned DNA
agcttgccctgggtctggtcctgggctcagtggcaaattcaacgctgggcaggtggcctgaggacaatgacggtgccagctgcaggtgacagcagggacatgtctcgggagatgcaggatgtagacctcgctgaggtgaagcctttggtggagaaaggggagaccatcaccggcctcctgcaagagtttgatgtccaggagcaggacatcgagactttacatggctctgttcacgtcacgctgtgtgggactcccaagggaaaccggcctgtcatcctcacctaccatgacatcggcatgaaccacaaaacctgctacaaccccctcttcaactacgaggacatgcaggagatcacccagcactttgccgtctgccacgtggacgcccctggccagcaggacggcgcagcctccttccccgcagggtacatgtacccctccatggatcagctggctgaaatgcttcctggagtccttcaacagtttgggctgaaaagcattattggcatgggaacaggagcaggcgcctacatcct

SEQ ID NO: 13521 - DNA, 709 bp, Homo sapiens
  source 1..709: mol_type = unassigned DNA
aaacctcgcctggctcccagctggtgctgaagctcgtcagttcaccatccgccctcggcttccgcggggcgctgggccgccagcctcggcaccgtcctttcctttctccctcgcgttagaaggagatcacagacaccagaagacagcagcttctgccagaactgggtccttccatgattctcaggtggtgactttgaatcccagaaaaagtgttttggggagagtggagtgaaggaagagtgtgaacattggatctgactccactccagcccctgtgctgcagccagcagggcaggtgacagcagggacatgtctcgggagatgcaggatgtagacctcgctgaggtgaagcctttggtggagaaaggggagaccatcaccggcctcctgcaagagtttgatgtccaggagcaggacatcgagactttacatggctctgttcacgtcacgctgtgtgggactcccaagggaaaccggcctgtcatcctcacctaccatgacatcggcatgaaccacaaaacctgctacaaccccctcttcaactacgaggacatgcaggagatcacccagcactttgccgtctgccacgtggacgcccctggccagcaggacggcgcagcctccttccccgcagggtacatgtacccctccatggatcagctggctgaaatgcttcctggagtccttcaacagtttgggctgaaaagca

SEQ ID NO: 13522 - DNA, 391 bp, Homo sapiens
  source 1..391: mol_type = unassigned DNA
tgtcatcctcacctaccatgacatcggcatgaaccacaaaacctgctacaaccccctcttcaactacgaggacatgcaggagatcacccagcactttgccgtctgccacgtggacgcccctggccagcaggacggcgcagcctccttccccgcagggtacatgtacccctccatggatcagctggctgaaatgcttcctggagtccttcaacagtttgggtaagagcgaaggatcagctccttctctgtctgcagagaagcctggtttctagcatcttcctgccccttggctttgatctggactgaccactaaaattaaggttgcaatttagagatgaggcaagaaattagctcgtcactctgtgaacactgttcttcacacagtctctga

SEQ ID NO: 13523 - DNA, 347 bp, Homo sapiens
  source 1..347: mol_type = unassigned DNA
gaaacaaaatgaatgtgctttgccaccgagacacctaatttttttctcatcttacttttttctcttctctccctcactgctgttcttcagacaaaacctgctacaaccccctcttcaactacgaggacatgcaggagatcacccagcactttgccgtctgccacgtggacgcccctggccagcaggacggcgcagcctccttccccgcagggtacatgtacccctccatggatcagctggctgaaatgcttcctggagtccttcaacagtttgggtaagagcgaaggatcagctccttctctgtctgcagagaagcctggtttctagcatcttcctgccccttggct

SEQ ID NO: 13524 - DNA, 530 bp, Homo sapiens
  source 1..530: mol_type = unassigned DNA
agtcccgtagcacacacagggcggtgtgcatgtcaggcagccgagagtcctgcaccgtggggtgtgtatgtgtgttcacgcgcatgcgtgtgcctgtgtgtctgtgcgtctgcatcaccaaccttctgttagggctaactgtgaggctgaagcttgcactatgcctatacgtggcaggtgacagcagggacatgtctcgggagatgcaggatgtagacctcgctgaggtgaagcctttggtggagaaaggggagaccatcaccggcctcctgcaagagtttgatgtccaggagcaggacatcgagactttacatggctctgttcacgtcacgctgtgtgggactcccaagggaaaccggcctgtcatcctcacctaccatgacatcggcatgaaccacaaaacctgctacaaccccctcttcaactacgaggacatgcaggagatcacccagcactttgccgtctgccacgtggacgcccctggccagcaggacggcgcagcctccttccccgcagggtacatgtacccc

SEQ ID NO: 13525 - DNA, 562 bp, Homo sapiens
  source 1..562: mol_type = unassigned DNA
aaacaaacctcgcctggctcccagctggtgctgaagctcgtcagttcaccatccgccctcggcttccgcggggcgctgggccgccagcctcggcaccgtcctttcctttctccctcgcgttaggcaggtgacagcagggacatgtctcgggagatgcaggatgtagacctcgctgaggtgaagcctttggtggagaaaggggagattgagggaaatgcttagaggtctccactgcctcttctactcacaagagactgaaatttaatccaggtccagatgacagcagccatggaaaaaataccatcaccggcctcctgcaagagtttgatgtccaggagcaggacatcgagactttacatggctctgttcacgtcacgctgtgtgggactcccaagggaaaccggcctgtcatcctcacctaccatgacatcggcatgaaccacaaaacctgctacaaccccctcttcaactacgaggacatgcaggagatcacccagcactttgccgtctgccacgtggacgcccctggccagcaggacggcgcagcctccttccccgcagg

SEQ ID NO: 13526 - DNA, 554 bp, Homo sapiens
  source 1..554: mol_type = unassigned DNA
aaggaagcaaggaagcgcaggcttgatggcctgttttccagatggagcaaacagtccggggcagagatggtggcgggcaagccctttccccagcatttggtgcatttaacagcgcagtctgagccaggcctctgtcccctgcctcctgggagtcccctcctagccctggtccttggagtggcttctggccagagagagctgctgcccgaagccggggctcttatggccagatgagaagagagcttcctcaaaacacagttggaaacaggctggctgtcttcagccacgcggatgccatgaaccccacatgaccagcccactgtctgctgtgtctcctcaggagcaggacatcgagactttacatggctctgttcacgtcacgctgtgtgggactcccaagggaaaccggcctgtcatcctcacctaccatgacatcggcatgaaccacaaaacctgctacaaccccctcttcaactacgaggacatgcaggagatcacccagcactttgccgtctgccacgtggacgcccctggccagcaggacggcgcagcct

SEQ ID NO: 13527 - DNA, 2975 bp, Homo sapiens
  source 1..2975: mol_type = unassigned DNA
gcgggggcggggccgcggcgcctataaagtcgccctccgcccggacgtaaacaaacctcgcctggctcccagctggtgctgaagctcgtcagttcaccatccgccctcggcttccgcggggcgctgggccgccagcctcggcaccgtcctttcctttctccctcgcgttaggcaggtgacagcagggacatgtctcgggagatgcaggatgtagacctcgctgaggtgaagcctttggtggagaaaggggagaccatcaccggcctcctgcaagagtttgatgtccagacaaaacctgctacaaccccctcttcaactacgaggacatgcaggagatcacccagcactttgccgtctgccacgtggacgcccctggccagcaggacggcgcagcctccttccccgcagggtacatgtacccctccatggatcagctggctgaaatgcttcctggagtccttcaacagtttgggctgaaaagcattattggcatgggaacaggagcaggcgcctacatcctaactcgatttgctctaaacaaccctgagatggtggagggccttgtccttatcaacgtgaacccttgtgcggaaggctggatggactgggccgcctccaagatctcaggatggacccaagctctgccggacatggtggtgtcccacctttttgggaaggaagaaatgcagagtaacgtggaagtggtccacacctaccgccagcacattgtgaatgacatgaaccccggcaacctgcacctgttcatcaatgcctacaacagccggcgcgacctggagattgagcgaccaatgccgggaacccacacagtcaccctgcagtgccctgctctgttggtggttggggacagctcgcctgcagtggatgccgtggtggagtgcaactcaaaattggacccaacaaagaccactctcctcaagatggcggactgtggcggcctcccgcagatctcccagccggccaagctcgctgaggccttcaagtacttcgtgcagggcatgggatacatgccctcggctagcatgacccgcctgatgcggtcccgcacagcctctggttccagcgtcacttctctggatggcacccgcagccgctcccacaccagcgagggcacccgaagccgctcccacaccagcgagggcacccgcagccgctcgcacaccagcgagggggcccacctggacatcacccccaactcgggtgctgctgggaacagcgccgggcccaagtccatggaggtctcctgctaggcggcctgcccagctgccgcccccggactctgatctctgtagtggccccctcctccccggccccttttcgccccctgcctgccatactgcgcctaactcggtattaatccaaagcttattttgtaagagtgagctctggtggagacaaatgaggtctattacgtgggtgccctctccaaaggcggggtggcggtggaccaaaggaaggaagcaagcatctccgcatcgcatcctcttccattaaccagtggccggttgccactctcctcccctccctcagagacaccaaactgccaaaaacaagacgcgtagcagcacacacttcacaaagccaagcctaggccgccctgagcatcctggttcaaacgggtgcctggtcagaaggccagccgcccacttcccgtttcctctttaactgaggagaagctgatccagtttccggaaacaaaatccttttctcatttggggaggggggtaatagtgacatgcaggcacctcttttaaacaggcaaaacaggaagggggaaaaggtgggattcatgtcgaggctagaggcatttggaacaacaaatctacgtagttaacttgaagaaaccgatttttaaagttggtgcatctagaaagctttgaatgcagaagcaaacaagcttgatttttctagcatcctcttaatgtgcagcaaaagcaggcgacaaaatctcctggctttacagacaaaaatatttcagcaaacgttgggcatcatggtttttgaaggctttagttctgctttctgcctctcctccacagccccaacctcccacccctgatacatgagccagtgattattcttgttcagggagaagatcatttagatttgttttgcattccttagaatggagggcaacattccacagctgccctggctgtgatgagtgtccttgcaggggccggagtaggagcactggggtgggggtggaattggggttactcgatgtaagggattccttgttgttgtgttgagatccagtgcagttgtgatttctgtggatcccagcttggttccaggaattttgtgtgattggcttaaatccagttttcaatcttcgacagctgggctggaacgtgaactcagtagctgaacctgtctgacccggtcacgttcttggatcctcagaactctttgctcttgtcggggtgggggtgggaactcacgtggggagcggtggctgagaaaatgtaaggattctggaatacatattccatgggactttccttccctctcctgcttcctcttttcctgctccctaacctttcgccgaatggggcagcaccactgacgtttctgggcggccagtgcggctgccaggttcctgtactactgccttgtacttttcattttggctcaccgtggattttctcataggaagtttggtcagagtgaattgaatattgtaagtcagccactgggacccgaggatttctgggaccccgcagttgggaggaggaagtagtccagccttccaggtggcgtgagaggcaatgactcgttacctgccgcccatcaccttggaggccttccctggccttgagtagaaaagtcggggatcggggcaagagaggctgagtacggatgggaaactattgtgcacaagtctttccagaggagtttcttaatgagatatttgtatttatttccagaccaataaatttgtaactttgcagcgg

SEQ ID NO: 13528 - DNA, 2122 bp, Homo sapiens
  source 1..2122: mol_type = unassigned DNA
cggccccccgcattccccgcccccacctccccgccttgttgtccaacttctcccggagcagccggagagcaggcgtcgggacgcagcaaagagaggagagaccccagagtcagaaggagtgagaaccctgacccctaatcccactgcatccagccaataggagcccagccaccatggcggagctgcaggaggtgcagatcacagaggagaagccactgttgccaggacagacgcctgaggcggccaaggaggctgagttagctgcccgaatcctcctggaccagggacagactcactctgtggagacaccatacggctctgtcactttcactgtctatggcacccccaaacccaaacgcccagcgatccttacctaccacgatgtgggactcaactataaatcttgcttccagccactgtttcagttcgaggacatgcaggaaatcattcagaactttgtgcgggttcatgtggatgcccctggaatggaagagggagcccctgtgttccctttgggatatcagtacccatctctggaccagcttgcagacatgatcccttgcgtcctgcagtacctaaatttctctacaataattggagttggtgttggagctggagcctacatcctggcgagatatgctcttaaccacccggacactgttgaaggtcttgtcctcatcaacattgatcccaatgccaagggttggatggattgggcagcccacaagctaacaggcctcacctcttccattccggagatgatccttggacatcttttcagccaggaagagctctctggaaattctgagttgatacaaaagtacagaaatatcattacacatgcacccaacctggataacattgaattgtactggaacagctacaacaaccgccgagacctgaactttgagcgtggaggtgatatcaccctcaggtgtcctgtgatgctggtggtaggagaccaagcacctcatgaagatgcagtggtggaatgtaactcaaaactggaccccacccagacctcgttcctcaagatggctgactccggaggtcagccccagctgactcagccaggcaagctgaccgaggccttcaagtacttcctgcaaggcatgggctacatggcctcatcctgcatgactcgcctgtcccggtctcgtacagcctctctgaccagtgcagcatccgttgatggcaaccggtcccgctctcgcaccctgtcccagagcagcgagtctggaactctttcttcggggcccccggggcacaccatggaggtctcctgttgaatggcccttgttgccctagagtgggacccagccctcacctcccccagagctaacctgggaggtgctgaaggggcattgggccaccgtaagcaagggaaaaagggcagatcatgcggggagatgaccttgatctttgattgctaccctaaccttgacctttaacccgtgattccccccagctcctggaagagatgtcctaatatctcttagggacccagacccctaaattctcctcctcccccattttgatgttaaggtggagagggcatatgcatcctctgtcctgatctaggtgtctatagctgaggggtaagaggttgttgtagttgtcctggtgcctccatcagactctccctacttgtcccatatttgcaaggggaggggatttggggctggggctccattcaccaaagctgaggtggcttctcattaaccctttaggactctgaagggtatggacctacgtgaatgtgtgtcagggggagacttgctggtgggttagtggtcctcaggatgtgatagaaacatccagtgtaaaaaggaagttggaatgggagttggcgggcagtgaacgagtgtggggaaggattggtgctggggcaacaggaaggggcctggggccgtttggctgcactaactttggtagctcagtgtgcatctagagtgggactggggagggagctaagcttgggctgggctgcttggggcttggcatagggtggaaagggctaccctggggctctgaccacactgtagtatgtgtggagggtgccctcccgtctcccacaacttctgctataacaataaactgtagaggaatctgagtaccgtta

SEQ ID NO: 13529 - DNA, 2127 bp, Homo sapiens
  source 1..2127: mol_type = unassigned DNA
atcctctccccaccccccgcctgcccgcgatcgccctctatttatagcggccccccgcattccccgcccccacctccccgccttgttgtccaacttctcccggagcagccggagagcaggcgtcgggacgcagcaaagagaggagagaccccagagtcagaaggagtgagaaccctgacccctaatcccactgcatccagccaataggagcccagccaccatggcggagctgcaggaggtgcagatcacagaggagaagccactgttgccaggacagacgcctgaggcggccaagactcactctgtggagacaccatacggctctgtcactttcactgtctatggcacccccaaacccaaacgcccagcgatccttacctaccacgatgtgggactcaactataaatcttgcttccagccactgtttcagttcgaggacatgcaggaaatcattcagaactttgtgcgggttcatgtggatgcccctggaatggaagagggagcccctgtgttccctttgggatatcagtacccatctctggaccagcttgcagacatgatcccttgcgtcctgcagtacctaaatttctctacaataattggagttggtgttggagctggagcctacatcctggcgagatatgctcttaaccacccggacactgttgaaggtcttgtcctcatcaacattgatcccaatgccaagggttggatggattgggcagcccacaagctaacaggcctcacctcttccattccggagatgatccttggacatcttttcagccaggaagagctctctggaaattctgagttgatacaaaagtacagaaatatcattacacatgcacccaacctggataacattgaattgtactggaacagctacaacaaccgccgagacctgaactttgagcgtggaggtgatatcaccctcaggtgtcctgtgatgctggtggtaggagaccaagcacctcatgaagatgcagtggtggaatgtaactcaaaactggaccccacccagacctcgttcctcaagatggctgactccggaggtcagccccagctgactcagccaggcaagctgaccgaggccttcaagtacttcctgcaaggcatgggctacatggcctcatcctgcatgactcgcctgtcccggtctcgtacagcctctctgaccagtgcagcatccgttgatggcaaccggtcccgctctcgcaccctgtcccagagcagcgagtctggaactctttcttcggggcccccggggcacaccatggaggtctcctgttgaatggcccttgttgccctagagtgggacccagccctcacctcccccagagctaacctgggaggtgctgaaggggcattgggccaccgtaagcaagggaaaaagggcagatcatgcggggagatgaccttgatctttgattgctaccctaaccttgacctttaacccgtgattccccccagctcctggaagagatgtcctaatatctcttagggacccagacccctaaattctcctcctcccccattttgatgttaaggtggagagggcatatgcatcctctgtcctgatctaggtgtctatagctgaggggtaagaggttgttgtagttgtcctggtgcctccatcagactctccctacttgtcccatatttgcaaggggaggggatttggggctggggctccattcaccaaagctgaggtggcttctcattaaccctttaggactctgaagggtatggacctacgtgaatgtgtgtcagggggagacttgctggtgggttagtggtcctcaggatgtgatagaaacatccagtgtaaaaaggaagttggaatgggagttggcgggcagtgaacgagtgtggggaaggattggtgctggggcaacaggaaggggcctggggccgtttggctgcactaactttggtagctcagtgtgcatctagagtgggactggggagggagctaagcttgggctgggctgcttggggcttggcatagggtggaaagggctaccctggggctctgaccacactgtagtatgtgtggagggtgccctcccgtctcccacaacttctgctataacaataaactgtagaggaatctgagtaccgtta

SEQ ID NO: 13530 - DNA, 2718 bp, Homo sapiens
  source 1..2718: mol_type = unassigned DNA
gtgggagtccaggagtgggtcgagcttagcggggaggggataaggccatgccctgtttctcatttccttccttctgctgtccctcagcttaaccacccggacactgttgaaggtcttgtcctcatcaacattgatcccaatgccaagggttggatggattgggcagcccacaaggtttggaggggcctgtgtgctgagacctacggttggggatcccctcgtatggatccagttaggctctggtagatagcctaactggatggactctgaacttcaaggagggagtaaaggggcaggaaagtgaagctgtcactttgcctgagtctcttataatatcctgaactttctttttctttttctttttttttttttttttgagatggtgtctcactctgttgccaaggctggagtgcagtggcttgatcttggctcactgcaacctctgcttcctgggttcaagtgattctcctgcctcagcctcccaagtagctgggattacaggcacccgccaccacgcctggctaatatttgtattattagtagagatggggtttcaccatcttggccagggtggtcttgaactcctgacctcgtgatccacccgcctcggcctcccaaagtgctgggattacagacgtgagccactgtgcctggccaataccctgaactttctcacctgccttctcctcatagctaacaggcctcacctcttccattccggagatgatccttggacatcttttcagccaggaagagctctctggaaattctgagttgatacaaaagtacagaaatatcattacacatgcacccaacctggataacattgaattgtactggaacagctacaacaaccgccgagacctgaactttgagcgtggaggtgatatcaccctcaggtgtcctgtgatgctggtggtaggagaccaagcacctcatgaagatgcagtggttagtagggaattttggggtgagtgagggaggagggttggggtcctaaagtggtggtcagaagagtatcttgccaaggggatgtcctgtttggcacagggagatcaactttggggcactaagaatttgattcctggtaaggaggaactgggtagggagctgatagaaaagggactggggtctgggttcctgggtcccttacgggggaggcgccacagtgggcgtgacctcattcattcagcctcctgcttactccaggtggaatgtaactcaaaactggaccccacccagacctcgttcctcaaggtcagtaacctgttcctgggcccccgtccacagtcatatatcctctctacatgcagctgctaagcctccagggcccggcatgggagcaaatggggtgaacgaagaacaaaacaaaggggctagagtgaagaagctagggaagagagaccctttccacctctctgcatggctcatttatgtgtgtttcactttttctgggtggtgctctcctgaacagatggctgactccggaggtcagccccagctgactcaggtgagtgccgctgccgtccatgggatggggaagggacataggataccggtggcactgggctctgccctttgccacacacccggccccacagtgccgcagcctcaggctccagctcttcctctaacctcatctcaccgtctccctcgcctcttcttacttccgcagccaggcaagctgaccgaggccttcaagtacttcctgcaaggcatgggctacatggcctcatcctgcatgactcgcctgtcccggtctcgtacagcctctctgaccagtgcagcatccgttgatggcaaccggtcccgctctcgcaccctgtcccagagcagcgagtctggaactctttcttcggggcccccggggcacaccatggaggtctcctgttgaatggcccttgttgccctagagtgggacccagccctcacctcccccagagctaacctgggaggtgctgaaggggcattgggccaccgtaagcaagggaaaaagggcagatcatgcggggagatgaccttgatctttgattgctaccctaaccttgacctttaacccgtgattccccccagctcctggaagagatgtcctaatatctcttagggacccagacccctaaattctcctcctcccccattttgatgttaaggtggagagggcatatgcatcctctgtcctgatctaggtgtctatagctgaggggtaagaggttgttgtagttgtcctggtgcctccatcagactctccctacttgtcccatatttgcaaggggaggggatttggggctggggctccattcaccaaagctgaggtggcttctcattaaccctttaggactctgaagggtatggacctacgtgaatgtgtgtcagggggagacttgctggtgggttagtggtcctcaggatgtgatagaaacatccagtgtaaaaaggaagttggaatgggagttggcgggcagtgaacgagtgtggggaaggattggtgctggggcaacaggaaggggcctggggccgtttggctgcactaactttggtagctcagtgtgcatctagagtgggactggggagggagctaagcttgggctgggctgcttggggcttggcatagggtggaaagggctaccctggggctctgaccacactgtagtatgtgtggagggtgccctcccgtctcccacaacttctgctataacaataaactgtagaggaatctga

SEQ ID NO: 13531 - DNA, 527 bp, Homo sapiens
  source 1..527: mol_type = unassigned DNA
cccaaacccaaacgcccagcgatccttacctaccacgatgtgggactcaactataaatcttgcttccagccactgtttcagttcgaggacatgcaggaaatcattcagaactttgtgcgggttcatgtggatgcccctggaatggaagagggagcccctgtgttccctttgggatatcagtacccatctctggaccagcttgcagacatgatcccttgcgtcctgcagtacctaaatttctctacaataattggagttggtgttggagctggagcctacatcctggcgagatatgctcttaaccacccggacactgttgaaggtcttgtcctcatcaacattgatcccaatgccaagggttggatggattgggcagcccacaagctaagcttgggctgggctgcttggggcttggcatagggtggaaagggctaccctggggctctgaccacactgtagtatgtgtggagggtgccctcccgtctcccacaacttctgctataacaataaactgtagaggaatctga

SEQ ID NO: 13532 - DNA, 2146 bp, Homo sapiens
  source 1..2146: mol_type = unassigned DNA
ctcttccccagtagaaggatggcctctgcttggccctctcttctctctttgctttctttccttctattctagtcctttcccttccctatctctcccctctccttccttcccctcctcttctctctctaatcttcattattctttcttatcctcaaactcatcttccggtatcatgttttcctcaattcttgctgatcctgtttttaattctttgttcccttttccctcttgcccacccactcccagctccctgaccttggtgttgctccttttctggcctcgtctcctctgagcctagctcttggtgccctgttttcctgcagactcactctgtggagacaccatacggctctgtcactttcactgtctatggcacccccaaacccaaacgcccagcgatccttacctaccacgatgtgggactcaactataaatcttgcttccagccactgtttcagttcgaggacatgcaggaaatcattcagaactttgtgcgggttcatgtggatgcccctggaatggaagagggagcccctgtgttccctttgggatatcagtacccatctctggaccagcttgcagacatgatcccttgcgtcctgcagtacctaaatttctctacaataattggagttggtgttggagctggagcctacatcctggcgagatatgctcttaaccacccggacactgttgaaggtcttgtcctcatcaacattgatcccaatgccaagggttggatggattgggcagcccacaagctaacaggcctcacctcttccattccggagatgatccttggacatcttttcagccaggaagagctctctggaaattctgagttgatacaaaagtacagaaatatcattacacatgcacccaacctggataacattgaattgtactggaacagctacaacaaccgccgagacctgaactttgagcgtggaggtgatatcaccctcaggtgtcctgtgatgctggtggtaggagaccaagcacctcatgaagatgcagtggtggaatgtaactcaaaactggaccccacccagacctcgttcctcaagatggctgactccggaggtcagccccagctgactcagccaggcaagctgaccgaggccttcaagtacttcctgcaaggcatgggctacatggcctcatcctgcatgactcgcctgtcccggtctcgtacagcctctctgaccagtgcagcatccgttgatggcaaccggtcccgctctcgcaccctgtcccagagcagcgagtctggaactctttcttcggggcccccggggcacaccatggaggtctcctgttgaatggcccttgttgccctagagtgggacccagccctcacctcccccagagctaacctgggaggtgctgaaggggcattgggccaccgtaagcaagggaaaaagggcagatcatgcggggagatgaccttgatctttgattgctaccctaaccttgacctttaacccgtgattccccccagctcctggaagagatgtcctaatatctcttagggacccagacccctaaattctcctcctcccccattttgatgttaaggtggagagggcatatgcatcctctgtcctgatctaggtgtctatagctgaggggtaagaggttgttgtagttgtcctggtgcctccatcagactctccctacttgtcccatatttgcaaggggaggggatttggggctggggctccattcaccaaagctgaggtggcttctcattaaccctttaggactctgaagggtatggacctacgtgaatgtgtgtcagggggagacttgctggtgggttagtggtcctcaggatgtgatagaaacatccagtgtaaaaaggaagttggaatgggagttggcgggcagtgaacgagtgtggggaaggattggtgctggggcaacaggaaggggcctggggccgtttggctgcactaactttggtagctcagtgtgcatctagagtgggactggggagggagctaagcttgggctgggctgcttggggcttggcatagggtggaaagggctaccctggggctctgaccacactgtagtatgtgtggagggtgccctcccgtctcccacaacttctgctataacaataaactgtagaggaatctga

SEQ ID NO: 13533 - DNA, 2216 bp, Homo sapiens
  source 1..2216: mol_type = unassigned DNA
agggggaggggcaggcgaggggccgtagggcctggaaggcgccagccgggccggcgggcggtgtgattgatccgcgtcccctggagctggaggctcgggggaaagggccagcacggagcgggcgctcggttgctgcgcacaaaggctgaggctccaagagctgcagggcgtgtttggggtgcgcgcgaggttgtgtgcaagaccccagagtcagaaggagtgagaaccctgacccctaatcccactgcatccagccaataggagcccagtaagtgaccccaccccgcaggctgcaggctccttcctgtgcaggccaccatggcggagctgcaggaggtgcagatcacagaggagaagccactgttgccaggacagacgcctgaggcggccaagactcactctgtggagacaccatacggctctgtcactttcactgtctatggcacccccaaacccaaacgcccagcgatccttacctaccacgatgtgggactcaactataaatcttgcttccagccactgtttcagttcgaggacatgcaggaaatcattcagaactttgtgcgggttcatgtggatgcccctggaatggaagagggagcccctgtgttccctttgggatatcagtacccatctctggaccagcttgcagacatgatcccttgcgtcctgcagtacctaaatttctctacaataattggagttggtgttggagctggagcctacatcctggcgagatatgctcttaaccacccggacactgttgaaggtcttgtcctcatcaacattgatcccaatgccaagggttggatggattgggcagcccacaagctaacaggcctcacctcttccattccggagatgatccttggacatcttttcagccaggaagagctctctggaaattctgagttgatacaaaagtacagaaatatcattacacatgcacccaacctggataacattgaattgtactggaacagctacaacaaccgccgagacctgaactttgagcgtggaggtgatatcaccctcaggtgtcctgtgatgctggtggtaggagaccaagcacctcatgaagatgcagtggtggaatgtaactcaaaactggaccccacccagacctcgttcctcaagatggctgactccggaggtcagccccagctgactcagccaggcaagctgaccgaggccttcaagtacttcctgcaaggcatgggctacatggcctcatcctgcatgactcgcctgtcccggtctcgtacagcctctctgaccagtgcagcatccgttgatggcaaccggtcccgctctcgcaccctgtcccagagcagcgagtctggaactctttcttcggggcccccggggcacaccatggaggtctcctgttgaatggcccttgttgccctagagtgggacccagccctcacctcccccagagctaacctgggaggtgctgaaggggcattgggccaccgtaagcaagggaaaaagggcagatcatgcggggagatgaccttgatctttgattgctaccctaaccttgacctttaacccgtgattccccccagctcctggaagagatgtcctaatatctcttagggacccagacccctaaattctcctcctcccccattttgatgttaaggtggagagggcatatgcatcctctgtcctgatctaggtgtctatagctgaggggtaagaggttgttgtagttgtcctggtgcctccatcagactctccctacttgtcccatatttgcaaggggaggggatttggggctggggctccattcaccaaagctgaggtggcttctcattaaccctttaggactctgaagggtatggacctacgtgaatgtgtgtcagggggagacttgctggtgggttagtggtcctcaggatgtgatagaaacatccagtgtaaaaaggaagttggaatgggagttggcgggcagtgaacgagtgtggggaaggattggtgctggggcaacaggaaggggcctggggccgtttggctgcactaactttggtagctcagtgtgcatctagagtgggactggggagggagctaagcttgggctgggctgcttggggcttggcatagggtggaaagggctaccctggggctctgaccacactgtagtatgtgtggagggtgccctcccgtctcccacaacttctgctataacaataaactgtagaggaatctga

SEQ ID NO: 13534 - DNA, 2162 bp, Homo sapiens
  source 1..2162: mol_type = unassigned DNA
ggcggcagcaggtagggggaggggcaggcgaggggccgtagggcctggaaggcgccagccgggccggcgggcggtgtgattgatccgcgtcccctggagctggaggctcgggggaaagggccagcacggagcgggcgctcggttgctgcgcacaaaggctgaggctccaagagctgcagggcgtgtttgggaccccagagtcagaaggagtgagaaccctgacccctaatcccactgcatccagccaataggagcccagccaccatggcggagctgcaggaggtgcagatcacagaggagaagccactgttgccaggacagacgcctgaggcggccaagactcactctgtggagacaccatacggctctgtcactttcactgtctatggcacccccaaacccaaacgcccagcgatccttacctaccacgatgtgggactcaactataaatcttgcttccagccactgtttcagttcgaggacatgcaggaaatcattcagaactttgtgcgggttcatgtggatgcccctggaatggaagagggagcccctgtgttccctttgggatatcagtacccatctctggaccagcttgcagacatgatcccttgcgtcctgcagtacctaaatttctctacaataattggagttggtgttggagctggagcctacatcctggcgagatatgctcttaaccacccggacactgttgaaggtcttgtcctcatcaacattgatcccaatgccaagggttggatggattgggcagcccacaagctaacaggcctcacctcttccattccggagatgatccttggacatcttttcagccaggaagagctctctggaaattctgagttgatacaaaagtacagaaatatcattacacatgcacccaacctggataacattgaattgtactggaacagctacaacaaccgccgagacctgaactttgagcgtggaggtgatatcaccctcaggtgtcctgtgatgctggtggtaggagaccaagcacctcatgaagatgcagtggtggaatgtaactcaaaactggaccccacccagacctcgttcctcaagatggctgactccggaggtcagccccagctgactcagccaggcaagctgaccgaggccttcaagtacttcctgcaaggcatgggctacatggcctcatcctgcatgactcgcctgtcccggtctcgtacagcctctctgaccagtgcagcatccgttgatggcaaccggtcccgctctcgcaccctgtcccagagcagcgagtctggaactctttcttcggggcccccggggcacaccatggaggtctcctgttgaatggcccttgttgccctagagtgggacccagccctcacctcccccagagctaacctgggaggtgctgaaggggcattgggccaccgtaagcaagggaaaaagggcagatcatgcggggagatgaccttgatctttgattgctaccctaaccttgacctttaacccgtgattccccccagctcctggaagagatgtcctaatatctcttagggacccagacccctaaattctcctcctcccccattttgatgttaaggtggagagggcatatgcatcctctgtcctgatctaggtgtctatagctgaggggtaagaggttgttgtagttgtcctggtgcctccatcagactctccctacttgtcccatatttgcaaggggaggggatttggggctggggctccattcaccaaagctgaggtggcttctcattaaccctttaggactctgaagggtatggacctacgtgaatgtgtgtcagggggagacttgctggtgggttagtggtcctcaggatgtgatagaaacatccagtgtaaaaaggaagttggaatgggagttggcgggcagtgaacgagtgtggggaaggattggtgctggggcaacaggaaggggcctggggccgtttggctgcactaactttggtagctcagtgtgcatctagagtgggactggggagggagctaagcttgggctgggctgcttggggcttggcatagggtggaaagggctaccctggggctctgaccacactgtagtatgtgtggagggtgccctcccgtctcccacaacttctgctataacaataaactgtagaggaatctga

SEQ ID NO: 13535 - DNA, 2079 bp, Homo sapiens
  source 1..2079: mol_type = unassigned DNA
aagcccgagccggggcgggcccgagtcaaaggcaagtgaaggtggaagcggccgcggcggcagcagaccccagagtcagaaggagtgagaaccctgacccctaatcccactgcatccagccaataggagcccagccaccatggcggagctgcaggaggtgcagatcacagaggagaagccactgttgccaggacagacgcctgaggcggccaaggaggctgagttagctgcccgaatcctcctggaccagggacagactcactctgtggagacaccatacggctctgtcactttcactgtctatggcacccccaaacccaaacgcccagcgatccttacctaccacgatgtgggactcaactataaatcttgcttccagccactgtttcagttcgaggacatgcaggaaatcattcagaactttgtgcgggttcatgtggatgcccctggaatggaagagggagcccctgtgttccctttgggatatcagtacccatctctggaccagcttgcagacatgatcccttgcgtcctgcagtacctaaatttctctacaataattggagttggtgttggagctggagcctacatcctggcgagatatgctcttaaccacccggacactgttgaaggtcttgtcctcatcaacattgatcccaatgccaagggttggatggattgggcagcccacaagctaacaggcctcacctcttccattccggagatgatccttggacatcttttcagccaggaagagctctctggaaattctgagttgatacaaaagtacagaaatatcattacacatgcacccaacctggataacattgaattgtactggaacagctacaacaaccgccgagacctgaactttgagcgtggaggtgatatcaccctcaggtgtcctgtgatgctggtggtaggagaccaagcacctcatgaagatgcagtggtggaatgtaactcaaaactggaccccacccagacctcgttcctcaagatggctgactccggaggtcagccccagctgactcagccaggcaagctgaccgaggccttcaagtacttcctgcaaggcatgggctacatggcctcatcctgcatgactcgcctgtcccggtctcgtacagcctctctgaccagtgcagcatccgttgatggcaaccggtcccgctctcgcaccctgtcccagagcagcgagtctggaactctttcttcggggcccccggggcacaccatggaggtctcctgttgaatggcccttgttgccctagagtgggacccagccctcacctcccccagagctaacctgggaggtgctgaaggggcattgggccaccgtaagcaagggaaaaagggcagatcatgcggggagatgaccttgatctttgattgctaccctaaccttgacctttaacccgtgattccccccagctcctggaagagatgtcctaatatctcttagggacccagacccctaaattctcctcctcccccattttgatgttaaggtggagagggcatatgcatcctctgtcctgatctaggtgtctatagctgaggggtaagaggttgttgtagttgtcctggtgcctccatcagactctccctacttgtcccatatttgcaaggggaggggatttggggctggggctccattcaccaaagctgaggtggcttctcattaaccctttaggactctgaagggtatggacctacgtgaatgtgtgtcagggggagacttgctggtgggttagtggtcctcaggatgtgatagaaacatccagtgtaaaaaggaagttggaatgggagttggcgggcagtgaacgagtgtggggaaggattggtgctggggcaacaggaaggggcctggggccgtttggctgcactaactttggtagctcagtgtgcatctagagtgggactggggagggagctaagcttgggctgggctgcttggggcttggcatagggtggaaagggctaccctggggctctgaccacactgtagtatgtgtggagggtgccctcccgtctcccacaacttctgctataacaataaactgtagaggaatctga

SEQ ID NO: 13536 - DNA, 2047 bp, Homo sapiens
  source 1..2047: mol_type = unassigned DNA
tctccccaccccccgcctgcccgcgatcgccctctatttatagcggccccccgcattccccgcccccacctccccgccttgttgtccaacttctcccggagcagccggagagcaggcgtcgggacgcagcaaagagaggagaggccaccatggcggagctgcaggaggtgcagatcacagaggagaagccactgttgccaggacagacgcctgaggcggccaagactcactctgtggagacaccatacggctctgtcactttcactgtctatggcacccccaaacccaaacgcccagcgatccttacctaccacgatgtgggactcaactataaatcttgcttccagccactgtttcagttcgaggacatgcaggaaatcattcagaactttgtgcgggttcatgtggatgcccctggaatggaagagggagcccctgtgttccctttgggatatcagtacccatctctggaccagcttgcagacatgatcccttgcgtcctgcagtacctaaatttctctacaataattggagttggtgttggagctggagcctacatcctggcgagatatgctcttaaccacccggacactgttgaaggtcttgtcctcatcaacattgatcccaatgccaagggttggatggattgggcagcccacaagctaacaggcctcacctcttccattccggagatgatccttggacatcttttcagccaggaagagctctctggaaattctgagttgatacaaaagtacagaaatatcattacacatgcacccaacctggataacattgaattgtactggaacagctacaacaaccgccgagacctgaactttgagcgtggaggtgatatcaccctcaggtgtcctgtgatgctggtggtaggagaccaagcacctcatgaagatgcagtggtggaatgtaactcaaaactggaccccacccagacctcgttcctcaagatggctgactccggaggtcagccccagctgactcagccaggcaagctgaccgaggccttcaagtacttcctgcaaggcatgggctacatggcctcatcctgcatgactcgcctgtcccggtctcgtacagcctctctgaccagtgcagcatccgttgatggcaaccggtcccgctctcgcaccctgtcccagagcagcgagtctggaactctttcttcggggcccccggggcacaccatggaggtctcctgttgaatggcccttgttgccctagagtgggacccagccctcacctcccccagagctaacctgggaggtgctgaaggggcattgggccaccgtaagcaagggaaaaagggcagatcatgcggggagatgaccttgatctttgattgctaccctaaccttgacctttaacccgtgattccccccagctcctggaagagatgtcctaatatctcttagggacccagacccctaaattctcctcctcccccattttgatgttaaggtggagagggcatatgcatcctctgtcctgatctaggtgtctatagctgaggggtaagaggttgttgtagttgtcctggtgcctccatcagactctccctacttgtcccatatttgcaaggggaggggatttggggctggggctccattcaccaaagctgaggtggcttctcattaaccctttaggactctgaagggtatggacctacgtgaatgtgtgtcagggggagacttgctggtgggttagtggtcctcaggatgtgatagaaacatccagtgtaaaaaggaagttggaatgggagttggcgggcagtgaacgagtgtggggaaggattggtgctggggcaacaggaaggggcctggggccgtttggctgcactaactttggtagctcagtgtgcatctagagtgggactggggagggagctaagcttgggctgggctgcttggggcttggcatagggtggaaagggctaccctggggctctgaccacactgtagtatgtgtggagggtgccctcccgtctcccacaacttctgctataacaataaactgtagaggaatctga

SEQ ID NO: 13537 - DNA, 2880 bp, Homo sapiens
  source 1..2880: mol_type = unassigned DNA
gtgattgatccgcgtcccctggagctggaggctcgggggaaagggccagcacggagcgggcgctcggttgctgcgcacaaaggctgaggctccaagagctgcagggcgtgtttggggtgcgcgcgaggttgtgtgcaaggtccggggcgcttggcaccggccacgcaagggtgtcagtctccacgcggacgggctgcgtagggactcgtagggacgggttccgggtgctgggcccggccggtctcctctgtcctacccatcccttcccgatggcgcttgccttcgcgggccgtcgggggagaacgggagaagattgtgggaccgctctcctctccctttctccactcgtgggacctacacggagactgagtagaggagagaagcgacggcaccaatctttgtgtttgtttttaaattgtggagggaaacagccatgctctgctaccctcctcttactggagagctgtcaaaaattttggggatcccctattcccccgcgtttagtccccctgcagatagaaaattgaggccaaatgtagtaactaactggggcaaggtcacactgggagtggcagagccgggattcgaatccggaggttctgacagggccaccctcttacctccacatcagcacttccttctctcctccgcgcagcctgaactgatgcccttgtagcctatattgattccggctcgagcctagagaggacgtgttctctggacttaggggtagacagacactggggagggttagtgacccgaggaggttgatgaccctgggagtctgggtcttggctgaggctttccgtccctgaaagaccccaggtctgtctcccatgtcattcacctcgttgctgtgttttctcagaccccagagtcagaaggagtgagaaccctgacccctaatcccactgcatccagccaataggagcccagccaccatggcggagctgcaggaggtgcagatcacagaggagaagccactgttgccaggacagacgcctgaggcggccaaggaggctgagttagctgcccgaatcctcctggaccagggacagactcactctgtggagacaccatacggctctgtcactttcactgtctatggcacccccaaacccaaacgcccagcgatccttacctaccacgatgtgggactcaactataaatcttgcttccagccactgtttcagttcgaggacatgcaggaaatcattcagaactttgtgcgggttcatgtggatgcccctggaatggaagagggagcccctgtgttccctttgggatatcagtacccatctctggaccagcttgcagacatgatcccttgcgtcctgcagtacctaaatttctctacaataattggagttggtgttggagctggagcctacatcctggcgagatatgctcttaaccacccggacactgttgaaggtcttgtcctcatcaacattgatcccaatgccaagggttggatggattgggcagcccacaagctaacaggcctcacctcttccattccggagatgatccttggacatcttttcagccaggaagagctctctggaaattctgagttgatacaaaagtacagaaatatcattacacatgcacccaacctggataacattgaattgtactggaacagctacaacaaccgccgagacctgaactttgagcgtggaggtgatatcaccctcaggtgtcctgtgatgctggtggtaggagaccaagcacctcatgaagatgcagtggtggaatgtaactcaaaactggaccccacccagacctcgttcctcaagatggctgactccggaggtcagccccagctgactcagccaggcaagctgaccgaggccttcaagtacttcctgcaaggcatgggctacatggcctcatcctgcatgactcgcctgtcccggtctcgtacagcctctctgaccagtgcagcatccgttgatggcaaccggtcccgctctcgcaccctgtcccagagcagcgagtctggaactctttcttcggggcccccggggcacaccatggaggtctcctgttgaatggcccttgttgccctagagtgggacccagccctcacctcccccagagctaacctgggaggtgctgaaggggcattgggccaccgtaagcaagggaaaaagggcagatcatgcggggagatgaccttgatctttgattgctaccctaaccttgacctttaacccgtgattccccccagctcctggaagagatgtcctaatatctcttagggacccagacccctaaattctcctcctcccccattttgatgttaaggtggagagggcatatgcatcctctgtcctgatctaggtgtctatagctgaggggtaagaggttgttgtagttgtcctggtgcctccatcagactctccctacttgtcccatatttgcaaggggaggggatttggggctggggctccattcaccaaagctgaggtggcttctcattaaccctttaggactctgaagggtatggacctacgtgaatgtgtgtcagggggagacttgctggtgggttagtggtcctcaggatgtgatagaaacatccagtgtaaaaaggaagttggaatgggagttggcgggcagtgaacgagtgtggggaaggattggtgctggggcaacaggaaggggcctggggccgtttggctgcactaactttggtagctcagtgtgcatctagagtgggactggggagggagctaagcttgggctgggctgcttggggcttggcatagggtggaaagggctaccctggggctctgaccacactgtagtatgtgtggagggtgccctcccgtctcccacaacttctgctataacaataaactgtagaggaatctg

SEQ ID NO: 13538 - DNA, 1919 bp, Homo sapiens
  source 1..1919: mol_type = unassigned DNA
aagtgaaggtggaagcggccgcggcggcagcaggccaccatggcggagctgcaggaggtgcagatcacagaggagaagccactgttgccaggacagacgcctgaggcggccaagactcactctgtggagacaccatacggctctgtcactttcactgtctatggcacccccaaacccaaacgcccagcgatccttacctaccacgatgtgggactcaactccactgtttcagttcgaggacatgcaggaaatcattcagaactttgtgcgggttcatgtggatgcccctggaatggaagagggagcccctgtgttccctttgggatatcagtacccatctctggaccagcttgcagacatgatcccttgcgtcctgcagtacctaaatttctctacaataattggagttggtgttggagctggagcctacatcctggcgagatatgctcttaaccacccggacactgttgaaggtcttgtcctcatcaacattgatcccaatgccaagggttggatggattgggcagcccacaagctaacaggcctcacctcttccattccggagatgatccttggacatcttttcagccaggaagagctctctggaaattctgagttgatacaaaagtacagaaatatcattacacatgcacccaacctggataacattgaattgtactggaacagctacaacaaccgccgagacctgaactttgagcgtggaggtgatatcaccctcaggtgtcctgtgatgctggtggtaggagaccaagcacctcatgaagatgcagtggtggaatgtaactcaaaactggaccccacccagacctcgttcctcaagatggctgactccggaggtcagccccagctgactcagccaggcaagctgaccgaggccttcaagtacttcctgcaaggcatgggctacatggcctcatcctgcatgactcgcctgtcccggtctcgtacagcctctctgaccagtgcagcatccgttgatggcaaccggtcccgctctcgcaccctgtcccagagcagcgagtctggaactctttcttcggggcccccggggcacaccatggaggtctcctgttgaatggcccttgttgccctagagtgggacccagccctcacctcccccagagctaacctgggaggtgctgaaggggcattgggccaccgtaagcaagggaaaaagggcagatcatgcggggagatgaccttgatctttgattgctaccctaaccttgacctttaacccgtgattccccccagctcctggaagagatgtcctaatatctcttagggacccagacccctaaattctcctcctcccccattttgatgttaaggtggagagggcatatgcatcctctgtcctgatctaggtgtctatagctgaggggtaagaggttgttgtagttgtcctggtgcctccatcagactctccctacttgtcccatatttgcaaggggaggggatttggggctggggctccattcaccaaagctgaggtggcttctcattaaccctttaggactctgaagggtatggacctacgtgaatgtgtgtcagggggagacttgctggtgggttagtggtcctcaggatgtgatagaaacatccagtgtaaaaaggaagttggaatgggagttggcgggcagtgaacgagtgtggggaaggattggtgctggggcaacaggaaggggcctggggccgtttggctgcactaactttggtagctcagtgtgcatctagagtgggactggggagggagctaagcttgggctgggctgcttggggcttggcatagggtggaaagggctaccctggggctctgaccacactgtagtatgtgtggagggtgccctcccgtctcccacaacttctgctataacaataaactgtagaggaatctg

SEQ ID NO: 13539 - DNA, 1980 bp, Homo sapiens
  source 1..1980: mol_type = unassigned DNA
gggtctgcgggaagcccgagccggggcgggcccgagtcaaaggcaagtgaaggtggaagcggccgcggcggcagcaggccaccatggcggagctgcaggaggtgcagatcacagaggagaagccactgttgccaggacagacgcctgaggcggccaagactcactctgtggagacaccatacggctctgtcactttcactgtctatggcacccccaaacccaaacgcccagcgatccttacctaccacgatgtgggactcaactataaatcttgcttccagccactgtttcagttcgaggacatgcaggaaatcattcagaactttgtgcgggttcatgtggatgcccctggaatggaagagggagcccctgtgttccctttgggatatcagtacccatctctggaccagcttgcagacatgatcccttgcgtcctgcagtacctaaatttctctacaataattggagttggtgttggagctggagcctacatcctggcgagatatgctcttaaccacccggacactgttgaaggtcttgtcctcatcaacattgatcccaatgccaagggttggatggattgggcagcccacaagctaacaggcctcacctcttccattccggagatgatccttggacatcttttcagccaggaagagctctctggaaattctgagttgatacaaaagtacagaaatatcattacacatgcacccaacctggataacattgaattgtactggaacagctacaacaaccgccgagacctgaactttgagcgtggaggtgatatcaccctcaggtgtcctgtgatgctggtggtaggagaccaagcacctcatgaagatgcagtggtggaatgtaactcaaaactggaccccacccagacctcgttcctcaagatggctgactccggaggtcagccccagctgactcagccaggcaagctgaccgaggccttcaagtacttcctgcaaggcatgggctacatggcctcatcctgcatgactcgcctgtcccggtctcgtacagcctctctgaccagtgcagcatccgttgatggcaaccggtcccgctctcgcaccctgtcccagagcagcgagtctggaactctttcttcggggcccccggggcacaccatggaggtctcctgttgaatggcccttgttgccctagagtgggacccagccctcacctcccccagagctaacctgggaggtgctgaaggggcattgggccaccgtaagcaagggaaaaagggcagatcatgcggggagatgaccttgatctttgattgctaccctaaccttgacctttaacccgtgattccccccagctcctggaagagatgtcctaatatctcttagggacccagacccctaaattctcctcctcccccattttgatgttaaggtggagagggcatatgcatcctctgtcctgatctaggtgtctatagctgaggggtaagaggttgttgtagttgtcctggtgcctccatcagactctccctacttgtcccatatttgcaaggggaggggatttggggctggggctccattcaccaaagctgaggtggcttctcattaaccctttaggactctgaagggtatggacctacgtgaatgtgtgtcagggggagacttgctggtgggttagtggtcctcaggatgtgatagaaacatccagtgtaaaaaggaagttggaatgggagttggcgggcagtgaacgagtgtggggaaggattggtgctggggcaacaggaaggggcctggggccgtttggctgcactaactttggtagctcagtgtgcatctagagtgggactggggagggagctaagcttgggctgggctgcttggggcttggcatagggtggaaagggctaccctggggctctgaccacactgtagtatgtgtggagggtgccctcccgtctcccacaacttctgctataacaataaactgtagaggaatctg

SEQ ID NO: 13540 - DNA, 2022 bp, Homo sapiens
  source 1..2022: mol_type = unassigned DNA
gggtctgcgggaagcccgagccggggcgggcccgagtcaaaggcaagtgaaggtggaagcggccgcggcggcagcaggccaccatggcggagctgcaggaggtgcagatcacagaggagaagccactgttgccaggacagacgcctgaggcggccaaggaggctgagttagctgcccgaatcctcctggaccagggacagactcactctgtggagacaccatacggctctgtcactttcactgtctatggcacccccaaacccaaacgcccagcgatccttacctaccacgatgtgggactcaactataaatcttgcttccagccactgtttcagttcgaggacatgcaggaaatcattcagaactttgtgcgggttcatgtggatgcccctggaatggaagagggagcccctgtgttccctttgggatatcagtacccatctctggaccagcttgcagacatgatcccttgcgtcctgcagtacctaaatttctctacaataattggagttggtgttggagctggagcctacatcctggcgagatatgctcttaaccacccggacactgttgaaggtcttgtcctcatcaacattgatcccaatgccaagggttggatggattgggcagcccacaagctaacaggcctcacctcttccattccggagatgatccttggacatcttttcagccaggaagagctctctggaaattctgagttgatacaaaagtacagaaatatcattacacatgcacccaacctggataacattgaattgtactggaacagctacaacaaccgccgagacctgaactttgagcgtggaggtgatatcaccctcaggtgtcctgtgatgctggtggtaggagaccaagcacctcatgaagatgcagtggtggaatgtaactcaaaactggaccccacccagacctcgttcctcaagatggctgactccggaggtcagccccagctgactcagccaggcaagctgaccgaggccttcaagtacttcctgcaaggcatgggctacatggcctcatcctgcatgactcgcctgtcccggtctcgtacagcctctctgaccagtgcagcatccgttgatggcaaccggtcccgctctcgcaccctgtcccagagcagcgagtctggaactctttcttcggggcccccggggcacaccatggaggtctcctgttgaatggcccttgttgccctagagtgggacccagccctcacctcccccagagctaacctgggaggtgctgaaggggcattgggccaccgtaagcaagggaaaaagggcagatcatgcggggagatgaccttgatctttgattgctaccctaaccttgacctttaacccgtgattccccccagctcctggaagagatgtcctaatatctcttagggacccagacccctaaattctcctcctcccccattttgatgttaaggtggagagggcatatgcatcctctgtcctgatctaggtgtctatagctgaggggtaagaggttgttgtagttgtcctggtgcctccatcagactctccctacttgtcccatatttgcaaggggaggggatttggggctggggctccattcaccaaagctgaggtggcttctcattaaccctttaggactctgaagggtatggacctacgtgaatgtgtgtcagggggagacttgctggtgggttagtggtcctcaggatgtgatagaaacatccagtgtaaaaaggaagttggaatgggagttggcgggcagtgaacgagtgtggggaaggattggtgctggggcaacaggaaggggcctggggccgtttggctgcactaactttggtagctcagtgtgcatctagagtgggactggggagggagctaagcttgggctgggctgcttggggcttggcatagggtggaaagggctaccctggggctctgaccacactgtagtatgtgtggagggtgccctcccgtctcccacaacttctgctataacaataaactgtagaggaatctg

SEQ ID NO: 13541 - DNA, 2084 bp, Homo sapiens
  source 1..2084: mol_type = unassigned DNA
attgaccccagagtccctgttggccatcctctccccaccccccgcctgcccgcgatcgccctctatttatagcggccccccgcattccccgcccccacctccccgccttgttgtccaacttctcccggagcagccggagagcaggcgtcgggacgcagcaaagagaggagaggccaccatggcggagctgcaggaggtgcagatcacagaggagaagccactgttgccaggacagacgcctgaggcggccaaggaggctgagttagctgcccgaatcctcctggaccagggacagactcactctgtggagacaccatacggctctgtcactttcactgtctatggcacccccaaacccaaacgcccagcgatccttacctaccacgatgtgggactcaactataaatcttgcttccagccactgtttcagttcgaggacatgcaggaaatcattcagaactttgtgcgggttcatgtggatgcccctggaatggaagagggagcccctgtgttccctttgggatatcagtacccatctctggaccagcttgcagacatgatcccttgcgtcctgcagtacctaaatttctctacaataattggagttggtgttggagctggagcctacatcctggcgagatatgctcttaaccacccggacactgttgaaggtcttgtcctcatcaacattgatcccaatgccaagggttggatggattgggcagcccacaagctaacaggcctcacctcttccattccggagatgatccttggacatcttttcagccaggaagagctctctggaaattctgagttgatacaaaagtacagaaatatcattacacatgcacccaacctggataacattgaattgtactggaacagctacaacaaccgccgagacctgaactttgagcgtggaggtgatatcaccctcaggtgtcctgtgatgctggtggtggaatgtaactcaaaactggaccccacccagacctcgttcctcaagatggctgactccggaggtcagccccagctgactcagccaggcaagctgaccgaggccttcaagtacttcctgcaaggcatgggctacatggcctcatcctgcatgactcgcctgtcccggtctcgtacagcctctctgaccagtgcagcatccgttgatggcaaccggtcccgctctcgcaccctgtcccagagcagcgagtctggaactctttcttcggggcccccggggcacaccatggaggtctcctgttgaatggcccttgttgccctagagtgggacccagccctcacctcccccagagctaacctgggaggtgctgaaggggcattgggccaccgtaagcaagggaaaaagggcagatcatgcggggagatgaccttgatctttgattgctaccctaaccttgacctttaacccgtgattccccccagctcctggaagagatgtcctaatatctcttagggacccagacccctaaattctcctcctcccccattttgatgttaaggtggagagggcatatgcatcctctgtcctgatctaggtgtctatagctgaggggtaagaggttgttgtagttgtcctggtgcctccatcagactctccctacttgtcccatatttgcaaggggaggggatttggggctggggctccattcaccaaagctgaggtggcttctcattaaccctttaggactctgaagggtatggacctacgtgaatgtgtgtcagggggagacttgctggtgggttagtggtcctcaggatgtgatagaaacatccagtgtaaaaaggaagttggaatgggagttggcgggcagtgaacgagtgtggggaaggattggtgctggggcaacaggaaggggcctggggccgtttggctgcactaactttggtagctcagtgtgcatctagagtgggactggggagggagctaagcttgggctgggctgcttggggcttggcatagggtggaaagggctaccctggggctctgaccacactgtagtatgtgtggagggtgccctcccgtctcccacaacttctgctataacaataaactgtagaggaatctg

SEQ ID NO: 13542 - DNA, 1784 bp, Homo sapiens
  source 1..1784: mol_type = unassigned DNA
tgccaggccaccatggcggagctgcaggaggtgcagatcacagaggagaagccactgttgccaggacagacgcctgaggcggccaagactcactctgtggagacaccatacggctctgtcactttcactgtctatggcacccccaaacccaaacgcccagcgatccttacctaccacgatgtgggactcaactataaatcttgcttccagccactgtttcagttcgaggacatgcaggaaatcattcagaactttgtgcgggttcatgtggatgcccctggaatggaagagggagcccctgtgttccctttgggatatcagtacccatctctggaccagcttgcagacatgatcccttgcgtcctgcagtacctaaatttctctacaataattggagttggtgttggagctggagcctacatcctggcgagatatgctctaacaggcctcacctcttccattccggagatgatccttggacatcttttcagccaggaagagctctctggaaattctgagttgatacaaaagtacagaaatatcattacacatgcacccaacctggataacattgaattgtactggaacagctacaacaaccgccgagacctgaactttgagcgtggaggtgatatcaccctcaggtgtcctgtgatgctggtggtaggagaccaagcacctcatgaagatgcagtggtggaatgtaactcaaaactggaccccacccagacctcgttcctcaagatggctgactccggaggtcagccccagctgactcagccaggcaagctgaccgaggccttcaagtacttcctgcaaggcatgggctacatggcctcatcctgcatgactcgcctgtcccggtctcgtacagcctctctgaccagtgcagcatccgttgatggcaaccggtcccgctctcgcaccctgtcccagagcagcgagtctggaactctttcttcggggcccccggggcacaccatggaggtctcctgttgaatggcccttgttgccctagagtgggacccagccctcacctcccccagagctaacctgggaggtgctgaaggggcattgggccaccgtaagcaagggaaaaagggcagatcatgcggggagatgaccttgatctttgattgctaccctaaccttgacctttaacccgtgattccccccagctcctggaagagatgtcctaatatctcttagggacccagacccctaaattctcctcctcccccattttgatgttaaggtggagagggcatatgcatcctctgtcctgatctaggtgtctatagctgaggggtaagaggttgttgtagttgtcctggtgcctccatcagactctccctacttgtcccatatttgcaaggggaggggatttggggctggggctccattcaccaaagctgaggtggcttctcattaaccctttaggactctgaagggtatggacctacgtgaatgtgtgtcagggggagacttgctggtgggttagtggtcctcaggatgtgatagaaacatccagtgtaaaaaggaagttggaatgggagttggcgggcagtgaacgagtgtggggaaggattggtgctggggcaacaggaaggggcctggggccgtttggctgcactaactttggtagctcagtgtgcatctagagtgggactggggagggagctaagcttgggctgggctgcttggggcttggcatagggtggaaagggctaccctggggctctgaccacactgtagtatgtgtggagggtgccctcccgtctccc

SEQ ID NO: 13543 - DNA, 1588 bp, Homo sapiens
  source 1..1588: mol_type = unassigned DNA
gtgtcctgtgatgctggtggtaggagaccaagcacctcatgaagatgcagtggttagtagggaattttggggtgagtgagggaggagggttggggtcctaaagtggtggtcagaagagtatcttgccaaggggatgtcctgtttggcacagggagatcaactttggggcactaagaatttgattcctggtaaggaggaactgggtagggagctgatagaaaagggactggggtctgggttcctgggtcccttacgggggaggcgccacagtgggcgtgacctcattcattcagcctcctgcttactccaggtggaatgtaactcaaaactggaccccacccagacctcgttcctcaaggtcagtaacctgttcctgggcccccgtccacagtcatatatcctctctacatgcagctgctaagcctccagggcccggcatgggagcaaatggggtgaacgaagaacaaaacaaaggggctagagtgaagaagctagggaagagagaccctttccacctctctgcatggctcatttatgtgtgtttcactttttctgggtggtgctctcctgaacagatggctgactccggaggtcagccccagctgactcagccaggcaagctgaccgaggccttcaagtacttcctgcaaggcatgggctacatggcctcatcctgcatgactcgcctgtcccggtctcgtacagcctctctgaccagtgcagcatccgttgatggcaaccggtcccgctctcgcaccctgtcccagagcagcgagtctggaactctttcttcggggcccccggggcacaccatggaggtctcctgttgaatggcccttgttgccctagagtgggacccagccctcacctcccccagagctaacctgggaggtgctgaaggggcattgggccaccgtaagcaagggaaaaagggcagatcatgcggggagatgaccttgatctttgattgctaccctaaccttgacctttaacccgtgattccccccagctcctggaagagatgtcctaatatctcttagggacccagacccctaaattctcctcctcccccattttgatgttaaggtggagagggcatatgcatcctctgtcctgatctaggtgtctatagctgaggggtaagaggttgttgtagttgtcctggtgcctccatcagactctccctacttgtcccatatttgcaaggggaggggatttggggctggggctccattcaccaaagctgaggtggcttctcattaaccctttaggactctgaagggtatggacctacgtgaatgtgtgtcagggggagacttgctggtgggttagtggtcctcaggatgtgatagaaacatccagtgtaaaaaggaagttggaatgggagttggcgggcagtgaacgagtgtggggaaggattggtgctggggcaacaggaaggggcctggggccgtttggctgcactaactttggtagctcagtgtgcatctagagtgggactggggagggagctaagcttgggctgggctgcttggggcttggcatagggtggaaagggctaccctggggctctgaccacactgtagta

SEQ ID NO: 13544 - DNA, 2096 bp, Homo sapiens
  source 1..2096: mol_type = unassigned DNA
actcctgcgccctcgacgttcccccgtgccccctttcggcgccagcacacctgcccctgccagccggcgagacccccgcctcctcagcggcggtcccgcccacctcctcctttcttaatctagttctctgtgttcgggcggggggagtcgaactcgtggggtgtcagtatcccgggttcgtctccccactaccggttcccaccactgagtctgggggcgaaggaaggagccagagtgcaattgcagatccagaccccagagtcagaaggagtgagaaccctgacccctaatcccactgcatccagccaataggagcccagccaccatggcggagctgcaggaggtgcagatcacagaggagaagccactgttgccaggacagacgcctgaggcggccaagactcactctgtggagacaccatacggctctgtcactttcactgtctatggcacccccaaacccaaacgcccagcgatccttacctaccacgatgtgggactcaactataaatcttgcttccagccactgtttcagttcgaggacatgcaggaaatcattcagaactttgtgcgggttcatgtggatgcccctggaatggaagagggagcccctgtgttccctttgggatatcagtacccatctctggaccagcttgcagacatgatcccttgcgtcctgcagtacctaaatttctctacaataattggagttggtgttggagctggagcctacatcctggcgagatatgctcttaaccacccggacactgttgaaggtcttgtcctcatcaacattgatcccaatgccaagggttggatggattgggcagcccacaagctaacaggcctcacctcttccattccggagatgatccttggacatcttttcagccaggaagagctctctggaaattctgagttgatacaaaagtacagaaatatcattacacatgcacccaacctggataacattgaattgtactggaacagctacaacaaccgccgagacctgaactttgagcgtggaggtgatatcaccctcaggtgtcctgtgatgctggtggtaggagaccaagcacctcatgaagatgcagtgatggctgactccggaggtcagccccagctgactcagccaggcaagctgaccgaggccttcaagtacttcctgcaaggcatgggctacatggcctcatcctgcatgactcgcctgtcccggtctcgtacagcctctctgaccagtgcagcatccgttgatggcaaccggtcccgctctcgcaccctgtcccagagcagcgagtctggaactctttcttcggggcccccggggcacaccatggaggtctcctgttgaatggcccttgttgccctagagtgggacccagccctcacctcccccagagctaacctgggaggtgctgaaggggcattgggccaccgtaagcaagggaaaaagggcagatcatgcggggagatgaccttgatctttgattgctaccctaaccttgacctttaacccgtgattccccccagctcctggaagagatgtcctaatatctcttagggacccagacccctaaattctcctcctcccccattttgatgttaaggtggagagggcatatgcatcctctgtcctgatctaggtgtctatagctgaggggtaagaggttgttgtagttgtcctggtgcctccatcagactctccctacttgtcccatatttgcaaggggaggggatttggggctggggctccattcaccaaagctgaggtggcttctcattaaccctttaggactctgaagggtatggacctacgtgaatgtgtgtcagggggagacttgctggtgggttagtggtcctcaggatgtgatagaaacatccagtgtaaaaaggaagttggaatgggagttggcgggcagtgaacgagtgtggggaaggattggtgctggggcaacaggaaggggcctggggccgtttggctgcactaactttggtagctcagtgtgcatctagagtgggactggggagggagctaagcttgggctgggctgcttggggcttggcatagggtggaaagggctaccctggggctctga

SEQ ID NO: 13545 - DNA, 1500 bp, Homo sapiens
  source 1..1500: mol_type = unassigned DNA
ctcaccgggttggggacagggatggaaaatggtggttccatgcaggccaccatggcggagctgcaggaggtgcagatcacagaggagaagccactgttgccaggacagacgcctgaggcggccaagactcactctgtggagacaccatacggctctgtcactttcactgtctatggcacccccaaacccaaacgcccagcgatccttacctaccacgatgtgggactcaactataaatcttgcttccagccactgtttcagttcgaggacatgcaggaaatcattcagaactttgtgcgggttcatgtggatgcccctggaatggaagagggagcccctgtgttccctttgggatatcagtacccatctctggaccagcttgcagacatgatcccttgcgtcctgcagtacctaaatttctctacaataattggagttggtgttggagctggagcctacatcctggcgagatatgctcttaaccacccggacactgttgaaggtcttgtcctcatcaacattgatcccaatgccaagggttggatggattgggcagcccacaagctaacaggcctcacctcttccattccggagatgatccttggacatcttttcagccaggaagagctctctggaaattctgagttgatacaaaagtacagaaatatcattacacatgcacccaacctggataacattgaattgtactggaacagctacaacaaccgccgagacctgaactttgagcgtggaggtgatatcaccctcaggtgtcctgtgatgctggtggtaggagaccaagcacctcatgaagatgcagtggtggaatgtaactcaaaactggaccccacccagacctcgttcctcaagatggctgactccggaggtcagccccagctgactcagccaggcaagctgaccgaggccttcaagtacttcctgcaaggcatgggctacatggcctcatcctgcatgactcgcctgtcccggtctcgtacagcctctctgaccagtgcagcatccgttgatggcaaccggtcccgctctcgcaccctgtcccagagcagcgagtctggaactctttcttcggggcccccggggcacaccatggaggtctcctgttgaatggcccttgttgccctagagtgggacccagccctcacctcccccagagctaacctgggaggtgctgaaggggcattgggccaccgtaagcaagggaaaaagggcagatcatgcggggagatgaccttgatctttgattgctaccctaaccttgacctttaacccgtgattccccccagctcctggaagagatgtcctaatatctcttagggacccagacccctaaattctcctcctcccccattttgatgttaaggtggagagggcatatgcatcctctgtcctgatctaggtgtctatagctgaggggtaagaggttgttgtagttgtcctggtgcctccatcagactctccctacttgtcccatatttgcaa

SEQ ID NO: 13546 - DNA, 978 bp, Homo sapiens
  source 1..978: mol_type = unassigned DNA
aaacagtgtgttggttggctggtggatgggtgtttgtttttaagacactagctctccagcagaaagctggggatagacttcaggtatctaccctgactacccgtgccaacctttggcttcttgggcccttctttttcgcgtcctccaaagaaagtttctctacaataattggagttggtgttggagctggagcctacatcctggcgagatatgctcttaaccacccggacactgttgaaggtcttgtcctcatcaacattgatcccaatgccaagggttggatggattgggcagcccacaagctaacaggcctcacctcttccattccggagatgatccttggacatcttttcagccaggaagagctctctggaaattctgagttgatacaaaagtacagaaatatcattacacatgcacccaacctggataacattgaattgtactggaacagctacaacaaccgccgagacctgaactttgagcgtggaggtgatatcaccctcaggtgtcctgtgatgctggtggtaggagaccaagcacctcatgaagatgcagtggtggaatgtaactcaaaactggaccccacccagacctcgttcctcaagatggctgactccggaggtcagccccagctgactcagccaggcaagctgaccgaggccttcaagtacttcctgcaaggcatgggctacatggcctcatcctgcatgactcgcctgtcccggtctcgtacagcctctctgaccagtgcagcatccgttgatggcaaccggtcccgctctcgcaccctgtcccagagcagcgagtctggaactctttcttcggggcccccggggcacaccatggaggtctcctgttgaatggcccttgttgccctagagtgggacccagccctcacctcccccagagctaacctgggaggtgctgaaggggcattgggccaccgtaagcaagggaaaaagggcagatcatgcg

SEQ ID NO: 13547 - DNA, 725 bp, Homo sapiens
  source 1..725: mol_type = unassigned DNA
gatggtgtctcactctgttgccaaggctggagtgcagtggcttgatcttggctcactgcaacctctgcttcctgggttcaagtgattctcctgcctcagcctcccaagtagctgggattacaggcacccgccaccacgcctggctaatatttgtattattagtagagatggggtttcaccatcttggccagggtggtcttgaactcctgacctcgtgatccacccgcctcggcctcccaaagtgctgggattacagacgtgagccactgtgcctggccaataccctgaactttctcacctgccttctcctcatagctaacaggcctcacctcttccattccggagatgatccttggacatcttttcagccaggaagagctctctggaaattctgagttgatacaaaagtacagaaatatcattacacatgcacccaacctggataacattgaattgtactggaacagctacaacaaccgccgagacctgaactttgagcgtggaggtgatatcaccctcaggtgtcctgtgatgctggtggtaggagaccaagcacctcatgaagatgcagtggtggaatgtaactcaaaactggaccccacccagacctcgttcctcaagatggctgactccggaggtcagccccagctgactcagccaggcaagctgaccgaggccttcaagtacttcctgcaaggcatgggctacatggcctcatcctgcat

SEQ ID NO: 13548 - DNA, 1051 bp, Homo sapiens
  source 1..1051: mol_type = unassigned DNA
aagtgaaggtggaagcggccgcggcggcagcaggtctgtctcccatgtcattcacctcgttgctgtgttttctcagaccccagagtcagaaggagtgagaaccctgacccctaatcccactgcatccagccaataggagcccagccaccatggcggagctgcaggaggtgcagatcacagaggagaagccactgttgccaggacagacgcctgaggcggccaagactcactctgtggagacaccatacggctctgtcactttcactgtctatggcacccccaaacccaaacgcccagcgatccttacctaccacgatgtgggactcaactataaatcttgcttccagccactgtttcagttcgaggacatgcaggaaatcattcagaactttgtgcgggttcatgtggatgcccctggaatggaagagggagcccctgtgttccctttgggatatcagtacccatctctggaccagcttgcagacatgatcccttgcgtcctgcagtacctaaatttctctacaataattggagttggtgttggagctggagcctacatcctggcgagatatgctcttaaccacccggacactgttgaaggtcttgtcctcatcaacattgatcccaatgccaagggttggatggattgggcagcccacaagctaacaggcctcacctcttccattccggagatgatccttggacatcttttcagccaggaagagctctctggaaattctgagttgatacaaaagtacagaaatatcattacacatgcacccaacctggataacattgaattgtactggaacagctacaacaaccgccgagacctgaactttgagcgtggaggtgatatcaccctcaggtgtcctgtgatgctggtggtaggagaccaagcacctcatgaagatgcagtggtggaatgtaactcaaaactggaccccacccagacctcgttcctcaagatggctgactccggaggtcagccccagctgactcagccaggcaagctgaccgaggccttcaagtacttcctgcaaggcatggg

SEQ ID NO: 13549 - DNA, 556 bp, Homo sapiens
  source 1..556: mol_type = unassigned DNA
cttggccagggtggtcttgaactcctgacctcgtgatccacccgcctcggcctcccaaagtgctgggattacagacgtgagccactgtgcctggccaataccctgaactttctcacctgccttctcctcatagctaacaggcctcacctcttccattccggagatgatccttggacatcttttcagccaggaagagctctctggaaattctgagttgatacaaaagtacagaaatatcattacacatgcacccaacctggataacattgaattgtactggaacagctacaacaaccgccgagacctgaactttgagcgtggaggtgatatcaccctcaggtgtcctgtgatgctggtggtaggagaccaagcacctcatgaagatgcagtgggagatcaactttggggcactaagaatttgattcctggtggaatgtaactcaaaactggaccccacccagacctcgttcctcaagatggctgactccggaggtcagccccagctgactcagccaggcaagctgaccgaggccttcaagtacttcctgcaaggcat

SEQ ID NO: 13550 - DNA, 672 bp, Homo sapiens
  source 1..672: mol_type = unassigned DNA
ataaatcttgcttccagccactgtttcagttcgaggacatgcaggaaatcattcagaactttgtgcgggttcatgtggatgcccctggaatggaagagggagcccctgtgttccctttgggatatcagtacccatctctggaccagcttgcagacatgatcccttgcgtcctgcagtacctaaatttctctacaataattggagttggtgttggagctggagcctacatcctggcgagatatgctcttaaccacccggacactgttgaaggtcttgtcctcatcaacattgatcccaatgccaagggttggatggattgggcagcccacaagctaacaggcctcacctcttccattccggagatgatccttggacatcttttcagccaggaagagctctctggaaattctgagttgatacaaaagtacagaaatatcattacacatgcacccaacctggataacattgaattgtactggaacagctacaacaaccgccgagacctgaactttgagcgtggaggtgatatcaccctcaggtgtcctgtgatgctggtggtaggagaccaagcacctcatgaagatgcagtgacctcgttcctcaagatggctgactccggaggtcagccccagctgactcagccaggcaagctgaccgaggccttcaagtact

SEQ ID NO: 13551 - DNA, 772 bp, Homo sapiens
  source 1..772: mol_type = unassigned DNA
gaaaggaagggtgagttctgactgggggacacgagtccctgtctgattctattgttgaggtgatgtgggttctctttagataaatcttgcttccagccactgtttcagttcgaggacatgcaggaaatcattcagaactttgtgcgggttcatgtggatgcccctggaatggaagagggagcccctgtgttccctttgggatatcagtacccatctctggaccagcttgcagacatgatcccttgcgtcctgcagtacctaaatttctctacaataattggagttggtgttggagctggagcctacatcctggcgagatatgctcttaaccacccggacactgttgaaggtcttgtcctcatcaacattgatcccaatgccaagggttggatggattgggcagcccacaagctaacaggcctcacctcttccattccggagatgatccttggacatcttttcagccaggaagagctctctggaaattctgagttgatacaaaagtacagaaatatcattacacatgcacccaacctggataacattgaattgtactggaacagctacaacaaccgccgagacctgaactttgagcgtggaggtgatatcaccctcaggtgtcctgtgatgctggtggtaggagaccaagcacctcatgaagatgcagtggtggaatgtaactcaaaactggaccccacccagacctcgttcctcaagatggctgactccggaggtcagccccagctgactcagccaggcaagctgaccgagg

SEQ ID NO: 13552 - DNA, 1012 bp, Homo sapiens
  source 1..1012: mol_type = unassigned DNA
acctccccgccttgttgtccaacttctcccggagcagccggagagcaggcgtcgggacgcagcaaagagaggagagaccccagagtcagaaggagtgagaaccctgacccctaatcccactgcatccagccaataggagcccagtaagtgaccccaccccgcaggctgcaggctccttcctgtgcaggccaccatggcggagctgcaggaggtgcagatcacagaggagaagccactgttgccaggacagacgcctgaggcggccaagactcactctgtggagacaccatacggctctgtcactttcactgtctatggcacccccaaacccaaacgcccagcgatccttacctaccacgatgtgggactcaactataaatcttgcttccagccactgtttcagttcgaggacatgcaggaaatcattcagaactttgtgcgggttcatgtggatgcccctggaatggaagagggagcccctgtgttccctttgggatatcagtacccatctctggaccagcttgcagacatgatcccttgcgtcctgcagtacctaaatttctctacaataattggagttggtgttggagctggagcctacatcctggcgagatatgctcttaaccacccggacactgttgaaggtcttgtcctcatcaacattgatcccaatgccaagggttggatggattgggcagcccacaagctaacaggcctcacctcttccattccggagatgatccttggacatcttttcagccaggaagagctctctggaaattctgagttgatacaaaagtacagaaatatcattacacatgcacccaacctggataacattgaattgtactggaacagctacaacaaccgccgagacctgaactttgagcgtggaggtgatatcaccctcaggtgtcctgtgatgctggtggtaggagaccaagcacctcatgaagatgcagtggtggaatgtaactcaaaactggaccccacccagacctcgttcctcaag

SEQ ID NO: 13553 - DNA, 1162 bp, Homo sapiens
  source 1..1162: mol_type = unassigned DNA
gtaatctcagcagttttgggaggctgaggagagtagatcacctgagctcaggagtttgagatcagcttatatagatggggaaactcccacctccctaagctaagaggcgttctatcacagtgtgtattttcatcacgagcacacatttttatttacctttcctcttatgaactgtggacttcttacaagatctcattagcaatgtgggctttctcatgtccctgtggctccgtggatgttcccaagcttactggttttggagtcttgcacagcctccttaacgtgaagacaatgaggatgaagacttttatgatgagccacttccactaaacgaatagccaccatggcggagctgcaggaggtgcagatcacagaggagaagccactgttgccaggacagacgcctgaggcggccaagactcactctgtggagacaccatacggctctgtcactttcactgtctatggcacccccaaacccaaacgcccagcgatccttacctaccacgatgtgggactcaactataaatcttgcttccagccactgtttcagttcgaggacatgcaggaaatcattcagaactttgtgcgggttcatgtggatgcccctggaatggaagagggagcccctgtgttccctttgggatatcagtacccatctctggaccagcttgcagacatgatcccttgcgtcctgcagtacctaaatttctctacaataattggagttggtgttggagctggagcctacatcctggcgagatatgctcttaaccacccggacactgttgaaggtcttgtcctcatcaacattgatcccaatgccaagggttggatggattgggcagcccacaagctaacaggcctcacctcttccattccggagatgatccttggacatcttttcagccaggaagagctctctggaaattctgagttgatacaaaagtacagaaatatcattacacatgcacccaacctggataacattgaattgtactggaacagctacaacaaccgccgagacctgaactttgagcgtggaggtgatatcaccctcaggtgtcctgtgatgctggtggtaggagaccaagcacctcatgaagatgcagtggtggaatgtaactcaaaactggaccccacccagacctcgttcctcaag

SEQ ID NO: 13554 - DNA, 410 bp, Homo sapiens
  source 1..410: mol_type = unassigned DNA
cctgcagtacctaaatttctctacaataattggagttggtgttggagctggagcctacatcctggcgagatatgctcttaaccacccggacactgttgaaggtcttgtcctcatcaacattgatcccaatgccaagggttggatggattgggcagcccacaagctaacaggcctcacctcttccattccggagatgatccttggacatcttttcagccaggaagagctctctggaaattctgagttgatacaaaagtacagaaatatcattacacatgcacccaacctggataacattgaattgtactggaacagctacaacaagtgggtgggctgtgtgtgtatgcatccgccgagacctgaactttgagcgtggaggtgatatcaccctcaggtgtcctgtgatgctg

SEQ ID NO: 13555 - DNA, 848 bp, Homo sapiens
  source 1..848: mol_type = unassigned DNA
gcggccgcggcggcagcagaccccagagtcagaaggagtgagaaccctgacccctaatcccactgcatccagccaataggagcccagccaccatggcggagctgcaggaggtgcagatcacagaggagaagccactgttgccaggacagacgcctgaggcggccaaggaggctgagttagctgcccgaatcctcctggaccagggacagactcactctgtggagacaccatacggctctgtcactttcactgtctatggcacccccaaacccaaacgcccagcgatccttacctaccacgatgtgggactcaactataaatcttgcttccagccactgtttcagttcgaggacatgcaggaaatcattcagaactttgtgcgggttcatgtggatgcccctggaatggaagagggagcccctgtgttccctttgggatatcagtacccatctctggaccagcttgcagacatgatcccttgcgtcctgcagtacctaaatttctctacaataattggagttggtgttggagctggagcctacatcctggcgagatatgctcttaaccacccggacactgttgaaggtcttgtcctcatcaacattgatcccaatgccaagggttggatggattgggcagcccacaagctaacaggcctcacctcttccattccggagatgatccttggacatcttttcagccaggaagagctctctggaaattctgagttgatacaaaagtacagaaatatcattacacatgcacccaacctggataacattgaattgtactggaacagctacaacaaccgccgagacctgaactttgagcgtggaggtgatatcacc

SEQ ID NO: 13556 - DNA, 545 bp, Homo sapiens
  source 1..545: mol_type = unassigned DNA
actcactctgtggagacaccatacggctctgtcactttcactgtctatggcacccccaaacccaaacgcccagcgatccttacctaccacgatgtgggactcaactataaatcttgcttccagccactgtttcagttcgaggacatgcaggaaatcattcagaactttgtgcgggttcatgtggatgcccctggaatggaagagggagcccctgtgttccctttgggatatcagtacccatctctggaccagcttgcagacatgatcccttgcgtcctgcagtacctaaatttctctacaataattggagttggtgttggagctggagcctacatcctggcgagatatgctcttaaccacccggacactgttgaaggcctcacctcttccattccggagatgatccttggacatcttttcagccaggaagagctctctggaaattctgagttgatacaaaagtacagaaatatcattacacatgcacccaacctggataacattgaattgtactggaacagctacaacaaccgccgagacctgaa

SEQ ID NO: 13557 - DNA, 851 bp, Homo sapiens
  source 1..851: mol_type = unassigned DNA
ctggaaacggagctgggggcaggaaaggccctctgtgtgttctagagtagtcttcaacccctgggtccctctgttccctgcatcttcctgtgctgagagaggaagcctggtgtttgaggcgatgtggggatgtagagacaacttcccagtctcatttcctcatcctgccaggccaccatggcggagctgcaggaggtgcagatcacagaggagaagccactgttgccaggacagacgcctgaggcggccaagactcactctgtggagacaccatacggctctgtcactttcactgtctatggcacccccaaacccaaacgcccagcgatccttacctaccacgatgtgggactcaactataaatcttgcttccagccactgtttcagttcgaggacatgcaggaaatcattcagaactttgtgcgggttcatgtggatgcccctggaatggaagagggagcccctgtgttccctttgggatatcagtacccatctctggaccagcttgcagacatgatcccttgcgtcctgcagtacctaaatttctctacaataattggagttggtgttggagctggagcctacatcctggcgagatatgctcttaaccacccggacactgttgaaggtcttgtcctcatcaacattgatcccaatgccaagggttggatggattgggcagcccacaagctaacaggcctcacctcttccattccggagatgatccttggacatcttttcagccaggaagagctctctggaaattctgagttgatacaaaagtacagaaatatcattacacatgcacccaacctggataacattgaattgtactggaacagctacaacaa

SEQ ID NO: 13558 - DNA, 823 bp, Homo sapiens
  source 1..823: mol_type = unassigned DNA
aatcccactgcatccagccaataggagcccagccaccatggcggagctgcaggaggtgcagatcacagaggagaagccactgttgccaggacagacgcctgaggcggccaaggaggctgagttagctgcccgaatcctcctggaccagggacagactcactctgtggagacaccatacggctctgtcactttcactgtctatggcacccccaaacccaaacgcccagcgatccttacctaccacgatgtgggactcaactataaatcttgcttccagccactgtttcagttcgaggacatgcaggaaatcattcagaactttgtgcgggttcatgtggatgcccctggaatggaagagggagcccctgtgttccctttgggatatcagtacccatctctggaccagcttgcagacatgatcccttgcgtcctgcagtacctaaagtgagaggcctgggaacccctccaaaccagagttctctttccagcacaaggagacccttagaacttccagtttctctacaataattggagttggtgttggagctggagcctacatcctggcgagatatgctcttaaccacccggacactgttgaaggtcttgtcctcatcaacattgatcccaatgccaagggttggatggattgggcagcccacaagctaacaggcctcacctcttccattccggagatgatccttggacatcttttcagccaggaagagctctctggaaattctgagttgatacaaaagtacagaaatatcattacacatgcacccaacctggataacattgaattgtactggaacagctacaacaa

SEQ ID NO: 13559 - DNA, 871 bp, Homo sapiens
  source 1..871: mol_type = unassigned DNA
ctagttctctgtgttcgggcggggggagtcgaactcgtggggtgtcagtatcccgggttcgtctccccactaccggttcccaccactgagtctgggggcgaaggaaggagccagagtgcaattgcagatccagaccccagagtcagaaggagtgagaaccctgacccctaatcccactgcatccagccaataggagcccagccaccatggcggagctgcaggaggtgcagatcacagaggagaagccactgttgccaggacagacgcctgaggcggccaagactcactctgtggagacaccatacggctctgtcactttcactgtctatggcacccccaaacccaaacgcccagcgatccttacctaccacgatgtgggactcaactataaatcttgcttccagccactgtttcagttcgaggacatgcaggaaatcattcagaactttgtgcgggttcatgtggatgcccctggaatggaagagggagcccctgtgttccctttgggatatcagtacccatctctggaccagcttgcagacatgatcccttgcgtcctgcagtacctaaatttctctacaataattggagttggtgttggagctggagcctacatcctggcgagatatgctcttaaccacccggacactgttgaaggtcttgtcctcatcaacattgatcccaatgccaagggttggatggattgggcagcccacaagctaacaggcctcacctcttccattccggagatgatccttggacatcttttcagccaggaagagctctctggaaattctgagttgatacaaaagtacagaaatatcattacacatgcacccaacctggataacattgaattgtactggaacag

SEQ ID NO: 13560 - DNA, 559 bp, Homo sapiens
  source 1..559: mol_type = unassigned DNA
aagtgaaggtggaagcggccgcggcggcagcaggccaccatggcggagctgcaggaggtgcagatcacagaggagaagccactgttgccaggacagacgcctgaggcggccaagccactgtttcagttcgaggacatgcaggaaatcattcagaactttgtgcgggttcatgtggatgcccctggaatggaagagggagcccctgtgttccctttgggatatcagtacccatctctggaccagcttgcagacatgatcccttgcgtcctgcagtacctaaatttctctacaataattggagttggtgttggagctggagcctacatcctggcgagatatgctcttaaccacccggacactgttgaaggtcttgtcctcatcaacattgatcccaatgccaagggttggatggattgggcagcccacaagctaacaggcctcacctcttccattccggagatgatccttggacatcttttcagccaggaagagctctctggaaattctgagttgatacaaaagtacagaaatatcattacacatgcacccaacctggata

SEQ ID NO: 13561 - DNA, 924 bp, Homo sapiens
  source 1..924: mol_type = unassigned DNA
cgcggcggcagcaggtagggggaggggcaggcgaggggccgtagggcctggaaggcgccagccgggccggcgggcggtgtgattgatccgcgtcccctggagctggaggctcgggggaaagggccagcacggagcgggcgctcggttgctgcgcacaaaggctgaggctccaagagctgcagggcgtgtttgggaccccagagtcagaaggagtgagaaccctgacccctaatcccactgcatccagccaataggagcccagccaccatggcggagctgcaggaggtgcagatcacagaggagaagccactgttgccaggacagacgcctgaggcggccaaggaggctgagttagctgcccgaatcctcctggaccagggacagactcactctgtggagacaccatacggctctgtcactttcactgtctatggcacccccaaacccaaacgcccagcgatccttacctaccacgatgtgggactcaactataaatcttgcttccagccactgtttcagttcgaggacatgcaggaaatcattcagaactttgtgcgggttcatgtggatgcccctggaatggaagagggagcccctgtgttccctttgggatatcagtacccatctctggaccagcttgcagacatgatcccttgcgtcctgcagtacctaaatttctctacaataattggagttggtgttggagctggagcctacatcctggcgagatatgctcttaaccacccggacactgttgaaggtcttgtcctcatcaacattgatcccaatgccaagggttggatggattgggcagcccacaagctaacaggcctcacctcttccattccggagatgatccttggacatcttttcagccaggaagagctctctggaaattctgagttgatacaaaagtacagaaat

SEQ ID NO: 13562 - DNA, 775 bp, Homo sapiens
  source 1..775: mol_type = unassigned DNA
agcaggtagggggaggggcaggcgaggggccgtagggcctggaaggcgccagccgggccggcgggcggtgtgattgatccgcgtcccctggagctggaggctcgggggaaagggccagcacggagcgggcgctcggttgctgcgcacaaaggctgaggctccaagagctgcagggcgtgtttggggccaccatggcggagctgcaggaggtgcagatcacagaggagaagccactgttgccaggacagacgcctgaggcggccaaggaggctgagttagctgcccgaatcctcctggaccagggacagactcactctgtggagacaccatacggctctgtcactttcactgtctatggcacccccaaacccaaacgcccagcgatccttacctaccacgatgtgggactcaactataaatcttgcttccagccactgtttcagttcgaggacatgcaggaaatcattcagaactttgtgcgggttcatgtggatgcccctggaatggaagagggagcccctgtgttccctttgggatatcagtacccatctctggaccagcttgcagacatgatcccttgcgtcctgcagtacctaaatttctctacaataattggagttggtgttggagctggagcctacatcctggcgagatatgctcttaaccacccggacactgttgaaggtcttgtcctcatcaacattgatcccaatgccaagggttggatggattgggcagcccacaagctaacaggcctcacctcttccattccgga

SEQ ID NO: 13563 - DNA, 595 bp, Homo sapiens
  source 1..595: mol_type = unassigned DNA
aatgttgaacttgcggagtttattcagagttgggaggaagggtcttgggaggaagggaggcattgggccaccatggcggagctgcaggaggtgcagatcacagaggagaagccactgttgccaggacagacgcctgaggcggccaagactcactctgtggagacaccatacggctctgtcactttcactgtctatggcacccccaaacccaaacgcccagcgatccttacctaccacgatgtgggactcaactataaatcttgcttccagccactgtttcagttcgaggacatgcaggaaatcattcagaactttgtgcgggttcatgtggatgcccctggaatggaagagggagcccctgtgttccctttgggatatcagtacccatctctggaccagcttgcagacatgatcccttgcgtcctgcagtacctaaatttctctacaataattggagttggtgttggagctggagcctacatcctggcgagatatgctcttaaccacccggacactgttgaaggtcttgtcctcatcaacattgatcccaatgccaagggttggatggattgggcagcccacaagctaacaggcc

SEQ ID NO: 13564 - DNA, 572 bp, Homo sapiens
  source 1..572: mol_type = unassigned DNA
gtttttaagacactagctctccagcagaaagctggggatagacttcagtttctctacaataattggagttggtgttggagctggagcctacatcctggcgagatatgctcttaaccacccggacactgttgaaggtcttgtcctcatcaacattgatcccaatgccaagggttggatggattgggcagcccacaaggtttggaggggcctgtgtgctgagacctacggttggggatcccctcgtatggatccagttaggctctggtagatagcctaactggatggactctgaacttcaaggagggagtaaaggggcaggaaagtgaagctgtcactttgcctgagtctcttataatatcctgaactttctttttctttttctttttttttttttttttgagatggtgtctcactctgttgccaaggctggagtgcagtggcttgatcttggctcactgcaacctctgcttcctgggttcaagtgattctcctgcctcagcctcccaagtagctgggattacaggcacccgccaccacgcctggctaatatttgtattattagtagagatggg

SEQ ID NO: 13565 - DNA, 842 bp, Homo sapiens
  source 1..842: mol_type = unassigned DNA
gtgagaaccctgacccctaatcccactgcatccagccaataggagcccagccaccatggcggagctgcaggaggtgcagatcacagaggagaagccactgttgccaggacagacgcctgaggcggccaaggaggctgagttagctgcccgaatcctcctggaccagggacagactcactctgtggagacaccatacggctctgtcactttcactgtctatggcacccccaaacccaaacgcccagcgatccttacctaccacgatgtgggactcaactataaatcttgcttccagccactgtttcagttcgaggacatgcaggaaatcattcagaactttgtgcgggttcatgtggatgcccctggaatggaagagggagcccctgtgttccctttgggatatcagtacccatctctggaccagcttgcagacatgatcccttgcgtcctgcagtacctaaatttctctacaataattggagttggtgttggagctggagcctacatcctggcgagatatgctcttaaccacccggacactgttgaaggtcttgtcctcatcaacattgatcccaatgccaagggttggatggattgggcagcccacaaggtttggaggggcctgtgtgctgagacctacggttggggatcccctcgtatggatccagttaggctctggtagatagcctaactggatggactctgaacttcaaggagggagtaaaggggcaggaaagtgaagctgtcactttgcctgagtctcttataatatcctgaactttctttttctttttctttttttttttttttttgagatggtgtctcactctgttgccaaggct

SEQ ID NO: 13566 - DNA, 587 bp, Homo sapiens
  source 1..587: mol_type = unassigned DNA
acacgagtccctgtctgattctattgttgaggtgatgtgggttctctttagataaatcttgcttccagccactgtttcagttcgaggacatgcaggaaatcattcagaactttgtgcgggttcatgtggatgcccctggaatggaagagggagcccctgtgttccctttgggatatcagtacccatctctggaccagcttgcagacatgatcccttgcgtcctgcagtacctaaatttctctacaataattggagttggtgttggagctggagcctacatcctggcgagatatgctcttaaccacccggacactgttgaaggtcttgtcctcatcaacattgatcccaatgccaagggttggatggattgggcagcccacaaggtttggaggggcctgtgtgctgagacctacggttggggatcccctcgtatggatccagttaggctctggtagatagcctaactggatggactctgaacttcaaggagggagtaaaggggcaggaaagtgaagctgtcactttgcctgagtctcttataatatcctgaactttctttttctttttctttttttttttttttttga

SEQ ID NO: 13567 - DNA, 555 bp, Homo sapiens
  source 1..555: mol_type = unassigned DNA
aggtatctaccctgactacccgtgccaacctttggcttcttgggcccttctttttcgcgtcctccaaagaaagtttctctacaataattggagttggtgttggagctggagcctacatcctggcgagatatgctgtaagaaataaaaagcccagaggagggaaaggagggtccagactgattaggagaatactgtttattagtgctgtttgggggaggaagtgggcactaggtggggagtcaggccctgtgggagtccaggagtgggtcgagcttagcggggaggggataaggccatgccctgtttctcatttccttccttctgctgtccctcagcttaaccacccggacactgttgaaggtcttgtcctcatcaacattgatcccaatgccaagggttggatggattgggcagcccacaaggtttggaggggcctgtgtgctgagacctacggttggggatcccctcgtatggatccagttaggctctggtagatagcctaactggatggactctgaacttcaaggagggagtaaaggggcaggaaagtgaagc

SEQ ID NO: 13568 - DNA, 603 bp, Homo sapiens
  source 1..603: mol_type = unassigned DNA
ttgtgtctgttttcacatttgctttaagttccattcttcccgttcctctagaggaaccaggaactaaagcagaacaagttgaactggctcttgaaaattgagaatggacaaagagctatctatatgggaaaacagtgtgttggttggctggtggatgggtgtttgtttttaagacactagctctccagcagaaagctggggatagacttcaggtatctaccctgactacccgtgccaacctttggcttcttgggcccttctttttcgcgtcctccaaagaaaggtccgtgtctgcctttctttgtgcccgtggactcaggagggagggtgaagagtttgaagagatgggctgtggcaggttttggacagcagatcccatgaggcgtatatttctttccctttcacagtttctctacaataattggagttggtgttggagctggagcctacatcctggcgagatatgctcttaaccacccggacactgttgaaggtcttgtcctcatcaacattgatcccaatgccaagggttggatggattgggcagcccacaaggtttggaggggcctgtgtgctgagacctacggttggggatcccctcgt

SEQ ID NO: 13569 - DNA, 583 bp, Homo sapiens
  source 1..583: mol_type = unassigned DNA
aagtgaaggtggaagcggccgcggcggcagcaggccaccatggcggagctgcaggaggtgcagatcacagaggagaagccactgttgccaggacagacgcctgaggcggccaagactcactctgtggagacaccatacggctctgtcactttcactgtctatggcacccccaaacccaaacgcccagcgatccttacctaccacgatgtgggactcaactataaatcttgcttccagccactgtttcagttcgaggacatgcaggaaatcattcagaactttgtgcgggttcatgtggatgcccctggaatggaagagggagcccctgtgttccctttgggatatcagtacccatctctggaccagcttgcagacatgatcccttgcgtcctgcagtacctaaatttctctacaataattggagttggtgttggagctggagcctacatcctggcgagatatgctcttaaccacccggacactgttgaaggtcttgtcctcatcaacattgatcccaatgccaagggttggatggattgggcagcccacaaggtttggaggggcctgtgtgctgagacctacg

SEQ ID NO: 13570 - DNA, 639 bp, Homo sapiens
  source 1..639: mol_type = unassigned DNA
gtggggtgtcagtatcccggaccccagagtcagaaggagtgagaaccctgacccctaatcccactgcatccagccaataggagcccagtaagtgaccccaccccgcaggctgcaggctccttcctgtgcaggccaccatggcggagctgcaggaggtgcagatcacagaggagaagccactgttgccaggacagacgcctgaggcggccaagactcactctgtggagacaccatacggctctgtcactttcactgtctatggcacccccaaacccaaacgcccagcgatccttacctaccacgatgtgggactcaactataaatcttgcttccagccactgtttcagttcgaggacatgcaggaaatcattcagaactttgtgcgggttcatgtggatgcccctggaatggaagagggagcccctgtgttccctttgggatatcagtacccatctctggaccagcttgcagacatgatcccttgcgtcctgcagtacctaaatttctctacaataattggagttggtgttggagctggagcctacatcctggcgagatatgctcttaaccacccggacactgttgaaggtcttgtcctcatcaacattgatcccaatgccaagggttggatggattggg

SEQ ID NO: 13571 - DNA, 671 bp, Homo sapiens
  source 1..671: mol_type = unassigned DNA
agcaggtagggggaggggcaggcgaggggccgtagggcctggaaggcgccagccgggccggcgggcggtgtgattgatccgcgtcccctggagctggaggctcgggggaaagggccagcacggagcgggcgctcggttgctgcgcacaaaggctgaggctccaagagctgcagggcgtgtttggggccaccatggcggagctgcaggaggtgcagatcacagaggagaagccactgttgccaggacagacgcctgaggcggccaagactcactctgtggagacaccatacggctctgtcactttcactgtctatggcacccccaaacccaaacgcccagcgatccttacctaccacgatgtgggactcaactataaatcttgcttccagccactgtttcagttcgaggacatgcaggaaatcattcagaactttgtgcgggttcatgtggatgcccctggaatggaagagggagcccctgtgttccctttgggatatcagtacccatctctggaccagcttgcagacatgatcccttgcgtcctgcagtacctaaatttctctacaataattggagttggtgttggagctggagcctacatcctggcgagatatgctcttaaccacccggacactgttgaaggtcttgtcctcatcaacattgatcccaat

SEQ ID NO: 13572 - DNA, 943 bp, Homo sapiens
  source 1..943: mol_type = unassigned DNA
ttttggtaccctgtcctttagaatactcagtcactgagctacaagtttcactccctacctgagagtgtggggtggcccctaaatatagcccgagaaatctgagctacacttctgccccaccctggtattttggtccagggcagaggagggaggggtctggaggtgtggtgttgagggtggcagtggggatggtgagtatcaagagaagggctgtcctgattcctcttccaaagcttccaccgatcagcctggaaacggagctgggggcaggaaaggccctctgtgtgttctagagtagtcttcaacccctgggtccctctgttccctgcatcttcctgtgctgagagaggaagcctggtgtttgaggcgatgtggggatgtagagacaacttcccagtctcatttcctcatcctgccaggccaccatggcggagctgcaggaggtgcagatcacagaggagaagccactgttgccaggacagacgcctgaggcggccaaggaggctgagttagctgcccgaatcctcctggaccagggacagactcactctgtggagacaccatacggctctgtcactttcactgtctatggcacccccaaacccaaacgcccagcgatccttacctaccacgatgtgggactcaactataaatcttgcttccagccactgtttcagttcgaggacatgcaggaaatcattcagaactttgtgcgggttcatgtggatgcccctggaatggaagagggagcccctgtgttccctttgggatatcagtacccatctctggaccagcttgcagacatgatcccttgcgtcctgcagtacctaaatttctctacaataattggagttggtgttggagctggagcctacatcctggcgagatatgctcttaaccacccggacactgttgaaggtcttgtcctcatcaacattgatcc

SEQ ID NO: 13573 - DNA, 583 bp, Homo sapiens
  source 1..583: mol_type = unassigned DNA
atattgattccggctcgagcctagagaggacgtgttctctggacttagggaccccagagtcagaaggagtgagaaccctgacccctaatcccactgcatccagccaataggagcccagccaccatggcggagctgcaggaggtgcagatcacagaggagaagccactgttgccaggacagacgcctgaggcggccaagactcactctgtggagacaccatacggctctgtcactttcactgtctatggcacccccaaacccaaacgcccagcgatccttacctaccacgatgtgggactcaactataaatcttgcttccagccactgtttcagttcgaggacatgcaggaaatcattcagaactttgtgcgggttcatgtggatgcccctggaatggaagagggagcccctgtgttccctttgggatatcagtacccatctctggaccagcttgcagacatgatcccttgcgtcctgcagtacctaaatttctctacaataattggagttggtgttggagctggagcctacatcctggcgagatatgctcttaaccacccggacactgttgaaggtcttgtcc

SEQ ID NO: 13574 - DNA, 609 bp, Homo sapiens
  source 1..609: mol_type = unassigned DNA
agcgcccgtgggcgggctggggcgggccgggggcgggtctgcgggaagcccgagccggggcgggcccgagtcaaagaccccagagtcagaaggagtgagaaccctgacccctaatcccactgcatccagccaataggagcccagccaccatggcggagctgcaggaggtgcagatcacagaggagaagccactgttgccaggacagacgcctgaggcggccaagactcactctgtggagacaccatacggctctgtcactttcactgtctatggcacccccaaacccaaacgcccagcgatccttacctaccacgatgtgggactcaactataaatcttgcttccagccactgtttcagttcgaggacatgcaggaaatcattcagaactttgtgcgggttcatgtggatgcccctggaatggaagagggagcccctgtgttccctttgggatatcagtacccatctctggaccagcttgcagacatgatcccttgcgtcctgcagtacctaaatttctctacaataattggagttggtgttggagctggagcctacatcctggcgagatatgctcttaaccacccggacactgttgaaggtcttgtcc

SEQ ID NO: 13575 - DNA, 560 bp, Homo sapiens
  source 1..560: mol_type = unassigned DNA
aatctagttctctgtgttcgggcggggggagtcgaactcgtggggtgtcagtatcccgggttcgtctccccactaccggttcccaccactgagtctgggggcgaaggaaggagccagagtgcaattgcagatccagaccccagagtcagaaggagtgagaaccctgacccctaatcccactgcatccagccaataggagcccagccaccatggcggagctgcaggaggtgcagatcacagaggagaagccactgttgccaggacagacgcctgaggcggccaagataaatcttgcttccagccactgtttcagttcgaggacatgcaggaaatcattcagaactttgtgcgggttcatgtggatgcccctggaatggaagagggagcccctgtgttccctttgggatatcagtacccatctctggaccagcttgcagacatgatcccttgcgtcctgcagtacctaaatttctctacaataattggagttggtgttggagctggagcctacatcctggcgagatatgctcttaaccacccggacactgttgaaggtcttg

SEQ ID NO: 13576 - DNA, 669 bp, Homo sapiens
  source 1..669: mol_type = unassigned DNA
attctaactcacaccactgcttcaccactaccctagtctctctccccatacactataattgggagtcaggcccttgtctcgtcactacactaaccttcatcctttccgtgtctctctttgtcaatctctttctgtctttggtcatttgttggtctgtctttacttgcctctctttgtctgtttgtctctccatctgggacgccacatggtcatgtgtttctgtgtgaatccgtgtgtgtctctccaggaggctgagttagctgcccgaatcctcctggaccagggacagactcactctgtggagacaccatacggctctgtcactttcactgtctatggcacccccaaacccaaacgcccagcgatccttacctaccacgatgtgggactcaactataaatcttgcttccagccactgtttcagttcgaggacatgcaggaaatcattcagaactttgtgcgggttcatgtggatgcccctggaatggaagagggagcccctgtgttccctttgggatatcagtacccatctctggaccagcttgcagacatgatcccttgcgtcctgcagtacctaaatttctctacaataattggagttggtgttggagctggagcctacatcctggcgagatatgctcttaaccacccggacactgttgaaggtct

SEQ ID NO: 13577 - DNA, 593 bp, Homo sapiens
  source 1..593: mol_type = unassigned DNA
atattgattccggctcgagcctagagaggacgtgttctctggacttaggggtagacagacactggggaggaccccagagtcagaaggagtgagaaccctgacccctaatcccactgcatccagccaataggagcccagccaccatggcggagctgcaggaggtgcagatcacagaggagaagccactgttgccaggacagacgcctgaggcggccaagactcactctgtggagacaccatacggctctgtcactttcactgtctatggcacccccaaacccaaacgcccagcgatccttacctaccacgatgtgggactcaactataaatcttgcttccagccactgtttcagttcgaggacatgcaggaaatcattcagaactttgtgcgggttcatgtggatgcccctggaatggaagagggagcccctgtgttccctttgggatatcagtacccatctctggaccagcttgcagacatgatcccttgcgtcctgcagtacctaaatttctctacaataattggagttggtgttggagctggagcctacatcctggcgagatatgctcttaaccacccggacactgttgaa

SEQ ID NO: 13578 - DNA, 633 bp, Homo sapiens
  source 1..633: mol_type = unassigned DNA
tagcgcccgtgggcgggctggggcgggccgggggcgggtctgcgggaagcccgagccggggcgggcccgagtcaaaggcaagtgaaggtggaagcggccgcggcggcagcagaccccagagtcagaaggagtgagaaccctgacccctaatcccactgcatccagccaataggagcccagccaccatggcggagctgcaggaggtgcagatcacagaggagaagccactgttgccaggacagacgcctgaggcggccaagactcactctgtggagacaccatacggctctgtcactttcactgtctatggcacccccaaacccaaacgcccagcgatccttacctaccacgatgtgggactcaactataaatcttgcttccagccactgtttcagttcgaggacatgcaggaaatcattcagaactttgtgcgggttcatgtggatgcccctggaatggaagagggagcccctgtgttccctttgggatatcagtacccatctctggaccagcttgcagacatgatcccttgcgtcctgcagtacctaaatttctctacaataattggagttggtgttggagctggagcctacatcctggcgagatatgctcttaaccacccggacactgttg

SEQ ID NO: 13579 - DNA, 603 bp, Homo sapiens
  source 1..603: mol_type = unassigned DNA
gttttggtgagccgagcagagcctggaagcgtccagccgcccgcccctcgccccccggccccagcacaaccctttcctgagcggcagtctgggcgggaccccagagtcagaaggagtgagaaccctgacccctaatcccactgcatccagccaataggagcccagccaccatggcggagctgcaggaggtgcagatcacagaggagaagccactgttgccaggacagacgcctgaggcggccaagactcactctgtggagacaccatacggctctgtcactttcactgtctatggcacccccaaacccaaacgcccagcgatccttacctaccacgatgtgggactcaactataaatcttgcttccagccactgtttcagttcgaggacatgcaggaaatcattcagaactttgtgcgggttcatgtggatgcccctggaatggaagagggagcccctgtgttccctttgggatatcagtacccatctctggaccagcttgcagacatgatcccttgcgtcctgcagtacctaaatttctctacaataattggagttggtgttggagctggagcctacatcctggcgagatatgctcttaacc

SEQ ID NO: 13580 - DNA, 609 bp, Homo sapiens
  source 1..609: mol_type = unassigned DNA
aagcccgagccggggcgggcccgagtcaaaggcaagtgaaggtggaagcggccgcggcggcagcagaccccagagtcagaaggagtgagaaccctgacccctaatcccactgcatccagccaataggagcccagtaagtgaccccaccccgcaggctgcaggctccttcctgtgcaggccaccatggcggagctgcaggaggtgcagatcacagaggagaagccactgttgccaggacagacgcctgaggcggccaagactcactctgtggagacaccatacggctctgtcactttcactgtctatggcacccccaaacccaaacgcccagcgatccttacctaccacgatgtgggactcaactataaatcttgcttccagccactgtttcagttcgaggacatgcaggaaatcattcagaactttgtgcgggttcatgtggatgcccctggaatggaagagggagcccctgtgttccctttgggatatcagtacccatctctggaccagcttgcagacatgatcccttgcgtcctgcagtacctaaatttctctacaataattggagttggtgttggagctggagcctacatcctggcgagatatgct

SEQ ID NO: 13581 - DNA, 553 bp, Homo sapiens
  source 1..553: mol_type = unassigned DNA
agcccgagccggggcgggcccgagtcaaaggcaagtgaaggtggaagcggccgcggcggcagcaggccaccatggcggagctgcaggaggtgcagatcacagaggagaagccactgttgccaggacagacgcctgaggcggccaagactcactctgtggagacaccatacggctctgtcactttcactgtctatggcacccccaaacccaaacgcccagcgatccttacctaccacgatgtgggactcaactataaatcttgcttccagccactgtttcagttcgaggacatgcaggaaatcattcagaactttgtgcgggttcatgtggatgcccctggaatggaagagggagcccctgtgttccctttgggatatcagtacccatctctggaccagcttgcagacatgatcccttgcgtcctgcagtacctaaagtgagaggcctgggaacccctccaaaccagagttctctttccagcacaaggagacccttagaacttccagtttctctacaataattggagttggtgttggagctggagcctacatcc

SEQ ID NO: 13582 - DNA, 565 bp, Homo sapiens
  source 1..565: mol_type = unassigned DNA
accccagagtcagaaggagtgagaaccctgacccctaatcccactgcatccagccaataggagcccagtaagtgaccccaccccgcaggctgcaggctccttcctgtgcaggccaccatggcggagctgcaggaggtgcagatcacagaggagaagccactgttgccaggacagacgcctgaggcggccaaggaggctgagttagctgcccgaatcctcctggaccagggacagactcactctgtggagacaccatacggctctgtcactttcactgtctatggcacccccaaacccaaacgcccagcgatccttacctaccacgatgtgggactcaactataaatcttgcttccagccactgtttcagttcgaggacatgcaggaaatcattcagaactttgtgcgggttcatgtggatgcccctggaatggaagagggagcccctgtgttccctttgggatatcagtacccatctctggaccagcttgcagacatgatcccttgcgtcctgcagtacctaaatttctctacaataattggagttggtgttggagctggagcct

SEQ ID NO: 13583 - DNA, 587 bp, Homo sapiens
  source 1..587: mol_type = unassigned DNA
atattgattccggctcgagcctagagaggacgtgttctctggacttaggggtagacagacactggggaggaccccagagtcagaaggagtgagaaccctgacccctaatcccactgcatccagccaataggagcccagccaccatggcggagctgcaggaggtgcagatcacagaggagaagccactgttgccaggacagacgcctgaggcggccaaggaggctgagttagctgcccgaatcctcctggaccagggacagactcactctgtggagacaccatacggctctgtcactttcactgtctatggcacccccaaacccaaacgcccagcgatccttacctaccacgatgtgggactcaactataaatcttgcttccagccactgtttcagttcgaggacatgcaggaaatcattcagaactttgtgcgggttcatgtggatgcccctggaatggaagagggagcccctgtgttccctttgggatatcagtacccatctctggaccagcttgcagacatgatcccttgcgtcctgcagtacctaaatttctctacaataattggagttggtgttggagctgga

SEQ ID NO: 13584 - DNA, 561 bp, Homo sapiens
  source 1..561: mol_type = unassigned DNA
aagtgaaggtggaagcggccgcggcggcagcagaccccagagtcagaaggagtgagaaccctgacccctaatcccactgcatccagccaataggagcccagtaagtgaccccaccccgcaggctgcaggctccttcctgtgcaggtctgtccaggccaccatggcggagctgcaggaggtgcagatcacagaggagaagccactgttgccaggacagacgcctgaggcggccaagactcactctgtggagacaccatacggctctgtcactttcactgtctatggcacccccaaacccaaacgcccagcgatccttacctaccacgatgtgggactcaactataaatcttgcttccagccactgtttcagttcgaggacatgcaggaaatcattcagaactttgtgcgggttcatgtggatgcccctggaatggaagagggagcccctgtgttccctttgggatatcagtacccatctctggaccagcttgcagacatgatcccttgcgtcctgcagtacctaaatttctctacaataattggagttggtgttggagctgg

SEQ ID NO: 13585 - DNA, 578 bp, Homo sapiens
  source 1..578: mol_type = unassigned DNA
aggcgaggggccgtagggcctggaaggcgccagccgggccggcgggcggtgtgattgatccgcgtcccctggagctggaggctcgggggaaagggccagcacggagcgggcgctcggttgctgcgcacaaaggctgaggctccaagagctgcagggcgtgtttggggtgcgcgcgaggttgtgtgcaaggccaccatggcggagctgcaggaggtgcagatcacagaggagaagccactgttgccaggacagacgcctgaggcggccaagactcactctgtggagacaccatacggctctgtcactttcactgtctatggcacccccaaacccaaacgcccagcgatccttacctaccacgatgtgggactcaactataaatcttgcttccagccactgtttcagttcgaggacatgcaggaaatcattcagaactttgtgcgggttcatgtggatgcccctggaatggaagagggagcccctgtgttccctttgggatatcagtacccatctctggaccagcttgcagacatgatcccttgcgtcctgcagtacctaaatttctctacaataattgg

SEQ ID NO: 13586 - DNA, 579 bp, Homo sapiens
  source 1..579: mol_type = unassigned DNA
ggcgggcccgagtcaaaggcaagtgaaggtggaagcggccgcggcggcagcagaccccagagtcagaaggagtgagaaccctgacccctaatcccactgcatccagccaataggagcccagccaccatggcggagctgcaggaggtgcagatcacagaggagaagccactgttgccaggacagacgcctgaggcggccaagactcactctgtggagacaccatacggctctgtcactttcactgtctatggcacccccaaacccaaacgcccagcgatccttacctaccacgatgtgggactcaactataaatcttgcttccagccactgtttcagttcgaggacatgcaggaaatcattcagaactttgtgcgggttcatgtggatgcccctggaatggaagagggagcccctgtgttccctttgggatatcagtacccatctctggaccagcttgcagacatgatcccttgcgtcctgcagtacctaaagtgagaggcctgggaacccctccaaaccagagttctctttccagcacaaggagacccttagaacttccagtttctctacaataattgg

SEQ ID NO: 13587 - DNA, 571 bp, Homo sapiens
  source 1..571: mol_type = unassigned DNA
gaggggcaggcgaggggccgtagggcctggaaggcgccagccgggccggcgggcggtgtgattgatccgcgtcccctggagctggaggctcgggggaaagggccagcacggagcgggcgctcggttgctgcgcacaaaggctgaggctccaagagctgcagggcgtgtttggggtgcgcgcgaggccaccatggcggagctgcaggaggtgcagatcacagaggagaagccactgttgccaggacagacgcctgaggcggccaagactcactctgtggagacaccatacggctctgtcactttcactgtctatggcacccccaaacccaaacgcccagcgatccttacctaccacgatgtgggactcaactataaatcttgcttccagccactgtttcagttcgaggacatgcaggaaatcattcagaactttgtgcgggttcatgtggatgcccctggaatggaagagggagcccctgtgttccctttgggatatcagtacccatctctggaccagcttgcagacatgatcccttgcgtcctgcagtacctaaatttctctacaataatt

SEQ ID NO: 13588 - DNA, 635 bp, Homo sapiens
  source 1..635: mol_type = unassigned DNA
cttaatctagttctctgtgttcgggcggggggagtcgaactcgtggggtgtcagtatcccgggttcgtctccccactaccggttcccaccactgagtctgggggcgaaggaaggagccagagtgcaattgcagatccagaccccagagtcagaaggagtgagaaccctgacccctaatcccactgcatccagccaataggagcccagccaccatggcggagctgcaggaggtgcagatcacagaggagaagccactgttgccaggacagacgcctgaggcggccaaggaggctgagttagctgcccgaatcctcctggaccagggacagactcactctgtggagacaccatacggctctgtcactttcactgtctatggcacccccaaacccaaacgcccagcgatccttacctaccacgatgtgggactcaactataaatcttgcttccagccactgtttcagttcgaggacatgcaggaaatcattcagaactttgtgcgggttcatgtggatgcccctggaatggaagagggagcccctgtgttccctttgggatatcagtacccatctctggaccagcttgcagacatgatcccttgcgtcctgcagtacctaaatttctctacaataatt

SEQ ID NO: 13589 - DNA, 583 bp, Homo sapiens
  source 1..583: mol_type = unassigned DNA
gagtcaaaggcaagtgaaggtggaagcggccgcggcggcagcagaccccagagtcagaaggagtgagaaccctgacccctaatcccactgcatccagccaataggagcccagtaagtgaccccaccccgcaggctgcaggctccttcctgtgcaggccaccatggcggagctgcaggaggtgcagatcacagaggagaagccactgttgccaggacagacgcctgaggcggccaaggaggctgagttagctgcccgaatcctcctggaccagggacagactcactctgtggagacaccatacggctctgtcactttcactgtctatggcacccccaaacccaaacgcccagcgatccttacctaccacgatgtgggactcaactataaatcttgcttccagccactgtttcagttcgaggacatgcaggaaatcattcagaactttgtgcgggttcatgtggatgcccctggaatggaagagggagcccctgtgttccctttgggatatcagtacccatctctggaccagcttgcagacatgatcccttgcgtcctgcagtacctaaatttctctacaataat

SEQ ID NO: 13590 - DNA, 745 bp, Homo sapiens
  source 1..745: mol_type = unassigned DNA
gggaagggtagaaatgaaacccagagggaggggaggggtcagtgtgggaaggagaagttctctcctggtctgactgtggcatgaaaggaagggtgagttctgactgggggacacgagtccctgtctgattctattgttgaggtgatgtgggttctctttagataaatcttgcttccagccactgtttcagttcgaggacatgcaggaaatcattcagaactttgtgcgggttcatgtggatgcccctggaatggaagagggagcccctgtgttccctttgggatatcagtacccatctctggaccagcttgcagacatgatcccttgcgtcctgcagtacctaaagtgagaggcctgggaacccctccaaaccagagttctctttccagcacaaggagacccttagaacttccaggttcaccgtggttcctgagccagtttcagcttctgaactcaatatatcttcttccttcatgctcccgccttgattattgagaaaaggtggtgggtttggaaaattggccagagtcaacagaatagccctaatgggtggagggaaggaaaagggtctatgcttggccctgcctcaggctaaggagggccttctctgatcagaaagtcagggaggaatgaaagggggtgacataatccctgaggaaccagatagacctgtctctttctctcccactcccctctccttcatgcccacacctggtggatggggagctctgcgggtgagagagag

SEQ ID NO: 13591 - DNA, 657 bp, Homo sapiens
  source 1..657: mol_type = unassigned DNA
aacttctcccggagcagccggagagcaggcgtcgggacgcagcaaagagaggagaggccaccatggcggagctgcaggaggtgcagatcacagaggagaagccactgttgccaggacagacgcctgaggcggccaagactcactctgtggagacaccatacggctctgtcactttcactgtctatggcacccccaaacccaaacgcccagcgatccttacctaccacgatgtgggactcaactataaatcttgcttccagccactgtttcagttcgaggacatgcaggaaatcattcagaactttgtgcgggttcatgtggatgcccctggaatggaagagggagcccctgtgttccctttgggatatcagtacccatctctggaccagcttgcagacatgatcccttgcgtcctgcagtacctaaagtgagaggcctgggaacccctccaaaccagagttctctttccagcacaaggagacccttagaacttccaggttcaccgtggttcctgagccagtttcagcttctgaactcaatatatcttcttccttcatgctcccgccttgattattgagaaaaggtggtgggtttggaaaattggccagagtcaacagaatagccctaatgggtggagggaaggaaaagggtctatgc

SEQ ID NO: 13592 - DNA, 558 bp, Homo sapiens
  source 1..558: mol_type = unassigned DNA
cagtaagtgaccccaccccgcaggctgcaggctccttcctgtgcaggccaccatggcggagctgcaggaggtgcagatcacagaggagaagccactgttgccaggacagacgcctgaggcggccaagactcactctgtggagacaccatacggctctgtcactttcactgtctatggcacccccaaacccaaacgcccagcgatccttacctaccacgatgtgggactcaactataaatcttgcttccagccactgtttcagttcgaggacatgcaggaaatcattcagaactttgtgcgggttcatgtggatgcccctggaatggaagagggagcccctgtgttccctttgggatatcagtacccatctctggaccagcttgcagacatgatcccttgcgtcctgcagtacctaaagtgagaggcctgggaacccctccaaaccagagttctctttccagcacaaggagacccttagaacttccaggttcaccgtggttcctgagccagtttcagcttctgaactcaatatatcttcttccttcatgctcccgcctt

SEQ ID NO: 13593 - DNA, 576 bp, Homo sapiens
  source 1..576: mol_type = unassigned DNA
aagtgaaggtggaagcggccgcggcggcagcagaccccagagtcagaaggagtgagaaccctgacccctaatcccactgcatccagccaataggagcccagccaccatggcggagctgcaggaggtgcagatcacagaggagaagccactgttgccaggacagacgcctgaggcggccaagactcactctgtggagacaccatacggctctgtcactttcactgtctatggcacccccaaacccaaacgcccagcgatccttacctaccacgatgtgggactcaactataaatcttgcttccagccactgtttcagttcgaggacatgcaggaaatcattcagaactttgtgcgggttcatgtggatgcccctggaatggaagagggagcccctgtgttccctttgggatatcagtacccatctctggaccagcttgcagacatgatcccttgcgtcctgcagtacctaaagtgagaggcctgggaacccctccaaaccagagttctctttccagcacaaggagacccttagaacttccaggttcaccgtggttcctgagccagtttcagcttctg

SEQ ID NO: 13594 - DNA, 515 bp, Homo sapiens
  source 1..515: mol_type = unassigned DNA
caaaggcaagtgaaggtggaagcggccgcggcggcagcaggccaccatggcggagctgcaggaggtgcagatcacagaggagaagccactgttgccaggacagacgcctgaggcggccaaggaggctgagttagctgcccgaatcctcctggaccagggacagactcactctgtggagacaccatacggctctgtcactttcactgtctatggcacccccaaacccaaacgcccagcgatccttacctaccacgatgtgggactcaactataaatcttgcttccagccactgtttcagttcgaggacatgcaggaaatcattcagaactttgtgcgggttcatgtggatgcccctggaatggaagagggagcccctgtgttccctttgggatatcagtacccatctctggaccagcttgcagacatgatcccttgcgtcctgcagtacctaaagtgagaggcctgggaacccctccaaaccagagttctctttccagcacaaggagacccttaga

SEQ ID NO: 13595 - DNA, 632 bp, Homo sapiens
  source 1..632: mol_type = unassigned DNA
cttgtagcctatattgattccggctcgagcctagagaggacgtgttctctggacttaggggtagacagacactggggagggttagtgacccgaggaggttgatgaccctgggagtctgggtcttggctgaggctttccgtccctgaaagaccccaggtctgtctcccatgtcattcacctcgttgctgtgttttctcagaccccagagtcagaaggagtgagaaccctgacccctaatcccactgcatccagccaataggagcccagccaccatggcggagctgcaggaggtgcagatcacagaggagaagccactgttgccaggacagacgcctgaggcggccaagactcactctgtggagacaccatacggctctgtcactttcactgtctatggcacccccaaacccaaacgcccagcgatccttacctaccacgatgtgggactcaactataaatcttgcttccagccactgtttcagttcgaggacatgcaggaaatcattcagaactttgtgcgggttcatgtggatgcccctggaatggaagagggagcccctgtgttccctttgggatatcagtacccatctctggaccagcttgcagacatgatcccttgcgtcctgcagtac

SEQ ID NO: 13596 - DNA, 583 bp, Homo sapiens
  source 1..583: mol_type = unassigned DNA
cccacctccccgccttgttgtccaacttctcccggagcagccggagagcaggcgtcgggacgcagcaaagagaggagagaccccagagtcagaaggagtgagaaccctgacccctaatcccactgcatccagccaataggagcccagtaagtgaccccaccccgcaggctgcaggctccttcctgtgcaggccaccatggcggagctgcaggaggtgcagatcacagaggagaagccactgttgccaggacagacgcctgaggcggccaaggaggctgagttagctgcccgaatcctcctggaccagggacagactcactctgtggagacaccatacggctctgtcactttcactgtctatggcacccccaaacccaaacgcccagcgatccttacctaccacgatgtgggactcaactataaatcttgcttccagccactgtttcagttcgaggacatgcaggaaatcattcagaactttgtgcgggttcatgtggatgcccctggaatggaagagggagcccctgtgttccctttgggatatcagtacccatctctggaccagcttgcagacatgatccct

SEQ ID NO: 13597 - DNA, 531 bp, Homo sapiens
  source 1..531: mol_type = unassigned DNA
attcctcttccaaagcttccaccgatcagcctggaaacggagctgggggcaggaaaggccctctgtgtgttctagagtagtcttcaacccctgggtccctctgttccctgcatcttcctgtgctgagagaggaagcctggtgtttgaggcgatgtggggatgtagagacaacttcccagtctcatttcctcatcctgccaggccaccatggcggagctgcaggaggtgcagatcacagaggagaagccactgttgccaggacagacgcctgaggcggccaagactcactctgtggagacaccatacggctctgtcactttcactgtctatggcacccccaaacccaaacgcccagcgatccttacctaccacgatgtgggactcaactccactgtttcagttcgaggacatgcaggaaatcattcagaactttgtgcgggttcatgtggatgcccctggaatggaagagggagcccctgtgttccctttgggatatcagtacccatctctggaccagcttgcagacatgat

SEQ ID NO: 13598 - DNA, 573 bp, Homo sapiens
  source 1..573: mol_type = unassigned DNA
agggcctggaaggcgccagccgggccggcgggcggtgtgattgatccgcgtcccctggagctggaggctcgggggaaagggccagcacggagcgggcgctcggttgctgcgcacaaaggctgaggctccaagagctgcagggcgtgtttggggtgcgcgcgaggttgtgtgcaagaccccagagtcagaaggagtgagaaccctgacccctaatcccactgcatccagccaataggagcccagccaccatggcggagctgcaggaggtgcagatcacagaggagaagccactgttgccaggacagacgcctgaggcggccaagactcactctgtggagacaccatacggctctgtcactttcactgtctatggcacccccaaacccaaacgcccagcgatccttacctaccacgatgtgggactcaactataaatcttgcttccagccactgtttcagttcgaggacatgcaggaaatcattcagaactttgtgcgggttcatgtggatgcccctggaatggaagagggagcccctgtgttccctttgggatatcagtacccatctctggacc

SEQ ID NO: 13599 - DNA, 580 bp, Homo sapiens
  source 1..580: mol_type = unassigned DNA
gtcctacccatcccttcccgatggcgcttgccttcgcgggccgtcgggggagaacgggagaagattgtgggaccgctctcctctccctttctccactcgtgggacctacacggagactgagtagaggagagaagcgacggcaccaatctttgtaccccagagtcagaaggagtgagaaccctgacccctaatcccactgcatccagccaataggagcccagccaccatggcggagctgcaggaggtgcagatcacagaggagaagccactgttgccaggacagacgcctgaggcggccaaggaggctgagttagctgcccgaatcctcctggaccagggacagactcactctgtggagacaccatacggctctgtcactttcactgtctatggcacccccaaacccaaacgcccagcgatccttacctaccacgatgtgggactcaactataaatcttgcttccagccactgtttcagttcgaggacatgcaggaaatcattcagaactttgtgcgggttcatgtggatgcccctggaatggaagagggagcccctgtgttccctttgggatatcagtac

SEQ ID NO: 13600 - DNA, 578 bp, Homo sapiens
  source 1..578: mol_type = unassigned DNA
agcaggtagggggaggggcaggcgaggggccgtagggcctggaaggcgccagccgggccggcgggcggtgtgattgatccgcgtcccctggagctggaggctcgggggaaagggccagcacggagcgggcgctcggttgctgcgcacaaaggctgaggctccaagagctgcagggcgtgtttgggaccccagagtcagaaggagtgagaaccctgacccctaatcccactgcatccagccaataggagcccagtaagtgaccccaccccgcaggctgcaggctccttcctgtgcaggccaccatggcggagctgcaggaggtgcagatcacagaggagaagccactgttgccaggacagacgcctgaggcggccaagactcactctgtggagacaccatacggctctgtcactttcactgtctatggcacccccaaacccaaacgcccagcgatccttacctaccacgatgtgggactcaactataaatcttgcttccagccactgtttcagttcgaggacatgcaggaaatcattcagaactttgtgcgggttcatgtggatgcccctggaatggaa

SEQ ID NO: 13601 - DNA, 571 bp, Homo sapiens
  source 1..571: mol_type = unassigned DNA
agggggaggggcaggcgaggggccgtagggcctggaaggcgccagccgggccggcgggcggtgtgattgatccgcgtcccctggagctggaggctcgggggaaagggccagcacggagcgggcgctcggttgctgcgcacaaaggctgaggctccaagagctgcagggcgtgtttggggtgcgcgcgaggttgtgtgcaagaccccagagtcagaaggagtgagaaccctgacccctaatcccactgcatccagccaataggagcccagccaccatggcggagctgcaggaggtgcagatcacagaggagaagccactgttgccaggacagacgcctgaggcggccaaggaggctgagttagctgcccgaatcctcctggaccagggacagactcactctgtggagacaccatacggctctgtcactttcactgtctatggcacccccaaacccaaacgcccagcgatccttacctaccacgatgtgggactcaactataaatcttgcttccagccactgtttcagttcgaggacatgcaggaaatcattcagaactttgtgcgggttcat

SEQ ID NO: 13602 - DNA, 554 bp, Homo sapiens
  source 1..554: mol_type = unassigned DNA
agcaaagagaggagaggtaccaggactctgggcacgagggagtcggaactcctgcgccctcgacgttcccccgtgccccctttcggcgccagcacacctgcccctgccagccggcgagacccccgcctcctcagcggcggtcccgcccacctcctcctttcttaatctagttctctgtgttcgggcggggggagtcgaactcgtggggtgtcagtatcccggaccccagagtcagaaggagtgagaaccctgacccctaatcccactgcatccagccaataggagcccagccaccatggcggagctgcaggaggtgcagatcacagaggagaagccactgttgccaggacagacgcctgaggcggccaaggaggctgagttagctgcccgaatcctcctggaccagggacagactcactctgtggagacaccatacggctctgtcactttcactgtctatggcacccccaaacccaaacgcccagcgatccttacctaccacgatgtgggactcaactataaatcttgcttccagccactgtttcagttcgagg

SEQ ID NO: 13603 - DNA, 558 bp, Homo sapiens
  source 1..558: mol_type = unassigned DNA
tattgattccggctcgagcctagagaggacgtgttctctggacttagggaccccagagtcagaaggagtgagaaccctgacccctaatcccactgcatccagccaataggagcccagccaccatggcggagctgcaggaggtgcagatcacagaggagaagccactgttgccaggacagacgcctgaggcggccaaggttattagagaccgtttgactcccatgcccaaattccagacctctaagcatcccccttgccttctaacttcccaagcgtactgatcttattctaactcacaccactgcttcaccactaccctagtctctctccccatacactataattgggagtcaggcccttgtctcgtcactacactaaccttcatcctttccgtgtctctctttgtcaatctctttctgtctttggtcatttgttggtctgtctttacttgcctctctttgtctgtttgtctctccatctgggacgccacatggtcatgtgtttctgtgtgaatccgtgtgtgtctctccaggaggctgagttagctgcccgaatcct

SEQ ID NO: 13604 - DNA, 2054 bp, Homo sapiens
  source 1..2054: mol_type = unassigned DNA
cggccccccgcattccccgcccccacctccccgccttgttgtccaacttctcccggagcagccggagagcaggcgtcgggacgcagcaaagagaggagaggccaccatggcggagctgcaggaggtgcagatcacagaggagaagccactgttgccaggacagacgcctgaggcggccaaggaggctgagttagctgcccgaatcctcctggaccagggacagactcactctgtggagacaccatacggctctgtcactttcactgtctatggcacccccaaacccaaacgcccagcgatccttacctaccacgatgtgggactcaactataaatcttgcttccagccactgtttcagttcgaggacatgcaggaaatcattcagaactttgtgcgggttcatgtggatgcccctggaatggaagagggagcccctgtgttccctttgggatatcagtacccatctctggaccagcttgcagacatgatcccttgcgtcctgcagtacctaaatttctctacaataattggagttggtgttggagctggagcctacatcctggcgagatatgctcttaaccacccggacactgttgaaggtcttgtcctcatcaacattgatcccaatgccaagggttggatggattgggcagcccacaagctaacaggcctcacctcttccattccggagatgatccttggacatcttttcagccaggaagagctctctggaaattctgagttgatacaaaagtacagaaatatcattacacatgcacccaacctggataacattgaattgtactggaacagctacaacaaccgccgagacctgaactttgagcgtggaggtgatatcaccctcaggtgtcctgtgatgctggtggtaggagaccaagcacctcatgaagatgcagtggtggaatgtaactcaaaactggaccccacccagacctcgttcctcaagatggctgactccggaggtcagccccagctgactcagccaggcaagctgaccgaggccttcaagtacttcctgcaaggcatgggctacatggcctcatcctgcatgactcgcctgtcccggtctcgtacagcctctctgaccagtgcagcatccgttgatggcaaccggtcccgctctcgcaccctgtcccagagcagcgagtctggaactctttcttcggggcccccggggcacaccatggaggtctcctgttgaatggcccttgttgccctagagtgggacccagccctcacctcccccagagctaacctgggaggtgctgaaggggcattgggccaccgtaagcaagggaaaaagggcagatcatgcggggagatgaccttgatctttgattgctaccctaaccttgacctttaacccgtgattccccccagctcctggaagagatgtcctaatatctcttagggacccagacccctaaattctcctcctcccccattttgatgttaaggtggagagggcatatgcatcctctgtcctgatctaggtgtctatagctgaggggtaagaggttgttgtagttgtcctggtgcctccatcagactctccctacttgtcccatatttgcaaggggaggggatttggggctggggctccattcaccaaagctgaggtggcttctcattaaccctttaggactctgaagggtatggacctacgtgaatgtgtgtcagggggagacttgctggtgggttagtggtcctcaggatgtgatagaaacatccagtgtaaaaaggaagttggaatgggagttggcgggcagtgaacgagtgtggggaaggattggtgctggggcaacaggaaggggcctggggccgtttggctgcactaactttggtagctcagtgtgcatctagagtgggactggggagggagctaagcttgggctgggctgcttggggcttggcatagggtggaaagggctaccctggggctctgaccacactgtagtatgtgtggagggtgccctcccgtctcccacaacttctgctataacaataaactgtagaggaatctgagtaccgtt

SEQ ID NO: 13605 - DNA, 1309 bp, Homo sapiens
  source 1..1309: mol_type = unassigned DNA
gcggccgcggcggcagcagaccccagagtcagaaggagtgagaaccctgacccctaatcccactgcatccagccaataggagcccagccaccatggcggagtgcaggaggtgcagatcacagaggagaagccactgttgccaggacagacgcctgagggccaagactcactctgtggagacaccatacggctctgtcactttcactgtctatggcacccccaaacccaaacgcccagcgatccttacctaccacgatgtgggactcaactataaatcttgcttccagccactgtttcagttcgaggacatgcaggaaatcattcagaactttgtgcgggttcatgtggatgcccctggaatggaagagggagcccctgtgttccctttgggatatcagtacccatctctggaccagcttgcagacatgatcccttgcgtcctgcagtacctaaatttctctacaataattggagttggtgttggagctggagcctacatcctggcgagatatgctcttaaccacccggacactgttgaaggtcttgtcctcatcaacattgatcccaatgccaagggttggatggattgggcagcccacaagctaacaggcctcacctcttccattccggagatgatccttggacatcttttcagccaggaagagctctctggaaattctgagttgatacaaaagtacagaaatatcattacacatgcacccaacctggataacattgaattgtactggaacagctacaacaaccgccgagacctgaactttgagcgtggaggtgatatcaccctcaggtgtcctgtgatgctggtggtaggagaccaagcacctcatgaagatgcagtggtggaatgtaactcaaaactggaccccacccagacctcgttcctcaagatggctgactccggaggtcagccccagctgactcagccaggcaagctgaccgaggccttcaagtacttcctgcaaggcatgggctacatggcctcatcctgcatgactcgcctgtcccggtctcgtacagcctctctgaccagtgcagcatccgttgatggcaaccggtcccgctctcgcaccctgtcccagagcagcgagtctggaactctttcttcggggcccccggggcacaccatggaggtctcctgttgaatggcccttgttgccctagagtgggacccagccctcacctcccccagagctaacctgggaggtgctgaaggggcattgggccaccgtaagcaagggaaaaagggcagatcatgcggggagatgaccttgatctttgattgctaccc

SEQ ID NO: 13606 - DNA, 2184 bp, Homo sapiens
  source 1..2184: mol_type = unassigned DNA
gcgagggcggcggaggcgcggccgggcgggtcccagggccgtggttctccagcgcaggagtccccggcgcacccgctgcgctcgccccgcagccgcagcctgagcggccgaagtcgccaccagctgtgtccgcgcagatcccgggcgcggaggggagaggtcgcccgcttgtcgcccccgccggaccccgggcaccgcgtagcacccaagcgccacccggacgaggggccctggggagcggctgaggccgaagacccgagggaaggaggagcccgcggacggctgcagccccagactgtattttctgtgagtcctgatcaagtgatacaaatgagctgcaatggtgacataaactcttgacagagattggaaaagtagctggaacaccatcttttcttttaactttttatggtgcttctgttggcatagttggggaaagcacctacaacatgagttttatcatgaagcttcacagacactttcaaagaacagtcattctgcttgccactttttgtatggtgagcattatcatttctgcttactacctgtacagtggctacaaacaggaaaatgaactctctgagacggcttcagaagttgactgtggcgacctccaacacctaccatatcaactaatggaagtgaaagcaatgaagctttttgatgcctcaaggacagaccccacagtcctagtatttgtagagagccagtactcatctcttggtcaagacatcattatgattctagaatcaagtagattccagtatcacattgaaattgcccctggaaagggagatctcccagtgcttatagacaaaatgaaaggcaaatacattctcattatttatgagaatattttaaagtatataaatatggattcctggaatcgaagccttctagataaatactgtgtagaatatggtgtgggtgtcattggattccacaaaactagtgagaagagtgtacagagctttcagttaaaaggtttccctttttccatatatggaaatcttgcagtaaaagattgttgtattaatcctcattctccattgattcgtgtgaccaaatcttccaagcttgaaaaaggttctttacctggaactgactggacagtttttcagattaatcattcagcctatcaaccagtaatatttgccaaagtaaagaccccagaaaacctttctccttccatctctaaaggtgctttttatgccactattatacatgacctggggcttcatgatggaattcaaagggttctttttggcaacaacttgaacttttggctgcacaagctcatcttcatagatgccatctccttcttatcagggaagaggctgacattgtccttggacaggtacattcttgtggatattgatgatatatttgtgggaaaagagggaacaagaatgaacaccaatgatgtaaaggtaaggctctattttctcaagtttcaaagttcagttcatcttccagcagggatacaactatcccagtttgtactacaactgggttacccaggacatgggatttactgggaaagtctgggcaatctaggattatcgctcaccctaaatcaactaagaagattatgtatttctatctgaatcaagaaaaataaagattttactaaaagattgagtgtggcaggatcctgaaatggttttctacatgtatttacaactagagtagaagtcatttcgtttaattactttccagaaactatctacctcaaaaaaaagctattactaatctcagacttagctcatttaaatatgaaattaaagtgaatttgtcttaatgataataaatatttccacaaatttcaagaattacagatctcattgtagcaagttcagatacttttggaagtcaaatatgcagtgcattttctcttatcatatttttctgaaactgaaaatcagtactactaaatatgaagatcaatgactgtataagcatatttattcacatttaaacatgaggatttaacttgatttcagcgaacacttctgacacatatatgaagccaatcatgccaaatttaaattgtattacatttcttattgtgtaaaactgctgcccttaaacagaaaacaattatttgaaatagtttgtcattattatgagttgattgtgttacataaacagctgattgtttactattaaaaaattttaaaatta

SEQ ID NO: 13607 - DNA, 5961 bp, Homo sapiens
  source 1..5961: mol_type = unassigned DNA
ccggtcccttggcgacgggtcttgcatgtgacactcttgccctctagtgcctcaccagcttggtagcagtttgatggctaatattaataagatgttacataacatgagagtactgggccaggactggtgttgctaccacttgtaaagtcaaaaagcctgagccgatggtaacgagtggtactgtttccgtttcttttccatctattgcaactttctcaagcattttcagctctgaactttaattccagactgtattttctgtgagtcctgatcaagtgatacaaatgagctgcaatggtgacataaactcttgacagagattggaaaagtagctggaacaccatcttttcttttaactttttatggtgcttctgttggcatagttggggaaagcacctacaacatgagttttatcatgaagcttcacagacactttcaaagaacagtcattctgcttgccactttttgtatggtgagcattatcatttctgcttactacctgtacagtggctacaaacaggaaaatgaactctctgagacggcttcagaagttgactgtggcgacctccaacacctaccatatcaactaatggaagtgaaagcaatgaagctttttgatgcctcaaggacagaccccacagtcctagtatttgtagagagccagtactcatctcttggtcaagacatcattatgattctagaatcaagtagattccagtatcacattgaaattgcccctggaaagggagatctcccagtgcttatagacaaaatgaaaggcaaatacattctcattatttatgagaatattttaaagtatataaatatggattcctggaatcgaagccttctagataaatactgtgtagaatatggtgtgggtgtcattggattccacaaaactagtgagaagagtgtacagagctttcagttaaaaggtttccctttttccatatatggaaatcttgcagtaaaagattgttgtattaatcctcattctccattgattcgtgtgaccaaatcttccaagcttgaaaaaggttctttacctggaactgactggacagtttttcagattaatcattcagcctatcaaccagtaatatttgccaaagtaaagaccccagaaaacctttctccttccatctctaaaggtgctttttatgccactattatacatgacctggggcttcatgatggaattcaaagggttctttttggcaacaacttgaacttttggctgcacaagctcatcttcatagatgccatctccttcttatcagggaagaggctgacattgtccttggacaggtacattcttgtggatattgatgatatatttgtgggaaaagagggaacaagaatgaacaccaatgatgtaaaggccctgcttgatactcagaatcttttgcgtgcacaaatcacaaattttacattcaacctgggattttcagggaaattttaccatacaggaactgaagaggaagatgaaggagatgactgtctgttggggtctgtggatgagttctggtggtttcctcacatgtggagccatatgcagccccacctcttccacaatgagtcatctttggtggagcagatgattctcaacaaaaaatttgccttagagcacggcattccaacggacatgggctacgctgtggcccctcaccattcgggcgtctaccctgtacatgttcagctttatgaggcctggaagaaggtctggaatattaaaatcaccagcactgaagaatatccacatctgaagccagctagataccggaggggttttatccacaaaaacatcatggttctcccaagacaaacctgtgggcttttcactcacaccattttctacaaagaatatccagggggtcctaaagagctggataagagtatccaaggaggagaacttttcttcactgtcgtcctcaaccctatcagcattttcatgacccatttgtccaactatgggaatgaccgactgggattatatacatttgttaatctggccaactttgtgaagagctggaccaacctgcgacttcagactctgcctccagtacaactggcccacaagtattttgagctgtttcctgatcagaaagaccctctctggcagaatccttgcgatgacaaacgccacagagacatttggtctaaagaaaaaacttgtgatcgcttaccaaaattcttggtaataggaccccagaaaactggtaccactgctttgtatttgttcctggttatgcatccttccatccttagtaactcccccagcccaaaaacctttgaggaggtacagttctttaatagaaataactaccacagggggattgattggtatatggatttcttcccagtcccatctaatgtcactaccgactttttgtttgagaagagtgccaattacttccactcagaggaagcccctaaaagagctgcttctctggttcccaaagccaagattatcaccattctcattgacccttcagaccgagcatactcctggtaccagcatcagcgatcacatgaagaccctgcagctctgaagtttagcttctacgaagtgatctcagcagggccccgtgcaccctcggagctcagagccttgcagaagagatgtttggtcccggggtggtatgccagccacatcgagagatggcttgtttatttccccccatttcagttgctaattattgatgggcaacaactaagaactgatcctgctacagtgatggatgaagtacagaagtttctaggagtcttgcctcattataattactcagaagctttaacgtttgattctcataaaggtttctggtgtcagttactggaagaaggtaaaacaaaatgccttggaaagagcaaaggaagaaaataccctccaatggattctgatagcaggacatttctgtcaagctactatcgagatcacaacgtggaactctcaaagctgctgcacaaactgggtcagcctctgccatcctggctgagacaggagctgcagaaagtaagatagcactgagagaaaacttgagacttcatcgtccatgtagaacacaccttttccaaagcttccagaagctaccaaaaggcagttgaaaaatatacctcttcaaatgagaaaaaagaacagtttcttccatgtgctggcacgtggatgattagaaaaaaagaaaaagtatgtgttacaagccttgaggcctgtggcctttctcttaacccatatctgagcctgtgggattattgtagactactgtgcactcatgtggaagtcaattgcaaccaacataaatatcaaacacaaatgcagaactgttccatttcatagtaatatttacacttttatatatcaactaagattgtgtctctgtaggtttttagaccactgtttgcctgtacgatgttttcttattattttattctataaagtgtcctatgaaacaagaagcaaaataaacatcacaatgtagcataaaatgtcaaaagcataacacccatgaaaaatgcttgccaaaatttaaatccacttaagtatttagaaataattgtaaattataatttgtgctagatcagagtggaaaagttatatatgagtgttatctgcaccaaaaaaaaataagtgctatagcaaaagtgattttttcatatacatagtctagtgaatatatgtaaaaattactaactcttccatcacaacgtaattgttatactgaaatatatactgtaaagctgttggatggtaaatagaaacacatcaagtacaccaaaacagtaaataacaatgtaaagtgtactgactgaatcctctaaaagggagaaattgtaggggtctaaaaacatatcatcgagaattctatgtccacttgctgtaagctgtgaatctatcccagtagtcctcactagttctacagaaatgcatgcctagagtctgaggtatgtgtcatctccagaaacaggttgacttttaaatgtgaatagctatttttaatgctccccaaaacaaaacctattaaactaaaactaaaaacagtttccctagatgatgtggttaggctatttacatttaggttattaaaaaattgcattttcccagatagttcaaaataaaattatgtaatgtagtagagatttataacaaaaaacaaattaatatattatttgtaatctaatgtttgcaatgatacttttgatataaggcaaagaaacataagcagagcagaggcccatttttgaaaatatttcacccatcactctggtggaagtaacagatcataggtacaattaaggattagctactaaattaaatgcaggaagtacaaagatgagcaagtcatgctcttgaaatatatttacatttcaattgtaaataatatatatggttaataaagtttccaaaaaagaaaagaatacatcatacttattttcctgttaatatttacttaatttttttttttgagagggggacagagtctcactatgtcacccaggctggagtgcaatggtgtgatctcagctcactgcaacctccgcctcctgggttcaagtgattctcctgcctcagcctcctgaggagctgggattacagccatgcaccaccacgcccgggtaatttttgtatttttagtagtgacagggtttcaccatgttgactaggctgatcttgaactcctgacctcatgatccacccaccttggcctctcaaagtgctgagattacaagcgtgagccaccatgccctgactacttaatttttaaatgtactgtacatatacataaaatttaagtagtaaattaattccctgctatgattataagcctttataaaatattatcaaaggtatgattagaaacaaatgggaggaaaacccatagtaaaaatattttcattgtcattttaatgggtaaaactatcaattactaattagaaaatgaattgtgagatccacttactataaatttttaactgtacattataattacttttttaaagtttcatgtacctaaagcatatgctaatttttaaatatactattagcagaaaaaattggaaaaatcaccaatttttaagactcttgactctaaaagcaaaatcaaagtgatttggacaaatatgggaaacacagtcttcatgcttactgctgtctcttttatagcagcagatgccagacatgctaggaaaattactatagtcttccatctccaccaacttaagaaaactggcttaggaaggttaaacatgagaataggcctcagcagttatatacagtgtcatgttttcatttggcaacaacatttattctaataaaaaaagaaaagaaaaactgatacatttatgctttaatggtaagatgtacatttgaactgctaagcaaagctgctaatggcctattttgtttaggtaaatcgagttgactgaacacttcatccttttaaatagatgtcaaaaacatactccgtgtttgtataaagacaggagaaaaaggaagagatcttaccaaaatttattcattcacaagtacatgtattacgctagctagagcagcaaacctgtgaaaggatttttgaccactcaatgtgtcttgaagacagcatcaaattctagaggacatgcatactttccacattatatactccaactggttaatatgctaatctgaaagtaacataaatacatatgagagaataatgagagataatctgatttaaaactagctttgtatagaattccctttttcattgtttaaaatatgaaacttcctcaggaagaaatgaaatggttatttcaatgtttatagctgtaatattcttgtcattcacattgaatgaaaattactggaaacatttttttctctgagttttttaaaataaaaaacctagatataattctgatagtagcatggtacctcatatgtacaacaataaactgataggaaaatgaagagtttggacctgg

SEQ ID NO: 13608 - DNA, 3351 bp, Homo sapiens
  source 1..3351: mol_type = unassigned DNA
aaagaccgactacagctaaacaagaggcacagcagcactagcaacagcagagcaggagcagctggtattccggtgattaaatagttctcatagcctttttgctgtactcggtctgctccctggtgtaattctcgtgtccaagaaggaagctgcattttaacggtgtgctgaacagaggtttgaatcattccagctggctgcttgttttgaaaaggacaatgtgtgtataaataaaaggactctgctggaagagttcagacactaagactggagctagagagtgctcttggaatattgttgaggcagattgcatgaactgaaagctccttctaattaacctggagccaagtgaacctgaatactggatatctcatgttctaacacgggataaattcaagttagaaaaagacaaaatattgaaatgcttctctagattatgcttagaggattctgcagcaattctcagtattggacatattcaaaatctcctcaacgtatatccttcccatctattgccttccagctttaactcagttgtgctcccttcaaacattttacatgatttgcgatggttacatgaactctggggaagtgatatttgcaacatctcatactttattcactatggcactttaggaaacgaaattgggaaaaagcttccaaaacattattctaaaaaatgaatcttattgtgaaacttcggagaagttttcgaacattgattgttctcttagctaccttttgcttggtgagcattgtcatttctgcctattttctctactctggctacaaacaggaaatgacacttattgaaaccactgcagaagcagaatgcactgacatcaaaattctaccatataggtcaatggagctgaaaacagttaaacctattgacacatccaaaacggaccctactgtccttctcttcgtggagagccaatactctcaactcggtcaagatatcatagctattttggagtccagccgatttcagtaccacatggttattgcccctggaaagggagatatacctcctcttacagataatggcaaagggaaatatactttagttatttatgaaaatattctgaagtatgtcagcatggactcatggaatcgagagcttttagaaaaatactgtgtggaatacagtgttagtataatcggttttcataaagccaatgagaacagcttaccaagtacacaattaaaaggctttccgttaaaccttttcaataatctagctctaaaggactgttttgttaaccctcaatctcctttgctgcatattaccaaagcccccaaggttgagaaaggccctcttcctggggaagactggactattttccaatataatcattcaacctaccagcctgtacttttaactgagttacagacagaaaaatccctgtcatccttgtctagcaaaacactctttgcaacggtgattcaggatctggggcttcatgatggaattcagagagtactttttggcaacaacttgaacttttggctgcacaagctcatcttcatagatgccatctccttcttgtcagggaagaggctgacattgtccttggacaggtacatccttgtggacattgatgatatatttgttgggaaagagggaacaaggatgaatgtcaaagatgtgaaggcattactagagactcaaaatttactgcgcactcaggttgcaaattttaccttcaaccttggattttcagggaagttttaccacacagggactgaagaggaagatgaaggagatgaccttttacttcggtctgtggatgagttctggtggtttcctcacatgtggagccacatgcagccccacctcttccacaacgagtcatctttagtagagcagatgattctcaacaaggaatttgcactggaacatggaataccaatcaacatgggctatgctgtggccccacatcactcaggggtctacccggttcacattcagctgtatgcagcttggaagaaggtctggggtattcaagtcaccagcactgaagaatatccacatctgaaacctgcccggtacagaaagggcttcattcacaatagcatcatggtcctccctcgacagacttgtgggttgttcactcacactattttctacaaagaatatccaggaggaccccaagaactggataaaagtatcagaggaggtgaactttttctcacaatccttctaaacccaatcagcattttcatgacccatttatcaaactatggaaatgaccgcctagggttatatacctttgtgaacttggtcaactttgtgcagagctggaccaacctgaaattgcaaactctgcctccagtgcaactggcccaccagtattttgagctcttccctgagcagaaagaccctctatggcagaatccatgtgatgataaacgacacaaagacatctggtccagagagaaaacttgtgaccacttaccaaaatttctagtaattggtccacaaaaaacaggaacaactgcactttatttatttcttcttatgcatccttcaatcatcagcaatctccctagtccaaagacatttgaggaagttcagttctttaatggcaacaactatcacaaaggaatagactggtatatggactttttccctacaccatccaatactacaagtgactttctgtttgaaaagagtgctaattacttccattcggaagaagctccaagacgagccgcatctcttgtccccaaagccaagatcatcaccatcctcattgacccctcagacagggcatactcttggtaccagcaccaacgatcacatgaagatccagctgctctgaggttcaatttctatgaagttatttcaacaggacattgggctccatctgacttaaaaactttgcagagaagatgcctagtacctggatggtatgcagtccacatagaaagatggctaacttactttgctacttctcagttgctaattattgatggacagcagctgagatctgacccagctactgtgatggatgaagtccagaagtttctgggagttacacctcgttataattactctgaagcactaacgtttgatccccaaaagggtttttggtgtcaattactggaaggaggaaagacaaaatgccttggaaaaagcaaaggccgaaaatatccacctatggatccagagtctagaacgttcctctctaattactaccgagatcataatgtggaactatccaaactgctacacagactgggacagcctctgccatcgtggctgagacaggaactgcagaaagtgagatagcactggagacaagaactaagcctctcaagatacttttagtgttaaaaaaaaaa

SEQ ID NO: 13609 - DNA, 2015 bp, Homo sapiens
  source 1..2015: mol_type = unassigned DNA
tgctgtactcggtctgctccctggtgtaattctcgtgtccaagaaggaagctgcattttaacggtgtgctgaacagaggtttgaatcattccagctggctgcttgttttgaaaaggacaatgtgtgtataaataaaaggactctgctggaagagttcagacactaagactggagctagagagtgctcttggaatattgttgaggcagattgcatgaactgaaagctccttctaattaacctggagccaagtgaacctgaatactggatatctcatgttctaacacgggataaattcaagttagaaaaagacaaaatattgaaatgcttctctagggactgaagaggaagatgaaggagatgaccttttacttcggtctgtggatgagttctggtggtttcctcacatgtggagccacatgcagccccacctcttccacaacgagtcatctttagtagagcagatgattctcaacaaggaatttgcactggaacatggaataccaatcaacatgggctatgctgtggccccacatcactcaggggtctacccggttcacattcagctgtatgcagcttggaagaaggtctggggtattcaagtcaccagcactgaagaatatccacatctgaaacctgcccggtacagaaagggcttcattcacaatagcatcatggtcctccctcgacagacttgtgggttgttcactcacactattttctacaaagaatatccaggaggaccccaagaactggataaaagtatcagaggaggtgaactttttctcacaatccttctaaacccaatcagcattttcatgacccatttatcaaactatggaaatgaccgcctagggttatatacctttgtgaacttggtcaactttgtgcagagctggaccaacctgaaattgcaaactctgcctccagtgcaactggcccaccagtattttgagctcttccctgagcagaaagaccctctatggcagaatccatgtgatgataaacgacacaaagacatctggtccagagagaaaacttgtgaccacttaccaaaatttctagtaattggtccacaaaaaacaggaacaactgcactttatttatttcttcttatgcatccttcaatcatcagcaatctccctagtccaaagacatttgaggaagttcagttctttaatggcaacaactatcacaaaggaatagactggtatatggactttttccctacaccatccaatactacaagtgactttctgtttgaaaagagtgctaattacttccattcggaagaagctccaagacgagccgcatctcttgtccccaaagccaagatcatcaccatcctcattgacccctcagacagggcatactcttggtaccaggttggagtgcaatggcgtgatctcggctcactgcaaccttcacctcccaggttcatgccattctcctgcctcagcctcctgagtagctgggactacagcaccaacgatcacatgaagatccagctgctctgaggttcaatttctatgaagttatttcaacaggacattgggctccatctgacttaaaaactttgcagagaagatgcctagtacctggatggtatgcagtccacatagaaagatggctaacttactttgctacttctcagttgctaattattgatggacagcagctgagatctgacccagctactgtgatggatgaagtccagaagtttctgggagttacacctcgttataattactctgaagcactaacgtttgatccccaaaagggtttttggtgtcaattactggaaggaggaaagacaaaatgccttggaaaaagcaaaggccgaaaatatccacctatggatccagagtctagaacgttcctctctaattactaccgagatcataatgtggaactatccaaactgctacacagactgggacagcctctgccatcgtggctgagacaggaactgcagaaagtgagatagcactggagacaagaactaagcctctcaaga

SEQ ID NO: 13610 - DNA, 1234 bp, Homo sapiens
  source 1..1234: mol_type = unassigned DNA
cacagcagcactagcaacagcagagcaggagcagctggtattccggtgattaaatagttctcatagcctttttgctgtactcggtctgctccctggtgtaattctcgtgtccaagaaggaagctgcattttaacggtgtgctgaacagaggtttgaatcattccagctggctgcttgttttgaaaaggacaatgtgtgtataaataaaaggactctgctggaagagttcagacactaagactggagctagagagtgctcttggaatattgttgaggcagattgcatgaactgaaagctccttctaattaacctggagccaagtgaacctgaatactggatatctcatgttctaacacgggataaattcaagttagaaaaagacaaaatattgaaatgcttctctaggcattactagagactcaaaatttactgcgcactcaggttgcaaattttaccttcaaccttggattttcagggaagttttaccacacagggactgaagaggaagatgaaggagatgaccttttacttcggtctgtggatgagttctggtggtttcctcacatgtggagccacatgcagccccacctcttccacaacgagtcatctttagtagagcagatgattctcaacaaggaatttgcactgagatgcggagaggagaaatgccgtggactgccatttccaaggagaaatcataagcctagacttgacactacagagagatgtagccctatgttcttggctacacttacccaaggaacatggaataccaatcaacatgggctatgctgtggccccacatcactcaggggtctacccggttcacattcagctgtatgcagcttggaagaaggtctggggtattcaagtcaccagcactgaagaatatccacatctgaaacctgcccggtacagaaagggcttcattcacaatagcatcatggtcctccctcgacagacttgtgggttgttcactcacactattttctacaaagaatatccaggaggaccccaagaactggataaaagtatcagaggaggtgaactttttctcacaatccttctaaacccagtatgtattctatgtatgcaccttacaataagattagcatttttaaatgtgttttattttcctgtcttttaaactaaatcatatttattttctttatttacagcacatcttactggtcatgcatttaaatctatattaaaatacttttcttgataaaa

SEQ ID NO: 13611 - DNA, 3439 bp, Homo sapiens
  source 1..3439: mol_type = unassigned DNA
aaagaccgactacagctaaacaagaggcacagcagcactagcaacagcagagcaggagcagctggtattccggtgattaaatagttctcatagcctttttgctgtactcggtctgctccctggtgtaattctcgtgtccaagaaggaagctgcattttaacggtgtgctgaacagaggtttgaatcattccagctggctgcttgttttgaaaaggacaatgtgtgtataaataaaaggactctgctggaagagttcagacactaagactggagctagagagtgctcttggaatattgttgaggcagattgcatgaactgaaagctccttctaattaacctggagccaagtgaacctgaatactggatatctcatgttctaacacgggataaattcaagttagaaaaagacaaaatattgaaatgcttctctagattatgcttagaggattctgcagcaattctcagtattggacatattcaaaatctcctcaacgtatatccttcccatctattgccttccagctttaactcagttgtgctcccttcaaacattttacatgatttgcgatggttacatgaactctggggaagtgatatttgcaacatctcatactttattcactatggcactttaggaaacgaaattgggaaaaagcttccaaaacattattctaaaaaatgaatcttattgtgaaacttcggagaagttttcgaacattgattgttctcttagctaccttttgcttggtgagcattgtcatttctgcctattttctctactctggctacaaacaggaaatgacacttattgaaaccactgcagaagcagaatgcactgacatcaaaattctaccatataggtcaatggagctgaaaacagttaaacctattgacacatccaaaacggaccctactgtccttctcttcgtggagagccaatactctcaactcggtcaagatatcatagctattttggagtccagccgatttcagtaccacatggttattgcccctggaaagggagatatacctcctcttacagataatggcaaagggaaatatactttagttatttatgaaaatattctgaagtatgtcagcatggactcatggaatcgagagcttttagaaaaatactgtgtggaatacagtgttagtataatcggttttcataaagccaatgagaacagcttaccaagtacacaattaaaaggctttccgttaaaccttttcaataatctagctctaaaggactgttttgttaaccctcaatctcctttgctgcatattaccaaagcccccaaggttgagaaaggccctcttcctggggaagactggactattttccaatataatcattcaacctaccagcctgtacttttaactgagttacagacagaaaaatccctgtcatccttgtctagcaaaacactctttgcaacggtgattcaggatctggggcttcatgatggaattcagagagtactttttggcaacaacttgaacttttggctgcacaagctcatcttcatagatgccatctccttcttgtcagggaagaggctgacattgtccttggacaggtacatccttgtggacattgatgatatatttgttgggaaagagggaacaaggatgaatgtcaaagatgtgaaggcattactagagactcaaaatttactgcgcactcaggttgcaaattttaccttcaaccttggattttcagggaagttttaccacacagggactgaagaggaagatgaaggagatgaccttttacttcggtctgtggatgagttctggtggtttcctcacatgtggagccacatgcagccccacctcttccacaacgagtcatctttagtagagcagatgattctcaacaaggaatttgcactggaacatggaataccaatcaacatgggctatgctgtggccccacatcactcaggggtctacccggttcacattcagctgtatgcagcttggaagaaggtctggggtattcaagtcaccagcactgaagaatatccacatctgaaacctgcccggtacagaaagggcttcattcacaatagcatcatggtcctccctcgacagacttgtgggttgttcactcacactattttctacaaagaatatccaggaggaccccaagaactggataaaagtatcagaggaggtgaactttttctcacaatccttctaaacccaatcagcattttcatgacccatttatcaaactatggaaatgaccgcctagggttatatacctttgtgaacttggtcaactttgtgcagagctggaccaacctgaaattgcaaactctgcctccagtgcaactggcccaccagtattttgagctcttccctgagcagaaagaccctctatggcagaatccatgtgatgataaacgacacaaagacatctggtccagagagaaaacttgtgaccacttaccaaaatttctagtaattggtccacaaaaaacaggaacaactgcactttatttatttcttcttatgcatccttcaatcatcagcaatctccctagtccaaagacatttgaggaagttcagttctttaatggcaacaactatcacaaaggaatagactggtatatggactttttccctacaccatccaatactacaagtgactttctgtttgaaaagagtgctaattacttccattcggaagaagctccaagacgagccgcatctcttgtccccaaagccaagatcatcaccatcctcattgacccctcagacagggcatactcttggtaccaggttggagtgcaatggcgtgatctcggctcactgcaaccttcacctcccaggttcatgccattctcctgcctcagcctcctgagtagctgggactacagcaccaacgatcacatgaagatccagctgctctgaggttcaatttctatgaagttatttcaacaggacattgggctccatctgacttaaaaactttgcagagaagatgcctagtacctggatggtatgcagtccacatagaaagatggctaacttactttgctacttctcagttgctaattattgatggacagcagctgagatctgacccagctactgtgatggatgaagtccagaagtttctgggagttacacctcgttataattactctgaagcactaacgtttgatccccaaaagggtttttggtgtcaattactggaaggaggaaagacaaaatgccttggaaaaagcaaaggccgaaaatatccacctatggatccagagtctagaacgttcctctctaattactaccgagatcataatgtggaactatccaaactgctacacagactgggacagcctctgccatcgtggctgagacaggaactgcagaaagtgagatagcactggagacaagaactaagcctctcaagatacttttagtgtt

SEQ ID NO: 13612 - DNA, 1811 bp, Homo sapiens
  source 1..1811: mol_type = unassigned DNA
gcaaaagttgtggcaagtccagccggagttagcgacagggagggatgcgcgcctgggtgtagttgtgggggaggaagtggctagctcagggcttcaggggacagacagggagagatgactgagttagatgagacgagggggcgggctgggggtgcgagaaggaagcttggcaaggagactaggtctagggggaccacagtggggcaggctgcatggaaaatatccgcagggtcccccaggcagaacagccacgctccaggccaggctgtccctactgcctggtggagggggaacttgacctctgggagggcgccgctcttgcatagctgagcgagcccgggtgcgctggtctgtgtggaaggaggaaggcagggagaggtagaaggggtggaggagtcaggaggaataggccgcagcagccctggaaatgatcaggaaggcaggcagtgggtgcagggctgcaggagggccgggagggctaatcttcaacttgtccatgccagcagcccctttttttccagaccaagggctgtgaacccgcctggggatgaggcctggtcttgtggaactgaacttagctcgacggggctgaccgctctggcccagggtggtggcagtgctccttttggacttttctctaggtttggcgctaaactcttcttgtgagctcactccaccccttcttcctccctttaacttatccattcacttaaaacattacctggtcatctggtaagcccgggacagtaagccgagtggctgttggagtcggtattgttggtaatggtggaggaagagaggccttcccgctgaggctggggtggggcggatcggtgttgcttgcctgcagagagggtggggagtgaatgtgcacccttgggtgggcctgcagccatccagctgaaagttacaaaaatgcttcatggaccgtggtttgttactatagtgttcctcatggcgagcagatggaaccgggagacatggagtccctggccagtgtgagtcctagcattgcaggaggggagaccctggaggagagagcccgcctcaattgatgcctgcagattgaatttccagaggcttaggaggaggaagttctccaatgttctgtttccaggccttgctcaggaagccctgtattcaggaggctaccatttaaagtttgcagatgagcttatggggggcaatcttaaaaagtccacagcagatgcatccggctcgaggggccatcagctttgaataaatgcttgttccagagcccatgaatgccagcaggcacccctcctttcctggggtaaaggttttcagatgctgcatcttctaaattgagcctccggtcatactagttttgtgcttggaaccttgcttcaagaagatccctaagctgtagaacattttaacgttgatgccacaacgcagattgatgccttgtagatggagcttgcagatggagccccgtgacctctcacctacccacctgtttgcctgccttcttgtgcgtttctcggagaagttcttagcctgatgaaataacttggggcgttgaagagctgtttaattttaaatgccttagactggggatatattagaggaagcagattgtcaaattaagggtgtcattgtgttgtgctaaacgctgggagggtacaagttggtcattcctaaatctgtgtgtgagaaatggcaggtctagtttgggcattgtgattgcattgcagattactaggagaagggaatggtgggtacaccggtagtgctcttttgttcttgcttcgtttttttaaacttgaactttacttcgttagatttca

SEQ ID NO: 13613 - DNA, 22743 bp, Homo sapiens
  source 1..22743: mol_type = unassigned DNA
ggagttagcgacagggagggatgcgcgcctgggtgtagttgtgggggaggaagtggctagctcagggcttcaggggacagacagggagagatgactgagttagatgagacgagggggcgggctgggggtgcgagaaggaagcttggcaaggagactaggtctagggggaccacagtggggcaggctgcatggaaaatatccgcagggtcccccaggcagaacagccacgctccaggccaggctgtccctactgcctggtggagggggaacttgacctctgggagggcgccgctcttgcatagctgagcgagcccgggtgcgctggtctgtgtggaaggaggaaggcagggagaggtagaaggggtggaggagtcaggaggaataggccgcagcagccctggaaatgatcaggaaggcaggcagtgggtgcagggctgcaggagggccgggagggctaatcttcaacttgtccatgccagcagcccctttttttccagaccaagggctgtgaacccgcctggggatgaggcctggtcttgtggaactgaacttagctcgacggggctgaccgctctggcccagggtggtatgtaattttcgctcggcctgggacggggcccaggccgggcccagcctggtggagcgtccaggtctgggtgcgaagccaggcccctgggcggaggtgaggggtggtctgaggagtgatgtggagttaaggcgccatcctcaccggtgactggtgcggcacctagcatgtttgacaggcggggactgcgaggcacgctgctcgggtgttggggacaacattgaccaacgctttattttccaggtggcagtgctccttttggacttttctctaggtttggcgctaaactcttcttgtgagctcactccaccccttcttcctccctttaacttatccattcacttaaaacattacctggtcatctggtaagcccgggacagtaagccgagtggctgttggagtcggtattgttggtaatggtggaggaagagaggccttcccgctgaggctggggtggggcggatcggtgttgcttgcctgcagagagggtggggagtgaatgtgcacccttgggtgggcctgcagccatccagctgaaagttacaaaaatgcttcatggaccgtggtttgttactatagtgttcctcatggcgagcagatggaaccgggagacatggagtccctggccagtgtgagtcctagcattgcaggaggggagaccctggaggagagagcccgcctcaattgatgcctgcagattgaatttccagaggcttaggaggaggaagttctccaatgttctgtttccaggccttgctcaggaagccctgtattcaggaggctaccatttaaagtttgcagatgagcttatggggggcaatcttaaaaagtccacagcagatgcatccggctcgaggggccatcagctttgaataaatgcttgttccagagcccatgaatgccagcaggcacccctcctttcctggggtaaaggttttcagatgctgcatcttctaaattgagcctccggtcatactagttttgtgcttggaaccttgcttcaagaagatccctaagctgtagaacattttaacgttgatgccacaacgcagattgatgccttgtagatggagcttgcagatggagccccgtgacctctcacctacccacctgtttgcctgccttcttgtgcgtttctcggagaagttcttagcctgatgaaataacttggggcgttgaagagctgtttaattttaaatgccttagactggggatatattagaggaagcagattgtcaaattaagggtgtcattgtgttgtgctaaacgctgggagggtacaagttggtcattcctaaatctgtgtgtgagaaatggcaggtctagtttgggcattgtgattgcattgcagattactaggagaagggaatggtgggtacaccggtagtgctcttttgttcttgcttcgtttttttaaacttgaactttacttcgttagatttcataatactttcttggcattctagtaagaggaccctgaggtgggagttgtgggggacggggagaaggggacagcttggcaccggtcccgtgggcgttgcagtgtgggggatgggggtatgcagcttggcactggtactgggagggatgagggtgaagaaggggagagggttggttagagatacagtgtgggtggtgggggtggtaggaaatgcaggttgaagggaattctctggggctttggggaatttagtgcgtgggtgagccaagaaaatactaattaataatagtaagttgttagtgttggttaagttgttgcttggaagtgagaagttgcttagaaactttccaaagtgcttagaactttaagtgcaaacagacaaactaacaaacaaaaattgttttgctttgctacaaggtggggaagactgaagaagtgttaactgaaaacaggtgacacagagtcaccagttttccgagaaccaaagggaggggtgtgtgatgccatctcacaggcaggggaaatgtctttaccagcttcctcctggtggccaagacagcctgtttcagagggttgttttgtttggggtgtgggtgttatcaagtgaattagtcacttgaaagatgggcgtcagacttgcatacgcagcagatcagcatccttcgctgccccttagcaacttaggtggttgatttgaaactgtgaaggtgtgattttttcaggagctggaagtcttagaaaagccttgtaaatgcctatattgtgggcttttaacgtatttaagggaccacttaagacgagattagatgggctcttctggatttgttcctcatttgtcacaggtgtcttgtgattgaaaatcatgagcgaagtgaaattgcattgaatttcaagggaatttagtatgtaaatcgtgccttagaaacacatctgttgtcttttctgtgtttggtcgatattaataatggcaaaatttttgcctatctagtatcttcaaattgtagtctttgtaacaaccaaataaccttttgtggtcactgtaaaattaatatttggtagacagaatccatgtacctttgctaaggttagaatgaataatttattgtatttttaatttgaatgtttgtgctttttaaatgagccaagactagaggggaaactatcacctaaaatcagtttggaaaacaagacctaaaaagggaaggggatggggattgtggggagagagtgggcgaggtgcctttactacatgtgtgatctgaaaaccctgcttggttctgagctgcgtctattgaattggtaaagtaataccaatggctttttatcatttccttcttccctttaagtttcacttgaaattttaaaaatcatggttatttttatcgttgggatctttctgtcttctgggttccattttttaaatgtttaaaaatatgttgacatggtagttcagttcttaaccaatgacttggggatgatgcaaacaattactgtcgttgggatttagagtgtattagtcacgcatgtatggggaagtagtctcgggtatgctgttgtgaaattgaaactgtaaaagtagatggttgaaagtactggtatgttgctctgtatggtaagaactaattctgttacgtcatgtacataattactaatcacttttcttcccctttacagcacaaataaagtttgagttctaaactcattagaattgttgtattgctatgttacatttctcgacccctatcacattgccttcataacgactttggatgtatcttcatattgtagatttaggtctagatttgctagctccaagtaattaaggccatgtaggagagcatggtaaccacagatagaactggtattatcccaagtggtctgcagactgctgagtggggatgggatctgctctctgttgagagttggtaatcattggtttgaaatgtgatgaaaccactcaagccaatgaaggtgggtgtgtaggtggggagtactttgccataatattttaaaacattacctggttagagttctaagtggtacttatttttgtttggttaggggaaagcctgaataaaaacagaaatggacacataatatgcatattccatagtctttgggaggctggaatgtgcctgggatttgggtctaagtgtatgcgtaattcttacctcactaaagaatttgccttgtttttttccttttggtgagtgactaaaacgtctgggcttccctgtgtgcgtgctacagtaagcaagcagaggctgtgcaaaggtgtgagcaggatcacgtggaatctggaggatacatcttggcttgcaaactgcctctgtctcctgggtgggactgttctgtccttgcactgctgttctgtgttacctcttggggtgtaaggttttgcttacaggagacaaactttgggcgtagaatggaagccactgccagcctctgtgctgagaaggaaggtgcttgtttcaaagggagcagcaagggaggcttgttctactcacctgggcctgtttgcctgagaaggggagataagggctgaactgggactagccagggggaccaacacaaatggtgggggatcatgacctgaaggattctttccttcccatgagctgcagggctggttgccgtccttgcaactgtgtcttatttgcctgtgccgttatatcttggtgacccctccacgtgtacactactgacaaacgggtggagtgctggggagaagtcactgtgccgcccacctagtaaaccttctgtctgtgctcatggcatctccaagatggggcactgctgtgtgcagaatccagggtcctctttctgcttgcaactcctttccctggatgccccagaaacaatccaggcctcctttcctatcttacccctttgctttgctttttaccccagcacctctataaccgccttctcttcttttcagaactccttgtttctcgtcctgttttttatgattacaaaactcttgcttccaccctggaagataactgctatagatgcctgtatgtaaatggtgctgtctccagcaactggcatgctgaagaagaattgattcacggggtataaatgttggggattggaagtggggatgaaatggcacttgttgatacaggagcagagaggtgaggccgactgctgaagacagctcgccaccctccttgcctccactccaatccaggggctggggccacattctttgccttcatttatcctcagatcaggtgagatcgacaggaggtgttgatggcagtgccagcaattattgctaatccgtttgcatccttatgcatagatctgaattcagactttgtgaatttccagaggtgtgggtaatataatagaattcagtgagtgggcatggctgatcttgtgcaaattaaaagttatggggcataagaatagcaaaagttgaacttcttttaaaaaggaaagtaccctgagagccagtattggttgaggctcttcagtatgcccaggttggcagcactgagaaccgcaggaacggcctgttgttacaaaaaggagattgactcagctgcccttggtgcatctgactgactatgactgctgagagattccaaggacccttaatgccagggctaacctctccatgtgcagtgagacctctggaggaagtgtcatcctctggctttgtgtggtactcattatggtgcagtgcgggcatgaaatgaagacacccaaataggcttacagatacgatatgttttaaatgttcgtatttaacaaaaacatactgacactgtttggaaatggcaacaggaagatagcaaaatgaatactaacattacgaaaagatgaacaggtacatgttccaaggcaggtggctgtgaacttcctctgagtgaaggcatcccctccagcacctttcagcctgctagttaggacgacccgccgccaccctccaggacctccagccctgcactgcctttcctctcttttaaataattcttcattgagttctaatatgtaaaaaaaaaaagtttactgtaaagtttgcaaataaggaaattttttttaaaagtcctcagtaatcttaccagtaacaattgttatgggcacatttgcttttggaagatttcttttgtatgcatgggataagtacatttttaaacaaaaatgggattatgccataaattctattttgtgactttaatatatagtgaacaccttttttaatgatgacaggatgttcccttgcatggctgtatcaatttaaacaatcttgtttcaatgggcatacagggtattttctagtttttttttcctcttagaaaataatacttgcgatgactttccttgtagctcagactttttcacgtctgttgttatctctttgggaatgctgaatacatacatttcgagaaggaaatgactgttaaactcttaagacttcaggttcatattgctaaactgcccagcagggagggattttttcaattagtgttctcactggtgaggcaaacctgatgccttcccctcttcctcagaaccggctttatcacattgaaaacctttgctcctccgacggatcgagtctgctttccctctggatgtgagcattgctttgtctgctggtgactgaacatctctaccttgtgtcaattggccatttgtggtgtgtgtgtgtgtgcgtgtgtgtgtgtgtgtgtgtgtatgattttctaattcctagtcatttttctattgattgttttgcaaaagccatttacatcttaaggatattgataatcttttgttatatttgatgcaaatatttttttccagtttataggttgccttttaattttgtgtttcaggtagataaaagttaaacgattttcttaggttagtttatcactgtggtttctgaacttgttatgtgtagatcttttccaccccaagagtacataaatattaatccatactttcttatggaacttgtatggtttcgttttttacatttaaaccttcttccccgtggtgtgtgttgtggaatctgtgtttgtgtgaggaggggcatggtgctctcagaacccacctcctgtggccagagagccctgtcctgtgagggtggttgtcacagtggcagggttcaattcagaagaccttgagggcaggctgatgtttcctgaatgggcccctggttgttgcttgtccctgactctccatttccccatctgagtggatttggacctaatagggcactggagctggttcgaatcctgactggactacttggcaactttatgtctgggagcaagttacttaacctccccaagcctgtgtctgtgaaatgcgggtaaatgaatgtagatgtttggcagcagctactccttgttgagctctcacagtgaactctcctgcctctgccctccttccccgcctcccctggtgcctagcgtcaggtctagccacttcctcctgggcccctctcccttttctgtggctggctgcctgcccgcctggcgctggacctttcatgtaacgggaatcagcatgtatattctggtctggtctgtttctacacttaattttgtttccagtagtatttccctgtaccggcagagttcacaaacacatttgaagaggctttttctcaggattcttaaccttcccaaaggaagtcccatggatgggtttctagaagtctataaatgctctgaaattgtatttttctgtggaaagcataactttcatctgcttgttcgtgctcaaaaaagatcatgaatgaatgattgcatgattttatgccattgtgcttatactaaaggatatgtagcccatctcttgagctgttaaactgttttgactactttaaatcgtgcagctgtgagcatctctgtaaatttagtgtacacatgtatcccctggagtggcattgcctcggcagtgagcacttatggttttataactctcttcacagactcaaatgactccagaaagctacacttcctgttgtgagtatatgatatccatttccctacatagccactaacatcaggtttttacaattttatttatttcttgctactttaagaaatttttgtggtgaaatacatataatagaagttgactatctgaatcatttttaagtatacattcagtagtgttaagtatgtcgccattgttgtacaaccaatctccagaactttttcatcttgcaaaacaaactctgtacccattaaataacattaaacattccattccctccagcctcagcaaccccattctactttctgtttctgtgagtttgactattccaagcacttcatatcagttaaatcatgaagtatttgtctgtctgtgactggcttatttctctgagcacagtgtcctcgagatgcgtctatgttgtagcatatgtcagaatttccttcctttttaaaagatccaaataatattcttattttatatcttttttttatccattcatccattagtggacacttgggttgcttttggctattgtaaataatggtgctatgtacaaatatctatattattgtatttacaagtataatgctgtaatgtacacacatctttttgagatcctaccttcagttcttttgagtatatagccagaagtggtattactaaatcttacgatatttctatttttaatttattgaggaaccactgtagtttttcatagcaactgcaccattttacgttctcaccaagagtgcacaagggttccgaggttcccacatcctccccaacacttgttattttctgctttttttagattgcagccatcatagtgggtgtgaggtgacatttcattgtggttttgatttgcatttccctaatgaggagtgatgctgagcatcttttcatatgcttactggtcatttgtatgttgtctttggaaaaatgtctattcaagtcctttgactattttaaaaattgggttattagagttatcgttgttgttgacttgtaggagtttctttctatattctggatattaatcccctatcagatatatgatttgcaaatatcttctcttattccataaggttactttttcactttgttgattgtgttctttgatgtatagaagtttttagttttgaaatagtctaatttatctgtttttacttttgtggtctgtgcttttggtgtcatatccaagaaatccttgccaaatccaacgttataaggtacttttaaggtattttagttgtcttagtctatatttctgtactcacctttctttatccactcatcagttgatgggcatgtaggttggttccatatctttgcaattctgaattgtgctatgatcaggtgtctttttagtataatgatttactctcctttgggtagatacccagtagtgggattgctggatcgaatggtttttataattttctattttaccacagtttctctctgcatttttcctctttgaccactaaccatgtgaaattctcatattgacctttataatgatcatgaactcttagtatcattgggaaggccacatttgccacttatgattgtaaaccttatcctccatttttcctgttattgttggtgcaaaaagcacctattataccaggactttaaaaatcagtctgataagtctttgataagtctaataataataactgataagtccattgaatttgcttctgattactttttctttagtagctaaacatgtatgtactcctatgattacaatgaacactcctctccatttaaattaattatttacattgatgaaatagcaaaatgttaatgactaaatactgtcttggttttttcgttccaggtcagtcaatattaacttcttataattttcttttttttctttatgtgtgtgtgtgtgtgtatttttttttttttaatttcaatggcttttggggtacaaatggcttttggtcatatagatgaattctacagtagtgaagtctgagattttactgcaccggtcacctgagtagtgtacattgtacccaatatgtggttttttataccttgcccccctcttaccctccccactttgagtctctagtgtccattatgtcactctgtatacctttttgtacccataagttagctctcacttataagtgagaacacacagtatttggttttccattcctgagttgcttcacttagaataatatcctccagctccatccaaaattgctgcaaaaaaaaaaaaaaccacaaacattattttgttcttttttattgctaagtcatattccatggtgtagagataccacattttatttatccactcactggttgatgggttggttccacatctttgcaattgtgacttgtactgccatcaagtgtctttctggtataatgacttcttttcctttgggtagatacccaggagtgggattgctagatcaaatggttcttaacattttctctctggatctatttctggaaattttaggctccagtttttgttgttgttgttaataaaatgcaatggaatgtaatgatcatcacttttcattatgctttaaaatctggtaaatggaggctagaacactcctgtaaggcaagaatattctctctgttggaactcaaatacacagaactgggtaaatctcaatcttaatctttgattcaggacacaacatggctctcttttacttgctttctttaattgttttttaataatgtggtaagcatttctgaatctcctatccaatacaaaaactaggacaatacagacagtaactcctatggttacaatgaacactcctctccacttaaattaattatttacactgatgaaattgaaatagcaaaattttaatgactaaatactgtctttgattttttgttccaggtctgtcaatattaacttcttataattttctttttttttctttatgtgtgtgtgtgtgtgtgtatatatatatatttaatttcaatggcttttggggtacaaatggcttttggtcatatatatgagttctacagtagtgaagtctgagattttactacaccttccacttatgtggtcccacaccacccgcctcccctgccgcctcctgccaccccctaggccaaggtaataatcatcctgaatcctgggtttatctctcacttgctttcttttcatataattttgcaaaagaatctgatctaaatgtgtttttcagagtatatatttatattttagctgttcttagagaaaatttattattttgcatgtaatcttatggaacattctcatttaataccatggtaagattcagcccttgcccaggggatagttcatttagtttgtttactggatagagctcatcatgtgactatacctcagttagtttatcagttctcccatccatggtgactaggttgcctctcagcctctcaacaacactgtttctcagtgtccttgtagaagtgatatgtgggtgttttctccttacacagagttgaaaggtgacgacaacaacgttggcactaccaatcccccaccctccagaggggtaaccagtgttaccagtttgctgtgtttcctgctacacctcgccttattcacttccatttgtatctgaaaaacgtgttgcatggtttcttttctatagaagtggtaaaatgctattgtgtcctgtacattattgattactttttttcatttaacagtagggagatgcctgggagtacacagagaactgccctcattgttttcaacttctgcactgtatgtctgtgagtttagccattctgctgttaatggaaatttacagtattctaatcttttgatattacaaacagttctgtgcgatcatcgtcatacacaaccccttgtgcacaatgcatgagtgtttctcagggtaggtaccaagaagtgaaattcctgggtcatagggcgtgagtccgacatttttctccattctgccctgttgccctccagagtgggtgtccagctttgcatacctaagtatgagagtatctgttgttcatatcctctacgacgctccatatatgaaacttaagtttctgctagttgccatctttgatctatcatgtatgcagtgacctactaagactgtaattggtacagtagattcttgtcatctgtgtgtgaatttagcattcatgggcttaatgctgacaaggcccccagggtccaagacatataatcatgtataattttgtcaaggtataattttttaaattgcttttgtcatgtgtctgctggtgatgcccaacccagtgctctgcacccaggtcacactgtggctttgtcctctgcttatgcctgcattgcagcaactgtcctgaagagaccaaaattatgcagatttaggtaagtccatggctaatgttattatattatgtgctattgtaatggatggggctgtggagtgtatgaatttataaatcactggtcttgtaattaaaattcaaacactatagaaaaaggccatgtagaagataaaagttcctctataatcccggacccctaagataactactaatgacaacttcatttatattccttcagacattttctggctgtggatgtactaaaatgtatcctattattctctgccctaaaatggaatcatacaaggtgtactgttatttttatggctctataacatgtcatattgtacgtgttggtatggtcattttaaccatttttctagtgatggctttgaggttatttgcagtttcctagccatctcaaagtgtgctgcggggatctcttttgcatccctctgggtgcagagctgaggcacccagaggcagtgtccagaggaggcagcatctgtaggtgtcttcacctgctctggctcttggcacatctggttggtgacactgttttgtgagatgggttgaaagcacgtgctgccaaaatagaataatgttggtcctctcctcatgtgccgtggaactggggtaaaactgcgtagtggctgcagctgcctgtccataccggaatcgagtataacacggtgcctggcttagcacaaaacagtagtgggtcctgcaggccccagagtctaattcctggtattctttcccctacacagattaaataaaccaaaaacaaactattctaggaaagcgtctgtgacatttgtaaaaagtggtatttaatgatcttttattcacttgtctgtttagtttgttgaaatcttaagtggcatcctggtctgggaaggagtgctgtctgcgcctgccctccgctgggcacagcgtggctgcttcaggggctaagcacacactttctgtcttctaaagggccgccacatgccaggagctcaggtgtgagcccggctctggctcttacctcatagggtcactcataggggcacagggagcagaacattgtacacagcgaggcaccacccggcttggcatctgcctcggtggacttactacctctagaaggaaatacctgagttcctctggcctcagctcctagagtgactggtgtgctgtccctgttactcttctgtcaaggtgacaactgtgtgacccatcatctgtgtgtcaaagcaaggccctgcctgggcctctgctcctgtgctgaccccaaaggcaaatgctttgctagtttccttccagttaatttcacctatgaatagatgtgtgaaaactgttcaaagccatacctgcacatgtttgaacttcaaaccctgtgggtgattcagtggcatctttctctaacccccagcctcccttcccacagaggccaccgtcatggccagttgctgcagtttctttccagagaacctgtgtatgtgtaaagctgtacaggcgtgggtacaccacacagcctgtcttgcactgtggactgttgagttactagtacatctaggtaagcaccgcatatctgtattcatgtctgccttggtcttttcaacatctgtgtggtagccgtgtttgaattacccattccctttttggggaaccattaagttgtttcagcaatttttactgtagataaggctataccgcatatctgtgtacatgggtttttatgtacatgggcaagtatatctgtgagagaaaagtttcctcaggaggaattctgggcacagcatgtgtaaatttctaaatatgatggacacccccagcttccacctcaaggaggttggtcccattgacatttccccacaccttcacccaggctgtgcccttaaacttggttatttgtcaatgtgagaagtggaaaatagtatttaattgtagtttggatttgtatttctattgggttgtatacttactgattaataataagagctctttacatattaaggaaattaacccttttcaaatacattcctatttctcactaatctttaagttttattgtaatattttgctctttagtttatatatatatgtatatatatatatatgtatatatatatatatacatatatatatacatatatatatactaattttcttttatggttcctggattttgtgagtagtttgaaaaggctaatccagctgaagattttgttgttgttgttaaaccccatgttttctcctaactctttttatttttattttggaggactctatctagacttaattttagcataacaagtgacagggttagttagcctgttgtccttacaccattttctggctaatacagctattaactattgatctgtctattcacgtgccagttcctaatggttttacatagtgtaatctgcacttcaaaatagcgaagggaagccctacctcattattctacttttccagaattctcctggctattccaggctgcatgtttaccttaaccttccctgtgatgtcttcatgccgttgtcttcttatgcaagaataaggtacgtctttccatccactcacgtctatttaatttgactttgcattacacagaaagctggtcttggtctgtctacctcggcatctagttgtcctcactgccccctagccgaccccaccccatctgactgactaccccatcacagagtacttttatttacgttttgctctgcctaatggttacttgatactgtcacgccgacagtgtccagttcagtggtctttgcagttgaaatgctcccgtacacactgtcttgttaaaaatgccagtaagttcatacaaacccagcttgcacccaaggtcacattcagagagcgtagggctgggatgggttgttttccaagcttctgccactgtgtggctagctcttcccactgggaagttctgtgtacccggaatgtcggagtggagtcctgttctagtgtccagcacctgaccctgtgcccaacccctcaacagcctattcctgctgtccacagcctgctggaactttttacaaaatatgttgccatgctggaccctgggcactggacataagccccctggcagcctttttcatgtcacccaaaggggtaattgtcctactggtggtctgtaagatgagttagggtgacttgctaatagacattgtaaatcttaatatttatgtatgtattttattattaccggttttccatttatgatggtaatattgtttcttctaagaatatttatttttccttctaaatattgagataaaattcatgcttttgaaatgttctattcagtggcttttagtatatttgctatgttgtgcaaccatcgacactatccatttctagaactttttcgtcatcccaaacagacgctctgtattcataaaaaaataacttcctacctgtctctccccctagtctttggtaacctttgttatactggtaaactttgttgtgctctctgtctgtgtgaatttgcctattctaggggcctcatataagtgtaatcatacagtatttgtctttttgggtctgtctgatttcacttagcgggttttcagggttcattcatgttgcagcatataacagtactgcgttcctttttctggctgaataatattccactgtatggatagaccccattttgtttattcacacatcatttggacatttggattatttctggtttttggctattatgaacaatggtgctatgaacagttgcgtacaagtttttgtgtgaacatatgttttcaattctctcattatatacctaggagtagaattactgggtcatatggtaactgtatatttttgaggaactgccaaactattttcccacgtccatgcaccatttcacattcccaccagtaagtaagagggttccaatttctgcgcattcttgccaacactagttattatctgactttctggttataatcattctaatgagtgtgaagtagcctctggtgtcatttggatttgcatttctctgatgagtgatgctatcaagcacctttgctggtgctgttggccatatgtgtatgttccctggagaagtgtctgtgctgagccttggcccactttttaattaggcgtttgtctttttattactgagttgtaagagttctttatatattctggattctagacccttatcagatacatggtttgcaaatattttctcccattctgtgggttgtgttttcactttatcgataatgtccttagacatataataaatttgtattttaaaagtgacttgatttggctgtgcaaggtggctcacgcttgtaatcccagcactttgggagactgaggtgggtggatcatatgaggaggctaggagttcgaggtcagcctggccagcatagcgaaaacttgtctctactaaaaatacaaaaattagtcaggcatggtggtgcacgtctgtaataccagcttctcaggaggctgaggcacgaggatcacttgaacccaggaggaggaggttgcagtgagctgagatcatgccagggcaacagaatgagactttgtttaaaaaaaaaaaaaagtgacttgatttaagggaaaaaatgactggctatattcagtcagatatggcaaaaagtctcaaggtgttaatgtgaatgattaaggtcttggggggggtgtcccctatcagactacaggtgtttagaggcacagaaaaaggtgcagttgggttcttaatgtgaaatgatgagaagcacaactccagtgtgtctctttgtgtagaatgtcagcagacaccccctgctagatgtgctggatcatgggaaagcatttccatttgttactagattgttcagaagttttaatttatgatgggtgtggtggctcatgcctgtagtcccagcactgtgggaggctgaggcaggaggatcatctgaggccaagagttcaagatcagcctgggcaacatagtgataccctatctcttaaaaaagaagaagtttttaaatttgaaataataataggtactggatttatgcaaatgtcttttctgcgtcttttgagatgagtatcaggtttttttttttccttttatcatctgatgatgaacttaatgtttccatttgtattaatggaatactaagtccctctgtgatttctgaaccaagctattcctaggcctgagttttattttgttgacacagaaataaattagaaggccaagcgtggtggcatgtgcctgtagtcctagttgctgaggtaagaggattgcttgagcccaggagttcaaggctgcagcaagctttgattgcgccactgcactccagccttggcgacagactaagacgctgtctcaaaaaaaaacaaaaacgacaaaaaaaaaacaaaacagaaaaaataaactaaggcaatgacagtccctggcaaatgctgggagggaggcagcagtggtcagggaaggtaaccctgaagcaggacttgtaaagcaaataagattgggaggccaaggtgggtggatcacgaggtcaggagttcgagaccagcctggccaacatagtgaaaccccgtctttactaaaaatacaaaaaaattagccaggtgtggtggtgggtgcctgtagtcccagctacttgggaggctgaggcaggagaatctcgaacccaggaggcggaggttacagtcagctgagaccgcaccattgcactccagcctgggtgacagagcaagattccgtctcaaaaaaaaaaaaaaaaaaaaaaccaagaagaaaaggaatgaattagaacttcttctgcttggacttaagggcatcatcaggcaggttttgggtaggatagcaggggaggcagagacatagtcggggtcagtggtcatgagtgtggctttgagcccaaaaacttggtttctgttccctactttgccactcagtagtgcatgactttggccaaatttcttaaattcatgaagcaagtttccgggtgaatgaaatggggataaaaatagtgttcaaacctatccgttggtttgtgtgaaactgaaatgaatagtatcgtgcaggtacttgtgagcaaggggagctgctgtttcctgtccctttatgatgggaaatatctagacaagttcccaaccctctgcactgcaggctgcatggcacggagggtcttgtaacaccagctggggctggccttcttttaggagcttcagtggttctgaaaacttttatttgtttgtttgttttagtagatgtggggtctttctgtgttgcccggactggtctcaaacttctggactcaagtgatcctcccccgctcaacctcccaaagtgttgggattacaggtgtgagccactgtgcccagccttgaaaactttttcaggttcttccagggttactgggctattaaatatttctatttcattataagtcagtttttcaaagttatattatcttaattaccttttttatatgtattagtgtagagtagcattttatattttgatatcctccttatgcatagtttttcactttttattcctagtttttcgtttttaataagactttcaagaaatttattttattggccttttgaaaaaagcagctttagataaagtaagcagttctgctttcattttataatttatttctacttttgtttcattaatcttttcctccggcatgccttggattttgttgtgttactctttttctagaggctcgcattgtgtgtctggttcacttatgatcacgcttgcctacttttaagaatggaagaggggaggtggagggtggctgcacagtcgagggtgtgaggcagtcttgctctagccccaccatgccctcagcccgctgtggccacgctggttcctcaattgctggggcgtgcagtgtctgtaagggaggctactgatgccatccgaggaagatgtaaggtttcgtgtgggcagcgagagcctagcaggcatgtggggtgcccagcaaagggtaacagtggacagttgttgcctcattccacagagttttgattttttttttttttttaatggtcactccatcaacatcccccatggccagagcctgagctggtccccagagacacaggcattcagctgacagcctcgccttcacgctgctgctgttctcatgggggacaggcctcaggtggcaatgcacaaatcattagttaagggcagttgtgacagttaccaaggagtgtagtcccccgccccccgcccagtgaaaacagccctaaccaggggtggggacctttgggctctgacccgaagggtaggagaagctggaaggacagcattcctgtctgcgaaggcaggagcaaagctgccaggctatgaaggaaatggctggagcctgaagtcatgcaagctggggctggcagggacagggccaacttccaggcctgggggccaccatgaggattcaggacgtgacccccagggcacatgaaggccttccatctgtatttaagaaaagactttatcagacgagtatggtggctcacgcctgaatcttagcactttgggaggctgaggcaggtggatcacgaggtcaggagttcaataccagcctggccaatatggtaaaaccccatctctactaaaactacaaaaattagccaggcatggtggcgcacgcctgtagtcccagctactcgggaggctgaggcagaagaatcacttgaacccgggaggtggaggttacagtgagccaagatcgcgccactacactccagcctgggtgacagagtgagactccgtctcaaaaaaaccaaaagactttatcttatttcctatatgtttgtggtttcagtcctgatgtataatttgaccctagttagaatggttatctgaggaagtggcctgtacgatttctgcttttttaaatgtgtggctccctttcttcattgattaacgtatgattatttttataaatgttccatggcagtgggaagggattctctgtcacattccacatctggatcagttcctccccattttgttggtcaaatccgatctgccatatcctgtgtaatgacaagtgagttgcattctcaccgtcactcctggggtctctccgcttcccctgagctggctcagcagtctgctccatgtgttttgatgcagggtgacccattggtattcccgacactaacgcccccgtctgtggactgcttgctgcttgggcttcactgtgtctggtgttgacagtgcagacctaaaggtgtgcacacatgtgcacacacactccgctgtcttcttgtttgcactggacttaaatatctatgagggttattttcaactgctgaatttggaatgatttttatatcttttctgctttctgcccatgtacatgtgtttattttacactgttgtgattggtagttactatgtggggacacaattacttgggctgaaataatccacctgttgtggttggggtcctctggggcattccagggtgagaggttgtcactgccacctgggccatgtgggccggcaccagcattttgtggttacgaattctacagtcacaaatatctttgggcaaatccccttctatacctcaaggcagcttttggtttgcaaccccactggccagagggaagggccagtcacttggctctctcactgccctgcgccccagatggttctagggctgctgttttcccttggccctgccaacaccactgtttttacttctgctcattggctgagtgcagtggttcctggaagccagtggcacgtttccccgcgtagctcgcttatcccacagcacacacccaagggttctgttgctaacacgctgaattaattctttgctcatcttacagagtgtgttttgactgcccccatttctgaggccttgtaaggccagagctttgttgcttcatcggcaggttgggacttagatggccgtgaatgtttcctctctgctgctgcagtaagtaagtgcccgcaccatagtgtgtttggaggctgaagttgaagcgaggctgtgaggggagatggacgtgtgaggagggatgatggggcttgagcaaagtgggggagggggcaaaggcagttggcccaacacattccccacccctttgagaggtctgaggcctgcagacctggctcggagcccacctggtagtcctcagactgtgtgtgtgtgtgtgtgtgtgtgtgtgtgtgtgtgtgtgtgtgtgtgtgtgtgtgtgtaaaagagagaagttgtggagaaatggggggctgattctgctcagattcatcaggatgagtagaaggcacccagctctcaccctggcctgacatgtgtgtccctgagcaggttacagtcctctctgagcctctgcttcccatctggaccctgctgggcagggcttctgagctccttagcactagcaggaggggctccaggggccctccctccatggcagccaggacaggactctcaaatgaggacagcagagctcgtggggggctcccacggacccgccgtgggcccaggggaggcagagcctgagccaacagcagtggtgctgtggaccgtggatcctgagggtggcctggggcaagtaccggctgagggtccaggtgggctttgtgtacctttgggtcctggggccctggtgacttggactccaggttagagtcaagtgacaggagaaaggctggtggggccctgtgcttccgacttcatttcgagtgatggcagttcccaggaaggaatccacagctgacggtggctgacagatcagagaatggaaggcgaggcaggcgggcgtctgcgtgacctcaggtgcttggggcccagcagacccagagaaccatttccactaggccagggtgccggaagtgtccacaggtcttagattccctgttcagatgaaaagatttgtgcctttaatgataaaagtgatctgcatagagtcaaaaattcaagccatgggtataaaatgcaagtaaaatccctgccctcacctatcccaccctactacacagagatgtcctctcgagtttcctagactcactctggaaatttctgtatacacacagaagcttgtgcctctgctcgtgaaggcagagggagggagagctgaagggccagcaccttctcacctgtgggccccctcagtgctcggtcccagagcatgcaggactgtgcctcgtgttcagtttgctggtctgacttcatgctccttgggcaggatatgcatgtgccatgctaggagacatgtggatgtgaagctgggggacaatgtcccctggctatgcctttacaagggaagtaaggaaggtaggaggtgagcctgggagggagggagggaggcgcggagccgccgcaggtgtttcttttactgagtgcagcccatggccgcactcaggttttgcttttcaccttcccatctgtgaaagagtgagcaggaaaaagcaaaa

SEQ ID NO: 13614 - DNA, 487 bp, Homo sapiens
  source 1..487: mol_type = unassigned DNA
agttagcgacagggagggatgcgcgcctgggtgtagttgtgggggaggaagtggctagctcagggcttcaggggacagacagggagagatgactgagttagatgagacgagggggcgggctgggggtgcgagaaggaagcttggcaaggagactaggtctagggggaccacagtggggcaggctgcatggaaaatatccgcagggtcccccaggcagaacagccacgctccaggccaggctgtccctactgcctggtggagggggaacttgacctctgggagggcgccgctcttgcatagctgagcgagcccgggtgcgctggtctgtgtggaaggaggaaggcagggagaggtagaaggggtggaggagtcaggaggaataggccgcagcagccctggaaatgatcaggaagaccaagggctgtgaacccgcctggggatgaggcctggtcttgtggaactgaacttagctcgacggggctgaccg

SEQ ID NO: 13615 - DNA, 572 bp, Homo sapiens
  source 1..572: mol_type = unassigned DNA
ttttttccagaccaagggctgtgaacccgcctggggatgaggcctggtcttgtggaactgaacttagctcgacggggctgaccgctctggcccagggtggtggcagtgctccttttggacttttctctagtgttcctcatggcgagcagatggaaccgggagacatggagtccctggccagtgtgagtcctagcattgcaggaggggagaccctggaggagagagcccgcctcaattgatgcctgcagattgaatttccagaggcttaggaggaggaagttctccaatgttctgtttccaggccttgctcaggaagccctgtattcaggaggctaccatttaaagtttgcagatgagcttatggggggcaatcttaaaaagtccacagcagatgcatccggctcgaggggccatcagctttgaataaatgcttgttccagagcccatgaatgccagcaggcacccctcctttcctggggtaaaggttttcagatgctgcatcttctaaattgagcctccggtcatactagttttgtgcttggaaccttgcttcaagaagatccctaagctgt

SEQ ID NO: 13616 - DNA, 483 bp, Homo sapiens
  source 1..483: mol_type = unassigned DNA
ctatattgtgggcttttaacgtatttaagggaccacttaagacgagattagatgggctcttctggatttgttcctcatttgtcacaggtgtcttgtgattgaaaatcatgagcgaagtgaaattgcattgaatttcaagggaatttagtatgtaaatcgtgcctttactacatgtgtgatctgaaaaccctgcttggttctgagctgcgtctattgaattggtaaagtaataccaatggctttttatcatttccttcttccctttaagtttcacttgaaattttaaaaatcatggttatttttatcgttgggatctttctgtcttctgggttccattttttaaatgtttaaaaatatgttgacatggtagttcagttcttaaccaatgacttggggatgatgcaaacaattactgtcgttgggatttagagtgtattagtcacgcatgtatggggaagtagtctcgggtatgctgttgtgaaa

SEQ ID NO: 13617 - DNA, 5289 bp, Homo sapiens
  source 1..5289: mol_type = unassigned DNA
aggctatctccagccgtggccgatggccgtgccgggggcagagcccgctcccctccgcgcgttgctacgtgcggggatgacatggatccagacgccgtcaactacgggaaggaggaggcgagagttggagcgcgtgggagcgcagaggccggaggagggagggggggacaccgagcgcggagagcgcggagagcgcggagggaggcgcgcgcgggagcgaacaccctcccggatccagagcccggcggcggcgaagcagcagctgcggccgcgcccttgccagagccggtgcgtccgcctagccccgctccgcctgaggccgtcagggctcccgaggatggaagattcccaggagacatcgccgtcctccaacaactcctcggaggagctcagctctgctctgcacctgtccaagggcatgtcgatcttcctcgacatactgaggagagcagacaaaaatgatgatggaaaattatcctttgaagaattcaaagcatattttgcagatggtgttctcagtggagaagaattacacgagcttttccataccattgatacacataatactaataatcttgacacagaagagctatgtgaatatttttctcagcacttgggcgagtatgagaatgtactagcagcacttgaagacctgaatctttccatcctgaaggcaatgggcaaaacaaagaaagactaccaagaagcctccaatttggaacaattcgtaactagatttttattgaaggaaaccctgaatcagctgcagtctctccagaattccctggaatgtgccatggaaactactgaggagcaaacccgtcaagaaaggcaagggccagccaagccagaagtcctgtcgattcaatggcctggaaaacgatcaagccgccgagtccagagacacaacagcttctccccaaacagccctcagtttaatgtcagcggtccaggcttattagaagaagacaaccagtggatgacccagataaatagactccagaaattaattgatagactggaaaagaaggatctcaaactcgaaccaccagaagaagaaattattgaagggaatactaaatctcacatcatgcttgtgcagcggcagatgtctgtgatagaagaggacctggaagaattccagctcgctctgaaacactacgtggagagtgcttcctcccaaagtggatgcttgcgtatttctatacagaagctttcaaatgaatctcgctacatgatctatgagttctgggagaatagtagtgtatggaatagccaccttcagacaaattatagcaagacattccaaagaagtaatgtggatttcttggaaactccagaactcacatctacaatgctagttcctgcttcgtggtggatcctgaacaactagatgttcctagacattttctttatggttccaagtgcaaaacaggtgttcttatctaaaacgtcaattagaaaattatctgcggttgttaatctactgtatatttttgtttggtatatttactaagtgcactctttcaaaacttattctataactttatcaattcatgtgaattttagctcaattttcaaagttcactaatattctcaatatttaatgctaaatgctttgctacattgtaactcacctaaaaccttttagtgacaaaatcctaatatgtggaaaaaagcatatgcataaaggaataatattgtgaaaatgaatctgttatgataaagaaaaaataaagtggaaacttttagagtattacttcatagggcagattttgtaaactgtcgtatactgtaaagggttaaatcagcgttttgtgatttttaagtaactgtgagtgaagtttattcttcaacaatgtctactccatccccaacccaactcacagccctatgactactatctttgcattagttaaaaagttagtatataggcatcaaacaaccttggctgtaacctatagaatctctatccacgtatcaggttatagactggtttttcaaaagtgaacaatcctgtgataagttggagtaccatttagtaatacagcaacattgtgtcatttattagcatcataattctttgttatgtaagttaaatatatcaagaaagaagagactgtttggaaaaatgtggttcaagttttatgctatatagttttggtatgcgatacagacagctaacttttcttatgaaaaatacatatttgcatgtaaacaatgatttcaaaatacttgaaaaataaaattttaacccaaatgaataactaagaaatataaaacaagcacaaaatcttagggaagtcataaaatagtagtgaaagtattagacagaagacatctgttttcgaatttcaacactagaatgactaaaactatctacctatagaactatctgtagatagtatactatctacactctgctcaacaagctcagaaattaaatatttttaataataaaaatctgttctggttataaaccttgctaatgaaaatacaatacatataaaaatgtatagccatgttattttctagtataaattcctttgaaactataagtctttgaggaaaattataaggtaaaattttcctgtttttccccctttgaaaaactcaggaaaaaaggaagattgaactaataaaattttatttcttaaatataaatttgacctaaaatattttctcaaactaattcatgaaacagcaacttttaccaatacctttgtatactctcagttctcattcagtataaataaaattttaaaatcctttcatagttctattagaaataagtagtaaattttgatatattgtacatacacacgtgtgtgtgtgtgtgtgtgtgtgtgtgtgtgtgtgtgtgtgtatttgtgtgcctctggtcaactctaaggatgacagacactgtgtaacaacacctgggtcaactcttttaatttatatacaaagcaaagaacaacattaatggagatgcacaatgattattcaaacaagctatatatatgtacaaaggcaaacagacacataacagtctctgcagactgattgtatatagtaagaaaagatcaaaagactttaaaacctaaatgacttttgacatacaaactcttcttgagaatgtttgttgtaaatggtttcaaaaatacaaattatagccaatcaaaacattgctttggttggtgcatttaagtatccaactcaaaaagcatatcaaatattttgggtactaggcagtttccaaagtagcatggtagtattacttgttaaaagggttctgttttcattaacagtactaagtggaagggatctgcagattccaaactggaataagctctatcatattctgaaacaagaattagaatgacttgagaacgggcaaataacaaagcaaaccaatataattatatggtcattctgaccccagctcttatacaaattatacatgtatttttgtgtatgtttgtgagagttgtatgtatgtgaatgtgtgtgagtgtgtattcacatacacatatatactggaacctatagtagaaaaggaaactagtagggccaaaaaaaaaaagaaaaagaaaaagaaaaaagaaaaaaaaagaaaaaactgggacctaagtataaatatctcatcctaaagtaaacaataagtttatagttaacgaagatttttttctatttaaaaccccattttcctaaagaacaaagtagtaaaataaaaaaaaatttaaaaaattaaaaaataaaaaaaagaggtcactaaaagaccaagatgggaaacgtaacatggaatacaagcttgaatctgggaaacaagctcaaaaaacagtgaaaaaaaaagtactggtttaggagttcaaaattcagtgaaacaaactttttgccaatagacctagggatctaagaaatagaattagggagagtttacacttacttacctatatatcagcagatttttctggaagaaaccctttttttttttttttttaaacagtaacatccagagtgacaaattgcaggagatttaatgtataaaatttctaggaattaaaagcttaaacccaaaaattgttcatccatatataagaaattatcgaattaaaacttaatgtatgtcaattattttcaaatgtctaaattcctttggaaataaaaatatcagttttactttgaaattgctcaacttctgctattcatatggtctgattagtgacataagtagcagccgtttttcaacttcagtttcattcactaccattgtttccaaattatcaatctctgctagtaattatgaatttaagaccatattattatcaaaaacctagagaccaatcatatatctgaaaagaaatacccattaaaaattctgcctcctgtttattgagaactatgcattgaacattctgaatcattctaagcctctggagagactgtaatgatccattcatgagctggtatgaaatcagtgggaagcagaacaacagaaggaactttaaaagcaacaagcaattatgtaccatatatacactgtagcaaatattttatatttgagagtctttacagcttacatttccattccattattacaagtgatgaaaaacaaaaaattgcaagtagtatgcaaattataaatatacagtcttcccacttcactaaccaaattcctactttccagtgttacttcccaatttatgcaggaaacctcctgcaaagctgaaactgattagaaaattctttatattttaaaatagctctttctcatttttagagaagtcaaatagccaaccatcaaaattaagaataaattgaattgtcacagtccattacagttattgttgctagatccacctcatttgcagatgtccaaacttaaattcatctgttcttaaaatgctacttaaaactttggttgttttcctgtaatataaaagaaaaagttaatttatcaattgattgaatacagtttttactaattagtttatcaaaccaaatactgtgaacgtaccaggtgtttacagatttaaatgcatgttaccatagaaactattaaagtaactagaactgtcaaataacaaaacggctcatgtttttaaaatatatgtaactcattttaaaatatattaaattgtattccaaacctgttcttctgtttctgtggcacctaggtttaaaatatgtattaatgtgtaaatcacaagtaaaatgaattctaatgtacaagtttgttttaaaaagtgtatgtcaagcttttatttacacaataaaatgttattaaagatggaaagtctacaaatg

SEQ ID NO: 13618 - DNA, 656 bp, Homo sapiens
  source 1..656: mol_type = unassigned DNA
agcgcggagggaggcgcgcgcgggagcgaacaccctcccggatccagagcccggcggcggcgaagcagcagctgcggccgcgcccttgccagagccggtgcgtccgcctagccccgctccgcctgaggccgtcagggctcccgaggatggaagattcccaggagacatcgccgtcctccaacaactcctcggaggagctcagctctgctctgcacctgtccaagggcatgtcgatcttcctcgacatactgaggagagcagacaaaaatgatgatggaaaattatcctttgaagaattcaaagcatattttgcagatggtgttctcagtggagaagaattacacgagcttttccataccattgatacacataatactaagtaagaaacttttttatcactggattccacaagtgaggcacagagagcgtgaatgcattcatgtccaggaagaagaaagggaagaacaatatagagggtatattttgccaagtttgcctatgcttaattctgagatacctctttagtaattaaaattgctctgaaaaattgactttgaatcagaaaataatgatcttttgtagaaagctcccctgaagtgtttttagattgttcccactttgcagaatgtaaaacaaagtataaattataaataaat

SEQ ID NO: 13619 - DNA, 662 bp, Homo sapiens
  source 1..662: mol_type = unassigned DNA
agctgcggccgcgcccttgccagagccggtgcgtccgcctagccccgctccgcctgaggccgtcagggctcccgaggatggaagattcccaggagacatcgccgtcctccaacaactcctcggaggagctcagctctgctctgcacctgtccaagggcatgtcgatcttcctcgacatactgaggagagcagacaaaaatgatgatggaaaattatcctttgaagaattcaaagcatattttgcagatggtgttctcagtggagaagaattacacgagcttttccataccattgatacacataatactaataatcttgacacagaagagctatgtggtaagtgtttctttaagatcagtcaaacctattacttgcttaagaaggaaaaagagtattgtctgatatatatcaaccttggaattaatgttgtatattaggagttcacaaaggaaaaattaatcgagatctcaagggatttatctttacccgtgaattttgctcaagtatgtatttcactccagaaagagttgggcctcattagttcgttcatagaagaagaattgttgttacaatcagtacattagtttcgcaagagcaaattctccacaagtttgaatatatttttaaattgatgtttaatacaacttcattattctctgcat

SEQ ID NO: 13620 - DNA, 490 bp, Homo sapiens
  source 1..490: mol_type = unassigned DNA
agctgcggccgcgcccttgccagagccggtgcgtccgcctagccccgctccgcctgaggccgtcagggctcccgaggatggaagattcccaggagacatcgccgtcctccaacaactcctcggaggagctcagctctgctctgcacctgtccaagggcatgtcgatcttcctcgacatactgaggagagcagacaaaaatgatgatggaaaattatcctttgaagaattcaaagcatattttgcagatggtgttctcagtggagaagaattacacgagcttttccataccattgatacacataatactaataatcttgacacagaagagctatgtgaatatttttctcagcacttgggcgagtatgagaatgtactagcagcacttgaagacctgaatctttccatcctgaaggcaatgggcaaaacaaagaaattttgaagactttcagcactggggcaagagaaagcgtagccaccagcaccccgcaa

SEQ ID NO: 13621 - DNA, 811 bp, Homo sapiens
  source 1..811: mol_type = unassigned DNA
atttgaacagggcctgttgtaagtagttaatgtgtttgacaaccctgtaatatttgatatacctttggaaatgcatgagttactaatttttttgaaatctagttgtttgtaatgattgtcacttatgtctaatatcacaaaatattcaagaaattggagctgtgcaatgaacaataggacttctctttaaaaattgcacatcatgcttgtgcagcggcagatgtctgtgatagaagaggacctggaagaattccagctcgctctgaaacactacgtggagagtgcttcctcccaaagtggatgcttgcgtatttctatacagaagctttcaaatgaatctcgctacatgatctatgagttctgggagaatagtagtgtatggaatagccaccttcagacaaattatagcaagacattccaaagaagtaatgtggatttcttggaaactccagaactcacatctacaatgctagttcctgcttcgtggtggatcctgaacaactagatgttcctagacattttctttatggttccaagtgcaaaacaggtgttcttatctaaaacgtcaattagaaaattatctgcggttgttaatctactgtatatttttgtttggtatatttactaagtgcactctttcaaaacttattctataactttatcaattcatgtgaattttagctcaattttcaaagttcactaatattctcaatatttaatgctaaatgctttgctacattgtaactcacctaaaaccttttagtgacaaaatcctaatatgtggaaaaaagcatatgcataaaggaataat

SEQ ID NO: 13622 - DNA, 2908 bp, Homo sapiens
  source 1..2908: mol_type = unassigned DNA
attgagaatcactgcttttaaagggaaacacgtcattgtaaagaacacgttgtttagcttctgggactagaggcaaggaaaatatcttgcctagattacagcctttatacagttttatacttggaatagtcatggccttccttggtcatatttttggatgacaatcatctgtttttgtgaggaggaatgggatgggcagtaggagtcagcttaaatcgggctccgtgacagccaacgcagtgaccctcgccccttccttggcagcacatcatgcttgtgcagcggcagatgtctgtgatagaagaggacctggaagaattccagctcgctctgaaacactacgtggagagtgcttcctcccaaagtggatgcttgcgtatttctatacagaagctttcaaatgaatctcgctacatgatctatgagttctgggagaatagtagtgtatggaatagccaccttcagacaaattatagcaagacattccaaagaagtaatgtggatttcttggaaactccagaactcacatctacaatgctagttcctgcttcgtggtggatcctgaacaactagatgttcctagacattttctttatggttccaagtgcaaaacaggtgttcttatctaaaacgtcaattagaaaattatctgcggttgttaatctactgtatatttttgtttggtatatttactaagtgcactctttcaaaacttattctataactttatcaattcatgtgaattttagctcaattttcaaagttcactaatattctcaatatttaatgctaaatgctttgctacattgtaactcacctaaaaccttttagtgacaaaatcctaatatgtggaaaaaagcatatgcataaaggaataatattgtgaaaatgaatctgttatgataaagaaaaaataaagtggaaacttttagagtattacttcatagggcagattttgtaaactgtcgtatactgtaaagggttaaatcagcgttttgtgatttttaagtaactgtgagtgaagtttattcttcaacaatgtctactccatccccaacccaactcacagccctatgactactatctttgcattagttaaaaagttagtatataggcatcaaacaaccttggctgtaacctatagaatctctatccacgtatcaggttatagactggtttttcaaaagtgaacaatcctgtgataagttggagtaccatttagtaatacagcaacattgtgtcatttattagcatcataattctttgttatgtaagttaaatatatcaagaaagaagagactgtttggaaaaatgtggttcaagttttatgctatatagttttggtatgcgatacagacagctaacttttcttatgaaaaatacatatttgcatgtaaacaatgatttcaaaatacttgaaaaataaaattttaacccaaatgaataactaagaaatataaaacaagcacaaaatcttagggaagtcataaaatagtagtgaaagtattagacagaagacatctgttttcgaatttcaacactagaatgactaaaactatctacctatagaactatctgtagatagtatactatctacactctgctcaacaagctcagaaattaaatatttttaataataaaaatctgttctggttataaaccttgctaatgaaaatacaatacatataaaaatgtatagccatgttattttctagtataaattcctttgaaactataagtctttgaggaaaattataaggtaaaattttcctgtttttccccctttgaaaaactcaggaaaaaaggaagattgaactaataaaattttatttcttaaatataaatttgacctaaaatattttctcaaactaattcatgaaacagcaacttttaccaatacctttgtatactctcagttctcattcagtataaataaaattttaaaatcctttcatagttctattagaaataagtagtaaattttgatatattgtacatacacacgtgtgtgtgtgtgtgtgtgtgtgtgtgtgtgtgtgtgtgtgtatttgtgtgcctctggtcaactctaaggatgacagacactgtgtaacaacacctgggtcaactcttttaatttatatacaaagcaaagaacaacattaatggagatgcacaatgattattcaaacaagctatatatatgtacaaaggcaaacagacacataacagtctctgcagactgattgtatatagtaagaaaagatcaaaagactttaaaacctaaatgacttttgacatacaaactcttcttgagaatgtttgttgtaaatggtttcaaaaatacaaattatagccaatcaaaacattgctttggttggtgcatttaagtatccaactcaaaaagcatatcaaatattttgggtactaggcagtttccaaagtagcatggtagtattacttgttaaaagggttctgttttcattaacagtactaagtggaagggatctgcagattccaaactggaataagctctatcatattctgaaacaagaattagaatgacttgagaacgggcaaataacaaagcaaaccaatataattatatggtcattctgaccccagctcttatacaaattatacatgtatttttgtgtatgtttgtgagagttgtatgtatgtgaatgtgtgtgagtgtgtattcacatacacatatatactggaacctatagtagaaaaggaaactagtagggccaaaaaaaaaaagaaaaagaaaaagaaaaaagaaaaaaaaagaaaaaactgggacctaagtataaatatctcatcctaaagtaaacaataagtttatagttaacgaagatttttttctatttaaaaccccattttcctaaagaacaaagtagtaaaataaaaaaaaatttaaaaa

SEQ ID NO: 13623 - DNA, 564 bp, Homo sapiens
  source 1..564: mol_type = unassigned DNA
atcatcaggggatctcccggagcgatgcaggacaaggtgccttagctggaccaattattgtggagccacatgtcacagcagtatggggaaagaatgtttcattaaagtgtttaattgaagtaaatgaaaccataacacagatttcatgggagaagatacatggcaaaagttcacagactgttgcagttcaccatccccaatatggattctctgttcaaggagaatatcagggaagagtcttgtttaaaaattactcacttaatgatgcaacaattactctgcataacataggattctctgattctggaaaatacatctgcaaagctgttacattcccgcttggaaatgcccagtcctctacaactgtaactgtgttagttgaacccactgtgagcctgataaaagggccagattctttaattgatggaggaaatgaaacagtagcagccatttgcatcgcagccactggaaaacccgttgcacatattgactgggaaggtgatcttggtgaaatggaatccactacaacttcttttccaaatgaaacggcaacgattatcagcc

SEQ ID NO: 13624 - DNA, 586 bp, Homo sapiens
  source 1..586: mol_type = unassigned DNA
ataagtgcatcttgagaataggtgatagaaagccttggctgcaggagacaagcttacaggggacgacagaggcagacaggcacagggagggagggaagaggaaagggctggagggaaaaaggcactagaccgagcgctgggagactggaagggaggcagaagttaagaaagaaaaaagaggtgggcagggtgtagaatggcttgtagccttggaggtgccttagctggaccaattattgtggagccacatgtcacagcagtatggggaaagaatgtttcattaaagtgtttaattgaagtaaatgaaaccataacacagatttcatgggagaagatacatggcaaaagttcacagactgttgcagttcaccatccccaatatggattctctgttcaaggagaatatcagggaagagtcttgtttaaaaattactcacttaatgatgcaacaattactctgcataacataggattctctgattctggaaaatacatctgcaaagctgttacattcccgcttggaaatgcccagtcctctacaactgtaactgtgttagttgaacccactgtgagcctgataaaaggg

SEQ ID NO: 13625 - DNA, 3664 bp, Homo sapiens
  source 1..3664: mol_type = unassigned DNA
agttcccaggagttcgacgcgggcgggtgccgaggggaggggagtggcggcggcggcgggcggctcccgcttcagcctcggcagtggcgtcggcgacggcggtgtcgaggcagccgccagcgttcggccaagtgtcagccggcagcgacggcgctagagctgggagctggggacgcgcgcgccggaccttccacagcctccgcccagagcctgaggcgccggggccgggggagccggggggcgggcgggcgagcgggccggggggagggtgggggatggcgcggaccctgcggccgtccccgctgtgtcctggaggcggcaaagcacaactttcctccgcttctctcctcggagccgggctcctgctgcagcccccgacgccacctccgctgctgctgctgctcttcccgctgctgctcttctccaggctctgtggtgccttagctggaccaattattgtggagccacatgtcacagcagtatggggaaagaatgtttcattaaagtgtttaattgaagtaaatgaaaccataacacagatttcatgggagaagatacatggcaaaagttcacagactgttgcagttcaccatccccaatatggattctctgttcaaggagaatatcagggaagagtcttgtttaaaaattactcacttaatgatgcaacaattactctgcataacataggattctctgattctggaaaatacatctgcaaagctgttacattcccgcttggaaatgcccagtcctctacaactgtaactgtgttagttgaacccactgtgagcctgataaaagggccagattctttaattgatggaggaaatgaaacagtagcagccatttgcatcgcagccactggaaaacccgttgcacatattgactgggaaggtgatcttggtgaaatggaatccactacaacttcttttccaaatgaaacggcaacgattatcagccagtacaagctatttccaaccagatttgctagaggaaggcgaattacttgtgttgtaaaacatccagccttggaaaaggacatccgatactctttcatattagacatacagtatgctcctgaagtttcggtaacaggatatgatggaaattggtttgtaggaagaaaaggtgttaatctcaaatgtaatgctgatgcaaatccaccacccttcaaatctgtgtggagcaggttggatggacaatggcctgatggtttattggcttcagacaatactcttcattttgtccatccattgactttcaattattctggtgtttatatctgtaaagtgaccaattcccttggtcaaagaagtgaccaaaaagtcatctacatttcagatcctcctactactaccacccttcagcctacaattcagtggcatccctcaactgctgacatcgaggatctagcaacagaacctaaaaaattgcccttcccattgtcaactttggcaacaattaaggatgacacaattgccacgatcattgctagtgtagtgggtggggctctcttcatagtacttgtaagtgttttggctggaatattctgctataggagaagacggacgtttcgtggagactactttgccaagaactacattccaccatcagatatgcaaaaagaatcacaaatagatgttcttcaacaagatgagcttgattcttacccagacagtgtaaaaaaagaaaacaaaaatccagtgaacaatctaatacgtaaagactatttagaagagcctgaaaaaactcagtggaacaatgtagaaaatctcaataggtttgaaagaccaatggattattatgaagatctaaaaatgggaatgaagtttgtcagtgatgaacattatgatgaaaacgaagatgacttagtttcacatgtagatggttccgtaatttccaggagggagtggtatgtttagcaaccactgaatgtgacttaactatgtacaatgttcattcacactagttgatcattttcagattgttcatactttttcttgaggaagaataagctttttcaagttgattttcaagcttactttttatattctaatctgacaaatgaaaatgtaaaatctgagttcagtgtatctaagctgctttacaattttttttcaatgctgtactactgtctcaagatttaaattttaatgcagagtactttattggtgtgaggcacacaggtaagaagaaatgtcaacattaaatgtatgacttacttggtacaaaaattttttaaaaagggaactaccttgacattgtgtattaaatgtttacctaagactataatctcaagtatgatgtttgtttaacatatacctctcaaaatttatcaccactcaatgacactgcatcaaaattgactataaaactaattcaagaaatatttatatatattttttaatatacaaaaaatatttagcctgatggaatggctttccttttcaaacattattttctaagtttctatacaaatgaaatctttacctctgcatattaatgagccttgccataattactgtagagtggcttttcaaagatattttgttgcactaaaactgtggtagtaaactcagtgaacatgatgtgtggaagagcataattagctggtcaatatttttgtccaaaatacctgcaagagtaataaaatacatacctttcaaacatgataattattagtttttttttttcctttctggaacatggattttggtacattagcagtagccttattttaatgctttatgtcctaaacatactaatagaaatgaaaagacgcagagagagcatttcggaatactgaagtactagttttagaaatgagactttcagccaacaatctatagaaagaattttatggaccatcttgttttagttatttaatgttgatgttgttcaaatgggtaaatgtacagaaagaaaattttagagtaaacttggaactttggatataactagaaaaaactagattatagaattagtcggtaacacttgctaatggacattggcattcatctcctttttcctcctaagtgtatgtatgtgttttaagatttctgtttttacgattaaaactggaaacatgaggttttttgtttttgtttttttacataattacatatattccttctgaatcatttatcttttgagaaagaaatgttacctaaacttcaaatgtgctttttgtttgtgaggtaattaaattgcttctacagtggaggcttacaaaattattgtgacaactattttgaagctgaaaggatagtttttctattgctaagtcatttgaaaaagtgaccattttgccagtgaaatgaagtggaagttagtaggagaatcataaattaaatatattattttgttaataaaaaggcaaagtagtaggtactttttaaaccctcccaaccagccctttctcaatattcatcaaatctaaaacatttagggggcaaaattctaacatgttcatggtatcttgcaaatagtgaaagctttattctgaaggattataaactagttttcttcattttaactagcactattttgtggaaattagaaacctcttttatttctcttcccaaaagtaatacttattataaggctgtagtatcaggttaaggatacagataaataaagttcacttatatcttcttacaaa

SEQ ID NO: 13626 - DNA, 1549 bp, Homo sapiens
  source 1..1549: mol_type = unassigned DNA
ggccaagtgtcagccggcagcgacggcgctagagctgggagctggggacgcgcgcgccggaccttccacagcctccgcccagagcctgaggcgccggggccgggggagccggggggcgggcgggcgagcgggccggggggagggtgggggatggcgcggaccctgcggccgtccccgctgtgtcctggaggcggcaaagcacaactttcctccgcttctctcctcggagccgggctcctgctgcagcccccgacgccacctccgctgctgctgctgctcttcccgctgctgctcttctccaggctctgtggtgccttagctggaccaattattgtggagccacatgtcacagcagtatggggaaagaatgtttcattaaagtgtttaattgaagtaaatgaaaccataacacagatttcatgggagaagatacatggcaaaagttcacagactgttgcagttcaccatccccaatatggattctctgttcaaggagaatatcagggaagagtcttgtttaaaaattactcacttaatgatgcaacaattactctgcataacataggattctctgattctggaaaatacatctgcaaagctgttacattcccgcttggaaatgcccagtcctctacaactgtaactgtgttagttgaacccactgtgagcctgataaaagggccagattctttaattgatggaggaaatgaaacagtagcagccatttgcatcgcagccactggaaaacccgttgcacatattgactgggaaggtgatcttggtgaaatggaatccactacaacttcttttccaaatgaaacggcaacgattatcagccagtacaagctatttccaaccagatttgctagaggaaggcgaattacttgtgttgtaaaacatccagccttggaaaaggacatccgatactctttcatattagacatacagtatgctcctgaagtttcggtaacaggatatgatggaaattggtttgtaggaagaaaaggtgttaatctcaaatgtaatgctgatgcaaatccaccacccttcaaatctgtgtggagcaggttggatggacaatggcctgatggtttattggcttcagacaatactcttcattttgtccatccattgactttcaattattctggtgtttatatctgtaaagtgaccaattcccttggtcaaagaagtgaccaaaaagtcatctacatttcagcctacaattcagtggcatccctcaactgctgacatcgaggatctagcaacagaacctaaaaaattgcccttcccattgtcaactttggcaacaattaaggatgacacaattgccacgatcattgctagtgtagtgggtggggctctcttcatagtacttgtaagtgttttggctggaatattctgctataggagaagacggacgtttcgtggagactactttgccaagaactacattccaccatcagatatgcaaaaagaatcacaaatagatgttcttcaacaagatgagcttgattcttacccagacagtgtaaaaaaagaaaacaaa

SEQ ID NO: 13627 - DNA, 732 bp, Homo sapiens
  source 1..732: mol_type = unassigned DNA
ggcgcggaccctgcggccgtccccgctgtgtcctggaggcggcaaagcacaactttcctccgcttctctcctcggagccgggctcctgctgcagcccccgacgccacctccgctgctgctgctgctcttcccgctgctgctcttctccaggctctgtggtgccttagctggaccaattattgtggagccacatgtcacagcagtatggggaaagaatgtttcattaaagtgtttaattgaagtaaatgaaaccataacacagatttcatgggagaagatacatggcaaaagttcacagactgttgcagttcaccatccccaatatggattctctgttcaaggagaatatcagggaagagtcttgtttaaaaattactcacttaatgatgcaacaattactctgcataacataggattctctgattctggaaaatacatctgcaaagctgttacattcccgcttggaaatgcccagtcctctacaactgtaactgtgttagatgctcctgaagtttcggtaacaggatatgatggaaattggtttgtaggaagaaaaggtgttaatctcaaatgtaatgctgatgcaaatccaccacccttcaaatctgtgtggagcaggttggatggacaatggcctgatggtttattggcttcagacaatactcttcattttgtccatccattgactttcaattattctggtgtttatatctgtaaagtgaccaattccct

SEQ ID NO: 13628 - DNA, 1876 bp, Homo sapiens
  source 1..1876: mol_type = unassigned DNA
aggctctgtggtaggtgaacctcggcggccggcgtgggctgagggagccgccactgagggtgcgggcgccgcggccggctctgccagccgttctctggagcagcgaggcggttggttgtgcgagcgagtgccgaggactttggctggaaacttttcgccgcgcccggggcgaggccctggaagggccaggccagcgaatgctgagccggcggcccgctgccctcccccgcggccgcgcgggtcgccgtgcggatggccgagggttggcgatggtgcttcgtgcgccgaactccgggtttgctccggggaccgttacttcctcgctcattctctgggaaccctcgtgccttagctggaccaattattgtggagccacatgtcacagcagtatggggaaagaatgtttcattaaagtgtttaattgaagtaaatgaaaccataacacagatttcatgggagaagatacatggcaaaagttcacagactgttgcagttcaccatccccaatatggattctctgttcaaggagaatatcagggaagagtcttgtttaaaaattactcacttaatgatgcaacaattactctgcataacataggattctctgattctggaaaatacatctgcaaagctgttacattcccgcttggaaatgcccagtcctctacaactgtaactgtgttagttgaacccactgtgagcctgataaaagggccagattctttaattgatggaggaaatgaaacagtagcagccatttgcatcgcagccactggaaaacccgttgcacatattgactgggaaggtgatcttggtgaaatggaatccactacaacttcttttccaaatgaaacggcaacgattatcagccagtacaagctatttccaaccagatttgctagaggaaggcgaattacttgtgttgtaaaacatccagccttggaaaaggacatccgatactctttcatattagacatacagtatgctcctgaagtttcggtaacaggatatgatggaaattggtttgtaggaagaaaaggtgttaatctcaaatgtaatgctgatgcaaatccaccacccttcaaatctgtgtggagcaggttggatggacaatggcctgatggtttattggcttcagacaatactcttcattttgtccatccattgactttcaattattctggtgtttatatctgtaaagtgaccaattcccttggtcaaagaagtgaccaaaaagtcatctacatttcagatgttccatttaagcagacctcttccatagctgtagctggagcggtaattggagctgttcttgcccttttcatcattgctatctttgtgactgtgctgctgactcctcgaaaaaaaagaccatcctatcttgacaaagtgattgaccttccacccacacataaaccacctcctctgtatgaagaacgatccccacctttgcctcagaaagacctatttcagcctgaacacttgcctttgcagactcagttcaaagaaagagaagttggcaatcttcagcactctaatggactaaatagcaggagttttgactatgaagatgagaatccagttggggaagatggcattcagcagatgtaccccctttacaatcaaatgtgctaccaagaccggagccctggcaaacatcatcaaaataacgaccctaagagagtctacatcgacccacgagaacattatgtgtgatttttctctttttccaatgggcgttctaacaaatgtttattcttagattggggagagaagctaaggccaatagttattttactgtctctcatataagaacagtcccactctaagggtattggaagtcttaatgaatgacgtaaagccaatagcaaatttc

SEQ ID NO: 13629 - DNA, 829 bp, Homo sapiens
  source 1..829: mol_type = unassigned DNA
attctctgggaaccctcgtaggttaaggtgccgggatgcacgtttgccgctttttttcccggtgaaacttgagctgtgagcccagaaaccctagggaccggagcccgatggaatgaagcctccgggtccacttctcatggccttccaccctggagaaggcaccattttagcccacccagccgcagaatcccctacagctagttttcttctgtcttgtgcccactcccccggctctgccctgacagcttctggagctctctagattgaccctcgtccctgccctccagcttgtgggacgtctctcacactgcccgtgcttattttaccaaaccgcaggaacaagatttacgtgttaaatacctgatttcatggactgtgtgccccggctgttctaaccaaaacagtcacgcgcctgtttcccatctcttgaccctcgtgttatgttactgttttcctgtcatatttgggagttagtctctgagttttcttcccaggtgccttagctggaccaattattgtggagccacatgtcacagcagtatggggaaagaatgtttcattaaagtgtttaattgaagtaaatgaaaccataacacagatttcatgggagaagatacatggcaaaagttcacagactgttgcagttcaccatccccaatatggattctctgttcaaggagaatatcagggaagagtcttgtttaaaaattactcacttaatgatgcaacaattactctgcataacataggattctctgattctggaaaatacatctgcaaagctgttacattcccgcttggaaatgcccagtcctctacaactgtaact

SEQ ID NO: 13630 - DNA, 554 bp, Homo sapiens
  source 1..554: mol_type = unassigned DNA
tgagaatttccactgacagtttaccaccacgtttccagcactgtaatgaaatctgatttacacagagtatagtatggtgccttagctggaccaattattgtggagccacatgtcacagcagtatggggaaagaatgtttcattaaagtgtttaattgaagtaaatgaaaccataacacagatttcatgggagaagatacatggcaaaagttcacagactgttgcagttcaccatccccaatatggattctctgttcaaggagaatatcagggaagagtcttgtttaaaaattactcacttaatgatgcaacaattactctgcataacataggattctctgattctggaaaatacatctgcaaagctgttacattcccgcttggaaatgcccagtcctctacaactgtaactgtgttagttgaacccactgtgagcctgataaaagggccagattctttaattgatggaggaaatgaaacagtagcagccatttgcatcgcagccactggaaaacccgttgcacatattgactgggaaggtgatcttggtgaaat

SEQ ID NO: 13631 - DNA, 530 bp, Homo sapiens
  source 1..530: mol_type = unassigned DNA
ttgtgacttatggaagcttagtggtatggaagcaaaattttcttcaatatggcatccaggagattgtttttcttgcaagactattgactgcccaccattcattctgctaaataagttgagtagggaagacctgttgcattgtgccttagctggaccaattattgtggagccacatgtcacagcagtatggggaaagaatgtttcattaaagtgtttaattgaagtaaatgaaaccataacacagatttcatgggagaagatacatggcaaaagttcacagactgttgcagttcaccatccccaatatggattctctgttcaaggagaatatcagggaagagtcttgtttaaaaattactcacttaatgatgcaacaattactctgcataacataggattctctgattctggaaaatacatctgcaaagctgttacattcccgcttggaaatgcccagtcctctacaactgtaactgtgttagttgaacccactgtgagcctgataaaagggccagattctttaattgatg

SEQ ID NO: 13632 - DNA, 549 bp, Homo sapiens
  source 1..549: mol_type = unassigned DNA
agagaatattatcatgggtatggtaatgatgaataacaagatagactgacctttgtaaggtcccatttggctctgagattctatgcctctttccattttcagcaaggcttcatcttaagatgaatgtttaaaagagcacagaaaagaagatctgatatgatatggaacttttaaaagcactttgactacttgataggcacttggggacataacacacgcataagacagagtcctggcttcaagatgcttgtaactttgggttcgacctaaaggaaacatgattgtagaacagtttggtgtttgtgaggtattttgatttgcccggaaatgggacacctaacccattagtatggcatccaggagattgtttttcttgcaagactattgactgcccaccattcattctgctaaataagttgagtagggaagacctgttgcatttacttttttttcctccataggtgccttagctggaccaattattgtggagccacatgtcacagcagtatggggaaagaatgtttcattaaagtgtttaattgaagtaaa

SEQ ID NO: 13633 - DNA, 314 bp, Homo sapiens
  source 1..314: mol_type = unassigned DNA
cctgaacacttgcctttgcagactcagttcaaagaaagagaagttggcaatcttcagcactctacttactataatcctgggacaaaaacacattaagaggaagatggatcaatagttctcaaaggaaaaagatggcagcaacctataagaagatctgagcttctaggaatgatgggctattttttctatttttcagagacttttatagcttataaatacttatcagaagaaattagttccacagaatgacagtgaagttgtgatcacatcccaccaaattgtaattttatatccccttccttcaccaaggttaa

SEQ ID NO: 13634 - DNA, 5707 bp, Homo sapiens
  source 1..5707: mol_type = unassigned DNA
caaatggtgattgtaaaccagaaatgtcagaaattaagcttaattctgattcagagtatattaagctcatgcataggacatctgcatgtttgccatcctcccaaaatgtagattgtcaaataaatatcaatggagaattggaaagaccacattcacagatgaacaaaaaccatggtattttacgaagaagtatttcattgggaggagcttatccaaatatttcctgtctatccagccttaagcacaattgttctaaagggggaccatctcagttactcataaagtttgcatctggaaatgaaggtaaagtggataatttatcaagagacagcaacagagattgcacaaatgaactgtctaattcttgcaagacagaaaatccaagattggagagaccatatacatttaaggattttgttcttcatccaagaagtcacaaatcaagagttaaaggttatctgagactaaaaatgacttatttacctaaaaccagtggctcagaagatgataatgcagaacaggctgaggaattagagcctggctgggttgttttggaccaaccagatgctgcttgccatttgcagcaacaacaagaaccttctcctctacctccagggtgggaagagaggcaggatatccttggaaggacctattatgtaaaccatgaatctagaagaacacagtggaaaagaccaacccctcaggacaacctaacagatgctgagaatggcaacattcaactgcaagcacaacgtgcatttaccaccaggcggcagatatccgaggaaacagaaagtgttgacaaccgagagtcttccgagaactgggaaattataagagaagatgaagccaccatgtatagcaaccaggccttcccatcacctccaccgtcaagtaacttggatgttccaactcatcttgcagaagaattgaatgccagactcaccatttttggaaattcagccgtgagccagccagcatcgagctcaaatcattccagcagaagaggcagcttacaagcctatacttttgaggaacaacctacacttcctgtgcttttgcctacttcatctggattaccaccaggttgggaagaaaaacaagatgaaagaggaagatcatattatgtagatcacaattccagaacgactacttggacaaagcccactgtacaggccacagtggagaccagtcagctgacctcaagccagagttctgcaggccctcaatcacaagcctccaccagtgattcaggccagcaggtgacccagccatctgaaattgagcaaggattccttcctaaaggctgggaagtccggcatgcaccaaatgggaggcctttctttattgaccacaacactaaaaccaccacctgggaagatccaagattgaaaattccagcccatctgagaggaaagacatcacttgatacttccaatgatctagggcctttacctccaggatgggaagagagaactcacacagatggaagaatcttctacataaatcacaatataaaaagaacacaatgggaagatcctcggttggagaatgtagcaataactggaccagcagtgccctactccagggattacaaaagaaagtatgagttcttccgaagaaagttgaagaagcagaatgacattccaaacaaatttgaaatgaaacttcgccgagcaactgttcttgaagactcttaccggagaattatgggtgtcaagagagcagacttcctgaaggctcgactgtggattgagtttgatggtgaaaagggattggattatggaggagttgccagagaatggttcttcctgatctcaaaggaaatgtttaacccttattatgggttgtttgaatattctgctacggacaattataccctacagataaatccaaactctggattgtgtaacgaagatcacctctcttacttcaagtttattggtcgggtagctggaatggcagtttatcatggcaaactgttggatggttttttcatccgcccattttacaagatgatgcttcacaaaccaataacccttcatgatatggaatctgtggatagtgaatattacaattccctaagatggattcttgaaaatgacccaacagaattggacctcaggtttatcatagatgaagaactttttggacagacacatcaacatgagctgaaaaatggtggatcagaaatagttgtcaccaataagaacaaaaaggaatatatttatcttgtaatacaatggcgatttgtaaaccgaatccagaagcaaatggctgcttttaaagagggattctttgaactaataccacaggatctcatcaaaatttttgatgaaaatgaactagagcttcttatgtgtggactgggagatgttgatgtgaatgactggagggaacatacaaagtataaaaatggctacagtgcaaatcatcaggttatacagtggttttggaaggctgttttaatgatggattcagaaaaaagaataagattacttcagtttgtcactggcacatctcgggtgcctatgaatggatttgctgaactatacggttcaaatggaccacagtcatttacagttgaacagtggggtactcctgaaaagctgccaagagctcatacctgttttaatcgcctggacttgccaccttatgaatcatttgaagaattatgggataaacttcagatggcaattgaaaacacccagggctttgatggagttgattagattacaaataacaatctgtagtgtttttactgccatagttttataaccaaaatcttgacttaaaattttccggggaactactaaaatgtggccactgagtcttcccagatcttgaagaaaatcatataaaaagcatttgaagaaatagtacgacaacttatttttaatcacttttaaataatgtgttgcatttacacagttgtttcatgctgtctttagagttaggtgcctgcctaaagccaggcaccaccacacctggctttagagttcacacaataggatataagtcctgtatgacttaaatagtgaattttgtccttaacatttacctcttgtatagtatctgccaggcagttttttcttaaactactgagatgataactgtgaaatatttgtgatacgtgtcatgtgtgaaaagtttgatgcattttgagatggaaaactgaaatttggaaaaagaaatactttactattgagtaaactacaatatatttagtgctactcgcagctatttattattttgtagacctgccttatgcaccttactgcctagatttttgggaaaaaactttggaaagtgtgttacctatatttctagccaactaactcacagaaaaactgtttacttcttcactttcgaagtatttggcttttgttaatatgcagttttactaaacagatggttcataagacatgtgaagcaaattcatatttgcaatgggtaaaaagtattaaagcctttctcttgcctgcatatcctattgaccattggtatagtcatcactttttcatattttagtgtagttagaagaattccttcttcaaacattaaagatccacaaagcagtatttctaaatatgccttgaagaactaaatgaagtgtatagcacttgcctttactagatattctttacacttgtacaattatgtagtaaatgtatgtttacagggtttatcatgtttacagattaagctaatttctgtagtcgcatttttatatttttagtatcactctagtaaaaaaaccaaataatttgtttaaaataaccaaagagttgttataatgcataatttgtattaaatttattactatttcttatgccttttaaaatactgtttactatgaagacaatgtttttaattacaaatccagaattctgtaggcaaaatgctacagttcatatcttcctttaaccaaactgaagtacataaagaccatgtacatgtattcatcaaacgtttattgaatgctgcgtgcctagcgctgtgctatgctctggggtaagagttgtcagcttcagagaagctgagtcctgatcctcaaggaacttgcaaatgtgtctatgaatttgtaaaacaatcaaaagtaggcgtaagcagaataaggcaaaagggaaagtgttctaggttccagcacacctgcaaagataaagtgtgccaagactgtatttatatttcatacttatattgtttcatccttatattggaatgattatatagaaaatgctcttaaaaagattaaacctatttctcagtatggtatcttggtgatttaggaataattgtaaatatatgttacgaatcttcttaaatatatatatatacacaccctgtgagaactgtaaaaagtacctctggttcttggtttaagtttgttggggtataacatgatgagtactcattagcacctgatagaaatctgaaatgtgacagtagcaaaaccactttctactttccaaacaccacagcatcagcatggtttaggggaagcaattcacagattaatgtaccctgcgttttgtcttcaccattgtcaaccagcagtcaaggatgagcaccaggtatagtcctggtttgatatctcaccagccatgtgaactgaagcagcttacttaacctctctggattcatatttcttcatctgtcaaatgagagtaatcatgcccaccctcattgtcatgccagattgtcagaagttccagacagatgagaaagcaaaaagtactttgtaaagtgttatacaatcagaaggtgctttgtgctgaccgtcagattgtgtcaagtcaggtgtgcaaattgaccacactcccaaagaatcatttaaaagtaaagtgacttctaagagacaaggaagtaggaacatttctgatattaaatatataaataatatggatacacatgtgtatatctgtatatggatcttaccatcataattcattttcttcatatcagcaaagtaatagtaatgtgggccaatgcattttggaaatgtcctcattatgtagaatggaatgtgaaaattatttttgttaaaacaggattttgccacaattatttaaatattatgtttgtgaactatctaagcatgagaaaatacaaagctttctttgtatctggctgatactcatttggatgattctgtgactcatagaacatgatgttaaatgagaccagactcaactgccaccagtccccagctgcagaccttcatccccttcatctcccactaggggctcgtggtctggaagaaacatctatcaagcaacacagccccttatcccagatagaaaagtgtctcaaatgcattctactgcgggacagtcagtaggatcattttcataaagcaaggacatcatatgtttctagaaattacaagcatataactttagcctacaatctcttattaaaaatttttaacaaaattgtattacaaatgcatttcatcagaactcaaatttaaatggtgtttgttttgggtttttatttataatgctgaagttattccatataagtatcaagttaaacacaattcattttgattataaactatttgactttttaaaatcttctgacacagtaaatatatatatcaagattgatgtatcaaaatttattgcacactttaaagtgtaaaatcattttttaaaatcttgaatccacaaataaagttctattctgattttaaaaaacaaaa

SEQ ID NO: 13635 - DNA, 6339 bp, Homo sapiens
  source 1..6339: mol_type = unassigned DNA
tatttacagtagtgctgtggtcgataatgaattgaatgctgtgaatgatggtcaccttgtaagcagtccagccatttgtagtggtagccttagtaacttttcaaccagtgataatgggtcttacagcagcaacggtagtgattttgggtcatgtgcaagtatcacaagtggaggttcatatactaacagtgtcatcagtgacagtagtagttatacttttccaccaagtgatgatacttttttgggtggaaacttaccttctgacagcacctccaatagaagtgtgccaaacaggaatactactccttgtgaaattttttcaagaagtacaagtacagatccttttgtccaggatgacttggaacatggattagagattatgaaattgccagtgagcaggaacacaaaaattccactaaaacgttactcctccttagtcatttttcctaggagtccttcaactacccgaccgacttctccaacaagtctgtgtactcttctgagcaaaggatcctatcaaacttcacaccagtttattatttctcctagtgaaattgcacataatgaggatggcactagtgctaaaggatttctttcaacagctgtcaatggacttcggttatctaaaacaatttgtacccccggagaagtaagagacatacggccgcttcacaggaagggctcgttacagaagaaaattgttctttcgaataatactcccagacagactgtctgtgaaaagtcatctgaaggatattcttgtgtttcagtgcatttcacccaacgaaaagcagctacattagactgtgaaacaacaaatggtgattgtaaaccagaaatgtcagaaattaagcttaattctgattcagagtatattaagctcatgcataggacatctgcatgtttgccatcctcccaaaatgtagattgtcaaataaatatcaatggagaattggaaagaccacattcacagatgaacaaaaaccatggtattttacgaagaagtatttcattgggaggagcttatccaaatatttcctgtctatccagccttaagcacaattgttctaaagggggaccatctcagttactcataaagtttgcatctggaaatgaaggtaaagtggataatttatcaagagacagcaacagagattgcacaaatgaactgtctaattcttgcaagtcacaaatcaagagttaaaggttatctgagactaaaaatgacttatttacctaaaaccagtggctcagaagatgataatgcagaacaggctgaggaattagagcctggctgggttgttttggaccaaccagatgctgcttgccatttgcagcaacaacaagaaccttctcctctacctccagggtgggaagagaggcaggatatccttggaaggacctattatgtaaaccatgaatctagaagaacacagtggaaaagaccaacccctcaggacaacctaacagatgctgagaatggcaacattcaactgcaagcacaacgtgcatttaccaccaggcggcagatatccgaggaaacagaaagtgttgacaaccgagagtcttccgagaactgggaaattataagagaagatgaagccaccatgtatagcaaccaggccttcccatcacctccaccgtcaagtaacttggatgttccaactcatcttgcagaagaattgaatgccagactcaccatttttggaaattcagccgtgagccagccagcatcgagctcaaatcattccagcagaagaggcagcttacaagcctatacttttgaggaacaacctacacttcctgtgcttttgcctacttcatctggattaccaccaggttgggaagaaaaacaagatgaaagaggaagatcatattatgtagatcacaattccagaacgactacttggacaaagcccactgtacaggccacagtggagaccagtcagctgacctcaagccagagttctgcaggccctcaatcacaagcctccaccagtgattcaggccagcaggtgacccagccatctgaaattgagcaaggattccttcctaaaggctgggaagtccggcatgcaccaaatgggaggcctttctttattgaccacaacactaaaaccaccacctgggaagatccaagattgaaaattccagcccatctgagaggaaagacatcacttgatacttccaatgatctagggcctttacctccaggatgggaagagagaactcacacagatggaagaatcttctacataaatcacaatataaaaagaacacaatgggaagatcctcggttggagaatgtagcaataactggaccagcagtgccctactccagggattacaaaagaaagtatgagttcttccgaagaaagttgaagaagcagaatgacattccaaacaaatttgaaatgaaacttcgccgagcaactgttcttgaagactcttaccggagaattatgggtgtcaagagagcagacttcctgaaggctcgactgtggattgagtttgatggtgaaaagggattggattatggaggagttgccagagaatggttcttcctgatctcaaaggaaatgtttaacccttattatgggttgtttgaatattctgctacggacaattataccctacagataaatccaaactctggattgtgtaacgaagatcacctctcttacttcaagtttattggtcgggtagctggaatggcagtttatcatggcaaactgttggatggttttttcatccgcccattttacaagatgatgcttcacaaaccaataacccttcatgatatggaatctgtggatagtgaatattacaattccctaagatggattcttgaaaatgacccaacagaattggacctcaggtttatcatagatgaagaactttttggacagacacatcaacatgagctgaaaaatggtggatcagaaatagttgtcaccaataagaacaaaaaggaatatatttacttcttatgtgtggactgggagatgttgatgtgaatgactggagggaacatacaaagtataaaaatggctacagtgcaaatcatcaggttatacagtggttttggaaggctgttttaatgatggattcagaaaaaagaataagattacttcagtttgtcactggcacatctcgggtgcctatgaatggatttgctgaactatacggttcaaatggaccacagtcatttacagttgaacagtggggtactcctgaaaagctgccaagagctcatacctgttttaatcgcctggacttgccaccttatgaatcatttgaagaattatgggataaacttcagatggcaattgaaaacacccagggctttgatggagttgattagattacaaataacaatctgtagtgtttttactgccatagttttataaccaaaatcttgacttaaaattttccggggaactactaaaatgtggccactgagtcttcccagatcttgaagaaaatcatataaaaagcatttgaagaaatagtacgacaacttatttttaatcacttttaaataatgtgttgcatttacacagttgtttcatgctgtctttagagttaggtgcctgcctaaagccaggcaccaccacacctggctttagagttcacacaataggatataagtcctgtatgacttaaatagtgaattttgtccttaacatttacctcttgtatagtatctgccaggcagttttttcttaaactactgagatgataactgtgaaatatttgtgatacgtgtcatgtgtgaaaagtttgatgcattttgagatggaaaactgaaatttggaaaaagaaatactttactattgagtaaactacaatatatttagtgctactcgcagctatttattattttgtagacctgccttatgcaccttactgcctagatttttgggaaaaaactttggaaagtgtgttacctatatttctagccaactaactcacagaaaaactgtttacttcttcactttcgaagtatttggcttttgttaatatgcagttttactaaacagatggttcataagacatgtgaagcaaattcatatttgcaatgggtaaaaagtattaaagcctttctcttgcctgcatatcctattgaccattggtatagtcatcactttttcatattttagtgtagttagaagaattccttcttcaaacattaaagatccacaaagcagtatttctaaatatgccttgaagaactaaatgaagtgtatagcacttgcctttactagatattctttacacttgtacaattatgtagtaaatgtatgtttacagggtttatcatgtttacagattaagctaatttctgtagtcgcatttttatatttttagtatcactctagtaaaaaaaccaaataatttgtttaaaataaccaaagagttgttataatgcataatttgtattaaatttattactatttcttatgccttttaaaatactgtttactatgaagacaatgtttttaattacaaatccagaattctgtaggcaaaatgctacagttcatatcttcctttaaccaaactgaagtacataaagaccatgtacatgtattcatcaaacgtttattgaatgctgcgtgcctagcgctgtgctatgctctggggtaagagttgtcagcttcagagaagctgagtcctgatcctcaaggaacttgcaaatgtgtctatgaatttgtaaaacaatcaaaagtaggcgtaagcagaataaggcaaaagggaaagtgttctaggttccagcacacctgcaaagataaagtgtgccaagactgtatttatatttcatacttatattgtttcatccttatattggaatgattatatagaaaatgctcttaaaaagattaaacctatttctcagtatggtatcttggtgatttaggaataattgtaaatatatgttacgaatcttcttaaatatatatatatacacaccctgtgagaactgtaaaaagtacctctggttcttggtttaagtttgttggggtataacatgatgagtactcattagcacctgatagaaatctgaaatgtgacagtagcaaaaccactttctactttccaaacaccacagcatcagcatggtttaggggaagcaattcacagattaatgtaccctgcgttttgtcttcaccattgtcaaccagcagtcaaggatgagcaccaggtatagtcctggtttgatatctcaccagccatgtgaactgaagcagcttacttaacctctctggattcatatttcttcatctgtcaaatgagagtaatcatgcccaccctcattgtcatgccagattgtcagaagttccagacagatgagaaagcaaaaagtactttgtaaagtgttatacaatcagaaggtgctttgtgctgaccgtcagattgtgtcaagtcaggtgtgcaaattgaccacactcccaaagaatcatttaaaagtaaagtgacttctaagagacaaggaagtaggaacatttctgatattaaatatataaataatatggatacacatgtgtatatctgtatatggatcttaccatcataattcattttcttcatatcagcaaagtaatagtaatgtgggccaatgcattttggaaatgtcctcattatgtagaatggaatgtgaaaattatttttgttaaaacaggattttgccacaattatttaaatattatgtttgtgaactatctaagcatgagaaaatacaaagctttctttgtatctggctgatactcatttggatgattctgtgactcatagaacatgatgttaaatgagaccagactcaactgccaccagtccccagctgcagaccttcatccccttcatctcccactaggggctcgtggtctggaagaaacatctatcaagcaacacagccccttatcccagatagaaaagtgtctcaaatgcattctactgcgggacagtcagtaggatcattttcataaagcaaggacatcatatgtttctagaaattacaagcatataactttagcctacaatctcttattaaaaatttttaacaaaattgtattacaaatgcatttcatcagaactcaaatttaaatggtgtttgttttgggtttttatttataatgctgaagttattccatataagtatcaagttaaacacaattcattttgattataaactatttgactttttaaaatcttctgacacagtaaatatatatatcaagattgatgtatcaaaatttattgcacactttaaagtgtaaaatcattttttaaaatcttgaatccacaaataaagttctattctgattttaaaaaacaaaa

SEQ ID NO: 13636 - DNA, 7019 bp, Homo sapiens
  source 1..7019: mol_type = unassigned DNA
gctgcagctgagctcagcttaaaggtcgctggaaatcaagtgctttgtaagtgaaggcattttgactacaagcgattcaagacattttggaaacgtcagtctctggaatgggtcgtctttttctttctatgatatctggtatctaatgttttacttaggataaagactactacttaatagctcttttaggcaccacaaatgattttttcttttgatgcagtgcagctgcttctagcctgtctacggacagagatctttgttatgactttcagcccttaacatgtttggaaatgagaacaaatggcacaaagcttacgattgcactttgcagccagaagaagcaatacttaccctttgtcagaaacctccggagatgacttggatagccatgttcacatgtgcttcaaaagaccaacacggatttcaacgtctaacgttgttcaaatgaagctgactcccagacagactgcactagctccgttaataaaggaaaacgttcagtctcaagaaagatcatctgttccctcatctgaaaatgttaataaaaagagcagctgtctacagatttcactacagccaacaaggtacagtggatatcttcagtctagcaatgtcttagctgatagtgatgatgcttcgtttacttgtatcttgaaggatggtatttacagtagtgctgtggtcgataatgaattgaatgctgtgaatgatggtcaccttgtaagcagtccagccatttgtagtggtagccttagtaacttttcaaccagtgataatgggtcttacagcagcaacggtagtgattttgggtcatgtgcaagtatcacaagtggaggttcatatactaacagtgtcatcagtgacagtagtagttatacttttccaccaagtgatgatacttttttgggtggaaacttaccttctgacagcacctccaatagaagtgtgccaaacaggaatactactccttgtgaaattttttcaagaagtacaagtacagatccttttgtccaggatgacttggaacatggattagagattatgaaattgccagtgagcaggaacacaaaaattccactaaaacgttactcctccttagtcatttttcctaggagtccttcaactacccgaccgacttctccaacaagtctgtgtactcttctgagcaaaggatcctatcaaacttcacaccagtttattatttctcctagtgaaattgcacataatgaggatggcactagtgctaaaggatttctttcaacagctgtcaatggacttcggttatctaaaacaatttgtacccccggagaagtaagagacatacggccgcttcacaggaagggctcgttacagaagaaaattgttctttcgaataatactcccagacagactgtctgtgaaaagtcatctgaaggatattcttgtgtttcagtgcatttcacccaacgaaaagcagctacattagactgtgaaacaacaaatggtgattgtaaaccagaaatgtcagaaattaagcttaattctgattcagagtatattaagctcatgcataggacatctgcatgtttgccatcctcccaaaatgtagattgtcaaataaatatcaatggagaattggaaagaccacattcacagatgaacaaaaaccatggtattttacgaagaagtatttcattgggaggagcttatccaaatatttcctgtctatccagccttaagcacaattgttctaaagggggaccatctcagttactcataaagtttgcatctggaaatgaaggtaaagtggataatttatcaagagacagcaacagagattgcacaaatgaactgtctaattcttgcaagcctggctgggttgttttggaccaaccagatgctgcttgccatttgcagcaacaacaagaaccttctcctctacctccagggtgggaagagaggcaggatatccttggaaggacctattatgtaaaccatgaatctagaagaacacagtggaaaagaccaacccctcaggacaacctaacagatgctgagaatggcaacattcaactgcaagcacaacgtgcatttaccaccaggcggcagatatccgaggaaacagaaagtgttgacaaccgagagtcttccgagaactgggaaattataagagaagatgaagccaccatgtatagcaaccaggccttcccatcacctccaccgtcaagtaacttggatgttccaactcatcttgcagaagaattgaatgccagactcaccatttttggaaattcagccgtgagccagccagcatcgagctcaaatcattccagcagaagaggcagcttacaagcctatacttttgaggaacaacctacacttcctgtgcttttgcctacttcatctggattaccaccaggttgggaagaaaaacaagatgaaagaggaagatcatattatgtagatcacaattccagaacgactacttggacaaagcccactgtacaggccacagtggagaccagtcagctgacctcaagccagagttctgcaggccctcaatcacaagcctccaccagtgattcaggccagcaggtgacccagccatctgaaattgagcaaggattccttcctaaaggctgggaagtccggcatgcaccaaatgggaggcctttctttattgaccacaacactaaaaccaccacctgggaagatccaagattgaaaattccagcccatctgagaggaaagacatcacttgatacttccaatgatctagggcctttacctccaggatgggaagagagaactcacacagatggaagaatcttctacataaatcacaatataaaaagaacacaatgggaagatcctcggttggagaatgtagcaataactggaccagcagtgccctactccagggattacaaaagaaagtatgagttcttccgaagaaagttgaagaagcagaatgacattccaaacaaatttgaaatgaaacttcgccgagcaactgttcttgaagactcttaccggagaattatgggtgtcaagagagcagacttcctgaaggctcgactgtggattgagtttgatggtgaaaagggattggattatggaggagttgccagagaatggttcttcctgatctcaaaggaaatgtttaacccttattatgggttgtttgaatattctgctacggacaattataccctacagataaatccaaactctggattgtgtaacgaagatcacctctcttacttcaagtttattggtcgggtagctggaatggcagtttatcatggcaaactgttggatggttttttcatccgcccattttacaagatgatgcttcacaaaccaataacccttcatgatatggaatctgtggatagtgaatattacaattccctaagatggattcttgaaaatgacccaacagaattggacctcaggtttatcatagatgaagaactttttggacagacacatcaacatgagctgaaaaatggtggatcagaaatagttgtcaccaataagaacaaaaaggaatatatttatcttgtaatacaatggcgatttgtaaaccgaatccagaagcaaatggctgcttttaaagagggattctttgaactaataccacaggatctcatcaaaatttttgatgaaaatgaactagagcttcttatgtgtggactgggagatgttgatgtgaatgactggagggaacatacaaagtataaaaatggctacagtgcaaatcatcaggttatacagtggttttggaaggctgttttaatgatggattcagaaaaaagaataagattacttcagtttgtcactggcacatctcgggtgcctatgaatggatttgctgaactatacggttcaaatggaccacagtcatttacagttgaacagtggggtactcctgaaaagctgccaagagctcatacctgttttaatcgcctggacttgccaccttatgaatcatttgaagaattatgggataaacttcagatggcaattgaaaacacccagggctttgatggagttgattagattacaaataacaatctgtagtgtttttactgccatagttttataaccaaaatcttgacttaaaattttccggggaactactaaaatgtggccactgagtcttcccagatcttgaagaaaatcatataaaaagcatttgaagaaatagtacgacaacttatttttaatcacttttaaataatgtgttgcatttacacagttgtttcatgctgtctttagagttaggtgcctgcctaaagccaggcaccaccacacctggctttagagttcacacaataggatataagtcctgtatgacttaaatagtgaattttgtccttaacatttacctcttgtatagtatctgccaggcagttttttcttaaactactgagatgataactgtgaaatatttgtgatacgtgtcatgtgtgaaaagtttgatgcattttgagatggaaaactgaaatttggaaaaagaaatactttactattgagtaaactacaatatatttagtgctactcgcagctatttattattttgtagacctgccttatgcaccttactgcctagatttttgggaaaaaactttggaaagtgtgttacctatatttctagccaactaactcacagaaaaactgtttacttcttcactttcgaagtatttggcttttgttaatatgcagttttactaaacagatggttcataagacatgtgaagcaaattcatatttgcaatgggtaaaaagtattaaagcctttctcttgcctgcatatcctattgaccattggtatagtcatcactttttcatattttagtgtagttagaagaattccttcttcaaacattaaagatccacaaagcagtatttctaaatatgccttgaagaactaaatgaagtgtatagcacttgcctttactagatattctttacacttgtacaattatgtagtaaatgtatgtttacagggtttatcatgtttacagattaagctaatttctgtagtcgcatttttatatttttagtatcactctagtaaaaaaaccaaataatttgtttaaaataaccaaagagttgttataatgcataatttgtattaaatttattactatttcttatgccttttaaaatactgtttactatgaagacaatgtttttaattacaaatccagaattctgtaggcaaaatgctacagttcatatcttcctttaaccaaactgaagtacataaagaccatgtacatgtattcatcaaacgtttattgaatgctgcgtgcctagcgctgtgctatgctctggggtaagagttgtcagcttcagagaagctgagtcctgatcctcaaggaacttgcaaatgtgtctatgaatttgtaaaacaatcaaaagtaggcgtaagcagaataaggcaaaagggaaagtgttctaggttccagcacacctgcaaagataaagtgtgccaagactgtatttatatttcatacttatattgtttcatccttatattggaatgattatatagaaaatgctcttaaaaagattaaacctatttctcagtatggtatcttggtgatttaggaataattgtaaatatatgttacgaatcttcttaaatatatatatatacacaccctgtgagaactgtaaaaagtacctctggttcttggtttaagtttgttggggtataacatgatgagtactcattagcacctgatagaaatctgaaatgtgacagtagcaaaaccactttctactttccaaacaccacagcatcagcatggtttaggggaagcaattcacagattaatgtaccctgcgttttgtcttcaccattgtcaaccagcagtcaaggatgagcaccaggtatagtcctggtttgatatctcaccagccatgtgaactgaagcagcttacttaacctctctggattcatatttcttcatctgtcaaatgagagtaatcatgcccaccctcattgtcatgccagattgtcagaagttccagacagatgagaaagcaaaaagtactttgtaaagtgttatacaatcagaaggtgctttgtgctgaccgtcagattgtgtcaagtcaggtgtgcaaattgaccacactcccaaagaatcatttaaaagtaaagtgacttctaagagacaaggaagtaggaacatttctgatattaaatatataaataatatggatacacatgtgtatatctgtatatggatcttaccatcataattcattttcttcatatcagcaaagtaatagtaatgtgggccaatgcattttggaaatgtcctcattatgtagaatggaatgtgaaaattatttttgttaaaacaggattttgccacaattatttaaatattatgtttgtgaactatctaagcatgagaaaatacaaagctttctttgtatctggctgatactcatttggatgattctgtgactcatagaacatgatgttaaatgagaccagactcaactgccaccagtccccagctgcagaccttcatccccttcatctcccactaggggctcgtggtctggaagaaacatctatcaagcaacacagccccttatcccagatagaaaagtgtctcaaatgcattctactgcgggacagtcagtaggatcattttcataaagcaaggacatcatatgtttctagaaattacaagcatataactttagcctacaatctcttattaaaaatttttaacaaaattgtattacaaatgcatttcatcagaactcaaatttaaatggtgtttgttttgggtttttatttataatgctgaagttattccatataagtatcaagttaaacacaattcattttgattataaactatttgactttttaaaatcttctgacacagtaaatatatatatcaagattgatgtatcaaaatttattgcacactttaaagtgtaaaatcattttttaaaatcttgaatccacaaataaagttctattctgattttaaaaaacaaaa

SEQ ID NO: 13637 - DNA, 7235 bp, Homo sapiens
  source 1..7235: mol_type = unassigned DNA
gctgcagctgagctcagcttaaaggtcgctggaaatcaagtgctttgtaagtgaaggcattttgactacaagcgattcaagacattttggaaacgtcagtctctggaatgggtcgtctttttctttctatgatatctggtatctaatgttttacttaggataaagactactacttaatagctcttttaggcaccacaaatgattttttcttttgatgcagtgcagctgcttctagcctgtctacggacagagatctttgttatgactttcagcccttaacatgtttggaaatgagaacaaatggcacaaagcttacgattgcactttgcagccagaagaagcaatacttaccctttgtcagaaacctccggagatgacttggatagccatgttcacatgtgcttcaaaagaccaacacggatttcaacgtctaacgttgttcaaatgaagctgactcccagacagactgcactagctccgttaataaaggaaaacgttcagtctcaagaaagatcatctgttccctcatctgaaaatgttaataaaaagagcagctgtctacagatttcactacagccaacaaggtacagtggatatcttcagtctagcaatgtcttagctgatagtgatgatgcttcgtttacttgtatcttgaaggatggtatttacagtagtgctgtggtcgataatgaattgaatgctgtgaatgatggtcaccttgtaagcagtccagccatttgtagtggtagccttagtaacttttcaaccagtgataatgggtcttacagcagcaacggtagtgattttgggtcatgtgcaagtatcacaagtggaggttcatatactaacagtgtcatcagtgacagtagtagttatacttttccaccaagtgatgatacttttttgggtggaaacttaccttctgacagcacctccaatagaagtgtgccaaacaggaatactactccttgtgaaattttttcaagaagtacaagtacagatccttttgtccaggatgacttggaacatggattagagattatgaaattgccagtgagcaggaacacaaaaattccactaaaacgttactcctccttagtcatttttcctaggagtccttcaactacccgaccgacttctccaacaagtctgtgtactcttctgagcaaaggatcctatcaaacttcacaccagtttattatttctcctagtgaaattgcacataatgaggatggcactagtgctaaaggatttctttcaacagctgtcaatggacttcggttatctaaaacaatttgtacccccggagaagtaagagacatacggccgcttcacaggaagggctcgttacagaagaaaattgttctttcgaataatactcccagacagactgtctgtgaaaagtcatctgaaggatattcttgtgtttcagtgcatttcacccaacgaaaagcagctacattagactgtgaaacaacaaatggtgattgtaaaccagaaatgtcagaaattaagcttaattctgattcagagtatattaagctcatgcataggacatctgcatgtttgccatcctcccaaaatgtagattgtcaaataaatatcaatggagaattggaaagaccacattcacagatgaacaaaaaccatggtattttacgaagaagtatttcattgggaggagcttatccaaatatttcctgtctatccagccttaagcacaattgttctaaagggggaccatctcagttactcataaagtttgcatctggaaatgaaggtaaagtggataatttatcaagagacagcaacagagattgcacaaatgaactgtctaattcttgcaagacaagagatgatttcctaggtcaagtggatgttccactttatccattaccgacagaaaatccaagattggagagaccatatacatttaaggattttgttcttcatccaagaagtcacaaatcaagagttaaaggttatctgagactaaaaatgacttatttacctaaaaccagtggctcagaagatgataatgcagaacaggctgaggaattagagcctggctgggttgttttggaccaaccagatgctgcttgccatttgcagcaacaacaagaaccttctcctctacctccagggtgggaagagaggcaggatatccttggaaggacctattatgtaaaccatgaatctagaagaacacagtggaaaagaccaacccctcaggacaacctaacagatgctgagaatggcaacattcaactgcaagcacaacgtgcatttaccaccaggcggcagatatccgaggaaacagaaagtgttgacaaccgagagtcttccgagaactgggaaattataagagaagatgaagccaccatgtatagcaaccaggccttcccatcacctccaccgtcaagtaacttggatgttccaactcatcttgcagaagaattgaatgccagactcaccatttttggaaattcagccgtgagccagccagcatcgagctcaaatcattccagcagaagaggcagcttacaagcctatacttttgaggaacaacctacacttcctgtgcttttgcctacttcatctggattaccaccaggttgggaagaaaaacaagatgaaagaggaagatcatattatgtagatcacaattccagaacgactacttggacaaagcccactgtacaggccacagtggagaccagtcagctgacctcaagccagagttctgcaggccctcaatcacaagcctccaccagtgattcaggccagcaggtgacccagccatctgaaattgagcaaggattccttcctaaaggctgggaagtccggcatgcaccaaatgggaggcctttctttattgaccacaacactaaaaccaccacctgggaagatccaagattgaaaattccagcccatctgagaggaaagacatcacttgatacttccaatgatctagggcctttacctccaggatgggaagagagaactcacacagatggaagaatcttctacataaatcacaatataaaaagaacacaatgggaagatcctcggttggagaatgtagcaataactggaccagcagtgccctactccagggattacaaaagaaagtatgagttcttccgaagaaagttgaagaagcagaatgacattccaaacaaatttgaaatgaaacttcgccgagcaactgttcttgaagactcttaccggagaattatgggtgtcaagagagcagacttcctgaaggctcgactgtggattgagtttgatggtgaaaagggattggattatggaggagttgccagagaatggttcttcctgatctcaaaggaaatgtttaacccttattatgggttgtttgaatattctgctacggacaattataccctacagataaatccaaactctggattgtgtaacgaagatcacctctcttacttcaagtttattggtcgggtagctggaatggcagtttatcatggcaaactgttggatggttttttcatccgcccattttacaagatgatgcttcacaaaccaataacccttcatgatatggaatctgtggatagtgaatattacaattccctaagatggattcttgaaaatgacccaacagaattggacctcaggtttatcatagatgaagaactttttggacagacacatcaacatgagctgaaaaatggtggatcagaaatagttgtcaccaataagaacaaaaaggaatatatttatcttgtaatacaatggcgatttgtaaaccgaatccagaagcaaatggctgcttttaaagagggattctttgaactaataccacaggatctcatcaaaatttttgatgaaaatgaactagagcttcttatgtgtggactgggagatgttgatgtgaatgactggagggaacatacaaagtataaaaatggctacagtgcaaatcatcaggttatacagtggttttggaaggctgttttaatgatggattcagaaaaaagaataagattacttcagtttgtcactggcacatctcgggtgcctatgaatggatttgctgaactatacggttcaaatggaccacagtcatttacagttgaacagtggggtactcctgaaaagctgccaagagctcatacctgttttaatcgcctggacttgccaccttatgaatcatttgaagaattatgggataaacttcagatggcaattgaaaacacccagggctttgatggagttgattagattacaaataacaatctgtagtgtttttactgccatagttttataaccaaaatcttgacttaaaattttccggggaactactaaaatgtggccactgagtcttcccagatcttgaagaaaatcatataaaaagcatttgaagaaatagtacgacaacttatttttaatcacttttaaataatgtgttgcatttacacagttgtttcatgctgtctttagagttaggtgcctgcctaaagccaggcaccaccacacctggctttagagttcacacaataggatataagtcctgtatgacttaaatagtgaattttgtccttaacatttacctcttgtatagtatctgccaggcagttttttcttaaactactgagatgataactgtgaaatatttgtgatacgtgtcatgtgtgaaaagtttgatgcattttgagatggaaaactgaaatttggaaaaagaaatactttactattgagtaaactacaatatatttagtgctactcgcagctatttattattttgtagacctgccttatgcaccttactgcctagatttttgggaaaaaactttggaaagtgtgttacctatatttctagccaactaactcacagaaaaactgtttacttcttcactttcgaagtatttggcttttgttaatatgcagttttactaaacagatggttcataagacatgtgaagcaaattcatatttgcaatgggtaaaaagtattaaagcctttctcttgcctgcatatcctattgaccattggtatagtcatcactttttcatattttagtgtagttagaagaattccttcttcaaacattaaagatccacaaagcagtatttctaaatatgccttgaagaactaaatgaagtgtatagcacttgcctttactagatattctttacacttgtacaattatgtagtaaatgtatgtttacagggtttatcatgtttacagattaagctaatttctgtagtcgcatttttatatttttagtatcactctagtaaaaaaaccaaataatttgtttaaaataaccaaagagttgttataatgcataatttgtattaaatttattactatttcttatgccttttaaaatactgtttactatgaagacaatgtttttaattacaaatccagaattctgtaggcaaaatgctacagttcatatcttcctttaaccaaactgaagtacataaagaccatgtacatgtattcatcaaacgtttattgaatgctgcgtgcctagcgctgtgctatgctctggggtaagagttgtcagcttcagagaagctgagtcctgatcctcaaggaacttgcaaatgtgtctatgaatttgtaaaacaatcaaaagtaggcgtaagcagaataaggcaaaagggaaagtgttctaggttccagcacacctgcaaagataaagtgtgccaagactgtatttatatttcatacttatattgtttcatccttatattggaatgattatatagaaaatgctcttaaaaagattaaacctatttctcagtatggtatcttggtgatttaggaataattgtaaatatatgttacgaatcttcttaaatatatatatatacacaccctgtgagaactgtaaaaagtacctctggttcttggtttaagtttgttggggtataacatgatgagtactcattagcacctgatagaaatctgaaatgtgacagtagcaaaaccactttctactttccaaacaccacagcatcagcatggtttaggggaagcaattcacagattaatgtaccctgcgttttgtcttcaccattgtcaaccagcagtcaaggatgagcaccaggtatagtcctggtttgatatctcaccagccatgtgaactgaagcagcttacttaacctctctggattcatatttcttcatctgtcaaatgagagtaatcatgcccaccctcattgtcatgccagattgtcagaagttccagacagatgagaaagcaaaaagtactttgtaaagtgttatacaatcagaaggtgctttgtgctgaccgtcagattgtgtcaagtcaggtgtgcaaattgaccacactcccaaagaatcatttaaaagtaaagtgacttctaagagacaaggaagtaggaacatttctgatattaaatatataaataatatggatacacatgtgtatatctgtatatggatcttaccatcataattcattttcttcatatcagcaaagtaatagtaatgtgggccaatgcattttggaaatgtcctcattatgtagaatggaatgtgaaaattatttttgttaaaacaggattttgccacaattatttaaatattatgtttgtgaactatctaagcatgagaaaatacaaagctttctttgtatctggctgatactcatttggatgattctgtgactcatagaacatgatgttaaatgagaccagactcaactgccaccagtccccagctgcagaccttcatccccttcatctcccactaggggctcgtggtctggaagaaacatctatcaagcaacacagccccttatcccagatagaaaagtgtctcaaatgcattctactgcgggacagtcagtaggatcattttcataaagcaaggacatcatatgtttctagaaattacaagcatataactttagcctacaatctcttattaaaaatttttaacaaaattgtattacaaatgcatttcatcagaactcaaatttaaatggtgtttgttttgggtttttatttataatgctgaagttattccatataagtatcaagttaaacacaattcattttgattataaactatttgactttttaaaatcttctgacacagtaaatatatatatcaagattgatgtatcaaaatttattgcacactttaaagtgtaaaatcattttttaaaatcttgaatccacaaataaagttctattctgattttaaaaaacaaaa

SEQ ID NO: 13638 - DNA, 5869 bp, Homo sapiens
  source 1..5869: mol_type = unassigned DNA
ggccttttcccgccgcgctgccgggtgccgctagtgcccgctcgccgcgggaggcgctgctgtcgctgagggagcgcctcctcctcttcctccaactcttccccgcctcctcccgcttctcctcctcctcctccacagttgcctgccctgggcgggggcgagcgcgtccggtttgctggaagcgttcggaaatggcaacttgcgcggtggaggtgttcgggctcctggaggacgaggaaaattcacgaattgtgagagtaagagttatagccggaataggccttgccaagaaggatatattgggagctagtgatccttacgtgagagtgacgttatatgacccaatgaatggagttcttacaagtgtgcaaacaaaaaccattaaaaagagtttgaatccaaagtggaatgaagaaatattattcagagttcatcctcagcagcaccggcttctttttgaagtgtttgacgaaaaccgattgacaagagatgatttcctaggtcaagtggatgttccactttatccattaccgacagaaaatccaagattggagagaccatatacatttaaggattttgttcttcatccaagaagtcacaaatcaagagttaaaggttatctgagactaaaaatgacttatttacctaaaaccagtggctcagaagatgataatgcagaacaggctgaggaattagagcctggctgggttgttttggaccaaccagatgctgcttgccatttgcagcaacaacaagaaccttctcctctacctccagggtgggaagagaggcaggatatccttggaaggacctattatgtaaaccatgaatctagaagaacacagtggaaaagaccaacccctcaggacaacctaacagatgctgagaatggcaacattcaactgcaagcacaacgtgcatttaccaccaggcggcagatatccgaggaaacagaaagtgttgacaaccgagagtcttccgagaactgggaaattataagagaagatgaagccaccatgtatagcaaccaggccttcccatcacctccaccgtcaagtaacttggatgttccaactcatcttgcagaagaattgaatgccagactcaccatttttggaaattcagccgtgagccagccagcatcgagctcaaatcattccagcagaagaggcagcttacaagcctatacttttgaggaacaacctacacttcctgtgcttttgcctacttcatctggattaccaccaggttgggaagaaaaacaagatgaaagaggaagatcatattatgtagatcacaattccagaacgactacttggacaaagcccactgtacaggccacagtggagaccagtcagctgacctcaagccagagttctgcaggccctcaatcacaagcctccaccagtgattcaggccagcaggtgacccagccatctgaaattgagcaaggattccttcctaaaggctgggaagtccggcatgcaccaaatgggaggcctttctttattgaccacaacactaaaaccaccacctgggaagatccaagattgaaaattccagcccatctgagaggaaagacatcacttgatacttccaatgatctagggcctttacctccaggatgggaagagagaactcacacagatggaagaatcttctacataaatcacaatataaaaagaacacaatgggaagatcctcggttggagaatgtagcaataactggaccagcagtgccctactccagggattacaaaagaaagtatgagttcttccgaagaaagttgaagaagcagaatgacattccaaacaaatttgaaatgaaacttcgccgagcaactgttcttgaagactcttaccggagaattatgggtgtcaagagagcagacttcctgaaggctcgactgtggattgagtttgatggtgaaaagggattggattatggaggagttgccagagaatggttcttcctgatctcaaaggaaatgtttaacccttattatgggttgtttgaatattctgctacggacaattataccctacagataaatccaaactctggattgtgtaacgaagatcacctctcttacttcaagtttattggtcgggtagctggaatggcagtttatcatggcaaactgttggatggttttttcatccgcccattttacaagatgatgcttcacaaaccaataacccttcatgatatggaatctgtggatagtgaatattacaattccctaagatggattcttgaaaatgacccaacagaattggacctcaggtttatcatagatgaagaactttttggacagacacatcaacatgagctgaaaaatggtggatcagaaatagttgtcaccaataagaacaaaaaggaatatatttatcttgtaatacaatggcgatttgtaaaccgaatccagaagcaaatggctgcttttaaagagggattctttgaactaataccacaggatctcatcaaaatttttgatgaaaatgaactagagcttcttatgtgtggactgggagatgttgatgtgaatgactggagggaacatacaaagtataaaaatggctacagtgcaaatcatcaggttatacagtggttttggaaggctgttttaatgatggattcagaaaaaagaataagattacttcagtttgtcactggcacatctcgggtgcctatgaatggatttgctgaactatacggttcaaatggaccacagtcatttacagttgaacagtggggtactcctgaaaagctgccaagagctcatacctgttttaatcgcctggacttgccaccttatgaatcatttgaagaattatgggataaacttcagatggcaattgaaaacacccagggctttgatggagttgattagattacaaataacaatctgtagtgtttttactgccatagttttataaccaaaatcttgacttaaaattttccggggaactactaaaatgtggccactgagtcttcccagatcttgaagaaaatcatataaaaagcatttgaagaaatagtacgacaacttatttttaatcacttttaaataatgtgttgcatttacacagttgtttcatgctgtctttagagttaggtgcctgcctaaagccaggcaccaccacacctggctttagagttcacacaataggatataagtcctgtatgacttaaatagtgaattttgtccttaacatttacctcttgtatagtatctgccaggcagttttttcttaaactactgagatgataactgtgaaatatttgtgatacgtgtcatgtgtgaaaagtttgatgcattttgagatggaaaactgaaatttggaaaaagaaatactttactattgagtaaactacaatatatttagtgctactcgcagctatttattattttgtagacctgccttatgcaccttactgcctagatttttgggaaaaaactttggaaagtgtgttacctatatttctagccaactaactcacagaaaaactgtttacttcttcactttcgaagtatttggcttttgttaatatgcagttttactaaacagatggttcataagacatgtgaagcaaattcatatttgcaatgggtaaaaagtattaaagcctttctcttgcctgcatatcctattgaccattggtatagtcatcactttttcatattttagtgtagttagaagaattccttcttcaaacattaaagatccacaaagcagtatttctaaatatgccttgaagaactaaatgaagtgtatagcacttgcctttactagatattctttacacttgtacaattatgtagtaaatgtatgtttacagggtttatcatgtttacagattaagctaatttctgtagtcgcatttttatatttttagtatcactctagtaaaaaaaccaaataatttgtttaaaataaccaaagagttgttataatgcataatttgtattaaatttattactatttcttatgccttttaaaatactgtttactatgaagacaatgtttttaattacaaatccagaattctgtaggcaaaatgctacagttcatatcttcctttaaccaaactgaagtacataaagaccatgtacatgtattcatcaaacgtttattgaatgctgcgtgcctagcgctgtgctatgctctggggtaagagttgtcagcttcagagaagctgagtcctgatcctcaaggaacttgcaaatgtgtctatgaatttgtaaaacaatcaaaagtaggcgtaagcagaataaggcaaaagggaaagtgttctaggttccagcacacctgcaaagataaagtgtgccaagactgtatttatatttcatacttatattgtttcatccttatattggaatgattatatagaaaatgctcttaaaaagattaaacctatttctcagtatggtatcttggtgatttaggaataattgtaaatatatgttacgaatcttcttaaatatatatatatacacaccctgtgagaactgtaaaaagtacctctggttcttggtttaagtttgttggggtataacatgatgagtactcattagcacctgatagaaatctgaaatgtgacagtagcaaaaccactttctactttccaaacaccacagcatcagcatggtttaggggaagcaattcacagattaatgtaccctgcgttttgtcttcaccattgtcaaccagcagtcaaggatgagcaccaggtatagtcctggtttgatatctcaccagccatgtgaactgaagcagcttacttaacctctctggattcatatttcttcatctgtcaaatgagagtaatcatgcccaccctcattgtcatgccagattgtcagaagttccagacagatgagaaagcaaaaagtactttgtaaagtgttatacaatcagaaggtgctttgtgctgaccgtcagattgtgtcaagtcaggtgtgcaaattgaccacactcccaaagaatcatttaaaagtaaagtgacttctaagagacaaggaagtaggaacatttctgatattaaatatataaataatatggatacacatgtgtatatctgtatatggatcttaccatcataattcattttcttcatatcagcaaagtaatagtaatgtgggccaatgcattttggaaatgtcctcattatgtagaatggaatgtgaaaattatttttgttaaaacaggattttgccacaattatttaaatattatgtttgtgaactatctaagcatgagaaaatacaaagctttctttgtatctggctgatactcatttggatgattctgtgactcatagaacatgatgttaaatgagaccagactcaactgccaccagtccccagctgcagaccttcatccccttcatctcccactaggggctcgtggtctggaagaaacatctatcaagcaacacagccccttatcccagatagaaaagtgtctcaaatgcattctactgcgggacagtcagtaggatcattttcataaagcaaggacatcatatgtttctagaaattacaagcatataactttagcctacaatctcttattaaaaatttttaacaaaattgtattacaaatgcatttcatcagaactcaaatttaaatggtgtttgttttgggtttttatttataatgctgaagttattccatataagtatcaagttaaacacaattcattttgattataaactatttgactttttaaaatcttctgacacagtaaatatatatatcaagattgatgtatcaaaatttattgcacactttaaagtgtaaaatcattttttaaaatcttgaatccacaaataaagttctattctgattttaaaaaacaaaa

SEQ ID NO: 13639 - DNA, 6751 bp, Homo sapiens
  source 1..6751: mol_type = unassigned DNA
ggtcgctggaaatcaagtgctttgtaagtgaaggcattttgactacaagcgattcaagacattttggaaacgtcagtctctggaatgggtcgtctttttctttctatgatatctggtatctaatgttttacttaggataaagactactacttaatagctcttttaggcaccacaaatgattttttcttttgatgcagtgcagctgcttctagcctgtctacggacagagatctttgttatgactttcagcccttaacatgtttggaaatgagaacaaatggcacaaagcttacgattgcactttgcagccagaagaagcaatacttaccctttgtcagaaacctccggagatgacttggatagccatgttcacatgtgcttcaaaagaccaacacggatttcaacgtctaacgttgttcaaatgaagctgactcccagacagactgcactagctccgttaataaaggaaaacgttcagtctcaagaaagatcatctgttccctcatctgaaaatgttaataaaaagagcagctgtctacagatttcactacagccaacaaggtacagtggatatcttcagtctagcaatgtcttagctgatagtgatgatgcttcgtttacttgtatcttgaaggatggtatttacagtagtgctgtggtcgataatgaattgaatgctgtgaatgatggtcaccttgtaagcagtccagccatttgtagtggtagccttagtaacttttcaaccagtgataatgggtcttacagcagcaacggtagtgattttgggtcatgtgcaagtatcacaagtggaggttcatatactaacagtgtcatcagtgacagtagtagttatacttttccaccaagtgatgatacttttttgggtggaaacttaccttctgacagcacctccaatagaagtgtgccaaacaggaatactactccttgtgaaattttttcaagaagtacaagtacagatccttttgtccaggatgacttggaacatggattagagattatgaaattgccagtgagcaggaacacaaaaattccactaaaacgttactcctccttagtcatttttcctaggagtccttcaactacccgaccgacttctccaacaagtctgtgtactcttctgagcaaaggatcctatcaaacttcacaccagtttattatttctcctagtgaaattgcacataatgaggatggcactagtgctaaaggatttctttcaacagctgtcaatggacttcggttatctaaaacaatttgtacccccggagaagtaagagacatacggccgcttcacaggaagggctcgttacagaagaaaattgttctttcgaataatactcccagacagactgtctgtgaaaagtcatctgaaggatattcttgtgtttcagtgcatttcacccaacgaaaagcagctacattagactgtgaaacaacaaatggtgattgtaaaccagaaatgtcagaaattaagcttaattctgattcagagtatattaagctcatgcataggacatctgcatgtttgccatcctcccaaaatgtagattgtcaaataaatatcaatggagaattggaaagaccacattcacagatgaacaaaaaccatggtattttacgaagaagtatttcattgggaggagcttatccaaatatttcctgtctatccagccttaagcacaattgttctaaagggggaccatctcagttactcataaagtttgcatctggaaatgaaggtaaagtggataatttatcaagagacagcaacagagattgcacaaatgaactgtctaattcttgcaagacaagagatgatttcctaggtcaagtggatgttccactttatccattaccgacagaaaatccaagattggagagaccatatacatttaaggattttgttcttcatccaagaagtcacaaatcaagagttaaaggttatctgagactaaaaatgacttatttacctaaaaccagtggctcagaagatgataatgcagaacaggctgaggaattagagcaacaacaagaaccttctcctctacctccagggtgggaagagaggcaggatatccttggaaggacctattatgtaaaccatgaatctagaagaacacagtggaaaagaccaacccctcaggacaacctaacagatgctgagaatggcaacattcaactgcaagcacaacgtgcatttaccaccaggcggcagatatccgaggaaacagaaagtgttgacaaccgagagtcttccgagaactgggaaattataagagaagatgaagccaccatgtatagcaaccaggccttcccatcacctccaccgtcaagtaacttggatgttccaactcatcttgcagaagaattgaatgccagactcaccatttttggaaattcagccgtgagccagccagcatcgagctcaaatcattccagcagaagaggcagcttacaagcctatacttttgaggaacaacctacacttcctgtgcttttgcctacttcatctggattaccaccaggttgggaagaaaaacaagatgaaagaggaagatcatattatgtagatcacaattccagaacgactacttggacaaagcccactgtacaggccacagtggagaccagtcagctgacctcaagccagagttctgcaggccctcaatcacaagcctccaccagtgattcaggccagcaggtgacccagccatctgaaattgagcaaggattccttcctaaaggctgggaagtccggcatgcaccaaatgggaggcctttctttattgaccacaacactaaaaccaccacctgggaagatccaagattgaaaattccagcccatctgagaggaaagacatcacttgatacttccaatgatctagggcctttacctccaggatgggaagagagaactcacacagatggaagaatcttctacataaatcacaatataaaaagaacacaatgggaagatcctcggttggagaatgtagcaataactggaccagcagtgccctactccagggattacaaaagaaagtatgagttcttccgaagaaagttgaagaagcagaatgacattccaaacaaatttgaaatgaaacttcgccgagcaactgttcttgaagactcttaccggagaattatgggtgtcaagagagcagacttcctgaaggctcgactgtggattgagtttgatggtgaaaagggattggattatggaggagttgccagagaatggttcttcctgatctcaaaggaaatgtttaacccttattatgggttgtttgaatattctgctacggacaattataccctacagataaatccaaactctggattgtgtaacgaagatcacctctcttacttcaagtttattggtcgggtagctggaatggcagtttatcatggcaaactgttggatggttttttcatccgcccattttacaagatgatgcttcacaaaccaataacccttcatgatatggaatctgtggatagtgaatattacaattccctaagatggattcttgaaaatgacccaacagaattggacctcaggtttatcatagatgaagaactttttggacagacacatcaacatgagctgaaaaatggtggatcagaaatagttgtcaccaataagaacaaaaaggaatatatttatcttgtaatacaatggcgatttgtaaaccgaatccagaagcaaatggctgcttttaaagagggattctttgaactaataccacaggatctcatcaaaatttttgatgaaaatgaactagagcttcttatgtgtggactgggagatgttgatgtgaatgactggagggaacatacaaagtataaaaatggctacagtgcaaatcatcaggttatacagtggttttggaaggctgttttaatgatggattcagaaaaaagaataagattacttcagtttgtcactggcacatctcgggtgcctatgaatggatttgctgaactatacggttcaaatggaccacagtcatttacagttgaacagtggggtactcctgaaaagctgccaagagctcatacctgttttaatcgcctggacttgccaccttatgaatcatttgaagaattatgggataaacttcagatggcaattgaaaacacccagggctttgatggagttgattagattacaaataacaatctgtagtgtttttactgccatagttttataaccaaaatcttgacttaaaattttccggggaactactaaaatgtggccactgagtcttcccagatcttgaagaaaatcatataaaaagcatttgaagaaatagtacgacaacttatttttaatcacttttaaataatgtgttgcatttacacagttgtttcatgctgtctttagagttaggtgcctgcctaaagccaggcaccaccacacctggctttagagttcacacaataggatataagtcctgtatgacttaaatagtgaattttgtccttaacatttacctcttgtatagtatctgccaggcagttttttcttaaactactgagatgataactgtgaaatatttgtgatacgtgtcatgtgtgaaaagtttgatgcattttgagatggaaaactgaaatttggaaaaagaaatactttactattgagtaaactacaatatatttagtgctactcgcagctatttattattttgtagacctgccttatgcaccttactgcctagatttttgggaaaaaactttggaaagtgtgttacctatatttctagccaactaactcacagaaaaactgtttacttcttcactttcgaagtatttggcttttgttaatatgcagttttactaaacagatggttcataagacatgtgaagcaaattcatatttgcaatgggtaaaaagtattaaagcctttctcttgcctgcatatcctattgaccattggtatagtcatcactttttcatattttagtgtagttagaagaattccttcttcaaacattaaagatccacaaagcagtatttctaaatatgccttgaagaactaaatgaagtgtatagcacttgcctttactagatattctttacacttgtacaattatgtagtaaatgtatgtttacagggtttatcatgtttacagattaagctaatttctgtagtcgcatttttatatttttagtatcactctagtaaaaaaaccaaataatttgtttaaaataaccaaagagttgttataatgcataatttgtattaaatttattactatttcttatgccttttaaaatactgtttactatgaagacaatgtttttaattacaaatccagaattctgtaggcaaaatgctacagttcatatcttcctttaaccaaactgaagtacataaagaccatgtacatgtattcatcaaacgtttattgaatgctgcgtgcctagcgctgtgctatgctctggggtaagagttgtcagcttcagagaagctgagtcctgatcctcaaggaacttgcaaatgtgtctatgaatttgtaaaacaatcaaaagtaggcgtaagcagaataaggcaaaagggaaagtgttctaggttccagcacacctgcaaagataaagtgtgccaagactgtatttatatttcatacttatattgtttcatccttatattggaatgattatatagaaaatgctcttaaaaagattaaacctatttctcagtatggtatcttggtgatttaggaataattgtaaatatatgttacgaatcttcttaaatatatatatatacacaccctgtgagaactgtaaaaagtacctctggttcttggtttaagtttgttggggtataacatgatgagtactcattagcacctgatagaaatctgaaatgtgacagtagcaaaaccactttctactttccaaacaccacagcatcagcatggtttaggggaagcaattcacagattaatgtaccctgcgttttgtcttcaccattgtcaaccagcagtcaaggatgagcaccaggtatagtcctggtttgatatctcaccagccatgtgaactgaagcagcttacttaacctctctggattcatatttcttcatctgtcaaatgagagtaatcatgcccaccctcattgtcatgccagattgtcagaagttccagacagatgagaaagcaaaaagtactttgtaaagtgttatacaatcagaaggtgctttgtgctgaccgtcagattgtgtcaagtcaggtgtgcaaattgaccacactcccaaagaatcatttaaaagtaaagtgacttctaagagacaaggaagtaggaacatttctgatattaaatatataaataatatggatacacatgtgtatatctgtatatggatcttaccatcataattcattttcttcatatcagcaaagtaatagtaatgtgggccaatgcattttggaaatgtcctcattatgtagaatggaatgtgaaaattatttttgttaaaacaggattttgccacaattatttaaatattatgtttgtgaactatctaagcatgagaaaatacaaagctttctttgtatctggctgatactcatttggatgattctgtgactcatagaacatgatgttaaatgagaccagactcaactgccaccagtccccagctgcagaccttcatccccttcatctcccactaggggctcgtggtctggaagaaacatctatcaagcaacacagccccttatccc

SEQ ID NO: 13640 - DNA, 652 bp, Homo sapiens
  source 1..652: mol_type = unassigned DNA
cttgcgcggtggaggtgttcgggctcctggaggacgaggaaaattcacgaattgtgagagtaagagttatagccggaataggccttgccaagaaggatatattgggagctagagtttgaatccaaagtggaatgaagaaatattattcagagttcatcctcagcagcaccggcttctttttgaagtgtttgacgaaaaccgattgacaagagatgatttcctaggtcaagtggatgttccactttatccattaccgacagaaaatccaagattggagagaccatatacatttaaggattttgttcttcatccaagaagtcacaaatcaagagttaaaggttatctgagactaaaaatgacttatttacctaaaaccagtggctcagaagatgataatgcagaacaggctgaggaattagagcctggctgggttgttttggaccaaccagatgctgcttgccatttgcagcaacaacaagaaccttctcctctacctccagggtgggaagagaggcaggatatccttggaaggacctattatgtaaaccatgaatctagaagaacacagtggaaaagaccaacccctcaggacaacctaacagatgctgagaatggcaacattcaactgcaagcacaacgtgcatttaccacc

SEQ ID NO: 13641 - DNA, 577 bp, Homo sapiens
  source 1..577: mol_type = unassigned DNA
gagaacagatgacgcaaggctccaaagttcagagaactgaacaagggggatgagactcaaaacaagaggactcctgactcactaggttagggtgatccttacgtgagagtgacgttatatgacccaatgaatggagttcttacaagtgtgcaaacaaaaaccattaaaaagagtttgaatccaaagtggaatgaagaaatattattcagagttcatcctcagcagcaccggcttctttttgaagtgtttgacgaaaaccgattgacaagagatgatttcctaggtcaagtggatgttccactttatccattaccgacagaaaatccaagattggagagaccatatacatttaaggattttgttcttcatccaagaagtcacaaatcaagagttaaaggttatctgagactaaaaatgacttatttacctaaaaccagtggctcagaagatgataatgcagaacaggctgaggaattagagcctggctgggttgttttggaccaaccagatgctgcttgccatttgcagcaacaacaagaaccttctcctctacctccagggtgggaagagaggcagg

SEQ ID NO: 13642 - DNA, 457 bp, Homo sapiens
  source 1..457: mol_type = unassigned DNA
gtggaatgaagaaatattattcagagttcatcctcagcagcaccggcttctttttgaagtgtttgacgaaaaccgattgccatggttagtgacaaatcaggagtgaaggtgattcctttatataagttctgcaactgagtgaattccagacaagagatgatttcctaggtcaagtggatgttccactttatccattaccgacagaaaatccaagattggagagaccatatacatttaaggattttgttcttcatccaagaagtcacaaatcaagagttaaaggttatctgagactaaaaatgacttatttacctaaaaccagtggctcagaagatgataatgcagaacaggctgaggaattagagcctggctgggttgttttggaccaaccagatgctgcttgccatttgcagcaacaacaagaaccttctcctctacctccagggtgggaagagag

SEQ ID NO: 13643 - DNA, 591 bp, Homo sapiens
  source 1..591: mol_type = unassigned DNA
gaaaattcacgaattgtgagagtaagagttatagccggaataggccttgccaagaaggatatattgggagctagtgatccttacgtgagagtgacgttatatgacccaatgaatggagttcttacaagtgtgcaaacaaaaaccattaaaaagagtttgaatccaaagtggaatgaagaaatattattcagaaaaataattctggaaggacctaagaaactgtttactgtatttgctctgggggtgggacaaaggttcatcctcagcagcaccggcttctttttgaagtgtttgacgaaaaccgattggtaagttatattgtgcttatatgaaatatgaagtaagggtacatttcagtggagcagccaggggaagtgggtaagcagtctgggatttgagtgatggcttgggggtggttatggagactctgggcaaaatggtgagggagatagaatttgttttcttcctcctggtcctactcgctccctttccattctcctcccaagcacctcttctgattgccaacatattataaggtcttactcaagacctcttgtgacaggagaggacagaaaaccaacctctttgtcc

SEQ ID NO: 13644 - DNA, 965 bp, Homo sapiens
  source 1..965: mol_type = unassigned DNA
gccctgggcgggggcgagcgcgtccggtttgctggaagcgttcggaaatggcaacttgcgcggtggaggtgttcgggctcctggaggacgaggtaggccctgctaattgcagatttctcatctcaccgccttccagcagagccagttgatcttaaagaaaatagtgccaaagaattggaaaaaactactttaaagttcatatggaaccaaaaaagagcccgcatcgccaagtcaatcctaagccaaaagaacaaagctggaggcatcacactacctgacttcaaactatactacaaggctacagtaaccaaaacagcatggtactggtaccaaaacagagatatagatcaatggaacagaacagagccctcagaaataatgccacatatctacaactatctgatctttgacaaacctgagaaaaacaagcaatggggaaaggattccctatttaataaatggtgctgggaaaactggctagccatatgtagaaagctgaaactggatcccttccttacaccttatacaaaaatcaattcaagatggattaaagatttaaacgttagacctaaaaccataaaaaccctagaagaaaacctaggcattaccattcaggacataggcgtgggcaaggacttcatgtccaaaacaccaaaagcaatggcaacaaaagccaaaattgacaaatgggatctaattaaactaaagagcttctgcacagcaaaagaaactaccatcagagtgaacaggcaacctacaacatgggagaaaattttcgcaacctactcatctgacaaagggctaatatccagaatctacaatgaactcaaacaaatttacaagaaaaaaacaaacaaccccatcaaaaagtgggcgaaggacatgaacagacacttctcaaaagaagacatttatgcagccaaaaaacacatgaagaaatgctcatcatcactggccatcagaga

SEQ ID NO: 13645 - DNA, 374 bp, Homo sapiens
  source 1..374: mol_type = unassigned DNA
cacagttgcctgccctgggcgggggcgagcgcgtccggtttgctggaagcgttcggaaatggcaacttgcgcggtggaggtgttcgggctcctggaggacgagaattggaaaaaactactttaaagttcatatggaaccaaaaaagagcccgcatcgccaagtcaatcctaagccaaaagaacaaagctggaggcatcacactacctgacttcaaactatactacaaggctacagtaaccaaaacagcatggtactggtaccaaaacagagatatagatcaatggaacagaacagagccctcagaaataatgccacatatctacaactatctgatctttgacaaacctgagaaaaacaagcaatggggaaagga

SEQ ID NO: 13646 - DNA, 3335 bp, Homo sapiens
  source 1..3335: mol_type = unassigned DNA
gcgccgccgccgcgcgcagtgagaggcgccggggctgccgcccggtgctcggcgcgctctcgggagccgcccgcccgctggtcccgcagccttccgggaggaagcggtgccggcagcgtccagggcgcgctctcgggcaccctcacctgccggcgcccggccgcttacccggcagggcgtgcgcagggtagggtgcgggaccggggggacctggaggcagaggggagaaccggccgtccgcgccgcagcacagccgctgggagcgcctcagaccccgcgcggggcgccggctccatggcgaccgggctcggggagccggtctatggactttccgaagacgagggagagtcccgtattctcagagtaaaagttgtttctggaattgatctcgccaaaaaggacatctttggagccagtgatccgtatgtgaaactttcattgtacgtagcggatgagaatagagaacttgctttggtccagacaaaaacaattaaaaagacactgaacccaaaatggaatgaagaattttatttcagggtaaacccatctaatcacagactcctatttgaagtatttgacgaaaatagactgacacgagacgacttcctgggccaggtggacgtgccccttagtcaccttccgacagaagatccaaccatggagcgaccctatacatttaaggactttctcctcagaccaagaagtcataagtctcgagttaagggatttttgcgattgaaaatggcctatatgccaaaaaatggaggtcaagatgaagaaaacagtgaccagagggatgacatggagcatggatgggaagttgttgactcaaatgactcggcttctcagcaccaagaggaacttcctcctcctcctctgcctcccgggtgggaagaaaaagtggacaatttaggccgaacttactatgtcaaccacaacaaccggaccactcagtggcacagaccaagcctgatggacgtgtcctcggagtcggacaataacatcagacagatcaaccaggaggcagcacaccggcgcttccgctcccgcaggcacatcagcgaagacttggagcccgagccctcggagggcggggatgtccccgagccttgggagaccatttcagaggaagtgaatatcgctggagactctctcggtctggctctgcccccaccaccggcctccccaggatctcggaccagccctcaggagctgtcagaggaactaagcagaaggcttcagatcactccagactccaatggggaacagttcagctctttgattcaaagagaaccctcctcaaggttgaggtcatgcagtgtcaccgacgcagttgcagaacagggccatctaccaccgcttgcagaagatggtgcgtccggatcagccacaaacagtaacaaccatctaatcgagcctcagatccgccggcctcgtagcctcagctcgccaacagtaactttatctgccccgctggagggtgccaaggactcacccgtacgtcgggctgtgaaagacaccctttccaacccacagtccccacagccatcaccttacaactcccccaaaccacaacacaaagtcacacagagcttcttgccacccggctgggaaatgaggatagcgccaaacggccggcccttcttcattgatcataacacaaagactacaacctgggaagatccacgtttgaaatttccagtacatatgcggtcaaagacatctttaaaccccaatgaccttggcccccttcctcctggctgggaagaaagaattcacttggatggccgaacgttttatattgatcataatagcaaaattactcagtgggaagacccaagactgcagaacccagctattactggtccggctgtcccttactccagagaatttaagcagaaatatgactacttcaggaagaaattaaagaaacctgctgatatccccaataggtttgaaatgaaacttcacagaaataacatatttgaagagtcctatcggagaattatgtccgtgaaaagaccagatgtcctaaaagctagactgtggattgagtttgaatcagagaaaggtcttgactatgggggtgtggccagagaatggttcttcttactgtccaaagagatgttcaacccctactacggcctctttgagtactctgccacggacaactacacccttcagatcaaccctaattcaggcctctgtaatgaggatcatttgtcctacttcacttttattggaagagttgctggtctggccgtatttcatgggaagctcttagatggtttcttcattagaccattttacaagatgatgttgggaaagcagataaccctgaatgacatggaatctgtggatagtgaatattacaactctttgaaatggatcctggagaatgaccctactgagctggacctcatgttctgcatagacgaagaaaactttggacagacatatcaagtggatttgaagcccaatgggtcagaaataatggtcacaaatgaaaacaaaagggaatatatcgacttagtcatccagtggagatttgtgaacagggtccagaagcagatgaacgccttcttggagggattcacagaactacttcctattgatttgattaaaatttttgatgaaaatgagctggagttgctcatgtgcggcctcggtgatgtggatgtgaatgactggagacagcattctatttacaagaacggctactgcccaaaccaccccgtcattcagtggttctggaaggctgtgctactcatggacgccgaaaagcgtatccggttactgcagtttgtcacagggacatcgcgagtacctatgaatggatttgccgaactttatggttccaatggtcctcagctgtttacaatagagcaatggggcagtcctgagaaactgcccagagctcacacatgctttaatcgccttgacttacctccatatgaaacctttgaagatttacgagagaaacttctcatggccgtggaaaatgctcaaggatttgaaggggtggattaagcaccctgtgcctcgggggtggttgttcttcaagcaagttctgcttgcacttttgcatttgcctaacagacttttgcagaggcgatggcagagagcagctgcaggcatggtccctggagccgagccttcaccacgcactcgtccaagttcggatgcgggaacctggtcccagcttgagttcctgcctttcccaccacaaattatcaactggttgatgtgtacactaattacatttcaggaggacttaatgctatttatgttgtgcctctgcaggcaaagcccttaataaatattttacatccttt

SEQ ID NO: 13647 - DNA, 3647 bp, Homo sapiens
  source 1..3647: mol_type = unassigned DNA
gcgcgcagtgagaggcgccggggctgccgcccggtgctcggcgcgctctcgggagccgcccgcccgctggtcccgcagccttccgggaggaagcggtgccggcagcgtccagggcgcgctctcgggcaccctcacctgccggcgcccggccgcttacccggcagggcgtgcgcagggtagggtgcgggaccggggggacctggaggcagaggggagaaccggccgtccgcgccgcagcacagccgctgggagcgcctcagaccccgcgcggggcgccggctccatggcgaccgggctcggggagccggtctatggactttccgaagacgagggagagtcccgtattctcagagtaaaagttgtttctggaattgatctcgccaaaaaggacatctttggagccagtgatccgtatgtgaaactttcattgtacgtagcggatgagaatagagaacttgctttggtccagacaaaaacaattaaaaagacactgaacccaaaatggaatgaagaattttatttcagggtaaacccatctaatcacagactcctatttgaagtatttgacgaaaatagactgacacgagacgacttcctgggccaggtggacgtgccccttagtcaccttccgacagaagatccaaccatggagcgaccctatacatttaaggactttctcctcagaccaagaagtcataagtctcgagttaagggatttttgcgattgaaaatggcctatatgccaaaaaatggaggtcaagatgaagaaaacagtgaccagagggatgacatggagcatggatgggaagttgttgactcaaatgactcggcttctcagcaccaagaggaacttcctcctcctcctctgcctcccgggtgggaagaaaaagtggacaatttaggccgaacttactatgtcaaccacaacaaccggaccactcagtggcacagaccaagcctgatggacgtgtcctcggagtcggacaataacatcagacagatcaaccaggaggcagcacaccggcgcttccgctcccgcaggcacatcagcgaagacttggagcccgagccctcggagggcggggatgtccccgagccttgggagaccatttcagaggaagtgaatatcgctggagactctctcggtctggctctgcccccaccaccggcctccccaggatctcggaccagccctcaggagctgtcagaggaactaagcagaaggcttcagatcactccagactccaatggggaacagttcagctctttgattcaaagagaaccctcctcaaggttgaggtcatgcagtgtcaccgacgcagttgcagaacagggccatctaccaccgcccagtgccccagctgggagagcgcgttcatcaactgtcacgggtggtgaggaaccaacgccatcagtggcctatgtacataccacgccgggtctgccttcaggctgggaagaaagaaaagatgctaaggggcgcacatactatgtcaatcataacaatcgaaccacaacttggactcgacctatcatgcagcttgcagaagatggtgcgtccggatcagccacaaacagtaacaaccatctaatcgagcctcagatccgccggcctcgtagcctcagctcgccaacagtaactttatctgccccgctggagggtgccaaggactcacccgtacgtcgggctgtgaaagacaccctttccaacccacagtccccacagccatcaccttacaactcccccaaaccacaacacaaagtcacacagagcttcttgccacccggctgggaaatgaggatagcgccaaacggccggcccttcttcattgatcataacacaaagactacaacctgggaagatccacgtttgaaatttccagtacatatgcggtcaaagacatctttaaaccccaatgaccttggcccccttcctcctggctgggaagaaagaattcacttggatggccgaacgttttatattgatcataatagcaaaattactcagtgggaagacccaagactgcagaacccagctattactggtccggctgtcccttactccagagaatttaagcagaaatatgactacttcaggaagaaattaaagaaacctgctgatatccccaataggtttgaaatgaaacttcacagaaataacatatttgaagagtcctatcggagaattatgtccgtgaaaagaccagatgtcctaaaagctagactgtggattgagtttgaatcagagaaaggtcttgactatgggggtgtggccagagaatggttcttcttactgtccaaagagatgttcaacccctactacggcctctttgagtactctgccacggacaactacacccttcagatcaaccctaattcaggcctctgtaatgaggatcatttgtcctacttcacttttattggaagagttgctggtctggccgtatttcatgggaagctcttagatggtttcttcattagaccattttacaagatgatgttgggaaagcagataaccctgaatgacatggaatctgtggatagtgaatattacaactctttgaaatggatcctggagaatgaccctactgagctggacctcatgttctgcatagacgaagaaaactttggacagacatatcaagtggatttgaagcccaatgggtcagaaataatggtcacaaatgaaaacaaaagggaatatatcgacttagtcatccagtggagatttgtgaacagggtccagaagcagatgaacgccttcttggagggattcacagaactacttcctattgatttgattaaaatttttgatgaaaatgagctggagttgctcatgtgcggcctcggtgatgtggatgtgaatgactggagacagcattctatttacaagaacggctactgcccaaaccaccccgtcattcagtggttctggaaggctgtgctactcatggacgccgaaaagcgtatccggttactgcagtttgtcacagggacatcgcgagtacctatgaatggatttgccgaactttatggttccaatggtcctcagctgtttacaatagagcaatggggcagtcctgagaaactgcccagagctcacacatgctttaatcgccttgacttacctccatatgaaacctttgaagatttacgagagaaacttctcatggccgtggaaaatgctcaaggatttgaaggggtggattaagcaccctgtgcctcgggggtggttgttcttcaagcaagttctgcttgcacttttgcatttgcctaacagacttttgcagaggcgatggcagagagcagctgcaggcatggtccctggagccgagccttcaccacgcactcgtccaagttcggatgcgggaacctggtcccagcttgagttcctgcctttcccaccacaaattatcaactggttgatgtgtacactaattacatttcaggaggacttaatgctatttatgttgtgcctctgcaggcaaagcccttaataaatattttacatcctttctaatgacaatgaatggaattaatcactcaacaggtatagtattacgactcatgtttactttttaaaatgatttagaccgattttcagattttatttcgttatgattaaagatgtctcatgtacttggaaa

SEQ ID NO: 13648 - DNA, 1033 bp, Homo sapiens
  source 1..1033: mol_type = unassigned DNA
agtgagaggcgccggggctgccgcccggtgctcggcgcgctctcgggagccgcccgcccgctggtcccgcagccttccgggaggaagcggtgccggcagcgtccagggcgcgctctcgggcaccctcacctgccggcgcccggccgcttacccggcagggcgtgcgcagggtagggtgcgggaccggggggacctggaggcagaggggagaaccggccgtccgcgccgcagcacagccgctgggagcgcctcagaccccgcgcggggcgccggctccatggcgaccgggctcggggagccggtctatggactttccgaagacgaggctgtgctactcatggacgccgaaaagcgtatccggttactgcagtttgtcacagggacatcgcgagtacctatgaatggatttgccgaactttatggttccaatggtcctcagctgtttacaatagagcaatggggcagtcctgagaaactgcccagagctcacacatgctttaatcgccttgacttacctccatatgaaacctttgaagatttacgagagaaacttctcatggccgtggaaaatgctcaaggatttgaaggggtggattaagcaccctgtgcctcgggggtggttgttcttcaagcaagttctgcttgcacttttgcatttgcctaacagacttttgcagaggcgatggcagagagcagctgcaggcatggtccctggagccgagccttcaccacgcactcgtccaagttcggatgcgggaacctggtcccagcttgagttcctgcctttcccaccacaaattatcaactggttgatgtgtacactaattacatttcaggaggacttaatgctatttatgttgtgcctctgcaggcaaagcccttaataaatattttacatcctttctaatgacaatgaatggaattaatcactcaacaggtatagtattacgactcatgtttactttttaaaatgatttagaccgattttcagattttatttcgttatgattaaagatgtctcatgtacttggaa

SEQ ID NO: 13649 - DNA, 728 bp, Homo sapiens
  source 1..728: mol_type = unassigned DNA
gagaggcgccggggctgccgcccggtgctcggcgcgctctcgggagccgcccgcccgctggtcccgcagccttccgggaggaagcggtgccggcagcgtccagggcgcgctctcgggcaccctcacctgccggcgcccggccgcttacccggcagggcgtgcgcagggtagggtgcgggaccggggggacctggaggcagaggggagaaccggccgtccgcgccgcagcacagccgctgggagcgcctcagaccccgcgcggggcgccggctccatggcgaccgggctcggggagccggtctatggactttccgaagacgagcccgggagtccatgatgcatgtcacgtctgggtcgcgcggctggagacccgggactgcggagaagccggatcgtttccccctggaactttctctctcatgattgtgtggatcagcaggcgctcagaagcctgtgcgtgcttatcccggcgggaatgggggacacgctgcgtgtgtccctcccctcgttttgcaaagtctacggccaggattgtggatttcggagcctcggtgggggaggtgttcaaggctggtggcaggtgctcctggaaacttggggaggaagcttgcagccctgccattttttcctcccgaggattcaaagcccggcacctccagggtgggtggggagaggaaagcttaattgatctcttttattaataaagcgactgaataagccacgcctcc

SEQ ID NO: 13650 - DNA, 8251 bp, Homo sapiens
  source 1..8251: mol_type = unassigned DNA
cgcagggtagggtgcgggaccggggggacctggaggcagaggggagaaccggccgtccgcgccgcagcacagccgctgggagcgcctcagaccccgcgcggggcgccggctccatggcgaccgggctcggggagccggtctatggactttccgaagacgagggagagtcccgtattctcagagtaaaagttgtttctggaattgatctcgccaaaaaggacatctttggagccagtgatccgtatgtgaaactttcattgtacgtagcggatgagaatagagaacttgctttggtccagacaaaaacaattaaaaagacactgaacccaaaatggaatgaagaattttatttcagggtaaacccatctaatcacagactcctatttgaagtatttgacgaaaatagactgacacgagacgacttcctgggccaggtggacgtgccccttagtcaccttccgacagaagatccaaccatggagcgaccctatacatttaaggactttctcctcagaccaagaagtcataagtctcgagttaagggatttttgcgattgaaaatggcctatatgccaaaaaatggaggtcaagatgaagaaaacagtgaccagagggatgacatggagcatggatgggaagttgttgactcaaatgactcggcttctcagcaccaagaggaacttcctcctcctcctctgcctcccgggtgggaagaaaaagtggacaatttaggccgaacttactatgtcaaccacaacaaccggaccactcagtggcacagaccaagcctgatggacgtgtcctcggagtcggacaataacatcagacagatcaaccaggaggcagcacaccggcgcttccgctcccgcaggcacatcagcgaagacttggagcccgagccctcggagggcggggatgtccccgagccttgggagaccatttcagaggaagtgaatatcgctggagactctctcggtctggctctgcccccaccaccggcctccccaggatctcggaccagccctcaggagctgtcagaggaactaagcagaaggcttcagatcactccagactccaatggggaacagttcagctctttgattcaaagagaaccctcctcaaggttgaggtcatgcagtgtcaccgacgcagttgcagaacagggccatctaccaccgccatcagtggcctatgtacataccacgccgggtctgccttcaggctgggaagaaagaaaagatgctaaggggcgcacatactatgtcaatcataacaatcgaaccacaacttggactcgacctatcatgcagcttgcagaagatggtgcgtccggatcagccacaaacagtaacaaccatctaatcgagcctcagatccgccggcctcgtagcctcagctcgccaacagtaactttatctgccccgctggagggtgccaaggactcacccgtacgtcgggctgtgaaagacaccctttccaacccacagtccccacagccatcaccttacaactcccccaaaccacaacacaaagtcacacagagcttcttgccacccggctgggaaatgaggatagcgccaaacggccggcccttcttcattgatcataacacaaagactacaacctgggaagatccacgtttgaaatttccagtacatatgcggtcaaagacatctttaaaccccaatgaccttggcccccttcctcctggctgggaagaaagaattcacttggatggccgaacgttttatattgatcataatagcaaaattactcagtgggaagacccaagactgcagaacccagctattactggtccggctgtcccttactccagagaatttaagcagaaatatgactacttcaggaagaaattaaagaaacctgctgatatccccaataggtttgaaatgaaacttcacagaaataacatatttgaagagtcctatcggagaattatgtccgtgaaaagaccagatgtcctaaaagctagactgtggattgagtttgaatcagagaaaggtcttgactatgggggtgtggccagagaatggttcttcttactgtccaaagagatgttcaacccctactacggcctctttgagtactctgccacggacaactacacccttcagatcaaccctaattcaggcctctgtaatgaggatcatttgtcctacttcacttttattggaagagttgctggtctggccgtatttcatgggaagctcttagatggtttcttcattagaccattttacaagatgatgttgggaaagcagataaccctgaatgacatggaatctgtggatagtgaatattacaactctttgaaatggatcctggagaatgaccctactgagctggacctcatgttctgcatagacgaagaaaactttggacagacatatcaagtggatttgaagcccaatgggtcagaaataatggtcacaaatgaaaacaaaagggaatatatcgacttagtcatccagtggagatttgtgaacagggtccagaagcagatgaacgccttcttggagggattcacagaactacttcctattgatttgattaaaatttttgatgaaaatgagctggagttgctcatgtgcggcctcggtgatgtggatgtgaatgactggagacagcattctatttacaagaacggctactgcccaaaccaccccgtcattcagtggttctggaaggctgtgctactcatggacgccgaaaagcgtatccggttactgcagtttgtcacagggacatcgcgagtacctatgaatggatttgccgaactttatggttccaatggtcctcagctgtttacaatagagcaatggggcagtcctgagaaactgcccagagctcacacatgctttaatcgccttgacttacctccatatgaaacctttgaagatttacgagagaaacttctcatggccgtggaaaatgctcaaggatttgaaggggtggattaagcaccctgtgcctcgggggtggttgttcttcaagcaagttctgcttgcacttttgcatttgcctaacagacttttgcagaggcgatggcagagagcagctgcaggcatggtccctggagccgagccttcaccacgcactcgtccaagttcggatgcgggaacctggtcccagcttgagttcctgcctttcccaccacaaattatcaactggttgatgtgtacactaattacatttcaggaggacttaatgctatttatgttgtgcctctgcaggcaaagcccttaataaatattttacatcctttctaatgacaatgaatggaattaatcactcaacaggtatagtattacgactcatgtttactttttaaaatgatttagaccgattttcagattttatttcgttatgattaaagatgtctcatgtacttggaaaagtgagcattttttttttttttgtatttcactttcataccaggcttaatgtcaatgacatttttatttttgaagtactctgacacctccaccctctactttattagaattggaaggcaaatttttgtccaaaaacctacagacaagtactttgagagaatttccaatataatattagacataatgataattttttccatactcagaatgaaaaactggatattacgtttttgttttggggtttttttgtacaaatttagctaatagctacaggctgagagaattgtaacatagcatgacaaattttgtgttgacttgaaaggaatcacaccattattccttagaagtaattacatgtgttctaacacatttgagacagggttggactcccatttctcatccgagaaattacttaacccttcctggcgctgtacagtcatcttttattctatttcctctttgctgtttgtagtagagacattttgaatgaaacttggcactgcttgattcaaaactgtggaaaccagatctgtttagtctcctgtttgtatgcgtttgctaatggtagctaaataaccagtttttgttgtaaatgcaccaattctgaaggcactttatgtactacatggaggtcatatctggttttgtttttatttttttatcatgaacattaaatgtgatgatgatttcttttccctgcacacatctttccggtgcaatatctatcaattgtgaatctggctgctggtgtataaaaacctggatgtaaagctgagcctacagacctgtcctcaccaactgttttgtgatttctactcaactacaaagatttatttaatgtactcttaatctaactgagttttgttaccaatgacctgttgcatgcttcaataccgtgtactgcctgagttgtgcctcttgtgtgctagattaaaagtgagacagagacttgacttgatcctctgagctcaagctattgagctggtagtggcagaggactgagggtacctgcacagtttgattcttttccacgtgtaagtctccattgcagaattgtcgtgctttgagaaaacacctgaggcagtgtgggagttgaacgaccctgctgtcctttttaacctgtgttgtcctagaccctgtcggggcagtcaggggacactagagatttgatctcatgcgagtcatcaataggacaaaaaagttgtggtttggggaggtctgtttgttacataaaaaggacctttcggtgtaagaaattgccgtttttaccctgccctggctggcatgtgagaagccatggaaggttgtggttgtaaatgagttgtctaaaggggtgcagaggcctgaggtttctaaaagaaggtagatttctacagagctgagtgttggttcctttttcttattggttgaaaattacctggtagtgatcagaaaacttagatgctatgtaactaaaaaaaaaaaaaaaaaaaaaaaaaaaaaaaaaaaaattcccgctcatgagttttgactattggtgagatgttttccgctacagttaacatgacaaatgtctcagtggcaaaaatcccctttttgtaagcccccatagtctagaggcagttttctttttaagaatcatgccagagcctgagtcgagcagtatgctttcttggtttttgagagtaattgtgtaattgtagagggagaaatccaattctaacctaagaactgggattcttctgtcatcttgtaaaccgtatattgaaaaaaacagaatgtcactaaatgcatattaagtcaagtattggaaagtataaaagaaaaatcattctgacaatttctaagccagaagcaaacaagaattactgaaatctaccccatgaatacttggaaggcagtaattgtgagtgacacctcagttcatcaaccccttaataatatcagcttaattttaatgacaactaaatatgctgaagtgaggatttagtattttttaaaaaagcaaaacaaggttcagtagtcctcagcaattctccaagtttctctctttgcctaaaatggtcatagatcttgatttctctgaatcgtgatgaccacacccagtcatcttcacagcataattgcaggtggcagtaaagagagtgtgctgggtaaggagcagttgctgggtcattccttgggccccgacctgcccggggagtagccctgggggagagagggcagtgttgcctatcccagaggtcccagcagtcacactgctctgcaggccgggctctctttatagccagagaaatcaccttaatgcagtctctttagttgtctgctgaagctgtagttattatgggccacttacatgaggctgagaagtacgtgccggagctcacacactgcctgttgcggttctcttaacatcagttatcacagctgcctgtgggtcccgggtatttccattcctgccccttgttggcccgaggaaggatgtggaaagagcacctggtgggatgaaggtccaacagcctgtgcctctccactgctggccctggagccggcagcagtgaggcattcattgtctgtgttgcggtgtattcccagcttcagtgctcttttcctttttgcctgaaatgtttatgcttctctgcagccagtcctctaacaaatctcaagaacaaaggtaagacacttggtttttgtttccaggacccttcagaaggtgacatcagatattccctaaattcagacaatgagggatacagagcgacttggcatgtattatttctcccatgtaaggacaaagggacagattattattgttatttctgagacagagtcttgctctgtagctcaggctggagtgcagtggctcaatctcagctcaccacaacctctgcctcctggcttcaagcgattcttctgcctcagcctccccgaatagttgggattacaggcacccaccaccacgcctggctaatttttgtatttttagtagagatggtttcaccatgctggccaggctggtcttgaactcctgacctcaggtgatcctcccgcctcagccttccaaagtgctgggattacaagcatgagccaccgcacccggcctcacagtgacagattctgagaaacagcatgcaaaacatttgaaccattttctacatctcccattgttgcatagagagtgtgcaccgctgctatcttgccagatccacactggtcctcccgaaagccaggttcatacacagcaactttttaattattctaacagttacccattaacagtcgactcctgtatttctgagagtcttgtactcacctctgaaatttaaaaacgtataaagagagcctgggttaatcagttctgcagcccctacgtgacactgtgctagttctccttcttctgtctcctccttaccctggccctgcacccctgtacttaagagggagaggtgggaggtgctgtctggtatcatttgctgcctcgccagtagagggtgccgctgtgcagggtaactgcccgcctgctcccttcctgacctcccctgaccccgaagatcactacctctgtcattcaggcattggggtacatcctgataagtcgtgtcagaactgccaatttcaggactgagatgtgtttttaaaaaacaaatccttataaactccactttgtactttagattttaaaactggggaaaaatgtgatattctttggaccacttttttaatttatataagccttaatgaacagtgtctatacatttgcatacacacacccccaccccagagtgttctcagtatgtcagagaaagtgccacagcattaggacgggagcttggagaacgttttctagaaaagggttagcttcctgttggcatgaaattttccaagcaaacctcattaaacatctgttgtttgttaaagatgttccactgaaagcaacgcatgtttcaaaggcacgtctttccgttcgttggttttctgtgtgtaaggagtagcattgctgttggcgcctaacctcgcgtgcactgcattctcaaccccgtaccagtgcatcatcagaagccttcctcgtgaccataactctgtgtctgcagatatgtgttcccgtgtaagccagttttccccttttactcagactgatttcacctagattgtcacggtttccttcatgttaactttgcgtgactttgttcttcctttactactctgtatgtaatatatatacatatatacgtacatatgctgtccaaatatatttgtatatatttgtatagcatttttacacctttattgagtaatctggtttcgaaaggaggtgagagtttagtcccttctgcagttttctccaagctgtgtcctgtgaatttcaacccttggagcctaagaaaaccctaggaagatgatgttaatttgctgtcatttcctaattcaggatctatcatcaaatgaaacatgaaaaaaacagtgacttttaaggtgaaaagagtttcaagcattccaaataaattatcaatgtttcataactttttattataaacccacctcctaataggaagccaagtactatttgatacagtggtaaaaaccaaactaccttgaatttttttaaggcaacttatgaataatgctcattttcacagtcagaatagctttaaaatatggttgaatttgatacacacaggaagttttcttgaagaacaatcctttcgcttttcttttttcttgagagatctaaagagaaactgtagattgttttcctgacagcaaaagactaatgtgacaaaatgaagtcattgtaaagaagcgatgcaacttgtcaaatatttaataaagaattatggaagctggaacattttcta

SEQ ID NO: 13651 - DNA, 2920 bp, Homo sapiens
  source 1..2920: mol_type = unassigned DNA
atggcgaccgggctcggggagccggtctatggactttccgaagacgagggagagtcccgtattctcagagtaaaagttgtttctggaattgatctcgccaaaaaggacatctttggagccagtgatccgtatgtgaaactttcattgtacgtagcggatgagaatagagaacttgctttggtccagacaaaaacaattaaaaagacactgaacccaaaatggaatgaagaattttatttcagggtaaacccatctaatcacagactcctatttgaagtatttgacgaaaatagactgacacgagacgacttcctgggccaggtggacgtgccccttagtcaccttccgacagaagatccaaccatggagcgaccctatacatttaaggactttctcctcagaccaagaagtcataagtctcgagttaagggatttttgcgattgaaaatggcctatatgccaaaaaatggaggtcaagatgaagaaaacagtgaccagagggatgacatggagcatggatgggaagttgttgactcaaatgactcggcttctcagcaccaagaggaacttcctcctcctcctctgcctcccgggtgggaagaaaaagtggacaatttaggccgaacttactatgtcaaccacaacaaccggaccactcagtggcacagaccaagcctgatggacgtgtcctcggagtcggacaataacatcagacagatcaaccaggaggcagcacaccggcgcttccgctcccgcaggcacatcagcgaagacttggagcccgagccctcggagggcggggatgtccccgagccttgggagaccatttcagaggaagtgaatatcgctggagactctctcggtctggctctgcccccaccaccggcctccccaggatctcggaccagccctcaggagctgtcagaggaactaagcagaaggcttcagatcactccagactccaatggggaacagttcagctctttgattcaaagagaaccctcctcaaggttgaggtcatgcagtgtcaccgacgcagttgcagaacagggccatctaccaccgggtgccaaggactcacccgtacgtcgggctgtgaaagacaccctttccaacccacagtccccacagccatcaccttacaactcccccaaaccacaacacaaagtcacacagagcttcttgccacccggctgggaaatgaggatagcgccaaacggccggcccttcttcattgatcataacacaaagactacaacctgggaagatccacgtttgaaatttccagtacatatgcggtcaaagacatctttaaaccccaatgaccttggcccccttcctcctggctgggaagaaagaattcacttggatggccgaacgttttatattgatcataatagcaaaattactcagtgggaagacccaagactgcagaacccagctattactggtccggctgtcccttactccagagaatttaagcagaaatatgactacttcaggaagaaattaaagaaacctgctgatatccccaataggtttgaaatgaaacttcacagaaataacatatttgaagagtcctatcggagaattatgtccgtgaaaagaccagatgtcctaaaagctagactgtggattgagtttgaatcagagaaaggtcttgactatgggggtgtggccagagaatggttcttcttactgtccaaagagatgttcaacccctactacggcctctttgagtactctgccacggacaactacacccttcagatcaaccctaattcaggcctctgtaatgaggatcatttgtcctacttcacttttattggaagagttgctggtctggccgtatttcatgggaagctcttagatggtttcttcattagaccattttacaagatgatgttgggaaagcagataaccctgaatgacatggaatctgtggatagtgaatattacaactctttgaaatggatcctggagaatgaccctactgagctggacctcatgttctgcatagacgaagaaaactttggacagacatatcaagtggatttgaagcccaatgggtcagaaataatggtcacaaatgaaaacaaaagggaatatatcgacttagtcatccagtggagatttgtgaacagggtccagaagcagatgaacgccttcttggagggattcacagaactacttcctattgatttgattaaaatttttgatgaaaatgagctggagttgctcatgtgcggcctcggtgatgtggatgtgaatgactggagacagcattctatttacaagaacggctactgcccaaaccaccccgtcattcagtggttctggaaggctgtgctactcatggacgccgaaaagcgtatccggttactgcagtttgtcacagggacatcgcgagtacctatgaatggatttgccgaactttatggttccaatggtcctcagctgtttacaatagagcaatggggcagtcctgagaaactgcccagagctcacacatgctttaatcgccttgacttacctccatatgaaacctttgaagatttacgagagaaacttctcatggccgtggaaaatgctcaaggatttgaaggggtggattaagcaccctgtgcctcgggggtggttgttcttcaagcaagttctgcttgcacttttgcatttgcctaacagacttttgcagaggcgatggcagagagcagctgcaggcatggtccctggagccgagccttcaccacgcactcgtccaagttcggatgcgggaacctggtcccagcttgagttcctgcctttcccaccacaaattatcaactggttgatgtgtacactaattacatttcaggaggacttaatgctatttatgttgtgcctctgcaggcaaagcccttaataaatattttacatcctt

SEQ ID NO: 13652 - DNA, 165 bp, Homo sapiens
  source 1..165: mol_type = unassigned DNA
ctcttccgtgtctcccactccccccttttgaaacaatcctgctaaatcactgcctagtcctctctcgaccagccacgctcggctcttattgggagagtcccgtattctcagagtaaaagttgtttctggaattgatctcgccaaaaaggacatctttggagccag

SEQ ID NO: 13653 - DNA, 233 bp, Homo sapiens
  source 1..233: mol_type = unassigned DNA
aggtaggagtggtttgccatctggcggggtgcgcgctcaggtctggctcccctttcgagaggtgaattttacaacccaagaagcattactcagcagggagagtcccgtattctcagagtaaaagttgtttctggaattgatctcgccaaaaaggacatctttggagccagtgatccgtatgtgaaactttcattgtacgtagcggatgagaatagagaacttgctttggtcca

SEQ ID NO: 13654 - DNA, 144 bp, Homo sapiens
  source 1..144: mol_type = unassigned DNA
gtggtttgccatctggcggggtgcgcgctcaggtctggctcccctttcgagaggtgaattttacaacccaagaagcattactcagcagggagggagagtcccgtattctcagagtaaaagttgtttctggaattgatctcgcca

SEQ ID NO: 13655 - DNA, 484 bp, Homo sapiens
  source 1..484: mol_type = unassigned DNA
atctggcggggtgcgcgctcaggtctggctcccctttcgagaggtgaattttacaacccaagaagcattactcagcagggagagtcccgtattctcagagtaaaagttgtttctggaattgatctcgccaaaaaggacatctttggagccagcttctgctccattgctgttgaacttttttttggtcgtgacatcagaaaaataaccaagttgatccgtatgtgaaactttcattgtacgtagcggatgagaatagagaacttgctttggtccagacaaaaacaattaaaaagacactgaacccaaaatggaatgaagaattttatttcagggtaaacccatctaatcacagactcctatttgaagtatttgacgaaaatagactgacacgagacgacttcctgggccaggtggacgtgccccttagtcaccttccgacagaagatccaaccatggagcgaccctatacatttaaggactttct

SEQ ID NO: 13656 - DNA, 241 bp, Homo sapiens
  source 1..241: mol_type = unassigned DNA
attatctgagacaggctcgcgttatggctccgctttctgcggctctcctaccctggcatggtgtgtgtgtgtgcctgtgtgctacggagagtcccgtattctcagagtaaaagttgtttctggaattgatctcgccaaaaaggacatctttggagccagtgatccgtatgtgaaactttcattgtacgtagcggatgagaatagagaacttgctttggtccagacaaaaacaattaaaaag

SEQ ID NO: 13657 - DNA, 1304 bp, Homo sapiens
  source 1..1304: mol_type = unassigned DNA
agacattcctaaacaaaggggctgcttgggttgacgtattgtggggggtgggggtgaggacagctgcatttcatcctaggttcttttaaaaaatgttttaataacatgattatttgtaaaaactcccccgaaaaaacgattttaagagtgttttgggaagtgcagctggataaatgaaacacgttaatgtcactgttgtttgtgctttatttacattggcagtgagtgtcagaatctacctagagcacatcttgccacttttgtccacaggagtcactactaatcatcataactgatgtctagtgtgaaagtgaagcttggaatgtaaacagagtccgagtgtgtgttggcatgtgactggattcactcctgcatgttgctagaagggaatttggggctgtataggaaatagcaagaggtgatgaagacaccttttattatctatttattgccatgtcgctggtagtatttagttccacacacattgtatttcacaagatgagtctcagccgtcttcctttttcaactttctcctaccagtgaaaaaataagccagggcagttctgatgacttcacatttcattggtatttgtttttcatgggcagtttcatgctgtcacgttgcccttcagagaatcagggaatgccttcgtagaatattaacgacaaattgttgaatttgcacagcttgttttgtctccctgaattagtatgtgtaagaaaaaccaatggaagattttagcaggctctgaaagtagaatgcccgctgaagcaaacggcagggttgttcttccaaggcgtattaaatatgggtacacttagtttgcagacttggtgtgctgcagaatatcacatatgaagatattttgaccgctatttagaagagtgacctcataaatcttttagcaaagtagacacacatacctaccacatttcttaaaagtagattcgtattttgatttgagattgttgaaaagcatggtatgtttggagtgcacttagttatgtcccatctcataaagactgttgagctctctgcactgctgatgatgaagcattgcatgaacccagaaaacggggatgccaaagcacagggcttaggtgctgttccttgcgtcatcagcagaggtctgtccactttgtagaagggagagtcccgtattctcagagtaaaagttgtttctggaattgatctcgccaaaaaggacatctttggagccagtgatccgtatgtgaaactttcattgtacgtagcggatgagaatagagaacttgctttggtccagacaaaaacaattaaaaag

SEQ ID NO: 13658 - DNA, 220 bp, Homo sapiens
  source 1..220: mol_type = unassigned DNA
attgtcagtaacttggtttttaagcttcagactgtatttcctcctcacttgttaacaccagaagataaatgaatgtggctcttggattgaactacatctacagggagctgaacttcccatgttgacgttgaattctagagtatgcttatgctgattcttgagaaattgggagagtcccgtattctcagagtaaaagttgtttctggaattgatctcgcca

SEQ ID NO: 13659 - DNA, 889 bp, Homo sapiens
  source 1..889: mol_type = unassigned DNA
attttatttcatttgagatttcagactttgtcgcttgttctttctgtagaagttttttcatagaagtatgttgtttcaaaagcaaccttcaaatagtagacttagcttggatgagaatctaaaagtctttgagtccaacaaccaagcaggtcccctgtccaggaagtaccttatagctgatgtttgagtatccctgcagatgggaactcactacctcctgaagcaccttacttctacccttggaatagtaacagagattaaaatgtccttccttaatttgaggtgaaatctgccttcttgtccattttacacacactaaccttccttccaccatgcaagctgagagagagccaggttgagcctgtgtttccacaacaactcttctcagacctcctgctgccacctaccatgcacttgctcttcactggctaggttccagttgctctgtacctttcctaaagtgtggtgaccagaatttggcacagtgagggaaggttccagagccctttagtgttatcgggggcacagagcttgggctttggagtcgctcagatcttgagttgatatgcacttctttgtccttgagcaaatgattgaaccttcttggactctcagttcctcattaataaaatgaagatgaaacaagatgagatggactgtgcacatttcctgatgggggctggtatgtgctggtgcccagtgcaaagtggctgctggcagaatggtgagtcaccagtacctgctcccttcactgagtgcttcctgtgtgcctggcaccattgctcagggctttacatggacttactcatttcattttcactgcagcctagagcgtaaggagagtcccgtattctcagagtaaaagttgtttctggaattgatctcgcca

SEQ ID NO: 13660 - DNA, 3417 bp, Homo sapiens
  source 1..3417: mol_type = unassigned DNA
gccatttccagagaggaacaaccgtgtagactgctttcctgggagtcaagttaaaacttctctcctgtgaccttgtcacccggcagtggaaagttacccttggctgcagccacgacttccgcatactcttcagaacttgctctgcccttgagttttccagctttcctttaatgcactaaacctttaatattgtattctcctaaatgagacgtctcgcatttgagcaggtaacactcgggagagtcccgtattctcagagtaaaagttgtttctggaattgatctcgccaaaaaggacatctttggagccagcttctgctccattgctgttgaacttttttttggtcgtgacatcagaaaaataaccaagtgtgagtctgataatagcaatgatccgtatgtgaaactttcattgtacgtagcggatgagaatagagaacttgctttggtccagacaaaaacaattaaaaagacactgaacccaaaatggaatgaagaattttatttcagggtaaacccatctaatcacagactcctatttgaagtatttgacgaaaatagactgacacgagacgacttcctgggccaggtggacgtgccccttagtcaccttccgacagaagatccaaccatggagcgaccctatacatttaaggactttctcctcagaccaagaagtcataagtctcgagttaagggatttttgcgattgaaaatggcctatatgccaaaaaatggaggtcaagatgaagaaaacagtgaccagagggatgacatggagcatggatgggaagttgttgactcaaatgactcggcttctcagcaccaagaggaacttcctcctcctcctctgcctcccgggtgggaagaaaaagtggacaatttaggccgaacttactatgtcaaccacaacaaccggaccactcagtggcacagaccaagcctgatggacgtgtcctcggagtcggacaataacatcagacagatcaaccaggaggcagcacaccggcgcttccgctcccgcaggcacatcagcgaagacttggagcccgagccctcggagggcggggatgtccccgagccttgggagaccatttcagaggaagtgaatatcgctggagactctctcggtctggctctgcccccaccaccggcctccccaggatctcggaccagccctcaggagctgtcagaggaactaagcagaaggcttcagatcactccagactccaatggggaacagttcagctctttgattcaaagagaaccctcctcaaggttgaggtcatgcagtgtcaccgacgcagttgcagaacagggccatctaccaccgccatcagtggcctatgtacataccacgccgggtctgccttcaggctgggaagaaagaaaagatgctaaggggcgcacatactatgtcaatcataacaatcgaaccacaacttggactcgacctatcatgcagcttgcagaagatggtgcgtccggatcagccacaaacagtaacaaccatctaatcgagcctcagatccgccggcctcgtagcctcagctcgccaacagtaactttatctgccccgctggagggtgccaaggactcacccgtacgtcgggctgtgaaagacaccctttccaacccacagtccccacagccatcaccttacaactcccccaaaccacaacacaaagtcacacagagcttcttgccacccggctgggaaatgaggatagcgccaaacggccggcccttcttcattgatcataacacaaagactacaacctgggaagatccacgtttgaaatttccagtacatatgcggtcaaagacatctttaaaccccaatgaccttggcccccttcctcctggctgggaagaaagaattcacttggatggccgaacgttttatattgatcataatagcaaaattactcagtgggaagacccaagactgcagaacccagctattactggtccggctgtcccttactccagagaatttaagcagaaatatgactacttcaggaagaaattaaagaaacctgctgatatccccaataggtttgaaatgaaacttcacagaaataacatatttgaagagtcctatcggagaattatgtccgtgaaaagaccagatgtcctaaaagctagactgtggattgagtttgaatcagagaaaggtcttgactatgggggtgtggccagagaatggttcttcttactgtccaaagagatgttcaacccctactacggcctctttgagtactctgccacggacaactacacccttcagatcaaccctaattcaggcctctgtaatgaggatcatttgtcctacttcacttttattggaagagttgctggtctggccgtatttcatgggaagctcttagatggtttcttcattagaccattttacaagatgatgttgggaaagcagataaccctgaatgacatggaatctgtggatagtgaatattacaactctttgaaatggatcctggagaatgaccctactgagctggacctcatgttctgcatagacgaagaaaactttggacagacatatcaagtggatttgaagcccaatgggtcagaaataatggtcacaaatgaaaacaaaagggaatatatcgacttagtcatccagtggagatttgtgaacagggtccagaagcagatgaacgccttcttggagggattcacagaactacttcctattgatttgattaaaatttttgatgaaaatgagctggagttgctcatgtgcggcctcggtgatgtggatgtgaatgactggagacagcattctatttacaagaacggctactgcccaaaccaccccgtcattcagtggttctggaaggctgtgctactcatggacgccgaaaagcgtatccggttactgcagtttgtcacagggacatcgcgagtacctatgaatggatttgccgaactttatggttccaatggtcctcagctgtttacaatagagcaatggggcagtcctgagaaactgcccagagctcacacatgctttaatcgccttgacttacctccatatgaaacctttgaagatttacgagagaaacttctcatggccgtggaaaatgctcaaggatttgaaggggtggattaagcaccctgtgcctcgggggtggttgttcttcaagcaagttctgcttgcacttttgcatttgcctaacagacttttgcagaggcgatggcagagagcagctgcaggcatggtccctggagccgagccttcaccacgcactcgtccaagttcggatgcgggaacctggtcccagcttgagttcctgcctttcccaccacaaattatcaactggttgatgtgtacactaattacatttcaggaggacttaatgctatttatgttgtgcctctgcaggcaaagccc

SEQ ID NO: 13661 - DNA, 3543 bp, Homo sapiens
  source 1..3543: mol_type = unassigned DNA
gccatttccagagaggaacaaccgtgtagactgctttcctgggagtcaagttaaaacttctctcctgtgaccttgtcacccggcagtggaaagttacccttggctgcagccacgacttccgcatactcttcagaacttgctctgcccttgagttttccagctttcctttaatgcactaaacctttaatattgtattctcctaaatgagacgtctcgcatttgagcagggagagtcccgtattctcagagtaaaagttgtttctggaattgatctcgccaaaaaggacatctttggagccagtgatccgtatgtgaaactttcattgtacgtagcggatgagaatagagaacttgctttggtccagacaaaaacaattaaaaagacactgaacccaaaatggaatgaagaattttatttcagggtaaacccatctaatcacagactcctatttgaagtatttgacgaaaatagactgacacgagacgacttcctgggccaggtggacgtgccccttagtcaccttccgacagaagatccaaccatggagcgaccctatacatttaaggactttctcctcagaccaagaagtcataagtctcgagttaagggatttttgcgattgaaaatggcctatatgccaaaaaatggaggtcaagatgaagaaaacagtgaccagagggatgacatggagcatggatgggaagttgttgactcaaatgactcggcttctcagcaccaagaggaacttcctcctcctcctctgcctcccgggtgggaagaaaaagtggacaatttaggccgaacttactatgtcaaccacaacaaccggaccactcagtggcacagaccaagcctgatggacgtgtcctcggagtcggacaataacatcagacagatcaaccaggaggcagcacaccggcgcttccgctcccgcaggcacatcagcgaagacttggagcccgagccctcggagggcggggatgtccccgagccttgggagaccatttcagaggaagtgaatatcgctggagactctctcggtctggctctgcccccaccaccggcctccccaggatctcggaccagccctcaggagctgtcagaggaactaagcagaaggcttcagatcactccagactccaatggggaacagttcagctctttgattcaaagagaaccctcctcaaggttgaggtcatgcagtgtcaccgacgcagttgcagaacagggccatctaccaccgcccagtgccccagctgggagagcgcgttcatcaactgtcacgggtggtgaggaaccaacgccatcagtggcctatgtacataccacgccgggtctgccttcaggctgggaagaaagaaaagatgctaaggggcgcacatactatgtcaatcataacaatcgaaccacaacttggactcgacctatcatgcagcttgcagaagatggtgcgtccggatcagccacaaacagtaacaaccatctaatcgagcctcagatccgccggcctcgtagcctcagctcgccaacagtaactttatctgccccgctggagggtgccaaggactcacccgtacgtcgggctgtgaaagacaccctttccaacccacagtccccacagccatcaccttacaactcccccaaaccacaacacaaagtcacacagagcttcttgccacccggctgggaaatgaggatagcgccaaacggccggcccttcttcattgatcataacacaaagactacaacctgggaagatccacgtttgaaatttccagtacatatgcggtcaaagacatctttaaaccccaatgaccttggcccccttcctcctggctgggaagaaagaattcacttggatggccgaacgttttatattgatcataatagcaaaattactcagtgggaagacccaagactgcagaacccagctattactggtccggctgtcccttactccagagaatttaagcagaaatatgactacttcaggaagaaattaaagaaacctgctgatatccccaataggtttgaaatgaaacttcacagaaataacatatttgaagagtcctatcggagaattatgtccgtgaaaagaccagatgtcctaaaagctagactgtggattgagtttgaatcagagaaaggtcttgactatgggggtgtggccagagaatggttcttcttactgtccaaagagatgttcaacccctactacggcctctttgagtactctgccacggacaactacacccttcagatcaaccctaattcaggcctctgtaatgaggatcatttgtcctacttcacttttattggaagagttgctggtctggccgtatttcatgggaagctcttagatggtttcttcattagaccattttacaagatgatgttgggaaagcagataaccctgaatgacatggaatctgtggatagtgaatattacaactctttgaaatggatcctggagaatgaccctactgagctggacctcatgttctgcatagacgaagaaaactttggacagacatatcaagtggatttgaagcccaatgggtcagaaataatggtcacaaatgaaaacaaaagggaatatatcgacttagtcatccagtggagatttgtgaacagggtccagaagcagatgaacgccttcttggagggattcacagaactacttcctattgatttgattaaaatttttgatgaaaatgagctggagttgctcatgtgcggcctcggtgatgtggatgtgaatgactggagacagcattctatttacaagaacggctactgcccaaaccaccccgtcattcagtggttctggaaggctgtgctactcatggacgccgaaaagcgtatccggttactgcagtttgtcacagggacatcgcgagtacctatgaatggatttgccgaactttatggttccaatggtcctcagctgtttacaatagagcaatggggcagtcctgagaaactgcccagagctcacacatgctttaatcgccttgacttacctccatatgaaacctttgaagatttacgagagaaacttctcatggccgtggaaaatgctcaaggatttgaaggggtggattaagcaccctgtgcctcgggggtggttgttcttcaagcaagttctgcttgcacttttgcatttgcctaacagacttttgcagaggcgatggcagagagcagctgcaggcatggtccctggagccgagccttcaccacgcactcgtccaagttcggatgcgggaacctggtcccagcttgagttcctgcctttcccaccacaaattatcaactggttgatgtgtacactaattacatttcaggaggacttaatgctatttatgttgtgcctctgcaggcaaagcccttaataaatattttacatcctttctaatgacaatgaatggaattaatcactcaacaggtatagtattacgactcatgtttactttttaaaatgatttagaccgattttcagattttatttcgttatgattaaagatgtctcatgtacttggaaa

SEQ ID NO: 13662 - DNA, 3347 bp, Homo sapiens
  source 1..3347: mol_type = unassigned DNA
tttccagagaggaacaaccgtgtagactgctttcctgggagtcaagttaaaacttctctcctgtgaccttgtcacccggcagtggaaagttacccttggctgcagccacgacttccgcatactcttcagaacttgctctgcccttgagttttccagctttcctttaatgcactaaacctttaatattgtattctcctaaatgagacgtctcgcatttgagcagggagagtcccgtattctcagagtaaaagttgtttctggaattgatctcgccaaaaaggacatctttggagccagtgatccgtatgtgaaactttcattgtacgtagcggatgagaatagagaacttgctttggtccagacaaaaacaattaaaaagacactgaacccaaaatggaatgaagaattttatttcagggtaaacccatctaatcacagactcctatttgaagtatttgacgaaaatagactgacacgagacgacttcctgggccaggtggacgtgccccttagtcaccttccgacagaagatccaaccatggagcgaccctatacatttaaggactttctcctcagaccaagaagtcataagtctcgagttaagggatttttgcgattgaaaatggcctatatgccaaaaaatggaggtcaagatgaagaaaacagtgaccagagggatgacatggagcatggatgggaagttgttgactcaaatgactcggcttctcagcaccaagaggaacttcctcctcctcctctgcctcccgggtgggaagaaaaagtggacaatttaggccgaacttactatgtcaaccacaacaaccggaccactcagtggcacagaccaagcctgatggacgtgtcctcggagtcggacaataacatcagacagatcaaccaggaggcagcacaccggcgcttccgctcccgcaggcacatcagcgaagacttggagcccgagccctcggagggcggggatgtccccgagccttgggagaccatttcagaggaagtgaatatcgctggagactctctcggtctggctctgcccccaccaccggcctccccaggatctcggaccagccctcaggagctgtcagaggaactaagcagaaggcttcagatcactccagactccaatggggaacagttcagctctttgattcaaagagaaccctcctcaaggttgaggtcatgcagtgtcaccgacgcagttgcagaacagggccatctaccaccgccatcagtggcctatgtacataccacgccgggtctgccttcaggctgggaagaaagaaaagatgctaaggggcgcacatactatgtcaatcataacaatcgaaccacaacttggactcgacctatcatgcagcttgcagaagatggtgcgtccggatcagccacaaacagtaacaaccatctaatcgagcctcagatccgccggcctcgtagcctcagctcgccaacagtaactttatctgccccgctggagggtgccaaggactcacccgtacgtcgggctgtgaaagacaccctttccaacccacagtccccacagccatcaccttacaactcccccaaaccacaacacaaagtcacacagagcttcttgccacccggctgggaaatgaggatagcgccaaacggccggcccttcttcattgatcataacacaaagactacaacctgggaagatccacgtttgaaatttccagtacatatgcggtcaaagacatctttaaaccccaatgaccttggcccccttcctcctggctgggaagaaagaattcacttggatggccgaacgttttatattgatcataatagcaaaattactcagtgggaagacccaagactgcagaacccagctattactggtccggctgtcccttactccagagaatttaagcagaaatatgactacttcaggaagaaattaaagaaacctgctgatatccccaataggtttgaaatgaaacttcacagaaataacatatttgaagagtcctatcggagaattatgtccgtgaaaagaccagatgtcctaaaagctagactgtggattgagtttgaatcagagaaaggtcttgactatgggggtgtggccagagaatggttcttcttactgtccaaagagatgttcaacccctactacggcctctttgagtactctgccacggacaactacacccttcagatcaaccctaattcaggcctctgtaatgaggatcatttgtcctacttcacttttattggaagagttgctggtctggccgtatttcatgggaagctcttagatggtttcttcattagaccattttacaagatgatgttgggaaagcagataaccctgaatgacatggaatctgtggatagtgaatattacaactctttgaaatggatcctggagaatgaccctactgagctggacctcatgttctgcatagacgaagaaaactttggacagacatatcaagtggatttgaagcccaatgggtcagaaataatggtcacaaatgaaaacaaaagggaatatatcgacttagtcatccagtggagatttgtgaacagggtccagaagcagatgaacgccttcttggagggattcacagaactacttcctattgatttgattaaaatttttgatgaaaatgagctggagttgctcatgtgcggcctcggtgatgtggatgtgaatgactggagacagcattctatttacaagaacggctactgcccaaaccaccccgtcattcagtggttctggaaggctgtgctactcatggacgccgaaaagcgtatccggttactgcagtttgtcacagggacatcgcgagtacctatgaatggatttgccgaactttatggttccaatggtcctcagctgtttacaatagagcaatggggcagtcctgagaaactgcccagagctcacacatgctttaatcgccttgacttacctccatatgaaacctttgaagatttacgagagaaacttctcatggccgtggaaaatgctcaaggatttgaaggggtggattaagcaccctgtgcctcgggggtggttgttcttcaagcaagttctgcttgcacttttgcatttgcctaacagacttttgcagaggcgatggcagagagcagctgcaggcatggtccctggagccgagccttcaccacgcactcgtccaagttcggatgcgggaacctggtcccagcttgagttcctgcctttcccaccacaaattatcaactggttgatgtgtacactaattacatttcaggaggacttaatgctatttatgttgtgcctctgcaggcaaagcccttaataaatattttacatcctt

SEQ ID NO: 13663 - DNA, 4978 bp, Homo sapiens
  source 1..4978: mol_type = unassigned DNA
acttccgtgttccccacatttgaatttgctcccgattcgagagaggcaggcatccgcggcagcagcttccaacccagacaggcttaagccgcgcgagggtgcccgggtgggtggctgcgcagggccctacctgggcgggagcggctgcagagccctgtccacgcggtgcctccccagcacggcacctcccactccaggctgttggttacctggccgggagctggcggagaccaggatttctcctcgccgccgttgctgttgttaggggaaacagaccatctgcatctagacctgcctctctctccgctccccacttcagacgagctcttcctgcctggaatctgtgatccgtatgtgaaactttcattgtacgtagcggatgagaatagagaacttgctttggtccagacaaaaacaattaaaaagacactgaacccaaaatggaatgaagaattttatttcagggtaaacccatctaatcacagactcctatttgaagtatttgacgaaaatagactgacacgagacgacttcctgggccaggtggacgtgccccttagtcaccttccgacagaagatccaaccatggagcgaccctatacatttaaggactttctcctcagaccaagaagtcataagtctcgagttaagggatttttgcgattgaaaatggcctatatgccaaaaaatggaggtcaagatgaagaaaacagtgaccagagggatgacatggagcatggatgggaagttgttgactcaaatgactcggcttctcagcaccaagaggaacttcctcctcctcctctgcctcccgggtgggaagaaaaagtggacaatttaggccgaacttactatgtcaaccacaacaaccggaccactcagtggcacagaccaagcctgatggacgtgtcctcggagtcggacaataacatcagacagatcaaccaggaggcagcacaccggcgcttccgctcccgcaggcacatcagcgaagacttggagcccgagccctcggagggcggggatgtccccgagccttgggagaccatttcagaggaagtgaatatcgctggagactctctcggtctggctctgcccccaccaccggcctccccaggatctcggaccagccctcaggagctgtcagaggaactaagcagaaggcttcagatcactccagactccaatggggaacagttcagctctttgattcaaagagaaccctcctcaaggttgaggtcatgcagtgtcaccgacgcagttgcagaacagggccatctaccaccgccatcagtggcctatgtacataccacgccgggtctgccttcaggctgggaagaaagaaaagatgctaaggggcgcacatactatgtcaatcataacaatcgaaccacaacttggactcgacctatcatgcagcttgcagaagatggtgcgtccggatcagccacaaacagtaacaaccatctaatcgagcctcagatccgccggcctcgtagcctcagctcgccaacagtaactttatctgccccgctggagggtgccaaggactcacccgtacgtcgggctgtgaaagacaccctttccaacccacagtccccacagccatcaccttacaactcccccaaaccacaacacaaagtcacacagagcttcttgccacccggctgggaaatgaggatagcgccaaacggccggcccttcttcattgatcataacacaaagactacaacctgggaagatccacgtttgaaatttccagtacatatgcggtcaaagacatctttaaaccccaatgaccttggcccccttcctcctggctgggaagaaagaattcacttggatggccgaacgttttatattgatcataatagcaaaattactcagtgggaagacccaagactgcagaacccagctattactggtccggctgtcccttactccagagaatttaagcagaaatatgactacttcaggaagaaattaaagaaacctgctgatatccccaataggtttgaaatgaaacttcacagaaataacatatttgaagagtcctatcggagaattatgtccgtgaaaagaccagatgtcctaaaagctagactgtggattgagtttgaatcagagaaaggtcttgactatgggggtgtggccagagaatggttcttcttactgtccaaagagatgttcaacccctactacggcctctttgagtactctgccacggacaactacacccttcagatcaaccctaattcaggcctctgtaatgaggatcatttgtcctacttcacttttattggaagagttgctggtctggccgtatttcatgggaagctcttagatggtttcttcattagaccattttacaagatgatgttgggaaagcagataaccctgaatgacatggaatctgtggatagtgaatattacaactctttgaaatggatcctggagaatgaccctactgagctggacctcatgttctgcatagacgaagaaaactttggacagacatatcaagtggatttgaagcccaatgggtcagaaataatggtcacaaatgaaaacaaaagggaatatatcgacttagtcatccagtggagatttgtgaacagggtccagaagcagatgaacgccttcttggagggattcacagaactacttcctattgatttgattaaaatttttgatgaaaatgagctggagttgctcatgtgcggcctcggtgatgtggatgtgaatgactggagacagcattctatttacaagaacggctactgcccaaaccaccccgtcattcagtggttctggaaggctgtgctactcatggacgccgaaaagcgtatccggttactgcagtttgtcacagggacatcgcgagtacctatgaatggatttgccgaactttatggttccaatggtcctcagctgtttacaatagagcaatggggcagtcctgagaaactgcccagagctcacacatgctttaatcgccttgacttacctccatatgaaacctttgaagatttacgagagaaacttctcatggccgtggaaaatgctcaaggatttgaaggggtggattaagcaccctgtgcctcgggggtggttgttcttcaagcaagttctgcttgcacttttgcatttgcctaacagacttttgcagaggcgatggcagagagcagctgcaggcatggtccctggagccgagccttcaccacgcactcgtccaagttcggatgcgggaacctggtcccagcttgagttcctgcctttcccaccacaaattatcaactggttgatgtgtacactaattacatttcaggaggacttaatgctatttatgttgtgcctctgcaggcaaagcccttaataaatattttacatcctttctaatgacaatgaatggaattaatcactcaacaggtatagtattacgactcatgtttactttttaaaatgatttagaccgattttcagattttatttcgttatgattaaagatgtctcatgtacttggaaaagtgagcattttttttttttttgtatttcactttcataccaggcttaatgtcaatgacatttttatttttgaagtactctgacacctccaccctctactttattagaattggaaggcaaatttttgtccaaaaacctacagacaagtactttgagagaatttccaatataatattagacataatgataattttttccatactcagaatgaaaaactggatattacgtttttgttttggggtttttttgtacaaatttagctaatagctacaggctgagagaattgtaacatagcatgacaaattttgtgttgacttgaaaggaatcacaccattattccttagaagtaattacatgtgttctaacacatttgagacagggttggactcccatttctcatccgagaaattacttaacccttcctggcgctgtacagtcatcttttattctatttcctctttgctgtttgtagtagagacattttgaatgaaacttggcactgcttgattcaaaactgtggaaaccagatctgtttagtctcctgtttgtatgcgtttgctaatggtagctaaataaccagtttttgttgtaaatgcaccaattctgaaggcactttatgtactacatggaggtcatatctggttttgtttttatttttttatcatgaacattaaatgtgatgatgatttcttttccctgcacacatctttccggtgcaatatctatcaattgtgaatctggctgctggtgtataaaaacctggatgtaaagctgagcctacagacctgtcctcaccaactgttttgtgatttctactcaactacaaagatttatttaatgtactcttaatctaactgagttttgttaccaatgacctgttgcatgcttcaataccgtgtactgcctgagttgtgcctcttgtgtgctagattaaaagtgagacagagacttgacttgatcctctgagctcaagctattgagctggtagtggcagaggactgagggtacctgcacagtttgattcttttccacgtgtaagtctccattgcagaattgtcgtgctttgagaaaacacctgaggcagtgtgggagttgaacgaccctgctgtcctttttaacctgtgttgtcctagaccctgtcggggcagtcaggggacactagagatttgatctcatgcgagtcatcaataggacaaaaaagttgtggtttggggaggtctgtttgttacataaaaaggacctttcggtgtaagaaattgccgtttttaccctgccctggctggcatgtgagaagccatggaaggttgtggttgtaaatgagttgtctaaaggggtgcagaggcctgaggtttctaaaagaaggtagatttctacagagctgagtgttggttcctttttcttattggttgaaaattacctggtagtgatcagaaaacttagatgctatgtaact

SEQ ID NO: 13664 - DNA, 505 bp, Homo sapiens
  source 1..505: mol_type = unassigned DNA
aggggaaacagaccatctgcatctagacctgcctctctctccgctccccacttcagacgagctcttcctgcctggaatctgcttctgctccattgctgttgaacttttttttggtcgtgacatcagaaaaataaccaagtgtgagtctgataatagcaatgatccgtatgtgaaactttcattgtacgtagcggatgagaatagagaacttgctttggtccagacaaaaacaattaaaaagacactgaacccaaaatggaatgaagaattttatttcagggtaaacccatctaatcacagactcctatttgaagtatttgacgaaaatagactgacacgagacgacttcctgggccaggtggacgtgccccttagtcaccttccgacagaagatccaaccatggagcgaccctatacatttaaggactttctcctcagaccaagaagtcataagtctcgagttaagggatttttgcgattgaaaatggcctatatgccaaaaaat

SEQ ID NO: 13665 - DNA, 579 bp, Homo sapiens
  source 1..579: mol_type = unassigned DNA
accgatgaggtggaaccaaagctgttcagcagaagagagcaaccacagagcagcctgttgggtggagggcttgagggttcctaaaatccgaggactttctgtgatccgtatgtgaaactttcattgtacgtagcggatgagaatagagaacttgctttggtccagacaaaaacaattaaaaagacactgaacccaaaatggaatgaagaattttatttcagggtaaacccatctaatcacagactcctatttgaagtatttgacgaaaatagactgacacgagacgacttcctgggccaggtggacgtgccccttagtcaccttccgacagaagatccaaccatggagcgaccctatacatttaaggactttctcctcagaccaagaagtcataagtctcgagttaagggatttttgcgattgaaaatggcctatatgccaaaaaatggaggtcaagatgaagaaaacagtgaccagagggatgacatggagcatggatgggaagttgttgactcaaatgactcggcttctcagcaccaagaggaacttcctcctcctcctctgcctcccgggtgggaa

SEQ ID NO: 13666 - DNA, 3338 bp, Homo sapiens
  source 1..3338: mol_type = unassigned DNA
atcagtataagtagcgagctgggcgcattccttctcagttgtgttaaaacttgctggtattcccccggtatcagcagaggtgtgtacgggcactgctttaaaactgggaaggaggaagacgaggccagggagccggagggtcaccaaggtagatttccagcagcgctagtccagctgaacactttccagccttgtttttcagcagctttgaggaaaagtatagtgatccgtatgtgaaactttcattgtacgtagcggatgagaatagagaacttgctttggtccagacaaaaacaattaaaaagacactgaacccaaaatggaatgaagaattttatttcagggtaaacccatctaatcacagactcctatttgaagtatttgacgaaaatagactgacacgagacgacttcctgggccaggtggacgtgccccttagtcaccttccgacagaagatccaaccatggagcgaccctatacatttaaggactttctcctcagaccaagaagtcataagtctcgagttaagggatttttgcgattgaaaatggcctatatgccaaaaaatggaggtcaagatgaagaaaacagtgaccagagggatgacatggagcatggatgggaagttgttgactcaaatgactcggcttctcagcaccaagaggaacttcctcctcctcctctgcctcccgggtgggaagaaaaagtggacaatttaggccgaacttactatgtcaaccacaacaaccggaccactcagtggcacagaccaagcctgatggacgtgtcctcggagtcggacaataacatcagacagatcaaccaggaggcagcacaccggcgcttccgctcccgcaggcacatcagcgaagacttggagcccgagccctcggagggcggggatgtccccgagccttgggagaccatttcagaggaagtgaatatcgctggagactctctcggtctggctctgcccccaccaccggcctccccaggatctcggaccagccctcaggagctgtcagaggaactaagcagaaggcttcagatcactccagactccaatggggaacagttcagctctttgattcaaagagaaccctcctcaaggttgaggtcatgcagtgtcaccgacgcagttgcagaacagggccatctaccaccgcccagtgccccagctgggagagcgcgttcatcaactgtcacgggtggtgaggaaccaacgccatcagtggcctatgtacataccacgccgggtctgccttcaggctgggaagaaagaaaagatgctaaggggcgcacatactatgtcaatcataacaatcgaaccacaacttggactcgacctatcatgcagcttgcagaagatggtgcgtccggatcagccacaaacagtaacaaccatctaatcgagcctcagatccgccggcctcgtagcctcagctcgccaacagtaactttatctgccccgctggagggtgccaaggactcacccgtacgtcgggctgtgaaagacaccctttccaacccacagtccccacagccatcaccttacaactcccccaaaccacaacacaaagtcacacagagcttcttgccacccggctgggaaatgaggatagcgccaaacggccggcccttcttcattgatcataacacaaagactacaacctgggaagatccacgtttgaaatttccagtacatatgcggtcaaagacatctttaaaccccaatgaccttggcccccttcctcctggctgggaagaaagaattcacttggatggccgaacgttttatattgatcataatagcaaaattactcagtgggaagacccaagactgcagaacccagctattactggtccggctgtcccttactccagagaatttaagcagaaatatgactacttcaggaagaaattaaagaaacctgctgatatccccaataggtttgaaatgaaacttcacagaaataacatatttgaagagtcctatcggagaattatgtccgtgaaaagaccagatgtcctaaaagctagactgtggattgagtttgaatcagagaaaggtcttgactatgggggtgtggccagagaatggttcttcttactgtccaaagagatgttcaacccctactacggcctctttgagtactctgccacggacaactacacccttcagatcaaccctaattcaggcctctgtaatgaggatcatttgtcctacttcacttttattggaagagttgctggtctggccgtatttcatgggaagctcttagatggtttcttcattagaccattttacaagatgatgttgggaaagcagataaccctgaatgacatggaatctgtggatagtgaatattacaactctttgaaatggatcctggagaatgaccctactgagctggacctcatgttctgcatagacgaagaaaactttggacagacatatcaagtggatttgaagcccaatgggtcagaaataatggtcacaaatgaaaacaaaagggaatatatcgacttagtcatccagtggagatttgtgaacagggtccagaagcagatgaacgccttcttggagggattcacagaactacttcctattgatttgattaaaatttttgatgaaaatgagctggagttgctcatgtgcggcctcggtgatgtggatgtgaatgactggagacagcattctatttacaagaacggctactgcccaaaccaccccgtcattcagtggttctggaaggctgtgctactcatggacgccgaaaagcgtatccggttactgcagtttgtcacagggacatcgcgagtacctatgaatggatttgccgaactttatggttccaatggtcctcagctgtttacaatagagcaatggggcagtcctgagaaactgcccagagctcacacatgctttaatcgccttgacttacctccatatgaaacctttgaagatttacgagagaaacttctcatggccgtggaaaatgctcaaggatttgaaggggtggattaagcaccctgtgcctcgggggtggttgttcttcaagcaagttctgcttgcacttttgcatttgcctaacagacttttgcagaggcgatggcagagagcagctgcaggcatggtccctggagccgagccttcaccacgcactcgtccaagttcggatgcgggaacctggtcccagcttgagttcctgcctttcccaccacaaattatcaactggttgatgtgtacactaattacatttcaggaggacttaatgctatttatgttgtgcctctgcaggcaaagcccttaataaatattttacatcctttctaa

SEQ ID NO: 13667 - DNA, 830 bp, Homo sapiens
  source 1..830: mol_type = unassigned DNA
ctcagttgtgttaaaacttgctggtattcccccggtatcagcagaggtgtgtacgggcactgctttaaaactgggaaggaggaagacgaggccagggagccggagggtcaccaaggtagatttccagcagcgctagtccagctgaacactttccagccttgtttttcagcagctttgaggaaaagtatagtgatccgtatgtgaaactttcattgtacgtagcggatgagaatagagaacttgctttggtccagacaaaaacaattaaaaagacactgaacccaaaatggaatgaagaattttatttcagggtaaacccatctaatcacagactcctatttgaagtatttgacgaaaatagactgacagaagatccaaccatggagcgaccctatacatttaaggactttctcctcagaccaagaagtcataagtctcgagttaagggatttttgcgattgaaaatggcctatatgccaaaaaatggaggtcaagatgaagaaaacagtgaccagagggatgacatggagcatggatgggaagttgttgactcaaatgactcggcttctcagcaccaagaggaacttcctcctcctcctctgcctcccgggtgggaagaaaaagtggacaatttaggccgaacttactatgtcaaccacaacaaccggaccactcagtggcacagaccaagcctgatggacgtgtcctcggagtcggacaataacatcagacagatcaaccaggaggcagcacaccggcgcttccgctcccgcaggcacatcagcgaagacttggagcccgagccctcggagggcggggatgtccccgag

SEQ ID NO: 13668 - DNA, 553 bp, Homo sapiens
  source 1..553: mol_type = unassigned DNA
agttgtgttaaaacttgctggtattcccccggtatcagcagaggtgtgtacgggcactgctttaaaactgggaaggaggaagacgaggccagggagccggagggtcaccaaggtagatttccagcagcgctagtccagctgaacactttccagccttgtttttcagcagctttgaggaaaagtatagcttctgctccattgctgttgaacttttttttggtcgtgacatcagaaaaataaccaagtgtgagtctgataatagcaatgatccgtatgtgaaactttcattgtacgtagcggatgagaatagagaacttgctttggtccagacaaaaacaattaaaaagacactgaacccaaaatggaatgaagaattttatttcagggtaaacccatctaatcacagactcctatttgaagtatttgacgaaaatagactgacacgagacgacttcctgggccaggtggacgtgccccttagtcaccttccgacagaagatccaaccatggagcgaccctatacatttaaggactttctcctcagaccaagaag

SEQ ID NO: 13669 - DNA, 381 bp, Homo sapiens
  source 1..381: mol_type = unassigned DNA
tttaaaactgggaaggaggaagacgaggccagggagccggagggtcaccaaggtagatttccagcagcgctagtccagctgaacactttccagccttgtttttcagcagctttgaggaaaagtatagcttctgctccattgctgttgaacttttttttggtcgtgacatcagaaaaataaccaagttgatccgtatgtgaaactttcattgtacgtagcggatgagaatagagaacttgctttggtccagacaaaaacaattaaaaagacactgaacccaaaatggaatgaagaattttatttcagggtaaacccatctaatcacagactcctatttgaagtatttgacgaaaatagactgacacgagacgacttcctggg

SEQ ID NO: 13670 - DNA, 628 bp, Homo sapiens
  source 1..628: mol_type = unassigned DNA
acttggcattgggactggcattaaaaatctgttttgcaaacaggagccagtcttttgattagcagggaggatgcctgcgagggacggaggccattgttccctgtgttaggcgttgttgctggttcagtttctaggcgagtgggggctgtctagaaggctcaccaggaaggcagctgggaaacttggttgcctgctggatgtggagccaggaccaaagccggcgactggggctattgcaatggatttccttccaaagggaggtcctccttctccctccctttccacggtcgagggagtagctctgtagctgggtttgccctccttctcctgctgcccgcctcctgacactgaacccaaaatggaatgaagaattttatttcagggtaaacccatctaatcacagactcctatttgaagtatttgacgaaaatagactgacacgagacgacttcctgggccaggtggacgtgccccttagtcaccttccgacagaagatccaaccatggagcgaccctatacatttaaggactttctcctcagaccaagaagtcataagtctcgagttaagggatttttgcgattgaaaatggcctatatgccaaaaaatggaggtcaagatgaagaaaa

SEQ ID NO: 13671 - DNA, 4402 bp, Homo sapiens
  source 1..4402: mol_type = unassigned DNA
ttttgctcttatccaatcatgcctggaatgccgcttgccacttgggttatttctgctatctgtcgctcccggtgccgcagtgctaacagtttggcagatgggacactttttcttggaatttgtgtctttggtttgtgacttctggcagtgtcgggcctgttgttgccgcttgccctagccctcctggcccccctggtcaccatggcccatcggcttcggtttcattttggctctggtcgcagcaacacagcccccgaatcagacatcctagaccaggagagagaagacgacttcttcatggcattccacaccctaccgcggagaagcagcccgcaccccttcgcccagaacggaggggaggacggcggcggaggcctgcagggaggcgtgggtgcgcttaagcggagctcgtccatgttcatcccgcagctcttgaccagcatcgacgcccgccccacgtgcagctcctccgtgcagatctccctgcagcgcaaggccacggacggggccacggacgggtgcgggccgcccgagggcgccgacgatgggcctccatgcgcaacgcccgaccccagggaccaggcctccgccactgccaccacgagggcctcgccccagagtggctcccgggagccctcgccgagggacacccccgggagctcccctccgagggcagcccgggacccagggctccaggtcaacggcacgtgcggccgccgcgtgcggtgctccggccccgtggactgcgcggaggaggctgccccgggcctgcgcatccagcaccgcgcctccagcgccgacgtgcgccaggtgaggctgctgcccctgggccccgatggccagggcggcccggccgcggcagagcccaggcgctggtccctgcagcacgttccagatgcttctggaagctctgggaagcggtgttttgtcttccagttgcagcagccccaacaaggcgcttcggggccaggcagcgacctcaactttggcttcacgggcacaaagggggacaggttggtgaggtatcctcgcattcggctggagaggagcacctcgtaccccacgcagccccgaagcgagcgagggagccccacggaagatcggggagccctggaggcatcgcctcgagctggcaggatggctcctgaaatccgcaggacgaactccgcggagaggactccgcagggccaggggtgcacatttaagatcaggcaggatcagaacgcggggcagcagcattttagaattcttgtaacccgggggccggaagaagctccccagaatcccgaggagaaaagcgccaaaagccctgtttccacgggagctgacaccacgacacgagacgacttcctgggccaggtggacgtgccccttagtcaccttccgacagaagatccaaccatggagcgaccctatacatttaaggactttctcctcagaccaagaagtcataagtctcgagttaagggatttttgcgattgaaaatggcctatatgccaaaaaatggaggtcaagatgaagaaaacagtgaccagagggatgacatggagcatggatgggaagttgttgactcaaatgactcggcttctcagcaccaagaggaacttcctcctcctcctctgcctcccgggtgggaagaaaaagtggacaatttaggccgaacttactatgtcaaccacaacaaccggaccactcagtggcacagaccaagcctgatggacgtgtcctcggagtcggacaataacatcagacagatcaaccaggaggcagcacaccggcgcttccgctcccgcaggcacatcagcgaagacttggagcccgagccctcggagggcggggatgtccccgagccttgggagaccatttcagaggaagtgaatatcgctggagactctctcggtctggctctgcccccaccaccggcctccccaggatctcggaccagccctcaggagctgtcagaggaactaagcagaaggcttcagatcactccagactccaatggggaacagttcagctctttgattcaaagagaaccctcctcaaggttgaggtcatgcagtgtcaccgacgcagttgcagaacagggccatctaccaccgcccagtgccccagctgggagagcgcgttcatcaactgtcacgggtggtgaggaaccaacgccatcagtggcctatgtacataccacgccgggtctgccttcaggctgggaagaaagaaaagatgctaaggggcgcacatactatgtcaatcataacaatcgaaccacaacttggactcgacctatcatgcagcttgcagaagatggtgcgtccggatcagccacaaacagtaacaaccatctaatcgagcctcagatccgccggcctcgtagcctcagctcgccaacagtaactttatctgccccgctggagggtgccaaggactcacccgtacgtcgggctgtgaaagacaccctttccaacccacagtccccacagccatcaccttacaactcccccaaaccacaacacaaagtcacacagagcttcttgccacccggctgggaaatgaggatagcgccaaacggccggcccttcttcattgatcataacacaaagactacaacctgggaagatccacgtttgaaatttccagtacatatgcggtcaaagacatctttaaaccccaatgaccttggcccccttcctcctggctgggaagaaagaattcacttggatggccgaacgttttatattgatcataatagcaaaattactcagtgggaagacccaagactgcagaacccagctattactggtccggctgtcccttactccagagaatttaagcagaaatatgactacttcaggaagaaattaaagaaacctgctgatatccccaataggtttgaaatgaaacttcacagaaataacatatttgaagagtcctatcggagaattatgtccgtgaaaagaccagatgtcctaaaagctagactgtggattgagtttgaatcagagaaaggtcttgactatgggggtgtggccagagaatggttcttcttactgtccaaagagatgttcaacccctactacggcctctttgagtactctgccacggacaactacacccttcagatcaaccctaattcaggcctctgtaatgaggatcatttgtcctacttcacttttattggaagagttgctggtctggccgtatttcatgggaagctcttagatggtttcttcattagaccattttacaagatgatgttgggaaagcagataaccctgaatgacatggaatctgtggatagtgaatattacaactctttgaaatggatcctggagaatgaccctactgagctggacctcatgttctgcatagacgaagaaaactttggacagacatatcaagtggatttgaagcccaatgggtcagaaataatggtcacaaatgaaaacaaaagggaatatatcgacttagtcatccagtggagatttgtgaacagggtccagaagcagatgaacgccttcttggagggattcacagaactacttcctattgatttgattaaaatttttgatgaaaatgagctggagttgctcatgtgcggcctcggtgatgtggatgtgaatgactggagacagcattctatttacaagaacggctactgcccaaaccaccccgtcattcagtggttctggaaggctgtgctactcatggacgccgaaaagcgtatccggttactgcagtttgtcacagggacatcgcgagtacctatgaatggatttgccgaactttatggttccaatggtcctcagctgtttacaatagagcaatggggcagtcctgagaaactgcccagagctcacacatgctttaatcgccttgacttacctccatatgaaacctttgaagatttacgagagaaacttctcatggccgtggaaaatgctcaaggatttgaaggggtggattaagcaccctgtgcctcgggggtggttgttcttcaagcaagttctgcttgcacttttgcatttgcctaacagacttttgcagaggcgatggcagagagcagctgcaggcatggtccctggagccgagccttcaccacgcactcgtccaagttcggatgcgggaacctggtcccagcttgagttcctgcctttcccaccacaaattatcaactggttgatgtgtacactaattacatttcaggaggacttaatgctatttatgttgtgcctctgcaggcaaagcccttaataaatattttacatcctttctaatgacaatgaatggaattaatcactcaacaggtatagtattacgactcatgtttactttttaaaatgatttagaccgattttcagattttatttcgttatgattaaagatgtctcatgtacttggaaa

SEQ ID NO: 13672 - DNA, 551 bp, Homo sapiens
  source 1..551: mol_type = unassigned DNA
ttattctcaaggccttctgctgactgctgctcttgacacgagacgacttcctgggccaggtggacgtgccccttagtcaccttccgacagaagatccaaccatggagcgaccctatacatttaaggactttctcctcagaccaagaagtcataagtctcgagttaagggatttttgcgattgaaaatggcctatatgccaaaaaatggaggtcaagatgaagaaaacagtgaccagagggatgacatggagcatggatgggaagttgttgactcaaatgactcggcttctcagcaccaagaggaacttcctcctcctcctctgcctcccgggtgggaagaaaaagtggacaatttaggccgaacttactatgtcaaccacaacaaccggaccactcagtggcacagaccaagcctgatggacgtgtcctcggagtcggacaataacatcagacagatcaaccaggaggcagcacaccggcgcttccgctcccgcaggcacatcagcgaagacttggagcccgagccctcggagggcggggatgtccccgag

SEQ ID NO: 13673 - DNA, 710 bp, Homo sapiens
  source 1..710: mol_type = unassigned DNA
gaaaacagtgaccagagggatgacatggagcatggatgggaagttgttgactcaaatgactcggcttctcagcaccaagaggaacttcctcctcctcctctgcctcccgggtgggaagaaaaagtggacaatttaggccgaacttactatgtcaaccacaacaaccggaccactcagtggcacagaccaagcctgatggacgtgtcctcggagtcggacaataacatcagacagatcaaccaggaggcagcacaccggcgcttccgctcccgcaggcacatcagcgaagacttggagcccgagccctcggagggcggggatgtccccgagccttgggagaccatttcagaggaagtgaatatcgctggagactctctcggtctggctctgcccccaccaccggcctccccaggatctcggaccagccctcaggagctgtcagaggaactaagcagaaggcttcagatcactccagactccaatggggaacagttcagctctttgattcaaagagaaccctcctcaaggttgaggtcatgcagtgtcaccgacgcagttgcagaacagggccatctaccaccggtaacccatgctaatttccagtcatcagttgactttttgggctttcatttacaatcatctgggctgctgcaaaaagagtttttcctgtgtaaatttatttacaatataaatgagatgtttttaaattt

SEQ ID NO: 13674 - DNA, 1984 bp, Homo sapiens
  source 1..1984: mol_type = unassigned DNA
agggatgacatggagcatggatgggaagttgttgactcaaatgactcggcttctcagcaccaagaggaacttcctcctcctcctctgcctcccgggtgggaagaaaaagtggacaatttaggccgaacttactatgtcaaccacaacaaccggaccactcagtggcacagaccaagcctgatggacgtgtcctcggagtcggacaataacatcagacagatcaaccaggaggcagcacaccggcgcttccgctcccgcaggcacatcagcgaagacttggagcccgagccctcggagggcggggatgtccccgagccttgggagaccatttcagaggaagtgaatatcgctggagactctctcggtctggctctgcccccaccaccggcctccccaggatctcggaccagccctcaggagctgtcagaggaactaagcagaaggcttcagatcactccagactccaatggggaacagttcagctctttgattcaaagagaaccctcctcaaggttgaggtcatgcagtgtcaccgacgcagttgcagaacagggccatctaccaccggaagatccacgtttgaaatttccagtacatatgcggtcaaagacatctttaaaccccaatgaccttggcccccttcctcctggctgggaagaaagaattcacttggatggccgaacgttttatattgatcataatagcaaaattactcagtgggaagacccaagactgcagaacccagctattactggtccggctgtcccttactccagagaatttaagcagaaatatgactacttcaggaagaaattaaagaaacctgctgatatccccaataggtttgaaatgaaacttcacagaaataacatatttgaagagtcctatcggagaattatgtccgtgaaaagaccagatgtcctaaaagctagactgtggattgagtttgaatcagagaaaggtcttgactatgggggtgtggccagagaatggttcttcttactgtccaaagagatgttcaacccctactacggcctctttgagtactctgccacggacaactacacccttcagatcaaccctaattcaggcctctgtaatgaggatcatttgtcctacttcacttttattggaagagttgctggtctggccgtatttcatgggaagctcttagatggtttcttcattagaccattttacaagatgatgttgggaaagcagataaccctgaatgacatggaatctgtggatagtgaatattacaactctttgaaatggatcctggagaatgaccctactgagctggacctcatgttctgcatagacgaagaaaactttggacagacatatcaagtggatttgaagcccaatgggtcagaaataatggtcacaaatgaaaacaaaagggaatatatcgacttagtcatccagtggagatttgtgaacagggtccagaagcagatgaacgccttcttggagggattcacagaactacttcctattgatttgattaaaatttttgatgaaaatgagctggagttgctcatgtgcggcctcggtgatgtggatgtgaatgactggagacagcattctatttacaagaacggctactgcccaaaccaccccgtcattcagtggttctggaaggctgtgctactcatggacgccgaaaagcgtatccggttactgcagtttgtcacagggacatcgcgagtacctatgaatggatttgccgaactttatggttccaatggtcctcagctgtttacaatagagcaatggggcagtcctgagaaactgcccagagctcacacatgctttaatcgccttgacttacctccatatgaaacctttgaagatttacgagagaaacttctcatggccgtggaaaatgctcaaggatttgaaggggtggattaagcaccctgtgcctcgggggtggttgttcttcaagcaagttctgcttgcacttttgcatttgcct

SEQ ID NO: 13675 - DNA, 754 bp, Homo sapiens
  source 1..754: mol_type = unassigned DNA
ggaactaagcagaaggcttcagatcactccagactccaatggggaacagttcagctctttgattcaaagagaaccctcctcaaggttgaggtcatgcagtgtcaccgacgcagttgcagaacagggccatctaccaccgcccagtgccccagctgggagagcgcgttcatcaactgtcacgggtggtgaggaaccaacggtaatgatccactttatcagacatcaatagcaagaggccgtgaggcagttttaatatttcgtgtagtggtgaatatacgctgtttttaaaaataagattagctcctttgtgctacagagctgcacacgtttcttattttaagcttctcatttggggattgtttaaaggtactgggtaaaatagaatgatttttttagtcccacataattttattaggaatactatcaggctttggttaagtgcatttaacttgaccatttagaagatatttttgacttttagtgtttgtactcctgataagtttttccatttcattagaatgcttggttaaagtaatttggttggaagatcatcaaagaagccacaggaattgcatgagactgtgtgtgtgattcctggatgtgcccagggcccttctcttttctgtatctcccctaccacatttttcacagggggttagacttttcttgtccccagaatgcaccatgaccctttctctgccaccaggggctctcctcacacaatgaacaagtttccgtaattccaagggaacat

SEQ ID NO: 13676 - DNA, 862 bp, Homo sapiens
  source 1..862: mol_type = unassigned DNA
ctgggtgtaccttactttattaaactgatcagaaaacaaatgcaaggtattaaataataatgatttcttgcacaaacagccatcagtggcctatgtacataccacgccgggtctgccttcaggctgggaagaaagaaaagatgctaaggggcgcacatactatgtcaatcataacaatcgaaccacaacttggactcgacctatcatgcagcttgcagaagatggtgcgtccggatcagccacaaacagtaacaaccatctaatcgagcctcagatccgccggcctcgtagcctcagctcgccaacagtaactttatctgccccgctggagggtgccaaggactcacccgtacgtcgggctgtgaaagacaccctttccaacccacagtccccacagccatcaccttacaactcccccaaaccacaacacaaagtcacacagagcttcttgccacccggctgggaaatgaggatagcgccaaacggccggcccttcttcattgatcataacacaaagactacaacctgggaagatccacgtttgaaatttccagtacatatgcggtcaaagacatctttaaaccccaatgaccttggcccccttcctcctggctgggaagaaagaattcacttggatggccgaacgttttatattgatcataatagcaaaattactcagtgggaagacccaagactgcagaacccagctattactggtccggctgtcccttactccagagaatttaagcagaaatatgactacttcaggaagaaattaaagaaacctgctgatatccccaataggtttgaaatgaaacttcacagaaataacatatttgaagagtcctatcggagaattatg

SEQ ID NO: 13677 - DNA, 487 bp, Homo sapiens
  source 1..487: mol_type = unassigned DNA
cacttctgcccagcagcactgccagtgacagtctgagagtggtaatatctcttagtctttgactcaaaaggtctcatttgacctctctgaagttcagctgatgatagaaatcttggttaaattattttccctcagtgctttggagattctcctgcatgtcttctggcctccataaatgatgataacaggctgtcccttactccagagaatttaagcagaaatatgactacttcaggaagaaattaaagaaacctgctgatatccccaataggtttgaaatgaaacttcacagaaataacatatttgaagagtcctatcggagaattatgtccgtgaaaagaccagatgtcctaaaagctagactgtggattgagtttgaatcagagaaaggtcttgactatgggggtgtggccagagaatggttcttcttactgtccaaagagatgttcaacccctactacggcctctttgagtactctgccacgta

SEQ ID NO: 13678 - DNA, 406 bp, Homo sapiens
  source 1..406: mol_type = unassigned DNA
gaggtctcctgtgtaaaggcaaattatacccccaccccggaggaatcagtctgtgatcccagtttgaaaactactgatccacatgattgtgaaccaagcaagatcatttggacaaatctaaaaatttgcagggacaactacacccttcagatcaaccctaattcaggcctctgtaatgaggatcatttgtcctacttcacttttattggaagagttgctggtctggccgtatttcatgggaagctcttagatggtttcttcattagaccattttacaagatgatgttgggaaagcagataaccctgaatgacatggaatctgtggatagtgaatattacaactctttgaaatggatcctggagaatgaccctactgagctggacctcatgttctgcatagacgaag

SEQ ID NO: 13679 - DNA, 582 bp, Homo sapiens
  source 1..582: mol_type = unassigned DNA
agtcaaatgagtttgtattttggggaaaaaatgctgaattttcactcctgtgtcattctgtaggatagtgaatattacaactctttgaaatggatcctggagaatgaccctactgagctggacctcatgttctgcatagacgaagaaaactttggacagacatatcaagtggatttgaagcccaatgggtcagaaataatggtcacaaatgaaaacaaaagggaatatatcgacttagtcatccagtggagatttgtgaacagggtccagaagcagatgaacgccttcttggagggattcacagaactacttcctattgatttgattaaaatttttgatgaaaatgagctggagttgctcatgtgcggcctcggtgatgtggatgtgaatgactggagacagcattctatttacaagaacggctactgcccaaaccaccccgtcattcagtggttctggaaggctgtgctactcatggacgccgaaaagcgtatccggttactgcagtttgtcacagggacatcgcgagtacctatgaatggatttgccgaactttatggttccaatggtcctcagctgttt

SEQ ID NO: 13680 - DNA, 730 bp, Homo sapiens
  source 1..730: mol_type = unassigned DNA
gtaggatagtgaatattacaactctttgaaatggatcctggagaatgaccctactgagctggacctcatgttctgcatagacgaagaaaactttggacagacatatcaagtggatttgaagcccaatgggtcagaaataatggtcacaaatgaaaacaaaagggaatatatcgacttagtcatccagtggagatttgtgaacagggtccagaagcagatgaacgccttcttggagggattcacagaactacttcctattgatttgattaaaatttttgatgaaaatgagctggagttgctcatgtgcggcctcggtgatgtggatgtgaatgactggagacagcattctatttacaagaacggctactgcccaaaccaccccgtcattcagtggttctggaaggtaactccggggcccagccccagccggtgtcctccacctgaggcaggattgagggctgtgtggcgccctccattgtggtctgacttcaggactgatgctggctttggggtctgttagagcttggactgctgggggagggaagaggcaaactgagccagcagccccgtggtggctcctctgtaactgtagcagacagctagacttgaatgaagttggtccctacaaaagcacactggccttccttgaccacctcgtgaaagtgacttttatttgagggactggtcctccaatgcgtaaatagaaatggggggcttctcagggcagaaa

SEQ ID NO: 13681 - DNA, 2066 bp, Homo sapiens
  source 1..2066: mol_type = unassigned DNA
cagcaaaaataatcagctgtagttgccttgtccatcagagggcagttctggaacatgcctagtaagtagaggccactgagcagagctgggatcatggccctatgcaccaggcgaggcaaattgccacaacaagtagaaacaaggtttgcagtagccctctggacagcagaaacctgcttacactaccagactggccaagtatcctctgctgcatccccatccacccccaccgtggcagccaaatgggggtcttggccacaaggtggccgtaagcatctacttgggcctgtagaacgacgtctcattgaacttgaagtggtttatgttgagtgaggaaaaatgtcagaaggcaacagggttgtagcaaaaggtagtttagtgattgtctagttcagcttcttggtgttgacatagttgagtaacagccattttaaaaacaaaggaatatctcgccctttgttgtgtcgagagaaacaggggaaagactgtctgttgagaagccgttggtgggactcggccatttgccccgtccatagccagtgagtgtttcccatacactggccttctatacttttatctcaaaacagaaagttcaagatcgatgatgtctatagaaatcatatacctcaagcctttcctctgataggtgggaaactgaggcagagagcagctgggtttacccagcaaggttttggcacggtcaggcctaggaactttatttccaggcttctggcttagttctgtttccatttcattctggtacctttgcataaatatcttccatttgtccacaggaaacctcccctgatggagagttgcataataggaacggcaaaccttagactaaatgctaagtcgaagacccagttgtgccttagcgtatgtctgccattcttaggcctctgggcagatgaggtgatttgtcatcactggaattgatcaacctggaggagagtcataagcactaattcttttgtgggtagggagatgcttttagatattcagaggaataacctctcaggaggagaagcagccagggtaatgcacagatgctgctggagcgtgagagaatccacaggtcccatgcgtaagactagaggggtagggaggacgactgtggcatttttatatccgatacgacatgccgtggcttgcgcaaggttcgaattgagctgccctcgtgactgctgcctctgtgatctgctatggcaggtggagcctggaacaggtgtctgccttcctctgttgttatgatttgctagcttaccttcgcggcacagtgaccacatgctggcactgagggtggtcatttctcagtgtgtgatctcgcacctttcacatcctgcttttacatctggtaaattttcttcctagttgctcatgtgcggcctcggtgatgtggatgtgaatgactggagacagcattctatttacaagaacggctactgcccaaaccaccccgtcattcagtggttctggaaggctgtgctactcatggacgccgaaaagcgtatccggttactgcagtttgtcacagggacatcgcgagtacctatgaatggatttgccgaactttatggttccaatggtcctcagctgtttacaatagagcaatggggcagtcctgagaaactgcccagagctcacacatgctttaatcgccttgacttacctccatatgaaacctttgaagatttacgagagaaacttctcatggccgtggaaaatgctcaaggatttgaaggggtggattaagcaccctgtgcctcgggggtggttgttcttcaagcaagttctgcttgcacttttgcatttgcctaacagacttttgcagaggcgatggcagagagcagctgcaggcatggtccctggagccgagccttcaccacgcactcgtccaagttcggatgcgggaacctggtcccagcttgagttcctgcctttcccaccacaaattatcaactggttgatgtgtacactaattacatttcaggaggacttaatgctatttatgttgtgcctctgcaggcaaagcccttaataaatattttacatcctttctaatg

SEQ ID NO: 13682 - DNA, 2743 bp, Homo sapiens
  source 1..2743: mol_type = unassigned DNA
cacttggcttgttttagatgtttgcctacagcagtccaagtggcattaccagtaaagccacctggattcccataataatgcagatatgtaagatacacagattattttagaaccccatctttgcctttgttgttttgtttttgttttgttttgttttgtttcattttataaaatgatgtcttctagggaacgtgtctacaatctgaaatcccatctcataacctggcttccccttgtgatgacaaatcttaaatactgtatatttataattggcttagggggaactggtaagcctcgaacacagaaacatgagcttggtgccatcagagagtttgctttttatatcatttattttggcctattggcagaagaagaaagagacggacattgtgatcactcagtctcttagattagagaggccagctagtattgtggccataaaaaacctactcagttttcagagtcaactgtctaggtcttacattgcaatataaataagattaagttctgcctgcctgcatgacagcagcatgtgccatgggtcacgtggggggtataatgaccttctgcctctgttcataggctgtgctactcatggacgccgaaaagcgtatccggttactgcagtttgtcacagggacatcgcgagtacctatgaatggatttgccgaactttatggttccaatggtcctcagctgtttacaatagagcaatggggcagtcctgagaaactgcccagagctcacacatgctttaatcgccttgacttacctccatatgaaacctttgaagatttacgagagaaacttctcatggccgtggaaaatgctcaaggatttgaaggggtggattaagcaccctgtgcctcgggggtggttgttcttcaagcaagttctgcttgcacttttgcatttgcctaacagacttttgcagaggcgatggcagagagcagctgcaggcatggtccctggagccgagccttcaccacgcactcgtccaagttcggatgcgggaacctggtcccagcttgagttcctgcctttcccaccacaaattatcaactggttgatgtgtacactaattacatttcaggaggacttaatgctatttatgttgtgcctctgcaggcaaagcccttaataaatattttacatcctttctaatgacaatgaatggaattaatcactcaacaggtatagtattacgactcatgtttactttttaaaatgatttagaccgattttcagattttatttcgttatgattaaagatgtctcatgtacttggaaaagtgagcattttttttttttttgtatttcactttcataccaggcttaatgtcaatgacatttttatttttgaagtactctgacacctccaccctctactttattagaattggaaggcaaatttttgtccaaaaacctacagacaagtactttgagagaatttccaatataatattagacataatgataattttttccatactcagaatgaaaaactggatattacgtttttgttttggggtttttttgtacaaatttagctaatagctacaggctgagagaattgtaacatagcatgacaaattttgtgttgacttgaaaggaatcacaccattattccttagaagtaattacatgtgttctaacacatttgagacagggttggactcccatttctcatccgagaaattacttaacccttcctggcgctgtacagtcatcttttattctatttcctctttgctgtttgtagtagagacattttgaatgaaacttggcactgcttgattcaaaactgtggaaaccagatctgtttagtctcctgtttgtatgcgtttgctaatggtagctaaataaccagtttttgttgtaaatgcaccaattctgaaggcactttatgtactacatggaggtcatatctggttttgtttttatttttttatcatgaacattaaatgtgatgatgatttcttttccctgcacacatctttccggtgcaatatctatcaattgtgaatctggctgctggtgtataaaaacctggatgtaaagctgagcctacagacctgtcctcaccaactgttttgtgatttctactcaactacaaagatttatttaatgtactcttaatctaactgagttttgttaccaatgacctgttgcatgcttcaataccgtgtactgcctgagttgtgcctcttgtgtgctagattaaaagtgagacagagacttgacttgatcctctgagctcaagctattgagctggtagtggcagaggactgagggtacctgcacagtttgattcttttccacgtgtaagtctccattgcagaattgtcgtgctttgagaaaacacctgaggcagtgtgggagttgaacgaccctgctgtcctttttaacctgtgttgtcctagaccctgtcggggcagtcaggggacactagagatttgatctcatgcgagtcatcaataggacaaaaaagttgtggtttggggaggtctgtttgttacataaaaaggacctttcggtgtaagaaattgccgtttttaccctgccctggctggcatgtgagaagccatggaaggttgtggttgtaaatgagttgtctaaaggggtgcagaggcctgaggtttctaaaagaaggtagatttctacagagctgagtgttggttcctttttcttattggttgaaaattacctggtagtgatcagaaaacttagatgctatgtaact
